United States Patent Application Publication US 2005/0244851 A1 - sequence listing, part 5

SEQ ID NO: 159345 - DNA, 25 bp, Homo sapien
tgaccgcatctggttaggcaggacg

SEQ ID NO: 159346 - DNA, 25 bp, Homo sapien
cagctgcccttggtacctggtggag

SEQ ID NO: 159347 - DNA, 25 bp, Homo sapien
cacaatcgaaatggataaggccttc

SEQ ID NO: 159348 - DNA, 25 bp, Homo sapien
tctctgcaggtttatggtacgctcg

SEQ ID NO: 159349 - DNA, 25 bp, Homo sapien
tatctcatactgtaatgggtcgccc

SEQ ID NO: 159350 - DNA, 25 bp, Homo sapien
tacatggtgtttactggtgccctgc

SEQ ID NO: 159351 - DNA, 25 bp, Homo sapien
caaccagtgccatagagctcagata

SEQ ID NO: 159352 - DNA, 25 bp, Homo sapien
gaaagttgcacttcatcagtcactc

SEQ ID NO: 159353 - DNA, 25 bp, Homo sapien
tgcacttctgcagtaggctggtgat

SEQ ID NO: 159354 - DNA, 25 bp, Homo sapien
tatgctttcatgaatataggtcaat

SEQ ID NO: 159355 - DNA, 25 bp, Homo sapien
tatatgctttcatgaatataggtca

SEQ ID NO: 159356 - DNA, 25 bp, Homo sapien
ctttcatgaatataggtcaataaga

SEQ ID NO: 159357 - DNA, 25 bp, Homo sapien
tgctttcatgaatataggtcaataa

SEQ ID NO: 159358 - DNA, 25 bp, Homo sapien
tgagcttggcaaacaggagtacata

SEQ ID NO: 159359 - DNA, 25 bp, Homo sapien
gccagtattcacaaaaccacgtaaa

SEQ ID NO: 159360 - DNA, 25 bp, Homo sapien
ggttatctcccctgatgaatgcttc

SEQ ID NO: 159361 - DNA, 25 bp, Homo sapien
tggcccaggtgagaataaaatctgc

SEQ ID NO: 159362 - DNA, 25 bp, Homo sapien
gcaagcgtgtactatataatacata

SEQ ID NO: 159363 - DNA, 25 bp, Homo sapien
tttgaagcatgtgaacgccagcacc

SEQ ID NO: 159364 - DNA, 25 bp, Homo sapien
ggctatcagtagttaggtttttgga

SEQ ID NO: 159365 - DNA, 25 bp, Homo sapien
ttgcaagctttgaagcatgtgaacg

SEQ ID NO: 159366 - DNA, 25 bp, Homo sapien
tgcagacgcaagatcctccacgtgt

SEQ ID NO: 159367 - DNA, 25 bp, Homo sapien
tcctggcaagcactgcatcgagctg

SEQ ID NO: 159368 - DNA, 25 bp, Homo sapien
cggttgctaagccagtgcagagtcc

SEQ ID NO: 159369 - DNA, 25 bp, Homo sapien
gagatgctggaatgccggttgctaa

SEQ ID NO: 159370 - DNA, 25 bp, Homo sapien
gacgcagccgagtttcccacttttg

SEQ ID NO: 159371 - DNA, 25 bp, Homo sapien
gaccactttcgtgatcacggcatct

SEQ ID NO: 159372 - DNA, 25 bp, Homo sapien
ggaagaccactttcgtgatcacggc

SEQ ID NO: 159373 - DNA, 25 bp, Homo sapien
ccatgaccacagatgacgcagccga

SEQ ID NO: 159374 - DNA, 25 bp, Homo sapien
aaaggcttctgtggtccggtctggc

SEQ ID NO: 159375 - DNA, 25 bp, Homo sapien
tgtggtccggtctggcttgccagca

SEQ ID NO: 159376 - DNA, 25 bp, Homo sapien
cttggtactccgaaaggcttctgtg

SEQ ID NO: 159377 - DNA, 25 bp, Homo sapien
tccttcaagagggaacttggtactc

SEQ ID NO: 159378 - DNA, 25 bp, Homo sapien
caaatttgttcttaactggcccgca

SEQ ID NO: 159379 - DNA, 25 bp, Homo sapien
gcattataagcccaggcgtcacctg

SEQ ID NO: 159380 - DNA, 25 bp, Homo sapien
tagagcagctactcgtgttttcagc

SEQ ID NO: 159381 - DNA, 25 bp, Homo sapien
tacttattcagtctgctagagcagc

SEQ ID NO: 159382 - DNA, 25 bp, Homo sapien
ctttctcaggttcttatgaaatcaa

SEQ ID NO: 159383 - DNA, 25 bp, Homo sapien
tctttctcaggttcttatgaaatca

SEQ ID NO: 159384 - DNA, 25 bp, Homo sapien
tacattcgggttctaggttgcctga

SEQ ID NO: 159385 - DNA, 25 bp, Homo sapien
gccaacttattctccaaagagattt

SEQ ID NO: 159386 - DNA, 25 bp, Homo sapien
ttcctgtgtttggtaccaatatggt

SEQ ID NO: 159387 - DNA, 25 bp, Homo sapien
tggtaccaatatggtatcaagactc

SEQ ID NO: 159388 - DNA, 25 bp, Homo sapien
tagccggcaagccacccttcaaaga

SEQ ID NO: 159389 - DNA, 25 bp, Homo sapien
gggtgttgttactccagccgtccaa

SEQ ID NO: 159390 - DNA, 25 bp, Homo sapien
caagcaaggtttattgacatttcaa

SEQ ID NO: 159391 - DNA, 25 bp, Homo sapien
ccaagcaaggtttattgacatttca

SEQ ID NO: 159392 - DNA, 25 bp, Homo sapien
gagaagttctacaatccagcttgta

SEQ ID NO: 159393 - DNA, 25 bp, Homo sapien
gcagagagagaagttctacaatcca

SEQ ID NO: 159394 - DNA, 25 bp, Homo sapien
tagcagagagagaagttctacaatc

SEQ ID NO: 159395 - DNA, 25 bp, Homo sapien
tttagcagagagagaagttctacaa

SEQ ID NO: 159396 - DNA, 25 bp, Homo sapien
aatttcacagaaggattgtagggcc

SEQ ID NO: 159397 - DNA, 25 bp, Homo sapien
cattaagcttgcagttcaaacgcca

SEQ ID NO: 159398 - DNA, 25 bp, Homo sapien
tgaacatgcaggacacgaggtacaa

SEQ ID NO: 159399 - DNA, 25 bp, Homo sapien
tgtagggccaaaacatggtgggttc

SEQ ID NO: 159400 - DNA, 25 bp, Homo sapien
gggtacgcgcgttgctgttcgcccc

SEQ ID NO: 159401 - DNA, 25 bp, Homo sapien
gtacgcgcgttgctgttcgccccac

SEQ ID NO: 159402 - DNA, 25 bp, Homo sapien
ccgctgaggtgaatgagcgcgcgcg

SEQ ID NO: 159403 - DNA, 25 bp, Homo sapien
gccgctgaggtgaatgagcgcgcgc

SEQ ID NO: 159404 - DNA, 25 bp, Homo sapien
aacgcgtgcgcgtccgcctgagact

SEQ ID NO: 159405 - DNA, 25 bp, Homo sapien
gcccctgccatcttggcgggcgcgt

SEQ ID NO: 159406 - DNA, 25 bp, Homo sapien
cagcgggggctcatcttctccgggt

SEQ ID NO: 159407 - DNA, 25 bp, Homo sapien
cggcggctccgcgtctgactgggct

SEQ ID NO: 159408 - DNA, 25 bp, Homo sapien
tctaatccagtaccagacaacagta

SEQ ID NO: 159409 - DNA, 25 bp, Homo sapien
agaatgcatctccagcgttatggct

SEQ ID NO: 159410 - DNA, 25 bp, Homo sapien
catgtgcctcgagtgtttagctcac

SEQ ID NO: 159411 - DNA, 25 bp, Homo sapien
gctaaaataagtggacatgtgcctc

SEQ ID NO: 159412 - DNA, 25 bp, Homo sapien
gcctaaaaagcagatgcctacactt

SEQ ID NO: 159413 - DNA, 25 bp, Homo sapien
caccgccgccggtctcaaacttttg

SEQ ID NO: 159414 - DNA, 25 bp, Homo sapien
taatcaacagaagtgctagccaaaa

SEQ ID NO: 159415 - DNA, 25 bp, Homo sapien
cccagcttatatacacaactataaa

SEQ ID NO: 159416 - DNA, 25 bp, Homo sapien
tgtgctaggtcgaacatctttctgt

SEQ ID NO: 159417 - DNA, 25 bp, Homo sapien
gctccaaggtttagtatgtttccat

SEQ ID NO: 159418 - DNA, 25 bp, Homo sapien
taaattgctaaaggacttcagcagg

SEQ ID NO: 159419 - DNA, 25 bp, Homo sapien
ttcaagccgaagttagagatctaaa

SEQ ID NO: 159420 - DNA, 25 bp, Homo sapien
taaggtcacacagatttactcttgt

SEQ ID NO: 159421 - DNA, 25 bp, Homo sapien
tatatgagagttcaaccctcatgac

SEQ ID NO: 159422 - DNA, 25 bp, Homo sapien
aaccattgtctaacataaggtcaca

SEQ ID NO: 159423 - DNA, 25 bp, Homo sapien
tattgacggtaccattttcagcaga

SEQ ID NO: 159424 - DNA, 25 bp, Homo sapien
gaccctagtcaaagagagtccctgg

SEQ ID NO: 159425 - DNA, 25 bp, Homo sapien
agttgccctcctgaccaaaaccagt

SEQ ID NO: 159426 - DNA, 25 bp, Homo sapien
tctcaactgatctctaaaactcctg

SEQ ID NO: 159427 - DNA, 25 bp, Homo sapien
cattacgtgtcttgggaccctagtc

SEQ ID NO: 159428 - DNA, 25 bp, Homo sapien
catgtgattcttgtgcctcggcttc

SEQ ID NO: 159429 - DNA, 25 bp, Homo sapien
tcatgtgattcttgtgcctcggctt

SEQ ID NO: 159430 - DNA, 25 bp, Homo sapien
tgtgattcttgtgcctcggcttccc

SEQ ID NO: 159431 - DNA, 25 bp, Homo sapien
tgattcttgtgcctcggcttcccca

SEQ ID NO: 159432 - DNA, 25 bp, Homo sapien
gcacactcctactctgggacttaat

SEQ ID NO: 159433 - DNA, 25 bp, Homo sapien
tgttttttaaaggcactccaagcca

SEQ ID NO: 159434 - DNA, 25 bp, Homo sapien
aagccattcgccaacaactcaggct

SEQ ID NO: 159435 - DNA, 25 bp, Homo sapien
actcaggctcagataatgcacactc

SEQ ID NO: 159436 - DNA, 25 bp, Homo sapien
aaattcagttagacattcacagttc

SEQ ID NO: 159437 - DNA, 25 bp, Homo sapien
gtcaggacctcccttctcgggccca

SEQ ID NO: 159438 - DNA, 25 bp, Homo sapien
tcaggacctcccttctcgggcccat

SEQ ID NO: 159439 - DNA, 25 bp, Homo sapien
ttcagttagacattcacagttccca

SEQ ID NO: 159440 - DNA, 25 bp, Homo sapien
gagacaatttccttagattgtgtgg

SEQ ID NO: 159441 - DNA, 25 bp, Homo sapien
tggtagtctttttggtatggaggac

SEQ ID NO: 159442 - DNA, 25 bp, Homo sapien
aatttccttagattgtgtggtagtc

SEQ ID NO: 159443 - DNA, 25 bp, Homo sapien
tggtatggaggacaaccatttagtt

SEQ ID NO: 159444 - DNA, 25 bp, Homo sapien
gatctttcccatccacaaacagatg

SEQ ID NO: 159445 - DNA, 25 bp, Homo sapien
gcacttccatcaaaatccccaaaag

SEQ ID NO: 159446 - DNA, 25 bp, Homo sapien
ccttttagtctttccggctgatctt

SEQ ID NO: 159447 - DNA, 25 bp, Homo sapien
tcagcacttccatcaaaatccccaa

SEQ ID NO: 159448 - DNA, 25 bp, Homo sapien
tagcagtcaggctccgttctgtcct

SEQ ID NO: 159449 - DNA, 25 bp, Homo sapien
ctttctcaggttgaactgcgtttgc

SEQ ID NO: 159450 - DNA, 25 bp, Homo sapien
tttgctgactagcagtcaggctccg

SEQ ID NO: 159451 - DNA, 25 bp, Homo sapien
tttctgaggggcagacgagcagcca

SEQ ID NO: 159452 - DNA, 25 bp, Homo sapien
gaacaaacaccactggctgatttag

SEQ ID NO: 159453 - DNA, 25 bp, Homo sapien
tgcccattaggcacaaacacagaca

SEQ ID NO: 159454 - DNA, 25 bp, Homo sapien
tcattccataattcattctgcccat

SEQ ID NO: 159455 - DNA, 25 bp, Homo sapien
cataattcattctgcccattaggca

SEQ ID NO: 159456 - DNA, 25 bp, Homo sapien
ggcactccaattacacgtatgtaga

SEQ ID NO: 159457 - DNA, 25 bp, Homo sapien
catataatgtatgcaatggatccct

SEQ ID NO: 159458 - DNA, 25 bp, Homo sapien
tctttcgttttcagcagtgtgactt

SEQ ID NO: 159459 - DNA, 25 bp, Homo sapien
ctgatattatcacaaggcactggta

SEQ ID NO: 159460 - DNA, 25 bp, Homo sapien
tctgtacaacaggtaagttggcaat

SEQ ID NO: 159461 - DNA, 25 bp, Homo sapien
gtcacccaagctgggtgatctcagc

SEQ ID NO: 159462 - DNA, 25 bp, Homo sapien
caggtaagttggcaatacattctct

SEQ ID NO: 159463 - DNA, 25 bp, Homo sapien
tttgtcttcaagcttcaaagcactt

SEQ ID NO: 159464 - DNA, 25 bp, Homo sapien
tgcctggctaatttgaaaacagttt

SEQ ID NO: 159465 - DNA, 25 bp, Homo sapien
tttaaatagagatggggtcttgcta

SEQ ID NO: 159466 - DNA, 25 bp, Homo sapien
cttgctatgtttccgaggctgatct

SEQ ID NO: 159467 - DNA, 25 bp, Homo sapien
atctcaaactcctggcctcaagtga

SEQ ID NO: 159468 - DNA, 25 bp, Homo sapien
tcaaaatgtgcgttatggcccagca

SEQ ID NO: 159469 - DNA, 25 bp, Homo sapien
tatcaactgctgagggaaaggtcct

SEQ ID NO: 159470 - DNA, 25 bp, Homo sapien
cagcatgcagtctaccttggcggat

SEQ ID NO: 159471 - DNA, 25 bp, Homo sapien
gtattgttcagaacgtctacgtcct

SEQ ID NO: 159472 - DNA, 25 bp, Homo sapien
tgttgatcagaggaccacagaccct

SEQ ID NO: 159473 - DNA, 25 bp, Homo sapien
cctatgttgatcagaggaccacaga

SEQ ID NO: 159474 - DNA, 25 bp, Homo sapien
aaagtggcagcacagggaaccctga

SEQ ID NO: 159475 - DNA, 25 bp, Homo sapien
gctgaaaagtggcagcacagggaac

SEQ ID NO: 159476 - DNA, 25 bp, Homo sapien
cctgaggaggcgagtcctgtactcc

SEQ ID NO: 159477 - DNA, 25 bp, Homo sapien
gaggcgagtcctgtactcccaccag

SEQ ID NO: 159478 - DNA, 25 bp, Homo sapien
gaaaagttcacagctcctatggctg

SEQ ID NO: 159479 - DNA, 25 bp, Homo sapien
caggactgtcactatggtgccaggc

SEQ ID NO: 159480 - DNA, 25 bp, Homo sapien
gtacgttgtcatgcactcaagagaa

SEQ ID NO: 159481 - DNA, 25 bp, Homo sapien
cggtatccccatgtgtcagtcagca

SEQ ID NO: 159482 - DNA, 25 bp, Homo sapien
tcaactagaggcacatgggattctt

SEQ ID NO: 159483 - DNA, 25 bp, Homo sapien
tgtgggttcagttaccaaagcaaag

SEQ ID NO: 159484 - DNA, 25 bp, Homo sapien
gtggcaatagtgataccagacctca

SEQ ID NO: 159485 - DNA, 25 bp, Homo sapien
gcaaagccattggactacactagtt

SEQ ID NO: 159486 - DNA, 25 bp, Homo sapien
cattactctgtgaagtctggtgcaa

SEQ ID NO: 159487 - DNA, 25 bp, Homo sapien
tccaaattggttgcccacatcatgg

SEQ ID NO: 159488 - DNA, 25 bp, Homo sapien
cacatcatgggcaatcaagacgttt

SEQ ID NO: 159489 - DNA, 25 bp, Homo sapien
catgggaaacccaaatggtgactga

SEQ ID NO: 159490 - DNA, 25 bp, Homo sapien
tgtttgccagcaacaagacttcagg

SEQ ID NO: 159491 - DNA, 25 bp, Homo sapien
tctggctctattgtttgccagcaac

SEQ ID NO: 159492 - DNA, 25 bp, Homo sapien
aaattatctgcaaaagtgtgcgtgc

SEQ ID NO: 159493 - DNA, 25 bp, Homo sapien
gctgcttctagaaatgcatttacca

SEQ ID NO: 159494 - DNA, 25 bp, Homo sapien
taaaaccaacgtgaactatgtggaa

SEQ ID NO: 159495 - DNA, 25 bp, Homo sapien
gttcttaaatgggtttgctctccaa

SEQ ID NO: 159496 - DNA, 25 bp, Homo sapien
caagcgctgagtactcgctgagctc

SEQ ID NO: 159497 - DNA, 25 bp, Homo sapien
cagacaagcgctgagtactcgctga

SEQ ID NO: 159498 - DNA, 25 bp, Homo sapien
gctgagtactcgctgagctctgtcc

SEQ ID NO: 159499 - DNA, 25 bp, Homo sapien
gcgctgagtactcgctgagctctgt

SEQ ID NO: 159500 - DNA, 25 bp, Homo sapien
ctaatcttttaaattctagcagaga

SEQ ID NO: 159501 - DNA, 25 bp, Homo sapien
taatcttttaaattctagcagagac

SEQ ID NO: 159502 - DNA, 25 bp, Homo sapien
ggctaatcttttaaattctagcaga

SEQ ID NO: 159503 - DNA, 25 bp, Homo sapien
atcttttaaattctagcagagacag

SEQ ID NO: 159504 - DNA, 25 bp, Homo sapien
agtaaggcagtcagatgagtaatta

SEQ ID NO: 159505 - DNA, 25 bp, Homo sapien
gctcacagctagtaaggcagtcaga

SEQ ID NO: 159506 - DNA, 25 bp, Homo sapien
tagtaaggcagtcagatgagtaatt

SEQ ID NO: 159507 - DNA, 25 bp, Homo sapien
gaagcccgggcttggcagatactct

SEQ ID NO: 159508 - DNA, 25 bp, Homo sapien
gcccgggcttggcagatactctgtt

SEQ ID NO: 159509 - DNA, 25 bp, Homo sapien
ccgggcttggcagatactctgttca

SEQ ID NO: 159510 - DNA, 25 bp, Homo sapien
cacggaagcccgggcttggcagata

SEQ ID NO: 159511 - DNA, 25 bp, Homo sapien
actccaacgactctgaaggtgttgc

SEQ ID NO: 159512 - DNA, 25 bp, Homo sapien
cctgctggccaggtttgattggtac

SEQ ID NO: 159513 - DNA, 25 bp, Homo sapien
attggtacccatttcttactggtgt

SEQ ID NO: 159514 - DNA, 25 bp, Homo sapien
tcttactggtgtcatcgtagaccat

SEQ ID NO: 159515 - DNA, 25 bp, Homo sapien
tatggagtcaaaatctgagcccagg

SEQ ID NO: 159516 - DNA, 25 bp, Homo sapien
gcccaggtcctctgattccgaatat

SEQ ID NO: 159517 - DNA, 25 bp, Homo sapien
tgcgcaggctcacgggtataatctg

SEQ ID NO: 159518 - DNA, 25 bp, Homo sapien
gaaacagtgtgcttaaggtgtcata

SEQ ID NO: 159519 - DNA, 25 bp, Homo sapien
ccaaatggctagagagacatgacca

SEQ ID NO: 159520 - DNA, 25 bp, Homo sapien
gatatatccctgtaagccaaatggc

SEQ ID NO: 159521 - DNA, 25 bp, Homo sapien
caaaggatccacctgaacacgtgca

SEQ ID NO: 159522 - DNA, 25 bp, Homo sapien
tccacttttgggtgaggctgcttca

SEQ ID NO: 159523 - DNA, 25 bp, Homo sapien
ggtagtccccgcttatccatgcaga

SEQ ID NO: 159524 - DNA, 25 bp, Homo sapien
gcagatgacgcctaatccagaatat

SEQ ID NO: 159525 - DNA, 25 bp, Homo sapien
tatggccagcagacaaccactgaag

SEQ ID NO: 159526 - DNA, 25 bp, Homo sapien
gaaattggatttagaagccgaggac

SEQ ID NO: 159527 - DNA, 25 bp, Homo sapien
gttggcgtggcctgattgtacttca

SEQ ID NO: 159528 - DNA, 25 bp, Homo sapien
gccctttcacgattgaataattgat

SEQ ID NO: 159529 - DNA, 25 bp, Homo sapien
ttaagccgtagacctggcgggcatc

SEQ ID NO: 159530 - DNA, 25 bp, Homo sapien
cattggagaacgtggttgcctcttc

SEQ ID NO: 159531 - DNA, 25 bp, Homo sapien
gcatcaggccaagacaaagccctac

SEQ ID NO: 159532 - DNA, 25 bp, Homo sapien
tcagcatcaggccaagacaaagccc

SEQ ID NO: 159533 - DNA, 25 bp, Homo sapien
agaggtagaacaagagagggtctca

SEQ ID NO: 159534 - DNA, 25 bp, Homo sapien
ggagggcagaggtagaacaagagag

SEQ ID NO: 159535 - DNA, 25 bp, Homo sapien
tgtggcttcagggacacatctgtac

SEQ ID NO: 159536 - DNA, 25 bp, Homo sapien
caaatctatatctcacaagtggcaa

SEQ ID NO: 159537 - DNA, 25 bp, Homo sapien
tacacggtttcttgccctcagtaag

SEQ ID NO: 159538 - DNA, 25 bp, Homo sapien
tgtggtccctaagtaccttgcacgt

SEQ ID NO: 159539 - DNA, 25 bp, Homo sapien
cgcctggcgccagtagatatttaaa

SEQ ID NO: 159540 - DNA, 25 bp, Homo sapien
aagttctcccaaggtaggctctcca

SEQ ID NO: 159541 - DNA, 25 bp, Homo sapien
tgctagcatatgtcagaaccaggac

SEQ ID NO: 159542 - DNA, 25 bp, Homo sapien
taatagagttgttactaggccaggc

SEQ ID NO: 159543 - DNA, 25 bp, Homo sapien
tgagggcaggattaacagatttacc

SEQ ID NO: 159544 - DNA, 25 bp, Homo sapien
tacctgtgattctctggtgaattta

SEQ ID NO: 159545 - DNA, 25 bp, Homo sapien
tgaaaatgagggcaggattaacaga

SEQ ID NO: 159546 - DNA, 25 bp, Homo sapien
agatttacctgtgattctctggtga

SEQ ID NO: 159547 - DNA, 25 bp, Homo sapien
tgtttcctcataatgcggcatggct

SEQ ID NO: 159548 - DNA, 25 bp, Homo sapien
tcataatgcggcatggctttcttat

SEQ ID NO: 159549 - DNA, 25 bp, Homo sapien
gagaagttgtttcctcataatgcgg

SEQ ID NO: 159550 - DNA, 25 bp, Homo sapien
tatctgacaacgagaagttgtttcc

SEQ ID NO: 159551 - DNA, 25 bp, Homo sapien
tgtcagtaggcttggacctcggctg

SEQ ID NO: 159552 - DNA, 25 bp, Homo sapien
tgggaactgcgcacacacgtgttaa

SEQ ID NO: 159553 - DNA, 25 bp, Homo sapien
gaggtcactaccagctgaaccagag

SEQ ID NO: 159554 - DNA, 25 bp, Homo sapien
ttattcgtcagtgggctgcaggacc

SEQ ID NO: 159555 - DNA, 25 bp, Homo sapien
atacaaggttgctttgtcattagag

SEQ ID NO: 159556 - DNA, 25 bp, Homo sapien
catgacgttaggctgcctccattca

SEQ ID NO: 159557 - DNA, 25 bp, Homo sapien
caaggttgctttgtcattagaggat

SEQ ID NO: 159558 - DNA, 25 bp, Homo sapien
cacatgacgttaggctgcctccatt

SEQ ID NO: 159559 - DNA, 25 bp, Homo sapien
ttaaaagtaggtgacagtatgatgg

SEQ ID NO: 159560 - DNA, 25 bp, Homo sapien
aaaagtaggtgacagtatgatggtg

SEQ ID NO: 159561 - DNA, 25 bp, Homo sapien
aaagtaggtgacagtatgatggtgg

SEQ ID NO: 159562 - DNA, 25 bp, Homo sapien
taaaagtaggtgacagtatgatggt

SEQ ID NO: 159563 - DNA, 25 bp, Homo sapien
ggatgactgaaacgtcacagtgacg

SEQ ID NO: 159564 - DNA, 25 bp, Homo sapien
gatccttgcattatcctgaagtgaa

SEQ ID NO: 159565 - DNA, 25 bp, Homo sapien
cttacatgtactgcaaaggagagag

SEQ ID NO: 159566 - DNA, 25 bp, Homo sapien
cacagtgacgatgctggagatagga

SEQ ID NO: 159567 - DNA, 25 bp, Homo sapien
caggacatgcactcttcctgctaga

SEQ ID NO: 159568 - DNA, 25 bp, Homo sapien
tcaggaagtggtttgggccaagtac

SEQ ID NO: 159569 - DNA, 25 bp, Homo sapien
tgcactcttcctgctagaccaagct

SEQ ID NO: 159570 - DNA, 25 bp, Homo sapien
tctcttcctgactgggtcatatcag

SEQ ID NO: 159571 - DNA, 25 bp, Homo sapien
catcttcgtgtcatgtgaactgcca

SEQ ID NO: 159572 - DNA, 25 bp, Homo sapien
catgtgaactgccacgggcctgtgg

SEQ ID NO: 159573 - DNA, 25 bp, Homo sapien
accgggcatcttcgtgtcatgtgaa

SEQ ID NO: 159574 - DNA, 25 bp, Homo sapien
caggcaccgggcatcttcgtgtcat

SEQ ID NO: 159575 - DNA, 25 bp, Homo sapien
cccactatgtggtcgagtgccatca

SEQ ID NO: 159576 - DNA, 25 bp, Homo sapien
tctagtaagttctgagaggacctac

SEQ ID NO: 159577 - DNA, 25 bp, Homo sapien
tcctggagtaatgggagacgatgac

SEQ ID NO: 159578 - DNA, 25 bp, Homo sapien
gacgatgacacgatgactctagtaa

SEQ ID NO: 159579 - DNA, 25 bp, Homo sapien
tggtataccttggtggacccctgga

SEQ ID NO: 159580 - DNA, 25 bp, Homo sapien
tactctggttgcatcagggcgagga

SEQ ID NO: 159581 - DNA, 25 bp, Homo sapien
taaagtcgatgaagaactactctgg

SEQ ID NO: 159582 - DNA, 25 bp, Homo sapien
tgttattacacgcaaaccaagtagg

SEQ ID NO: 159583 - DNA, 25 bp, Homo sapien
cctgcctgatacaacatctggagcc

SEQ ID NO: 159584 - DNA, 25 bp, Homo sapien
ggccctgcctgatacaacatctgga

SEQ ID NO: 159585 - DNA, 25 bp, Homo sapien
tggaggcgtacaaaggccctgcctg

SEQ ID NO: 159586 - DNA, 25 bp, Homo sapien
ttgggtagctgttggcatggaggcg

SEQ ID NO: 159587 - DNA, 25 bp, Homo sapien
tgcaagaggcgggctcccgtctggc

SEQ ID NO: 159588 - DNA, 25 bp, Homo sapien
gcaagaggcgggctcccgtctggca

SEQ ID NO: 159589 - DNA, 25 bp, Homo sapien
gtagcaggacgggccataggttccc

SEQ ID NO: 159590 - DNA, 25 bp, Homo sapien
caggacgggccataggttccctggc

SEQ ID NO: 159591 - DNA, 25 bp, Homo sapien
cactggtagcaggacgggccatagg

SEQ ID NO: 159592 - DNA, 25 bp, Homo sapien
gacgggccataggttccctggctga

SEQ ID NO: 159593 - DNA, 25 bp, Homo sapien
ggaaaagttcaggtgaaggagtcat

SEQ ID NO: 159594 - DNA, 25 bp, Homo sapien
gggaaaagttcaggtgaaggagtca

SEQ ID NO: 159595 - DNA, 25 bp, Homo sapien
ctcatcaggagaggggccattctgc

SEQ ID NO: 159596 - DNA, 25 bp, Homo sapien
aggagaggggccattctgcacctga

SEQ ID NO: 159597 - DNA, 25 bp, Homo sapien
agaggggccattctgcacctgacgc

SEQ ID NO: 159598 - DNA, 25 bp, Homo sapien
atctcatcaggagaggggccattct

SEQ ID NO: 159599 - DNA, 25 bp, Homo sapien
ggtatgcccattcccggacggccag

SEQ ID NO: 159600 - DNA, 25 bp, Homo sapien
gccaggcggtatgcccattcccgga

SEQ ID NO: 159601 - DNA, 25 bp, Homo sapien
tgaccccacacagcttggattgggc

SEQ ID NO: 159602 - DNA, 25 bp, Homo sapien
cacacagcttggattgggccctggg

SEQ ID NO: 159603 - DNA, 25 bp, Homo sapien
gccccggcttcagagtcaggtttcg

SEQ ID NO: 159604 - DNA, 25 bp, Homo sapien
tcaggtttcgccagcgctccacaag

SEQ ID NO: 159605 - DNA, 25 bp, Homo sapien
tgtgcctgtgctgtacccgccggcc

SEQ ID NO: 159606 - DNA, 25 bp, Homo sapien
aagcgccactgtgtgccacggctgc

SEQ ID NO: 159607 - DNA, 25 bp, Homo sapien
tttctagagattcctgacgctgctg

SEQ ID NO: 159608 - DNA, 25 bp, Homo sapien
tgtggccgaggttcttctttctaga

SEQ ID NO: 159609 - DNA, 25 bp, Homo sapien
gtggccgaggttcttctttctagag

SEQ ID NO: 159610 - DNA, 25 bp, Homo sapien
ctgtggccgaggttcttctttctag

SEQ ID NO: 159611 - DNA, 25 bp, Homo sapien
acagagcgccccgtgtgtccctggg

SEQ ID NO: 159612 - DNA, 25 bp, Homo sapien
tgcactttgagacctaggctcccca

SEQ ID NO: 159613 - DNA, 25 bp, Homo sapien
aggctccccatagctgctcacagag

SEQ ID NO: 159614 - DNA, 25 bp, Homo sapien
cctcatctacgtggaggggctgcca

SEQ ID NO: 159615 - DNA, 25 bp, Homo sapien
gcccactacatgagacgggggcgct

SEQ ID NO: 159616 - DNA, 25 bp, Homo sapien
cccactacatgagacgggggcgctg

SEQ ID NO: 159617 - DNA, 25 bp, Homo sapien
gggcggtggaggcccactacatgag

SEQ ID NO: 159618 - DNA, 25 bp, Homo sapien
cggtggaggcccactacatgagacg

SEQ ID NO: 159619 - DNA, 25 bp, Homo sapien
agctctcgtcgtggctggacccctg

SEQ ID NO: 159620 - DNA, 25 bp, Homo sapien
agcttggccccagctatggcagcgg

SEQ ID NO: 159621 - DNA, 25 bp, Homo sapien
ctgacatggagctctcgtcgtggct

SEQ ID NO: 159622 - DNA, 25 bp, Homo sapien
ccgttggactcttctcagcttggcc

SEQ ID NO: 159623 - DNA, 25 bp, Homo sapien
tgcccggttggcatcggactttgag

SEQ ID NO: 159624 - DNA, 25 bp, Homo sapien
gctgcttgcccggttggcatcggac

SEQ ID NO: 159625 - DNA, 25 bp, Homo sapien
ggcatcggactttgaggtcccactg

SEQ ID NO: 159626 - DNA, 25 bp, Homo sapien
gttggcatcggactttgaggtccca

SEQ ID NO: 159627 - DNA, 25 bp, Homo sapien
ggagacgcccgtgctgcggatccac

SEQ ID NO: 159628 - DNA, 25 bp, Homo sapien
caggcccagtagaggctccggagac

SEQ ID NO: 159629 - DNA, 25 bp, Homo sapien
gtacaaacgcccaggcccagtagag

SEQ ID NO: 159630 - DNA, 25 bp, Homo sapien
tcctgtcttggcgatgtacaaacgc

SEQ ID NO: 159631 - DNA, 25 bp, Homo sapien
agactcaccccggtcctcagataaa

SEQ ID NO: 159632 - DNA, 25 bp, Homo sapien
ctgccagactcaccccggtcctcag

SEQ ID NO: 159633 - DNA, 25 bp, Homo sapien
ccagactcaccccggtcctcagata

SEQ ID NO: 159634 - DNA, 25 bp, Homo sapien
accctgccagactcaccccggtcct

SEQ ID NO: 159635 - DNA, 25 bp, Homo sapien
gcttgtctgactgggaggctgcttt

SEQ ID NO: 159636 - DNA, 25 bp, Homo sapien
ggcttgtctgactgggaggctgctt

SEQ ID NO: 159637 - DNA, 25 bp, Homo sapien
tggcttgtctgactgggaggctgct

SEQ ID NO: 159638 - DNA, 25 bp, Homo sapien
ttgtctgactgggaggctgcttttc

SEQ ID NO: 159639 - DNA, 25 bp, Homo sapien
gggctgggactgcaacatactggca

SEQ ID NO: 159640 - DNA, 25 bp, Homo sapien
tactggcacctgactaagaaaggcc

SEQ ID NO: 159641 - DNA, 25 bp, Homo sapien
gcgatgtcttcagatccccagggct

SEQ ID NO: 159642 - DNA, 25 bp, Homo sapien
attcttcttagagctccaggagcga

SEQ ID NO: 159643 - DNA, 25 bp, Homo sapien
ccatggcaaacaagaaccagctgta

SEQ ID NO: 159644 - DNA, 25 bp, Homo sapien
tagacgctagtcctgggtatgagaa

SEQ ID NO: 159645 - DNA, 25 bp, Homo sapien
catgaacaagaaaacgagtgccggc

SEQ ID NO: 159646 - DNA, 25 bp, Homo sapien
actgcacttgtgtggtgtgtggatc

SEQ ID NO: 159647 - DNA, 25 bp, Homo sapien
ctctggcagtcgcacagtctgtgag

SEQ ID NO: 159648 - DNA, 25 bp, Homo sapien
caagtcaccggactccacatttggg

SEQ ID NO: 159649 - DNA, 25 bp, Homo sapien
tggaactggtcctcggagcagtaac

SEQ ID NO: 159650 - DNA, 25 bp, Homo sapien
gagcagtaactccattggcccaggg

SEQ ID NO: 159651 - DNA, 25 bp, Homo sapien
ctgggcacagagacttgcaccccac

SEQ ID NO: 159652 - DNA, 25 bp, Homo sapien
agcagtggggacacctaacactcat

SEQ ID NO: 159653 - DNA, 25 bp, Homo sapien
ccagcagtggggacacctaacactc

SEQ ID NO: 159654 - DNA, 25 bp, Homo sapien
cagcagtggggacacctaacactca

SEQ ID NO: 159655 - DNA, 25 bp, Homo sapien
ctgcccgtgtaataggtctgtggca

SEQ ID NO: 159656 - DNA, 25 bp, Homo sapien
taataggtctgtggcagtgctcgaa

SEQ ID NO: 159657 - DNA, 25 bp, Homo sapien
cagtgctcgaacagtggacgtgttc

SEQ ID NO: 159658 - DNA, 25 bp, Homo sapien
ctgtggcagtgctcgaacagtggac

SEQ ID NO: 159659 - DNA, 25 bp, Homo sapien
gagaagaagggagtctgtttaggaa

SEQ ID NO: 159660 - DNA, 25 bp, Homo sapien
tggagaagaagggagtctgtttagg

SEQ ID NO: 159661 - DNA, 25 bp, Homo sapien
agaagaagggagtctgtttaggaag

SEQ ID NO: 159662 - DNA, 25 bp, Homo sapien
ggagaagaagggagtctgtttagga

SEQ ID NO: 159663 - DNA, 25 bp, Homo sapien
ctggctgctcgggtccccggagagg

SEQ ID NO: 159664 - DNA, 25 bp, Homo sapien
tttgggtggagcgagatctactgcc

SEQ ID NO: 159665 - DNA, 25 bp, Homo sapien
gcaagtgccttctctcgtgcgggac

SEQ ID NO: 159666 - DNA, 25 bp, Homo sapien
tgtaatgtcggtcatcagctggcgt

SEQ ID NO: 159667 - DNA, 25 bp, Homo sapien
cactgggagacatgagtcctgacac

SEQ ID NO: 159668 - DNA, 25 bp, Homo sapien
gcaaatcaagacaccaggcaaaaat

SEQ ID NO: 159669 - DNA, 25 bp, Homo sapien
tcctggcaaatcaagacaccaggca

SEQ ID NO: 159670 - DNA, 25 bp, Homo sapien
agggcaggggtattgatcacgttca

SEQ ID NO: 159671 - DNA, 25 bp, Homo sapien
ccaggaacctatgcatcctggcaaa

SEQ ID NO: 159672 - DNA, 25 bp, Homo sapien
caaaccactttgcacacagatggga

SEQ ID NO: 159673 - DNA, 25 bp, Homo sapien
acttgaattcgttgactgtgcagga

SEQ ID NO: 159674 - DNA, 25 bp, Homo sapien
aagccaccttctgggacaggcgctg

SEQ ID NO: 159675 - DNA, 25 bp, Homo sapien
caacggtgggattgaggcagttttc

SEQ ID NO: 159676 - DNA, 25 bp, Homo sapien
ttctccaccgagttgctccgctccc

SEQ ID NO: 159677 - DNA, 25 bp, Homo sapien
gcttctccaccgagttgctccgctc

SEQ ID NO: 159678 - DNA, 25 bp, Homo sapien
tctccaccgagttgctccgctccca

SEQ ID NO: 159679 - DNA, 25 bp, Homo sapien
cttctccaccgagttgctccgctcc

SEQ ID NO: 159680 - DNA, 25 bp, Homo sapien
ctagagtgaggctgcgactgaaggg

SEQ ID NO: 159681 - DNA, 25 bp, Homo sapien
ttcggggctctttgccacagacggg

SEQ ID NO: 159682 - DNA, 25 bp, Homo sapien
ggctgcgactgaagggggctcttag

SEQ ID NO: 159683 - DNA, 25 bp, Homo sapien
agggggctcttagcttcggggctct

SEQ ID NO: 159684 - DNA, 25 bp, Homo sapien
gaaagaacagaccaccttcgcagag

SEQ ID NO: 159685 - DNA, 25 bp, Homo sapien
ttaaatgccaggacgtgagacagcg

SEQ ID NO: 159686 - DNA, 25 bp, Homo sapien
gacgcaggttctagaggccttccaa

SEQ ID NO: 159687 - DNA, 25 bp, Homo sapien
tccgggtcaacgaaaatgccagctc

SEQ ID NO: 159688 - DNA, 25 bp, Homo sapien
aatgcaaacttctaactccgcgctc

SEQ ID NO: 159689 - DNA, 25 bp, Homo sapien
gtgcgggggagcttggcgggtggct

SEQ ID NO: 159690 - DNA, 25 bp, Homo sapien
tgcttccaggtggaggtgcggggga

SEQ ID NO: 159691 - DNA, 25 bp, Homo sapien
ctgcgcatgaacacaatgcaaactt

SEQ ID NO: 159692 - DNA, 25 bp, Homo sapien
tcgttttgcccactctggttgcctt

SEQ ID NO: 159693 - DNA, 25 bp, Homo sapien
agggccctcgttttgcccactctgg

SEQ ID NO: 159694 - DNA, 25 bp, Homo sapien
gcggagtccgctgggagcgctgcag

SEQ ID NO: 159695 - DNA, 25 bp, Homo sapien
caggacgtggcggagtccgctggga

SEQ ID NO: 159696 - DNA, 25 bp, Homo sapien
gctgaagagagaccctattccaagc

SEQ ID NO: 159697 - DNA, 25 bp, Homo sapien
ttcctgcccagtgagcgacccttgg

SEQ ID NO: 159698 - DNA, 25 bp, Homo sapien
agagagaccctattccaagcatgaa

SEQ ID NO: 159699 - DNA, 25 bp, Homo sapien
tgttcctgcccagtgagcgaccctt

SEQ ID NO: 159700 - DNA, 25 bp, Homo sapien
tggtacacgttccccttgaagtcat

SEQ ID NO: 159701 - DNA, 25 bp, Homo sapien
gtggtacacgttccccttgaagtca

SEQ ID NO: 159702 - DNA, 25 bp, Homo sapien
ttctgggtcctgataggcaaacgca

SEQ ID NO: 159703 - DNA, 25 bp, Homo sapien
acacacatttatctggcagggccag

SEQ ID NO: 159704 - DNA, 25 bp, Homo sapien
cctgagaaggatttaacgcccgtct

SEQ ID NO: 159705 - DNA, 25 bp, Homo sapien
ccgcgctggcctgatttgaatgtta

SEQ ID NO: 159706 - DNA, 25 bp, Homo sapien
gagaaagggcctgtgggtgccctgg

SEQ ID NO: 159707 - DNA, 25 bp, Homo sapien
ggagagaaagggcctgtgggtgccc

SEQ ID NO: 159708 - DNA, 25 bp, Homo sapien
ctgggagagaaagggcctgtgggtg

SEQ ID NO: 159709 - DNA, 25 bp, Homo sapien
gagagaaagggcctgtgggtgccct

SEQ ID NO: 159710 - DNA, 25 bp, Homo sapien
ttcatccggtccaagtcgaaggcat

SEQ ID NO: 159711 - DNA, 25 bp, Homo sapien
ggcatccagggccatgtcattcacg

SEQ ID NO: 159712 - DNA, 25 bp, Homo sapien
agggccatgtcattcacgctcccag

SEQ ID NO: 159713 - DNA, 25 bp, Homo sapien
tcatccggtccaagtcgaaggcatc

SEQ ID NO: 159714 - DNA, 25 bp, Homo sapien
tctctcaccacctcctctaggatct

SEQ ID NO: 159715 - DNA, 25 bp, Homo sapien
ccttcaccttgtggagctctctcac

SEQ ID NO: 159716 - DNA, 25 bp, Homo sapien
agctctctcaccacctcctctagga

SEQ ID NO: 159717 - DNA, 25 bp, Homo sapien
tcaccttgtggagctctctcaccac

SEQ ID NO: 159718 - DNA, 25 bp, Homo sapien
caccctccccggtggggctgcactc

SEQ ID NO: 159719 - DNA, 25 bp, Homo sapien
accctccccggtggggctgcactca

SEQ ID NO: 159720 - DNA, 25 bp, Homo sapien
gccaccctccccggtggggctgcac

SEQ ID NO: 159721 - DNA, 25 bp, Homo sapien
gtgccaccctccccggtggggctgc

SEQ ID NO: 159722 - DNA, 25 bp, Homo sapien
aagaaggcagtataaaccgccaggg

SEQ ID NO: 159723 - DNA, 25 bp, Homo sapien
ggtggcagtatcaagaaggcagtat

SEQ ID NO: 159724 - DNA, 25 bp, Homo sapien
gctctggaacgatgctggggtctcc

SEQ ID NO: 159725 - DNA, 25 bp, Homo sapien
cacgtgggtcttccaggaaggtgcc

SEQ ID NO: 159726 - DNA, 25 bp, Homo sapien
accggaaggacggatgtgatgcatt

SEQ ID NO: 159727 - DNA, 25 bp, Homo sapien
tgtgaacgagctcaagcctggaagg

SEQ ID NO: 159728 - DNA, 25 bp, Homo sapien
gtgatgcattgagacccaccctgct

SEQ ID NO: 159729 - DNA, 25 bp, Homo sapien
gctgcatagctcgtccctagactga

SEQ ID NO: 159730 - DNA, 25 bp, Homo sapien
ttgccccggtcactgtgatgccctg

SEQ ID NO: 159731 - DNA, 25 bp, Homo sapien
ccttttgccccggtcactgtgatgc

SEQ ID NO: 159732 - DNA, 25 bp, Homo sapien
gacccttttgccccggtcactgtga

SEQ ID NO: 159733 - DNA, 25 bp, Homo sapien
cctgtgcgcttgtgggacccttttg

SEQ ID NO: 159734 - DNA, 25 bp, Homo sapien
aggagtgctgggcaccagaactctg

SEQ ID NO: 159735 - DNA, 25 bp, Homo sapien
acctggcgtagggacagaggcctgt

SEQ ID NO: 159736 - DNA, 25 bp, Homo sapien
gagcccttcccccaacatagtggag

SEQ ID NO: 159737 - DNA, 25 bp, Homo sapien
caggggtcagcaggaaatcttggcc

SEQ ID NO: 159738 - DNA, 25 bp, Homo sapien
tggtgctgatcccactcagctcctg

SEQ ID NO: 159739 - DNA, 25 bp, Homo sapien
ttacgtggtgctgatcccactcagc

SEQ ID NO: 159740 - DNA, 25 bp, Homo sapien
gtggtgctgatcccactcagctcct

SEQ ID NO: 159741 - DNA, 25 bp, Homo sapien
acgtggtgctgatcccactcagctc

SEQ ID NO: 159742 - DNA, 25 bp, Homo sapien
tcgccggatgggctcgacgaatcag

SEQ ID NO: 159743 - DNA, 25 bp, Homo sapien
ctgtcgccggatgggctcgacgaat

SEQ ID NO: 159744 - DNA, 25 bp, Homo sapien
acgaatcagcgcagcgaggccggcc

SEQ ID NO: 159745 - DNA, 25 bp, Homo sapien
atgggctcgacgaatcagcgcagcg

SEQ ID NO: 159746 - DNA, 25 bp, Homo sapien
acaggtcaggacgtttcacagcagc

SEQ ID NO: 159747 - DNA, 25 bp, Homo sapien
aggacgtttcacagcagcgcgccca

SEQ ID NO: 159748 - DNA, 25 bp, Homo sapien
tgtgatcacaggtcaggacgtttca

SEQ ID NO: 159749 - DNA, 25 bp, Homo sapien
gtcaggacgtttcacagcagcgcgc

SEQ ID NO: 159750 - DNA, 25 bp, Homo sapien
aaacacaaaaaagacgagcagacct

SEQ ID NO: 159751 - DNA, 25 bp, Homo sapien
cccaggagttgcacttggtttcctc

SEQ ID NO: 159752 - DNA, 25 bp, Homo sapien
gacgagcagacctggtgttccgtgt

SEQ ID NO: 159753 - DNA, 25 bp, Homo sapien
cagacctggtgttccgtgtcaggca

SEQ ID NO: 159754 - DNA, 25 bp, Homo sapien
gctgaggcgctaacagcgtcacctg

SEQ ID NO: 159755 - DNA, 25 bp, Homo sapien
gacagtttcaacaccatgagcgctg

SEQ ID NO: 159756 - DNA, 25 bp, Homo sapien
aacctggaaaccgtctaatgaagca

SEQ ID NO: 159757 - DNA, 25 bp, Homo sapien
gacaccgtggtgcatgacagacagt

SEQ ID NO: 159758 - DNA, 25 bp, Homo sapien
agacccactcctaagacagggcttc

SEQ ID NO: 159759 - DNA, 25 bp, Homo sapien
ttttcagaactgtcatggagctcct

SEQ ID NO: 159760 - DNA, 25 bp, Homo sapien
tccttgggtgcaaagctccagcagc

SEQ ID NO: 159761 - DNA, 25 bp, Homo sapien
tttctgcccagtgggttgggactcc

SEQ ID NO: 159762 - DNA, 25 bp, Homo sapien
tccatcctgaccgtacccagggtga

SEQ ID NO: 159763 - DNA, 25 bp, Homo sapien
cctgctgagacaccatgacctggct

SEQ ID NO: 159764 - DNA, 25 bp, Homo sapien
gctgtgccggaatggctcctgctga

SEQ ID NO: 159765 - DNA, 25 bp, Homo sapien
tgacctggctaagtcgagggacacc

SEQ ID NO: 159766 - DNA, 25 bp, Homo sapien
tcagccttgttgcaccttggtgggc

SEQ ID NO: 159767 - DNA, 25 bp, Homo sapien
ggccgctgctggaaaccgtctgtgt

SEQ ID NO: 159768 - DNA, 25 bp, Homo sapien
cactagatcggtgctgatggagtct

SEQ ID NO: 159769 - DNA, 25 bp, Homo sapien
tctgtggcagtgtagccaagcacta

SEQ ID NO: 159770 - DNA, 25 bp, Homo sapien
gctagctgcgcccactgcttgaaat

SEQ ID NO: 159771 - DNA, 25 bp, Homo sapien
tgccgttgaaaagatggtttgtcac

SEQ ID NO: 159772 - DNA, 25 bp, Homo sapien
atacctggccctggtgtgatcaggg

SEQ ID NO: 159773 - DNA, 25 bp, Homo sapien
ggctgtccggagttgtctgatacct

SEQ ID NO: 159774 - DNA, 25 bp, Homo sapien
taacaaatatgaagatgcggccctg

SEQ ID NO: 159775 - DNA, 25 bp, Homo sapien
tctccaggtagccacgaggtctgag

SEQ ID NO: 159776 - DNA, 25 bp, Homo sapien
ccagtggcaccatagtttgtaacaa

SEQ ID NO: 159777 - DNA, 25 bp, Homo sapien
tcaaagggacaactcagccagtggc

SEQ ID NO: 159778 - DNA, 25 bp, Homo sapien
caaacctaggttcagttacaatatc

SEQ ID NO: 159779 - DNA, 25 bp, Homo sapien
tgagggttgagcaatcaaacctagg

SEQ ID NO: 159780 - DNA, 25 bp, Homo sapien
ttagagcacgagttccccatctcag

SEQ ID NO: 159781 - DNA, 25 bp, Homo sapien
cagttttgccggctctctgaataag

SEQ ID NO: 159782 - DNA, 25 bp, Homo sapien
ccgagccaggccctgaacaactttt

SEQ ID NO: 159783 - DNA, 25 bp, Homo sapien
caggtcttcaccttgttgaccagga

SEQ ID NO: 159784 - DNA, 25 bp, Homo sapien
gccaggccctgaacaactttttcaa

SEQ ID NO: 159785 - DNA, 25 bp, Homo sapien
gccctgaacaactttttcaatgaaa

SEQ ID NO: 159786 - DNA, 25 bp, Homo sapien
tgtcaccttcctactatgggtttgt

SEQ ID NO: 159787 - DNA, 25 bp, Homo sapien
catagcacggaacaaaacaaaggtc

SEQ ID NO: 159788 - DNA, 25 bp, Homo sapien
tgcaatgtggcagtcgtagcttact

SEQ ID NO: 159789 - DNA, 25 bp, Homo sapien
tctaaatttcatgcattcgacaggt

SEQ ID NO: 159790 - DNA, 25 bp, Homo sapien
cggctttgcgtgtgcgcggcgagag

SEQ ID NO: 159791 - DNA, 25 bp, Homo sapien
caactgcctgggaagcggctttgcg

SEQ ID NO: 159792 - DNA, 25 bp, Homo sapien
ccgaacgccgcaactgcctgggaag

SEQ ID NO: 159793 - DNA, 25 bp, Homo sapien
aagcgggccccgaacgccgcaactg

SEQ ID NO: 159794 - DNA, 25 bp, Homo sapien
cctgggagaccctctccgctgggag

SEQ ID NO: 159795 - DNA, 25 bp, Homo sapien
ttcgagggctcctcgcccctgcttc

SEQ ID NO: 159796 - DNA, 25 bp, Homo sapien
tctccgctgggagagtcgcagtcac

SEQ ID NO: 159797 - DNA, 25 bp, Homo sapien
ctgccgcccgagaccttcgagggct

SEQ ID NO: 159798 - DNA, 25 bp, Homo sapien
tcgcgagctagctgccgccccgcct

SEQ ID NO: 159799 - DNA, 25 bp, Homo sapien
ctcgcgagctagctgccgccccgcc

SEQ ID NO: 159800 - DNA, 25 bp, Homo sapien
ttcctgttccaatgaggcatcgaag

SEQ ID NO: 159801 - DNA, 25 bp, Homo sapien
ccaatgaggcatcgaagctggcaca

SEQ ID NO: 159802 - DNA, 25 bp, Homo sapien
aatgaggcatcgaagctggcacagg

SEQ ID NO: 159803 - DNA, 25 bp, Homo sapien
gttccaatgaggcatcgaagctggc

SEQ ID NO: 159804 - DNA, 25 bp, Homo sapien
tgggtgcgcccaggaccagggtggg

SEQ ID NO: 159805 - DNA, 25 bp, Homo sapien
gagttacattgcagcgaagtgtttc

SEQ ID NO: 159806 - DNA, 25 bp, Homo sapien
attagcggcaagttaaaccttcctg

SEQ ID NO: 159807 - DNA, 25 bp, Homo sapien
ttttgtggcacggattagcggcaag

SEQ ID NO: 159808 - DNA, 25 bp, Homo sapien
ccttttggtcgacctgacaatttgc

SEQ ID NO: 159809 - DNA, 25 bp, Homo sapien
ggccgccccgcacgcgccagccgct

SEQ ID NO: 159810 - DNA, 25 bp, Homo sapien
gcgccagccgctccccgcgcggccc

SEQ ID NO: 159811 - DNA, 25 bp, Homo sapien
cggcccctccctcccttctcctcag

SEQ ID NO: 159812 - DNA, 25 bp, Homo sapien
agggccgccccgcacgcgccagccg

SEQ ID NO: 159813 - DNA, 25 bp, Homo sapien
attggggcgacagggccgccccgca

SEQ ID NO: 159814 - DNA, 25 bp, Homo sapien
acgcgccagccgctccccgcgcggc

SEQ ID NO: 159815 - DNA, 25 bp, Homo sapien
gcggggagcggctggcgcgtgcggg

SEQ ID NO: 159816 - DNA, 25 bp, Homo sapien
gggccgcgcggggagcggctggcgc

SEQ ID NO: 159817 - DNA, 25 bp, Homo sapien
tgcggggcggccctgtcgccccaat

SEQ ID NO: 159818 - DNA, 25 bp, Homo sapien
ctgaggagaagggagggaggggccg

SEQ ID NO: 159819 - DNA, 25 bp, Homo sapien
cggctggcgcgtgcggggcggccct

SEQ ID NO: 159820 - DNA, 25 bp, Homo sapien
gccgcgcggggagcggctggcgcgt

SEQ ID NO: 159821 - DNA, 25 bp, Homo sapien
tgttgcaccgcgaagggcggcagcc

SEQ ID NO: 159822 - DNA, 25 bp, Homo sapien
ttttgtggctgttgcaccgcgaagg

SEQ ID NO: 159823 - DNA, 25 bp, Homo sapien
ccgaggcggcgggttttgtggctgt

SEQ ID NO: 159824 - DNA, 25 bp, Homo sapien
ggctgtagcggcgacgccccgttcc

SEQ ID NO: 159825 - DNA, 25 bp, Homo sapien
tcccatcggccccaatccgggagga

SEQ ID NO: 159826 - DNA, 25 bp, Homo sapien
gcgcgacaccgggaagcgggaggcg

SEQ ID NO: 159827 - DNA, 25 bp, Homo sapien
ccgctgccttgggagccggtgagcg

SEQ ID NO: 159828 - DNA, 25 bp, Homo sapien
ttgggagccggtgagcggtccgcgc

SEQ ID NO: 159829 - DNA, 25 bp, Homo sapien
tcccgcttcccggtgtcgcgcggct

SEQ ID NO: 159830 - DNA, 25 bp, Homo sapien
ccttcgcggtgcaacagccacaaaa

SEQ ID NO: 159831 - DNA, 25 bp, Homo sapien
gcggctgccgcccttcgcggtgcaa

SEQ ID NO: 159832 - DNA, 25 bp, Homo sapien
tcgcacgcgccctggctggcccgcg

SEQ ID NO: 159833 - DNA, 25 bp, Homo sapien
aatcgagagggcgaacgggcgagtg

SEQ ID NO: 159834 - DNA, 25 bp, Homo sapien
gacagatcgattggccgagaggaga

SEQ ID NO: 159835 - DNA, 25 bp, Homo sapien
gggcgaacgggcgagtggcagcgag

SEQ ID NO: 159836 - DNA, 25 bp, Homo sapien
cagcggacagatcgattggccgaga

SEQ ID NO: 159837 - DNA, 25 bp, Homo sapien
gccagcggacagatcgattggccga

SEQ ID NO: 159838 - DNA, 25 bp, Homo sapien
ccgagaggagaatcgagagggcgaa

SEQ ID NO: 159839 - DNA, 25 bp, Homo sapien
tcggccaatcgatctgtccgctggc

SEQ ID NO: 159840 - DNA, 25 bp, Homo sapien
ttctcctctcggccaatcgatctgt

SEQ ID NO: 159841 - DNA, 25 bp, Homo sapien
ttcgccctctcgattctcctctcgg

SEQ ID NO: 159842 - DNA, 25 bp, Homo sapien
ggccaatcgatctgtccgctggcct

SEQ ID NO: 159843 - DNA, 25 bp, Homo sapien
tctcggccaatcgatctgtccgctg

SEQ ID NO: 159844 - DNA, 25 bp, Homo sapien
cactcgcccgttcgccctctcgatt

SEQ ID NO: 159845 - DNA, 25 bp, Homo sapien
ccgggcccgagcagagtgtggcggc

SEQ ID NO: 159846 - DNA, 25 bp, Homo sapien
cagcgcggaagtctcgcgaggccgg

SEQ ID NO: 159847 - DNA, 25 bp, Homo sapien
gaagtctcgcgaggccgggcccgag

SEQ ID NO: 159848 - DNA, 25 bp, Homo sapien
ggccagcgcggaagtctcgcgaggc

SEQ ID NO: 159849 - DNA, 25 bp, Homo sapien
gcgcggaagtctcgcgaggccgggc

SEQ ID NO: 159850 - DNA, 25 bp, Homo sapien
ggcccgagcagagtgtggcggcggc

SEQ ID NO: 159851 - DNA, 25 bp, Homo sapien
ggcctcgcgagacttccgcgctggc

SEQ ID NO: 159852 - DNA, 25 bp, Homo sapien
cccggcctcgcgagacttccgcgct

SEQ ID NO: 159853 - DNA, 25 bp, Homo sapien
gccgccgccacactctgctcgggcc

SEQ ID NO: 159854 - DNA, 25 bp, Homo sapien
ctcgggcccggcctcgcgagacttc

SEQ ID NO: 159855 - DNA, 25 bp, Homo sapien
cggcctcgcgagacttccgcgctgg

SEQ ID NO: 159856 - DNA, 25 bp, Homo sapien
gccgccacactctgctcgggcccgg

SEQ ID NO: 159857 - DNA, 25 bp, Homo sapien
ccgggcccgagcagagtgtggcggc

SEQ ID NO: 159858 - DNA, 25 bp, Homo sapien
gcggcgagatctgggctcgggttga

SEQ ID NO: 159859 - DNA, 25 bp, Homo sapien
gaagtctcgcgaggccgggcccgag

SEQ ID NO: 159860 - DNA, 25 bp, Homo sapien
ggccagcgcggaagtctcgcgaggc

SEQ ID NO: 159861 - DNA, 25 bp, Homo sapien
agcgcggaagtctcgcgaggccggg

SEQ ID NO: 159862 - DNA, 25 bp, Homo sapien
ggcccgagcagagtgtggcggcggc

SEQ ID NO: 159863 - DNA, 25 bp, Homo sapien
ggcctcgcgagacttccgcgctggc

SEQ ID NO: 159864 - DNA, 25 bp, Homo sapien
agacttccgcgctggcctcagcccg

SEQ ID NO: 159865 - DNA, 25 bp, Homo sapien
ccggcctcgcgagacttccgcgctg

SEQ ID NO: 159866 - DNA, 25 bp, Homo sapien
ctcgggcccggcctcgcgagacttc

SEQ ID NO: 159867 - DNA, 25 bp, Homo sapien
tcctcaacccgagcccagatctcgc

SEQ ID NO: 159868 - DNA, 25 bp, Homo sapien
gccgccacactctgctcgggcccgg

SEQ ID NO: 159869 - DNA, 25 bp, Homo sapien
ggagccgagacgagcagcggccgag

SEQ ID NO: 159870 - DNA, 25 bp, Homo sapien
cggggagccgagacgagcagcggcc

SEQ ID NO: 159871 - DNA, 25 bp, Homo sapien
aggcggggagccgagacgagcagcg

SEQ ID NO: 159872 - DNA, 25 bp, Homo sapien
ggggagccgagacgagcagcggccg

SEQ ID NO: 159873 - DNA, 25 bp, Homo sapien
ccagggcgggcggttgcggcgaggc

SEQ ID NO: 159874 - DNA, 25 bp, Homo sapien
gggagccgagacgagcagcggccga

SEQ ID NO: 159875 - DNA, 25 bp, Homo sapien
cgctgctcgtctcggctccccgcct

SEQ ID NO: 159876 - DNA, 25 bp, Homo sapien
gcctcgccgcaaccgcccgccctgg

SEQ ID NO: 159877 - DNA, 25 bp, Homo sapien
ctcggccgctgctcgtctcggctcc

SEQ ID NO: 159878 - DNA, 25 bp, Homo sapien
cggccgctgctcgtctcggctcccc

SEQ ID NO: 159879 - DNA, 25 bp, Homo sapien
ggccgctgctcgtctcggctccccg

SEQ ID NO: 159880 - DNA, 25 bp, Homo sapien
tcggccgctgctcgtctcggctccc

SEQ ID NO: 159881 - DNA, 25 bp, Homo sapien
cggagggcgggaggaggcgcggcca

SEQ ID NO: 159882 - DNA, 25 bp, Homo sapien
cgggcgcaccgaggcgagggaggcg

SEQ ID NO: 159883 - DNA, 25 bp, Homo sapien
tatttgtgtggaaggaggcggaggc

SEQ ID NO: 159884 - DNA, 25 bp, Homo sapien
ccagggcgggcggttgcggcgaggc

SEQ ID NO: 159885 - DNA, 25 bp, Homo sapien
gggagccgagacgagcagcggccga

SEQ ID NO: 159886 - DNA, 25 bp, Homo sapien
agcggccgagcgagcgcgggcgcgg

SEQ ID NO: 159887 - DNA, 25 bp, Homo sapien
ggaaggcagagggaggaaggcggcg

SEQ ID NO: 159888 - DNA, 25 bp, Homo sapien
cagagggaggaaggcggcgagcggg

SEQ ID NO: 159889 - DNA, 25 bp, Homo sapien
gcgggcgggcgaggaggcggccggc

SEQ ID NO: 159890 - DNA, 25 bp, Homo sapien
ctcgctcggccgctgctcgtctcgg

SEQ ID NO: 159891 - DNA, 25 bp, Homo sapien
cgcctccttccacacaaataccaac

SEQ ID NO: 159892 - DNA, 25 bp, Homo sapien
tcggccgctgctcgtctcggctccc

SEQ ID NO: 159893 - DNA, 25 bp, Homo sapien
ggccgtggcggcggagccctcagcc

SEQ ID NO: 159894 - DNA, 25 bp, Homo sapien
cggccgtggcggcggagccctcagc

SEQ ID NO: 159895 - DNA, 25 bp, Homo sapien
gctgagggctccgccgccacggccg

SEQ ID NO: 159896 - DNA, 25 bp, Homo sapien
ggctgagggctccgccgccacggcc

SEQ ID NO: 159897 - DNA, 25 bp, Homo sapien
gccgaggccgccgcggccgtggcgg

SEQ ID NO: 159898 - DNA, 25 bp, Homo sapien
cggccgtggcggcggagccctcagc

SEQ ID NO: 159899 - DNA, 25 bp, Homo sapien
ggccgtggcggcggagccctcagcc

SEQ ID NO: 159900 - DNA, 25 bp, Homo sapien
gagccgaggccgccgcggccgtggc

SEQ ID NO: 159901 - DNA, 25 bp, Homo sapien
ccgaggccgccgcggccgtggcggc

SEQ ID NO: 159902 - DNA, 25 bp, Homo sapien
agccgaggccgccgcggccgtggcg

SEQ ID NO: 159903 - DNA, 25 bp, Homo sapien
gccacggccgcggcggcctcggctc

SEQ ID NO: 159904 - DNA, 25 bp, Homo sapien
gctgagggctccgccgccacggccg

SEQ ID NO: 159905 - DNA, 25 bp, Homo sapien
ggctgagggctccgccgccacggcc

SEQ ID NO: 159906 - DNA, 25 bp, Homo sapien
cgccacggccgcggcggcctcggct

SEQ ID NO: 159907 - DNA, 25 bp, Homo sapien
gccgccacggccgcggcggcctcgg

SEQ ID NO: 159908 - DNA, 25 bp, Homo sapien
ccgccacggccgcggcggcctcggc

SEQ ID NO: 159909 - DNA, 25 bp, Homo sapien
catcgccacggacggctcggagatg

SEQ ID NO: 159910 - DNA, 25 bp, Homo sapien
tctacatcgccacggacggctcgga

SEQ ID NO: 159911 - DNA, 25 bp, Homo sapien
tcgtggagctgcacgagatcgaggt

SEQ ID NO: 159912 - DNA, 25 bp, Homo sapien
acggacggctcggagatgccggccg

SEQ ID NO: 159913 - DNA, 25 bp, Homo sapien
tggcctcgggcgacaccctctacat

SEQ ID NO: 159914 - DNA, 25 bp, Homo sapien
agatgccggccgagatcgtggagct

SEQ ID NO: 159915 - DNA, 25 bp, Homo sapien
tctccgagccgtccgtggcgatgta

SEQ ID NO: 159916 - DNA, 25 bp, Homo sapien
tccgagccgtccgtggcgatgtaga

SEQ ID NO: 159917 - DNA, 25 bp, Homo sapien
acctcgatctcgtgcagctccacga

SEQ ID NO: 159918 - DNA, 25 bp, Homo sapien
cgatgtagagggtgtcgcccgaggc

SEQ ID NO: 159919 - DNA, 25 bp, Homo sapien
catctccgagccgtccgtggcgatg

SEQ ID NO: 159920 - DNA, 25 bp, Homo sapien
agctccacgatctcggccggcatct

SEQ ID NO: 159921 - DNA, 25 bp, Homo sapien
gccacgggcacgccggccaccacca

SEQ ID NO: 159922 - DNA, 25 bp, Homo sapien
tggtggtggccggcgtgcccgtggc

SEQ ID NO: 159923 - DNA, 25 bp, Homo sapien
cggccacgggcacgccggccaccac

SEQ ID NO: 159924 - DNA, 25 bp, Homo sapien
gcggccacgggcacgccggccacca

SEQ ID NO: 159925 - DNA, 25 bp, Homo sapien
aggacggcggcggtggcgaccacgg

SEQ ID NO: 159926 - DNA, 25 bp, Homo sapien
gccacgggcacgccggccaccacca

SEQ ID NO: 159927 - DNA, 25 bp, Homo sapien
cggcggtggcgaccacggcggcggg

SEQ ID NO: 159928 - DNA, 25 bp, Homo sapien
gggcacgccggccaccaccaccacc

SEQ ID NO: 159929 - DNA, 25 bp, Homo sapien
ggtggtggtggtggccggcgtgccc

SEQ ID NO: 159930 - DNA, 25 bp, Homo sapien
tggtggccggcgtgcccgtggccgc

SEQ ID NO: 159931 - DNA, 25 bp, Homo sapien
cccgccgccgtggtcgccaccgccg

SEQ ID NO: 159932 - DNA, 25 bp, Homo sapien
tggtggtggccggcgtgcccgtggc

SEQ ID NO: 159933 - DNA, 25 bp, Homo sapien
tggtggtggtggtggccggcgtgcc

SEQ ID NO: 159934 - DNA, 25 bp, Homo sapien
gtggtggccggcgtgcccgtggccg

SEQ ID NO: 159935 - DNA, 25 bp, Homo sapien
gctggtcaccgacgacccgacccag

SEQ ID NO: 159936 - DNA, 25 bp, Homo sapien
gtcaccgacgacccgacccaggtgc

SEQ ID NO: 159937 - DNA, 25 bp, Homo sapien
tcaccgacgacccgacccaggtgca

SEQ ID NO: 159938 - DNA, 25 bp, Homo sapien
ctggtcaccgacgacccgacccagg

SEQ ID NO: 159939 - DNA, 25 bp, Homo sapien
cctgggtcgggtcgtcggtgaccag

SEQ ID NO: 159940 - DNA, 25 bp, Homo sapien
ctgggtcgggtcgtcggtgaccagc

SEQ ID NO: 159941 - DNA, 25 bp, Homo sapien
tgcacctgggtcgggtcgtcggtga

SEQ ID NO: 159942 - DNA, 25 bp, Homo sapien
gcacctgggtcgggtcgtcggtgac

SEQ ID NO: 159943 - DNA, 25 bp, Homo sapien
gctggtcaccgacgacccgacccag

SEQ ID NO: 159944 - DNA, 25 bp, Homo sapien
tcctggtgcagacgcgcgaggaggt

SEQ ID NO: 159945 - DNA, 25 bp, Homo sapien
caccgacgacccgacccaggtgcac

SEQ ID NO: 159946 - DNA, 25 bp, Homo sapien
gtgatcctggtgcagacgcgcgagg

SEQ ID NO: 159947 - DNA, 25 bp, Homo sapien
gtgcaccaccaccaggaggtgatcc

SEQ ID NO: 159948 - DNA, 25 bp, Homo sapien
ccaggtgcaccaccaccaggaggtg

SEQ ID NO: 159949 - DNA, 25 bp, Homo sapien
tcctcgcgcgtctgcaccaggatca

SEQ ID NO: 159950 - DNA, 25 bp, Homo sapien
cctgggtcgggtcgtcggtgaccag

SEQ ID NO: 159951 - DNA, 25 bp, Homo sapien
ctgggtcgggtcgtcggtgaccagc

SEQ ID NO: 159952 - DNA, 25 bp, Homo sapien
tggtggtgcacctgggtcgggtcgt

SEQ ID NO: 159953 - DNA, 25 bp, Homo sapien
cacctcctggtggtggtgcacctgg

SEQ ID NO: 159954 - DNA, 25 bp, Homo sapien
ggatcacctcctggtggtggtgcac

SEQ ID NO: 159955 - DNA, 25 bp, Homo sapien
cggcgacgacgactacattgaacaa

SEQ ID NO: 159956 - DNA, 25 bp, Homo sapien
gatcagattctcatcccggtgcccg

SEQ ID NO: 159957 - DNA, 25 bp, Homo sapien
gcggcgacgacgactacattgaaca

SEQ ID NO: 159958 - DNA, 25 bp, Homo sapien
gcggcgacgactcggacgggctgcg

SEQ ID NO: 159959 - DNA, 25 bp, Homo sapien
ggacggcttcgaggatcagattctc

SEQ ID NO: 159960 - DNA, 25 bp, Homo sapien
aggacggcttcgaggatcagattct

SEQ ID NO: 159961 - DNA, 25 bp, Homo sapien
gagaatctgatcctcgaagccgtcc

SEQ ID NO: 159962 - DNA, 25 bp, Homo sapien
gcgcgcagcccgtccgagtcgtcgc

SEQ ID NO: 159963 - DNA, 25 bp, Homo sapien
agaatctgatcctcgaagccgtcct

SEQ ID NO: 159964 - DNA, 25 bp, Homo sapien
ttgttcaatgtagtcgtcgtcgccg

SEQ ID NO: 159965 - DNA, 25 bp, Homo sapien
tgttcaatgtagtcgtcgtcgccgc

SEQ ID NO: 159966 - DNA, 25 bp, Homo sapien
cgggcaccgggatgagaatctgatc

SEQ ID NO: 159967 - DNA, 25 bp, Homo sapien
gaagagcggcaagaagagttacctc

SEQ ID NO: 159968 - DNA, 25 bp, Homo sapien
caagaagagcggcaagaagagttac

SEQ ID NO: 159969 - DNA, 25 bp, Homo sapien
ggaggcggccgcgtcaagaagggcg

SEQ ID NO: 159970 - DNA, 25 bp, Homo sapien
aagaagagcggcaagaagagttacc

SEQ ID NO: 159971 - DNA, 25 bp, Homo sapien
ggctcgtcgtcgtcgggaggcggcc

SEQ ID NO: 159972 - DNA, 25 bp, Homo sapien
aagggcggcggcaagaagagcggca

SEQ ID NO: 159973 - DNA, 25 bp, Homo sapien
tgccgctcttcttgccgccgccctt

SEQ ID NO: 159974 - DNA, 25 bp, Homo sapien
ggtaactcttcttgccgctcttctt

SEQ ID NO: 159975 - DNA, 25 bp, Homo sapien
gaggtaactcttcttgccgctcttc

SEQ ID NO: 159976 - DNA, 25 bp, Homo sapien
cggccgcctcccgacgacgacgagc

SEQ ID NO: 159977 - DNA, 25 bp, Homo sapien
gccgcccttcttgacgcggccgcct

SEQ ID NO: 159978 - DNA, 25 bp, Homo sapien
gtaactcttcttgccgctcttcttg

SEQ ID NO: 159979 - DNA, 25 bp, Homo sapien
ctggagggcgagttctcggtcacca

SEQ ID NO: 159980 - DNA, 25 bp, Homo sapien
ggcgagttctcggtcaccatgtggt

SEQ ID NO: 159981 - DNA, 25 bp, Homo sapien
gagggcgagttctcggtcaccatgt

SEQ ID NO: 159982 - DNA, 25 bp, Homo sapien
gagttctcggtcaccatgtggtcct

SEQ ID NO: 159983 - DNA, 25 bp, Homo sapien
cgagttctcggtcaccatgtggtcc

SEQ ID NO: 159984 - DNA, 25 bp, Homo sapien
gttctcggtcaccatgtggtcctca

SEQ ID NO: 159985 - DNA, 25 bp, Homo sapien
cacatggtgaccgagaactcgccct

SEQ ID NO: 159986 - DNA, 25 bp, Homo sapien
gaggaccacatggtgaccgagaact

SEQ ID NO: 159987 - DNA, 25 bp, Homo sapien
tgaggaccacatggtgaccgagaac

SEQ ID NO: 159988 - DNA, 25 bp, Homo sapien
atggtgaccgagaactcgccctcca

SEQ ID NO: 159989 - DNA, 25 bp, Homo sapien
accacatggtgaccgagaactcgcc

SEQ ID NO: 159990 - DNA, 25 bp, Homo sapien
ggaccacatggtgaccgagaactcg

SEQ ID NO: 159991 - DNA, 25 bp, Homo sapien
catcttcttcgccagggcaagtatg

SEQ ID NO: 159992 - DNA, 25 bp, Homo sapien
cagggcaagtatggcggccccaaaa

SEQ ID NO: 159993 - DNA, 25 bp, Homo sapien
tcttcttcgccagggcaagtatggc

SEQ ID NO: 159994 - DNA, 25 bp, Homo sapien
aagtatggcggccccaaaagatggc

SEQ ID NO: 159995 - DNA, 25 bp, Homo sapien
tcttcgccagggcaagtatggcggc

SEQ ID NO: 159996 - DNA, 25 bp, Homo sapien
tcgccagggcaagtatggcggcccc

SEQ ID NO: 159997 - DNA, 25 bp, Homo sapien
gggccgccatacttgccctggcgaa

SEQ ID NO: 159998 - DNA, 25 bp, Homo sapien
catacttgccctggcgaagaagatg

SEQ ID NO: 159999 - DNA, 25 bp, Homo sapien
gccatacttgccctggcgaagaaga

SEQ ID NO: 160000 - DNA, 25 bp, Homo sapien
ccatacttgccctggcgaagaagat

SEQ ID NO: 160001 - DNA, 25 bp, Homo sapien
ttttggggccgccatacttgccctg

SEQ ID NO: 160002 - DNA, 25 bp, Homo sapien
gccgccatacttgccctggcgaaga

SEQ ID NO: 160003 - DNA, 25 bp, Homo sapien
aactgctccccggtggcaccttcca

SEQ ID NO: 160004 - DNA, 25 bp, Homo sapien
actcccaactgctccccggtggcac

SEQ ID NO: 160005 - DNA, 25 bp, Homo sapien
ggactcccaactgctccccggtggc

SEQ ID NO: 160006 - DNA, 25 bp, Homo sapien
cggactcccaactgctccccggtgg

SEQ ID NO: 160007 - DNA, 25 bp, Homo sapien
caacttccccggactcccaactgct

SEQ ID NO: 160008 - DNA, 25 bp, Homo sapien
gactcccaactgctccccggtggca

SEQ ID NO: 160009 - DNA, 25 bp, Homo sapien
tgccaccggggagcagttgggagtc

SEQ ID NO: 160010 - DNA, 25 bp, Homo sapien
ggtgccaccggggagcagttgggag

SEQ ID NO: 160011 - DNA, 25 bp, Homo sapien
gccaccggggagcagttgggagtcc

SEQ ID NO: 160012 - DNA, 25 bp, Homo sapien
tggaaggtgccaccggggagcagtt

SEQ ID NO: 160013 - DNA, 25 bp, Homo sapien
ccaccggggagcagttgggagtccg

SEQ ID NO: 160014 - DNA, 25 bp, Homo sapien
agcagttgggagtccggggaagttg

SEQ ID NO: 160015 - DNA, 25 bp, Homo sapien
gagggggcttggcactcgtgggcgc

SEQ ID NO: 160016 - DNA, 25 bp, Homo sapien
agggggcttggcactcgtgggcgcc

SEQ ID NO: 160017 - DNA, 25 bp, Homo sapien
gcgcccacgagtgccaagccccctc

SEQ ID NO: 160018 - DNA, 25 bp, Homo sapien
ggcgcccacgagtgccaagccccct

SEQ ID NO: 160019 - DNA, 25 bp, Homo sapien
ctgggtgggcggggagcaaggaggc

SEQ ID NO: 160020 - DNA, 25 bp, Homo sapien
ggagggcgcccacgagtgccaagcc

SEQ ID NO: 160021 - DNA, 25 bp, Homo sapien
agggcgcccacgagtgccaagcccc

SEQ ID NO: 160022 - DNA, 25 bp, Homo sapien
ccggagggcgcccacgagtgccaag

SEQ ID NO: 160023 - DNA, 25 bp, Homo sapien
gcaaggaggccggagggcgcccacg

SEQ ID NO: 160024 - DNA, 25 bp, Homo sapien
gagggcgcccacgagtgccaagccc

SEQ ID NO: 160025 - DNA, 25 bp, Homo sapien
gcacgtagggctcgcgtgtgcgggc

SEQ ID NO: 160026 - DNA, 25 bp, Homo sapien
tccgagcgtcagtcggagcctgtca

SEQ ID NO: 160027 - DNA, 25 bp, Homo sapien
tgtcaccgccgttgccagcgaattc

SEQ ID NO: 160028 - DNA, 25 bp, Homo sapien
tcgcccaagtcgtcgtttgctgcgg

SEQ ID NO: 160029 - DNA, 25 bp, Homo sapien
tcagtcggagcctgtcaccgccgtt

SEQ ID NO: 160030 - DNA, 25 bp, Homo sapien
gtcacgctcgcccaagtcgtcgttt

SEQ ID NO: 160031 - DNA, 25 bp, Homo sapien
tgacaggctccgactgacgctcgga

SEQ ID NO: 160032 - DNA, 25 bp, Homo sapien
gaattcgctggcaacggcggtgaca

SEQ ID NO: 160033 - DNA, 25 bp, Homo sapien
cccgcagcaaacgacgacttgggcg

SEQ ID NO: 160034 - DNA, 25 bp, Homo sapien
ccaggaattcgctggcaacggcggt

SEQ ID NO: 160035 - DNA, 25 bp, Homo sapien
aacggcggtgacaggctccgactga

SEQ ID NO: 160036 - DNA, 25 bp, Homo sapien
caaacgacgacttgggcgagcgtga

SEQ ID NO: 160037 - DNA, 25 bp, Homo sapien
gtatttagctcttctgaataggttg

SEQ ID NO: 160038 - DNA, 25 bp, Homo sapien
agtatttagctcttctgaataggtt

SEQ ID NO: 160039 - DNA, 25 bp, Homo sapien
aagtatttagctcttctgaataggt

SEQ ID NO: 160040 - DNA, 25 bp, Homo sapien
tgaataggttgggttagtttactca

SEQ ID NO: 160041 - DNA, 25 bp, Homo sapien
cgaataattcttagtcacttacgtt

SEQ ID NO: 160042 - DNA, 25 bp, Homo sapien
aacgtaagtgactaagaattattcg

SEQ ID NO: 160043 - DNA, 25 bp, Homo sapien
aacctattcagaagagctaaatact

SEQ ID NO: 160044 - DNA, 25 bp, Homo sapien
caacctattcagaagagctaaatac

SEQ ID NO: 160045 - DNA, 25 bp, Homo sapien
tgagtaaactaacccaacctattca

SEQ ID NO: 160046 - DNA, 25 bp, Homo sapien
acctattcagaagagctaaatactt

SEQ ID NO: 160047 - DNA, 25 bp, Homo sapien
gttggcctcatgctccgggtagaga

SEQ ID NO: 160048 - DNA, 25 bp, Homo sapien
catgctccgggtagagaacccttgt

SEQ ID NO: 160049 - DNA, 25 bp, Homo sapien
tggcctcatgctccgggtagagaac

SEQ ID NO: 160050 - DNA, 25 bp, Homo sapien
tcatgctccgggtagagaacccttg

SEQ ID NO: 160051 - DNA, 25 bp, Homo sapien
atgctccgggtagagaacccttgtt

SEQ ID NO: 160052 - DNA, 25 bp, Homo sapien
ttggcctcatgctccgggtagagaa

SEQ ID NO: 160053 - DNA, 25 bp, Homo sapien
ttctctacccggagcatgaggccaa

SEQ ID NO: 160054 - DNA, 25 bp, Homo sapien
caagggttctctacccggagcatga

SEQ ID NO: 160055 - DNA, 25 bp, Homo sapien
acaagggttctctacccggagcatg

SEQ ID NO: 160056 - DNA, 25 bp, Homo sapien
aacaagggttctctacccggagcat

SEQ ID NO: 160057 - DNA, 25 bp, Homo sapien
gttctctacccggagcatgaggcca

SEQ ID NO: 160058 - DNA, 25 bp, Homo sapien
aagggttctctacccggagcatgag

SEQ ID NO: 160059 - DNA, 25 bp, Homo sapien
gaccactgagtggtagtactggcat

SEQ ID NO: 160060 - DNA, 25 bp, Homo sapien
ggaacttatactaccttcatctgat

SEQ ID NO: 160061 - DNA, 25 bp, Homo sapien
gaatatagaaaatcgggatcacagg

SEQ ID NO: 160062 - DNA, 25 bp, Homo sapien
tcaaccctaatgaggttactggcag

SEQ ID NO: 160063 - DNA, 25 bp, Homo sapien
ttcacagtgctgtcttagagatgcc

SEQ ID NO: 160064 - DNA, 25 bp, Homo sapien
ggtaaatatctcagttggtgaaggt

SEQ ID NO: 160065 - DNA, 25 bp, Homo sapien
gacagcactgtgaaatttgtcacat

SEQ ID NO: 160066 - DNA, 25 bp, Homo sapien
taggcatctctaagacagcactgtg

SEQ ID NO: 160067 - DNA, 25 bp, Homo sapien
tcagatgaaggtagtataagttcct

SEQ ID NO: 160068 - DNA, 25 bp, Homo sapien
aaatgccagtactaccactcagtgg

SEQ ID NO: 160069 - DNA, 25 bp, Homo sapien
ctgccagtaacctcattagggttga

SEQ ID NO: 160070 - DNA, 25 bp, Homo sapien
ccttcaccaactgagatatttacct

SEQ ID NO: 160071 - DNA, 25 bp, Homo sapien
tgtgagtgagcactgtagtcaccta

SEQ ID NO: 160072 - DNA, 25 bp, Homo sapien
tagtcacctaatcgacagttttggg

SEQ ID NO: 160073 - DNA, 25 bp, Homo sapien
taacatgatggttgcccacatcacc

SEQ ID NO: 160074 - DNA, 25 bp, Homo sapien
gaatcaatgactgtattctcagctt

SEQ ID NO: 160075 - DNA, 25 bp, Homo sapien
atttagccagagtgtgagtgagcac

SEQ ID NO: 160076 - DNA, 25 bp, Homo sapien
cccacttgtgttctggtaattagca

SEQ ID NO: 160077 - DNA, 25 bp, Homo sapien
taggtgactacagtgctcactcaca

SEQ ID NO: 160078 - DNA, 25 bp, Homo sapien
tgcaatgacctaaaacaactagacc

SEQ ID NO: 160079 - DNA, 25 bp, Homo sapien
ccaaaactgtcgattaggtgactac

SEQ ID NO: 160080 - DNA, 25 bp, Homo sapien
gatgtgggcaaccatcatgttagga

SEQ ID NO: 160081 - DNA, 25 bp, Homo sapien
gtgctcactcacactctggctaaat

SEQ ID NO: 160082 - DNA, 25 bp, Homo sapien
tgctaattaccagaacacaagtggg

SEQ ID NO: 160083 - DNA, 25 bp, Homo sapien
actgtatgattcaactggtatgagg

SEQ ID NO: 160084 - DNA, 25 bp, Homo sapien
tatgttacaacaggtgggtcttaaa

SEQ ID NO: 160085 - DNA, 25 bp, Homo sapien
agaaactcaggtggcatacttggca

SEQ ID NO: 160086 - DNA, 25 bp, Homo sapien
tatttctccatccattaacagatgg

SEQ ID NO: 160087 - DNA, 25 bp, Homo sapien
taaaccaggcatggatggcaaatac

SEQ ID NO: 160088 - DNA, 25 bp, Homo sapien
ggacaaaatggtatgtatgtacaga

SEQ ID NO: 160089 - DNA, 25 bp, Homo sapien
tagataattaatcagatgggttggg

SEQ ID NO: 160090 - DNA, 25 bp, Homo sapien
ttaagacccacctgttgtaacatat

SEQ ID NO: 160091 - DNA, 25 bp, Homo sapien
tgccaagtatgccacctgagtttct

SEQ ID NO: 160092 - DNA, 25 bp, Homo sapien
cctcataccagttgaatcatacagt

SEQ ID NO: 160093 - DNA, 25 bp, Homo sapien
gtatttgccatccatgcctggttta

SEQ ID NO: 160094 - DNA, 25 bp, Homo sapien
tctgttaatggatggagaaataaac

SEQ ID NO: 160095 - DNA, 25 bp, Homo sapien
ggattaagacactttcatcagtagc

SEQ ID NO: 160096 - DNA, 25 bp, Homo sapien
ccagggagtaggtcctcaccaagaa

SEQ ID NO: 160097 - DNA, 25 bp, Homo sapien
gattctcaacattgctatcattctg

SEQ ID NO: 160098 - DNA, 25 bp, Homo sapien
ttcagagtagcactgattctcaaca

SEQ ID NO: 160099 - DNA, 25 bp, Homo sapien
gtcctcaccaagaacaccaccatgc

SEQ ID NO: 160100 - DNA, 25 bp, Homo sapien
gcttattcagagtagcactgattct

SEQ ID NO: 160101 - DNA, 25 bp, Homo sapien
gctactgatgaaagtgtcttaatcc

SEQ ID NO: 160102 - DNA, 25 bp, Homo sapien
tgttgagaatcagtgctactctgaa

SEQ ID NO: 160103 - DNA, 25 bp, Homo sapien
gcatggtggtgttcttggtgaggac

SEQ ID NO: 160104 - DNA, 25 bp, Homo sapien
gagaatcagtgctactctgaataag

SEQ ID NO: 160105 - DNA, 25 bp, Homo sapien
cagaatgatagcaatgttgagaatc

SEQ ID NO: 160106 - DNA, 25 bp, Homo sapien
tcttggtgaggacctactccctggt

SEQ ID NO: 160107 - DNA, 25 bp, Homo sapien
attgacctctcagatcccaaacaac

SEQ ID NO: 160108 - DNA, 25 bp, Homo sapien
tgacctctcagatcccaaacaactg

SEQ ID NO: 160109 - DNA, 25 bp, Homo sapien
cattgacctctcagatcccaaacaa

SEQ ID NO: 160110 - DNA, 25 bp, Homo sapien
gacctctcagatcccaaacaactgg

SEQ ID NO: 160111 - DNA, 25 bp, Homo sapien
tgaaaaaaaagatattgaccatgag

SEQ ID NO: 160112 - DNA, 25 bp, Homo sapien
cctctcagatcccaaacaactggca

SEQ ID NO: 160113 - DNA, 25 bp, Homo sapien
agaactcacctcctgattattcaga

SEQ ID NO: 160114 - DNA, 25 bp, Homo sapien
tggagagaactcacctcctgattat

SEQ ID NO: 160115 - DNA, 25 bp, Homo sapien
gagaactcacctcctgattattcag

SEQ ID NO: 160116 - DNA, 25 bp, Homo sapien
gagagaactcacctcctgattattc

SEQ ID NO: 160117 - DNA, 25 bp, Homo sapien
atatgacaggaaagaaacttcctcc

SEQ ID NO: 160118 - DNA, 25 bp, Homo sapien
tatatgacaggaaagaaacttcctc

SEQ ID NO: 160119 - DNA, 25 bp, Homo sapien
ataatcaggaggtgagttctctcca

SEQ ID NO: 160120 - DNA, 25 bp, Homo sapien
gaggaagtttctttcctgtcatata

SEQ ID NO: 160121 - DNA, 25 bp, Homo sapien
tctgaataatcaggaggtgagttct

SEQ ID NO: 160122 - DNA, 25 bp, Homo sapien
gaataatcaggaggtgagttctctc

SEQ ID NO: 160123 - DNA, 25 bp, Homo sapien
ctgaataatcaggaggtgagttctc

SEQ ID NO: 160124 - DNA, 25 bp, Homo sapien
ggaggaagtttctttcctgtcatat

SEQ ID NO: 160125 - DNA, 25 bp, Homo sapien
cagttgtttgggatctgagaggtca

SEQ ID NO: 160126 - DNA, 25 bp, Homo sapien
ccagttgtttgggatctgagaggtc

SEQ ID NO: 160127 - DNA, 25 bp, Homo sapien
gttgtttgggatctgagaggtcaat

SEQ ID NO: 160128 - DNA, 25 bp, Homo sapien
ctcatggtcaatatcttttttttca

SEQ ID NO: 160129 - DNA, 25 bp, Homo sapien
tgccagttgtttgggatctgagagg

SEQ ID NO: 160130 - DNA, 25 bp, Homo sapien
ttgtttgggatctgagaggtcaatg

SEQ ID NO: 160131 - DNA, 25 bp, Homo sapien
gcctaaagtgggctgggttcttata

SEQ ID NO: 160132 - DNA, 25 bp, Homo sapien
cattctaagaacagagtgggttgct

SEQ ID NO: 160133 - DNA, 25 bp, Homo sapien
aatgcctttccatacctgaggttgg

SEQ ID NO: 160134 - DNA, 25 bp, Homo sapien
tagctcaggaaatttcggcaagggc

SEQ ID NO: 160135 - DNA, 25 bp, Homo sapien
aatttaagctggcatgacaggagga

SEQ ID NO: 160136 - DNA, 25 bp, Homo sapien
tggagaccgttcagtgtcctggctt

SEQ ID NO: 160137 - DNA, 25 bp, Homo sapien
tataagaacccagcccactttaggc

SEQ ID NO: 160138 - DNA, 25 bp, Homo sapien
agcaacccactctgttcttagaatg

SEQ ID NO: 160139 - DNA, 25 bp, Homo sapien
gctccttgtacaaactgccaaacag

SEQ ID NO: 160140 - DNA, 25 bp, Homo sapien
gaagccaggacactgaacggtctcc

SEQ ID NO: 160141 - DNA, 25 bp, Homo sapien
ccaacctcaggtatggaaaggcatt

SEQ ID NO: 160142 - DNA, 25 bp, Homo sapien
tgcccttgccgaaatttcctgagct

SEQ ID NO: 160143 - DNA, 25 bp, Homo sapien
tgggcgttaagaattccattgtggt

SEQ ID NO: 160144 - DNA, 25 bp, Homo sapien
gtttgatacatggaggttctcactg

SEQ ID NO: 160145 - DNA, 25 bp, Homo sapien
cctgtcaaatgggcgttaagaattc

SEQ ID NO: 160146 - DNA, 25 bp, Homo sapien
tggtttgatacatggaggttctcac

SEQ ID NO: 160147 - DNA, 25 bp, Homo sapien
acctggagctcgtttccccacctgt

SEQ ID NO: 160148 - DNA, 25 bp, Homo sapien
ccattgtggtttgatacatggaggt

SEQ ID NO: 160149 - DNA, 25 bp, Homo sapien
gagaacctccatgtatcaaaccaca

SEQ ID NO: 160150 - DNA, 25 bp, Homo sapien
acctccatgtatcaaaccacaatgg

SEQ ID NO: 160151 - DNA, 25 bp, Homo sapien
gaattcttaacgcccatttgacagg

SEQ ID NO: 160152 - DNA, 25 bp, Homo sapien
cagtgagaacctccatgtatcaaac

SEQ ID NO: 160153 - DNA, 25 bp, Homo sapien
gacaggtggggaaacgagctccagg

SEQ ID NO: 160154 - DNA, 25 bp, Homo sapien
accacaatggaattcttaacgccca

SEQ ID NO: 160155 - DNA, 25 bp, Homo sapien
ttgatagagatggagggtttactgg

SEQ ID NO: 160156 - DNA, 25 bp, Homo sapien
ctggccctagagttttgatagagat

SEQ ID NO: 160157 - DNA, 25 bp, Homo sapien
ccagtaaaccctccatctctatcaa

SEQ ID NO: 160158 - DNA, 25 bp, Homo sapien
atctctatcaaaactctagggccag

SEQ ID NO: 160159 - DNA, 25 bp, Homo sapien
actgcacccagctggccctagagtt

SEQ ID NO: 160160 - DNA, 25 bp, Homo sapien
ccaccttggcttcccaaaatgatta

SEQ ID NO: 160161 - DNA, 25 bp, Homo sapien
gcttcccaaaatgattatagacgtg

SEQ ID NO: 160162 - DNA, 25 bp, Homo sapien
caaaatgattatagacgtgagccac

SEQ ID NO: 160163 - DNA, 25 bp, Homo sapien
ctggccctagagttttgatagagat

SEQ ID NO: 160164 - DNA, 25 bp, Homo sapien
tttgatagagatggagggtttactg

SEQ ID NO: 160165 - DNA, 25 bp, Homo sapien
aactctagggccagctgggtgcagt

SEQ ID NO: 160166 - DNA, 25 bp, Homo sapien
cacgtctataatcattttgggaagc

SEQ ID NO: 160167 - DNA, 25 bp, Homo sapien
cagtaaaccctccatctctatcaaa

SEQ ID NO: 160168 - DNA, 25 bp, Homo sapien
taatcattttgggaagccaaggtgg

SEQ ID NO: 160169 - DNA, 25 bp, Homo sapien
atctctatcaaaactctagggccag

SEQ ID NO: 160170 - DNA, 25 bp, Homo sapien
tatcaaaactctagggccagctggg

SEQ ID NO: 160171 - DNA, 25 bp, Homo sapien
cgtagctgggcttgatggcaggcgc

SEQ ID NO: 160172 - DNA, 25 bp, Homo sapien
aacgtagctgggcttgatggcaggc

SEQ ID NO: 160173 - DNA, 25 bp, Homo sapien
aaaaacgtagctgggcttgatggca

SEQ ID NO: 160174 - DNA, 25 bp, Homo sapien
aaaacgtagctgggcttgatggcag

SEQ ID NO: 160175 - DNA, 25 bp, Homo sapien
caaaaacgtagctgggcttgatggc

SEQ ID NO: 160176 - DNA, 25 bp, Homo sapien
aaacgtagctgggcttgatggcagg

SEQ ID NO: 160177 - DNA, 25 bp, Homo sapien
gccatcaagcccagctacgtttttg

SEQ ID NO: 160178 - DNA, 25 bp, Homo sapien
gcgcctgccatcaagcccagctacg

SEQ ID NO: 160179 - DNA, 25 bp, Homo sapien
tgccatcaagcccagctacgttttt

SEQ ID NO: 160180 - DNA, 25 bp, Homo sapien
ctgccatcaagcccagctacgtttt

SEQ ID NO: 160181 - DNA, 25 bp, Homo sapien
cctgccatcaagcccagctacgttt

SEQ ID NO: 160182 - DNA, 25 bp, Homo sapien
gcctgccatcaagcccagctacgtt

SEQ ID NO: 160183 - DNA, 25 bp, Homo sapien
cagtggcagagtaaaagcatcattc

SEQ ID NO: 160184 - DNA, 25 bp, Homo sapien
ccatgtcagagggtaagaggtccca

SEQ ID NO: 160185 - DNA, 25 bp, Homo sapien
gattctcccgtgtccacatggctgg

SEQ ID NO: 160186 - DNA, 25 bp, Homo sapien
tgagccccaaaccagaacactgaag

SEQ ID NO: 160187 - DNA, 25 bp, Homo sapien
caaatactgactactctgagcccca

SEQ ID NO: 160188 - DNA, 25 bp, Homo sapien
gaggacgcagcgaaaccatgtcaga

SEQ ID NO: 160189 - DNA, 25 bp, Homo sapien
cagccatgtggacacgggagaatca

SEQ ID NO: 160190 - DNA, 25 bp, Homo sapien
tgggacctcttaccctctgacatgg

SEQ ID NO: 160191 - DNA, 25 bp, Homo sapien
gaatgatgcttttactctgccactg

SEQ ID NO: 160192 - DNA, 25 bp, Homo sapien
tctgacatggtttcgctgcgtcctc

SEQ ID NO: 160193 - DNA, 25 bp, Homo sapien
tggctaaaagcatcaaaacggtaag

SEQ ID NO: 160194 - DNA, 25 bp, Homo sapien
aacatccatgttggacttgaggtgg

SEQ ID NO: 160195 - DNA, 25 bp, Homo sapien
ccagcaaagctatcaagtcagatac

SEQ ID NO: 160196 - DNA, 25 bp, Homo sapien
gatttcctagtgcacgacaaccaag

SEQ ID NO: 160197 - DNA, 25 bp, Homo sapien
catgttgcatgcaccctttctgagg

SEQ ID NO: 160198 - DNA, 25 bp, Homo sapien
gagacccaaggattcatgttgcatg

SEQ ID NO: 160199 - DNA, 25 bp, Homo sapien
cagtttcattcagtagtgggtagag

SEQ ID NO: 160200 - DNA, 25 bp, Homo sapien
aagttggctggctgtaagaatttct

SEQ ID NO: 160201 - DNA, 25 bp, Homo sapien
ttcagtaagataggccatcaagtgg

SEQ ID NO: 160202 - DNA, 25 bp, Homo sapien
gaatgatagacctgaatgagacttt

SEQ ID NO: 160203 - DNA, 25 bp, Homo sapien
tggaaagaatgatagacctgaatga

SEQ ID NO: 160204 - DNA, 25 bp, Homo sapien
cagtagcaggggataattagagaca

SEQ ID NO: 160205 - DNA, 25 bp, Homo sapien
ccaaaagtttcagtaagataggcca

SEQ ID NO: 160206 - DNA, 25 bp, Homo sapien
gatagacctgaatgagacttttctt

SEQ ID NO: 160207 - DNA, 25 bp, Homo sapien
taattatcccctgctactgaagaaa

SEQ ID NO: 160208 - DNA, 25 bp, Homo sapien
aagaaaagtctcattcaggtctatc

SEQ ID NO: 160209 - DNA, 25 bp, Homo sapien
tcattcaggtctatcattctttcca

SEQ ID NO: 160210 - DNA, 25 bp, Homo sapien
tggcctatcttactgaaacttttgg

SEQ ID NO: 160211 - DNA, 25 bp, Homo sapien
tattgtctctaattatcccctgcta

SEQ ID NO: 160212 - DNA, 25 bp, Homo sapien
ccacttgatggcctatcttactgaa

SEQ ID NO: 160213 - DNA, 25 bp, Homo sapien
gttgtcgtgcactaggaaatcttcc

SEQ ID NO: 160214 - DNA, 25 bp, Homo sapien
ctctacccactactgaatgaaactg

SEQ ID NO: 160215 - DNA, 25 bp, Homo sapien
aagaaattcttacagccagccaact

SEQ ID NO: 160216 - DNA, 25 bp, Homo sapien
catgcaacatgaatccttgggtctc

SEQ ID NO: 160217 - DNA, 25 bp, Homo sapien
tcctcagaaagggtgcatgcaacat

SEQ ID NO: 160218 - DNA, 25 bp, Homo sapien
tatctgacttgatagctttgctgga

SEQ ID NO: 160219 - DNA, 25 bp, Homo sapien
ttacagagtttgggccctgtgaggt

SEQ ID NO: 160220 - DNA, 25 bp, Homo sapien
ccggcctctaacatagtagctcttg

SEQ ID NO: 160221 - DNA, 25 bp, Homo sapien
aatgaaatcttgctcgccttgacag

SEQ ID NO: 160222 - DNA, 25 bp, Homo sapien
gctcgccttgacagtgtaaaaagta

SEQ ID NO: 160223 - DNA, 25 bp, Homo sapien
tcttgctcgccttgacagtgtaaaa

SEQ ID NO: 160224 - DNA, 25 bp, Homo sapien
gcgcccggcctctaacatagtagct

SEQ ID NO: 160225 - DNA, 25 bp, Homo sapien
agctactatgttagaggccgggcgc

SEQ ID NO: 160226 - DNA, 25 bp, Homo sapien
tttacactgtcaaggcgagcaagat

SEQ ID NO: 160227 - DNA, 25 bp, Homo sapien
acctcacagggcccaaactctgtaa

SEQ ID NO: 160228 - DNA, 25 bp, Homo sapien
ctgtcaaggcgagcaagatttcatt

SEQ ID NO: 160229 - DNA, 25 bp, Homo sapien
caagagctactatgttagaggccgg

SEQ ID NO: 160230 - DNA, 25 bp, Homo sapien
tactttttacactgtcaaggcgagc

SEQ ID NO: 160231 - DNA, 25 bp, Homo sapien
cttccacttactccttaagtccaag

SEQ ID NO: 160232 - DNA, 25 bp, Homo sapien
tcttccacttactccttaagtccaa

SEQ ID NO: 160233 - DNA, 25 bp, Homo sapien
atcttccacttactccttaagtcca

SEQ ID NO: 160234 - DNA, 25 bp, Homo sapien
tggacttaaggagtaagtggaagat

SEQ ID NO: 160235 - DNA, 25 bp, Homo sapien
ttggacttaaggagtaagtggaaga

SEQ ID NO: 160236 - DNA, 25 bp, Homo sapien
cttggacttaaggagtaagtggaag

SEQ ID NO: 160237 - DNA, 25 bp, Homo sapien
ccaaggagcttaagagtggctgcat

SEQ ID NO: 160238 - DNA, 25 bp, Homo sapien
cttccacttactccttaagtccaag

SEQ ID NO: 160239 - DNA, 25 bp, Homo sapien
aaggaggatgatttgccaaggagct

SEQ ID NO: 160240 - DNA, 25 bp, Homo sapien
aagtccaagggtatttgtccaaatg

SEQ ID NO: 160241 - DNA, 25 bp, Homo sapien
gagtggctgcatttaaatcttccac

SEQ ID NO: 160242 - DNA, 25 bp, Homo sapien
tgtccaaatgcattttaaactctca

SEQ ID NO: 160243 - DNA, 25 bp, Homo sapien
atgcagccactcttaagctccttgg

SEQ ID NO: 160244 - DNA, 25 bp, Homo sapien
catttggacaaatacccttggactt

SEQ ID NO: 160245 - DNA, 25 bp, Homo sapien
gagagtttaaaatgcatttggacaa

SEQ ID NO: 160246 - DNA, 25 bp, Homo sapien
taagctccttggcaaatcatcctcc

SEQ ID NO: 160247 - DNA, 25 bp, Homo sapien
cttggacttaaggagtaagtggaag

SEQ ID NO: 160248 - DNA, 25 bp, Homo sapien
taagtggaagatttaaatgcagcca

SEQ ID NO: 160249 - DNA, 25 bp, Homo sapien
cctggtgtggtggcaggcgcctgta

SEQ ID NO: 160250 - DNA, 25 bp, Homo sapien
ttagcctggtgtggtggcaggcgcc

SEQ ID NO: 160251 - DNA, 25 bp, Homo sapien
gcgaggctgaggcaggtggatcacg

SEQ ID NO: 160252 - DNA, 25 bp, Homo sapien
cgaggctgaggcaggtggatcacga

SEQ ID NO: 160253 - DNA, 25 bp, Homo sapien
ctggtgtggtggcaggcgcctgtag

SEQ ID NO: 160254 - DNA, 25 bp, Homo sapien
gcctggtgtggtggcaggcgcctgt

SEQ ID NO: 160255 - DNA, 25 bp, Homo sapien
acaggcgcctgccaccacaccaggc

SEQ ID NO: 160256 - DNA, 25 bp, Homo sapien
gcgcctgccaccacaccaggctaat

SEQ ID NO: 160257 - DNA, 25 bp, Homo sapien
tacaggcgcctgccaccacaccagg

SEQ ID NO: 160258 - DNA, 25 bp, Homo sapien
cgtgatccacctgcctcagcctcgc

SEQ ID NO: 160259 - DNA, 25 bp, Homo sapien
ggcgcctgccaccacaccaggctaa

SEQ ID NO: 160260 - DNA, 25 bp, Homo sapien
ctacaggcgcctgccaccacaccag

SEQ ID NO: 160261 - DNA, 25 bp, Homo sapien
gaatttggacaaacagtcatgtagc

SEQ ID NO: 160262 - DNA, 25 bp, Homo sapien
tatgagagaggaccttactaagcca

SEQ ID NO: 160263 - DNA, 25 bp, Homo sapien
ggaccttactaagccatgtttacta

SEQ ID NO: 160264 - DNA, 25 bp, Homo sapien
atttgcatatggtaaagtctacccc

SEQ ID NO: 160265 - DNA, 25 bp, Homo sapien
gtagccatcttcacactcaacacag

SEQ ID NO: 160266 - DNA, 25 bp, Homo sapien
tttccaaggagtcctaggcaggtgg

SEQ ID NO: 160267 - DNA, 25 bp, Homo sapien
tccacctgcctaggactccttggaa

SEQ ID NO: 160268 - DNA, 25 bp, Homo sapien
gatggctacatgactgtttgtccaa

SEQ ID NO: 160269 - DNA, 25 bp, Homo sapien
tagtaaacatggcttagtaaggtcc

SEQ ID NO: 160270 - DNA, 25 bp, Homo sapien
ggggggtagactttaccatatgcaa

SEQ ID NO: 160271 - DNA, 25 bp, Homo sapien
ctgtgttgagtgtgaagatggctac

SEQ ID NO: 160272 - DNA, 25 bp, Homo sapien
tagtaaggtcctctctcatacattt

SEQ ID NO: 160273 - DNA, 25 bp, Homo sapien
gacataccgcgtttgattttccatt

SEQ ID NO: 160274 - DNA, 25 bp, Homo sapien
tattgatgaattctgaggtccgagt

SEQ ID NO: 160275 - DNA, 25 bp, Homo sapien
gtcttttatcccacaccattctttc

SEQ ID NO: 160276 - DNA, 25 bp, Homo sapien
tgtacactgtatccggtatgtagtc

SEQ ID NO: 160277 - DNA, 25 bp, Homo sapien
tataagtgaggacataccgcgtttg

SEQ ID NO: 160278 - DNA, 25 bp, Homo sapien
tgaattctgaggtccgagtgcaccc

SEQ ID NO: 160279 - DNA, 25 bp, Homo sapien
gactacataccggatacagtgtaca

SEQ ID NO: 160280 - DNA, 25 bp, Homo sapien
aatggaaaatcaaacgcggtatgtc

SEQ ID NO: 160281 - DNA, 25 bp, Homo sapien
gaaagaatggtgtgggataaaagac

SEQ ID NO: 160282 - DNA, 25 bp, Homo sapien
ataaaagactacataccggatacag

SEQ ID NO: 160283 - DNA, 25 bp, Homo sapien
caaacgcggtatgtcctcacttata

SEQ ID NO: 160284 - DNA, 25 bp, Homo sapien
gggtgcactcggacctcagaattca

SEQ ID NO: 160285 - DNA, 25 bp, Homo sapien
aaccatcatggaggggtgtgagagg

SEQ ID NO: 160286 - DNA, 25 bp, Homo sapien
atctgtttccgagatttaaatttat

SEQ ID NO: 160287 - DNA, 25 bp, Homo sapien
tgtgagaggggtaaaactagggaca

SEQ ID NO: 160288 - DNA, 25 bp, Homo sapien
taaatatgaaccatcatggaggggt

SEQ ID NO: 160289 - DNA, 25 bp, Homo sapien
tattaaatatgaaccatcatggagg

SEQ ID NO: 160290 - DNA, 25 bp, Homo sapien
tatgaaccatcatggaggggtgtga

SEQ ID NO: 160291 - DNA, 25 bp, Homo sapien
tgtccctagttttacccctctcaca

SEQ ID NO: 160292 - DNA, 25 bp, Homo sapien
cctctcacacccctccatgatggtt

SEQ ID NO: 160293 - DNA, 25 bp, Homo sapien
ataaatttaaatctcggaaacagat

SEQ ID NO: 160294 - DNA, 25 bp, Homo sapien
cacccctccatgatggttcatattt

SEQ ID NO: 160295 - DNA, 25 bp, Homo sapien
tcacacccctccatgatggttcata

SEQ ID NO: 160296 - DNA, 25 bp, Homo sapien
cctccatgatggttcatatttaata

SEQ ID NO: 160297 - DNA, 25 bp, Homo sapien
catttgtttttgatagagacagggt

SEQ ID NO: 160298 - DNA, 25 bp, Homo sapien
caaaaagaaaatctgtttccgagat

SEQ ID NO: 160299 - DNA, 25 bp, Homo sapien
acacccggctgatttatttatttat

SEQ ID NO: 160300 - DNA, 25 bp, Homo sapien
tattaaatatgaaccatcatggagg

SEQ ID NO: 160301 - DNA, 25 bp, Homo sapien
tatgaaccatcatggaggggtgtga

SEQ ID NO: 160302 - DNA, 25 bp, Homo sapien
tccgagatttaaatttattctctag

SEQ ID NO: 160303 - DNA, 25 bp, Homo sapien
ctatagggaatatttggagagaaag

SEQ ID NO: 160304 - DNA, 25 bp, Homo sapien
aaagcttgattcagtggagaagcag

SEQ ID NO: 160305 - DNA, 25 bp, Homo sapien
caaagcttgattcagtggagaagca

SEQ ID NO: 160306 - DNA, 25 bp, Homo sapien
tggagagaaagttttgacaaaagtc

SEQ ID NO: 160307 - DNA, 25 bp, Homo sapien
gttttgacaaaagtccaaagcttga

SEQ ID NO: 160308 - DNA, 25 bp, Homo sapien
gagagaaagttttgacaaaagtcca

SEQ ID NO: 160309 - DNA, 25 bp, Homo sapien
ttctctccaaatattccctatagat

SEQ ID NO: 160310 - DNA, 25 bp, Homo sapien
tcaagctttggacttttgtcaaaac

SEQ ID NO: 160311 - DNA, 25 bp, Homo sapien
ctgcttctccactgaatcaagcttt

SEQ ID NO: 160312 - DNA, 25 bp, Homo sapien
gacttttgtcaaaactttctctcca

SEQ ID NO: 160313 - DNA, 25 bp, Homo sapien
gcttctccactgaatcaagctttgg

SEQ ID NO: 160314 - DNA, 25 bp, Homo sapien
gaatcaagctttggacttttgtcaa

SEQ ID NO: 160315 - DNA, 25 bp, Homo sapien
taagttaccaaaccaggaggctctc

SEQ ID NO: 160316 - DNA, 25 bp, Homo sapien
gaggctctctggacagtaatttcac

SEQ ID NO: 160317 - DNA, 25 bp, Homo sapien
tctctggacagtaatttcacctggg

SEQ ID NO: 160318 - DNA, 25 bp, Homo sapien
aagttaccaaaccaggaggctctct

SEQ ID NO: 160319 - DNA, 25 bp, Homo sapien
gctctctggacagtaatttcacctg

SEQ ID NO: 160320 - DNA, 25 bp, Homo sapien
agttaccaaaccaggaggctctctg

SEQ ID NO: 160321 - DNA, 25 bp, Homo sapien
gagagcctcctggtttggtaactta

SEQ ID NO: 160322 - DNA, 25 bp, Homo sapien
ccccaggtgaaattactgtccagag

SEQ ID NO: 160323 - DNA, 25 bp, Homo sapien
caggtgaaattactgtccagagagc

SEQ ID NO: 160324 - DNA, 25 bp, Homo sapien
cagagagcctcctggtttggtaact

SEQ ID NO: 160325 - DNA, 25 bp, Homo sapien
cccaggtgaaattactgtccagaga

SEQ ID NO: 160326 - DNA, 25 bp, Homo sapien
gtgaaattactgtccagagagcctc

SEQ ID NO: 160327 - DNA, 25 bp, Homo sapien
tgttcaccgcttctttttcataagg

SEQ ID NO: 160328 - DNA, 25 bp, Homo sapien
taaggcaccttcatcatcgcagcag

SEQ ID NO: 160329 - DNA, 25 bp, Homo sapien
tggaaatcttcccttgcctctcaca

SEQ ID NO: 160330 - DNA, 25 bp, Homo sapien
cattcgtgtcagtactaattggacc

SEQ ID NO: 160331 - DNA, 25 bp, Homo sapien
gcctctcacaaggagattcatctga

SEQ ID NO: 160332 - DNA, 25 bp, Homo sapien
tgatttaaaaggactcttctgtacc

SEQ ID NO: 160333 - DNA, 25 bp, Homo sapien
tatgaaaaagaagcggtgaacacag

SEQ ID NO: 160334 - DNA, 25 bp, Homo sapien
tgtgagaggcaagggaagatttcca

SEQ ID NO: 160335 - DNA, 25 bp, Homo sapien
tcagatgaatctccttgtgagaggc

SEQ ID NO: 160336 - DNA, 25 bp, Homo sapien
cagctgctgcgatgatgaaggtgcc

SEQ ID NO: 160337 - DNA, 25 bp, Homo sapien
ccaattagtactgacacgaatgatc

SEQ ID NO: 160338 - DNA, 25 bp, Homo sapien
tacacgaaatgggtccaattagtac

SEQ ID NO: 160339 - DNA, 25 bp, Homo sapien
caagaacaatagcttgccctcataa

SEQ ID NO: 160340 - DNA, 25 bp, Homo sapien
aagaacaatagcttgccctcataaa

SEQ ID NO: 160341 - DNA, 25 bp, Homo sapien
ccaagaacaatagcttgccctcata

SEQ ID NO: 160342 - DNA, 25 bp, Homo sapien
ttatgagggcaagctattgttcttg

SEQ ID NO: 160343 - DNA, 25 bp, Homo sapien
tatgagggcaagctattgttcttgg

SEQ ID NO: 160344 - DNA, 25 bp, Homo sapien
tttatgagggcaagctattgttctt

SEQ ID NO: 160345 - DNA, 25 bp, Homo sapien
actgttaaatgggatgactgcaggg

SEQ ID NO: 160346 - DNA, 25 bp, Homo sapien
ctgtgtgttgactctactgttagcg

SEQ ID NO: 160347 - DNA, 25 bp, Homo sapien
tgcagggagccgttgcttgattact

SEQ ID NO: 160348 - DNA, 25 bp, Homo sapien
agatcctgggttgtgtctcacctat

SEQ ID NO: 160349 - DNA, 25 bp, Homo sapien
tcacctattgacctttatgggaatg

SEQ ID NO: 160350 - DNA, 25 bp, Homo sapien
aacaagtccgtcttaagatcctggg

SEQ ID NO: 160351 - DNA, 25 bp, Homo sapien
agagagttataagaaatttgcactt

SEQ ID NO: 160352 - DNA, 25 bp, Homo sapien
gagagttataagaaatttgcacttt

SEQ ID NO: 160353 - DNA, 25 bp, Homo sapien
tagagagttataagaaatttgcact

SEQ ID NO: 160354 - DNA, 25 bp, Homo sapien
aagtgcaaatttcttataactctct

SEQ ID NO: 160355 - DNA, 25 bp, Homo sapien
agtgcaaatttcttataactctcta

SEQ ID NO: 160356 - DNA, 25 bp, Homo sapien
aaagtgcaaatttcttataactctc

SEQ ID NO: 160357 - DNA, 25 bp, Homo sapien
gaaaccgaagattctaattccttgc

SEQ ID NO: 160358 - DNA, 25 bp, Homo sapien
gctaacagtagagtcaacacacagt

SEQ ID NO: 160359 - DNA, 25 bp, Homo sapien
cattcccataaaggtcaataggtga

SEQ ID NO: 160360 - DNA, 25 bp, Homo sapien
caataggtgagacacaacccaggat

SEQ ID NO: 160361 - DNA, 25 bp, Homo sapien
cccaggatcttaagacggacttgtt

SEQ ID NO: 160362 - DNA, 25 bp, Homo sapien
gtaatcaagcaacggctccctgcag

SEQ ID NO: 160363 - DNA, 25 bp, Homo sapien
tgacagtccattgttgcagcacaga

SEQ ID NO: 160364 - DNA, 25 bp, Homo sapien
cagtaggcgatggagaatgacagtc

SEQ ID NO: 160365 - DNA, 25 bp, Homo sapien
cagaagaaattgttgaggacatgct

SEQ ID NO: 160366 - DNA, 25 bp, Homo sapien
cccgccctgcactggtatcaatttg

SEQ ID NO: 160367 - DNA, 25 bp, Homo sapien
caaaggtagtggtggactaccgtca

SEQ ID NO: 160368 - DNA, 25 bp, Homo sapien
ccagggtgttgggttctattcccag

SEQ ID NO: 160369 - DNA, 25 bp, Homo sapien
gagttaaaatgacggtagtccacca

SEQ ID NO: 160370 - DNA, 25 bp, Homo sapien
gactgtcattctccatcgcctactg

SEQ ID NO: 160371 - DNA, 25 bp, Homo sapien
caaattgataccagtgcagggcggg

SEQ ID NO: 160372 - DNA, 25 bp, Homo sapien
caaggaatggcaactacagaagaaa

SEQ ID NO: 160373 - DNA, 25 bp, Homo sapien
tctgtgctgcaacaatggactgtca

SEQ ID NO: 160374 - DNA, 25 bp, Homo sapien
ctgggaatagaacccaacaccctgg

SEQ ID NO: 160375 - DNA, 25 bp, Homo sapien
tcagggataactcggccatgagaaa

SEQ ID NO: 160376 - DNA, 25 bp, Homo sapien
tgttcagggataactcggccatgag

SEQ ID NO: 160377 - DNA, 25 bp, Homo sapien
gatgttcagggataactcggccatg

SEQ ID NO: 160378 - DNA, 25 bp, Homo sapien
cccacggtcccagagtccacgtctg

SEQ ID NO: 160379 - DNA, 25 bp, Homo sapien
caaagcttttgttgagagttcaaaa

SEQ ID NO: 160380 - DNA, 25 bp, Homo sapien
aagatgttcagggataactcggcca

SEQ ID NO: 160381 - DNA, 25 bp, Homo sapien
tttctcatggccgagttatccctga

SEQ ID NO: 160382 - DNA, 25 bp, Homo sapien
tggactctgggaccgtgggtgtgca

SEQ ID NO: 160383 - DNA, 25 bp, Homo sapien
tggccgagttatccctgaacatctt

SEQ ID NO: 160384 - DNA, 25 bp, Homo sapien
cagacgtggactctgggaccgtggg

SEQ ID NO: 160385 - DNA, 25 bp, Homo sapien
ttttgaactctcaacaaaagctttg

SEQ ID NO: 160386 - DNA, 25 bp, Homo sapien
tcatggccgagttatccctgaacat

SEQ ID NO: 160387 - DNA, 25 bp, Homo sapien
tttaaacagttcgtgagggctctcc

SEQ ID NO: 160388 - DNA, 25 bp, Homo sapien
caacctgcctgctgattctagacta

SEQ ID NO: 160389 - DNA, 25 bp, Homo sapien
tgttctctagcaaagcagtgagctc

SEQ ID NO: 160390 - DNA, 25 bp, Homo sapien
tggagtacactttatggcaggagga

SEQ ID NO: 160391 - DNA, 25 bp, Homo sapien
ctatatccacaaagttcacccaggg

SEQ ID NO: 160392 - DNA, 25 bp, Homo sapien
gcctgtctgaacactgcaagtgtag

SEQ ID NO: 160393 - DNA, 25 bp, Homo sapien
taaatgcaggctagagtcctagtgc

SEQ ID NO: 160394 - DNA, 25 bp, Homo sapien
ggagagccctcacgaactgtttaaa

SEQ ID NO: 160395 - DNA, 25 bp, Homo sapien
cagtaccacagagtatagacaagga

SEQ ID NO: 160396 - DNA, 25 bp, Homo sapien
tctagaatcagcaggcaggttggac

SEQ ID NO: 160397 - DNA, 25 bp, Homo sapien
gagctcactgctttgctagagaaca

SEQ ID NO: 160398 - DNA, 25 bp, Homo sapien
tacacttgcagtgttcagacaggca

SEQ ID NO: 160399 - DNA, 25 bp, Homo sapien
tcttaacacatgctaaggccaaaaa

SEQ ID NO: 160400 - DNA, 25 bp, Homo sapien
tgaaatctcacatcttaacacatgc

SEQ ID NO: 160401 - DNA, 25 bp, Homo sapien
caatttgcgcacacatgtgcgaatc

SEQ ID NO: 160402 - DNA, 25 bp, Homo sapien
aggctgtgggaaacgcttttcactg

SEQ ID NO: 160403 - DNA, 25 bp, Homo sapien
tgtgccccttcgatggttgtaataa

SEQ ID NO: 160404 - DNA, 25 bp, Homo sapien
tttgctcagtcaactaacctgaaat

SEQ ID NO: 160405 - DNA, 25 bp, Homo sapien
cagtgaaaagcgtttcccacagcct

SEQ ID NO: 160406 - DNA, 25 bp, Homo sapien
atttcaggttagttgactgagcaaa

SEQ ID NO: 160407 - DNA, 25 bp, Homo sapien
gattcgcacatgtgtgcgcaaattg

SEQ ID NO: 160408 - DNA, 25 bp, Homo sapien
acttcttattacaaccatcgaaggg

SEQ ID NO: 160409 - DNA, 25 bp, Homo sapien
gcatgtgttaagatgtgagatttca

SEQ ID NO: 160410 - DNA, 25 bp, Homo sapien
tttttggccttagcatgtgttaaga

SEQ ID NO: 160411 - DNA, 25 bp, Homo sapien
ctaagatgacattgctaagatgctc

SEQ ID NO: 160412 - DNA, 25 bp, Homo sapien
cagaaagtggtgctcagttgtagaa

SEQ ID NO: 160413 - DNA, 25 bp, Homo sapien
gaatcctacacacctaagggacatg

SEQ ID NO: 160414 - DNA, 25 bp, Homo sapien
caggaggacaattcatgaacttcgc

SEQ ID NO: 160415 - DNA, 25 bp, Homo sapien
tgtaaagtgtggtcccaacaggagg

SEQ ID NO: 160416 - DNA, 25 bp, Homo sapien
tctcgaccacgggaagcatcttcca

SEQ ID NO: 160417 - DNA, 25 bp, Homo sapien
catgtagtatcaaatattagatgtg

SEQ ID NO: 160418 - DNA, 25 bp, Homo sapien
tgtagtatcaaatattagatgtgat

SEQ ID NO: 160419 - DNA, 25 bp, Homo sapien
tcacatctaatatttgatactacat

SEQ ID NO: 160420 - DNA, 25 bp, Homo sapien
cacatctaatatttgatactacatg

SEQ ID NO: 160421 - DNA, 25 bp, Homo sapien
gaattgtcctcctgttgggaccaca

SEQ ID NO: 160422 - DNA, 25 bp, Homo sapien
taagcatatccccaaaaaagtgtac

SEQ ID NO: 160423 - DNA, 25 bp, Homo sapien
caaaggagaggcatatttattccca

SEQ ID NO: 160424 - DNA, 25 bp, Homo sapien
ggtacaatacattctacaactgagc

SEQ ID NO: 160425 - DNA, 25 bp, Homo sapien
tatcaaaacatgtcccttaggtgtg

SEQ ID NO: 160426 - DNA, 25 bp, Homo sapien
tggaagatgcttcccgtggtcgaga

SEQ ID NO: 160427 - DNA, 25 bp, Homo sapien
ttttgttgtccagaatacttataat

SEQ ID NO: 160428 - DNA, 25 bp, Homo sapien
tcttttgttgtccagaatacttata

SEQ ID NO: 160429 - DNA, 25 bp, Homo sapien
cttttgttgtccagaatacttataa

SEQ ID NO: 160430 - DNA, 25 bp, Homo sapien
tataagtattctggacaacaaaaga

SEQ ID NO: 160431 - DNA, 25 bp, Homo sapien
attataagtattctggacaacaaaa

SEQ ID NO: 160432 - DNA, 25 bp, Homo sapien
ttataagtattctggacaacaaaag

SEQ ID NO: 160433 - DNA, 25 bp, Homo sapien
tatggcagaacaagatctgtaagca

SEQ ID NO: 160434 - DNA, 25 bp, Homo sapien
tacttataattcttgagcctcccag

SEQ ID NO: 160435 - DNA, 25 bp, Homo sapien
tcttgagcctcccagaaattggaag

SEQ ID NO: 160436 - DNA, 25 bp, Homo sapien
cctcccagaaattggaagctaaata

SEQ ID NO: 160437 - DNA, 25 bp, Homo sapien
caagatctgtaagcacagtcttatt

SEQ ID NO: 160438 - DNA, 25 bp, Homo sapien
gctaaataaagcaactcaagtttcc

SEQ ID NO: 160439 - DNA, 25 bp, Homo sapien
tctgggaggctcaagaattataagt

SEQ ID NO: 160440 - DNA, 25 bp, Homo sapien
tagcttccaatttctgggaggctca

SEQ ID NO: 160441 - DNA, 25 bp, Homo sapien
tgcttacagatcttgttctgccata

SEQ ID NO: 160442 - DNA, 25 bp, Homo sapien
ggaaacttgagttgctttatttagc

SEQ ID NO: 160443 - DNA, 25 bp, Homo sapien
tataagtattctggacaacaaaaga

SEQ ID NO: 160444 - DNA, 25 bp, Homo sapien
gaaaataagactgtgcttacagatc

SEQ ID NO: 160445 - DNA, 25 bp, Homo sapien
tgagtgaagcatctgtaccaccgcg

SEQ ID NO: 160446 - DNA, 25 bp, Homo sapien
cagcaagagtaaggatcccagaggt

SEQ ID NO: 160447 - DNA, 25 bp, Homo sapien
caagtcacgtcaggcaagagagggc

SEQ ID NO: 160448 - DNA, 25 bp, Homo sapien
taagtgcaggcccttcagacaagtc

SEQ ID NO: 160449 - DNA, 25 bp, Homo sapien
taggtaacaggcatcccgagttcag

SEQ ID NO: 160450 - DNA, 25 bp, Homo sapien
gaatcatgcttacctgcacggcagc

SEQ ID NO: 160451 - DNA, 25 bp, Homo sapien
caaggcaggcatccatagaagacgc

SEQ ID NO: 160452 - DNA, 25 bp, Homo sapien
tcagtgtatccaggacaaagggccc

SEQ ID NO: 160453 - DNA, 25 bp, Homo sapien
taaaccatcttcaggcaaccagggc

SEQ ID NO: 160454 - DNA, 25 bp, Homo sapien
taacgtgtcaagtacatgctgccca

SEQ ID NO: 160455 - DNA, 25 bp, Homo sapien
agatgcttcactcacacttgccggg

SEQ ID NO: 160456 - DNA, 25 bp, Homo sapien
gaaacacggacaggtattgcgcaca

SEQ ID NO: 160457 - DNA, 25 bp, Homo sapien
agcttcgtcctggccgagcaggcac

SEQ ID NO: 160458 - DNA, 25 bp, Homo sapien
atgtcccccgccagcattctggatg

SEQ ID NO: 160459 - DNA, 25 bp, Homo sapien
cgccagcattctggatgtcagagga

SEQ ID NO: 160460 - DNA, 25 bp, Homo sapien
cccgccagcattctggatgtcagag

SEQ ID NO: 160461 - DNA, 25 bp, Homo sapien
ccgccagcattctggatgtcagagg

SEQ ID NO: 160462 - DNA, 25 bp, Homo sapien
ccccgccagcattctggatgtcaga

SEQ ID NO: 160463 - DNA, 25 bp, Homo sapien
gtgcctgctcggccaggacgaagct

SEQ ID NO: 160464 - DNA, 25 bp, Homo sapien
acatccagaatgctggcgggggaca

SEQ ID NO: 160465 - DNA, 25 bp, Homo sapien
catccagaatgctggcgggggacat

SEQ ID NO: 160466 - DNA, 25 bp, Homo sapien
ctctgacatccagaatgctggcggg

SEQ ID NO: 160467 - DNA, 25 bp, Homo sapien
cctctgacatccagaatgctggcgg

SEQ ID NO: 160468 - DNA, 25 bp, Homo sapien
tcctctgacatccagaatgctggcg

SEQ ID NO: 160469 - DNA, 25 bp, Homo sapien
gaaaggcatcagtaccaaacggaac

SEQ ID NO: 160470 - DNA, 25 bp, Homo sapien
tagtatttaaggcatccgcatccag

SEQ ID NO: 160471 - DNA, 25 bp, Homo sapien
tacccggacatgtgaggctctatta

SEQ ID NO: 160472 - DNA, 25 bp, Homo sapien
tgaccgcttttcatgagacacccag

SEQ ID NO: 160473 - DNA, 25 bp, Homo sapien
gctttctggtaacttctgtaggccc

SEQ ID NO: 160474 - DNA, 25 bp, Homo sapien
caatgtccgcacacatcacggaggg

SEQ ID NO: 160475 - DNA, 25 bp, Homo sapien
gacgaaatgctaagtccttgagcca

SEQ ID NO: 160476 - DNA, 25 bp, Homo sapien
ctgggtgtctcatgaaaagcggtca

SEQ ID NO: 160477 - DNA, 25 bp, Homo sapien
gcttcagatgaatgtgacgccatca

SEQ ID NO: 160478 - DNA, 25 bp, Homo sapien
gcctacagaagttaccagaaagcga

SEQ ID NO: 160479 - DNA, 25 bp, Homo sapien
tgctggatgcggatgccttaaatac

SEQ ID NO: 160480 - DNA, 25 bp, Homo sapien
taatagagcctcacatgtccgggta

SEQ ID NO: 160481 - DNA, 25 bp, Homo sapien
gggcttcatccctgtgaaggcacag

SEQ ID NO: 160482 - DNA, 25 bp, Homo sapien
tgaagacgacactgggctttgcaca

SEQ ID NO: 160483 - DNA, 25 bp, Homo sapien
tgcacagcctggtgtcgctgtacag

SEQ ID NO: 160484 - DNA, 25 bp, Homo sapien
cgctgtacagaaactgtcaagggaa

SEQ ID NO: 160485 - DNA, 25 bp, Homo sapien
tcagcagagaacagtatgggacccc

SEQ ID NO: 160486 - DNA, 25 bp, Homo sapien
gccagctgacggacaactgagtctc

SEQ ID NO: 160487 - DNA, 25 bp, Homo sapien
ggacatggccagctgacggacaact

SEQ ID NO: 160488 - DNA, 25 bp, Homo sapien
acaaagaagccaaaggtcagtccct

SEQ ID NO: 160489 - DNA, 25 bp, Homo sapien
tgcccacactgtagagtcacgaagc

SEQ ID NO: 160490 - DNA, 25 bp, Homo sapien
gctgcgagctgtggagtctatcaga

SEQ ID NO: 160491 - DNA, 25 bp, Homo sapien
tcagctgggtagttttggccgagaa

SEQ ID NO: 160492 - DNA, 25 bp, Homo sapien
tatgaaataaggaccctcatgccca

SEQ ID NO: 160493 - DNA, 25 bp, Homo sapien
agggctctcccttgctagcactccc

SEQ ID NO: 160494 - DNA, 25 bp, Homo sapien
gctttggccaagttgttaaacatct

SEQ ID NO: 160495 - DNA, 25 bp, Homo sapien
tcccaatgccgagataattgagtgt

SEQ ID NO: 160496 - DNA, 25 bp, Homo sapien
gggcagttgtcccaatgccgagata

SEQ ID NO: 160497 - DNA, 25 bp, Homo sapien
gctgcttttacaccaggccgggttg

SEQ ID NO: 160498 - DNA, 25 bp, Homo sapien
gatccacatgctgggttcatggcca

SEQ ID NO: 160499 - DNA, 25 bp, Homo sapien
tgtttccgtgtacagccccaggtgg

SEQ ID NO: 160500 - DNA, 25 bp, Homo sapien
tcatggccaagtccatcctgggctt

SEQ ID NO: 160501 - DNA, 25 bp, Homo sapien
caggcgtgcttgtgggacacccgtt

SEQ ID NO: 160502 - DNA, 25 bp, Homo sapien
tgggacacccgtttgacacggtcaa

SEQ ID NO: 160503 - DNA, 25 bp, Homo sapien
aggtgagtctcatcgctgctttttt

SEQ ID NO: 160504 - DNA, 25 bp, Homo sapien
tttcctcggcgcgtacattggagag

SEQ ID NO: 160505 - DNA, 25 bp, Homo sapien
gatgaccgcacagtcacaagctgtc

SEQ ID NO: 160506 - DNA, 25 bp, Homo sapien
agaaccaaggatgaccgcacagtca

SEQ ID NO: 160507 - DNA, 25 bp, Homo sapien
caaggatgaccgcacagtcacaagc

SEQ ID NO: 160508 - DNA, 25 bp, Homo sapien
aaccaaggatgaccgcacagtcaca

SEQ ID NO: 160509 - DNA, 25 bp, Homo sapien
tcccaacagaggcaagtggcgtaag

SEQ ID NO: 160510 - DNA, 25 bp, Homo sapien
cctgctggagggagaagtaaagtcc

SEQ ID NO: 160511 - DNA, 25 bp, Homo sapien
cagctggacctagcttcaagggaca

SEQ ID NO: 160512 - DNA, 25 bp, Homo sapien
cgtgaccatgcacccacaggaaggg

SEQ ID NO: 160513 - DNA, 25 bp, Homo sapien
tagcggtggccttaagtattaaatc

SEQ ID NO: 160514 - DNA, 25 bp, Homo sapien
gtattaaatctgtggcgtcggagcc

SEQ ID NO: 160515 - DNA, 25 bp, Homo sapien
gatttggctcgaataaaccctcagc

SEQ ID NO: 160516 - DNA, 25 bp, Homo sapien
agactcgttgaaaagggagtgtgtt

SEQ ID NO: 160517 - DNA, 25 bp, Homo sapien
ccctgaccgcgcctgcccgggctcc

SEQ ID NO: 160518 - DNA, 25 bp, Homo sapien
acgaggaggaaaggcggcctcgccg

SEQ ID NO: 160519 - DNA, 25 bp, Homo sapien
cgggctccgcgccaggaggagcggc

SEQ ID NO: 160520 - DNA, 25 bp, Homo sapien
gctccgcgccaggaggagcggccag

SEQ ID NO: 160521 - DNA, 25 bp, Homo sapien
gccggaggggatccagcgagtcagc

SEQ ID NO: 160522 - DNA, 25 bp, Homo sapien
gaccagcgcgggtctagctgctgcc

SEQ ID NO: 160523 - DNA, 25 bp, Homo sapien
tccagcgagtcagctgccgccgagg

SEQ ID NO: 160524 - DNA, 25 bp, Homo sapien
accagcgcgggtctagctgctgccg

SEQ ID NO: 160525 - DNA, 25 bp, Homo sapien
gggcgattcccgctcgcggagtttc

SEQ ID NO: 160526 - DNA, 25 bp, Homo sapien
agtctgcgggcctcggaacgtcccg

SEQ ID NO: 160527 - DNA, 25 bp, Homo sapien
gctccacggccgttttcgcggcagg

SEQ ID NO: 160528 - DNA, 25 bp, Homo sapien
gtttcgcaactagcggcgtcccagt

SEQ ID NO: 160529 - DNA, 25 bp, Homo sapien
ccccaacccatccagaccgttgaag

SEQ ID NO: 160530 - DNA, 25 bp, Homo sapien
aacccatccagaccgttgaagatgc

SEQ ID NO: 160531 - DNA, 25 bp, Homo sapien
ctgtttgggacctttgctagctggg

SEQ ID NO: 160532 - DNA, 25 bp, Homo sapien
tgttcctgggttttcagcagctgtt

SEQ ID NO: 160533 - DNA, 25 bp, Homo sapien
ctggcaggccagcaaggactgggaa

SEQ ID NO: 160534 - DNA, 25 bp, Homo sapien
caggccagcaaggactgggaagggc

SEQ ID NO: 160535 - DNA, 25 bp, Homo sapien
cggcctggacgtgcttggcagggag

SEQ ID NO: 160536 - DNA, 25 bp, Homo sapien
ggccagcaaggactgggaagggctt

SEQ ID NO: 160537 - DNA, 25 bp, Homo sapien
agccctttgtgccctgaccaggagg

SEQ ID NO: 160538 - DNA, 25 bp, Homo sapien
ggaggcgtccttagacctggagtcc

SEQ ID NO: 160539 - DNA, 25 bp, Homo sapien
aagggctgagaaggccacttgtcct

SEQ ID NO: 160540 - DNA, 25 bp, Homo sapien
gaccaggaggcgtccttagacctgg

SEQ ID NO: 160541 - DNA, 25 bp, Homo sapien
gcgcccgagcccacgctgtgcgcgg

SEQ ID NO: 160542 - DNA, 25 bp, Homo sapien
cgcccgagcccacgctgtgcgcggc

SEQ ID NO: 160543 - DNA, 25 bp, Homo sapien
ccgagcccacgctgtgcgcggcccg

SEQ ID NO: 160544 - DNA, 25 bp, Homo sapien
agcccacgctgtgcgcggcccgggc

SEQ ID NO: 160545 - DNA, 25 bp, Homo sapien
tatatggcctttgtcgtagtccgtg

SEQ ID NO: 160546 - DNA, 25 bp, Homo sapien
cccgggagttctggactgtagcgca

SEQ ID NO: 160547 - DNA, 25 bp, Homo sapien
gattgtccaatacactacagtcagc

SEQ ID NO: 160548 - DNA, 25 bp, Homo sapien
tagtccgtgataaaaaggagtagcc

SEQ ID NO: 160549 - DNA, 25 bp, Homo sapien
aacaaggtgtggcggggaggccctg

SEQ ID NO: 160550 - DNA, 25 bp, Homo sapien
gcctgagagggctttggtgccacca

SEQ ID NO: 160551 - DNA, 25 bp, Homo sapien
cctgcctgagagggctttggtgcca

SEQ ID NO: 160552 - DNA, 25 bp, Homo sapien
tctgcctgcctgagagggctttggt

SEQ ID NO: 160553 - DNA, 25 bp, Homo sapien
ctccgatggctccagcgacaaaatc

SEQ ID NO: 160554 - DNA, 25 bp, Homo sapien
cgtcctctgcccgccccttccagtc

SEQ ID NO: 160555 - DNA, 25 bp, Homo sapien
ccttccagtccctgctgcaggacca

SEQ ID NO: 160556 - DNA, 25 bp, Homo sapien
cagtccctgctgcaggaccaggccc

SEQ ID NO: 160557 - DNA, 25 bp, Homo sapien
ttccagtccctgctgcaggaccagg

SEQ ID NO: 160558 - DNA, 25 bp, Homo sapien
ggggttcgtgaagagccaggactgc

SEQ ID NO: 160559 - DNA, 25 bp, Homo sapien
cggggttcgtgaagagccaggactg

SEQ ID NO: 160560 - DNA, 25 bp, Homo sapien
accgtgtccagggggtagcccacag

SEQ ID NO: 160561 - DNA, 25 bp, Homo sapien
ttcaccgtgtccagggggtagccca

SEQ ID NO: 160562 - DNA, 25 bp, Homo sapien
ggggtagcccacagcaacaccgcag

SEQ ID NO: 160563 - DNA, 25 bp, Homo sapien
gggtagcccacagcaacaccgcaga

SEQ ID NO: 160564 - DNA, 25 bp, Homo sapien
gggcttcaggcacgagcggctccag

SEQ ID NO: 160565 - DNA, 25 bp, Homo sapien
ctgcaggagaagtgggcttcaggca

SEQ ID NO: 160566 - DNA, 25 bp, Homo sapien
ggagaagtgggcttcaggcacgagc

SEQ ID NO: 160567 - DNA, 25 bp, Homo sapien
gcttcaggcacgagcggctccaggc

SEQ ID NO: 160568 - DNA, 25 bp, Homo sapien
gcgctctcggtgatacgtatcccgg

SEQ ID NO: 160569 - DNA, 25 bp, Homo sapien
actttggctccgtctggatcctgac

SEQ ID NO: 160570 - DNA, 25 bp, Homo sapien
atcccggacgcagtgccagatgcct

SEQ ID NO: 160571 - DNA, 25 bp, Homo sapien
cctgtgtactttggctccgtctgga

SEQ ID NO: 160572 - DNA, 25 bp, Homo sapien
catcccgagagcgtgatgtcggcct

SEQ ID NO: 160573 - DNA, 25 bp, Homo sapien
ttgccgtaccggagccggcagatgt

SEQ ID NO: 160574 - DNA, 25 bp, Homo sapien
cggaagataccagggacaccgtgca

SEQ ID NO: 160575 - DNA, 25 bp, Homo sapien
cggtaggtgccaaaagacacggaag

SEQ ID NO: 160576 - DNA, 25 bp, Homo sapien
cagtggcccgcggtacttgggctct

SEQ ID NO: 160577 - DNA, 25 bp, Homo sapien
agctgcccttgtagaggccgcacag

SEQ ID NO: 160578 - DNA, 25 bp, Homo sapien
gcttctgcgcctgtgtctgcgtctg

SEQ ID NO: 160579 - DNA, 25 bp, Homo sapien
tctgcgtctgcaagcggactttggc

SEQ ID NO: 160580 - DNA, 25 bp, Homo sapien
cgcgtaggaaaggaagtaggtggca

SEQ ID NO: 160581 - DNA, 25 bp, Homo sapien
aggagtggccgtcccgtaagaccag

SEQ ID NO: 160582 - DNA, 25 bp, Homo sapien
ctgagccactcgcagaggaccgcgt

SEQ ID NO: 160583 - DNA, 25 bp, Homo sapien
tggcaaaggagtggccgtcccgtaa

SEQ ID NO: 160584 - DNA, 25 bp, Homo sapien
agttcaagcccccactcgggtactg

SEQ ID NO: 160585 - DNA, 25 bp, Homo sapien
gacacagcaagtctgtcctgactct

SEQ ID NO: 160586 - DNA, 25 bp, Homo sapien
gagaactgaggagcccactctggga

SEQ ID NO: 160587 - DNA, 25 bp, Homo sapien
ggcgggcagcacgacctcaccttga

SEQ ID NO: 160588 - DNA, 25 bp, Homo sapien
tgactgggagcctgatcggggcgcc

SEQ ID NO: 160589 - DNA, 25 bp, Homo sapien
tgggagcctgatcggggcgcccagg

SEQ ID NO: 160590 - DNA, 25 bp, Homo sapien
cgcaccctggactcacgcttccggc

SEQ ID NO: 160591 - DNA, 25 bp, Homo sapien
cttccggcccgtcctcatttgcaac

SEQ ID NO: 160592 - DNA, 25 bp, Homo sapien
gtctcgacttgatcacgtccatggg

SEQ ID NO: 160593 - DNA, 25 bp, Homo sapien
gcagcaattgagtaccagccccttg

SEQ ID NO: 160594 - DNA, 25 bp, Homo sapien
gaacgctggtcaccatacagtgcag

SEQ ID NO: 160595 - DNA, 25 bp, Homo sapien
cataggcgacgaagaccaccatgtt

SEQ ID NO: 160596 - DNA, 25 bp, Homo sapien
gctgggatgaacaaccgactccatg

SEQ ID NO: 160597 - DNA, 25 bp, Homo sapien
ggaagcccctgcctgtaagggacag

SEQ ID NO: 160598 - DNA, 25 bp, Homo sapien
tctttaagtggcaggtgcagcgtcc

SEQ ID NO: 160599 - DNA, 25 bp, Homo sapien
taagggacagctcgtgaagacacag

SEQ ID NO: 160600 - DNA, 25 bp, Homo sapien
tgtagtccactccagaaatcatgct

SEQ ID NO: 160601 - DNA, 25 bp, Homo sapien
gaggccctcacagatgtctaggcag

SEQ ID NO: 160602 - DNA, 25 bp, Homo sapien
cttagctagggagaaagtcgaggca

SEQ ID NO: 160603 - DNA, 25 bp, Homo sapien
catttcatcacgcagcatgtgcagg

SEQ ID NO: 160604 - DNA, 25 bp, Homo sapien
agaggttctgcagcccttgatcgca

SEQ ID NO: 160605 - DNA, 25 bp, Homo sapien
catggtcggatagagaagtccagct

SEQ ID NO: 160606 - DNA, 25 bp, Homo sapien
gaaagagttcatgactccccggaag

SEQ ID NO: 160607 - DNA, 25 bp, Homo sapien
gactccgagggttccaagtatactc

SEQ ID NO: 160608 - DNA, 25 bp, Homo sapien
tacagggtggattattatgcgggca

SEQ ID NO: 160609 - DNA, 25 bp, Homo sapien
tatgcgggcatgaactattttaagt

SEQ ID NO: 160610 - DNA, 25 bp, Homo sapien
ttaggagccacccaaaacagtcttg

SEQ ID NO: 160611 - DNA, 25 bp, Homo sapien
aaactgagtagactcgccctcatgg

SEQ ID NO: 160612 - DNA, 25 bp, Homo sapien
tcccaggtttcagttcaatcagtgc

SEQ ID NO: 160613 - DNA, 25 bp, Homo sapien
tattctcctgtgtctccgaggatgg

SEQ ID NO: 160614 - DNA, 25 bp, Homo sapien
ctttcccgggtccagaatctgacag

SEQ ID NO: 160615 - DNA, 25 bp, Homo sapien
tctgacgcttgttacctgaggaact

SEQ ID NO: 160616 - DNA, 25 bp, Homo sapien
ataaccctaacagcctccacggatg

SEQ ID NO: 160617 - DNA, 25 bp, Homo sapien
ggtggtgacgccagcacatcttgaa

SEQ ID NO: 160618 - DNA, 25 bp, Homo sapien
tctgctgtgtgcctaccgtgggaaa

SEQ ID NO: 160619 - DNA, 25 bp, Homo sapien
gagacatcactacagaggtcattgg

SEQ ID NO: 160620 - DNA, 25 bp, Homo sapien
tagctggctgtgtccattcggcatc

SEQ ID NO: 160621 - DNA, 25 bp, Homo sapien
aaatcaaaatagtagcacagtgctg

SEQ ID NO: 160622 - DNA, 25 bp, Homo sapien
ttccatcatcttagttgctggcagc

SEQ ID NO: 160623 - DNA, 25 bp, Homo sapien
ttcggcatcatttcctgtcacacag

SEQ ID NO: 160624 - DNA, 25 bp, Homo sapien
tctgtcttccgttgtctgtaatcta

SEQ ID NO: 160625 - DNA, 25 bp, Homo sapien
cgttgtctgtaatctagaagttcca

SEQ ID NO: 160626 - DNA, 25 bp, Homo sapien
cttcaagcttcattgtggccccacg

SEQ ID NO: 160627 - DNA, 25 bp, Homo sapien
ttcaagcttcattgtggccccacgg

SEQ ID NO: 160628 - DNA, 25 bp, Homo sapien
cagtgatgcttcttatctttattca

SEQ ID NO: 160629 - DNA, 25 bp, Homo sapien
gtgatgcttcttatctttattcagg

SEQ ID NO: 160630 - DNA, 25 bp, Homo sapien
atgcttcttatctttattcagggac

SEQ ID NO: 160631 - DNA, 25 bp, Homo sapien
gatgcttcttatctttattcaggga

SEQ ID NO: 160632 - DNA, 25 bp, Homo sapien
ggatccgtagcttgcctctcagcac

SEQ ID NO: 160633 - DNA, 25 bp, Homo sapien
gctcccatagggaacagagatcctg

SEQ ID NO: 160634 - DNA, 25 bp, Homo sapien
caaagttcaggtgattcactgctcc

SEQ ID NO: 160635 - DNA, 25 bp, Homo sapien
ctggctgagcagtcgcgggcttgga

SEQ ID NO: 160636 - DNA, 25 bp, Homo sapien
ttgcgtagtgttgcacttagtcccc

SEQ ID NO: 160637 - DNA, 25 bp, Homo sapien
tcgcttttcccgaggagagaggccc

SEQ ID NO: 160638 - DNA, 25 bp, Homo sapien
gcacttagtcccctcaacggtaatg

SEQ ID NO: 160639 - DNA, 25 bp, Homo sapien
gttagcaggcttctccatgcccatt

SEQ ID NO: 160640 - DNA, 25 bp, Homo sapien
ggagtatccttagagcccggcttgc

SEQ ID NO: 160641 - DNA, 25 bp, Homo sapien
tggccctcccgggagtatccttaga

SEQ ID NO: 160642 - DNA, 25 bp, Homo sapien
ccgccgcgttctggcactgtgaggc

SEQ ID NO: 160643 - DNA, 25 bp, Homo sapien
agtgatggagggacgctggcgcggc

SEQ ID NO: 160644 - DNA, 25 bp, Homo sapien
ggcgtttccacggacgcccaggaga

SEQ ID NO: 160645 - DNA, 25 bp, Homo sapien
atccagtcacgttccgacgcgacgc

SEQ ID NO: 160646 - DNA, 25 bp, Homo sapien
aacagccaatgacggcgccgtcggg

SEQ ID NO: 160647 - DNA, 25 bp, Homo sapien
gccagccaatcagtggcggcctctg

SEQ ID NO: 160648 - DNA, 25 bp, Homo sapien
ggttctcccggaggcagaccggcca

SEQ ID NO: 160649 - DNA, 25 bp, Homo sapien
ggaggcagaccggccagcacactac

SEQ ID NO: 160650 - DNA, 25 bp, Homo sapien
tcggttctcccggaggcagaccggc

SEQ ID NO: 160651 - DNA, 25 bp, Homo sapien
cgctcggttctcccggaggcagacc

SEQ ID NO: 160652 - DNA, 25 bp, Homo sapien
tgaaaggaaggcgagcggctatgag

SEQ ID NO: 160653 - DNA, 25 bp, Homo sapien
taagaagtaaggttggtccaaggca

SEQ ID NO: 160654 - DNA, 25 bp, Homo sapien
atgagagaccgcgttaagcggcacg

SEQ ID NO: 160655 - DNA, 25 bp, Homo sapien
gctgagctgtcaatagtaagaagta

SEQ ID NO: 160656 - DNA, 25 bp, Homo sapien
ccaccaccagggtgcccgtgctccc

SEQ ID NO: 160657 - DNA, 25 bp, Homo sapien
ttcccaccaccagggtgcccgtgct

SEQ ID NO: 160658 - DNA, 25 bp, Homo sapien
gattcccaccaccagggtgcccgtg

SEQ ID NO: 160659 - DNA, 25 bp, Homo sapien
catgcacccagattcccaccaccag

SEQ ID NO: 160660 - DNA, 25 bp, Homo sapien
cagcctccgagtccgaatcatcata

SEQ ID NO: 160661 - DNA, 25 bp, Homo sapien
gcctccgagtccgaatcatcatacg

SEQ ID NO: 160662 - DNA, 25 bp, Homo sapien
aagtgtctttctgctggccggtagc

SEQ ID NO: 160663 - DNA, 25 bp, Homo sapien
cagaagtgtctttctgctggccggt

SEQ ID NO: 160664 - DNA, 25 bp, Homo sapien
tacttgcttaaagcgggcagctgcc

SEQ ID NO: 160665 - DNA, 25 bp, Homo sapien
tgagccaatggaaggcgatagcccc

SEQ ID NO: 160666 - DNA, 25 bp, Homo sapien
cagatgcaaaatcctgcccaggtgg

SEQ ID NO: 160667 - DNA, 25 bp, Homo sapien
gaacatggctcgtccacagagaaga

SEQ ID NO: 160668 - DNA, 25 bp, Homo sapien
gctgaataaactcagacactcccgg

SEQ ID NO: 160669 - DNA, 25 bp, Homo sapien
gcctctcaggtggaaaagcactttc

SEQ ID NO: 160670 - DNA, 25 bp, Homo sapien
gaaaggactggacaccactgaatgg

SEQ ID NO: 160671 - DNA, 25 bp, Homo sapien
tcttctgggagtatagggtaccaca

SEQ ID NO: 160672 - DNA, 25 bp, Homo sapien
ctcacggcctccgagagggataaga

SEQ ID NO: 160673 - DNA, 25 bp, Homo sapien
tcacggcctccgagagggataagaa

SEQ ID NO: 160674 - DNA, 25 bp, Homo sapien
cacggcctccgagagggataagaaa

SEQ ID NO: 160675 - DNA, 25 bp, Homo sapien
tccacagggtcaccgaggatgtccc

SEQ ID NO: 160676 - DNA, 25 bp, Homo sapien
agggtcaccgaggatgtccccagtc

SEQ ID NO: 160677 - DNA, 25 bp, Homo sapien
tgctccacagggtcaccgaggatgt

SEQ ID NO: 160678 - DNA, 25 bp, Homo sapien
acagggtcaccgaggatgtccccag

SEQ ID NO: 160679 - DNA, 25 bp, Homo sapien
cccaacagcccttgaaaccagcaca

SEQ ID NO: 160680 - DNA, 25 bp, Homo sapien
aacagcccttgaaaccagcacagca

SEQ ID NO: 160681 - DNA, 25 bp, Homo sapien
gcccttgaaaccagcacagcaccag

SEQ ID NO: 160682 - DNA, 25 bp, Homo sapien
agcccttgaaaccagcacagcacca

SEQ ID NO: 160683 - DNA, 25 bp, Homo sapien
aagggccaccacttgaactccaggg

SEQ ID NO: 160684 - DNA, 25 bp, Homo sapien
acaagggccaccacttgaactccag

SEQ ID NO: 160685 - DNA, 25 bp, Homo sapien
agaggtgagcgggcaggtaaaagaa

SEQ ID NO: 160686 - DNA, 25 bp, Homo sapien
gaggtgagcgggcaggtaaaagaag

SEQ ID NO: 160687 - DNA, 25 bp, Homo sapien
tccccccagtatatgaggggtccgc

SEQ ID NO: 160688 - DNA, 25 bp, Homo sapien
tctgtcccccggcttgctccactcc

SEQ ID NO: 160689 - DNA, 25 bp, Homo sapien
tccactccccccagtatatgagggg

SEQ ID NO: 160690 - DNA, 25 bp, Homo sapien
cccagtatatgaggggtccgcatga

SEQ ID NO: 160691 - DNA, 25 bp, Homo sapien
cagtattccacgtagaagatcaagg

SEQ ID NO: 160692 - DNA, 25 bp, Homo sapien
tccacgtagaagatcaaggtacgct

SEQ ID NO: 160693 - DNA, 25 bp, Homo sapien
tcagccagtatcacagtattccacg

SEQ ID NO: 160694 - DNA, 25 bp, Homo sapien
gatcaaggtacgctgtcctctgcca

SEQ ID NO: 160695 - DNA, 25 bp, Homo sapien
ctctgtatggccctcgttctatggg

SEQ ID NO: 160696 - DNA, 25 bp, Homo sapien
cagagggtgccgctcatctctgtat

SEQ ID NO: 160697 - DNA, 25 bp, Homo sapien
gggtgccgctcatctctgtatggcc

SEQ ID NO: 160698 - DNA, 25 bp, Homo sapien
cgctcatctctgtatggccctcgtt

SEQ ID NO: 160699 - DNA, 25 bp, Homo sapien
cacattcatcatggtggcgcagggc

SEQ ID NO: 160700 - DNA, 25 bp, Homo sapien
gacccactgacgagaattgaaactg

SEQ ID NO: 160701 - DNA, 25 bp, Homo sapien
aaatcatgaatagccagcgtcagtg

SEQ ID NO: 160702 - DNA, 25 bp, Homo sapien
tgaggaagctgtggcgtacccatgc

SEQ ID NO: 160703 - DNA, 25 bp, Homo sapien
gtacaagtatcctcttccgaccgag

SEQ ID NO: 160704 - DNA, 25 bp, Homo sapien
tcttccgaccgagaagctgaaaagc

SEQ ID NO: 160705 - DNA, 25 bp, Homo sapien
caatatacgcactgtacaagtatcc

SEQ ID NO: 160706 - DNA, 25 bp, Homo sapien
cgacaatatacgcactgtacaagta

SEQ ID NO: 160707 - DNA, 25 bp, Homo sapien
gaagcatccggaaagcagaacagag

SEQ ID NO: 160708 - DNA, 25 bp, Homo sapien
tgggcttctgtttccgtggcaacag

SEQ ID NO: 160709 - DNA, 25 bp, Homo sapien
gaaatcaatattatctgcgtcatca

SEQ ID NO: 160710 - DNA, 25 bp, Homo sapien
tatctgcgtcatcatcgttagaagc

SEQ ID NO: 160711 - DNA, 25 bp, Homo sapien
atttactatgctaatttcaaacctt

SEQ ID NO: 160712 - DNA, 25 bp, Homo sapien
gatttactatgctaatttcaaacct

SEQ ID NO: 160713 - DNA, 25 bp, Homo sapien
tgctaatgccagttgtaccccagga

SEQ ID NO: 160714 - DNA, 25 bp, Homo sapien
aaaatcacatccaagccctcaaatt

SEQ ID NO: 160715 - DNA, 25 bp, Homo sapien
ccaggaggtgcaccaaggagaatgt

SEQ ID NO: 160716 - DNA, 25 bp, Homo sapien
gaatgtaactgagcccctccaaagt

SEQ ID NO: 160717 - DNA, 25 bp, Homo sapien
aacaccagaggggtgtgcgctctgc

SEQ ID NO: 160718 - DNA, 25 bp, Homo sapien
gaggggtgtgcgctctgcctcccat

SEQ ID NO: 160719 - DNA, 25 bp, Homo sapien
aggaacaccagaggggtgtgcgctc

SEQ ID NO: 160720 - DNA, 25 bp, Homo sapien
ccagaggggtgtgcgctctgcctcc

SEQ ID NO: 160721 - DNA, 25 bp, Homo sapien
tgcacacatgtgacaggccgaagtt

SEQ ID NO: 160722 - DNA, 25 bp, Homo sapien
cttgatcaactcacaatctgggctc

SEQ ID NO: 160723 - DNA, 25 bp, Homo sapien
ctgcacacatgtgacaggccgaagt

SEQ ID NO: 160724 - DNA, 25 bp, Homo sapien
gatcaactcacaatctgggctccca

SEQ ID NO: 160725 - DNA, 25 bp, Homo sapien
gaaggaagaagggaatgaaaggaga

SEQ ID NO: 160726 - DNA, 25 bp, Homo sapien
tgaaaggagaaggggggcctagcca

SEQ ID NO: 160727 - DNA, 25 bp, Homo sapien
gtcttctgggctcaactcgctcaac

SEQ ID NO: 160728 - DNA, 25 bp, Homo sapien
ttaagatgttaaccgcaggctcagc

SEQ ID NO: 160729 - DNA, 25 bp, Homo sapien
tggaaggacttcagcgacctttgtc

SEQ ID NO: 160730 - DNA, 25 bp, Homo sapien
aggctcagcccaggcattgatcttc

SEQ ID NO: 160731 - DNA, 25 bp, Homo sapien
tgggaagatggatagggctttgaat

SEQ ID NO: 160732 - DNA, 25 bp, Homo sapien
ggaagatggatagggctttgaatta

SEQ ID NO: 160733 - DNA, 25 bp, Homo sapien
gatggatagggctttgaattaaaag

SEQ ID NO: 160734 - DNA, 25 bp, Homo sapien
agttgggaagatggatagggctttg

SEQ ID NO: 160735 - DNA, 25 bp, Homo sapien
tggaaacgcaccggcttcccacaag

SEQ ID NO: 160736 - DNA, 25 bp, Homo sapien
tgatctgcatgccataagaagcctc

SEQ ID NO: 160737 - DNA, 25 bp, Homo sapien
cttccttgatctgcatgccataaga

SEQ ID NO: 160738 - DNA, 25 bp, Homo sapien
gcatgccataagaagcctccagcag

SEQ ID NO: 160739 - DNA, 25 bp, Homo sapien
aggtctgcgtactcttctggcgtca

SEQ ID NO: 160740 - DNA, 25 bp, Homo sapien
gcaaattgctttcggcccttcagag

SEQ ID NO: 160741 - DNA, 25 bp, Homo sapien
tgagtcctatgcctgcctgcgtaaa

SEQ ID NO: 160742 - DNA, 25 bp, Homo sapien
caaacacttgcgtggctctcagctg

SEQ ID NO: 160743 - DNA, 25 bp, Homo sapien
caaacgtttcctcagatgggaaaag

SEQ ID NO: 160744 - DNA, 25 bp, Homo sapien
cacagaattctagacgggtcagtgc

SEQ ID NO: 160745 - DNA, 25 bp, Homo sapien
gtgccaacgcttcggtcggagcaca

SEQ ID NO: 160746 - DNA, 25 bp, Homo sapien
aaaagtgaccttgcgtgaatgctcc

SEQ ID NO: 160747 - DNA, 25 bp, Homo sapien
cactgcctgtaggcagagggggacc

SEQ ID NO: 160748 - DNA, 25 bp, Homo sapien
gacccaagataggctgaggcacagc

SEQ ID NO: 160749 - DNA, 25 bp, Homo sapien
gggacccaagataggctgaggcaca

SEQ ID NO: 160750 - DNA, 25 bp, Homo sapien
ctcactgcctgtaggcagaggggga

SEQ ID NO: 160751 - DNA, 25 bp, Homo sapien
ctggcaaggccccagtactctcctg

SEQ ID NO: 160752 - DNA, 25 bp, Homo sapien
gctctcagcagagcacctccgaggg

SEQ ID NO: 160753 - DNA, 25 bp, Homo sapien
tagcaggtcggcatcaacagggacc

SEQ ID NO: 160754 - DNA, 25 bp, Homo sapien
cctccgagggataagaccagggaag

SEQ ID NO: 160755 - DNA, 25 bp, Homo sapien
gggacaaaacacaaagtgccaaatg

SEQ ID NO: 160756 - DNA, 25 bp, Homo sapien
caaacgagtatctacggcacagtgg

SEQ ID NO: 160757 - DNA, 25 bp, Homo sapien
agcactttgagcacggagtcaggac

SEQ ID NO: 160758 - DNA, 25 bp, Homo sapien
tctgcagcctagatcaaaacccggg

SEQ ID NO: 160759 - DNA, 25 bp, Homo sapien
tcccaggtttgccagctgaatgatc

SEQ ID NO: 160760 - DNA, 25 bp, Homo sapien
ccaggtttgccagctgaatgatcgt

SEQ ID NO: 160761 - DNA, 25 bp, Homo sapien
tgagcatggggcaaaacctcctctg

SEQ ID NO: 160762 - DNA, 25 bp, Homo sapien
gaatgatcgtgagcatggggcaaaa

SEQ ID NO: 160763 - DNA, 25 bp, Homo sapien
gcaacagcagcttcgtcaccgaggc

SEQ ID NO: 160764 - DNA, 25 bp, Homo sapien
tgtgatgcacaggagtccgggggct

SEQ ID NO: 160765 - DNA, 25 bp, Homo sapien
agctctgtgatgcacaggagtccgg

SEQ ID NO: 160766 - DNA, 25 bp, Homo sapien
agcaacagcagcttcgtcaccgagg

SEQ ID NO: 160767 - DNA, 25 bp, Homo sapien
tgtaccaggctgaactgcacaacgc

SEQ ID NO: 160768 - DNA, 25 bp, Homo sapien
tgcacaacgccacacaaaatgccat

SEQ ID NO: 160769 - DNA, 25 bp, Homo sapien
tgaactgcacaacgccacacaaaat

SEQ ID NO: 160770 - DNA, 25 bp, Homo sapien
tgggcgggccgtgctgtaccaggct

SEQ ID NO: 160771 - DNA, 25 bp, Homo sapien
ctgagaattgctgctctggctctcc

SEQ ID NO: 160772 - DNA, 25 bp, Homo sapien
gtgataagcacactctccctgtaag

SEQ ID NO: 160773 - DNA, 25 bp, Homo sapien
ccatccaggagcagtgtgataagca

SEQ ID NO: 160774 - DNA, 25 bp, Homo sapien
tcagcagagggctagccacaaaaca

SEQ ID NO: 160775 - DNA, 25 bp, Homo sapien
tccaaaagaagagctcaagcatggc

SEQ ID NO: 160776 - DNA, 25 bp, Homo sapien
agctccctctgaccgccaatttcct

SEQ ID NO: 160777 - DNA, 25 bp, Homo sapien
cttcgaagtagcaaaatttccatca

SEQ ID NO: 160778 - DNA, 25 bp, Homo sapien
agcaccagtgaggcttcagctccct

SEQ ID NO: 160779 - DNA, 25 bp, Homo sapien
tccatcagcaccagtgaggcttcag

SEQ ID NO: 160780 - DNA, 25 bp, Homo sapien
accaccctgggcaacgggtaagatg

SEQ ID NO: 160781 - DNA, 25 bp, Homo sapien
ctggggcccaggtgtcaccaccctg

SEQ ID NO: 160782 - DNA, 25 bp, Homo sapien
tgtcaccaccctgggcaacgggtaa

SEQ ID NO: 160783 - DNA, 25 bp, Homo sapien
tggggcccaggtgtcaccaccctgg

SEQ ID NO: 160784 - DNA, 25 bp, Homo sapien
gcaacagcaagaacagcagcagcat

SEQ ID NO: 160785 - DNA, 25 bp, Homo sapien
tttgcagcaacagcaagaacagcag

SEQ ID NO: 160786 - DNA, 25 bp, Homo sapien
atttgcagcaacagcaagaacagca

SEQ ID NO: 160787 - DNA, 25 bp, Homo sapien
gcagcaacagcaagaacagcagcag

SEQ ID NO: 160788 - DNA, 25 bp, Homo sapien
tccagctgctgtggttaccccaaac

SEQ ID NO: 160789 - DNA, 25 bp, Homo sapien
cttctttggagggtagacgtctgtc

SEQ ID NO: 160790 - DNA, 25 bp, Homo sapien
gtttcccttgcggtgtgcagcagca

SEQ ID NO: 160791 - DNA, 25 bp, Homo sapien
tctggcacagactggagcctatgct

SEQ ID NO: 160792 - DNA, 25 bp, Homo sapien
tgtcacaacaagggcctgatctcca

SEQ ID NO: 160793 - DNA, 25 bp, Homo sapien
gtcacaacaagggcctgatctccag

SEQ ID NO: 160794 - DNA, 25 bp, Homo sapien
tgcagggagtaggtctgcaggcagt

SEQ ID NO: 160795 - DNA, 25 bp, Homo sapien
gtctgttaggtgcagcgcgaagtca

SEQ ID NO: 160796 - DNA, 25 bp, Homo sapien
taggtgcagcgcgaagtcaaagcca

SEQ ID NO: 160797 - DNA, 25 bp, Homo sapien
tgcccggagtccacggcgttccata

SEQ ID NO: 160798 - DNA, 25 bp, Homo sapien
gggcctctggatgatgatcgaaaag

SEQ ID NO: 160799 - DNA, 25 bp, Homo sapien
tctggatgatgatcgaaaagtggcc

SEQ ID NO: 160800 - DNA, 25 bp, Homo sapien
tgatcgaaaagtggccccatgtggg

SEQ ID NO: 160801 - DNA, 25 bp, Homo sapien
tgatgatcgaaaagtggccccatgt

SEQ ID NO: 160802 - DNA, 25 bp, Homo sapien
aagtgggcaagaaagtaggcggctg

SEQ ID NO: 160803 - DNA, 25 bp, Homo sapien
agtgggcaagaaagtaggcggctgc

SEQ ID NO: 160804 - DNA, 25 bp, Homo sapien
gtgggcaagaaagtaggcggctgct

SEQ ID NO: 160805 - DNA, 25 bp, Homo sapien
ctaacaagggcaccaaactgtgatg

SEQ ID NO: 160806 - DNA, 25 bp, Homo sapien
taacaagggcaccaaactgtgatgc

SEQ ID NO: 160807 - DNA, 25 bp, Homo sapien
gccagttattcgtgacctttgcttc

SEQ ID NO: 160808 - DNA, 25 bp, Homo sapien
catccacagactcatgaacatgtag

SEQ ID NO: 160809 - DNA, 25 bp, Homo sapien
ccacagactcatgaacatgtaggaa

SEQ ID NO: 160810 - DNA, 25 bp, Homo sapien
ttgcatcgccgccagttattcgtga

SEQ ID NO: 160811 - DNA, 25 bp, Homo sapien
tcaagaactggctgctttaggccat

SEQ ID NO: 160812 - DNA, 25 bp, Homo sapien
tggagaagggactgtaaacaacacc

SEQ ID NO: 160813 - DNA, 25 bp, Homo sapien
ggttttctgcctgatgggatgctga

SEQ ID NO: 160814 - DNA, 25 bp, Homo sapien
tttaggccatccaacccgtatggag

SEQ ID NO: 160815 - DNA, 25 bp, Homo sapien
cactgttcccaggttaagggtgaag

SEQ ID NO: 160816 - DNA, 25 bp, Homo sapien
taatggctcctgcaactaatcaggt

SEQ ID NO: 160817 - DNA, 25 bp, Homo sapien
ttttatccaccatcgaagcaaagga

SEQ ID NO: 160818 - DNA, 25 bp, Homo sapien
cagagccacgagagcctttgcaaag

SEQ ID NO: 160819 - DNA, 25 bp, Homo sapien
aatggggagggtgcatgccaggtgc

SEQ ID NO: 160820 - DNA, 25 bp, Homo sapien
tggcaatggggagggtgcatgccag

SEQ ID NO: 160821 - DNA, 25 bp, Homo sapien
gcaatggggagggtgcatgccaggt

SEQ ID NO: 160822 - DNA, 25 bp, Homo sapien
ctggcaatggggagggtgcatgcca

SEQ ID NO: 160823 - DNA, 25 bp, Homo sapien
gcctttttcagcttcaattccactt

SEQ ID NO: 160824 - DNA, 25 bp, Homo sapien
tggtggccccttcagcagagctgac

SEQ ID NO: 160825 - DNA, 25 bp, Homo sapien
ttcagcttcaattccacttttgcag

SEQ ID NO: 160826 - DNA, 25 bp, Homo sapien
ggtttagctgacaactgcaccagtc

SEQ ID NO: 160827 - DNA, 25 bp, Homo sapien
tatatggtattctatcagacttggt

SEQ ID NO: 160828 - DNA, 25 bp, Homo sapien
atggtattctatcagacttggtttc

SEQ ID NO: 160829 - DNA, 25 bp, Homo sapien
atatggtattctatcagacttggtt

SEQ ID NO: 160830 - DNA, 25 bp, Homo sapien
tatggtattctatcagacttggttt

SEQ ID NO: 160831 - DNA, 25 bp, Homo sapien
tgtattataggatataaaaactaac

SEQ ID NO: 160832 - DNA, 25 bp, Homo sapien
gctttgtattataggatataaaaac

SEQ ID NO: 160833 - DNA, 25 bp, Homo sapien
ctttgtattataggatataaaaact

SEQ ID NO: 160834 - DNA, 25 bp, Homo sapien
atgctttgtattataggatataaaa

SEQ ID NO: 160835 - DNA, 25 bp, Homo sapien
aggaagaaccttgactgccttgtac

SEQ ID NO: 160836 - DNA, 25 bp, Homo sapien
ggaggcttcgctcagaggtgccaca

SEQ ID NO: 160837 - DNA, 25 bp, Homo sapien
aagaaccttgactgccttgtacccg

SEQ ID NO: 160838 - DNA, 25 bp, Homo sapien
gactgccttgtacccgtagaaactc

SEQ ID NO: 160839 - DNA, 25 bp, Homo sapien
tgattctaaagtcacttcgaccact

SEQ ID NO: 160840 - DNA, 25 bp, Homo sapien
cagtccttatatcccaagctttcat

SEQ ID NO: 160841 - DNA, 25 bp, Homo sapien
gccagtccttatatcccaagctttc

SEQ ID NO: 160842 - DNA, 25 bp, Homo sapien
cttcgaccactaaatagctgggttc

SEQ ID NO: 160843 - DNA, 25 bp, Homo sapien
aaagggtcttccggtgccagccagt

SEQ ID NO: 160844 - DNA, 25 bp, Homo sapien
tcaggaaagggtcttccggtgccag

SEQ ID NO: 160845 - DNA, 25 bp, Homo sapien
ggaaagggtcttccggtgccagcca

SEQ ID NO: 160846 - DNA, 25 bp, Homo sapien
caggaaagggtcttccggtgccagc

SEQ ID NO: 160847 - DNA, 25 bp, Homo sapien
cacactgctagagggcccagtacag

SEQ ID NO: 160848 - DNA, 25 bp, Homo sapien
ttggaacattccccacactgctaga

SEQ ID NO: 160849 - DNA, 25 bp, Homo sapien
gctgagtccgtgtcacaggcttctc

SEQ ID NO: 160850 - DNA, 25 bp, Homo sapien
gcccagtacagctgagtccgtgtca

SEQ ID NO: 160851 - DNA, 25 bp, Homo sapien
gaatcctctaaactaggaagacacc

SEQ ID NO: 160852 - DNA, 25 bp, Homo sapien
taaagctgctgcagaggtttctggc

SEQ ID NO: 160853 - DNA, 25 bp, Homo sapien
cagcagcagggcaagagacatttcc

SEQ ID NO: 160854 - DNA, 25 bp, Homo sapien
aggtttctggctgggccaccaactg

SEQ ID NO: 160855 - DNA, 25 bp, Homo sapien
gagccacttcaccctcctcgggtcc

SEQ ID NO: 160856 - DNA, 25 bp, Homo sapien
catctgtccagaacccaaccccgct

SEQ ID NO: 160857 - DNA, 25 bp, Homo sapien
cgctctgccaacgggaatccagcag

SEQ ID NO: 160858 - DNA, 25 bp, Homo sapien
caaccccgctctgccaacgggaatc

SEQ ID NO: 160859 - DNA, 25 bp, Homo sapien
ctgtccagaacccaaccccgctctg

SEQ ID NO: 160860 - DNA, 25 bp, Homo sapien
catacaatagggatgagccttggaa

SEQ ID NO: 160861 - DNA, 25 bp, Homo sapien
aagcagcagcagactcacaagctcc

SEQ ID NO: 160862 - DNA, 25 bp, Homo sapien
tgttcatgaacgttctcagcagctt

SEQ ID NO: 160863 - DNA, 25 bp, Homo sapien
acaactcaaaacgtccatccacagg

SEQ ID NO: 160864 - DNA, 25 bp, Homo sapien
catggaagcgcagcaaggtctcaag

SEQ ID NO: 160865 - DNA, 25 bp, Homo sapien
gaagcgcagcaaggtctcaagttgg

SEQ ID NO: 160866 - DNA, 25 bp, Homo sapien
agcaaggtctcaagttggtcgcagg

SEQ ID NO: 160867 - DNA, 25 bp, Homo sapien
cacgcgcagccatggaagcgcagca

SEQ ID NO: 160868 - DNA, 25 bp, Homo sapien
gagccttcccggaggaacaggatgt

SEQ ID NO: 160869 - DNA, 25 bp, Homo sapien
ttttggcagaggtccggaaatccca

SEQ ID NO: 160870 - DNA, 25 bp, Homo sapien
gatgtccaaggtctgctggatggtc

SEQ ID NO: 160871 - DNA, 25 bp, Homo sapien
taatggtgcggtcagctgagtcccg

SEQ ID NO: 160872 - DNA, 25 bp, Homo sapien
gccgccgtctgctcatccggtaggg

SEQ ID NO: 160873 - DNA, 25 bp, Homo sapien
aagggccaggtagttgccattggtc

SEQ ID NO: 160874 - DNA, 25 bp, Homo sapien
tccggtagggccacacagtggagaa

SEQ ID NO: 160875 - DNA, 25 bp, Homo sapien
acacgggctctctcgggtgcaaggc

SEQ ID NO: 160876 - DNA, 25 bp, Homo sapien
atggcatgcgctcacccaggaaaca

SEQ ID NO: 160877 - DNA, 25 bp, Homo sapien
tgtgtgagccaactactgcttcctg

SEQ ID NO: 160878 - DNA, 25 bp, Homo sapien
tcagcattcgcctgggggacaagga

SEQ ID NO: 160879 - DNA, 25 bp, Homo sapien
tgacacccatgaccattttgtcctg

SEQ ID NO: 160880 - DNA, 25 bp, Homo sapien
caagccggggtgagtatgcccattc

SEQ ID NO: 160881 - DNA, 25 bp, Homo sapien
ggcttcgcacctcgtgtccctgagg

SEQ ID NO: 160882 - DNA, 25 bp, Homo sapien
agcaagccgcacctgtcaagccggg

SEQ ID NO: 160883 - DNA, 25 bp, Homo sapien
acagtgggtgagcaagccgcacctg

SEQ ID NO: 160884 - DNA, 25 bp, Homo sapien
ggagcactcgcagcccactgagtag

SEQ ID NO: 160885 - DNA, 25 bp, Homo sapien
ctgcagtgtgcatgctcggctggct

SEQ ID NO: 160886 - DNA, 25 bp, Homo sapien
tcagtgccagatcttcatgtcccct

SEQ ID NO: 160887 - DNA, 25 bp, Homo sapien
gtgataggtggtgccgacacaggcc

SEQ ID NO: 160888 - DNA, 25 bp, Homo sapien
tctcatctacccttgaggaagaggg

SEQ ID NO: 160889 - DNA, 25 bp, Homo sapien
catttattgggcatcgccggctgcc

SEQ ID NO: 160890 - DNA, 25 bp, Homo sapien
cccgccaggcgctttcactagtgta

SEQ ID NO: 160891 - DNA, 25 bp, Homo sapien
cccagctggcatcgggaaggttcag

SEQ ID NO: 160892 - DNA, 25 bp, Homo sapien
gctggttgtgcagccccttcaagcc

SEQ ID NO: 160893 - DNA, 25 bp, Homo sapien
tggtgcatcctgagcatcccgttct

SEQ ID NO: 160894 - DNA, 25 bp, Homo sapien
ccccacccgtcaaggacctgcagct

SEQ ID NO: 160895 - DNA, 25 bp, Homo sapien
gttgtgcagccccttcaagcccttc

SEQ ID NO: 160896 - DNA, 25 bp, Homo sapien
cagtgagaacgggacacaggtgcac

SEQ ID NO: 160897 - DNA, 25 bp, Homo sapien
tgagaacgggacacaggtgcacctt

SEQ ID NO: 160898 - DNA, 25 bp, Homo sapien
ggacacaggtgcaccttgtggtcca

SEQ ID NO: 160899 - DNA, 25 bp, Homo sapien
gacacaggtgcaccttgtggtccat

SEQ ID NO: 160900 - DNA, 25 bp, Homo sapien
tgagaggcggcgggaggggcatctc

SEQ ID NO: 160901 - DNA, 25 bp, Homo sapien
agaggcggcgggaggggcatctcac

SEQ ID NO: 160902 - DNA, 25 bp, Homo sapien
ctgagaggcggcgggaggggcatct

SEQ ID NO: 160903 - DNA, 25 bp, Homo sapien
gagaggcggcgggaggggcatctca

SEQ ID NO: 160904 - DNA, 25 bp, Homo sapien
ggcaattgtggcatccctctcaggg

SEQ ID NO: 160905 - DNA, 25 bp, Homo sapien
taggatggcggcaattgtggcatcc

SEQ ID NO: 160906 - DNA, 25 bp, Homo sapien
tgggagcagtcacagcgtcccacag

SEQ ID NO: 160907 - DNA, 25 bp, Homo sapien
gcatctgtaggatggcggcaattgt

SEQ ID NO: 160908 - DNA, 25 bp, Homo sapien
aactccatcagctgcaccaagactt

SEQ ID NO: 160909 - DNA, 25 bp, Homo sapien
gctgcaccaagacttgtagggcagt

SEQ ID NO: 160910 - DNA, 25 bp, Homo sapien
actgaagtcaccctgtctgaactcc

SEQ ID NO: 160911 - DNA, 25 bp, Homo sapien
tgtttggacgcgccctctggctgtc

SEQ ID NO: 160912 - DNA, 25 bp, Homo sapien
aagaccaggcgaggtccgagcagct

SEQ ID NO: 160913 - DNA, 25 bp, Homo sapien
tgctgggaaagaccaggcgaggtcc

SEQ ID NO: 160914 - DNA, 25 bp, Homo sapien
ctgatatcaattcactggaggctga

SEQ ID NO: 160915 - DNA, 25 bp, Homo sapien
agggtgagcgtgtgacccccctgct

SEQ ID NO: 160916 - DNA, 25 bp, Homo sapien
ccgggtttccacagggcttgttgct

SEQ ID NO: 160917 - DNA, 25 bp, Homo sapien
agaagcagctctgcgaggactcggc

SEQ ID NO: 160918 - DNA, 25 bp, Homo sapien
gctgctcctttgatggaaggcttgg

SEQ ID NO: 160919 - DNA, 25 bp, Homo sapien
ccgtcagaggcatcccaagggtctg

SEQ ID NO: 160920 - DNA, 25 bp, Homo sapien
gctccgccaggcgaggcgattctgc

SEQ ID NO: 160921 - DNA, 25 bp, Homo sapien
cacaaaggacagagtcagcgcagca

SEQ ID NO: 160922 - DNA, 25 bp, Homo sapien
ggaagtggtctgctgtcggcttcca

SEQ ID NO: 160923 - DNA, 25 bp, Homo sapien
cttctgagccatgaggaacgagggt

SEQ ID NO: 160924 - DNA, 25 bp, Homo sapien
gaccagttgtcctgttggactccgg

SEQ ID NO: 160925 - DNA, 25 bp, Homo sapien
tgcgggtggagtcccagtatcactg

SEQ ID NO: 160926 - DNA, 25 bp, Homo sapien
gtatcactgcagaggtcagccacgg

SEQ ID NO: 160927 - DNA, 25 bp, Homo sapien
tcagagtcctctctgtgcgggtgga

SEQ ID NO: 160928 - DNA, 25 bp, Homo sapien
ccgagggctccccaggacatggtgt

SEQ ID NO: 160929 - DNA, 25 bp, Homo sapien
tccccaggacatggtgtaccagctc

SEQ ID NO: 160930 - DNA, 25 bp, Homo sapien
aggacatggtgtaccagctcccagc

SEQ ID NO: 160931 - DNA, 25 bp, Homo sapien
ggctccccaggacatggtgtaccag

SEQ ID NO: 160932 - DNA, 25 bp, Homo sapien
tgaggggctgtgagaacccccggtg

SEQ ID NO: 160933 - DNA, 25 bp, Homo sapien
tcactggctgccaagtgagggcaag

SEQ ID NO: 160934 - DNA, 25 bp, Homo sapien
gggctgtgagaacccccggtggcag

SEQ ID NO: 160935 - DNA, 25 bp, Homo sapien
tgtgagaacccccggtggcagtgat

SEQ ID NO: 160936 - DNA, 25 bp, Homo sapien
ctgtaaaatgtgactctgcgagggc

SEQ ID NO: 160937 - DNA, 25 bp, Homo sapien
ggcaacactggtcctcctgaagcca

SEQ ID NO: 160938 - DNA, 25 bp, Homo sapien
ctggttggtacacactaggtgtcta

SEQ ID NO: 160939 - DNA, 25 bp, Homo sapien
gcaggagcttggtttcactcgctac

SEQ ID NO: 160940 - DNA, 25 bp, Homo sapien
ccagccatctgtggcgttggcagca

SEQ ID NO: 160941 - DNA, 25 bp, Homo sapien
ctccccagccatctgtggcgttggc

SEQ ID NO: 160942 - DNA, 25 bp, Homo sapien
gcctccccagccatctgtggcgttg

SEQ ID NO: 160943 - DNA, 25 bp, Homo sapien
ccccagccatctgtggcgttggcag

SEQ ID NO: 160944 - DNA, 25 bp, Homo sapien
tgcccgcttcctacggtcccaggcc

SEQ ID NO: 160945 - DNA, 25 bp, Homo sapien
ctcggacagagcacctacgaggctc

SEQ ID NO: 160946 - DNA, 25 bp, Homo sapien
acagagcacctacgaggctcccagc

SEQ ID NO: 160947 - DNA, 25 bp, Homo sapien
agagcacctacgaggctcccagctg

SEQ ID NO: 160948 - DNA, 25 bp, Homo sapien
gggctccgtctcgctgccctggagt

SEQ ID NO: 160949 - DNA, 25 bp, Homo sapien
tgccgctgtccggatgccacataca

SEQ ID NO: 160950 - DNA, 25 bp, Homo sapien
gcactgcttcttgccgtgttcctgc

SEQ ID NO: 160951 - DNA, 25 bp, Homo sapien
gtgttcctgccacctaaggctctca

SEQ ID NO: 160952 - DNA, 25 bp, Homo sapien
cctgtggtcccataccttggttcgc

SEQ ID NO: 160953 - DNA, 25 bp, Homo sapien
ctgtggtcccataccttggttcgcc

SEQ ID NO: 160954 - DNA, 25 bp, Homo sapien
tgtggtcccataccttggttcgcca

SEQ ID NO: 160955 - DNA, 25 bp, Homo sapien
gtggtcccataccttggttcgccac

SEQ ID NO: 160956 - DNA, 25 bp, Homo sapien
aaaagagaagtgtctagggcaccca

SEQ ID NO: 160957 - DNA, 25 bp, Homo sapien
aaagagaagtgtctagggcacccag

SEQ ID NO: 160958 - DNA, 25 bp, Homo sapien
aggtggccctcggagccgccatctg

SEQ ID NO: 160959 - DNA, 25 bp, Homo sapien
acccaggtggccctcggagccgcca

SEQ ID NO: 160960 - DNA, 25 bp, Homo sapien
ccggagctgctggcaggccacaggc

SEQ ID NO: 160961 - DNA, 25 bp, Homo sapien
cggagctgctggcaggccacaggcc

SEQ ID NO: 160962 - DNA, 25 bp, Homo sapien
caacgcagcccacgatgatcacttt

SEQ ID NO: 160963 - DNA, 25 bp, Homo sapien
tcagcatccgtttgacaagcacgcc

SEQ ID NO: 160964 - DNA, 25 bp, Homo sapien
gtgtgaagaaaacctccggcaacgc

SEQ ID NO: 160965 - DNA, 25 bp, Homo sapien
agaccttgggagtcgctcttcgccg

SEQ ID NO: 160966 - DNA, 25 bp, Homo sapien
aatcctgtgtcctcccgtatgtctg

SEQ ID NO: 160967 - DNA, 25 bp, Homo sapien
ccagaagttgtcaggagcagcggct

SEQ ID NO: 160968 - DNA, 25 bp, Homo sapien
gactggccggcacaatcgcagattt

SEQ ID NO: 160969 - DNA, 25 bp, Homo sapien
acgtggagcgactgcattgcggact

SEQ ID NO: 160970 - DNA, 25 bp, Homo sapien
tcctggtggccacttccattttctt

SEQ ID NO: 160971 - DNA, 25 bp, Homo sapien
tctttgtcttcagctgcttttccat

SEQ ID NO: 160972 - DNA, 25 bp, Homo sapien
ctatgatcaggcctcctggtggcca

SEQ ID NO: 160973 - DNA, 25 bp, Homo sapien
tttctttgtcttcagctgcttttcc

SEQ ID NO: 160974 - DNA, 25 bp, Homo sapien
ctgcctcctaggttcatgcagttct

SEQ ID NO: 160975 - DNA, 25 bp, Homo sapien
tgcctcctaggttcatgcagttctc

SEQ ID NO: 160976 - DNA, 25 bp, Homo sapien
cgaagctggcaaggaggtgggggct

SEQ ID NO: 160977 - DNA, 25 bp, Homo sapien
ctcgaagctggcaaggaggtggggg

SEQ ID NO: 160978 - DNA, 25 bp, Homo sapien
tggcaaggaggtgggggctgcctcc

SEQ ID NO: 160979 - DNA, 25 bp, Homo sapien
gcaaggaggtgggggctgcctcctc

SEQ ID NO: 160980 - DNA, 25 bp, Homo sapien
cttgctgagttaacactggcactgt

SEQ ID NO: 160981 - DNA, 25 bp, Homo sapien
actgtgcagcctcagcgtggtggac

SEQ ID NO: 160982 - DNA, 25 bp, Homo sapien
gctgagttaacactggcactgtgca

SEQ ID NO: 160983 - DNA, 25 bp, Homo sapien
tgtgcagcctcagcgtggtggactc

SEQ ID NO: 160984 - DNA, 25 bp, Homo sapien
ccagtgggcgggcaggatcaaagca

SEQ ID NO: 160985 - DNA, 25 bp, Homo sapien
gccagtgggcgggcaggatcaaagc

SEQ ID NO: 160986 - DNA, 25 bp, Homo sapien
ctgccagtgggcgggcaggatcaaa

SEQ ID NO: 160987 - DNA, 25 bp, Homo sapien
tgccagtgggcgggcaggatcaaag

SEQ ID NO: 160988 - DNA, 25 bp, Homo sapien
ggcctgcccaggtagctcttgcaac

SEQ ID NO: 160989 - DNA, 25 bp, Homo sapien
aacgctttgactcggccgcgtccag

SEQ ID NO: 160990 - DNA, 25 bp, Homo sapien
agccctgggcaagagttggcctgcc

SEQ ID NO: 160991 - DNA, 25 bp, Homo sapien
ggtagctcttgcaacaacgctttga

SEQ ID NO: 160992 - DNA, 25 bp, Homo sapien
cggccactgtaggatccacagagcc

SEQ ID NO: 160993 - DNA, 25 bp, Homo sapien
gccactgtaggatccacagagccaa

SEQ ID NO: 160994 - DNA, 25 bp, Homo sapien
cactgtaggatccacagagccaacg

SEQ ID NO: 160995 - DNA, 25 bp, Homo sapien
ggccactgtaggatccacagagcca

SEQ ID NO: 160996 - DNA, 25 bp, Homo sapien
ggacatgcaggtagaagccacgacc

SEQ ID NO: 160997 - DNA, 25 bp, Homo sapien
cctgacgttcacaagttggttgagg

SEQ ID NO: 160998 - DNA, 25 bp, Homo sapien
cccatctgccatatggcccagcctt

SEQ ID NO: 160999 - DNA, 25 bp, Homo sapien
caggtagaagccacgacctgccttc

SEQ ID NO: 161000 - DNA, 25 bp, Homo sapien
aagccagccggggagatgtggggca

SEQ ID NO: 161001 - DNA, 25 bp, Homo sapien
gaagccagccggggagatgtggggc

SEQ ID NO: 161002 - DNA, 25 bp, Homo sapien
tcattcatgacgtgcgaagccagcc

SEQ ID NO: 161003 - DNA, 25 bp, Homo sapien
ttcatgacgtgcgaagccagccggg

SEQ ID NO: 161004 - DNA, 25 bp, Homo sapien
ggatgttagtgacccccatatgcag

SEQ ID NO: 161005 - DNA, 25 bp, Homo sapien
cttgccaatgggaaacgggatgtta

SEQ ID NO: 161006 - DNA, 25 bp, Homo sapien
ttagtgacccccatatgcagcagca

SEQ ID NO: 161007 - DNA, 25 bp, Homo sapien
acgggatgttagtgacccccatatg

SEQ ID NO: 161008 - DNA, 25 bp, Homo sapien
tggtgtcacctgcttcacagcacgt

SEQ ID NO: 161009 - DNA, 25 bp, Homo sapien
taagggcatggcctttccggcagtt

SEQ ID NO: 161010 - DNA, 25 bp, Homo sapien
tcctctgaccctcgaacgggagttg

SEQ ID NO: 161011 - DNA, 25 bp, Homo sapien
tcgtaaaataatttcgggcgcttgc

SEQ ID NO: 161012 - DNA, 25 bp, Homo sapien
gggaggcatgaaatcctgacttccg

SEQ ID NO: 161013 - DNA, 25 bp, Homo sapien
aagtcatttgctccctccaggttta

SEQ ID NO: 161014 - DNA, 25 bp, Homo sapien
tactttgctaaaccaccacgcttgc

SEQ ID NO: 161015 - DNA, 25 bp, Homo sapien
ttcacacccaggacaaagtcatttg

SEQ ID NO: 161016 - DNA, 25 bp, Homo sapien
gcagaagctccaagacgcctagtac

SEQ ID NO: 161017 - DNA, 25 bp, Homo sapien
gaaccgcgtgtctcccaagatgaaa

SEQ ID NO: 161018 - DNA, 25 bp, Homo sapien
cctcggatttcgtactccaggcaga

SEQ ID NO: 161019 - DNA, 25 bp, Homo sapien
aatgggctccccgtacattgcgaac

SEQ ID NO: 161020 - DNA, 25 bp, Homo sapien
tgggaggtagattgcaggccctttt

SEQ ID NO: 161021 - DNA, 25 bp, Homo sapien
ggaggtagattgcaggcccttttct

SEQ ID NO: 161022 - DNA, 25 bp, Homo sapien
aaacgctgagtgacagttggctatg

SEQ ID NO: 161023 - DNA, 25 bp, Homo sapien
ctggcaccgtaataaacgctgagtg

SEQ ID NO: 161024 - DNA, 25 bp, Homo sapien
ggttactccacggttctgcacctgt

SEQ ID NO: 161025 - DNA, 25 bp, Homo sapien
ggtggccgaagtgggtaaattcatc

SEQ ID NO: 161026 - DNA, 25 bp, Homo sapien
gacagcgctggtctcgagttcaagc

SEQ ID NO: 161027 - DNA, 25 bp, Homo sapien
tgtttttctactggagaccctgcgc

SEQ ID NO: 161028 - DNA, 25 bp, Homo sapien
acagatcaaaatggcccaggagggc

SEQ ID NO: 161029 - DNA, 25 bp, Homo sapien
tgatgatgtcgtcctcctggaagag

SEQ ID NO: 161030 - DNA, 25 bp, Homo sapien
tgagggccaacattcctgcactcag

SEQ ID NO: 161031 - DNA, 25 bp, Homo sapien
tgctctcatacacgtgccccaaatg

SEQ ID NO: 161032 - DNA, 25 bp, Homo sapien
gcaaaatgcccagcgcctagtaggt

SEQ ID NO: 161033 - DNA, 25 bp, Homo sapien
tgtgtgcacaagagcacctccggga

SEQ ID NO: 161034 - DNA, 25 bp, Homo sapien
tctcatggcagtgtgcacgaagggc

SEQ ID NO: 161035 - DNA, 25 bp, Homo sapien
caatgggatgtcagaccagagggca

SEQ ID NO: 161036 - DNA, 25 bp, Homo sapien
ttttgtcctgctgggcggacgtcag

SEQ ID NO: 161037 - DNA, 25 bp, Homo sapien
cagggagccttacctggctttctaa

SEQ ID NO: 161038 - DNA, 25 bp, Homo sapien
gcttgttcttctaaggccggcgtca

SEQ ID NO: 161039 - DNA, 25 bp, Homo sapien
tctggtgcatcccataattgtctgc

SEQ ID NO: 161040 - DNA, 25 bp, Homo sapien
tcatcacgtccatctttaaagcggg

SEQ ID NO: 161041 - DNA, 25 bp, Homo sapien
catcacgtccatctttaaagcgggc

SEQ ID NO: 161042 - DNA, 25 bp, Homo sapien
ttcatcacgtccatctttaaagcgg

SEQ ID NO: 161043 - DNA, 25 bp, Homo sapien
cctcccacctcctgtctatgcccag

SEQ ID NO: 161044 - DNA, 25 bp, Homo sapien
cagagccatcttgagtagaatgagg

SEQ ID NO: 161045 - DNA, 25 bp, Homo sapien
ggagaagaggcgtttccaggccctc

SEQ ID NO: 161046 - DNA, 25 bp, Homo sapien
actgcccttgttcccaacatttggg

SEQ ID NO: 161047 - DNA, 25 bp, Homo sapien
tggcccagttgctcgctggccctca

SEQ ID NO: 161048 - DNA, 25 bp, Homo sapien
aattgcgtggagagggaaggcccca

SEQ ID NO: 161049 - DNA, 25 bp, Homo sapien
cccggcaagtggaggcgggagcggt

SEQ ID NO: 161050 - DNA, 25 bp, Homo sapien
catcactgggatcgcaattgcgtgg

SEQ ID NO: 161051 - DNA, 25 bp, Homo sapien
tcccagcaagttcagccaggtggct

SEQ ID NO: 161052 - DNA, 25 bp, Homo sapien
gggctcgcagagcccctcaattgtc

SEQ ID NO: 161053 - DNA, 25 bp, Homo sapien
gggggggcgcccagggctcgcagag

SEQ ID NO: 161054 - DNA, 25 bp, Homo sapien
tgggggggcgcccagggctcgcaga

SEQ ID NO: 161055 - DNA, 25 bp, Homo sapien
cccagggctcgcagagcccctcaat

SEQ ID NO: 161056 - DNA, 25 bp, Homo sapien
caatacagcggatgacttcctcccg

SEQ ID NO: 161057 - DNA, 25 bp, Homo sapien
tcatcgcacaggcattaagacgaca

SEQ ID NO: 161058 - DNA, 25 bp, Homo sapien
gacgacaatacagcggatgacttcc

SEQ ID NO: 161059 - DNA, 25 bp, Homo sapien
ggcattaagacgacaatacagcgga

SEQ ID NO: 161060 - DNA, 25 bp, Homo sapien
tgatcgtttcgagcctaatgaagcc

SEQ ID NO: 161061 - DNA, 25 bp, Homo sapien
cgaaggttccctccggaatgatgga

SEQ ID NO: 161062 - DNA, 25 bp, Homo sapien
tcttgtcctcggagccgactgttct

SEQ ID NO: 161063 - DNA, 25 bp, Homo sapien
cttaaaagaatgatacgtgtggcaa

SEQ ID NO: 161064 - DNA, 25 bp, Homo sapien
ctcgtggttcagggcgcctgtttcg

SEQ ID NO: 161065 - DNA, 25 bp, Homo sapien
tgggccaccgacaggacgtgggcag

SEQ ID NO: 161066 - DNA, 25 bp, Homo sapien
gggaggagccaccacggcttcctcg

SEQ ID NO: 161067 - DNA, 25 bp, Homo sapien
ttcagggcgcctgtttcggcggctc

SEQ ID NO: 161068 - DNA, 25 bp, Homo sapien
ccagctgatacagaccatctaggca

SEQ ID NO: 161069 - DNA, 25 bp, Homo sapien
tagccagctgatacagaccatctag

SEQ ID NO: 161070 - DNA, 25 bp, Homo sapien
gctgtagccagctgatacagaccat

SEQ ID NO: 161071 - DNA, 25 bp, Homo sapien
ctggctgtagccagctgatacagac

SEQ ID NO: 161072 - DNA, 25 bp, Homo sapien
gacaaggacgctggtgacactggca

SEQ ID NO: 161073 - DNA, 25 bp, Homo sapien
gcttgtagctgcagcccgttaggct

SEQ ID NO: 161074 - DNA, 25 bp, Homo sapien
ctagttgcttcgtatgtgttcagta

SEQ ID NO: 161075 - DNA, 25 bp, Homo sapien
atctgctcctggtcctgacaaggac

SEQ ID NO: 161076 - DNA, 25 bp, Homo sapien
tgttcctatggcaacactgcacctc

SEQ ID NO: 161077 - DNA, 25 bp, Homo sapien
gttcctctgagacgctctccatgag

SEQ ID NO: 161078 - DNA, 25 bp, Homo sapien
tggttcctctgagacgctctccatg

SEQ ID NO: 161079 - DNA, 25 bp, Homo sapien
ctccatgagcctgttcctatggcaa

SEQ ID NO: 161080 - DNA, 25 bp, Homo sapien
cagctcgtggagaccttcagaggca

SEQ ID NO: 161081 - DNA, 25 bp, Homo sapien
ccagctcgtggagaccttcagaggc

SEQ ID NO: 161082 - DNA, 25 bp, Homo sapien
gctcgtggagaccttcagaggcaca

SEQ ID NO: 161083 - DNA, 25 bp, Homo sapien
ctcgtggagaccttcagaggcacag

SEQ ID NO: 161084 - DNA, 25 bp, Homo sapien
agagccagcccgtatccccgagtcc

SEQ ID NO: 161085 - DNA, 25 bp, Homo sapien
cagagccagcccgtatccccgagtc

SEQ ID NO: 161086 - DNA, 25 bp, Homo sapien
caaaacaggcctgcgtatcactccc

SEQ ID NO: 161087 - DNA, 25 bp, Homo sapien
ccccaaaacaggcctgcgtatcact

SEQ ID NO: 161088 - DNA, 25 bp, Homo sapien
tcgtgctcagccgagctgggagtac

SEQ ID NO: 161089 - DNA, 25 bp, Homo sapien
ctgggagtacggctgcagagggaca

SEQ ID NO: 161090 - DNA, 25 bp, Homo sapien
cctggccttgtgcttggcgcctgaa

SEQ ID NO: 161091 - DNA, 25 bp, Homo sapien
gttccaggcccactccagggttctc

SEQ ID NO: 161092 - DNA, 25 bp, Homo sapien
aaacacttatcgctgaagtcccggg

SEQ ID NO: 161093 - DNA, 25 bp, Homo sapien
taggacaagtcgcaggaatcgaacc

SEQ ID NO: 161094 - DNA, 25 bp, Homo sapien
gcacacgtgcaatggttagataccc

SEQ ID NO: 161095 - DNA, 25 bp, Homo sapien
ttagccgcgctgaaacacaaatgca

SEQ ID NO: 161096 - DNA, 25 bp, Homo sapien
ctggttgcggacgcgaaagggggcg

SEQ ID NO: 161097 - DNA, 25 bp, Homo sapien
cgggcgcgcagcgaggggaaagcca

SEQ ID NO: 161098 - DNA, 25 bp, Homo sapien
gggcgcgcagcgaggggaaagccag

SEQ ID NO: 161099 - DNA, 25 bp, Homo sapien
tgcggacgcgaaagggggcgcgggc

SEQ ID NO: 161100 - DNA, 25 bp, Homo sapien
gtccggctcctggcgccgcactggg

SEQ ID NO: 161101 - DNA, 25 bp, Homo sapien
ggtccggctcctggcgccgcactgg

SEQ ID NO: 161102 - DNA, 25 bp, Homo sapien
gggtccggctcctggcgccgcactg

SEQ ID NO: 161103 - DNA, 25 bp, Homo sapien
cataggtgctgtggccgaaagccag

SEQ ID NO: 161104 - DNA, 25 bp, Homo sapien
gcaggagggcttcggtcgcggtcat

SEQ ID NO: 161105 - DNA, 25 bp, Homo sapien
gaggacgcgcaggagggcttcggtc

SEQ ID NO: 161106 - DNA, 25 bp, Homo sapien
ggaagggggcaactctctcgctgtc

SEQ ID NO: 161107 - DNA, 25 bp, Homo sapien
tgtcagagacagatggccgctgcag

SEQ ID NO: 161108 - DNA, 25 bp, Homo sapien
ccgctgcagacagaagtgtcgcagc

SEQ ID NO: 161109 - DNA, 25 bp, Homo sapien
tgcagacagaagtgtcgcagcccct

SEQ ID NO: 161110 - DNA, 25 bp, Homo sapien
caaacattgtcatcctcgcagaatc

SEQ ID NO: 161111 - DNA, 25 bp, Homo sapien
acattgtcatcctcgcagaatccat

SEQ ID NO: 161112 - DNA, 25 bp, Homo sapien
gcaaacattgtcatcctcgcagaat

SEQ ID NO: 161113 - DNA, 25 bp, Homo sapien
agaatccattttgggggttgcaggc

SEQ ID NO: 161114 - DNA, 25 bp, Homo sapien
gcactgcccgggttctccacagagt

SEQ ID NO: 161115 - DNA, 25 bp, Homo sapien
ccagccgtcggtgcaaatgcactgc

SEQ ID NO: 161116 - DNA, 25 bp, Homo sapien
ggtcacgcactggtcacaaagggga

SEQ ID NO: 161117 - DNA, 25 bp, Homo sapien
tctatcacagagctccccgtcccag

SEQ ID NO: 161118 - DNA, 25 bp, Homo sapien
aggcaggtaaggacgcagagctgag

SEQ ID NO: 161119 - DNA, 25 bp, Homo sapien
ctttagaatacagggcacggagtgt

SEQ ID NO: 161120 - DNA, 25 bp, Homo sapien
agatctttagaatacagggcacgga

SEQ ID NO: 161121 - DNA, 25 bp, Homo sapien
aggtggtaggggctagggcaggcag

SEQ ID NO: 161122 - DNA, 25 bp, Homo sapien
ccagatcctcaaacgactcagagct

SEQ ID NO: 161123 - DNA, 25 bp, Homo sapien
cagagcatgagtcagctgcgggtaa

SEQ ID NO: 161124 - DNA, 25 bp, Homo sapien
gatcctcaaacgactcagagctgct

SEQ ID NO: 161125 - DNA, 25 bp, Homo sapien
ggtaaaccttgcaccatattgcagg

SEQ ID NO: 161126 - DNA, 25 bp, Homo sapien
gggcacaggagcattcatagaggcc

SEQ ID NO: 161127 - DNA, 25 bp, Homo sapien
ttctggcagtcctttcccgagtacc

SEQ ID NO: 161128 - DNA, 25 bp, Homo sapien
ccaggctcacgcaggtcctgttgtt

SEQ ID NO: 161129 - DNA, 25 bp, Homo sapien
tcatagaggccatcgtccaggctca

SEQ ID NO: 161130 - DNA, 25 bp, Homo sapien
gctgttggccacgatctcgcagaaa

SEQ ID NO: 161131 - DNA, 25 bp, Homo sapien
gacgccgtcgttctcgcatgggttg

SEQ ID NO: 161132 - DNA, 25 bp, Homo sapien
ctcgcagaaattgcctgagaagcca

SEQ ID NO: 161133 - DNA, 25 bp, Homo sapien
cttgtcgatgaagccggctgggcac

SEQ ID NO: 161134 - DNA, 25 bp, Homo sapien
caccttcaggatgcggtgctccggc

SEQ ID NO: 161135 - DNA, 25 bp, Homo sapien
agcgcgcgcttcttgacacaggtga

SEQ ID NO: 161136 - DNA, 25 bp, Homo sapien
ggcggtaggccagcccatagccgct

SEQ ID NO: 161137 - DNA, 25 bp, Homo sapien
ctgggcagacgggtgacctgctggg

SEQ ID NO: 161138 - DNA, 25 bp, Homo sapien
gaagatgatgttgacggccaggtcc

SEQ ID NO: 161139 - DNA, 25 bp, Homo sapien
gttgtagcgcaggttggacacccag

SEQ ID NO: 161140 - DNA, 25 bp, Homo sapien
ggtcctccccgctgttgtactgaag

SEQ ID NO: 161141 - DNA, 25 bp, Homo sapien
cacttgttgaggaagacgataccca

SEQ ID NO: 161142 - DNA, 25 bp, Homo sapien
gattaggacagaccgcgtatagtaa

SEQ ID NO: 161143 - DNA, 25 bp, Homo sapien
tatatgtaagcgtagcgttcaccag

SEQ ID NO: 161144 - DNA, 25 bp, Homo sapien
gtatagtaagctctgcggaactcca

SEQ ID NO: 161145 - DNA, 25 bp, Homo sapien
gatagcgaacaccacaaagattagg

SEQ ID NO: 161146 - DNA, 25 bp, Homo sapien
ccaggattgggatagggactcgcca

SEQ ID NO: 161147 - DNA, 25 bp, Homo sapien
gaccatggtggtcggtgttcaaacc

SEQ ID NO: 161148 - DNA, 25 bp, Homo sapien
caatcggaaagatctaaaggtagcg

SEQ ID NO: 161149 - DNA, 25 bp, Homo sapien
catcaagcgttcatccaggataggc

SEQ ID NO: 161150 - DNA, 25 bp, Homo sapien
tgagatgagatggtgacttatgaat

SEQ ID NO: 161151 - DNA, 25 bp, Homo sapien
tatgaatgacttcgtggggaaggaa

SEQ ID NO: 161152 - DNA, 25 bp, Homo sapien
gaagggagggctggtggagacagga

SEQ ID NO: 161153 - DNA, 25 bp, Homo sapien
gaagagggacttggggcggttgtca

SEQ ID NO: 161154 - DNA, 25 bp, Homo sapien
ttctgcatgacgtgaagaccgtggc

SEQ ID NO: 161155 - DNA, 25 bp, Homo sapien
ggcctcatcgggtgctggtaataga

SEQ ID NO: 161156 - DNA, 25 bp, Homo sapien
gagttggtcaaggatacctcgaccg

SEQ ID NO: 161157 - DNA, 25 bp, Homo sapien
gctgacactgcttctgtggcacggg

SEQ ID NO: 161158 - DNA, 25 bp, Homo sapien
gttgaaatttggtcaactccagtgt

SEQ ID NO: 161159 - DNA, 25 bp, Homo sapien
agtgttcgcatctttgtcatggcca

SEQ ID NO: 161160 - DNA, 25 bp, Homo sapien
ctgtgctgaagttgaaatttggtca

SEQ ID NO: 161161 - DNA, 25 bp, Homo sapien
aactccagtgttcgcatctttgtca

SEQ ID NO: 161162 - DNA, 25 bp, Homo sapien
gctgagcagccgcttcctgccacag

SEQ ID NO: 161163 - DNA, 25 bp, Homo sapien
cagccgcttcctgccacagcccagg

SEQ ID NO: 161164 - DNA, 25 bp, Homo sapien
ccaccctggctgagcagccgcttcc

SEQ ID NO: 161165 - DNA, 25 bp, Homo sapien
accctggctgagcagccgcttcctg

SEQ ID NO: 161166 - DNA, 25 bp, Homo sapien
atccaaaaggacagtagttggattg

SEQ ID NO: 161167 - DNA, 25 bp, Homo sapien
tcatccaaaaggacagtagttggat

SEQ ID NO: 161168 - DNA, 25 bp, Homo sapien
catccaaaaggacagtagttggatt

SEQ ID NO: 161169 - DNA, 25 bp, Homo sapien
tccaaaaggacagtagttggattgc

SEQ ID NO: 161170 - DNA, 25 bp, Homo sapien
cctgaccagggctgcccctcccctc

SEQ ID NO: 161171 - DNA, 25 bp, Homo sapien
gaccagggctgcccctcccctctca

SEQ ID NO: 161172 - DNA, 25 bp, Homo sapien
ccctgaccagggctgcccctcccct

SEQ ID NO: 161173 - DNA, 25 bp, Homo sapien
cagggctgcccctcccctctcacac

SEQ ID NO: 161174 - DNA, 25 bp, Homo sapien
cgtctgcagttcaggtctttggttc

SEQ ID NO: 161175 - DNA, 25 bp, Homo sapien
caggtctttggttcttgagattgga

SEQ ID NO: 161176 - DNA, 25 bp, Homo sapien
tgggaaggaagcttcgtctgcagtt

SEQ ID NO: 161177 - DNA, 25 bp, Homo sapien
ggaagcttcgtctgcagttcaggtc

SEQ ID NO: 161178 - DNA, 25 bp, Homo sapien
gaagaggaaaatggcccatttggca

SEQ ID NO: 161179 - DNA, 25 bp, Homo sapien
tgccttagttccaccccttccaggc

SEQ ID NO: 161180 - DNA, 25 bp, Homo sapien
aggccctgcttgctggggaagagga

SEQ ID NO: 161181 - DNA, 25 bp, Homo sapien
ctgcacagccttgccttagttccac

SEQ ID NO: 161182 - DNA, 25 bp, Homo sapien
gatggaaacctctccgcatcaagac

SEQ ID NO: 161183 - DNA, 25 bp, Homo sapien
gggagggacgttctggtgtggtcca

SEQ ID NO: 161184 - DNA, 25 bp, Homo sapien
aggacgggctccttgcctgagaccc

SEQ ID NO: 161185 - DNA, 25 bp, Homo sapien
ggtgtagtgaggacgggctccttgc

SEQ ID NO: 161186 - DNA, 25 bp, Homo sapien
gaaacgcctctgatgcagtgagtac

SEQ ID NO: 161187 - DNA, 25 bp, Homo sapien
tcttgctggaaacgcctctgatgca

SEQ ID NO: 161188 - DNA, 25 bp, Homo sapien
gatgcagtgagtactttttgagccc

SEQ ID NO: 161189 - DNA, 25 bp, Homo sapien
ggtgccttcttgctggaaacgcctc

SEQ ID NO: 161190 - DNA, 25 bp, Homo sapien
gggtccccattgacaacccatacat

SEQ ID NO: 161191 - DNA, 25 bp, Homo sapien
aagctgggtccccattgacaaccca

SEQ ID NO: 161192 - DNA, 25 bp, Homo sapien
tgggtccccattgacaacccataca

SEQ ID NO: 161193 - DNA, 25 bp, Homo sapien
gctgggtccccattgacaacccata

SEQ ID NO: 161194 - DNA, 25 bp, Homo sapien
caagatctgcttgttccaggatcgg

SEQ ID NO: 161195 - DNA, 25 bp, Homo sapien
ttccaggatcgggagagcctcagag

SEQ ID NO: 161196 - DNA, 25 bp, Homo sapien
tgcttgttccaggatcgggagagcc

SEQ ID NO: 161197 - DNA, 25 bp, Homo sapien
ttatcttccaatacaggaacttggc

SEQ ID NO: 161198 - DNA, 25 bp, Homo sapien
gttcacacaaccagtaatgaccaga

SEQ ID NO: 161199 - DNA, 25 bp, Homo sapien
tacaggaatcctacaagagagctcg

SEQ ID NO: 161200 - DNA, 25 bp, Homo sapien
cagggcgcaacttctgctgattgca

SEQ ID NO: 161201 - DNA, 25 bp, Homo sapien
ccctctagggctatagaaactgcaa

SEQ ID NO: 161202 - DNA, 25 bp, Homo sapien
tcttccatcgacacagaatacccgg

SEQ ID NO: 161203 - DNA, 25 bp, Homo sapien
gaatacccggaattccgctatgagc

SEQ ID NO: 161204 - DNA, 25 bp, Homo sapien
tcctagcggagtacatgattcatca

SEQ ID NO: 161205 - DNA, 25 bp, Homo sapien
ctaaagccagctgacgcacacagga

SEQ ID NO: 161206 - DNA, 25 bp, Homo sapien
ctctgccaataagattctcttgggt

SEQ ID NO: 161207 - DNA, 25 bp, Homo sapien
ccaataagattctcttgggtaggct

SEQ ID NO: 161208 - DNA, 25 bp, Homo sapien
cagtttccctttcccacggagacat

SEQ ID NO: 161209 - DNA, 25 bp, Homo sapien
gacattctctgccaataagattctc

SEQ ID NO: 161210 - DNA, 25 bp, Homo sapien
tgggcttctgggtccagcaaactct

SEQ ID NO: 161211 - DNA, 25 bp, Homo sapien
gcatagccttcagccctgtagccag

SEQ ID NO: 161212 - DNA, 25 bp, Homo sapien
tggtgcacaccagagggatgtggga

SEQ ID NO: 161213 - DNA, 25 bp, Homo sapien
tgttggtggttccagggcatagcct

SEQ ID NO: 161214 - DNA, 25 bp, Homo sapien
tggacactggaacacaatgcctgac

SEQ ID NO: 161215 - DNA, 25 bp, Homo sapien
gggaacgcttgttggggctctctct

SEQ ID NO: 161216 - DNA, 25 bp, Homo sapien
agaaggtaacagagggaacgcttgt

SEQ ID NO: 161217 - DNA, 25 bp, Homo sapien
aggtggtggacactggaacacaatg

SEQ ID NO: 161218 - DNA, 25 bp, Homo sapien
gcggcccctgccttccgatgaggac

SEQ ID NO: 161219 - DNA, 25 bp, Homo sapien
tccactgtgggtggatggtccacgg

SEQ ID NO: 161220 - DNA, 25 bp, Homo sapien
cctgccttccgatgaggaccaggaa

SEQ ID NO: 161221 - DNA, 25 bp, Homo sapien
tccacggacacgagcaagacagcct

SEQ ID NO: 161222 - DNA, 25 bp, Homo sapien
aatggccagggagactaataccacc

SEQ ID NO: 161223 - DNA, 25 bp, Homo sapien
catgataggcttgggactcagcaaa

SEQ ID NO: 161224 - DNA, 25 bp, Homo sapien
cagaggatagagatggacaggactt

SEQ ID NO: 161225 - DNA, 25 bp, Homo sapien
tgcctgggctaagcgtattccactc

SEQ ID NO: 161226 - DNA, 25 bp, Homo sapien
tgagggatcctctcgtgggcgcccc

SEQ ID NO: 161227 - DNA, 25 bp, Homo sapien
agggatcctctcgtgggcgccccag

SEQ ID NO: 161228 - DNA, 25 bp, Homo sapien
cgggtgagggatcctctcgtgggcg

SEQ ID NO: 161229 - DNA, 25 bp, Homo sapien
ggtgagggatcctctcgtgggcgcc

SEQ ID NO: 161230 - DNA, 25 bp, Homo sapien
caggacccaggatcaggcaggctct

SEQ ID NO: 161231 - DNA, 25 bp, Homo sapien
ctctcggcatgtccaggaggacaga

SEQ ID NO: 161232 - DNA, 25 bp, Homo sapien
ttttgttgcggacgctcggggacca

SEQ ID NO: 161233 - DNA, 25 bp, Homo sapien
accaggcgaagtggccgcctccagc

SEQ ID NO: 161234 - DNA, 25 bp, Homo sapien
cccccagggaaatgtgcctcaagat

SEQ ID NO: 161235 - DNA, 25 bp, Homo sapien
ttccccccagggaaatgtgcctcaa

SEQ ID NO: 161236 - DNA, 25 bp, Homo sapien
agggaaatgtgcctcaagattttct

SEQ ID NO: 161237 - DNA, 25 bp, Homo sapien
ccagggaaatgtgcctcaagatttt

SEQ ID NO: 161238 - DNA, 25 bp, Homo sapien
ctccgcagtgaatccggggggtctc

SEQ ID NO: 161239 - DNA, 25 bp, Homo sapien
gaagccacggcgcaaaggccgaccc

SEQ ID NO: 161240 - DNA, 25 bp, Homo sapien
tctgtgcgcctccacaacacccgaa

SEQ ID NO: 161241 - DNA, 25 bp, Homo sapien
gcgcaaaggccgaccccggcctctg

SEQ ID NO: 161242 - DNA, 25 bp, Homo sapien
gaacgagagacagaacctgtgacat

SEQ ID NO: 161243 - DNA, 25 bp, Homo sapien
acgagagacagaacctgtgacatcg

SEQ ID NO: 161244 - DNA, 25 bp, Homo sapien
cggaacgagagacagaacctgtgac

SEQ ID NO: 161245 - DNA, 25 bp, Homo sapien
ctcggaacgagagacagaacctgtg

SEQ ID NO: 161246 - DNA, 25 bp, Homo sapien
ttaaacacacgttcactaaagtcag

SEQ ID NO: 161247 - DNA, 25 bp, Homo sapien
tcgtcaatccaattaaacacacgtt

SEQ ID NO: 161248 - DNA, 25 bp, Homo sapien
caggcaccgctgtcacgcatgtggg

SEQ ID NO: 161249 - DNA, 25 bp, Homo sapien
tccaggcaccgctgtcacgcatgtg

SEQ ID NO: 161250 - DNA, 25 bp, Homo sapien
ttgaagacaaggaggtggacggatg

SEQ ID NO: 161251 - DNA, 25 bp, Homo sapien
tggagaggaggtggtccttgaagac

SEQ ID NO: 161252 - DNA, 25 bp, Homo sapien
tgaagacaaggaggtggacggatga

SEQ ID NO: 161253 - DNA, 25 bp, Homo sapien
atgaaatgatagcaggagggttgaa

SEQ ID NO: 161254 - DNA, 25 bp, Homo sapien
gaaatgatagcaggagggttgaagt

SEQ ID NO: 161255 - DNA, 25 bp, Homo sapien
aatgatagcaggagggttgaagtac

SEQ ID NO: 161256 - DNA, 25 bp, Homo sapien
ttatgaaatgatagcaggagggttg

SEQ ID NO: 161257 - DNA, 25 bp, Homo sapien
ccagtttgctagcaggtgaacacaa

SEQ ID NO: 161258 - DNA, 25 bp, Homo sapien
gtagcatgctcattccagaagccca

SEQ ID NO: 161259 - DNA, 25 bp, Homo sapien
ggctggtcagttccggtcctcttca

SEQ ID NO: 161260 - DNA, 25 bp, Homo sapien
taggaggttgctctcatcgacccca

SEQ ID NO: 161261 - DNA, 25 bp, Homo sapien
taaatgtaagccctaccccatggga

SEQ ID NO: 161262 - DNA, 25 bp, Homo sapien
gacagagagttcagtcctcacgggt

SEQ ID NO: 161263 - DNA, 25 bp, Homo sapien
ttggtcttcaaaagcgccctgtggg

SEQ ID NO: 161264 - DNA, 25 bp, Homo sapien
tcttgtccggacaaaactggttggc

SEQ ID NO: 161265 - DNA, 25 bp, Homo sapien
accactggtaaaagctcctgccagt

SEQ ID NO: 161266 - DNA, 25 bp, Homo sapien
acattaaggatgtaaaaaccactgg

SEQ ID NO: 161267 - DNA, 25 bp, Homo sapien
ctgaacattaaggatgtaaaaacca

SEQ ID NO: 161268 - DNA, 25 bp, Homo sapien
aaaccactggtaaaagctcctgcca

SEQ ID NO: 161269 - DNA, 25 bp, Homo sapien
tgggagcaggactctcgattttaca

SEQ ID NO: 161270 - DNA, 25 bp, Homo sapien
gactctcgattttacagcccactcg

SEQ ID NO: 161271 - DNA, 25 bp, Homo sapien
cactcgaatctcactggggcctgga

SEQ ID NO: 161272 - DNA, 25 bp, Homo sapien
gattttacagcccactcgaatctca

SEQ ID NO: 161273 - DNA, 25 bp, Homo sapien
gccgggactgagacaggtacaattc

SEQ ID NO: 161274 - DNA, 25 bp, Homo sapien
tgccggcacagcaaagtcagaaatg

SEQ ID NO: 161275 - DNA, 25 bp, Homo sapien
gaatggacggttgcaaaaagtgaca

SEQ ID NO: 161276 - DNA, 25 bp, Homo sapien
tcagaaatgcagagggaggccttct

SEQ ID NO: 161277 - DNA, 25 bp, Homo sapien
cgtgcttccacggagtagagcgagt

SEQ ID NO: 161278 - DNA, 25 bp, Homo sapien
tccacggagtagagcgagtcaggaa

SEQ ID NO: 161279 - DNA, 25 bp, Homo sapien
gagtcaggaagcagtgggttgaaga

SEQ ID NO: 161280 - DNA, 25 bp, Homo sapien
tgtgagcgtgcttccacggagtaga

SEQ ID NO: 161281 - DNA, 25 bp, Homo sapien
tacgaaaatctagtggtgcctccag

SEQ ID NO: 161282 - DNA, 25 bp, Homo sapien
cgactcctgactgcttaagacggca

SEQ ID NO: 161283 - DNA, 25 bp, Homo sapien
tcaggatttaatcaccagcaaaggg

SEQ ID NO: 161284 - DNA, 25 bp, Homo sapien
tgtccttgtgtccatgagccgaaaa

SEQ ID NO: 161285 - DNA, 25 bp, Homo sapien
ctgtgttcattaagggaaaagggcg

SEQ ID NO: 161286 - DNA, 25 bp, Homo sapien
tatgcgacgaatactggaatccagc

SEQ ID NO: 161287 - DNA, 25 bp, Homo sapien
taacctcattaacgtctgcagcctc

SEQ ID NO: 161288 - DNA, 25 bp, Homo sapien
agtgtgtttttccttcgcagacaaa

SEQ ID NO: 161289 - DNA, 25 bp, Homo sapien
ttccttcgacaaggcccgagattag

SEQ ID NO: 161290 - DNA, 25 bp, Homo sapien
tgtcggctccatcaccaaaattaga

SEQ ID NO: 161291 - DNA, 25 bp, Homo sapien
tctgtgcgaaggatcgaacaaagcc

SEQ ID NO: 161292 - DNA, 25 bp, Homo sapien
agttgggaactgatcaccagtggcc

SEQ ID NO: 161293 - DNA, 25 bp, Homo sapien
gctgaatggacttcgcactgggaca

SEQ ID NO: 161294 - DNA, 25 bp, Homo sapien
gactcgggacatacctgctctaaag

SEQ ID NO: 161295 - DNA, 25 bp, Homo sapien
tcatttagaaacatcaggcgtgctc

SEQ ID NO: 161296 - DNA, 25 bp, Homo sapien
tgaaagtttttagggctccaggagc

SEQ ID NO: 161297 - DNA, 25 bp, Homo sapien
cattgtagtcactcccctagggcta

SEQ ID NO: 161298 - DNA, 25 bp, Homo sapien
tgaggagacacggggctggtcaagg

SEQ ID NO: 161299 - DNA, 25 bp, Homo sapien
gagacacggggctggtcaagggcac

SEQ ID NO: 161300 - DNA, 25 bp, Homo sapien
gggacaccctgaggagacacggggc

SEQ ID NO: 161301 - DNA, 25 bp, Homo sapien
gacaccctgaggagacacggggctg

SEQ ID NO: 161302 - DNA, 25 bp, Homo sapien
tcagctgtggtggtcgagtcctttc

SEQ ID NO: 161303 - DNA, 25 bp, Homo sapien
tcaactgttggatgacgggatggcc

SEQ ID NO: 161304 - DNA, 25 bp, Homo sapien
tcgcatggcccagctagtggctcag

SEQ ID NO: 161305 - DNA, 25 bp, Homo sapien
cgtgggcgtgctcagttaggatcaa

SEQ ID NO: 161306 - DNA, 25 bp, Homo sapien
ccacacctcgagagggagacctgtg

SEQ ID NO: 161307 - DNA, 25 bp, Homo sapien
agctgttcccgtgcccactttggtc

SEQ ID NO: 161308 - DNA, 25 bp, Homo sapien
cgggggggcacacactacagctgtt

SEQ ID NO: 161309 - DNA, 25 bp, Homo sapien
agggaagggtcgcagtcacaaccac

SEQ ID NO: 161310 - DNA, 25 bp, Homo sapien
gcaaagcggagtgccgggtgggtga

SEQ ID NO: 161311 - DNA, 25 bp, Homo sapien
gcagatgctccctggaggtttcccc

SEQ ID NO: 161312 - DNA, 25 bp, Homo sapien
cagagcaaagcggagtgccgggtgg

SEQ ID NO: 161313 - DNA, 25 bp, Homo sapien
gtgaggaagctggccgctggagagc

SEQ ID NO: 161314 - DNA, 25 bp, Homo sapien
gagaaggggaggttggtcaggccca

SEQ ID NO: 161315 - DNA, 25 bp, Homo sapien
cagctggagtgggagtggctcctgg

SEQ ID NO: 161316 - DNA, 25 bp, Homo sapien
gtggtactcagaccacaggagggcc

SEQ ID NO: 161317 - DNA, 25 bp, Homo sapien
ttggcagggagaaccagcctgctag

SEQ ID NO: 161318 - DNA, 25 bp, Homo sapien
gaccacaggtatgggcttggcaggg

SEQ ID NO: 161319 - DNA, 25 bp, Homo sapien
ggtctctgggatgggacaggagtct

SEQ ID NO: 161320 - DNA, 25 bp, Homo sapien
cgatcacgaggggtctctgggatgg

SEQ ID NO: 161321 - DNA, 25 bp, Homo sapien
cagggcacgatcacgaggggtctct

SEQ ID NO: 161322 - DNA, 25 bp, Homo sapien
caccagcaggggcttgtcgggggca

SEQ ID NO: 161323 - DNA, 25 bp, Homo sapien
ctcagggccacggcggaggcaaagg

SEQ ID NO: 161324 - DNA, 25 bp, Homo sapien
tctcagggccacggcggaggcaaag

SEQ ID NO: 161325 - DNA, 25 bp, Homo sapien
aaggtgcaaagcagcaacgggctgg

SEQ ID NO: 161326 - DNA, 25 bp, Homo sapien
aagccaaacacaccgaagaaagact

SEQ ID NO: 161327 - DNA, 25 bp, Homo sapien
gcaagcgccccggaaaagccaaaca

SEQ ID NO: 161328 - DNA, 25 bp, Homo sapien
tggcaaggcaagcgccccggaaaag

SEQ ID NO: 161329 - DNA, 25 bp, Homo sapien
cagagagttagaatcatggcaaggc

SEQ ID NO: 161330 - DNA, 25 bp, Homo sapien
aagaagacttgggtccgggatggtg

SEQ ID NO: 161331 - DNA, 25 bp, Homo sapien
atccgcagttcttcagccgacccag

SEQ ID NO: 161332 - DNA, 25 bp, Homo sapien
tcttccgcagcttccatccgcagtt

SEQ ID NO: 161333 - DNA, 25 bp, Homo sapien
cgagaggcccgccaggaagaagact

SEQ ID NO: 161334 - DNA, 25 bp, Homo sapien
cagagaccccattcgtgggcgtcca

SEQ ID NO: 161335 - DNA, 25 bp, Homo sapien
gagaccccattcgtgggcgtccaga

SEQ ID NO: 161336 - DNA, 25 bp, Homo sapien
tctcagagaccccattcgtgggcgt

SEQ ID NO: 161337 - DNA, 25 bp, Homo sapien
gaccccattcgtgggcgtccagagg

SEQ ID NO: 161338 - DNA, 25 bp, Homo sapien
ctggatccggctggagctggaaccc

SEQ ID NO: 161339 - DNA, 25 bp, Homo sapien
tctccatgtctgctggatccggctg

SEQ ID NO: 161340 - DNA, 25 bp, Homo sapien
tggcaaagataaggggtctctccat

SEQ ID NO: 161341 - DNA, 25 bp, Homo sapien
tcttctggcagagtgccctcctgct

SEQ ID NO: 161342 - DNA, 25 bp, Homo sapien
cagtccctcatgttgggaggcccac

SEQ ID NO: 161343 - DNA, 25 bp, Homo sapien
acgggccgcccacgatcgccaaggg

SEQ ID NO: 161344 - DNA, 25 bp, Homo sapien
acctgctctgtacacgggccgccca

SEQ ID NO: 161345 - DNA, 25 bp, Homo sapien
gcccacgatcgccaagggctcaggg

SEQ ID NO: 161346 - DNA, 25 bp, Homo sapien
catcgccacgtcctaaggtggcaac

SEQ ID NO: 161347 - DNA, 25 bp, Homo sapien
acagcgcgaccaaaggcactgccat

SEQ ID NO: 161348 - DNA, 25 bp, Homo sapien
caagaacacacagcgcgaccaaagg

SEQ ID NO: 161349 - DNA, 25 bp, Homo sapien
taaggtggcaacgagactcaggcca

SEQ ID NO: 161350 - DNA, 25 bp, Homo sapien
catagaaaggtagcctgtgacagct

SEQ ID NO: 161351 - DNA, 25 bp, Homo sapien
tttgtcaagacccacaggatgtgcg

SEQ ID NO: 161352 - DNA, 25 bp, Homo sapien
ggatgtgcgccacaaagagtgagcc

SEQ ID NO: 161353 - DNA, 25 bp, Homo sapien
gacgggatctgggaattctctgtac

SEQ ID NO: 161354 - DNA, 25 bp, Homo sapien
ccaggtcggcgagcaggatggctgg

SEQ ID NO: 161355 - DNA, 25 bp, Homo sapien
gcccaggtcggcgagcaggatggct

SEQ ID NO: 161356 - DNA, 25 bp, Homo sapien
cccaggtcggcgagcaggatggctg

SEQ ID NO: 161357 - DNA, 25 bp, Homo sapien
ctgcatagatgagaaacgggggtgg

SEQ ID NO: 161358 - DNA, 25 bp, Homo sapien
caggccctgaagacagggcatgaac

SEQ ID NO: 161359 - DNA, 25 bp, Homo sapien
gatgagaaacgggggtggcccaggc

SEQ ID NO: 161360 - DNA, 25 bp, Homo sapien
cccaggccctgaagacagggcatga

SEQ ID NO: 161361 - DNA, 25 bp, Homo sapien
tgctctgtgggacccaaaggcttag

SEQ ID NO: 161362 - DNA, 25 bp, Homo sapien
gaagtcgtgctctgtgggacccaaa

SEQ ID NO: 161363 - DNA, 25 bp, Homo sapien
tcacggagcgaagtcgtgctctgtg

SEQ ID NO: 161364 - DNA, 25 bp, Homo sapien
tctgtgggacccaaaggcttaggac

SEQ ID NO: 161365 - DNA, 25 bp, Homo sapien
agctgcctatggagcggaaggggca

SEQ ID NO: 161366 - DNA, 25 bp, Homo sapien
atggaacagacttgggttggtgctg

SEQ ID NO: 161367 - DNA, 25 bp, Homo sapien
agacatggaacagacttgggttggt

SEQ ID NO: 161368 - DNA, 25 bp, Homo sapien
cagctgcctatggagcggaaggggc

SEQ ID NO: 161369 - DNA, 25 bp, Homo sapien
ggtcccttcccacgtaggcatccag

SEQ ID NO: 161370 - DNA, 25 bp, Homo sapien
gaggtcccttcccacgtaggcatcc

SEQ ID NO: 161371 - DNA, 25 bp, Homo sapien
ctggggtcccacattcgaggtccct

SEQ ID NO: 161372 - DNA, 25 bp, Homo sapien
ggctggggtcccacattcgaggtcc

SEQ ID NO: 161373 - DNA, 25 bp, Homo sapien
ccctctggaccgtggtgaatgacca

SEQ ID NO: 161374 - DNA, 25 bp, Homo sapien
catggtacatagtctcctggtggga

SEQ ID NO: 161375 - DNA, 25 bp, Homo sapien
cacaaatggcggatgcagagcagag

SEQ ID NO: 161376 - DNA, 25 bp, Homo sapien
agatctgagatgagggcccacgttc

SEQ ID NO: 161377 - DNA, 25 bp, Homo sapien
tcgtaatctgcaactaatgggccct

SEQ ID NO: 161378 - DNA, 25 bp, Homo sapien
tacacttctcgaaggcaggtgcacc

SEQ ID NO: 161379 - DNA, 25 bp, Homo sapien
tattacagtggcagaagatacagcc

SEQ ID NO: 161380 - DNA, 25 bp, Homo sapien
gcactggtgccaattaagcggtctg

SEQ ID NO: 161381 - DNA, 25 bp, Homo sapien
tgctccgggcgcttgttaagaatcc

SEQ ID NO: 161382 - DNA, 25 bp, Homo sapien
aaaacacgtcgtgaaacagccgaga

SEQ ID NO: 161383 - DNA, 25 bp, Homo sapien
taaccccatagctttgattcctgag

SEQ ID NO: 161384 - DNA, 25 bp, Homo sapien
gatgtgagtaggtgccacacccagg

SEQ ID NO: 161385 - DNA, 25 bp, Homo sapien
gagaagaagagcagacccctgaggc

SEQ ID NO: 161386 - DNA, 25 bp, Homo sapien
tgttgccatccactcggccggagct

SEQ ID NO: 161387 - DNA, 25 bp, Homo sapien
cctgacacgtggtactggaggctcg

SEQ ID NO: 161388 - DNA, 25 bp, Homo sapien
acatgaattccatgtcctccgcctt

SEQ ID NO: 161389 - DNA, 25 bp, Homo sapien
gattcgtggcctgtctatcccagag

SEQ ID NO: 161390 - DNA, 25 bp, Homo sapien
tatattaggaacacaacgggacaca

SEQ ID NO: 161391 - DNA, 25 bp, Homo sapien
tcaacaaggcacaacgcagcaagtg

SEQ ID NO: 161392 - DNA, 25 bp, Homo sapien
taggatcccaactcggaccttgtgg

SEQ ID NO: 161393 - DNA, 25 bp, Homo sapien
cagagtttgcaaaatgccacgtgcc

SEQ ID NO: 161394 - DNA, 25 bp, Homo sapien
tagaatgtaattgccccaggtgaag

SEQ ID NO: 161395 - DNA, 25 bp, Homo sapien
ggtgacatgccctccctaaatggct

SEQ ID NO: 161396 - DNA, 25 bp, Homo sapien
taatgacttgaaaacctgctcccgg

SEQ ID NO: 161397 - DNA, 25 bp, Homo sapien
tgaatgtttgcagaaacccctccgg

SEQ ID NO: 161398 - DNA, 25 bp, Homo sapien
gaagcagcagcccacgttggaatgg

SEQ ID NO: 161399 - DNA, 25 bp, Homo sapien
gatgtctaaagctgcgtcccgaacc

SEQ ID NO: 161400 - DNA, 25 bp, Homo sapien
taacgggtgggaaaatcgaggctca

SEQ ID NO: 161401 - DNA, 25 bp, Homo sapien
cttgataacccagaacccaggactc

SEQ ID NO: 161402 - DNA, 25 bp, Homo sapien
ggaagcatcactctagtcctgacgc

SEQ ID NO: 161403 - DNA, 25 bp, Homo sapien
ttagactcggcccacttgcagaaac

SEQ ID NO: 161404 - DNA, 25 bp, Homo sapien
gagagcaagtccctgctcacgggct

SEQ ID NO: 161405 - DNA, 25 bp, Homo sapien
ccgtgggaataggtgcagggtgtcc

SEQ ID NO: 161406 - DNA, 25 bp, Homo sapien
agcctgtcccgtgggaataggtgca

SEQ ID NO: 161407 - DNA, 25 bp, Homo sapien
ggtgcagggtgtccccgtggctgtg

SEQ ID NO: 161408 - DNA, 25 bp, Homo sapien
tgtcccgtgggaataggtgcagggt

SEQ ID NO: 161409 - DNA, 25 bp, Homo sapien
gcaggggtccagcccacgggtctga

SEQ ID NO: 161410 - DNA, 25 bp, Homo sapien
ggtctgaccccaggtcagcggcgtc

SEQ ID NO: 161411 - DNA, 25 bp, Homo sapien
caggggtccagcccacgggtctgac

SEQ ID NO: 161412 - DNA, 25 bp, Homo sapien
acgggtctgaccccaggtcagcggc

SEQ ID NO: 161413 - DNA, 25 bp, Homo sapien
gccctgtgctttggaaccgcatcac

SEQ ID NO: 161414 - DNA, 25 bp, Homo sapien
cctgtgctttggaaccgcatcacag

SEQ ID NO: 161415 - DNA, 25 bp, Homo sapien
tggggtgcgccaagccctgtgcttt

SEQ ID NO: 161416 - DNA, 25 bp, Homo sapien
aggtgaaggagcccacttcccacat

SEQ ID NO: 161417 - DNA, 25 bp, Homo sapien
aggaaacacatttattgagagcaca

SEQ ID NO: 161418 - DNA, 25 bp, Homo sapien
cattagcatccatatccccacgtat

SEQ ID NO: 161419 - DNA, 25 bp, Homo sapien
gacattagcatccatatccccacgt

SEQ ID NO: 161420 - DNA, 25 bp, Homo sapien
agacattagcatccatatccccacg

SEQ ID NO: 161421 - DNA, 25 bp, Homo sapien
tagcatccatatccccacgtatttg

SEQ ID NO: 161422 - DNA, 25 bp, Homo sapien
atataggcatgggtgactccgggaa

SEQ ID NO: 161423 - DNA, 25 bp, Homo sapien
tcagggacagatccactgtcgccca

SEQ ID NO: 161424 - DNA, 25 bp, Homo sapien
tggacacaaagacggactgatgggc

SEQ ID NO: 161425 - DNA, 25 bp, Homo sapien
atgtggcatcggcacccagggtgct

SEQ ID NO: 161426 - DNA, 25 bp, Homo sapien
ggcgggcacaggcgtcgtccgggcc

SEQ ID NO: 161427 - DNA, 25 bp, Homo sapien
gctgggtggagggtgcagcatctgg

SEQ ID NO: 161428 - DNA, 25 bp, Homo sapien
gggtgcagcatctggccagagggca

SEQ ID NO: 161429 - DNA, 25 bp, Homo sapien
gggtggagggtgcagcatctggcca

SEQ ID NO: 161430 - DNA, 25 bp, Homo sapien
ggtgcagcatctggccagagggcat

SEQ ID NO: 161431 - DNA, 25 bp, Homo sapien
tgggctggctgtcgtggcttgttaa

SEQ ID NO: 161432 - DNA, 25 bp, Homo sapien
gggttaatgatgccaatatcacagg

SEQ ID NO: 161433 - DNA, 25 bp, Homo sapien
atggggttaatgatgccaatatcac

SEQ ID NO: 161434 - DNA, 25 bp, Homo sapien
ctgtcgtggcttgttaatggggtta

SEQ ID NO: 161435 - DNA, 25 bp, Homo sapien
cattctacttggaaaccggcgtcac

SEQ ID NO: 161436 - DNA, 25 bp, Homo sapien
tgaagagatgaagagctaccagccg

SEQ ID NO: 161437 - DNA, 25 bp, Homo sapien
gtttgaccagttacacggagccgag

SEQ ID NO: 161438 - DNA, 25 bp, Homo sapien
gaagattcttccaatacgggctgcc

SEQ ID NO: 161439 - DNA, 25 bp, Homo sapien
agacggatccgatgatctttctgaa

SEQ ID NO: 161440 - DNA, 25 bp, Homo sapien
gatgatgagacttccgaccagccaa

SEQ ID NO: 161441 - DNA, 25 bp, Homo sapien
agccaagctcagacggatccgatga

SEQ ID NO: 161442 - DNA, 25 bp, Homo sapien
tccgaccagccaagctcagacggat

SEQ ID NO: 161443 - DNA, 25 bp, Homo sapien
gagagaagagctatgctcaggctgc

SEQ ID NO: 161444 - DNA, 25 bp, Homo sapien
gccggattccctagacagtctgatt

SEQ ID NO: 161445 - DNA, 25 bp, Homo sapien
tatctattccgggtccctcagccgg

SEQ ID NO: 161446 - DNA, 25 bp, Homo sapien
ggagatcaggcactatctattccgg

SEQ ID NO: 161447 - DNA, 25 bp, Homo sapien
tcaaaacaaatggagtcctccgagg

SEQ ID NO: 161448 - DNA, 25 bp, Homo sapien
aacaaatggagtcctccgagggctc

SEQ ID NO: 161449 - DNA, 25 bp, Homo sapien
ggagcataagaatccatcatcaaaa

SEQ ID NO: 161450 - DNA, 25 bp, Homo sapien
gactcatttgagacgatgatggagc

SEQ ID NO: 161451 - DNA, 25 bp, Homo sapien
caaaaatccactctgggaccgtcag

SEQ ID NO: 161452 - DNA, 25 bp, Homo sapien
tacatgtctgttgggagggctcaac

SEQ ID NO: 161453 - DNA, 25 bp, Homo sapien
tgaagatctcctcaacagctcagag

SEQ ID NO: 161454 - DNA, 25 bp, Homo sapien
tcagaggtcgggagaacatagcatt

SEQ ID NO: 161455 - DNA, 25 bp, Homo sapien
aatgcatatctcagaggacttttat

SEQ ID NO: 161456 - DNA, 25 bp, Homo sapien
aggaaatgagttaatttctgcaatg

SEQ ID NO: 161457 - DNA, 25 bp, Homo sapien
gatttttctaacatgccgaggatat

SEQ ID NO: 161458 - DNA, 25 bp, Homo sapien
tgagctgaaggcaggaacattgaag

SEQ ID NO: 161459 - DNA, 25 bp, Homo sapien
tcagttggcaagtaaattacacggt

SEQ ID NO: 161460 - DNA, 25 bp, Homo sapien
ggatttaatcattcacatggtcgaa

SEQ ID NO: 161461 - DNA, 25 bp, Homo sapien
cagaaattttgtcttgggtagagta

SEQ ID NO: 161462 - DNA, 25 bp, Homo sapien
taagagcaaattcgtgtatcttgca

SEQ ID NO: 161463 - DNA, 25 bp, Homo sapien
gctttaagcagaagttataagagca

SEQ ID NO: 161464 - DNA, 25 bp, Homo sapien
gaccttatctcataggtaattaaga

SEQ ID NO: 161465 - DNA, 25 bp, Homo sapien
gattaaatttacatagcatgctaag

SEQ ID NO: 161466 - DNA, 25 bp, Homo sapien
tttggacactattttgagggatgac

SEQ ID NO: 161467 - DNA, 25 bp, Homo sapien
catttatagacaaagcatgttttta

SEQ ID NO: 161468 - DNA, 25 bp, Homo sapien
gctaagaagtttggacactattttg

SEQ ID NO: 161469 - DNA, 25 bp, Homo sapien
ggatgtcagccagtaaagcgtttta

SEQ ID NO: 161470 - DNA, 25 bp, Homo sapien
catgcagaggcgttcggatgtcagc

SEQ ID NO: 161471 - DNA, 25 bp, Homo sapien
gagttgaaggcattcaagtgctgtg

SEQ ID NO: 161472 - DNA, 25 bp, Homo sapien
ctggatttgctgaaccagataatga

SEQ ID NO: 161473 - DNA, 25 bp, Homo sapien
ttaatgaattatgggcagagggacg

SEQ ID NO: 161474 - DNA, 25 bp, Homo sapien
ccagatgggaatcccagagtgccca

SEQ ID NO: 161475 - DNA, 25 bp, Homo sapien
gaacaacatgtattgagccacagct

SEQ ID NO: 161476 - DNA, 25 bp, Homo sapien
tcctggtgatgacctgcaagatggg

SEQ ID NO: 161477 - DNA, 25 bp, Homo sapien
gaggagatccacttgaacgcttgca

SEQ ID NO: 161478 - DNA, 25 bp, Homo sapien
ctttttagcaagcagcgaggatcga

SEQ ID NO: 161479 - DNA, 25 bp, Homo sapien
gaaactgctcactcggtggcatggc

SEQ ID NO: 161480 - DNA, 25 bp, Homo sapien
taataaaaggaaggccctcgcagct

SEQ ID NO: 161481 - DNA, 25 bp, Homo sapien
cagaatgaagggcttgagttagttc

SEQ ID NO: 161482 - DNA, 25 bp, Homo sapien
ccaagcgagtctggaaggctggtct

SEQ ID NO: 161483 - DNA, 25 bp, Homo sapien
tgcaaattgtcgaaatttacacatt

SEQ ID NO: 161484 - DNA, 25 bp, Homo sapien
caaagtcagactaacagggcccctc

SEQ ID NO: 161485 - DNA, 25 bp, Homo sapien
aacttctgccttccaggttcgagca

SEQ ID NO: 161486 - DNA, 25 bp, Homo sapien
tctcatgcctcagtctcctgagtag

SEQ ID NO: 161487 - DNA, 25 bp, Homo sapien
ctggaactacaggcatgcaccacca

SEQ ID NO: 161488 - DNA, 25 bp, Homo sapien
aactacaggcatgcaccaccacgcc

SEQ ID NO: 161489 - DNA, 25 bp, Homo sapien
ctgtccagcacccacgggggagtgc

SEQ ID NO: 161490 - DNA, 25 bp, Homo sapien
gtccagcacccacgggggagtgctt

SEQ ID NO: 161491 - DNA, 25 bp, Homo sapien
ccagcacccacgggggagtgcttta

SEQ ID NO: 161492 - DNA, 25 bp, Homo sapien
agcacccacgggggagtgctttact

SEQ ID NO: 161493 - DNA, 25 bp, Homo sapien
taatgtcataaacactcgtgagccc

SEQ ID NO: 161494 - DNA, 25 bp, Homo sapien
ggacctcagtgttttgtgcagaact

SEQ ID NO: 161495 - DNA, 25 bp, Homo sapien
tctcatcattggtccagaaaagccc

SEQ ID NO: 161496 - DNA, 25 bp, Homo sapien
aatgaaacagccaagacctattgtc

SEQ ID NO: 161497 - DNA, 25 bp, Homo sapien
tcactgcagtgtcgttggtaacagc

SEQ ID NO: 161498 - DNA, 25 bp, Homo sapien
gctgagagaaacaggtagccccgtg

SEQ ID NO: 161499 - DNA, 25 bp, Homo sapien
tgaggtgcgcctagcaggtaaacac

SEQ ID NO: 161500 - DNA, 25 bp, Homo sapien
cctgacggctaggactgtgaccaaa

SEQ ID NO: 161501 - DNA, 25 bp, Homo sapien
gcgccacgggacagatgacacgatc

SEQ ID NO: 161502 - DNA, 25 bp, Homo sapien
aggcaaagtcagacccaggcaacac

SEQ ID NO: 161503 - DNA, 25 bp, Homo sapien
cagatgacacgatcctccgacactg

SEQ ID NO: 161504 - DNA, 25 bp, Homo sapien
gaaagaattcgaggcagttttcact

SEQ ID NO: 161505 - DNA, 25 bp, Homo sapien
cagacccgtttacctctggcaagga

SEQ ID NO: 161506 - DNA, 25 bp, Homo sapien
cccagaagggtgtttgcagctttac

SEQ ID NO: 161507 - DNA, 25 bp, Homo sapien
gaatatgactcggtcccaaaggtcc

SEQ ID NO: 161508 - DNA, 25 bp, Homo sapien
tttgccaaggacacgcagctcaagt

SEQ ID NO: 161509 - DNA, 25 bp, Homo sapien
ttggaaagccggccaccggacagga

SEQ ID NO: 161510 - DNA, 25 bp, Homo sapien
ctttggaaagccggccaccggacag

SEQ ID NO: 161511 - DNA, 25 bp, Homo sapien
ctggccccgctgcagagtctcgggc

SEQ ID NO: 161512 - DNA, 25 bp, Homo sapien
tggccaccacgcagcgcctggaagt

SEQ ID NO: 161513 - DNA, 25 bp, Homo sapien
tgcagagtctcgggcccctcggctt

SEQ ID NO: 161514 - DNA, 25 bp, Homo sapien
ggccaccacgcagcgcctggaagtg

SEQ ID NO: 161515 - DNA, 25 bp, Homo sapien
aaaactgtgtgccaagccgctctgg

SEQ ID NO: 161516 - DNA, 25 bp, Homo sapien
agccccactcttcccctatctctgt

SEQ ID NO: 161517 - DNA, 25 bp, Homo sapien
tgtgccaagccgctctggctatcct

SEQ ID NO: 161518 - DNA, 25 bp, Homo sapien
agttgatgcttttaccctaaaactg

SEQ ID NO: 161519 - DNA, 25 bp, Homo sapien
taaaagaaatttatgagtcaatcaa

SEQ ID NO: 161520 - DNA, 25 bp, Homo sapien
aaagaaatttatgagtcaatcaaga

SEQ ID NO: 161521 - DNA, 25 bp, Homo sapien
ctgtaaaagaaatttatgagtcaat

SEQ ID NO: 161522 - DNA, 25 bp, Homo sapien
agaaatttatgagtcaatcaagaat

SEQ ID NO: 161523 - DNA, 25 bp, Homo sapien
gatagtttgaacactgacttgacca

SEQ ID NO: 161524 - DNA, 25 bp, Homo sapien
tagtttgaacactgacttgaccaag

SEQ ID NO: 161525 - DNA, 25 bp, Homo sapien
gtttgaacactgacttgaccaagcc

SEQ ID NO: 161526 - DNA, 25 bp, Homo sapien
tttgaacactgacttgaccaagcca

SEQ ID NO: 161527 - DNA, 25 bp, Homo sapien
tcagacctgacatccatccttccac

SEQ ID NO: 161528 - DNA, 25 bp, Homo sapien
ctatgcatgtatcttgatgtaggca

SEQ ID NO: 161529 - DNA, 25 bp, Homo sapien
cagccatctctccatctatgcatgt

SEQ ID NO: 161530 - DNA, 25 bp, Homo sapien
ggtcttgcttcctagccgacctcga

SEQ ID NO: 161531 - DNA, 25 bp, Homo sapien
gcagcagagacggagagttgccact

SEQ ID NO: 161532 - DNA, 25 bp, Homo sapien
ccagtcagtgcgctcagaagcagaa

SEQ ID NO: 161533 - DNA, 25 bp, Homo sapien
ggtacaactgaagaaaacgcggcac

SEQ ID NO: 161534 - DNA, 25 bp, Homo sapien
gaatgtgtgaagtagggcctagccc

SEQ ID NO: 161535 - DNA, 25 bp, Homo sapien
gtacccagcacgtagtgttcacagc

SEQ ID NO: 161536 - DNA, 25 bp, Homo sapien
acattatctcgtttgattctcacaa

SEQ ID NO: 161537 - DNA, 25 bp, Homo sapien
acccagcacgtagtgttcacagcat

SEQ ID NO: 161538 - DNA, 25 bp, Homo sapien
tacattatctcgtttgattctcaca

SEQ ID NO: 161539 - DNA, 25 bp, Homo sapien
tgccccgacttgtacggtttgtaga

SEQ ID NO: 161540 - DNA, 25 bp, Homo sapien
gaatgcagcgccctcgtgggtccaa

SEQ ID NO: 161541 - DNA, 25 bp, Homo sapien
tttgtagaatgaggaatgcagcgcc

SEQ ID NO: 161542 - DNA, 25 bp, Homo sapien
tccaaccggagggtgacctgaacta

SEQ ID NO: 161543 - DNA, 25 bp, Homo sapien
tcagaattgttccattcgaggcctt

SEQ ID NO: 161544 - DNA, 25 bp, Homo sapien
gcccctcagttgtgaagaattaatc

SEQ ID NO: 161545 - DNA, 25 bp, Homo sapien
taatagccacgaaccactctgattt

SEQ ID NO: 161546 - DNA, 25 bp, Homo sapien
taacaaaattaatagccacgaacca

SEQ ID NO: 161547 - DNA, 25 bp, Homo sapien
tgttttggaataacctcacagaagc

SEQ ID NO: 161548 - DNA, 25 bp, Homo sapien
cccaatgcagagtacggtgactata

SEQ ID NO: 161549 - DNA, 25 bp, Homo sapien
gactatgcagccactacacttgaag

SEQ ID NO: 161550 - DNA, 25 bp, Homo sapien
tggaaaaacggaactacatgaggtg

SEQ ID NO: 161551 - DNA, 25 bp, Homo sapien
tcatttcgtcacttttgtactcatc

SEQ ID NO: 161552 - DNA, 25 bp, Homo sapien
ttttatatagtccacaattgtacac

SEQ ID NO: 161553 - DNA, 25 bp, Homo sapien
tctttgtggtccattcttgacattc

SEQ ID NO: 161554 - DNA, 25 bp, Homo sapien
ccactgaggtcaaagtcttgtttta

SEQ ID NO: 161555 - DNA, 25 bp, Homo sapien
cacaaggctgatattaaaaaggatg

SEQ ID NO: 161556 - DNA, 25 bp, Homo sapien
ggctgatattaaaaaggatgaaaaa

SEQ ID NO: 161557 - DNA, 25 bp, Homo sapien
ctgtggaacacaaggctgatattaa

SEQ ID NO: 161558 - DNA, 25 bp, Homo sapien
caaggctgatattaaaaaggatgaa

SEQ ID NO: 161559 - DNA, 25 bp, Homo sapien
gtgtcattaatttcactctggagcc

SEQ ID NO: 161560 - DNA, 25 bp, Homo sapien
atcaagatcttcatcgacaaagtgt

SEQ ID NO: 161561 - DNA, 25 bp, Homo sapien
cattaatttcactctggagcctcca

SEQ ID NO: 161562 - DNA, 25 bp, Homo sapien
gatcttcatcgacaaagtgtcatta

SEQ ID NO: 161563 - DNA, 25 bp, Homo sapien
tcatttatgaacacccttaaacaac

SEQ ID NO: 161564 - DNA, 25 bp, Homo sapien
cttaaacaactctccagccaagatt

SEQ ID NO: 161565 - DNA, 25 bp, Homo sapien
actctccagccaagatttaacaaca

SEQ ID NO: 161566 - DNA, 25 bp, Homo sapien
gatttaacaacatcaactattaatt

SEQ ID NO: 161567 - DNA, 25 bp, Homo sapien
tgtcccatgtttgccctctcttgtt

SEQ ID NO: 161568 - DNA, 25 bp, Homo sapien
aaacttaggttgaaaacggatgctg

SEQ ID NO: 161569 - DNA, 25 bp, Homo sapien
gagatatgatcacctttgtcccatg

SEQ ID NO: 161570 - DNA, 25 bp, Homo sapien
tgctgaagctacataaaaagaattt

SEQ ID NO: 161571 - DNA, 25 bp, Homo sapien
caggtttcctgcagagagttctcac

SEQ ID NO: 161572 - DNA, 25 bp, Homo sapien
tagagcaagccactatatctgtgtg

SEQ ID NO: 161573 - DNA, 25 bp, Homo sapien
aggtggataactgcaaactgtgtca

SEQ ID NO: 161574 - DNA, 25 bp, Homo sapien
tgtgtcaagggtgactaagcctgct

SEQ ID NO: 161575 - DNA, 25 bp, Homo sapien
acagaggaagcaactcaacaaaaca

SEQ ID NO: 161576 - DNA, 25 bp, Homo sapien
agaggaagcaactcaacaaaacaca

SEQ ID NO: 161577 - DNA, 25 bp, Homo sapien
cagaggaagcaactcaacaaaacac

SEQ ID NO: 161578 - DNA, 25 bp, Homo sapien
ctaacatggtcttgaggtctgtctc

SEQ ID NO: 161579 - DNA, 25 bp, Homo sapien
tatcccagcagacagtctaatgcct

SEQ ID NO: 161580 - DNA, 25 bp, Homo sapien
taagcatcctatccattaccaggtg

SEQ ID NO: 161581 - DNA, 25 bp, Homo sapien
gtccctctcataggaaactcattta

SEQ ID NO: 161582 - DNA, 25 bp, Homo sapien
catcactggtctgtcatctgtcctc

SEQ ID NO: 161583 - DNA, 25 bp, Homo sapien
gctgagaatccaaagaaaactgttc

SEQ ID NO: 161584 - DNA, 25 bp, Homo sapien
gcatccaaaactgactataacaaga

SEQ ID NO: 161585 - DNA, 25 bp, Homo sapien
taagaaggataaatctaccagcatc

SEQ ID NO: 161586 - DNA, 25 bp, Homo sapien
ggtgcgccaacatctccgaaatcac

SEQ ID NO: 161587 - DNA, 25 bp, Homo sapien
gaagtattgttcttgatgctataga

SEQ ID NO: 161588 - DNA, 25 bp, Homo sapien
aacaattgttagctatactgctaac

SEQ ID NO: 161589 - DNA, 25 bp, Homo sapien
tcaggtgacaggtgcgccaacatct

SEQ ID NO: 161590 - DNA, 25 bp, Homo sapien
ttctgagagtgtgccatgaagcaat

SEQ ID NO: 161591 - DNA, 25 bp, Homo sapien
catttgtaatggacctaagttgggc

SEQ ID NO: 161592 - DNA, 25 bp, Homo sapien
gaaatgtgtgtaaatcaaccacggc

SEQ ID NO: 161593 - DNA, 25 bp, Homo sapien
cacagaggcaaaacaccaatgtctt

SEQ ID NO: 161594 - DNA, 25 bp, Homo sapien
tcatgaccgcctgtattaccaacag

SEQ ID NO: 161595 - DNA, 25 bp, Homo sapien
actcatcattggtctaggcctagca

SEQ ID NO: 161596 - DNA, 25 bp, Homo sapien
taaagatagtacatgaggtagccag

SEQ ID NO: 161597 - DNA, 25 bp, Homo sapien
cctgttatgcatagccttgtgtagc

SEQ ID NO: 161598 - DNA, 25 bp, Homo sapien
tatgtatattccttacccaaatagg

SEQ ID NO: 161599 - DNA, 25 bp, Homo sapien
taatgcaggacaaacaatactgatt

SEQ ID NO: 161600 - DNA, 25 bp, Homo sapien
gctcatgattcccagactagatcat

SEQ ID NO: 161601 - DNA, 25 bp, Homo sapien
cccaaataggtatcagatttaatca

SEQ ID NO: 161602 - DNA, 25 bp, Homo sapien
tatgaatggcgttaacacctgtcat

SEQ ID NO: 161603 - DNA, 25 bp, Homo sapien
tcagaaatatgaatggcgttaacac

SEQ ID NO: 161604 - DNA, 25 bp, Homo sapien
aatatgaatggcgttaacacctgtc

SEQ ID NO: 161605 - DNA, 25 bp, Homo sapien
agaaatatgaatggcgttaacacct

SEQ ID NO: 161606 - DNA, 25 bp, Homo sapien
tatacattcactcatgacatcatca

SEQ ID NO: 161607 - DNA, 25 bp, Homo sapien
cactcctgtgtatacattcactcat

SEQ ID NO: 161608 - DNA, 25 bp, Homo sapien
cattcactcatgacatcatcaatat

SEQ ID NO: 161609 - DNA, 25 bp, Homo sapien
cctgtgtatacattcactcatgaca

SEQ ID NO: 161610 - DNA, 25 bp, Homo sapien
tatacacatgaacctgaccccgtgg

SEQ ID NO: 161611 - DNA, 25 bp, Homo sapien
gaaatgtttgatcgtcacactggga

SEQ ID NO: 161612 - DNA, 25 bp, Homo sapien
gaaaacacagtatgatcagcccatc

SEQ ID NO: 161613 - DNA, 25 bp, Homo sapien
ttcagtccatgttgtacctcagtgg

SEQ ID NO: 161614 - DNA, 25 bp, Homo sapien
taatcagtggcccaagaatggcctg

SEQ ID NO: 161615 - DNA, 25 bp, Homo sapien
tgatttatctggcacccaacacaag

SEQ ID NO: 161616 - DNA, 25 bp, Homo sapien
tggcgcgatcacagcacagagcttt

SEQ ID NO: 161617 - DNA, 25 bp, Homo sapien
gaacaagcccacacgaatcaagaat

SEQ ID NO: 161618 - DNA, 25 bp, Homo sapien
catgaacttgaggtgttaacttaca

SEQ ID NO: 161619 - DNA, 25 bp, Homo sapien
taaacactcctgaacaaagcatcca

SEQ ID NO: 161620 - DNA, 25 bp, Homo sapien
tctatcctgtggttgttacgtggaa

SEQ ID NO: 161621 - DNA, 25 bp, Homo sapien
taccccacggatctaactgccaaga

SEQ ID NO: 161622 - DNA, 25 bp, Homo sapien
gactaggtctccttttacaatggac

SEQ ID NO: 161623 - DNA, 25 bp, Homo sapien
tcctgtttcagataccccatggtac

SEQ ID NO: 161624 - DNA, 25 bp, Homo sapien
ggaataagatctccccattagtggc

SEQ ID NO: 161625 - DNA, 25 bp, Homo sapien
aggctgccacacaaagagttatcgg

SEQ ID NO: 161626 - DNA, 25 bp, Homo sapien
agaccagctacatggttttcattct

SEQ ID NO: 161627 - DNA, 25 bp, Homo sapien
tgattagagaataataagaccagct

SEQ ID NO: 161628 - DNA, 25 bp, Homo sapien
tctgctccttagtccacaaataaca

SEQ ID NO: 161629 - DNA, 25 bp, Homo sapien
caaataacaataatggtcttcatga

SEQ ID NO: 161630 - DNA, 25 bp, Homo sapien
tatttgtctctatgctccttactca

SEQ ID NO: 161631 - DNA, 25 bp, Homo sapien
ttaaatcagctggcctatgtccact

SEQ ID NO: 161632 - DNA, 25 bp, Homo sapien
tatatttgtctctatgctccttact

SEQ ID NO: 161633 - DNA, 25 bp, Homo sapien
tcaggataacagttctttcttaaat

SEQ ID NO: 161634 - DNA, 25 bp, Homo sapien
taattaaatcaggtagagtgcgttc

SEQ ID NO: 161635 - DNA, 25 bp, Homo sapien
ttaaatcaggtagagtgcgttcatt

SEQ ID NO: 161636 - DNA, 25 bp, Homo sapien
ctataattaaatcaggtagagtgcg

SEQ ID NO: 161637 - DNA, 25 bp, Homo sapien
agactataattaaatcaggtagagt

SEQ ID NO: 161638 - DNA, 25 bp, Homo sapien
aaatgaccaaatccaatctcgtcta

SEQ ID NO: 161639 - DNA, 25 bp, Homo sapien
ttgctccttaccacagaagaaatcg

SEQ ID NO: 161640 - DNA, 25 bp, Homo sapien
gaagaaatcgccatgctcttcacct

SEQ ID NO: 161641 - DNA, 25 bp, Homo sapien
tgaccaaatccaatctcgtctattc

SEQ ID NO: 161642 - DNA, 25 bp, Homo sapien
actgattaaatcaaccatggtcttc

SEQ ID NO: 161643 - DNA, 25 bp, Homo sapien
gcagagactgattaaatcaaccatg

SEQ ID NO: 161644 - DNA, 25 bp, Homo sapien
tcagcagagactgattaaatcaacc

SEQ ID NO: 161645 - DNA, 25 bp, Homo sapien
gagactgattaaatcaaccatggtc

SEQ ID NO: 161646 - DNA, 25 bp, Homo sapien
gccatagattttattagtgaataaa

SEQ ID NO: 161647 - DNA, 25 bp, Homo sapien
tgatctacatatgccttaactttaa

SEQ ID NO: 161648 - DNA, 25 bp, Homo sapien
aattgtgcttaattggactaaccac

SEQ ID NO: 161649 - DNA, 25 bp, Homo sapien
tcatctcattgatctacatatgcct

SEQ ID NO: 161650 - DNA, 25 bp, Homo sapien
aatcctggattcgagtacattctca

SEQ ID NO: 161651 - DNA, 25 bp, Homo sapien
tgtgactattaaacacgtctgtctg

SEQ ID NO: 161652 - DNA, 25 bp, Homo sapien
tgccttctactcaactaggaaaggg

SEQ ID NO: 161653 - DNA, 25 bp, Homo sapien
aagttaaatagttacacatggaggc

SEQ ID NO: 161654 - DNA, 25 bp, Homo sapien
ccacagatgtgctgaatgattcaca

SEQ ID NO: 161655 - DNA, 25 bp, Homo sapien
gcaaaagcaatcactttgttactta

SEQ ID NO: 161656 - DNA, 25 bp, Homo sapien
ctttccagaaagacttaactctctt

SEQ ID NO: 161657 - DNA, 25 bp, Homo sapien
tactcaaacagacaacaaccatgat

SEQ ID NO: 161658 - DNA, 25 bp, Homo sapien
taaaacttaaataccatgagtactg

SEQ ID NO: 161659 - DNA, 25 bp, Homo sapien
tcttgggaatggacactactactgc

SEQ ID NO: 161660 - DNA, 25 bp, Homo sapien
gacaaccctgacatctcttcatagg

SEQ ID NO: 161661 - DNA, 25 bp, Homo sapien
tctacattagtgcactgattcaatc

SEQ ID NO: 161662 - DNA, 25 bp, Homo sapien
tcagtggaaaatgattgcatcagcc

SEQ ID NO: 161663 - DNA, 25 bp, Homo sapien
aggtggccatcaaaaccttcatcag

SEQ ID NO: 161664 - DNA, 25 bp, Homo sapien
acaggtggccatcaaaaccttcatc

SEQ ID NO: 161665 - DNA, 25 bp, Homo sapien
caggtggccatcaaaaccttcatca

SEQ ID NO: 161666 - DNA, 25 bp, Homo sapien
taactgtacagttcacggtcattgc

SEQ ID NO: 161667 - DNA, 25 bp, Homo sapien
ttgcacagtgattaaatcagatggg

SEQ ID NO: 161668 - DNA, 25 bp, Homo sapien
gtacagttcacggtcattgcacagt

SEQ ID NO: 161669 - DNA, 25 bp, Homo sapien
agagtcttcctgtgacacacggagg

SEQ ID NO: 161670 - DNA, 25 bp, Homo sapien
tatccctaggatagaaggtgaagac

SEQ ID NO: 161671 - DNA, 25 bp, Homo sapien
gcaagcgagtaatacctctgagtca

SEQ ID NO: 161672 - DNA, 25 bp, Homo sapien
tatatgccatcctgcagcaagcgag

SEQ ID NO: 161673 - DNA, 25 bp, Homo sapien
gaaaatgcatgaacgtgaagaccaa

SEQ ID NO: 161674 - DNA, 25 bp, Homo sapien
gaccatggaagggtgcttaagtcaa

SEQ ID NO: 161675 - DNA, 25 bp, Homo sapien
gcaaccagaaacctcatgaccatgg

SEQ ID NO: 161676 - DNA, 25 bp, Homo sapien
gcttctaacacacagaggcaaccag

SEQ ID NO: 161677 - DNA, 25 bp, Homo sapien
cttctaacacacagaggcaaccaga

SEQ ID NO: 161678 - DNA, 25 bp, Homo sapien
aatggcttctcgtttccctacatag

SEQ ID NO: 161679 - DNA, 25 bp, Homo sapien
tcatccttagctagaggtaacacat

SEQ ID NO: 161680 - DNA, 25 bp, Homo sapien
tttcaacagaggcagagtcatcatt

SEQ ID NO: 161681 - DNA, 25 bp, Homo sapien
tcttaaatctgtctatagggtatgg

SEQ ID NO: 161682 - DNA, 25 bp, Homo sapien
aactgtggagaacgcgatcacagca

SEQ ID NO: 161683 - DNA, 25 bp, Homo sapien
tggagaacgcgatcacagcagaagg

SEQ ID NO: 161684 - DNA, 25 bp, Homo sapien
caactgtggagaacgcgatcacagc

SEQ ID NO: 161685 - DNA, 25 bp, Homo sapien
tgtggagaacgcgatcacagcagaa

SEQ ID NO: 161686 - DNA, 25 bp, Homo sapien
gacctcagatttccagatacaaact

SEQ ID NO: 161687 - DNA, 25 bp, Homo sapien
taagtatccctaacaccagtctata

SEQ ID NO: 161688 - DNA, 25 bp, Homo sapien
aacagtcattatcattggtcccaag

SEQ ID NO: 161689 - DNA, 25 bp, Homo sapien
tctaaaacgcttatgaacaaaatcc

SEQ ID NO: 161690 - DNA, 25 bp, Homo sapien
gcctgaccacatatattgatacttg

SEQ ID NO: 161691 - DNA, 25 bp, Homo sapien
aaggagtacaaagcagagcatttga

SEQ ID NO: 161692 - DNA, 25 bp, Homo sapien
cattaagggtaacactttgatccac

SEQ ID NO: 161693 - DNA, 25 bp, Homo sapien
tttgaaccacagtaataaagttgac

SEQ ID NO: 161694 - DNA, 25 bp, Homo sapien
cttggtggaaatggacactagtccc

SEQ ID NO: 161695 - DNA, 25 bp, Homo sapien
tgaatgagcctgaaatagtcctgca

SEQ ID NO: 161696 - DNA, 25 bp, Homo sapien
gaatgtttaaatcagctccagtgca

SEQ ID NO: 161697 - DNA, 25 bp, Homo sapien
tggaggcactcgcttcttgagaaac

SEQ ID NO: 161698 - DNA, 25 bp, Homo sapien
aaacgccaccagtggtcatcattgg

SEQ ID NO: 161699 - DNA, 25 bp, Homo sapien
gatgaacctcaatctattaatccaa

SEQ ID NO: 161700 - DNA, 25 bp, Homo sapien
gacacgtagtattcatcgtccatga

SEQ ID NO: 161701 - DNA, 25 bp, Homo sapien
tgttggacctcagagtttcagacac

SEQ ID NO: 161702 - DNA, 25 bp, Homo sapien
gaccatgaatgcttaggtcggctca

SEQ ID NO: 161703 - DNA, 25 bp, Homo sapien
ctcatgaccatgaatgcttaggtcg

SEQ ID NO: 161704 - DNA, 25 bp, Homo sapien
ccatgaatgcttaggtcggctcaag

SEQ ID NO: 161705 - DNA, 25 bp, Homo sapien
tgaatgcttaggtcggctcaagtgc

SEQ ID NO: 161706 - DNA, 25 bp, Homo sapien
gctccagatcaaggcaagatgttct

SEQ ID NO: 161707 - DNA, 25 bp, Homo sapien
attggcccatgtgcacctctacaga

SEQ ID NO: 161708 - DNA, 25 bp, Homo sapien
ggcccatgtgcacctctacagaggg

SEQ ID NO: 161709 - DNA, 25 bp, Homo sapien
gggctccagatcaaggcaagatgtt

SEQ ID NO: 161710 - DNA, 25 bp, Homo sapien
agcaaaatgatcagctcattgcatc

SEQ ID NO: 161711 - DNA, 25 bp, Homo sapien
gcaacatagccttgatcacagcaaa

SEQ ID NO: 161712 - DNA, 25 bp, Homo sapien
ctaacacagaggcaacatagccttg

SEQ ID NO: 161713 - DNA, 25 bp, Homo sapien
ttgatcacagcaaaatgatcagctc

SEQ ID NO: 161714 - DNA, 25 bp, Homo sapien
caacctaaaccaagacaagaaccat

SEQ ID NO: 161715 - DNA, 25 bp, Homo sapien
cccacagagactacatctctttcat

SEQ ID NO: 161716 - DNA, 25 bp, Homo sapien
tgaaaacccaagaacaagatatttg

SEQ ID NO: 161717 - DNA, 25 bp, Homo sapien
cattaattaacctcaatgttgcaca

SEQ ID NO: 161718 - DNA, 25 bp, Homo sapien
caagatatttgaagaatccttacat

SEQ ID NO: 161719 - DNA, 25 bp, Homo sapien
gagttccagacatatattcaccaaa

SEQ ID NO: 161720 - DNA, 25 bp, Homo sapien
ggtgtaacagcctgaaccattggtt

SEQ ID NO: 161721 - DNA, 25 bp, Homo sapien
cattgatccaggcttggctctcatt

SEQ ID NO: 161722 - DNA, 25 bp, Homo sapien
tccataatttgatgatgcttcaccc

SEQ ID NO: 161723 - DNA, 25 bp, Homo sapien
gaatccatcacctgcattaagaaaa

SEQ ID NO: 161724 - DNA, 25 bp, Homo sapien
tctgactatgggacatattggcccc

SEQ ID NO: 161725 - DNA, 25 bp, Homo sapien
gtgccgccactcaaacatgtaatcg

SEQ ID NO: 161726 - DNA, 25 bp, Homo sapien
tggctttataacacagtctcatgag

SEQ ID NO: 161727 - DNA, 25 bp, Homo sapien
tataacagactctcactttttgtcc

SEQ ID NO: 161728 - DNA, 25 bp, Homo sapien
caccgtcgctacaggatgatcaatc

SEQ ID NO: 161729 - DNA, 25 bp, Homo sapien
gggaacagtcaataccaccgtcgct

SEQ ID NO: 161730 - DNA, 25 bp, Homo sapien
gtggccatttatctaccttctatag

SEQ ID NO: 161731 - DNA, 25 bp, Homo sapien
tacatacgtttaagatggaacaacg

SEQ ID NO: 161732 - DNA, 25 bp, Homo sapien
ccaatcatgatgtccattctgtgga

SEQ ID NO: 161733 - DNA, 25 bp, Homo sapien
aatccattcatatcactgattggtg

SEQ ID NO: 161734 - DNA, 25 bp, Homo sapien
ggaacaacgaacaaccatcaagtca

SEQ ID NO: 161735 - DNA, 25 bp, Homo sapien
ggatctactgaaaccccataattag

SEQ ID NO: 161736 - DNA, 25 bp, Homo sapien
gaaatttagattctcagaccccaca

SEQ ID NO: 161737 - DNA, 25 bp, Homo sapien
gctcgcatttgagaacaactactct

SEQ ID NO: 161738 - DNA, 25 bp, Homo sapien
cagagcaaggacattaactatttca

SEQ ID NO: 161739 - DNA, 25 bp, Homo sapien
gactccatctcaaatataaataaat

SEQ ID NO: 161740 - DNA, 25 bp, Homo sapien
ttctcaataaaataaacaaactgga

SEQ ID NO: 161741 - DNA, 25 bp, Homo sapien
ccatctcaaatataaataaataaat

SEQ ID NO: 161742 - DNA, 25 bp, Homo sapien
cctgcctgggcaacaaacagagtga

SEQ ID NO: 161743 - DNA, 25 bp, Homo sapien
ctccatgctcctactgcagacagcc

SEQ ID NO: 161744 - DNA, 25 bp, Homo sapien
catgctcctactgcagacagcctcc

SEQ ID NO: 161745 - DNA, 25 bp, Homo sapien
tggtctccatgctcctactgcagac

SEQ ID NO: 161746 - DNA, 25 bp, Homo sapien
gttggtctccatgctcctactgcag

SEQ ID NO: 161747 - DNA, 25 bp, Homo sapien
cctgtggcaaccataaggcttctga

SEQ ID NO: 161748 - DNA, 25 bp, Homo sapien
gtctccatgctcctaataccctgtg

SEQ ID NO: 161749 - DNA, 25 bp, Homo sapien
ccatggaagcgtgcttaaatcagtt

SEQ ID NO: 161750 - DNA, 25 bp, Homo sapien
gcttctgaccatggaagcgtgctta

SEQ ID NO: 161751 - DNA, 25 bp, Homo sapien
gcccgtgattcacaaaacccagtaa

SEQ ID NO: 161752 - DNA, 25 bp, Homo sapien
tattactccccttggtcttcacgct

SEQ ID NO: 161753 - DNA, 25 bp, Homo sapien
ttcctaagcgtggtgcaaacagagt

SEQ ID NO: 161754 - DNA, 25 bp, Homo sapien
aacagagtatgtgaccttggaggca

SEQ ID NO: 161755 - DNA, 25 bp, Homo sapien
gcttgtaaccatggaatcggctggc

SEQ ID NO: 161756 - DNA, 25 bp, Homo sapien
aggctcacagaggacggcagatcac

SEQ ID NO: 161757 - DNA, 25 bp, Homo sapien
tccttgacccagaggttgaccatta

SEQ ID NO: 161758 - DNA, 25 bp, Homo sapien
ggctggcaaacatccatcctgaggc

SEQ ID NO: 161759 - DNA, 25 bp, Homo sapien
tcactaacaaggaaatacacctaag

SEQ ID NO: 161760 - DNA, 25 bp, Homo sapien
gatcagccctctttctctattacca

SEQ ID NO: 161761 - DNA, 25 bp, Homo sapien
catataatcatttccacgaagacca

SEQ ID NO: 161762 - DNA, 25 bp, Homo sapien
caagaaggagcattaacgattaccc

SEQ ID NO: 161763 - DNA, 25 bp, Homo sapien
ctggaatctttcatatcatgacagc

SEQ ID NO: 161764 - DNA, 25 bp, Homo sapien
tggaatctttcatatcatgacagca

SEQ ID NO: 161765 - DNA, 25 bp, Homo sapien
actggaatctttcatatcatgacag

SEQ ID NO: 161766 - DNA, 25 bp, Homo sapien
taacacacagatgcaaccacagagc

SEQ ID NO: 161767 - DNA, 25 bp, Homo sapien
gaagcgtgcttgaatcaactcaagt

SEQ ID NO: 161768 - DNA, 25 bp, Homo sapien
cacagagctcatgaccatggaagcg

SEQ ID NO: 161769 - DNA, 25 bp, Homo sapien
tcatgaccatggaagcgtgcttgaa

SEQ ID NO: 161770 - DNA, 25 bp, Homo sapien
tgcataaatcacctcgagattatca

SEQ ID NO: 161771 - DNA, 25 bp, Homo sapien
cataaatcacctcgagattatcact

SEQ ID NO: 161772 - DNA, 25 bp, Homo sapien
gaatgcataaatcacctcgagatta

SEQ ID NO: 161773 - DNA, 25 bp, Homo sapien
ggaagaatgcataaatcacctcgag

SEQ ID NO: 161774 - DNA, 25 bp, Homo sapien
gatgcaatcataaggctggtggcca

SEQ ID NO: 161775 - DNA, 25 bp, Homo sapien
agatgcaatcataaggctggtggcc

SEQ ID NO: 161776 - DNA, 25 bp, Homo sapien
tctctaagctgtgacgcacagatgc

SEQ ID NO: 161777 - DNA, 25 bp, Homo sapien
gctgtgacgcacagatgcaatcata

SEQ ID NO: 161778 - DNA, 25 bp, Homo sapien
tgattcaaagagcttgttgcatcca

SEQ ID NO: 161779 - DNA, 25 bp, Homo sapien
caatcttgatcccaacagaatgatt

SEQ ID NO: 161780 - DNA, 25 bp, Homo sapien
cagaatgattcaaagagcttgttgc

SEQ ID NO: 161781 - DNA, 25 bp, Homo sapien
ccaaacagagggaacacaacaatct

SEQ ID NO: 161782 - DNA, 25 bp, Homo sapien
gcttaaatcacctgagcgtatccat

SEQ ID NO: 161783 - DNA, 25 bp, Homo sapien
tctgtgctcttaatatacagaggca

SEQ ID NO: 161784 - DNA, 25 bp, Homo sapien
gaggcaaccacagagctcgtggcca

SEQ ID NO: 161785 - DNA, 25 bp, Homo sapien
tcgtggccatggaagactgcttaaa

SEQ ID NO: 161786 - DNA, 25 bp, Homo sapien
tatgagcacaaagaccaaaaacaaa

SEQ ID NO: 161787 - DNA, 25 bp, Homo sapien
caaaaacaaacccagtctatgttca

SEQ ID NO: 161788 - DNA, 25 bp, Homo sapien
acaaacccagtctatgttcatgata

SEQ ID NO: 161789 - DNA, 25 bp, Homo sapien
gaaaatgtatgagcacaaagaccaa

SEQ ID NO: 161790 - DNA, 25 bp, Homo sapien
aattctgaatttgccactgacccag

SEQ ID NO: 161791 - DNA, 25 bp, Homo sapien
aaaaacactgtctataattatcctc

SEQ ID NO: 161792 - DNA, 25 bp, Homo sapien
acactgtctataattatcctctcta

SEQ ID NO: 161793 - DNA, 25 bp, Homo sapien
gacacgtaccatttattcctccttg

SEQ ID NO: 161794 - DNA, 25 bp, Homo sapien
tctgcgtgctcccaatcaagaggca

SEQ ID NO: 161795 - DNA, 25 bp, Homo sapien
cacagcatgtcaccagggaggaatc

SEQ ID NO: 161796 - DNA, 25 bp, Homo sapien
ggaatccttccatcagcacaagcca

SEQ ID NO: 161797 - DNA, 25 bp, Homo sapien
gtaggtctgcgtgctcccaatcaag

SEQ ID NO: 161798 - DNA, 25 bp, Homo sapien
gaaactgacttctgcgatggacctc

SEQ ID NO: 161799 - DNA, 25 bp, Homo sapien
gagttccagacacgtattcatcgta

SEQ ID NO: 161800 - DNA, 25 bp, Homo sapien
catcatcgatccagggttgaccctc

SEQ ID NO: 161801 - DNA, 25 bp, Homo sapien
tatcactgggacatagttgaccata

SEQ ID NO: 161802 - DNA, 25 bp, Homo sapien
tttggtctgtacgctccttcctaag

SEQ ID NO: 161803 - DNA, 25 bp, Homo sapien
tggtctgtacgctccttcctaagca

SEQ ID NO: 161804 - DNA, 25 bp, Homo sapien
agagaggcattttaactatcaatcc

SEQ ID NO: 161805 - DNA, 25 bp, Homo sapien
cctatcattagttagtcatctaagc

SEQ ID NO: 161806 - DNA, 25 bp, Homo sapien
tgtcactcacattggtacacatgct

SEQ ID NO: 161807 - DNA, 25 bp, Homo sapien
tacgtccattctaagtacagagcaa

SEQ ID NO: 161808 - DNA, 25 bp, Homo sapien
tattaactgattctctgattgagcc

SEQ ID NO: 161809 - DNA, 25 bp, Homo sapien
ccaagtcctcggattagaggcacat

SEQ ID NO: 161810 - DNA, 25 bp, Homo sapien
ctgattgagccaatcataaatgtaa

SEQ ID NO: 161811 - DNA, 25 bp, Homo sapien
cccaagtcctcggattagaggcaca

SEQ ID NO: 161812 - DNA, 25 bp, Homo sapien
tatatcggagcttaaacttcctgac

SEQ ID NO: 161813 - DNA, 25 bp, Homo sapien
cgtgcccagccgataactgaatatt

SEQ ID NO: 161814 - DNA, 25 bp, Homo sapien
catttccaactgatcaataggctag

SEQ ID NO: 161815 - DNA, 25 bp, Homo sapien
gagcagttcctacagaaattagaca

SEQ ID NO: 161816 - DNA, 25 bp, Homo sapien
ctaagatcttcaccaatgataatcc

SEQ ID NO: 161817 - DNA, 25 bp, Homo sapien
cagctaagatcttcaccaatgataa

SEQ ID NO: 161818 - DNA, 25 bp, Homo sapien
agctaagatcttcaccaatgataat

SEQ ID NO: 161819 - DNA, 25 bp, Homo sapien
gctaagatcttcaccaatgataatc

SEQ ID NO: 161820 - DNA, 25 bp, Homo sapien
taatctcccgtaaagcagcacatcc

SEQ ID NO: 161821 - DNA, 25 bp, Homo sapien
caagggcagctttcgggaagaccta

SEQ ID NO: 161822 - DNA, 25 bp, Homo sapien
tgggcccactcgctggaggcataaa

SEQ ID NO: 161823 - DNA, 25 bp, Homo sapien
cagtgtcccacaactacagcaagga

SEQ ID NO: 161824 - DNA, 25 bp, Homo sapien
tgaacattgagtcggagctgcctgg

SEQ ID NO: 161825 - DNA, 25 bp, Homo sapien
ggccatggcacacaccgagagtttt

SEQ ID NO: 161826 - DNA, 25 bp, Homo sapien
tagggatagccagttgtgaggacac

SEQ ID NO: 161827 - DNA, 25 bp, Homo sapien
gcactgagaacctggcatccgggta

SEQ ID NO: 161828 - DNA, 25 bp, Homo sapien
ctgatttctcccagcgcggtctctg

SEQ ID NO: 161829 - DNA, 25 bp, Homo sapien
ctccgaccaggagtgaacccctgat

SEQ ID NO: 161830 - DNA, 25 bp, Homo sapien
aggagtgaacccctgatttctccca

SEQ ID NO: 161831 - DNA, 25 bp, Homo sapien
cgaccaggagtgaacccctgatttc

SEQ ID NO: 161832 - DNA, 25 bp, Homo sapien
agagtgactccttccatgtgcaggg

SEQ ID NO: 161833 - DNA, 25 bp, Homo sapien
tgagatgccttcctacatgcagagg

SEQ ID NO: 161834 - DNA, 25 bp, Homo sapien
attgaggtccccttcacgctggaga

SEQ ID NO: 161835 - DNA, 25 bp, Homo sapien
gaagcctcggatccaaggacaaaga

SEQ ID NO: 161836 - DNA, 25 bp, Homo sapien
cccctccaatatggcttctccaact

SEQ ID NO: 161837 - DNA, 25 bp, Homo sapien
catggctttaaaggggttgctgcta

SEQ ID NO: 161838 - DNA, 25 bp, Homo sapien
ggtggcccttggcacccaactccat

SEQ ID NO: 161839 - DNA, 25 bp, Homo sapien
ctctgatgagcacccaatctttgga

SEQ ID NO: 161840 - DNA, 25 bp, Homo sapien
gctcaattccactccagaaaaccaa

SEQ ID NO: 161841 - DNA, 25 bp, Homo sapien
gcatcccaaggaccccagagatcct

SEQ ID NO: 161842 - DNA, 25 bp, Homo sapien
cacaaagccacgctagatgtggggg

SEQ ID NO: 161843 - DNA, 25 bp, Homo sapien
agcctttgtgacacaccccactctg

SEQ ID NO: 161844 - DNA, 25 bp, Homo sapien
cacccacaggatacagtcagagacg

SEQ ID NO: 161845 - DNA, 25 bp, Homo sapien
cattcactgagagggtactttggga

SEQ ID NO: 161846 - DNA, 25 bp, Homo sapien
tgcaccttcacaagctctgggcagg

SEQ ID NO: 161847 - DNA, 25 bp, Homo sapien
caggatgaccttccaagacaagagg

SEQ ID NO: 161848 - DNA, 25 bp, Homo sapien
ccagttgaactgacaagttatccca

SEQ ID NO: 161849 - DNA, 25 bp, Homo sapien
cagtcaaaattgtgaacagaagcaa

SEQ ID NO: 161850 - DNA, 25 bp, Homo sapien
gaagaataacaatagggcatatatg

SEQ ID NO: 161851 - DNA, 25 bp, Homo sapien
gaagaccacatattaagacacatga

SEQ ID NO: 161852 - DNA, 25 bp, Homo sapien
agggccttgcccctgaagttggcgt

SEQ ID NO: 161853 - DNA, 25 bp, Homo sapien
tcaggaaccacggaatggtgctgac

SEQ ID NO: 161854 - DNA, 25 bp, Homo sapien
tgcccctgaagttggcgtcacttcc

SEQ ID NO: 161855 - DNA, 25 bp, Homo sapien
tggatttggcattggaagcaggcac

SEQ ID NO: 161856 - DNA, 25 bp, Homo sapien
taagcgtagcgtagtcaaccacgtc

SEQ ID NO: 161857 - DNA, 25 bp, Homo sapien
aagcgtagcgtagtcaaccacgtca

SEQ ID NO: 161858 - DNA, 25 bp, Homo sapien
agcgtagcgtagtcaaccacgtcat

SEQ ID NO: 161859 - DNA, 25 bp, Homo sapien
agaaggctcatgtccacgaagttgc

SEQ ID NO: 161860 - DNA, 25 bp, Homo sapien
tcatgtccacgaagttgcctgaggg

SEQ ID NO: 161861 - DNA, 25 bp, Homo sapien
tgcctgagggcgcttcttctaggct

SEQ ID NO: 161862 - DNA, 25 bp, Homo sapien
ttctaggctgcatttgacgctgaga

SEQ ID NO: 161863 - DNA, 25 bp, Homo sapien
tttaccatcccacatacatattcaa

SEQ ID NO: 161864 - DNA, 25 bp, Homo sapien
tcaaaatgtatgtgggacggtaaac

SEQ ID NO: 161865 - DNA, 25 bp, Homo sapien
tgtatgtgggacggtaaaccatttc

SEQ ID NO: 161866 - DNA, 25 bp, Homo sapien
tcctggacccatatctgctcctaca

SEQ ID NO: 161867 - DNA, 25 bp, Homo sapien
ctggacccatatctgctcctacatg

SEQ ID NO: 161868 - DNA, 25 bp, Homo sapien
ggacccatatctgctcctacatggg

SEQ ID NO: 161869 - DNA, 25 bp, Homo sapien
atctcctggacccatatctgctcct

SEQ ID NO: 161870 - DNA, 25 bp, Homo sapien
ggccagaaccagtgctctgtccctg

SEQ ID NO: 161871 - DNA, 25 bp, Homo sapien
gccagaaccagtgctctgtccctga

SEQ ID NO: 161872 - DNA, 25 bp, Homo sapien
tacatacgtcatggggaaaagacat

SEQ ID NO: 161873 - DNA, 25 bp, Homo sapien
gcagtgtggctgaacccttttcagg

SEQ ID NO: 161874 - DNA, 25 bp, Homo sapien
catgcagtgtggctgaacccttttc

SEQ ID NO: 161875 - DNA, 25 bp, Homo sapien
aagaagtagaccatgttacatacgt

SEQ ID NO: 161876 - DNA, 25 bp, Homo sapien
acccacatccaatgccactaccacc

SEQ ID NO: 161877 - DNA, 25 bp, Homo sapien
cagccaccggcaatgtggcaatgac

SEQ ID NO: 161878 - DNA, 25 bp, Homo sapien
ccaccggcaatgtggcaatgaccac

SEQ ID NO: 161879 - DNA, 25 bp, Homo sapien
acatccaatgccactaccacctcca

SEQ ID NO: 161880 - DNA, 25 bp, Homo sapien
aggacagtggctcttccgcaaagct

SEQ ID NO: 161881 - DNA, 25 bp, Homo sapien
caaagctgatatcacctcctggaag

SEQ ID NO: 161882 - DNA, 25 bp, Homo sapien
aagcagcagccgtactgacaccagg

SEQ ID NO: 161883 - DNA, 25 bp, Homo sapien
ggaagtcttccaaggcgagatgtga

SEQ ID NO: 161884 - DNA, 25 bp, Homo sapien
tgcaaagaggtcgaccgtgtaatgt

SEQ ID NO: 161885 - DNA, 25 bp, Homo sapien
tgtgcgccataaataaagcgaacgc

SEQ ID NO: 161886 - DNA, 25 bp, Homo sapien
tcgaccgtgtaatgtgcgccataaa

SEQ ID NO: 161887 - DNA, 25 bp, Homo sapien
cataaataaagcgaacgcgccacgg

SEQ ID NO: 161888 - DNA, 25 bp, Homo sapien
cccgcagttgatgttagctccagga

SEQ ID NO: 161889 - DNA, 25 bp, Homo sapien
ccccgcagttgatgttagctccagg

SEQ ID NO: 161890 - DNA, 25 bp, Homo sapien
cagttgatgttagctccaggaaagc

SEQ ID NO: 161891 - DNA, 25 bp, Homo sapien
cgcagttgatgttagctccaggaaa

SEQ ID NO: 161892 - DNA, 25 bp, Homo sapien
gatgccataaaaaggctggtcacag

SEQ ID NO: 161893 - DNA, 25 bp, Homo sapien
tggtgatgccataaaaaggctggtc

SEQ ID NO: 161894 - DNA, 25 bp, Homo sapien
cagctatcgcgtttagggttaacct

SEQ ID NO: 161895 - DNA, 25 bp, Homo sapien
ggtcacagcagctatcgcgtttagg

SEQ ID NO: 161896 - DNA, 25 bp, Homo sapien
tgttccgtgacactgtcgtggtgac

SEQ ID NO: 161897 - DNA, 25 bp, Homo sapien
actgtcgtggtgacactgtcttccc

SEQ ID NO: 161898 - DNA, 25 bp, Homo sapien
tgacactgtcgtggtgacactgtct

SEQ ID NO: 161899 - DNA, 25 bp, Homo sapien
ctgcatgttccgtgacactgtcgtg

SEQ ID NO: 161900 - DNA, 25 bp, Homo sapien
aagaggtttcccgtgtatgtttcat

SEQ ID NO: 161901 - DNA, 25 bp, Homo sapien
gaggtttcccgtgtatgtttcatca

SEQ ID NO: 161902 - DNA, 25 bp, Homo sapien
cggacaacctctccttcgagtatcg

SEQ ID NO: 161903 - DNA, 25 bp, Homo sapien
gagaagacaacacggacaacctctc

SEQ ID NO: 161904 - DNA, 25 bp, Homo sapien
cctgccggaatctagcttcatgtcc

SEQ ID NO: 161905 - DNA, 25 bp, Homo sapien
gtggccctgccggaatctagcttca

SEQ ID NO: 161906 - DNA, 25 bp, Homo sapien
acaccagtggccctgccggaatcta

SEQ ID NO: 161907 - DNA, 25 bp, Homo sapien
ggccctgccggaatctagcttcatg

SEQ ID NO: 161908 - DNA, 25 bp, Homo sapien
tctccatggacctgacgccaacagc

SEQ ID NO: 161909 - DNA, 25 bp, Homo sapien
catctggggcctcgtaaggcaagca

SEQ ID NO: 161910 - DNA, 25 bp, Homo sapien
gggacacatcttccgcagtctgaca

SEQ ID NO: 161911 - DNA, 25 bp, Homo sapien
agcgcgtgtcacagccgggacacat

SEQ ID NO: 161912 - DNA, 25 bp, Homo sapien
tgctctcagacaagatgtccactcc

SEQ ID NO: 161913 - DNA, 25 bp, Homo sapien
cgaaatagaatgtctgctctcagac

SEQ ID NO: 161914 - DNA, 25 bp, Homo sapien
tcagacaagatgtccactcccatac

SEQ ID NO: 161915 - DNA, 25 bp, Homo sapien
ccgaaatagaatgtctgctctcaga

SEQ ID NO: 161916 - DNA, 25 bp, Homo sapien
aaaacacgggcaacttctcattaag

SEQ ID NO: 161917 - DNA, 25 bp, Homo sapien
gaagtgcaccgcgaatgtttcgtca

SEQ ID NO: 161918 - DNA, 25 bp, Homo sapien
gaaaaagaagtgcaccgcgaatgtt

SEQ ID NO: 161919 - DNA, 25 bp, Homo sapien
ccgcgaatgtttcgtcacaaataaa

SEQ ID NO: 161920 - DNA, 25 bp, Homo sapien
ttgataccgaaaaagaagtgcacca

SEQ ID NO: 161921 - DNA, 25 bp, Homo sapien
tgtggttgaggcctcgccaactgtg

SEQ ID NO: 161922 - DNA, 25 bp, Homo sapien
gagaggtagtgacaccaggtcccat

SEQ ID NO: 161923 - DNA, 25 bp, Homo sapien
gccaactgtgcctgtccgagaggtg

SEQ ID NO: 161924 - DNA, 25 bp, Homo sapien
cagggatgctgaggttcgggggaca

SEQ ID NO: 161925 - DNA, 25 bp, Homo sapien
gctgaggttcgggggacagggatgc

SEQ ID NO: 161926 - DNA, 25 bp, Homo sapien
gccgtggggatgacgcgtatgctct

SEQ ID NO: 161927 - DNA, 25 bp, Homo sapien
gggatgctgaggttcgggggacagg

SEQ ID NO: 161928 - DNA, 25 bp, Homo sapien
gtaccaaagtgtagcccggagagca

SEQ ID NO: 161929 - DNA, 25 bp, Homo sapien
tctagttctggctggcagagctcca

SEQ ID NO: 161930 - DNA, 25 bp, Homo sapien
agtcccacagcctctagttctggct

SEQ ID NO: 161931 - DNA, 25 bp, Homo sapien
cctccagtaccaaagtgtagcccgg

SEQ ID NO: 161932 - DNA, 25 bp, Homo sapien
agagtgaacacatcaccaatagcct

SEQ ID NO: 161933 - DNA, 25 bp, Homo sapien
caaccattcctggccggcttctggg

SEQ ID NO: 161934 - DNA, 25 bp, Homo sapien
attcctggccggcttctggggtgct

SEQ ID NO: 161935 - DNA, 25 bp, Homo sapien
ccaatagcctccctccaaccattcc

SEQ ID NO: 161936 - DNA, 25 bp, Homo sapien
gtccttcaaggaggcactcagtgct

SEQ ID NO: 161937 - DNA, 25 bp, Homo sapien
aagtccttcaaggaggcactcagtg

SEQ ID NO: 161938 - DNA, 25 bp, Homo sapien
agtccttcaaggaggcactcagtgc

SEQ ID NO: 161939 - DNA, 25 bp, Homo sapien
tctgtgtggccagacatcattcgtg

SEQ ID NO: 161940 - DNA, 25 bp, Homo sapien
gggaattggacggtctgagtcataa

SEQ ID NO: 161941 - DNA, 25 bp, Homo sapien
gacatcattcgtgtcccaaggagtg

SEQ ID NO: 161942 - DNA, 25 bp, Homo sapien
tccacgaggccctgttgagaaccag

SEQ ID NO: 161943 - DNA, 25 bp, Homo sapien
gggagaaggacacccaagaatcttc

SEQ ID NO: 161944 - DNA, 25 bp, Homo sapien
gcttgtgtccagaaagtttcaatcg

SEQ ID NO: 161945 - DNA, 25 bp, Homo sapien
caggactggtcatgttggtgtgaca

SEQ ID NO: 161946 - DNA, 25 bp, Homo sapien
tccagagactgaagcttgtgtccag

SEQ ID NO: 161947 - DNA, 25 bp, Homo sapien
ctaatgtctcttccctaatggaggc

SEQ ID NO: 161948 - DNA, 25 bp, Homo sapien
ccctaatggaggcttcatggtcaag

SEQ ID NO: 161949 - DNA, 25 bp, Homo sapien
gagcgtttccaaagtagcatttaat

SEQ ID NO: 161950 - DNA, 25 bp, Homo sapien
tcatggtcaagagcgtttccaaagt

SEQ ID NO: 161951 - DNA, 25 bp, Homo sapien
tgatactgaaaacgtggaatttcct

SEQ ID NO: 161952 - DNA, 25 bp, Homo sapien
tttcctctatgtttaaccataaata

SEQ ID NO: 161953 - DNA, 25 bp, Homo sapien
ttgatactgaaaacgtggaatttcc

SEQ ID NO: 161954 - DNA, 25 bp, Homo sapien
cctctatgtttaaccataaataaca

SEQ ID NO: 161955 - DNA, 25 bp, Homo sapien
cacaccgaggtgtgaagtgcaggcc

SEQ ID NO: 161956 - DNA, 25 bp, Homo sapien
catctaacaggttgctggagtcagc

SEQ ID NO: 161957 - DNA, 25 bp, Homo sapien
gcaggcccgtgggtgaatcacacat

SEQ ID NO: 161958 - DNA, 25 bp, Homo sapien
ggagtcagccttgttcccaagaagg

SEQ ID NO: 161959 - DNA, 25 bp, Homo sapien
cagagctggagagcgctgagacaat

SEQ ID NO: 161960 - DNA, 25 bp, Homo sapien
gaatgtgtcacctgtacctacctcg

SEQ ID NO: 161961 - DNA, 25 bp, Homo sapien
ccacccattcgtgtgtccggagagg

SEQ ID NO: 161962 - DNA, 25 bp, Homo sapien
caaaggagtcctgaagaccagacac

SEQ ID NO: 161963 - DNA, 25 bp, Homo sapien
ctcgaaaacagcatagacagagcca

SEQ ID NO: 161964 - DNA, 25 bp, Homo sapien
agagccagtgctccgtggtccacca

SEQ ID NO: 161965 - DNA, 25 bp, Homo sapien
ggctcgaaaacagcatagacagagc

SEQ ID NO: 161966 - DNA, 25 bp, Homo sapien
cgaaaacagcatagacagagccagt

SEQ ID NO: 161967 - DNA, 25 bp, Homo sapien
tccaggaagccctcctggggctggc

SEQ ID NO: 161968 - DNA, 25 bp, Homo sapien
ctccaggaagccctcctggggctgg

SEQ ID NO: 161969 - DNA, 25 bp, Homo sapien
caggaagccctcctggggctggcct

SEQ ID NO: 161970 - DNA, 25 bp, Homo sapien
ggaagccctcctggggctggcctac

SEQ ID NO: 161971 - DNA, 25 bp, Homo sapien
tctcttcagctggacgttcgctttc

SEQ ID NO: 161972 - DNA, 25 bp, Homo sapien
tcttcagctggacgttcgctttcct

SEQ ID NO: 161973 - DNA, 25 bp, Homo sapien
ctcttcagctggacgttcgctttcc

SEQ ID NO: 161974 - DNA, 25 bp, Homo sapien
gagccgttgacaccagtgtcattct

SEQ ID NO: 161975 - DNA, 25 bp, Homo sapien
gccgttgacaccagtgtcattctcc

SEQ ID NO: 161976 - DNA, 25 bp, Homo sapien
agccgttgacaccagtgtcattctc

SEQ ID NO: 161977 - DNA, 25 bp, Homo sapien
gacttggtacgtcttcaaggcgcgg

SEQ ID NO: 161978 - DNA, 25 bp, Homo sapien
tctccaagtaccaaaggttagcacg

SEQ ID NO: 161979 - DNA, 25 bp, Homo sapien
tcgacatgagcaaaacgaacaggac

SEQ ID NO: 161980 - DNA, 25 bp, Homo sapien
aggacagggataaccactctccaag

SEQ ID NO: 161981 - DNA, 25 bp, Homo sapien
gaagtggcactgggccagtgacctg

SEQ ID NO: 161982 - DNA, 25 bp, Homo sapien
aagtggcactgggccagtgacctgg

SEQ ID NO: 161983 - DNA, 25 bp, Homo sapien
agtgggaacacagcccaagtcggcc

SEQ ID NO: 161984 - DNA, 25 bp, Homo sapien
ccaagtcggcctgcccttcacacac

SEQ ID NO: 161985 - DNA, 25 bp, Homo sapien
actgtgtggtctttgtcatgaaaaa

SEQ ID NO: 161986 - DNA, 25 bp, Homo sapien
tgaaaaatgcaagagcactccggtg

SEQ ID NO: 161987 - DNA, 25 bp, Homo sapien
ccagagcctgtatcacttctagggc

SEQ ID NO: 161988 - DNA, 25 bp, Homo sapien
ctggtggcgggacacctccacacat

SEQ ID NO: 161989 - DNA, 25 bp, Homo sapien
tggatcgtggcctcgtgctgatggc

SEQ ID NO: 161990 - DNA, 25 bp, Homo sapien
ctcctggatcgtggcctcgtgctga

SEQ ID NO: 161991 - DNA, 25 bp, Homo sapien
cgtggcctcgtgctgatggccagaa

SEQ ID NO: 161992 - DNA, 25 bp, Homo sapien
gatcgtggcctcgtgctgatggcca

SEQ ID NO: 161993 - DNA, 25 bp, Homo sapien
tacgagtatttcacgaggtgctgac

SEQ ID NO: 161994 - DNA, 25 bp, Homo sapien
tccccaggtgtgtcagaggagtccc

SEQ ID NO: 161995 - DNA, 25 bp, Homo sapien
tagagggaacctgccattgacgaga

SEQ ID NO: 161996 - DNA, 25 bp, Homo sapien
tatatccaggaaagaggtgatgctg

SEQ ID NO: 161997 - DNA, 25 bp, Homo sapien
cgtcttcaccagagtctgccttcct

SEQ ID NO: 161998 - DNA, 25 bp, Homo sapien
ggtgacggcccacgtcttcaccaga

SEQ ID NO: 161999 - DNA, 25 bp, Homo sapien
aaggctgacggtgacggcccacgtc

SEQ ID NO: 162000 - DNA, 25 bp, Homo sapien
tgacggcccacgtcttcaccagagt

SEQ ID NO: 162001 - DNA, 25 bp, Homo sapien
atgattcgtcataaattaagcgaac

SEQ ID NO: 162002 - DNA, 25 bp, Homo sapien
actggatgtccctgtatgattcgtc

SEQ ID NO: 162003 - DNA, 25 bp, Homo sapien
cagcagggataaccactcttcaagt

SEQ ID NO: 162004 - DNA, 25 bp, Homo sapien
attaagcgaacacagcagggataac

SEQ ID NO: 162005 - DNA, 25 bp, Homo sapien
gcgggacgctgtccgggaagccttc

SEQ ID NO: 162006 - DNA, 25 bp, Homo sapien
tgaagccaagaccccttgcctgaag

SEQ ID NO: 162007 - DNA, 25 bp, Homo sapien
cccttgcctgaaggcgggacgctgt

SEQ ID NO: 162008 - DNA, 25 bp, Homo sapien
ccaagaccccttgcctgaaggcggg

SEQ ID NO: 162009 - DNA, 25 bp, Homo sapien
tccaaggggagtggctgccaaccac

SEQ ID NO: 162010 - DNA, 25 bp, Homo sapien
gacagacaaggagtccccttccact

SEQ ID NO: 162011 - DNA, 25 bp, Homo sapien
aggagtccccttccacttctccaag

SEQ ID NO: 162012 - DNA, 25 bp, Homo sapien
acaagacagacaaggagtccccttc

SEQ ID NO: 162013 - DNA, 25 bp, Homo sapien
tgaatgattcgtcataagtaaagcg

SEQ ID NO: 162014 - DNA, 25 bp, Homo sapien
gaaaaaagtgttgtccgtgaatgat

SEQ ID NO: 162015 - DNA, 25 bp, Homo sapien
taaagcgaatccaccacgaacaact

SEQ ID NO: 162016 - DNA, 25 bp, Homo sapien
gaacaacttctcttcaagtaccaca

SEQ ID NO: 162017 - DNA, 25 bp, Homo sapien
tggcccgccatccattcttggcttt

SEQ ID NO: 162018 - DNA, 25 bp, Homo sapien
tccaggaagtccttagaggtagcat

SEQ ID NO: 162019 - DNA, 25 bp, Homo sapien
ttttccacatggttgacacaaagac

SEQ ID NO: 162020 - DNA, 25 bp, Homo sapien
ggtcagcgcattgtccatggcccgc

SEQ ID NO: 162021 - DNA, 25 bp, Homo sapien
acggtgctgacaccaacatctcttc

SEQ ID NO: 162022 - DNA, 25 bp, Homo sapien
ccagagttggtgagacccatgggaa

SEQ ID NO: 162023 - DNA, 25 bp, Homo sapien
ctgacaccaacatctcttctggaag

SEQ ID NO: 162024 - DNA, 25 bp, Homo sapien
gtgcatgcccctctggtcaaccagt

SEQ ID NO: 162025 - DNA, 25 bp, Homo sapien
acagtgcatgcccctctggtcaacc

SEQ ID NO: 162026 - DNA, 25 bp, Homo sapien
aacacagtgcatgcccctctggtca

SEQ ID NO: 162027 - DNA, 25 bp, Homo sapien
gaacacagtgcatgcccctctggtc

SEQ ID NO: 162028 - DNA, 25 bp, Homo sapien
cccaagagcacgtgtcatcgcagtc

SEQ ID NO: 162029 - DNA, 25 bp, Homo sapien
gttcgtccttccagacaagacaggg

SEQ ID NO: 162030 - DNA, 25 bp, Homo sapien
caagacagggagcttttgcgtagct

SEQ ID NO: 162031 - DNA, 25 bp, Homo sapien
tggccgcttcccaaagccgcattat

SEQ ID NO: 162032 - DNA, 25 bp, Homo sapien
tttgcgtagctcactggtccctgac

SEQ ID NO: 162033 - DNA, 25 bp, Homo sapien
gagagccgtgtatgactcgctttga

SEQ ID NO: 162034 - DNA, 25 bp, Homo sapien
ctccaagtaccacacatgaacactg

SEQ ID NO: 162035 - DNA, 25 bp, Homo sapien
gaatttgacactaaaagagaggaga

SEQ ID NO: 162036 - DNA, 25 bp, Homo sapien
gaatcgaattcatcacggccagcct

SEQ ID NO: 162037 - DNA, 25 bp, Homo sapien
taaatcggcatcaggtccaagaaga

SEQ ID NO: 162038 - DNA, 25 bp, Homo sapien
tctgataccgaaaagaggtcgaccg

SEQ ID NO: 162039 - DNA, 25 bp, Homo sapien
taaataatgcgaactcaccacggac

SEQ ID NO: 162040 - DNA, 25 bp, Homo sapien
tgagtatggtgtcccctaaatcggc

SEQ ID NO: 162041 - DNA, 25 bp, Homo sapien
cgaccatctcagaagtggcattgcc

SEQ ID NO: 162042 - DNA, 25 bp, Homo sapien
gaccatctcagaagtggcattgcca

SEQ ID NO: 162043 - DNA, 25 bp, Homo sapien
acgaccatctcagaagtggcattgc

SEQ ID NO: 162044 - DNA, 25 bp, Homo sapien
cacgaccatctcagaagtggcattg

SEQ ID NO: 162045 - DNA, 25 bp, Homo sapien
aaactcttccattgttagcagaaaa

SEQ ID NO: 162046 - DNA, 25 bp, Homo sapien
tcaaactcttccattgttagcagaa

SEQ ID NO: 162047 - DNA, 25 bp, Homo sapien
caaactcttccattgttagcagaaa

SEQ ID NO: 162048 - DNA, 25 bp, Homo sapien
gcagacccaatgtcaatgcctgttc

SEQ ID NO: 162049 - DNA, 25 bp, Homo sapien
ctagcgcagacccaatgtcaatgcc

SEQ ID NO: 162050 - DNA, 25 bp, Homo sapien
tagcgcagacccaatgtcaatgcct

SEQ ID NO: 162051 - DNA, 25 bp, Homo sapien
gcgcagacccaatgtcaatgcctgt

SEQ ID NO: 162052 - DNA, 25 bp, Homo sapien
ggcaacacggataacctatcttcaa

SEQ ID NO: 162053 - DNA, 25 bp, Homo sapien
tactgaaaaataggtcaaccgtgta

SEQ ID NO: 162054 - DNA, 25 bp, Homo sapien
gattcgtcacaaataaagcgaaggc

SEQ ID NO: 162055 - DNA, 25 bp, Homo sapien
ggtcaaccgtgtatgattcgtcaca

SEQ ID NO: 162056 - DNA, 25 bp, Homo sapien
gctgccaatgaaccatgtgaccgtg

SEQ ID NO: 162057 - DNA, 25 bp, Homo sapien
taaataaagcgaattcaccaagggc

SEQ ID NO: 162058 - DNA, 25 bp, Homo sapien
cagcaccaggcaaaacagacaagga

SEQ ID NO: 162059 - DNA, 25 bp, Homo sapien
ctcaagggtcaaacatcagcacggg

SEQ ID NO: 162060 - DNA, 25 bp, Homo sapien
tctgagcgacatctgttctcatcca

SEQ ID NO: 162061 - DNA, 25 bp, Homo sapien
ctgagcgacatctgttctcatccac

SEQ ID NO: 162062 - DNA, 25 bp, Homo sapien
tgagcgacatctgttctcatccacc

SEQ ID NO: 162063 - DNA, 25 bp, Homo sapien
gaccctgccaagtgtgagctctttg

SEQ ID NO: 162064 - DNA, 25 bp, Homo sapien
tagctttcctgaccgcgctgttgag

SEQ ID NO: 162065 - DNA, 25 bp, Homo sapien
aaatatcactgtttatcaccgccgc

SEQ ID NO: 162066 - DNA, 25 bp, Homo sapien
aaatgtctttgggatcaacacagcc

SEQ ID NO: 162067 - DNA, 25 bp, Homo sapien
agtgtgtcacgcctgaagtcagcac

SEQ ID NO: 162068 - DNA, 25 bp, Homo sapien
gtcacttacgtatgaatgctctggg

SEQ ID NO: 162069 - DNA, 25 bp, Homo sapien
gaagtcagcacacctttccgggaag

SEQ ID NO: 162070 - DNA, 25 bp, Homo sapien
ccgggaggacgccttaccagtgtgt

SEQ ID NO: 162071 - DNA, 25 bp, Homo sapien
cgtgggtacaatcgggcctgtccca

SEQ ID NO: 162072 - DNA, 25 bp, Homo sapien
tggaacagatgacatgcaccgtggg

SEQ ID NO: 162073 - DNA, 25 bp, Homo sapien
gcaggagtggaacagatgacatgca

SEQ ID NO: 162074 - DNA, 25 bp, Homo sapien
gtggtcccggaacgcaccggagtca

SEQ ID NO: 162075 - DNA, 25 bp, Homo sapien
aggaaaggcgctgagctgaagcgcg

SEQ ID NO: 162076 - DNA, 25 bp, Homo sapien
cgctgagctgaagcgcgatcggctc

SEQ ID NO: 162077 - DNA, 25 bp, Homo sapien
cacaggctgcagcggatacggacgg

SEQ ID NO: 162078 - DNA, 25 bp, Homo sapien
agctgaagcgcgatcggctccccgg

SEQ ID NO: 162079 - DNA, 25 bp, Homo sapien
tctcaggtacccagagtgccatcgg

SEQ ID NO: 162080 - DNA, 25 bp, Homo sapien
taataaaagcgaactcatcacagac

SEQ ID NO: 162081 - DNA, 25 bp, Homo sapien
ccatcggctcaagaacgtggctgcc

SEQ ID NO: 162082 - DNA, 25 bp, Homo sapien
caggccatctgtgttatattcgtca

SEQ ID NO: 162083 - DNA, 25 bp, Homo sapien
gcatcaagtggcacagggtcactgt

SEQ ID NO: 162084 - DNA, 25 bp, Homo sapien
gaaatcggcggggaacatgcacgct

SEQ ID NO: 162085 - DNA, 25 bp, Homo sapien
taatgaaattctgcatcaagtggca

SEQ ID NO: 162086 - DNA, 25 bp, Homo sapien
cactgtgtttgggttagaaatcggc

SEQ ID NO: 162087 - DNA, 25 bp, Homo sapien
tcacagagcctctggttgaagggtc

SEQ ID NO: 162088 - DNA, 25 bp, Homo sapien
gaagacgggacaagtcacagagcct

SEQ ID NO: 162089 - DNA, 25 bp, Homo sapien
ttgaagggtccatggagactttcat

SEQ ID NO: 162090 - DNA, 25 bp, Homo sapien
cactgaagacgggacaagtcacaga

SEQ ID NO: 162091 - DNA, 25 bp, Homo sapien
tcctaaagcccgtgcaagcagggtg

SEQ ID NO: 162092 - DNA, 25 bp, Homo sapien
tgagcgatctgtcttccaggacaca

SEQ ID NO: 162093 - DNA, 25 bp, Homo sapien
gaatattctggcaagctaagtctgg

SEQ ID NO: 162094 - DNA, 25 bp, Homo sapien
gaaaagaggcccattcggtgagcga

SEQ ID NO: 162095 - DNA, 25 bp, Homo sapien
tgaggacccctgacgaccgtgagct

SEQ ID NO: 162096 - DNA, 25 bp, Homo sapien
tgacatttgggggttctctgaatcc

SEQ ID NO: 162097 - DNA, 25 bp, Homo sapien
tctccaggactgcaccagccaacgt

SEQ ID NO: 162098 - DNA, 25 bp, Homo sapien
gaatccttgaggacccctgacgacc

SEQ ID NO: 162099 - DNA, 25 bp, Homo sapien
caagggccctggcttctaaaagctc

SEQ ID NO: 162100 - DNA, 25 bp, Homo sapien
ggtcagatttcatccaaggagacag

SEQ ID NO: 162101 - DNA, 25 bp, Homo sapien
ggagacaggcatgaactaagcacct

SEQ ID NO: 162102 - DNA, 25 bp, Homo sapien
tcagtacaccctcctgtgttgaaca

SEQ ID NO: 162103 - DNA, 25 bp, Homo sapien
aagccttggcagcacttggtggaga

SEQ ID NO: 162104 - DNA, 25 bp, Homo sapien
ttttcagcagcctcgcctgggaagc

SEQ ID NO: 162105 - DNA, 25 bp, Homo sapien
cacttggtggagatttatgcccatc

SEQ ID NO: 162106 - DNA, 25 bp, Homo sapien
tccacaaacgttctctgagtgcctc

SEQ ID NO: 162107 - DNA, 25 bp, Homo sapien
gccctgcttcccggccctcaagccc

SEQ ID NO: 162108 - DNA, 25 bp, Homo sapien
catccatgacaaattgtccctctac

SEQ ID NO: 162109 - DNA, 25 bp, Homo sapien
tcaagcccattcccatccatgacaa

SEQ ID NO: 162110 - DNA, 25 bp, Homo sapien
cctgcttcccggccctcaagcccat

SEQ ID NO: 162111 - DNA, 25 bp, Homo sapien
tgcacgctgctgggataacgggaaa

SEQ ID NO: 162112 - DNA, 25 bp, Homo sapien
cgctgctgggataacgggaaaatga

SEQ ID NO: 162113 - DNA, 25 bp, Homo sapien
cacgctgctgggataacgggaaaat

SEQ ID NO: 162114 - DNA, 25 bp, Homo sapien
ctgctgggataacgggaaaatgatg

SEQ ID NO: 162115 - DNA, 25 bp, Homo sapien
agggcctagggccttcgggcaggca

SEQ ID NO: 162116 - DNA, 25 bp, Homo sapien
gcccagggcctagggccttcgggca

SEQ ID NO: 162117 - DNA, 25 bp, Homo sapien
ccagggcctagggccttcgggcagg

SEQ ID NO: 162118 - DNA, 25 bp, Homo sapien
ggcctagggccttcgggcaggcagt

SEQ ID NO: 162119 - DNA, 25 bp, Homo sapien
ttcatggtcgggatcaaccgcaggc

SEQ ID NO: 162120 - DNA, 25 bp, Homo sapien
aacgaagatctcacagatggcggga

SEQ ID NO: 162121 - DNA, 25 bp, Homo sapien
tgtgcacaagtcagaaacagccgcg

SEQ ID NO: 162122 - DNA, 25 bp, Homo sapien
tatctgactgcaaattgagactgcc

SEQ ID NO: 162123 - DNA, 25 bp, Homo sapien
cagaaaacctatagacacctggctg

SEQ ID NO: 162124 - DNA, 25 bp, Homo sapien
gccccatcatttccgaatcaccagg

SEQ ID NO: 162125 - DNA, 25 bp, Homo sapien
ggtctgcagcccaacctcgcagaat

SEQ ID NO: 162126 - DNA, 25 bp, Homo sapien
aaaccagccacagataccaccacac

SEQ ID NO: 162127 - DNA, 25 bp, Homo sapien
tggcaaagcggggactgagactctt

SEQ ID NO: 162128 - DNA, 25 bp, Homo sapien
gggactgagactcttgaaatgtgtt

SEQ ID NO: 162129 - DNA, 25 bp, Homo sapien
ctcttgaaatgtgtttatcccaggc

SEQ ID NO: 162130 - DNA, 25 bp, Homo sapien
gagactcttgaaatgtgtttatccc

SEQ ID NO: 162131 - DNA, 25 bp, Homo sapien
gtgacccatggctccggggaccaga

SEQ ID NO: 162132 - DNA, 25 bp, Homo sapien
gaccagaaggtaaacagtttcggca

SEQ ID NO: 162133 - DNA, 25 bp, Homo sapien
ggtaaacagtttcggcacagggtgc

SEQ ID NO: 162134 - DNA, 25 bp, Homo sapien
atgaggcccaggtcgtgacccatgg

SEQ ID NO: 162135 - DNA, 25 bp, Homo sapien
tcaaatagcttgacagcaaagtgtt

SEQ ID NO: 162136 - DNA, 25 bp, Homo sapien
gctgtcctgctgagggatgtgcccc

SEQ ID NO: 162137 - DNA, 25 bp, Homo sapien
gaagagcaggaattccgcggttcct

SEQ ID NO: 162138 - DNA, 25 bp, Homo sapien
ccaggctgcggcaaagactgttgct

SEQ ID NO: 162139 - DNA, 25 bp, Homo sapien
tgcacagcgacctcaggattggtgg

SEQ ID NO: 162140 - DNA, 25 bp, Homo sapien
ggtgcacagcgacctcaggattggt

SEQ ID NO: 162141 - DNA, 25 bp, Homo sapien
caggtgcacagcgacctcaggattg

SEQ ID NO: 162142 - DNA, 25 bp, Homo sapien
ctgcaggtgcacagcgacctcagga

SEQ ID NO: 162143 - DNA, 25 bp, Homo sapien
ctgggggcgtatcaggagggcacag

SEQ ID NO: 162144 - DNA, 25 bp, Homo sapien
tcctaagagcaaaaacgggctgttg

SEQ ID NO: 162145 - DNA, 25 bp, Homo sapien
ggaccagagtgtgaacgattttggc

SEQ ID NO: 162146 - DNA, 25 bp, Homo sapien
gctgtttgcggttcttgttctgttt

SEQ ID NO: 162147 - DNA, 25 bp, Homo sapien
cagagtgtgaacgattttggcatag

SEQ ID NO: 162148 - DNA, 25 bp, Homo sapien
ttgcctccgcttgtccagaagtctc

SEQ ID NO: 162149 - DNA, 25 bp, Homo sapien
gattgccagccggtgacacttggtc

SEQ ID NO: 162150 - DNA, 25 bp, Homo sapien
ggtgacacttggtctcccagcagct

SEQ ID NO: 162151 - DNA, 25 bp, Homo sapien
tgcacccaagccgtcatggtcggct

SEQ ID NO: 162152 - DNA, 25 bp, Homo sapien
tgccccccagcccaagtccaggctg

SEQ ID NO: 162153 - DNA, 25 bp, Homo sapien
ccagtttttccactctgccccccag

SEQ ID NO: 162154 - DNA, 25 bp, Homo sapien
agcccaagtccaggctgcttggcca

SEQ ID NO: 162155 - DNA, 25 bp, Homo sapien
cagtttttccactctgccccccagc

SEQ ID NO: 162156 - DNA, 25 bp, Homo sapien
cttgaacctggtcctgatcacccag

SEQ ID NO: 162157 - DNA, 25 bp, Homo sapien
gaacctggtcctgatcacccagcag

SEQ ID NO: 162158 - DNA, 25 bp, Homo sapien
tgaacctggtcctgatcacccagca

SEQ ID NO: 162159 - DNA, 25 bp, Homo sapien
ttgaacctggtcctgatcacccagc

SEQ ID NO: 162160 - DNA, 25 bp, Homo sapien
tttgttgaacacttagtttgacctc

SEQ ID NO: 162161 - DNA, 25 bp, Homo sapien
tggatccaatccagtttttgttgaa

SEQ ID NO: 162162 - DNA, 25 bp, Homo sapien
tgaggctttcaactggatccaatcc

SEQ ID NO: 162163 - DNA, 25 bp, Homo sapien
gacctccagattccaacttggattc

SEQ ID NO: 162164 - DNA, 25 bp, Homo sapien
agtcttgtaggcattatcattatca

SEQ ID NO: 162165 - DNA, 25 bp, Homo sapien
cagtcttgtaggcattatcattatc

SEQ ID NO: 162166 - DNA, 25 bp, Homo sapien
tctcagctgccactattgatatagt

SEQ ID NO: 162167 - DNA, 25 bp, Homo sapien
cagctgccactattgatatagtcac

SEQ ID NO: 162168 - DNA, 25 bp, Homo sapien
gggaggaggtttacagctgcatctc

SEQ ID NO: 162169 - DNA, 25 bp, Homo sapien
tccgtagcaagagatggcagtatcc

SEQ ID NO: 162170 - DNA, 25 bp, Homo sapien
cagtggctgctctttgggtgcgggg

SEQ ID NO: 162171 - DNA, 25 bp, Homo sapien
gaacagctgctggtaacctccgtag

SEQ ID NO: 162172 - DNA, 25 bp, Homo sapien
ctttccccactgggccgggcaaatg

SEQ ID NO: 162173 - DNA, 25 bp, Homo sapien
tttatttctggaagaccaatgtacc

SEQ ID NO: 162174 - DNA, 25 bp, Homo sapien
caggtcctgagtgcatgggcctctc

SEQ ID NO: 162175 - DNA, 25 bp, Homo sapien
tgggcacaccggcctatctccaaga

SEQ ID NO: 162176 - DNA, 25 bp, Homo sapien
tcttaggaggccaattgaagcgggg

SEQ ID NO: 162177 - DNA, 25 bp, Homo sapien
ctggatcccgactgtctcctcccaa

SEQ ID NO: 162178 - DNA, 25 bp, Homo sapien
gatgccggggtccagtcagaggctc

SEQ ID NO: 162179 - DNA, 25 bp, Homo sapien
gaggccaattgaagcggggccttcc

SEQ ID NO: 162180 - DNA, 25 bp, Homo sapien
cgggagccgccttggaaggagaact

SEQ ID NO: 162181 - DNA, 25 bp, Homo sapien
cagctgcagggtgcttgggtgggcc

SEQ ID NO: 162182 - DNA, 25 bp, Homo sapien
ggtggccacaggatgacaacaggag

SEQ ID NO: 162183 - DNA, 25 bp, Homo sapien
gaacgcagttccagcaggagggaca

SEQ ID NO: 162184 - DNA, 25 bp, Homo sapien
cacgggatggtcacgcagggtcagg

SEQ ID NO: 162185 - DNA, 25 bp, Homo sapien
ggtcccctgagctttgagtactgtc

SEQ ID NO: 162186 - DNA, 25 bp, Homo sapien
tccctgagccgcacgggatggtcac

SEQ ID NO: 162187 - DNA, 25 bp, Homo sapien
ctgccggtcccctgagctttgagta

SEQ ID NO: 162188 - DNA, 25 bp, Homo sapien
ggacacagttctgcagatacagggc

SEQ ID NO: 162189 - DNA, 25 bp, Homo sapien
gagggctgcaaaaatctgtgtcccc

SEQ ID NO: 162190 - DNA, 25 bp, Homo sapien
gaagtgcacggtccaggtgggcatt

SEQ ID NO: 162191 - DNA, 25 bp, Homo sapien
agcatcagagggctgcaaaaatctg

SEQ ID NO: 162192 - DNA, 25 bp, Homo sapien
ggtgggcattgggtcatcccagccc

SEQ ID NO: 162193 - DNA, 25 bp, Homo sapien
tggagctgcgcagtttcaggccact

SEQ ID NO: 162194 - DNA, 25 bp, Homo sapien
gttcccagacttgcactgactccat

SEQ ID NO: 162195 - DNA, 25 bp, Homo sapien
ggcctccggtggagcctcctgctct

SEQ ID NO: 162196 - DNA, 25 bp, Homo sapien
cagccagggcccgttcctctgggtg

SEQ ID NO: 162197 - DNA, 25 bp, Homo sapien
ccagccagggcccgttcctctgggt

SEQ ID NO: 162198 - DNA, 25 bp, Homo sapien
agccagggcccgttcctctgggtgg

SEQ ID NO: 162199 - DNA, 25 bp, Homo sapien
tagccctgagacttcctcaaacccg

SEQ ID NO: 162200 - DNA, 25 bp, Homo sapien
cgtagccctgagacttcctcaaacc

SEQ ID NO: 162201 - DNA, 25 bp, Homo sapien
gacgtagccctgagacttcctcaaa

SEQ ID NO: 162202 - DNA, 25 bp, Homo sapien
tgacgtagccctgagacttcctcaa

SEQ ID NO: 162203 - DNA, 25 bp, Homo sapien
cacagagggaatattcatgaactca

SEQ ID NO: 162204 - DNA, 25 bp, Homo sapien
caagttcgaattgtgtgtccacaga

SEQ ID NO: 162205 - DNA, 25 bp, Homo sapien
ccgtccctccctcaggtggtgggtg

SEQ ID NO: 162206 - DNA, 25 bp, Homo sapien
gccgtgtgcgcgcaagttcgaattg

SEQ ID NO: 162207 - DNA, 25 bp, Homo sapien
gaatcaagccgatcgggctggctct

SEQ ID NO: 162208 - DNA, 25 bp, Homo sapien
caagagtggaggaatcaagccgatc

SEQ ID NO: 162209 - DNA, 25 bp, Homo sapien
aggaatcaagccgatcgggctggct

SEQ ID NO: 162210 - DNA, 25 bp, Homo sapien
gtgtcaagagtggaggaatcaagcc

SEQ ID NO: 162211 - DNA, 25 bp, Homo sapien
cagcatgtacatgtgcgtggttgcc

SEQ ID NO: 162212 - DNA, 25 bp, Homo sapien
tccacctgtgttgtggcatgccaac

SEQ ID NO: 162213 - DNA, 25 bp, Homo sapien
acatttccacatccgagagggtccc

SEQ ID NO: 162214 - DNA, 25 bp, Homo sapien
tggatgcatctcacaggcacagaca

SEQ ID NO: 162215 - DNA, 25 bp, Homo sapien
cagccagatgtgtgggacggtcagt

SEQ ID NO: 162216 - DNA, 25 bp, Homo sapien
aggcagcatctccagatcttaggac

SEQ ID NO: 162217 - DNA, 25 bp, Homo sapien
cggtcagtgtcatgatgcagaggcc

SEQ ID NO: 162218 - DNA, 25 bp, Homo sapien
catgaggtaatagcgaggaggcggc

SEQ ID NO: 162219 - DNA, 25 bp, Homo sapien
tttgctgagggtccacacccagcag

SEQ ID NO: 162220 - DNA, 25 bp, Homo sapien
gtgacccagcgtgtccaaggactgg

SEQ ID NO: 162221 - DNA, 25 bp, Homo sapien
taggaggtgacccagcgtgtccaag

SEQ ID NO: 162222 - DNA, 25 bp, Homo sapien
aaactcctcgctgtctagggccatg

SEQ ID NO: 162223 - DNA, 25 bp, Homo sapien
tgccgggaatctccgggtgcgtggg

SEQ ID NO: 162224 - DNA, 25 bp, Homo sapien
tcatgatttctaccgcaggtgggat

SEQ ID NO: 162225 - DNA, 25 bp, Homo sapien
ctccgggtgcgtgggaactgtcttt

SEQ ID NO: 162226 - DNA, 25 bp, Homo sapien
ctaagatcatgatttctaccgcagg

SEQ ID NO: 162227 - DNA, 25 bp, Homo sapien
ttgagcgggtatcgaccgcctccgc

SEQ ID NO: 162228 - DNA, 25 bp, Homo sapien
attgagcgggtatcgaccgcctccg

SEQ ID NO: 162229 - DNA, 25 bp, Homo sapien
tcagccattgagcgggtatcgaccg

SEQ ID NO: 162230 - DNA, 25 bp, Homo sapien
gccattgagcgggtatcgaccgcct

SEQ ID NO: 162231 - DNA, 25 bp, Homo sapien
cggctctgccgacgtcctctgcctg

SEQ ID NO: 162232 - DNA, 25 bp, Homo sapien
ccgacgtcctctgcctgcttgaatg

SEQ ID NO: 162233 - DNA, 25 bp, Homo sapien
gacgtcctctgcctgcttgaatgcc

SEQ ID NO: 162234 - DNA, 25 bp, Homo sapien
tctgccgacgtcctctgcctgcttg

SEQ ID NO: 162235 - DNA, 25 bp, Homo sapien
tggcggtagggacggagctggccag

SEQ ID NO: 162236 - DNA, 25 bp, Homo sapien
ggcggtagggacggagctggccagg

SEQ ID NO: 162237 - DNA, 25 bp, Homo sapien
agcccctgcaggggctagaaattgg

SEQ ID NO: 162238 - DNA, 25 bp, Homo sapien
caggggctagaaattggttgagcct

SEQ ID NO: 162239 - DNA, 25 bp, Homo sapien
cctgcaggggctagaaattggttga

SEQ ID NO: 162240 - DNA, 25 bp, Homo sapien
aggggctagaaattggttgagcctc

SEQ ID NO: 162241 - DNA, 25 bp, Homo sapien
tggagctttggacacaggagctccc

SEQ ID NO: 162242 - DNA, 25 bp, Homo sapien
gggcctgtgactggccatccttgcc

SEQ ID NO: 162243 - DNA, 25 bp, Homo sapien
ctttggacacaggagctcccgggga

SEQ ID NO: 162244 - DNA, 25 bp, Homo sapien
ctcccggggacagcggccgggcctg

SEQ ID NO: 162245 - DNA, 25 bp, Homo sapien
tggtccagaacagaggttccgtgaa

SEQ ID NO: 162246 - DNA, 25 bp, Homo sapien
ttgctgccctctcgggcatgcagca

SEQ ID NO: 162247 - DNA, 25 bp, Homo sapien
aacaaggtgactccctgacttgctg

SEQ ID NO: 162248 - DNA, 25 bp, Homo sapien
taaacgctgggcttggtgtggacca

SEQ ID NO: 162249 - DNA, 25 bp, Homo sapien
ctggcaagcagccacgggagggctg

SEQ ID NO: 162250 - DNA, 25 bp, Homo sapien
gccacgggagggctgaatcacagtt

SEQ ID NO: 162251 - DNA, 25 bp, Homo sapien
aagcagccacgggagggctgaatca

SEQ ID NO: 162252 - DNA, 25 bp, Homo sapien
gcagccacgggagggctgaatcaca

SEQ ID NO: 162253 - DNA, 25 bp, Homo sapien
cttgggtgggctttcgaggcacggt

SEQ ID NO: 162254 - DNA, 25 bp, Homo sapien
accttctccctttcatgggtgacag

SEQ ID NO: 162255 - DNA, 25 bp, Homo sapien
cccagaattccgaggacagggtgtg

SEQ ID NO: 162256 - DNA, 25 bp, Homo sapien
ggcacggtgcctggagagaacatct

SEQ ID NO: 162257 - DNA, 25 bp, Homo sapien
aacgttcttgttggggtggcagcct

SEQ ID NO: 162258 - DNA, 25 bp, Homo sapien
actgccttgtgccttccacgcttcc

SEQ ID NO: 162259 - DNA, 25 bp, Homo sapien
cttgtgccttccacgcttccagaat

SEQ ID NO: 162260 - DNA, 25 bp, Homo sapien
gcagcctgagcttctctcttaactg

SEQ ID NO: 162261 - DNA, 25 bp, Homo sapien
aaggcgtggagaggcccaagccggg

SEQ ID NO: 162262 - DNA, 25 bp, Homo sapien
agggctgtccgggcacaggctcttg

SEQ ID NO: 162263 - DNA, 25 bp, Homo sapien
tggagaggcccaagccgggagggct

SEQ ID NO: 162264 - DNA, 25 bp, Homo sapien
ctggaaggcgtggagaggcccaagc

SEQ ID NO: 162265 - DNA, 25 bp, Homo sapien
ggcagtctcggcgaagccttgaatc

SEQ ID NO: 162266 - DNA, 25 bp, Homo sapien
tctcggcgaagccttgaatctcacg

SEQ ID NO: 162267 - DNA, 25 bp, Homo sapien
ggcgaagccttgaatctcacggctc

SEQ ID NO: 162268 - DNA, 25 bp, Homo sapien
gaagccttgaatctcacggctccgc

SEQ ID NO: 162269 - DNA, 25 bp, Homo sapien
gagaactcgccaaagcagatttcca

SEQ ID NO: 162270 - DNA, 25 bp, Homo sapien
tttgctgacgagctttgctgagcgg

SEQ ID NO: 162271 - DNA, 25 bp, Homo sapien
gcactggccgagttttgctttgctg

SEQ ID NO: 162272 - DNA, 25 bp, Homo sapien
tacgaaaatagctgcactggccgag

SEQ ID NO: 162273 - DNA, 25 bp, Homo sapien
tttttctggaagtgcctgagcgagg

SEQ ID NO: 162274 - DNA, 25 bp, Homo sapien
cagagctcagggagaggttgtctcc

SEQ ID NO: 162275 - DNA, 25 bp, Homo sapien
caatggacttggagatttttctgga

SEQ ID NO: 162276 - DNA, 25 bp, Homo sapien
ggtctgtgcccaggccagcgtcaca

SEQ ID NO: 162277 - DNA, 25 bp, Homo sapien
tgcatgtatattgcctgactctgac

SEQ ID NO: 162278 - DNA, 25 bp, Homo sapien
atctgcatgtatattgcctgactct

SEQ ID NO: 162279 - DNA, 25 bp, Homo sapien
catgtatattgcctgactctgaccc

SEQ ID NO: 162280 - DNA, 25 bp, Homo sapien
tctgcatgtatattgcctgactctg

SEQ ID NO: 162281 - DNA, 25 bp, Homo sapien
cgcgtaactctggtgctttgcatca

SEQ ID NO: 162282 - DNA, 25 bp, Homo sapien
agcagacaccgggtggacaccaggc

SEQ ID NO: 162283 - DNA, 25 bp, Homo sapien
tgtgtccggttgtaactgtcggtta

SEQ ID NO: 162284 - DNA, 25 bp, Homo sapien
tttgcatcagctcgtgttgtgtccg

SEQ ID NO: 162285 - DNA, 25 bp, Homo sapien
gcctgctgcacgcagtcctggcagg

SEQ ID NO: 162286 - DNA, 25 bp, Homo sapien
ggacgcctgctgcacgcagtcctgg

SEQ ID NO: 162287 - DNA, 25 bp, Homo sapien
cctgctgcacgcagtcctggcaggg

SEQ ID NO: 162288 - DNA, 25 bp, Homo sapien
cagggacgcctgctgcacgcagtcc

SEQ ID NO: 162289 - DNA, 25 bp, Homo sapien
acaaaccctcactacatctggagac

SEQ ID NO: 162290 - DNA, 25 bp, Homo sapien
cacaaaccctcactacatctggaga

SEQ ID NO: 162291 - DNA, 25 bp, Homo sapien
aaaccctcactacatctggagacca

SEQ ID NO: 162292 - DNA, 25 bp, Homo sapien
ccacaaaccctcactacatctggag

SEQ ID NO: 162293 - DNA, 25 bp, Homo sapien
agagtggtgagcagggccactgaag

SEQ ID NO: 162294 - DNA, 25 bp, Homo sapien
agcagaagctctgcagagtggtgag

SEQ ID NO: 162295 - DNA, 25 bp, Homo sapien
agggccactgaagcctccaaatcca

SEQ ID NO: 162296 - DNA, 25 bp, Homo sapien
cagaagctctgcagagtggtgagca

SEQ ID NO: 162297 - DNA, 25 bp, Homo sapien
agctcatggtgccccctagcgggat

SEQ ID NO: 162298 - DNA, 25 bp, Homo sapien
cccacagcgcctggggaaaagcagc

SEQ ID NO: 162299 - DNA, 25 bp, Homo sapien
agcccacagcgcctggggaaaagca

SEQ ID NO: 162300 - DNA, 25 bp, Homo sapien
cccctagcgggatccgggctggcgg

SEQ ID NO: 162301 - DNA, 25 bp, Homo sapien
gcagatacttcaggcctggagtggg

SEQ ID NO: 162302 - DNA, 25 bp, Homo sapien
atggcaacccgggatgagcgcccct

SEQ ID NO: 162303 - DNA, 25 bp, Homo sapien
ttgtggggcctgtcacaccggttct

SEQ ID NO: 162304 - DNA, 25 bp, Homo sapien
gcctgccaaaggtggcagatacttc

SEQ ID NO: 162305 - DNA, 25 bp, Homo sapien
cagatctcaggccatgcatgtgtgt

SEQ ID NO: 162306 - DNA, 25 bp, Homo sapien
tctcagggtggtcgcagtggcagct

SEQ ID NO: 162307 - DNA, 25 bp, Homo sapien
tcattctggaggacacccccagatc

SEQ ID NO: 162308 - DNA, 25 bp, Homo sapien
tagatcccataaaactggggcaccc

SEQ ID NO: 162309 - DNA, 25 bp, Homo sapien
gagttcctgtttgacagtagccagg

SEQ ID NO: 162310 - DNA, 25 bp, Homo sapien
ttttgctgctgacatcggcccaaga

SEQ ID NO: 162311 - DNA, 25 bp, Homo sapien
caggagagcagtaaaaatagccaga

SEQ ID NO: 162312 - DNA, 25 bp, Homo sapien
ccaaggaggcaattcacaggagagc

SEQ ID NO: 162313 - DNA, 25 bp, Homo sapien
cattaaggccctgggagccaacgtg

SEQ ID NO: 162314 - DNA, 25 bp, Homo sapien
aaaggaccaattcagcctcctgggc

SEQ ID NO: 162315 - DNA, 25 bp, Homo sapien
ccaacgtgggggctgaggtattgtt

SEQ ID NO: 162316 - DNA, 25 bp, Homo sapien
gcagggaaggggtctcattaaggcc

SEQ ID NO: 162317 - DNA, 25 bp, Homo sapien
taccaccaaactagcaatcttctga

SEQ ID NO: 162318 - DNA, 25 bp, Homo sapien
atcagtgccaatgtccccaaccagc

SEQ ID NO: 162319 - DNA, 25 bp, Homo sapien
aactagcaatcttctgaaccccatg

SEQ ID NO: 162320 - DNA, 25 bp, Homo sapien
aaccagccctaccaccaaactagca

SEQ ID NO: 162321 - DNA, 25 bp, Homo sapien
caagtgccaagggatgttctctcca

SEQ ID NO: 162322 - DNA, 25 bp, Homo sapien
ccaagaagtttaggcaaaccagcac

SEQ ID NO: 162323 - DNA, 25 bp, Homo sapien
gcacccagggagcttgattccatga

SEQ ID NO: 162324 - DNA, 25 bp, Homo sapien
ggccagttctctcaacacacttggg

SEQ ID NO: 162325 - DNA, 25 bp, Homo sapien
gctcctcctggagggcgtcttgtta

SEQ ID NO: 162326 - DNA, 25 bp, Homo sapien
tggcttctggagtttggctacagaa

SEQ ID NO: 162327 - DNA, 25 bp, Homo sapien
gagggcgtcttgttaactctgatct

SEQ ID NO: 162328 - DNA, 25 bp, Homo sapien
ctggcttctggagtttggctacaga

SEQ ID NO: 162329 - DNA, 25 bp, Homo sapien
caaggcctgcgacctgtcttggtgg

SEQ ID NO: 162330 - DNA, 25 bp, Homo sapien
tgtctccatgttggaagcagaggtg

SEQ ID NO: 162331 - DNA, 25 bp, Homo sapien
caggtccaaggcctgcgacctgtct

SEQ ID NO: 162332 - DNA, 25 bp, Homo sapien
tcttggtggccgtctgatggcctgt

SEQ ID NO: 162333 - DNA, 25 bp, Homo sapien
cagcccttgatctggacatcataag

SEQ ID NO: 162334 - DNA, 25 bp, Homo sapien
gacttggctggtcctctatctgtgt

SEQ ID NO: 162335 - DNA, 25 bp, Homo sapien
tcacgggtgacctgtcgacggttta

SEQ ID NO: 162336 - DNA, 25 bp, Homo sapien
gaggagactctcatctcacgggtga

SEQ ID NO: 162337 - DNA, 25 bp, Homo sapien
gattggaccggaatctgcatctggg

SEQ ID NO: 162338 - DNA, 25 bp, Homo sapien
gccaagagaagaacccggcatacag

SEQ ID NO: 162339 - DNA, 25 bp, Homo sapien
agcccaaagtcctgtctacaccgga

SEQ ID NO: 162340 - DNA, 25 bp, Homo sapien
tacagcagacggtgaagatgcaggc

SEQ ID NO: 162341 - DNA, 25 bp, Homo sapien
tgtctacaccggatgccaagagaag

SEQ ID NO: 162342 - DNA, 25 bp, Homo sapien
gggactgcacgctccttccaaggtg

SEQ ID NO: 162343 - DNA, 25 bp, Homo sapien
ctttgctgcccggggactgcacgct

SEQ ID NO: 162344 - DNA, 25 bp, Homo sapien
tcagtgaagacgtggaccagggcct

SEQ ID NO: 162345 - DNA, 25 bp, Homo sapien
cctcagtgaagacgtggaccagggc

SEQ ID NO: 162346 - DNA, 25 bp, Homo sapien
agatgtccacatggtgatggcccaa

SEQ ID NO: 162347 - DNA, 25 bp, Homo sapien
ccctggatgcacagaccgtggacct

SEQ ID NO: 162348 - DNA, 25 bp, Homo sapien
gatgtccacatggtgatggcccaag

SEQ ID NO: 162349 - DNA, 25 bp, Homo sapien
ggcagtgtccctggatgcacagacc

SEQ ID NO: 162350 - DNA, 25 bp, Homo sapien
tgcccctgctgtgtatgaggcgtaa

SEQ ID NO: 162351 - DNA, 25 bp, Homo sapien
catgccatcattgcttattatgccc

SEQ ID NO: 162352 - DNA, 25 bp, Homo sapien
tttgttagggatccagagagaaact

SEQ ID NO: 162353 - DNA, 25 bp, Homo sapien
gaaggccttgccaactcatgccatc

SEQ ID NO: 162354 - DNA, 25 bp, Homo sapien
tccaggaaaggggtgcattgtgtgg

SEQ ID NO: 162355 - DNA, 25 bp, Homo sapien
aggctcagaagggtgtgcaggtggc

SEQ ID NO: 162356 - DNA, 25 bp, Homo sapien
cccatgcctcctctcagtttcggct

SEQ ID NO: 162357 - DNA, 25 bp, Homo sapien
tttcggctctttgaaagcgcatgcc

SEQ ID NO: 162358 - DNA, 25 bp, Homo sapien
ggtcatatgtgttgggatgcagtgg

SEQ ID NO: 162359 - DNA, 25 bp, Homo sapien
cttctccaaatcaaggtcatatgtg

SEQ ID NO: 162360 - DNA, 25 bp, Homo sapien
caggcctacaggcagtcctggtcca

SEQ ID NO: 162361 - DNA, 25 bp, Homo sapien
tggtccagctcaccgcttctccaaa

SEQ ID NO: 162362 - DNA, 25 bp, Homo sapien
agggaatgggtctgtccatggcaat

SEQ ID NO: 162363 - DNA, 25 bp, Homo sapien
tgagttggggactatgccccaggaa

SEQ ID NO: 162364 - DNA, 25 bp, Homo sapien
cgtgtagggaatgggtctgtccatg

SEQ ID NO: 162365 - DNA, 25 bp, Homo sapien
gctaggagtgtgagttggggactat

SEQ ID NO: 162366 - DNA, 25 bp, Homo sapien
tctctttgtgctctgtctcccaaat

SEQ ID NO: 162367 - DNA, 25 bp, Homo sapien
tgtctcccaaatctgcatcataaaa

SEQ ID NO: 162368 - DNA, 25 bp, Homo sapien
aaacccagctggcaaatagagggct

SEQ ID NO: 162369 - DNA, 25 bp, Homo sapien
ctggcaaatagagggctctccttgg

SEQ ID NO: 162370 - DNA, 25 bp, Homo sapien
cgaatggaattgttccctgggctgg

SEQ ID NO: 162371 - DNA, 25 bp, Homo sapien
cacgcaccgaatggaattgttccct

SEQ ID NO: 162372 - DNA, 25 bp, Homo sapien
ccattcctggagcatgagcagccac

SEQ ID NO: 162373 - DNA, 25 bp, Homo sapien
caccattcctggagcatgagcagcc

SEQ ID NO: 162374 - DNA, 25 bp, Homo sapien
ctgtgtctgggctcgacatgggcac

SEQ ID NO: 162375 - DNA, 25 bp, Homo sapien
cactcctgcgtctggattcgggtga

SEQ ID NO: 162376 - DNA, 25 bp, Homo sapien
ccctaaaatcactcctgcgtctgga

SEQ ID NO: 162377 - DNA, 25 bp, Homo sapien
ggagggtccgtggtgaactctgaca

SEQ ID NO: 162378 - DNA, 25 bp, Homo sapien
ttcgggtgaggagggtccgtggtga

SEQ ID NO: 162379 - DNA, 25 bp, Homo sapien
tagcagtttcactatcagtccccag

SEQ ID NO: 162380 - DNA, 25 bp, Homo sapien
tgagcggattctgcagactccctgg

SEQ ID NO: 162381 - DNA, 25 bp, Homo sapien
caagagggaactttgtggtcagagg

SEQ ID NO: 162382 - DNA, 25 bp, Homo sapien
ctgggcagccgccaggagtcagcag

SEQ ID NO: 162383 - DNA, 25 bp, Homo sapien
gacgtcttcccgctcaactgagaaa

SEQ ID NO: 162384 - DNA, 25 bp, Homo sapien
cgctcaactgagaaagtgaggccca

SEQ ID NO: 162385 - DNA, 25 bp, Homo sapien
actggctgatgtgacgtcttcccgc

SEQ ID NO: 162386 - DNA, 25 bp, Homo sapien
gctgatgtgacgtcttcccgctcaa

SEQ ID NO: 162387 - DNA, 25 bp, Homo sapien
gggcacatgctgtctgacttgaggt

SEQ ID NO: 162388 - DNA, 25 bp, Homo sapien
tgggcatcctctgagtgtatgcgtg

SEQ ID NO: 162389 - DNA, 25 bp, Homo sapien
catgctgtctgacttgaggtgcaca

SEQ ID NO: 162390 - DNA, 25 bp, Homo sapien
gattgtccggggcttgggagccgca

SEQ ID NO: 162391 - DNA, 25 bp, Homo sapien
aaatattatcccacaagatggccca

SEQ ID NO: 162392 - DNA, 25 bp, Homo sapien
aatattatcccacaagatggcccat

SEQ ID NO: 162393 - DNA, 25 bp, Homo sapien
ggttcgcacagacccggcggttctg

SEQ ID NO: 162394 - DNA, 25 bp, Homo sapien
gttcgcacagacccggcggttctgc

SEQ ID NO: 162395 - DNA, 25 bp, Homo sapien
tcgcacagacccggcggttctgcag

SEQ ID NO: 162396 - DNA, 25 bp, Homo sapien
gcacagacccggcggttctgcagct

SEQ ID NO: 162397 - DNA, 25 bp, Homo sapien
acggacagccgtgaagatgttacac

SEQ ID NO: 162398 - DNA, 25 bp, Homo sapien
ttagagacggacagccgtgaagatg

SEQ ID NO: 162399 - DNA, 25 bp, Homo sapien
gacggacagccgtgaagatgttaca

SEQ ID NO: 162400 - DNA, 25 bp, Homo sapien
gagacggacagccgtgaagatgtta

SEQ ID NO: 162401 - DNA, 25 bp, Homo sapien
ctctgagctcctcggtcccgagatg

SEQ ID NO: 162402 - DNA, 25 bp, Homo sapien
gccctggattattaagagagtaacc

SEQ ID NO: 162403 - DNA, 25 bp, Homo sapien
tctccgagggccctggattattaag

SEQ ID NO: 162404 - DNA, 25 bp, Homo sapien
cggtcccgagatgctgttgaggcca

SEQ ID NO: 162405 - DNA, 25 bp, Homo sapien
ggggcagtgcgagccaggagacctg

SEQ ID NO: 162406 - DNA, 25 bp, Homo sapien
tctgtggttcgctgtccactccagc

SEQ ID NO: 162407 - DNA, 25 bp, Homo sapien
tggcagggatccactggagctccct

SEQ ID NO: 162408 - DNA, 25 bp, Homo sapien
ggccctatctgtggttcgctgtcca

SEQ ID NO: 162409 - DNA, 25 bp, Homo sapien
cacaggtatgtgatgggatgagtct

SEQ ID NO: 162410 - DNA, 25 bp, Homo sapien
cgtaggtgctgcttgttgagatcat

SEQ ID NO: 162411 - DNA, 25 bp, Homo sapien
ctggtacagccaacaggatggagct

SEQ ID NO: 162412 - DNA, 25 bp, Homo sapien
catcgtcagaggagcttcgtaggtg

SEQ ID NO: 162413 - DNA, 25 bp, Homo sapien
gagggagaattgcagctgaccctga

SEQ ID NO: 162414 - DNA, 25 bp, Homo sapien
gggagaattgcagctgaccctgaac

SEQ ID NO: 162415 - DNA, 25 bp, Homo sapien
agggagaattgcagctgaccctgaa

SEQ ID NO: 162416 - DNA, 25 bp, Homo sapien
cgagggagaattgcagctgaccctg

SEQ ID NO: 162417 - DNA, 25 bp, Homo sapien
ctgcggcaagagctctgcaggtcgg

SEQ ID NO: 162418 - DNA, 25 bp, Homo sapien
gcaagagctctgcaggtcggcaccc

SEQ ID NO: 162419 - DNA, 25 bp, Homo sapien
tgcggcaagagctctgcaggtcggc

SEQ ID NO: 162420 - DNA, 25 bp, Homo sapien
cggcaagagctctgcaggtcggcac

SEQ ID NO: 162421 - DNA, 25 bp, Homo sapien
gtcttcctgagacatgtgggagttg

SEQ ID NO: 162422 - DNA, 25 bp, Homo sapien
gacatgtgggagttgaggaggcagg

SEQ ID NO: 162423 - DNA, 25 bp, Homo sapien
caggctgagcgaaaagctgggggct

SEQ ID NO: 162424 - DNA, 25 bp, Homo sapien
cttcctgagacatgtgggagttgag

SEQ ID NO: 162425 - DNA, 25 bp, Homo sapien
gctctgagaaccctgtgttgtgtcc

SEQ ID NO: 162426 - DNA, 25 bp, Homo sapien
ggcagattttcccatcgtccttcca

SEQ ID NO: 162427 - DNA, 25 bp, Homo sapien
ttgggaggcagcgtccctgacatgc

SEQ ID NO: 162428 - DNA, 25 bp, Homo sapien
ttggcagctggaacttagatctgga

SEQ ID NO: 162429 - DNA, 25 bp, Homo sapien
gggaatctgtagggtgccgactgat

SEQ ID NO: 162430 - DNA, 25 bp, Homo sapien
tagtgggggaatctgtagggtgccg

SEQ ID NO: 162431 - DNA, 25 bp, Homo sapien
aatctgtagggtgccgactgatgtc

SEQ ID NO: 162432 - DNA, 25 bp, Homo sapien
tgggggaatctgtagggtgccgact

SEQ ID NO: 162433 - DNA, 25 bp, Homo sapien
tgcaaccttctcaggccgtgggctt

SEQ ID NO: 162434 - DNA, 25 bp, Homo sapien
tgctggctcatgctctaagacgtcc

SEQ ID NO: 162435 - DNA, 25 bp, Homo sapien
cgtgtgctccaaggtggtccaggca

SEQ ID NO: 162436 - DNA, 25 bp, Homo sapien
taagacgtccttcaagcttgcccca

SEQ ID NO: 162437 - DNA, 25 bp, Homo sapien
ggtgacagtggccactagggtgaag

SEQ ID NO: 162438 - DNA, 25 bp, Homo sapien
ggtgaaggcgatgggacctgaacgt

SEQ ID NO: 162439 - DNA, 25 bp, Homo sapien
tcagaacaagatcttccactctgtc

SEQ ID NO: 162440 - DNA, 25 bp, Homo sapien
gaacaagatcttccactctgtctgc

SEQ ID NO: 162441 - DNA, 25 bp, Homo sapien
ctaggtggttcaggaccccagggat

SEQ ID NO: 162442 - DNA, 25 bp, Homo sapien
ggtgttggccacctccatcctaggt

SEQ ID NO: 162443 - DNA, 25 bp, Homo sapien
tgatctggagacgtcttgcaaagcc

SEQ ID NO: 162444 - DNA, 25 bp, Homo sapien
cacctaatcaaaggaggatacccct

SEQ ID NO: 162445 - DNA, 25 bp, Homo sapien
gagagactcctccttactgttgggc

SEQ ID NO: 162446 - DNA, 25 bp, Homo sapien
taaaatcctctgctagggctgcact

SEQ ID NO: 162447 - DNA, 25 bp, Homo sapien
gaatataaatggacctgccctgaca

SEQ ID NO: 162448 - DNA, 25 bp, Homo sapien
ttctttgacgctaccccagtggagg

SEQ ID NO: 162449 - DNA, 25 bp, Homo sapien
ggcgctggccgttcttgcagcgttt

SEQ ID NO: 162450 - DNA, 25 bp, Homo sapien
tttcccaggatacgtttgcctctcg

SEQ ID NO: 162451 - DNA, 25 bp, Homo sapien
gctgaagaagatatcctgggcaggt

SEQ ID NO: 162452 - DNA, 25 bp, Homo sapien
ttgcctctcgccctgctgaagaaga

SEQ ID NO: 162453 - DNA, 25 bp, Homo sapien
caaactcctaagacattatcattaa

SEQ ID NO: 162454 - DNA, 25 bp, Homo sapien
cgtctgtgcattgttgtccatatat

SEQ ID NO: 162455 - DNA, 25 bp, Homo sapien
caaaatacaagggaggcatgtagct

SEQ ID NO: 162456 - DNA, 25 bp, Homo sapien
gaggcagtttgcatgtcccacttcc

SEQ ID NO: 162457 - DNA, 25 bp, Homo sapien
atcagagaagctgtgttctaggagg

SEQ ID NO: 162458 - DNA, 25 bp, Homo sapien
gaggtgacaaggcaatgaagcacat

SEQ ID NO: 162459 - DNA, 25 bp, Homo sapien
tgctggattacactggctcagctgg

SEQ ID NO: 162460 - DNA, 25 bp, Homo sapien
agagcattggaccaacttcatcaga

SEQ ID NO: 162461 - DNA, 25 bp, Homo sapien
gactggagatgtgattgctgttgca

SEQ ID NO: 162462 - DNA, 25 bp, Homo sapien
gaggtcttcttgcagggattagaag

SEQ ID NO: 162463 - DNA, 25 bp, Homo sapien
ggattagaagtctggaagctccatt

SEQ ID NO: 162464 - DNA, 25 bp, Homo sapien
gaggtactcattagtttggcaaaag

SEQ ID NO: 162465 - DNA, 25 bp, Homo sapien
gagttatttgataccagctgatttt

SEQ ID NO: 162466 - DNA, 25 bp, Homo sapien
catgcctctgcggatcctgttggat

SEQ ID NO: 162467 - DNA, 25 bp, Homo sapien
cagaaccgtctggatcacctgaaga

SEQ ID NO: 162468 - DNA, 25 bp, Homo sapien
gaacgaagtcaacaagagctaccct

SEQ ID NO: 162469 - DNA, 25 bp, Homo sapien
tgactggttgcagacgtggcacttg

SEQ ID NO: 162470 - DNA, 25 bp, Homo sapien
taggatgccacacgtggctgatgtg

SEQ ID NO: 162471 - DNA, 25 bp, Homo sapien
gcacttgtggccgtgtaggatgcca

SEQ ID NO: 162472 - DNA, 25 bp, Homo sapien
tcaccagagggcttaagtgtgactg

SEQ ID NO: 162473 - DNA, 25 bp, Homo sapien
tcctgccaagtcctcagtgatacgg

SEQ ID NO: 162474 - DNA, 25 bp, Homo sapien
gtgatacggaatgctagccaagccc

SEQ ID NO: 162475 - DNA, 25 bp, Homo sapien
tcctcagtgatacggaatgctagcc

SEQ ID NO: 162476 - DNA, 25 bp, Homo sapien
caagtcctcagtgatacggaatgct

SEQ ID NO: 162477 - DNA, 25 bp, Homo sapien
tgcactgggagcaggtgctcctgac

SEQ ID NO: 162478 - DNA, 25 bp, Homo sapien
tgtgcactgggagcaggtgctcctg

SEQ ID NO: 162479 - DNA, 25 bp, Homo sapien
ctcggcaggatgtgcactgggagca

SEQ ID NO: 162480 - DNA, 25 bp, Homo sapien
cggcaggatgtgcactgggagcagg

SEQ ID NO: 162481 - DNA, 25 bp, Homo sapien
tgaagaagagccgctgactggttcg

SEQ ID NO: 162482 - DNA, 25 bp, Homo sapien
tctgaagaagagccgctgactggtt

SEQ ID NO: 162483 - DNA, 25 bp, Homo sapien
aagaagagccgctgactggttcgtg

SEQ ID NO: 162484 - DNA, 25 bp, Homo sapien
gaagagccgctgactggttcgtggg

SEQ ID NO: 162485 - DNA, 25 bp, Homo sapien
tgtggggctgtgactgccaggcaga

SEQ ID NO: 162486 - DNA, 25 bp, Homo sapien
actgtggggctgtgactgccaggca

SEQ ID NO: 162487 - DNA, 25 bp, Homo sapien
gtggggctgtgactgccaggcagac

SEQ ID NO: 162488 - DNA, 25 bp, Homo sapien
tcactgtggggctgtgactgccagg

SEQ ID NO: 162489 - DNA, 25 bp, Homo sapien
ctcttacgacgatggctaagctcta

SEQ ID NO: 162490 - DNA, 25 bp, Homo sapien
ggctaagctctagcccaggagaccc

SEQ ID NO: 162491 - DNA, 25 bp, Homo sapien
cttcctcttacgacgatggctaagc

SEQ ID NO: 162492 - DNA, 25 bp, Homo sapien
ggagaccctgcctcctcacgcatgt

SEQ ID NO: 162493 - DNA, 25 bp, Homo sapien
ctgcagcaaaggaggtggaaggggg

SEQ ID NO: 162494 - DNA, 25 bp, Homo sapien
ggtggaagggggagacacgggatga

SEQ ID NO: 162495 - DNA, 25 bp, Homo sapien
gcaaaggaggtggaagggggagaca

SEQ ID NO: 162496 - DNA, 25 bp, Homo sapien
aggtggaagggggagacacgggatg

SEQ ID NO: 162497 - DNA, 25 bp, Homo sapien
tgtagacagccgacggctttggaaa

SEQ ID NO: 162498 - DNA, 25 bp, Homo sapien
gcttgcttggttggcagacatggca

SEQ ID NO: 162499 - DNA, 25 bp, Homo sapien
cagacatggcagtgtagacagccga

SEQ ID NO: 162500 - DNA, 25 bp, Homo sapien
ggctttggaaactgattcagtgtgg

SEQ ID NO: 162501 - DNA, 25 bp, Homo sapien
gaactccctgcagccattgctgtac

SEQ ID NO: 162502 - DNA, 25 bp, Homo sapien
ttactcaactgtgaactccctgcag

SEQ ID NO: 162503 - DNA, 25 bp, Homo sapien
tgtgaactccctgcagccattgctg

SEQ ID NO: 162504 - DNA, 25 bp, Homo sapien
tactcaactgtgaactccctgcagc

SEQ ID NO: 162505 - DNA, 25 bp, Homo sapien
cgatgtcttagaactttgagcggaa

SEQ ID NO: 162506 - DNA, 25 bp, Homo sapien
catgctccgatgtcttagaactttg

SEQ ID NO: 162507 - DNA, 25 bp, Homo sapien
gctgcagcgtcccatgctccgatgt

SEQ ID NO: 162508 - DNA, 25 bp, Homo sapien
ttagaactttgagcggaacgtccca

SEQ ID NO: 162509 - DNA, 25 bp, Homo sapien
gaaggacaggcttgtaaaatctgct

SEQ ID NO: 162510 - DNA, 25 bp, Homo sapien
tacagctgcggccaaccgtggagcc

SEQ ID NO: 162511 - DNA, 25 bp, Homo sapien
agtgatacagctgcggccaaccgtg

SEQ ID NO: 162512 - DNA, 25 bp, Homo sapien
tgtgagtgatacagctgcggccaac

SEQ ID NO: 162513 - DNA, 25 bp, Homo sapien
tcctgaggttgctcggacgggttcc

SEQ ID NO: 162514 - DNA, 25 bp, Homo sapien
taagtcgcagcttgaggtacagtga

SEQ ID NO: 162515 - DNA, 25 bp, Homo sapien
taaacgtgtgcagaacgggtcctca

SEQ ID NO: 162516 - DNA, 25 bp, Homo sapien
gggctgacacagcactaagtcgcag

SEQ ID NO: 162517 - DNA, 25 bp, Homo sapien
gatggttaatcacccctgggatgga

SEQ ID NO: 162518 - DNA, 25 bp, Homo sapien
tcccagcagggtgccacaaagagtt

SEQ ID NO: 162519 - DNA, 25 bp, Homo sapien
tagcctggaatgacctcgcaaatgc

SEQ ID NO: 162520 - DNA, 25 bp, Homo sapien
tggttgacctgaaagcacattagca

SEQ ID NO: 162521 - DNA, 25 bp, Homo sapien
cgttttatcatcaggagcagccaaa

SEQ ID NO: 162522 - DNA, 25 bp, Homo sapien
gagtatcctctgcagaaaacaccct

SEQ ID NO: 162523 - DNA, 25 bp, Homo sapien
gcacgggccgcctcagtatcttagt

SEQ ID NO: 162524 - DNA, 25 bp, Homo sapien
gccacatccgtcacctgttcaggga

SEQ ID NO: 162525 - DNA, 25 bp, Homo sapien
tttcccgactgaggccaagagcctc

SEQ ID NO: 162526 - DNA, 25 bp, Homo sapien
gtttcccgactgaggccaagagcct

SEQ ID NO: 162527 - DNA, 25 bp, Homo sapien
ttgagtttcccgactgaggccaaga

SEQ ID NO: 162528 - DNA, 25 bp, Homo sapien
gagtttcccgactgaggccaagagc

SEQ ID NO: 162529 - DNA, 25 bp, Homo sapien
caccccatatacgtgcggggccgag

SEQ ID NO: 162530 - DNA, 25 bp, Homo sapien
accagccgcctcaccctgatgaagt

SEQ ID NO: 162531 - DNA, 25 bp, Homo sapien
tgatgaagtctgacaagacccaggg

SEQ ID NO: 162532 - DNA, 25 bp, Homo sapien
gatgtctcagagcacgtggagctcc

SEQ ID NO: 162533 - DNA, 25 bp, Homo sapien
gtaaggagccgttgtcttgaagccc

SEQ ID NO: 162534 - DNA, 25 bp, Homo sapien
cgccctctgcgtagagtagcaacat

SEQ ID NO: 162535 - DNA, 25 bp, Homo sapien
ctctcttgagctggcttaggagcct

SEQ ID NO: 162536 - DNA, 25 bp, Homo sapien
tcatgttgggacagctgacccctgg

SEQ ID NO: 162537 - DNA, 25 bp, Homo sapien
cagtcttgacaacagtccggtggag

SEQ ID NO: 162538 - DNA, 25 bp, Homo sapien
tcttgaccccgttgacagtgaggag

SEQ ID NO: 162539 - DNA, 25 bp, Homo sapien
tatagtgagccccatggcctaggtt

SEQ ID NO: 162540 - DNA, 25 bp, Homo sapien
gaggtgcctccggtaccactgtata

SEQ ID NO: 162541 - DNA, 25 bp, Homo sapien
gcgtattagtgccttgatcctccga

SEQ ID NO: 162542 - DNA, 25 bp, Homo sapien
tgttgcacagacgacggaatgagtg

SEQ ID NO: 162543 - DNA, 25 bp, Homo sapien
gctgtctgggcacagtaagcgtatt

SEQ ID NO: 162544 - DNA, 25 bp, Homo sapien
gtggtcagtgtttgttgcacagacg

SEQ ID NO: 162545 - DNA, 25 bp, Homo sapien
tgacaccatgtgtttttgaagcatc

SEQ ID NO: 162546 - DNA, 25 bp, Homo sapien
cctccttgacaccatgtgtttttga

SEQ ID NO: 162547 - DNA, 25 bp, Homo sapien
cttgacaccatgtgtttttgaagca

SEQ ID NO: 162548 - DNA, 25 bp, Homo sapien
tccttgacaccatgtgtttttgaag

SEQ ID NO: 162549 - DNA, 25 bp, Homo sapien
cgggagcaaccagccgcccactgcg

SEQ ID NO: 162550 - DNA, 25 bp, Homo sapien
ccagcagctccgggagcaaccagcc

SEQ ID NO: 162551 - DNA, 25 bp, Homo sapien
agctccgggagcaaccagccgccca

SEQ ID NO: 162552 - DNA, 25 bp, Homo sapien
agcagctccgggagcaaccagccgc

SEQ ID NO: 162553 - DNA, 25 bp, Homo sapien
tgattcccatgcaggtgctgtaggg

SEQ ID NO: 162554 - DNA, 25 bp, Homo sapien
tcctgattcccatgcaggtgctgta

SEQ ID NO: 162555 - DNA, 25 bp, Homo sapien
gtcctgattcccatgcaggtgctgt

SEQ ID NO: 162556 - DNA, 25 bp, Homo sapien
ccatgcaggtgctgtaggggctgat

SEQ ID NO: 162557 - DNA, 25 bp, Homo sapien
agaaagatctggattccgaagtttt

SEQ ID NO: 162558 - DNA, 25 bp, Homo sapien
ggattccgaagttttctcctccaca

SEQ ID NO: 162559 - DNA, 25 bp, Homo sapien
gggtctgccggccattcacgatgac

SEQ ID NO: 162560 - DNA, 25 bp, Homo sapien
gagggaaacgcaggcagagactcct

SEQ ID NO: 162561 - DNA, 25 bp, Homo sapien
gtgtgcctggcgcccttgcggtcat

SEQ ID NO: 162562 - DNA, 25 bp, Homo sapien
tctgcctcccgtgggagaggcagat

SEQ ID NO: 162563 - DNA, 25 bp, Homo sapien
ggcagataccacagtcgcaaaccca

SEQ ID NO: 162564 - DNA, 25 bp, Homo sapien
ccttgcggtcatcccagatttttgc

SEQ ID NO: 162565 - DNA, 25 bp, Homo sapien
ctttcgggaggaatttacaggcaca

SEQ ID NO: 162566 - DNA, 25 bp, Homo sapien
ggctttccatacttgagttgtttgt

SEQ ID NO: 162567 - DNA, 25 bp, Homo sapien
ggcagctggctttccatacttgagt

SEQ ID NO: 162568 - DNA, 25 bp, Homo sapien
ttcgggaggaatttacaggcacatg

SEQ ID NO: 162569 - DNA, 25 bp, Homo sapien
aatgaccatttgttgtgcaaaagtg

SEQ ID NO: 162570 - DNA, 25 bp, Homo sapien
ggtggtgactctgacagttcttcag

SEQ ID NO: 162571 - DNA, 25 bp, Homo sapien
ggaggtggtgactctgacagttctt

SEQ ID NO: 162572 - DNA, 25 bp, Homo sapien
cctgtcttcggattccattgccact

SEQ ID NO: 162573 - DNA, 25 bp, Homo sapien
tcggctcgtggtgtaccgagctgac

SEQ ID NO: 162574 - DNA, 25 bp, Homo sapien
tcccgtggatctcggctcgtggtgt

SEQ ID NO: 162575 - DNA, 25 bp, Homo sapien
gtccgtcccgtggatctcggctcgt

SEQ ID NO: 162576 - DNA, 25 bp, Homo sapien
gatctcggctcgtggtgtaccgagc

SEQ ID NO: 162577 - DNA, 25 bp, Homo sapien
gcaaaagctggtttctcaccatatt

SEQ ID NO: 162578 - DNA, 25 bp, Homo sapien
tgtggcttttatggccacgccagga

SEQ ID NO: 162579 - DNA, 25 bp, Homo sapien
cgtgtcagcgtttgcagctgtggct

SEQ ID NO: 162580 - DNA, 25 bp, Homo sapien
tgggaaagtgcccttcggatcttcc

SEQ ID NO: 162581 - DNA, 25 bp, Homo sapien
agaggagcagggtttgagcctgcac

SEQ ID NO: 162582 - DNA, 25 bp, Homo sapien
gcctgcactggtttgtcgaacgccc

SEQ ID NO: 162583 - DNA, 25 bp, Homo sapien
gtgtttgttttctcggtgactcttg

SEQ ID NO: 162584 - DNA, 25 bp, Homo sapien
tgtgtttgttttctcggtgactctt

SEQ ID NO: 162585 - DNA, 25 bp, Homo sapien
aaacctgtttatgacagttgttgtg

SEQ ID NO: 162586 - DNA, 25 bp, Homo sapien
attaccgtgtttgttctcaaacctg

SEQ ID NO: 162587 - DNA, 25 bp, Homo sapien
aacctgtttatgacagttgttgtga

SEQ ID NO: 162588 - DNA, 25 bp, Homo sapien
gatactcacatcctgggtaatccct

SEQ ID NO: 162589 - DNA, 25 bp, Homo sapien
gcattctctgagtacggtggacata

SEQ ID NO: 162590 - DNA, 25 bp, Homo sapien
taaggtgacccctgatgatactcac

SEQ ID NO: 162591 - DNA, 25 bp, Homo sapien
ttgtaagactcccttttgctggtag

SEQ ID NO: 162592 - DNA, 25 bp, Homo sapien
ttactgatgccgtctaaagccaacc

SEQ ID NO: 162593 - DNA, 25 bp, Homo sapien
tttctttcccacgaattcctgccat

SEQ ID NO: 162594 - DNA, 25 bp, Homo sapien
cccacaactaaagatgatactgaag

SEQ ID NO: 162595 - DNA, 25 bp, Homo sapien
ctgaaggctggtccttggttttact

SEQ ID NO: 162596 - DNA, 25 bp, Homo sapien
ctagcagggccgtccggtgggcaaa

SEQ ID NO: 162597 - DNA, 25 bp, Homo sapien
ggcactggatgagcaaatagtgcat

SEQ ID NO: 162598 - DNA, 25 bp, Homo sapien
cgtccggtgggcaaactgtgggcac

SEQ ID NO: 162599 - DNA, 25 bp, Homo sapien
gcaaactgtgggcactggatgagca

SEQ ID NO: 162600 - DNA, 25 bp, Homo sapien
gccgctcattcagttccattttacg

SEQ ID NO: 162601 - DNA, 25 bp, Homo sapien
gcggatggattaagcgccgctcatt

SEQ ID NO: 162602 - DNA, 25 bp, Homo sapien
gcctttggcggatggattaagcgcc

SEQ ID NO: 162603 - DNA, 25 bp, Homo sapien
tgcctcagccccgtatgaggctgcg

SEQ ID NO: 162604 - DNA, 25 bp, Homo sapien
aggagatccgggggcagtggggatg

SEQ ID NO: 162605 - DNA, 25 bp, Homo sapien
tgaaggagatccgggggcagtgggg

SEQ ID NO: 162606 - DNA, 25 bp, Homo sapien
gaaggagatccgggggcagtgggga

SEQ ID NO: 162607 - DNA, 25 bp, Homo sapien
ctgaaggagatccgggggcagtggg

SEQ ID NO: 162608 - DNA, 25 bp, Homo sapien
gctcgccttggtgcgcctgggccac

SEQ ID NO: 162609 - DNA, 25 bp, Homo sapien
ctggggccgctctgccgccgcacct

SEQ ID NO: 162610 - DNA, 25 bp, Homo sapien
tcgtggccgcgctcgccttggtgcg

SEQ ID NO: 162611 - DNA, 25 bp, Homo sapien
caaagagtctgggtggcgctgggcc

SEQ ID NO: 162612 - DNA, 25 bp, Homo sapien
gaagagaatcccagctcgaatcctg

SEQ ID NO: 162613 - DNA, 25 bp, Homo sapien
gccatctgcatttagagaatcccag

SEQ ID NO: 162614 - DNA, 25 bp, Homo sapien
gaaggcgggcaaagaataagagact

SEQ ID NO: 162615 - DNA, 25 bp, Homo sapien
cactggagtccatggcacaacttcc

SEQ ID NO: 162616 - DNA, 25 bp, Homo sapien
tgggaatggacagctctagccccag

SEQ ID NO: 162617 - DNA, 25 bp, Homo sapien
gtgggaatggacagctctagcccca

SEQ ID NO: 162618 - DNA, 25 bp, Homo sapien
ggaatggacagctctagccccaggc

SEQ ID NO: 162619 - DNA, 25 bp, Homo sapien
ggtgggaatggacagctctagcccc

SEQ ID NO: 162620 - DNA, 25 bp, Homo sapien
tctcagataaagttgtgggaaggac

SEQ ID NO: 162621 - DNA, 25 bp, Homo sapien
tgggaaggacaatttaagtctgtgt

SEQ ID NO: 162622 - DNA, 25 bp, Homo sapien
ccaataaaactagtcctgtgattgt

SEQ ID NO: 162623 - DNA, 25 bp, Homo sapien
gattgtcaccgttgtcatgcttctc

SEQ ID NO: 162624 - DNA, 25 bp, Homo sapien
gggcaggacagccaattctaatgga

SEQ ID NO: 162625 - DNA, 25 bp, Homo sapien
caggacagccaattctaatggaaat

SEQ ID NO: 162626 - DNA, 25 bp, Homo sapien
ggacagccaattctaatggaaatac

SEQ ID NO: 162627 - DNA, 25 bp, Homo sapien
agccaattctaatggaaatacagcc

SEQ ID NO: 162628 - DNA, 25 bp, Homo sapien
cttccagggccggagcgaacattaa

SEQ ID NO: 162629 - DNA, 25 bp, Homo sapien
tttgacgagcgctatgaaaacttga

SEQ ID NO: 162630 - DNA, 25 bp, Homo sapien
tctgcagagcgttccgaggtctctg

SEQ ID NO: 162631 - DNA, 25 bp, Homo sapien
tctcatcggaatttccattggtgaa

SEQ ID NO: 162632 - DNA, 25 bp, Homo sapien
gtttcagttcctagttccgcagcgg

SEQ ID NO: 162633 - DNA, 25 bp, Homo sapien
gggtgctcaatacttcgacagactt

SEQ ID NO: 162634 - DNA, 25 bp, Homo sapien
tagagaggcccttttattggagtct

SEQ ID NO: 162635 - DNA, 25 bp, Homo sapien
cagactttcgctggctcattgggaa

SEQ ID NO: 162636 - DNA, 25 bp, Homo sapien
tgcagcccggagccgcgtgaccccg

SEQ ID NO: 162637 - DNA, 25 bp, Homo sapien
cagcccggagccgcgtgaccccggg

SEQ ID NO: 162638 - DNA, 25 bp, Homo sapien
ctgcagcccggagccgcgtgacccc

SEQ ID NO: 162639 - DNA, 25 bp, Homo sapien
gcagcccggagccgcgtgaccccgg

SEQ ID NO: 162640 - DNA, 25 bp, Homo sapien
cgctcgcctcgccccgagggtcggt

SEQ ID NO: 162641 - DNA, 25 bp, Homo sapien
ccgagggtcggtgccggggcgcgct

SEQ ID NO: 162642 - DNA, 25 bp, Homo sapien
acgggctggggtcgcgcgaggacag

SEQ ID NO: 162643 - DNA, 25 bp, Homo sapien
cggggcgcgctctggacgggctggg

SEQ ID NO: 162644 - DNA, 25 bp, Homo sapien
tggctcggagggagggtgacccgcc

SEQ ID NO: 162645 - DNA, 25 bp, Homo sapien
cggagaaccggtccgtgcgccctgt

SEQ ID NO: 162646 - DNA, 25 bp, Homo sapien
gagacggccctgagtcgggctccat

SEQ ID NO: 162647 - DNA, 25 bp, Homo sapien
tgcccacggacggagtggctcggag

SEQ ID NO: 162648 - DNA, 25 bp, Homo sapien
aacgctgagcgtccggctcggacct

SEQ ID NO: 162649 - DNA, 25 bp, Homo sapien
tgagcgtccggctcggacctggtaa

SEQ ID NO: 162650 - DNA, 25 bp, Homo sapien
ggagggcaacgctgagcgtccggct

SEQ ID NO: 162651 - DNA, 25 bp, Homo sapien
gctcgcggagggcaacgctgagcgt

SEQ ID NO: 162652 - DNA, 25 bp, Homo sapien
gaaactgtgcgaaaagaatccctaa

SEQ ID NO: 162653 - DNA, 25 bp, Homo sapien
gcgctggcacttcagagctgggacc

SEQ ID NO: 162654 - DNA, 25 bp, Homo sapien
ggcttagggcgcagttccaaaggcc

SEQ ID NO: 162655 - DNA, 25 bp, Homo sapien
ccctgctcggagaaacgtttaactg

SEQ ID NO: 162656 - DNA, 25 bp, Homo sapien
ttgcaacctcagaggcgcagacacc

SEQ ID NO: 162657 - DNA, 25 bp, Homo sapien
attacagccactgcgtcgcggcagc

SEQ ID NO: 162658 - DNA, 25 bp, Homo sapien
cccaggtaccccgaagcaattacag

SEQ ID NO: 162659 - DNA, 25 bp, Homo sapien
tcccgcatcctaactggttccagat

SEQ ID NO: 162660 - DNA, 25 bp, Homo sapien
cacctgatggaacgtgcggagctca

SEQ ID NO: 162661 - DNA, 25 bp, Homo sapien
gagaaagacgggctctggttcctta

SEQ ID NO: 162662 - DNA, 25 bp, Homo sapien
ttttccttctgggacgcgcacggag

SEQ ID NO: 162663 - DNA, 25 bp, Homo sapien
tctgagcacactaaaacagccaggt

SEQ ID NO: 162664 - DNA, 25 bp, Homo sapien
cttcagcatgaccgtccctggccac

SEQ ID NO: 162665 - DNA, 25 bp, Homo sapien
cagagctggcggctcccaggcatag

SEQ ID NO: 162666 - DNA, 25 bp, Homo sapien
ccctggccacctgatccagagctgg

SEQ ID NO: 162667 - DNA, 25 bp, Homo sapien
gagctggcggctcccaggcatagcc

SEQ ID NO: 162668 - DNA, 25 bp, Homo sapien
ctccttcaatgtgggctcaccaagg

SEQ ID NO: 162669 - DNA, 25 bp, Homo sapien
ccttcaatgtgggctcaccaagggc

SEQ ID NO: 162670 - DNA, 25 bp, Homo sapien
aatctagattctctgccgcctcttg

SEQ ID NO: 162671 - DNA, 25 bp, Homo sapien
ttctccttcaatgtgggctcaccaa

SEQ ID NO: 162672 - DNA, 25 bp, Homo sapien
ggagcaggtcctcagtcgaccgcat

SEQ ID NO: 162673 - DNA, 25 bp, Homo sapien
accaggagcaggtcctcagtcgacc

SEQ ID NO: 162674 - DNA, 25 bp, Homo sapien
gcaccaggagcaggtcctcagtcga

SEQ ID NO: 162675 - DNA, 25 bp, Homo sapien
aggagcaggtcctcagtcgaccgca

SEQ ID NO: 162676 - DNA, 25 bp, Homo sapien
ggccgactgcgtctgctgccatttt

SEQ ID NO: 162677 - DNA, 25 bp, Homo sapien
gctgccattttgagtactggcccca

SEQ ID NO: 162678 - DNA, 25 bp, Homo sapien
ctggcaggccgactgcgtctgctgc

SEQ ID NO: 162679 - DNA, 25 bp, Homo sapien
attttgagtactggccccagccgca

SEQ ID NO: 162680 - DNA, 25 bp, Homo sapien
gactcttggacacctggaggccacc

SEQ ID NO: 162681 - DNA, 25 bp, Homo sapien
agaagactcttggacacctggaggc

SEQ ID NO: 162682 - DNA, 25 bp, Homo sapien
aagactcttggacacctggaggcca

SEQ ID NO: 162683 - DNA, 25 bp, Homo sapien
gaagactcttggacacctggaggcc

SEQ ID NO: 162684 - DNA, 25 bp, Homo sapien
ggggcatgggcttttatgcctttat

SEQ ID NO: 162685 - DNA, 25 bp, Homo sapien
ggcatgggcttttatgcctttatta

SEQ ID NO: 162686 - DNA, 25 bp, Homo sapien
gggcatgggcttttatgcctttatt

SEQ ID NO: 162687 - DNA, 25 bp, Homo sapien
gaggcgggggcgttctctgcttgcc

SEQ ID NO: 162688 - DNA, 25 bp, Homo sapien
cctggaggcgggggcgttctctgct

SEQ ID NO: 162689 - DNA, 25 bp, Homo sapien
gcgggggcgttctctgcttgccctc

SEQ ID NO: 162690 - DNA, 25 bp, Homo sapien
gggggcgttctctgcttgccctctt

SEQ ID NO: 162691 - DNA, 25 bp, Homo sapien
taattcgatcttgtttacaaatgga

SEQ ID NO: 162692 - DNA, 25 bp, Homo sapien
tccatggaccctggtttcacaatca

SEQ ID NO: 162693 - DNA, 25 bp, Homo sapien
ttgccttccccgggatgccgtggag

SEQ ID NO: 162694 - DNA, 25 bp, Homo sapien
gtcagtgaatgcgtgtcctcccgtg

SEQ ID NO: 162695 - DNA, 25 bp, Homo sapien
ctgtagctctggcttgcgtagggac

SEQ ID NO: 162696 - DNA, 25 bp, Homo sapien
catttcgtagtccagatgctctgac

SEQ ID NO: 162697 - DNA, 25 bp, Homo sapien
cccatgcatcgcctgtcctggtggg

SEQ ID NO: 162698 - DNA, 25 bp, Homo sapien
ttgcgtagggacactgccaagtggc

SEQ ID NO: 162699 - DNA, 25 bp, Homo sapien
cataaatcctgtgtctttggaggga

SEQ ID NO: 162700 - DNA, 25 bp, Homo sapien
ttttctggcacactgcggcagctgt

SEQ ID NO: 162701 - DNA, 25 bp, Homo sapien
ggcagctgtggcttgcaatgtctaa

SEQ ID NO: 162702 - DNA, 25 bp, Homo sapien
caatgtctaagttaccaggatgtcg

SEQ ID NO: 162703 - DNA, 25 bp, Homo sapien
tgaggtaaatacgaccgaccgcagg

SEQ ID NO: 162704 - DNA, 25 bp, Homo sapien
tgaggtgccttggacagcgtctcct

SEQ ID NO: 162705 - DNA, 25 bp, Homo sapien
tgatgtcctgcacggtcatcgcaag

SEQ ID NO: 162706 - DNA, 25 bp, Homo sapien
catgaaaatcgtagtgccctctggg

SEQ ID NO: 162707 - DNA, 25 bp, Homo sapien
gctgcgttgaactgttcgttcataa

SEQ ID NO: 162708 - DNA, 25 bp, Homo sapien
tcactggagctgcgttgaactgttc

SEQ ID NO: 162709 - DNA, 25 bp, Homo sapien
ctggagctgcgttgaactgttcgtt

SEQ ID NO: 162710 - DNA, 25 bp, Homo sapien
gcgttgaactgttcgttcataaagt

SEQ ID NO: 162711 - DNA, 25 bp, Homo sapien
tcttcttgagagtccttagccccaa

SEQ ID NO: 162712 - DNA, 25 bp, Homo sapien
cccctgccttatggccgtgggtggc

SEQ ID NO: 162713 - DNA, 25 bp, Homo sapien
tgagagtccttagccccaagctccg

SEQ ID NO: 162714 - DNA, 25 bp, Homo sapien
gaggaggtccagcagcgagggggcc

SEQ ID NO: 162715 - DNA, 25 bp, Homo sapien
ggctctgcagaagcatctcgggcca

SEQ ID NO: 162716 - DNA, 25 bp, Homo sapien
cgggccagtagagctctgttatcag

SEQ ID NO: 162717 - DNA, 25 bp, Homo sapien
tgttatcagggggttctgccctccc

SEQ ID NO: 162718 - DNA, 25 bp, Homo sapien
gcccgctgggaaggacggctgggct

SEQ ID NO: 162719 - DNA, 25 bp, Homo sapien
aagtgacaagcggttccccttggag

SEQ ID NO: 162720 - DNA, 25 bp, Homo sapien
agtgacaagcggttccccttggagc

SEQ ID NO: 162721 - DNA, 25 bp, Homo sapien
tcatggaagtgacaagcggttcccc

SEQ ID NO: 162722 - DNA, 25 bp, Homo sapien
tggaagtgacaagcggttccccttg

SEQ ID NO: 162723 - DNA, 25 bp, Homo sapien
gtgtagagacgtgcttccaactgcc

SEQ ID NO: 162724 - DNA, 25 bp, Homo sapien
tcagaagaggatttctgcgtgctgc

SEQ ID NO: 162725 - DNA, 25 bp, Homo sapien
caactgccccactgatagtttcaga

SEQ ID NO: 162726 - DNA, 25 bp, Homo sapien
tgctgcaaagataccaccctggaaa

SEQ ID NO: 162727 - DNA, 25 bp, Homo sapien
ccttgcccggctaagagctgtgtat

SEQ ID NO: 162728 - DNA, 25 bp, Homo sapien
cgcttagacgttggagcctgcctct

SEQ ID NO: 162729 - DNA, 25 bp, Homo sapien
tagcgagttgaaccagcaggcttgg

SEQ ID NO: 162730 - DNA, 25 bp, Homo sapien
tacagagccatctttgtagctctcc

SEQ ID NO: 162731 - DNA, 25 bp, Homo sapien
gcagcaggactgctacagaaacagg

SEQ ID NO: 162732 - DNA, 25 bp, Homo sapien
tcatagatgatgctgggacaggagc

SEQ ID NO: 162733 - DNA, 25 bp, Homo sapien
gagcagcaggactgctacagaaaca

SEQ ID NO: 162734 - DNA, 25 bp, Homo sapien
aggagcagcaggactgctacagaaa

SEQ ID NO: 162735 - DNA, 25 bp, Homo sapien
gtcttagcccgatgggaagacggaa

SEQ ID NO: 162736 - DNA, 25 bp, Homo sapien
ttgctgctgtgaaatgttctgaaat

SEQ ID NO: 162737 - DNA, 25 bp, Homo sapien
ctcccagttctgtggcacccgcttc

SEQ ID NO: 162738 - DNA, 25 bp, Homo sapien
tttgagtcttagcccgatgggaaga

SEQ ID NO: 162739 - DNA, 25 bp, Homo sapien
ggcctggggaccttcagtaacctgc

SEQ ID NO: 162740 - DNA, 25 bp, Homo sapien
gaggggtggacagggaggtgaacca

SEQ ID NO: 162741 - DNA, 25 bp, Homo sapien
tgccagaagaggggtggacagggag

SEQ ID NO: 162742 - DNA, 25 bp, Homo sapien
gggtggacagggaggtgaaccagga

SEQ ID NO: 162743 - DNA, 25 bp, Homo sapien
ctgctgccagaagaggggtggacag

SEQ ID NO: 162744 - DNA, 25 bp, Homo sapien
cctgctccatgtgatgaatccagat

SEQ ID NO: 162745 - DNA, 25 bp, Homo sapien
ctttctggaagtggtctctgattga

SEQ ID NO: 162746 - DNA, 25 bp, Homo sapien
ccaactctcagcaaaggtggcgcag

SEQ ID NO: 162747 - DNA, 25 bp, Homo sapien
gtctctgattgaaagggtcccctgc

SEQ ID NO: 162748 - DNA, 25 bp, Homo sapien
cagccacatgctaagggaggtgcag

SEQ ID NO: 162749 - DNA, 25 bp, Homo sapien
tgctggccgcatgggaccagagagg

SEQ ID NO: 162750 - DNA, 25 bp, Homo sapien
caatgccaggatgtctgtccttcca

SEQ ID NO: 162751 - DNA, 25 bp, Homo sapien
gcaggctgatccacattggaggcca

SEQ ID NO: 162752 - DNA, 25 bp, Homo sapien
ctgccaggggagacaggaatggggc

SEQ ID NO: 162753 - DNA, 25 bp, Homo sapien
agacaggaatggggctgagggtctc

SEQ ID NO: 162754 - DNA, 25 bp, Homo sapien
ggagacaggaatggggctgagggtc

SEQ ID NO: 162755 - DNA, 25 bp, Homo sapien
acaggaatggggctgagggtctcac

SEQ ID NO: 162756 - DNA, 25 bp, Homo sapien
gggccaggagcgctgagtctgcgca

SEQ ID NO: 162757 - DNA, 25 bp, Homo sapien
tggacatggagggggcccgtgggct

SEQ ID NO: 162758 - DNA, 25 bp, Homo sapien
gctgagtctgcgcagtgcctgttct

SEQ ID NO: 162759 - DNA, 25 bp, Homo sapien
ggccaagcctccgtgtctgtgggct

SEQ ID NO: 162760 - DNA, 25 bp, Homo sapien
ctgaactcccagaatctgggacgcc

SEQ ID NO: 162761 - DNA, 25 bp, Homo sapien
ctcaatgaaggagaatggctgcagg

SEQ ID NO: 162762 - DNA, 25 bp, Homo sapien
tgtactgctaaagcttggaggtctc

SEQ ID NO: 162763 - DNA, 25 bp, Homo sapien
gctaaagcttggaggtctcccagga

SEQ ID NO: 162764 - DNA, 25 bp, Homo sapien
caatgaaggagaatggctgcaggcc

SEQ ID NO: 162765 - DNA, 25 bp, Homo sapien
cagctggtgagactggcggccttcc

SEQ ID NO: 162766 - DNA, 25 bp, Homo sapien
acggaccgcctcatgggccgggtgt

SEQ ID NO: 162767 - DNA, 25 bp, Homo sapien
ggccgggtgtacagcggcccacacc

SEQ ID NO: 162768 - DNA, 25 bp, Homo sapien
tctgcccaagtagctgctcccacgg

SEQ ID NO: 162769 - DNA, 25 bp, Homo sapien
tccttcctcttacgggtctgcgtgg

SEQ ID NO: 162770 - DNA, 25 bp, Homo sapien
acgggtctgcgtggtcccagtgcct

SEQ ID NO: 162771 - DNA, 25 bp, Homo sapien
ccagtgcctgctaggtggatgcttt

SEQ ID NO: 162772 - DNA, 25 bp, Homo sapien
tcttacgggtctgcgtggtcccagt

SEQ ID NO: 162773 - DNA, 25 bp, Homo sapien
cgctgtgatctagggcgccgctgca

SEQ ID NO: 162774 - DNA, 25 bp, Homo sapien
cactgcgtgctcagggaaggcgagc

SEQ ID NO: 162775 - DNA, 25 bp, Homo sapien
gagtccttctcagagccgctgtgat

SEQ ID NO: 162776 - DNA, 25 bp, Homo sapien
tcagagccgctgtgatctagggcgc

SEQ ID NO: 162777 - DNA, 25 bp, Homo sapien
gctgcttcttgaagcccgctctgct

SEQ ID NO: 162778 - DNA, 25 bp, Homo sapien
ctctggttgagcacttcccgagcgc

SEQ ID NO: 162779 - DNA, 25 bp, Homo sapien
tctgctcgtgcgcctgctctggttg

SEQ ID NO: 162780 - DNA, 25 bp, Homo sapien
agggcgtagcgtttgggctgcttct

SEQ ID NO: 162781 - DNA, 25 bp, Homo sapien
gaaggtgccctgagcttcggtcctt

SEQ ID NO: 162782 - DNA, 25 bp, Homo sapien
caattgcaggattttgccgctgtga

SEQ ID NO: 162783 - DNA, 25 bp, Homo sapien
tcagggcttggcacgagtgaacgtc

SEQ ID NO: 162784 - DNA, 25 bp, Homo sapien
tggccaccgacctctgtttctctgg

SEQ ID NO: 162785 - DNA, 25 bp, Homo sapien
tcacgatggccacttttaaccccac

SEQ ID NO: 162786 - DNA, 25 bp, Homo sapien
agtgggcagcacacagtcacgatgg

SEQ ID NO: 162787 - DNA, 25 bp, Homo sapien
accgccttgatcaagacctggagag

SEQ ID NO: 162788 - DNA, 25 bp, Homo sapien
taaccccaccgccttgatcaagacc

SEQ ID NO: 162789 - DNA, 25 bp, Homo sapien
gctgtggctcggagatgcctgcaag

SEQ ID NO: 162790 - DNA, 25 bp, Homo sapien
tccactcaagcactggtcctggagg

SEQ ID NO: 162791 - DNA, 25 bp, Homo sapien
caggtgtcctcctggaccgtttgac

SEQ ID NO: 162792 - DNA, 25 bp, Homo sapien
tcccagggttgtgtgaagttagtga

SEQ ID NO: 162793 - DNA, 25 bp, Homo sapien
ggccaatgccctagaaatcttgggc

SEQ ID NO: 162794 - DNA, 25 bp, Homo sapien
agtgcagggagttcaatttatagcg

SEQ ID NO: 162795 - DNA, 25 bp, Homo sapien
cttgagcccggagggatcacccagc

SEQ ID NO: 162796 - DNA, 25 bp, Homo sapien
ttatagcggaggcttcaattggcgg

SEQ ID NO: 162797 - DNA, 25 bp, Homo sapien
accaaccgcgacgtggcctggcgag

SEQ ID NO: 162798 - DNA, 25 bp, Homo sapien
tctccgaccaccaaccgcgacgtgg

SEQ ID NO: 162799 - DNA, 25 bp, Homo sapien
tcgccctctccgaccaccaaccgcg

SEQ ID NO: 162800 - DNA, 25 bp, Homo sapien
accaccaaccgcgacgtggcctggc

SEQ ID NO: 162801 - DNA, 25 bp, Homo sapien
cacaagaaatcgagaagccagagca

SEQ ID NO: 162802 - DNA, 25 bp, Homo sapien
tgcacaggcggttgtcgtcggacac

SEQ ID NO: 162803 - DNA, 25 bp, Homo sapien
gcggcccaggaaatgcttgcggata

SEQ ID NO: 162804 - DNA, 25 bp, Homo sapien
cgggtcatcgggaggcacctcctcg

SEQ ID NO: 162805 - DNA, 25 bp, Homo sapien
cagcgggcggttcccttgcgcgtag

SEQ ID NO: 162806 - DNA, 25 bp, Homo sapien
tctggaagccgtcgggcagaaccac

SEQ ID NO: 162807 - DNA, 25 bp, Homo sapien
gctctggaagccgtcgggcagaacc

SEQ ID NO: 162808 - DNA, 25 bp, Homo sapien
ccttgcgcgtagtcgaggatgtgct

SEQ ID NO: 162809 - DNA, 25 bp, Homo sapien
tcaggtgcagctgccgaaattgaga

SEQ ID NO: 162810 - DNA, 25 bp, Homo sapien
caggtgcagctgccgaaattgagaa

SEQ ID NO: 162811 - DNA, 25 bp, Homo sapien
aggtgcagctgccgaaattgagaac

SEQ ID NO: 162812 - DNA, 25 bp, Homo sapien
tctggatgacatagagacgctcgaa

SEQ ID NO: 162813 - DNA, 25 bp, Homo sapien
gacgtcgcgctggtacttagtgacc

SEQ ID NO: 162814 - DNA, 25 bp, Homo sapien
ggtgcgcttcctcgatgtagatgat

SEQ ID NO: 162815 - DNA, 25 bp, Homo sapien
acggccgccctggtacataatagtg

SEQ ID NO: 162816 - DNA, 25 bp, Homo sapien
tgacttggtttgaggcgcttgcacg

SEQ ID NO: 162817 - DNA, 25 bp, Homo sapien
gcagactcagtctgaaatggtggct

SEQ ID NO: 162818 - DNA, 25 bp, Homo sapien
gacagttacagaagcagagtcccag

SEQ ID NO: 162819 - DNA, 25 bp, Homo sapien
caagttcagtcaattgtccgttgga

SEQ ID NO: 162820 - DNA, 25 bp, Homo sapien
atcccgcgctcaaaagaggatttcc

SEQ ID NO: 162821 - DNA, 25 bp, Homo sapien
tatcccgcgctcaaaagaggatttc

SEQ ID NO: 162822 - DNA, 25 bp, Homo sapien
caaaagaggatttccagtgagccag

SEQ ID NO: 162823 - DNA, 25 bp, Homo sapien
gctcaaaagaggatttccagtgagc

SEQ ID NO: 162824 - DNA, 25 bp, Homo sapien
cagaactagctcgtggtcaagacca

SEQ ID NO: 162825 - DNA, 25 bp, Homo sapien
caaggtctctgtgcagctgcgggaa

SEQ ID NO: 162826 - DNA, 25 bp, Homo sapien
ggttacctcacggaaacccagagca

SEQ ID NO: 162827 - DNA, 25 bp, Homo sapien
tgggtgccaggcaactagctcagct

SEQ ID NO: 162828 - DNA, 25 bp, Homo sapien
cctcgctgtctggagggcatcgtgg

SEQ ID NO: 162829 - DNA, 25 bp, Homo sapien
cagtcctgccgtccacacaccgcct

SEQ ID NO: 162830 - DNA, 25 bp, Homo sapien
gcatcgtggtgcccggcagcagcct

SEQ ID NO: 162831 - DNA, 25 bp, Homo sapien
cagcctcagtcctgccgtccacaca

SEQ ID NO: 162832 - DNA, 25 bp, Homo sapien
tgaagtgaagagtgggggagtgcac

SEQ ID NO: 162833 - DNA, 25 bp, Homo sapien
tcgaagctgcactgcttccttgaag

SEQ ID NO: 162834 - DNA, 25 bp, Homo sapien
agccccttcgaagctgcactgcttc

SEQ ID NO: 162835 - DNA, 25 bp, Homo sapien
tgggggagtgcacacagatgccacc

SEQ ID NO: 162836 - DNA, 25 bp, Homo sapien
gggcaccatgcgggccgggacttgc

SEQ ID NO: 162837 - DNA, 25 bp, Homo sapien
aggaagacatgctctaggcagggca

SEQ ID NO: 162838 - DNA, 25 bp, Homo sapien
agacatgctctaggcagggcaccat

SEQ ID NO: 162839 - DNA, 25 bp, Homo sapien
gaagacatgctctaggcagggcacc

SEQ ID NO: 162840 - DNA, 25 bp, Homo sapien
cggtgaggaggctccgatgtagagc

SEQ ID NO: 162841 - DNA, 25 bp, Homo sapien
aggctccggtgaggaggctccgatg

SEQ ID NO: 162842 - DNA, 25 bp, Homo sapien
aggaggctccgatgtagagcgtggg

SEQ ID NO: 162843 - DNA, 25 bp, Homo sapien
agaggggtggtgaggaggctccggt

SEQ ID NO: 162844 - DNA, 25 bp, Homo sapien
aagcagctgctggtcaccagtgggt

SEQ ID NO: 162845 - DNA, 25 bp, Homo sapien
tgctggtcaccagtgggtggagggc

SEQ ID NO: 162846 - DNA, 25 bp, Homo sapien
ccctggctcagggtatgggtggaag

SEQ ID NO: 162847 - DNA, 25 bp, Homo sapien
ctcagggtatgggtggaagcagctg

SEQ ID NO: 162848 - DNA, 25 bp, Homo sapien
ggcactggggttccagttgtgaaca

SEQ ID NO: 162849 - DNA, 25 bp, Homo sapien
ggttccagttgtgaacaagaaggtc

SEQ ID NO: 162850 - DNA, 25 bp, Homo sapien
ccagttgtgaacaagaaggtcagaa

SEQ ID NO: 162851 - DNA, 25 bp, Homo sapien
ttgtgaacaagaaggtcagaatcct

SEQ ID NO: 162852 - DNA, 25 bp, Homo sapien
ctctggataattctcccatccaaat

SEQ ID NO: 162853 - DNA, 25 bp, Homo sapien
cgtggtgaggtggtgccggccactt

SEQ ID NO: 162854 - DNA, 25 bp, Homo sapien
tttctgggcaaaaagcacattgcgt

SEQ ID NO: 162855 - DNA, 25 bp, Homo sapien
gccacttggcgcccttgcctctctg

SEQ ID NO: 162856 - DNA, 25 bp, Homo sapien
gtaatcgctggaccttgtaaccagc

SEQ ID NO: 162857 - DNA, 25 bp, Homo sapien
gtttcttaattcgtgcttgtggatg

SEQ ID NO: 162858 - DNA, 25 bp, Homo sapien
gggcaatcgatcttagccaagaact

SEQ ID NO: 162859 - DNA, 25 bp, Homo sapien
gagtcatttcggctttaggttgtaa

SEQ ID NO: 162860 - DNA, 25 bp, Homo sapien
ggctgttagaatgagcgattctgca

SEQ ID NO: 162861 - DNA, 25 bp, Homo sapien
ttagaatgagcgattctgcaattac

SEQ ID NO: 162862 - DNA, 25 bp, Homo sapien
tcaggctgttagaatgagcgattct

SEQ ID NO: 162863 - DNA, 25 bp, Homo sapien
gctgttagaatgagcgattctgcaa

SEQ ID NO: 162864 - DNA, 25 bp, Homo sapien
ctctatccctcttcggcccggcggc

SEQ ID NO: 162865 - DNA, 25 bp, Homo sapien
gctgctactcggctgacgggagact

SEQ ID NO: 162866 - DNA, 25 bp, Homo sapien
ctactcggctgacgggagactcttg

SEQ ID NO: 162867 - DNA, 25 bp, Homo sapien
tgctactcggctgacgggagactct

SEQ ID NO: 162868 - DNA, 25 bp, Homo sapien
tctggaagttctgtgaagactttac

SEQ ID NO: 162869 - DNA, 25 bp, Homo sapien
tgcacacgtctcaggtcctaaaagc

SEQ ID NO: 162870 - DNA, 25 bp, Homo sapien
tcaggtcctaaaagcctcccagtgg

SEQ ID NO: 162871 - DNA, 25 bp, Homo sapien
ctggaaaagcctgcacacgtctcag

SEQ ID NO: 162872 - DNA, 25 bp, Homo sapien
ggaagacgtaatcttccttcgaatg

SEQ ID NO: 162873 - DNA, 25 bp, Homo sapien
cttttgcgattcttgcttcggtggg

SEQ ID NO: 162874 - DNA, 25 bp, Homo sapien
gaagacgtaatcttccttcgaatgt

SEQ ID NO: 162875 - DNA, 25 bp, Homo sapien
cgattcttgcttcggtgggaagtca

SEQ ID NO: 162876 - DNA, 25 bp, Homo sapien
ctgacctttatagtgtccttgtaca

SEQ ID NO: 162877 - DNA, 25 bp, Homo sapien
gacctttatagtgtccttgtacaac

SEQ ID NO: 162878 - DNA, 25 bp, Homo sapien
ttcccgctgcacctgttcaatgtag

SEQ ID NO: 162879 - DNA, 25 bp, Homo sapien
ctgcacctgttcaatgtagataaca

SEQ ID NO: 162880 - DNA, 25 bp, Homo sapien
accttgctggggtgaacgcctgcgt

SEQ ID NO: 162881 - DNA, 25 bp, Homo sapien
tgctggggtgaacgcctgcgtggac

SEQ ID NO: 162882 - DNA, 25 bp, Homo sapien
caccttgctggggtgaacgcctgcg

SEQ ID NO: 162883 - DNA, 25 bp, Homo sapien
cttgctggggtgaacgcctgcgtgg

SEQ ID NO: 162884 - DNA, 25 bp, Homo sapien
tcctttcctacttggcaagatttgg

SEQ ID NO: 162885 - DNA, 25 bp, Homo sapien
cgttcaaggatctttttgcggtctt

SEQ ID NO: 162886 - DNA, 25 bp, Homo sapien
cttttcctttcctacttggcaagat

SEQ ID NO: 162887 - DNA, 25 bp, Homo sapien
gcaagatttggctttccgttcaagg

SEQ ID NO: 162888 - DNA, 25 bp, Homo sapien
tttcaagttttaatcaaagctcgta

SEQ ID NO: 162889 - DNA, 25 bp, Homo sapien
caagttttaatcaaagctcgtatat

SEQ ID NO: 162890 - DNA, 25 bp, Homo sapien
agttttaatcaaagctcgtatataa

SEQ ID NO: 162891 - DNA, 25 bp, Homo sapien
tcaagttttaatcaaagctcgtata

SEQ ID NO: 162892 - DNA, 25 bp, Homo sapien
gcagaaactaactcaattgaaaaca

SEQ ID NO: 162893 - DNA, 25 bp, Homo sapien
acagaaaaaccatatgagagcagaa

SEQ ID NO: 162894 - DNA, 25 bp, Homo sapien
ttgtgatacaggataagcaagcccc

SEQ ID NO: 162895 - DNA, 25 bp, Homo sapien
ttagttgggcacgatggcacactcc

SEQ ID NO: 162896 - DNA, 25 bp, Homo sapien
ctctgtgagtctctcaacacagccc

SEQ ID NO: 162897 - DNA, 25 bp, Homo sapien
cctgtctatggaagttgttgagcgg

SEQ ID NO: 162898 - DNA, 25 bp, Homo sapien
tgttgagcggacaggcacacagctg

SEQ ID NO: 162899 - DNA, 25 bp, Homo sapien
tctatggaagttgttgagcggacag

SEQ ID NO: 162900 - DNA, 25 bp, Homo sapien
tccacgggcctggggaagccttaca

SEQ ID NO: 162901 - DNA, 25 bp, Homo sapien
cacgggcctggggaagccttacaat

SEQ ID NO: 162902 - DNA, 25 bp, Homo sapien
ttttattgtgaagcactgctctctt

SEQ ID NO: 162903 - DNA, 25 bp, Homo sapien
cctgaaacgcctccgttcaagcaat

SEQ ID NO: 162904 - DNA, 25 bp, Homo sapien
tgtgaagcactgctctcttccggct

SEQ ID NO: 162905 - DNA, 25 bp, Homo sapien
gactcatgcctgaaacgcctccgtt

SEQ ID NO: 162906 - DNA, 25 bp, Homo sapien
tgaccgtcttcctgtgtgatgagaa

SEQ ID NO: 162907 - DNA, 25 bp, Homo sapien
tctgctggatgcaaagtccgaggtc

SEQ ID NO: 162908 - DNA, 25 bp, Homo sapien
gcgtcactttccaatgaggcaggtg

SEQ ID NO: 162909 - DNA, 25 bp, Homo sapien
aggccaaacagtgggtgcgtcactt

SEQ ID NO: 162910 - DNA, 25 bp, Homo sapien
ggcgctccaggaacaatatcaggct

SEQ ID NO: 162911 - DNA, 25 bp, Homo sapien
tatctccagagtcccaagtttttga

SEQ ID NO: 162912 - DNA, 25 bp, Homo sapien
tacagtggcaaaggtagccttgcaa

SEQ ID NO: 162913 - DNA, 25 bp, Homo sapien
caaaagctgctaagatacagtggca

SEQ ID NO: 162914 - DNA, 25 bp, Homo sapien
atcccagtacccattagaaacacag

SEQ ID NO: 162915 - DNA, 25 bp, Homo sapien
tttattattttgatcccagtaccca

SEQ ID NO: 162916 - DNA, 25 bp, Homo sapien
tcccagtacccattagaaacacagt

SEQ ID NO: 162917 - DNA, 25 bp, Homo sapien
gatcccagtacccattagaaacaca

SEQ ID NO: 162918 - DNA, 25 bp, Homo sapien
ggattcctgaggatagtatcaccct

SEQ ID NO: 162919 - DNA, 25 bp, Homo sapien
tcacccttaaagttgagcatttggg

SEQ ID NO: 162920 - DNA, 25 bp, Homo sapien
tttctaaggactgtgcaggcctctt

SEQ ID NO: 162921 - DNA, 25 bp, Homo sapien
gaaccacttagctgggaaggccaag

SEQ ID NO: 162922 - DNA, 25 bp, Homo sapien
catccgttaggctcaggaccaagca

SEQ ID NO: 162923 - DNA, 25 bp, Homo sapien
caggcccctgcatccgttaggctca

SEQ ID NO: 162924 - DNA, 25 bp, Homo sapien
agccaggcccctgcatccgttaggc

SEQ ID NO: 162925 - DNA, 25 bp, Homo sapien
ccctgcatccgttaggctcaggacc

SEQ ID NO: 162926 - DNA, 25 bp, Homo sapien
gagaggacgaacctgttacagttgt

SEQ ID NO: 162927 - DNA, 25 bp, Homo sapien
cctgttacagttgtgggctttttct

SEQ ID NO: 162928 - DNA, 25 bp, Homo sapien
ctacggagaggacgaacctgttaca

SEQ ID NO: 162929 - DNA, 25 bp, Homo sapien
ggacgaacctgttacagttgtgggc

SEQ ID NO: 162930 - DNA, 25 bp, Homo sapien
cattctgctaccgagacgataccaa

SEQ ID NO: 162931 - DNA, 25 bp, Homo sapien
gacgataccaaccagcgtgatacta

SEQ ID NO: 162932 - DNA, 25 bp, Homo sapien
cgagacgataccaaccagcgtgata

SEQ ID NO: 162933 - DNA, 25 bp, Homo sapien
ctaccgagacgataccaaccagcgt

SEQ ID NO: 162934 - DNA, 25 bp, Homo sapien
ttccgcagctcctcccgcgaggtcc

SEQ ID NO: 162935 - DNA, 25 bp, Homo sapien
gctcctcccgcgaggtcccgcccat

SEQ ID NO: 162936 - DNA, 25 bp, Homo sapien
gcagctcctcccgcgaggtcccgcc

SEQ ID NO: 162937 - DNA, 25 bp, Homo sapien
cagctcagctttccgcagctcctcc

SEQ ID NO: 162938 - DNA, 25 bp, Homo sapien
gtttttattcggcatggctggagcg

SEQ ID NO: 162939 - DNA, 25 bp, Homo sapien
cttgtttttattcggcatggctgga

SEQ ID NO: 162940 - DNA, 25 bp, Homo sapien
ttcttgtttttattcggcatggctg

SEQ ID NO: 162941 - DNA, 25 bp, Homo sapien
tgtttttattcggcatggctggagc

SEQ ID NO: 162942 - DNA, 25 bp, Homo sapien
caagcccacggcgcgctgtcggaaa

SEQ ID NO: 162943 - DNA, 25 bp, Homo sapien
cccacggcgcgctgtcggaaacggg

SEQ ID NO: 162944 - DNA, 25 bp, Homo sapien
gcgctgtcggaaacgggcgcccctc

SEQ ID NO: 162945 - DNA, 25 bp, Homo sapien
acggcgcgctgtcggaaacgggcgc

SEQ ID NO: 162946 - DNA, 25 bp, Homo sapien
ctctgattctactgtgtcttgtcct

SEQ ID NO: 162947 - DNA, 25 bp, Homo sapien
tctgattctactgtgtcttgtcctt

SEQ ID NO: 162948 - DNA, 25 bp, Homo sapien
ctgattctactgtgtcttgtccttc

SEQ ID NO: 162949 - DNA, 25 bp, Homo sapien
ctttggggagggcaacagatttgct

SEQ ID NO: 162950 - DNA, 25 bp, Homo sapien
cagtgatctgccaagtgtcaagctt

SEQ ID NO: 162951 - DNA, 25 bp, Homo sapien
gaactagaagtgaagcagtgagctg

SEQ ID NO: 162952 - DNA, 25 bp, Homo sapien
ggaagcagtgaagggcccaacattt

SEQ ID NO: 162953 - DNA, 25 bp, Homo sapien
tcaagcttaatatgccaggttgcct

SEQ ID NO: 162954 - DNA, 25 bp, Homo sapien
tcactgggtaatgggagcaactgct

SEQ ID NO: 162955 - DNA, 25 bp, Homo sapien
tagtgtgttaagtcaaccagaggcc

SEQ ID NO: 162956 - DNA, 25 bp, Homo sapien
tgttacactgaaagatacagcctgc

SEQ ID NO: 162957 - DNA, 25 bp, Homo sapien
ggcaaaagttacagggcagcagtta

SEQ ID NO: 162958 - DNA, 25 bp, Homo sapien
agtgacccatgagcccgttttttgc

SEQ ID NO: 162959 - DNA, 25 bp, Homo sapien
gaaacaacacccacctatggtctga

SEQ ID NO: 162960 - DNA, 25 bp, Homo sapien
taacattggacacagtacacacact

SEQ ID NO: 162961 - DNA, 25 bp, Homo sapien
tgaaggttacactgagaacagatgc

SEQ ID NO: 162962 - DNA, 25 bp, Homo sapien
gacagtggccccattcataatcagc

SEQ ID NO: 162963 - DNA, 25 bp, Homo sapien
gcaggacaaagtggctgtgctctgt

SEQ ID NO: 162964 - DNA, 25 bp, Homo sapien
cttccgtgttctggacagtggcccc

SEQ ID NO: 162965 - DNA, 25 bp, Homo sapien
tctgccacattgcacagcttccgtg

SEQ ID NO: 162966 - DNA, 25 bp, Homo sapien
gcctccacgtgtctgaacagtggct

SEQ ID NO: 162967 - DNA, 25 bp, Homo sapien
ggttccaagcgagcactgtggcctc

SEQ ID NO: 162968 - DNA, 25 bp, Homo sapien
cactgaaagtcggtggtcccagagg

SEQ ID NO: 162969 - DNA, 25 bp, Homo sapien
tctgaacagtggctgcacacgagca

SEQ ID NO: 162970 - DNA, 25 bp, Homo sapien
ctgtagacgggacagcaacaaggct

SEQ ID NO: 162971 - DNA, 25 bp, Homo sapien
tgtagacgggacagcaacaaggctg

SEQ ID NO: 162972 - DNA, 25 bp, Homo sapien
ggatggtagtttttgaagttctcta

SEQ ID NO: 162973 - DNA, 25 bp, Homo sapien
aggatggtagtttttgaagttctct

SEQ ID NO: 162974 - DNA, 25 bp, Homo sapien
ctggggctacaagcgagtgccacca

SEQ ID NO: 162975 - DNA, 25 bp, Homo sapien
tagctggggctacaagcgagtgcca

SEQ ID NO: 162976 - DNA, 25 bp, Homo sapien
ggggctacaagcgagtgccaccatg

SEQ ID NO: 162977 - DNA, 25 bp, Homo sapien
agctggggctacaagcgagtgccac

SEQ ID NO: 162978 - DNA, 25 bp, Homo sapien
ggttgctaaaaatcatgcctctcgt

SEQ ID NO: 162979 - DNA, 25 bp, Homo sapien
cagaggtgaaattatgtgcagatgc

SEQ ID NO: 162980 - DNA, 25 bp, Homo sapien
caatcaggtaattcagtaaggaagc

SEQ ID NO: 162981 - DNA, 25 bp, Homo sapien
ggaagcaggttatgaaagcaaggcc

SEQ ID NO: 162982 - DNA, 25 bp, Homo sapien
gccccagggtctctagttagttagc

SEQ ID NO: 162983 - DNA, 25 bp, Homo sapien
ttcacaaaagaccaaatactcggca

SEQ ID NO: 162984 - DNA, 25 bp, Homo sapien
tagttagccgataataagtcctaca

SEQ ID NO: 162985 - DNA, 25 bp, Homo sapien
tattgtatttgcatgagaggagagc

SEQ ID NO: 162986 - DNA, 25 bp, Homo sapien
taacggccaaggtcatgtgtgtagc

SEQ ID NO: 162987 - DNA, 25 bp, Homo sapien
ggctgaagctagaacaccgctgtga

SEQ ID NO: 162988 - DNA, 25 bp, Homo sapien
tgcctcagcaatccagggactgtgt

SEQ ID NO: 162989 - DNA, 25 bp, Homo sapien
tgagactgaccatggagtaacggcc

SEQ ID NO: 162990 - DNA, 25 bp, Homo sapien
gaggtgacaccacaaccatctcggt

SEQ ID NO: 162991 - DNA, 25 bp, Homo sapien
gatggcatcagccttcgacgggagc

SEQ ID NO: 162992 - DNA, 25 bp, Homo sapien
ctcgaatggatgacacaggcagaca

SEQ ID NO: 162993 - DNA, 25 bp, Homo sapien
aatgtgtgtggcgtgctctgcaacc

SEQ ID NO: 162994 - DNA, 25 bp, Homo sapien
taaactggaaactatatgagcacgg

SEQ ID NO: 162995 - DNA, 25 bp, Homo sapien
caggcacttgttgctgtgtgagcga

SEQ ID NO: 162996 - DNA, 25 bp, Homo sapien
gatgaagtgaaatccacccagagtg

SEQ ID NO: 162997 - DNA, 25 bp, Homo sapien
ccacagggaagctcagcgtaggtga

SEQ ID NO: 162998 - DNA, 25 bp, Homo sapien
aaacaagcatacattactttcagag

SEQ ID NO: 162999 - DNA, 25 bp, Homo sapien
catacattactttcagagtaattaa

SEQ ID NO: 163000 - DNA, 25 bp, Homo sapien
cattactttcagagtaattaaaagt

SEQ ID NO: 163001 - DNA, 25 bp, Homo sapien
actttcagagtaattaaaagtgaca

SEQ ID NO: 163002 - DNA, 25 bp, Homo sapien
tgcgcaggggctgtgctaatctctg

SEQ ID NO: 163003 - DNA, 25 bp, Homo sapien
cgcaggggctgtgctaatctctgta

SEQ ID NO: 163004 - DNA, 25 bp, Homo sapien
aaaaatatgcaactgcttcacgaat

SEQ ID NO: 163005 - DNA, 25 bp, Homo sapien
aatatgcaactgcttcacgaatttg

SEQ ID NO: 163006 - DNA, 25 bp, Homo sapien
tatatatttaagagacacaagagat

SEQ ID NO: 163007 - DNA, 25 bp, Homo sapien
atatttaagagacacaagagatgtc

SEQ ID NO: 163008 - DNA, 25 bp, Homo sapien
tatatttaagagacacaagagatgt

SEQ ID NO: 163009 - DNA, 25 bp, Homo sapien
atatatatttaagagacacaagaga

SEQ ID NO: 163010 - DNA, 25 bp, Homo sapien
cctggccgtgggagtaagaaagcaa

SEQ ID NO: 163011 - DNA, 25 bp, Homo sapien
gaaagccgctttataaattcgatag

SEQ ID NO: 163012 - DNA, 25 bp, Homo sapien
ccattagtttggactcttattcaac

SEQ ID NO: 163013 - DNA, 25 bp, Homo sapien
aacttcccttaccaataggatgagt

SEQ ID NO: 163014 - DNA, 25 bp, Homo sapien
cagcgggaaaggcaatgggctcctt

SEQ ID NO: 163015 - DNA, 25 bp, Homo sapien
gaactggctggttcgtgatgtcagc

SEQ ID NO: 163016 - DNA, 25 bp, Homo sapien
gctggttcgtgatgtcagcaggcat

SEQ ID NO: 163017 - DNA, 25 bp, Homo sapien
aaggcaatgggctccttaaggcaag

SEQ ID NO: 163018 - DNA, 25 bp, Homo sapien
tgctgcccgctttattacatgtcaa

SEQ ID NO: 163019 - DNA, 25 bp, Homo sapien
attggagttggccgcatccaccacc

SEQ ID NO: 163020 - DNA, 25 bp, Homo sapien
tggagttggccgcatccaccaccat

SEQ ID NO: 163021 - DNA, 25 bp, Homo sapien
ttggagttggccgcatccaccacca

SEQ ID NO: 163022 - DNA, 25 bp, Homo sapien
tcctgctcgatgaaagaaaggcgcc

SEQ ID NO: 163023 - DNA, 25 bp, Homo sapien
tatactctgaactgaggccgtggac

SEQ ID NO: 163024 - DNA, 25 bp, Homo sapien
gacacggaaagccaccctatttgag

SEQ ID NO: 163025 - DNA, 25 bp, Homo sapien
tcagttacatgaacacccggcagtg

SEQ ID NO: 163026 - DNA, 25 bp, Homo sapien
tcagggttaggtgggctccggatgc

SEQ ID NO: 163027 - DNA, 25 bp, Homo sapien
gaaggctcagggttaggtgggctcc

SEQ ID NO: 163028 - DNA, 25 bp, Homo sapien
ggctccggatgctctcagctctcat

SEQ ID NO: 163029 - DNA, 25 bp, Homo sapien
aggcaagaggaaggctcagggttag

SEQ ID NO: 163030 - DNA, 25 bp, Homo sapien
tactatggatgccatagctaaggct

SEQ ID NO: 163031 - DNA, 25 bp, Homo sapien
gcaaatgtctcagcccgtatgttac

SEQ ID NO: 163032 - DNA, 25 bp, Homo sapien
taaggctattagcttggctgatagg

SEQ ID NO: 163033 - DNA, 25 bp, Homo sapien
cataaatatttacatcggcagcgtg

SEQ ID NO: 163034 - DNA, 25 bp, Homo sapien
ccctgtgataaagaaacctgcaaga

SEQ ID NO: 163035 - DNA, 25 bp, Homo sapien
aaagtaccgtgtagatagatccctg

SEQ ID NO: 163036 - DNA, 25 bp, Homo sapien
ctgagagcagaaagtaccgtgtaga

SEQ ID NO: 163037 - DNA, 25 bp, Homo sapien
gcaggctcagtgcatgctcagagag

SEQ ID NO: 163038 - DNA, 25 bp, Homo sapien
taagatcaactaacctggtttcagc

SEQ ID NO: 163039 - DNA, 25 bp, Homo sapien
gatgacaccataagatcaactaacc

SEQ ID NO: 163040 - DNA, 25 bp, Homo sapien
tgcactgcactctacaccactgtaa

SEQ ID NO: 163041 - DNA, 25 bp, Homo sapien
tcaactaacctggtttcagctgcac

SEQ ID NO: 163042 - DNA, 25 bp, Homo sapien
agataagttaatttcatccataacc

SEQ ID NO: 163043 - DNA, 25 bp, Homo sapien
gagacaatgtaaggctcagataagt

SEQ ID NO: 163044 - DNA, 25 bp, Homo sapien
tagtgagacaatgtaaggctcagat

SEQ ID NO: 163045 - DNA, 25 bp, Homo sapien
taagttaatttcatccataaccaca

SEQ ID NO: 163046 - DNA, 25 bp, Homo sapien
tgtgcgagctccgaaaatcaagtgg

SEQ ID NO: 163047 - DNA, 25 bp, Homo sapien
tgccacggaacaagtgggcactgtg

SEQ ID NO: 163048 - DNA, 25 bp, Homo sapien
ggaaagtcagtcctggagtctgttc

SEQ ID NO: 163049 - DNA, 25 bp, Homo sapien
tgcagcttgaacatgaatctctcgg

SEQ ID NO: 163050 - DNA, 25 bp, Homo sapien
cacgaaaatactcttgccagctatg

SEQ ID NO: 163051 - DNA, 25 bp, Homo sapien
acgaaaatactcttgccagctatgt

SEQ ID NO: 163052 - DNA, 25 bp, Homo sapien
gaacttcatgctatatcattacgaa

SEQ ID NO: 163053 - DNA, 25 bp, Homo sapien
ggaaatctttgcagagctttattaa

SEQ ID NO: 163054 - DNA, 25 bp, Homo sapien
aatgtctacactaaaacagagccag

SEQ ID NO: 163055 - DNA, 25 bp, Homo sapien
taaaatcaggaacatgcgtgcatag

SEQ ID NO: 163056 - DNA, 25 bp, Homo sapien
caacttccccttgtgtagtgacgaa

SEQ ID NO: 163057 - DNA, 25 bp, Homo sapien
gaagatggcgtgagaagccactgct

SEQ ID NO: 163058 - DNA, 25 bp, Homo sapien
ttgtttggcccaacaaaggacacag

SEQ ID NO: 163059 - DNA, 25 bp, Homo sapien
aacacgaccagttcttagcactaag

SEQ ID NO: 163060 - DNA, 25 bp, Homo sapien
aagagttaaaaagatgttgtactca

SEQ ID NO: 163061 - DNA, 25 bp, Homo sapien
gaactcatagtaaggattcttacaa

SEQ ID NO: 163062 - DNA, 25 bp, Homo sapien
gaaatgaatggtagctggagattga

SEQ ID NO: 163063 - DNA, 25 bp, Homo sapien
tcaggaaatgaatggtagctggaga

SEQ ID NO: 163064 - DNA, 25 bp, Homo sapien
gcttggccttcttgcctggtaagac

SEQ ID NO: 163065 - DNA, 25 bp, Homo sapien
gtggggcccgtagcccagcacttcc

SEQ ID NO: 163066 - DNA, 25 bp, Homo sapien
tgcttggccttcttgcctggtaaga

SEQ ID NO: 163067 - DNA, 25 bp, Homo sapien
gcacttccctgatgtaggttccttc

SEQ ID NO: 163068 - DNA, 25 bp, Homo sapien
ctggatgtctgattgcgggcacctc

SEQ ID NO: 163069 - DNA, 25 bp, Homo sapien
gctgtaatcagggtccatgcatgga

SEQ ID NO: 163070 - DNA, 25 bp, Homo sapien
cactcaatttgaaggcactgcgtaa

SEQ ID NO: 163071 - DNA, 25 bp, Homo sapien
acgttgcctgctcccgctgtaatca

SEQ ID NO: 163072 - DNA, 25 bp, Homo sapien
cagcgacacaacaaccaaagtgaga

SEQ ID NO: 163073 - DNA, 25 bp, Homo sapien
aagaaaaatacgacagcgacacaac

SEQ ID NO: 163074 - DNA, 25 bp, Homo sapien
aaccagtgttcggtccctaggagtg

SEQ ID NO: 163075 - DNA, 25 bp, Homo sapien
gaacatttcaatactgcgaaaaaag

SEQ ID NO: 163076 - DNA, 25 bp, Homo sapien
gtcggcccgcagaacccgtgcgtat

SEQ ID NO: 163077 - DNA, 25 bp, Homo sapien
ccgtgcgtatgaaaagttggccctc

SEQ ID NO: 163078 - DNA, 25 bp, Homo sapien
tatacataggtctcgaatcttgtgc

SEQ ID NO: 163079 - DNA, 25 bp, Homo sapien
cgcatattcaagtcccacagtcggc

SEQ ID NO: 163080 - DNA, 25 bp, Homo sapien
gattttaggctaaggttggcaggtc

SEQ ID NO: 163081 - DNA, 25 bp, Homo sapien
tacaaaaccagctacgacagtgtgt

SEQ ID NO: 163082 - DNA, 25 bp, Homo sapien
gaaggtcagggacttccaacctcag

SEQ ID NO: 163083 - DNA, 25 bp, Homo sapien
gacagtgtgtgtgattctagcagct

SEQ ID NO: 163084 - DNA, 25 bp, Homo sapien
tatgtctaccacatgacctgtgagg

SEQ ID NO: 163085 - DNA, 25 bp, Homo sapien
aacttataccatgagggtcgggcac

SEQ ID NO: 163086 - DNA, 25 bp, Homo sapien
gctttgcccagcattgacgtcatga

SEQ ID NO: 163087 - DNA, 25 bp, Homo sapien
cgctttagcgtgatgaataaccctg

SEQ ID NO: 163088 - DNA, 25 bp, Homo sapien
tggtcacgtaacttgactctggaaa

SEQ ID NO: 163089 - DNA, 25 bp, Homo sapien
tcacaggccctgtgccacctgtggt

SEQ ID NO: 163090 - DNA, 25 bp, Homo sapien
gcaggaagtcgtcgcaggctgttct

SEQ ID NO: 163091 - DNA, 25 bp, Homo sapien
gaagtcgtcgcaggctgttctcaca

SEQ ID NO: 163092 - DNA, 25 bp, Homo sapien
gagaacactgctggcatctccgagt

SEQ ID NO: 163093 - DNA, 25 bp, Homo sapien
caaggtgggcactacaagaaggacc

SEQ ID NO: 163094 - DNA, 25 bp, Homo sapien
tattaactagccgtgaccagctgct

SEQ ID NO: 163095 - DNA, 25 bp, Homo sapien
gacgaaaaaggcaagagacgctggc

SEQ ID NO: 163096 - DNA, 25 bp, Homo sapien
ctagcatgactggtgaaatactgaa

SEQ ID NO: 163097 - DNA, 25 bp, Homo sapien
taaatgctcaacacccttcgtgcag

SEQ ID NO: 163098 - DNA, 25 bp, Homo sapien
cccagggcactgattactaaatgct

SEQ ID NO: 163099 - DNA, 25 bp, Homo sapien
gatacaggccatatttcccacatag

SEQ ID NO: 163100 - DNA, 25 bp, Homo sapien
tcagctgtaaaatctcctgtggaca

SEQ ID NO: 163101 - DNA, 25 bp, Homo sapien
tcaaaaggcagtggttgaagctaaa

SEQ ID NO: 163102 - DNA, 25 bp, Homo sapien
gaacaaactgactcccggttcagac

SEQ ID NO: 163103 - DNA, 25 bp, Homo sapien
tttccgcccatgaagactggcagct

SEQ ID NO: 163104 - DNA, 25 bp, Homo sapien
tttcgggcaaaatgaacagtaccgc

SEQ ID NO: 163105 - DNA, 25 bp, Homo sapien
catgtggctgcctgtagctaggtct

SEQ ID NO: 163106 - DNA, 25 bp, Homo sapien
taagtgttcccggttccagcatgtg

SEQ ID NO: 163107 - DNA, 25 bp, Homo sapien
gctccatgagaaacccggagaggtg

SEQ ID NO: 163108 - DNA, 25 bp, Homo sapien
gttatttcattcaaatgtagccaat

SEQ ID NO: 163109 - DNA, 25 bp, Homo sapien
agatatggtatcttagcttccctgc

SEQ ID NO: 163110 - DNA, 25 bp, Homo sapien
ggactacaatgaacagtgccttagg

SEQ ID NO: 163111 - DNA, 25 bp, Homo sapien
tgctcaggtttctaaatggatgtta

SEQ ID NO: 163112 - DNA, 25 bp, Homo sapien
gaaagacagcagaaccaggactttc

SEQ ID NO: 163113 - DNA, 25 bp, Homo sapien
tgctccaagacaccataaaggacca

SEQ ID NO: 163114 - DNA, 25 bp, Homo sapien
tcttggtggtcaaaagaaatgctcc

SEQ ID NO: 163115 - DNA, 25 bp, Homo sapien
aaggaccaactttcagcatggcagc

SEQ ID NO: 163116 - DNA, 25 bp, Homo sapien
atgcctcaaaatgccctaaaagcat

SEQ ID NO: 163117 - DNA, 25 bp, Homo sapien
ctctttgcttgccttcaattctcat

SEQ ID NO: 163118 - DNA, 25 bp, Homo sapien
taccatttcacttaaagcagctcgt

SEQ ID NO: 163119 - DNA, 25 bp, Homo sapien
ccatttcacttaaagcagctcgttt

SEQ ID NO: 163120 - DNA, 25 bp, Homo sapien
ctaccatttcacttaaagcagctcg

SEQ ID NO: 163121 - DNA, 25 bp, Homo sapien
atttcacttaaagcagctcgtttta

SEQ ID NO: 163122 - DNA, 25 bp, Homo sapien
actatacttctcatcaatgccctct

SEQ ID NO: 163123 - DNA, 25 bp, Homo sapien
cttccttctttcactatacttctca

SEQ ID NO: 163124 - DNA, 25 bp, Homo sapien
ttcactatacttctcatcaatgccc

SEQ ID NO: 163125 - DNA, 25 bp, Homo sapien
tatacttctcatcaatgccctctag

SEQ ID NO: 163126 - DNA, 25 bp, Homo sapien
taagtgtgagagacccagtgtctgc

SEQ ID NO: 163127 - DNA, 25 bp, Homo sapien
aagaaggctgcattgaggcgtcccc

SEQ ID NO: 163128 - DNA, 25 bp, Homo sapien
tagttacggcaacgggatcaagggc

SEQ ID NO: 163129 - DNA, 25 bp, Homo sapien
tctatcgcatggtttggtgggcaca

SEQ ID NO: 163130 - DNA, 25 bp, Homo sapien
caaaacttcttggttcacaatgccc

SEQ ID NO: 163131 - DNA, 25 bp, Homo sapien
tgtggtgcggaagacgtgactatac

SEQ ID NO: 163132 - DNA, 25 bp, Homo sapien
gttccgagaactggccacaagaaag

SEQ ID NO: 163133 - DNA, 25 bp, Homo sapien
tgttctatatcctgactgtggtgcg

SEQ ID NO: 163134 - DNA, 25 bp, Homo sapien
gatgtaaactagaatggcccaagaa

SEQ ID NO: 163135 - DNA, 25 bp, Homo sapien
cacgaacagttagcattacacagca

SEQ ID NO: 163136 - DNA, 25 bp, Homo sapien
caggaccgtctctggttaatatcag

SEQ ID NO: 163137 - DNA, 25 bp, Homo sapien
tgaaaataatggcacgcacgtgagt

SEQ ID NO: 163138 - DNA, 25 bp, Homo sapien
ggagaggaaacagccgtccctctgg

SEQ ID NO: 163139 - DNA, 25 bp, Homo sapien
tggaagaggcctgctgcccaagagt

SEQ ID NO: 163140 - DNA, 25 bp, Homo sapien
caccattctggccgaggccacaggg

SEQ ID NO: 163141 - DNA, 25 bp, Homo sapien
aagaggcctgctgcccaagagtcac

SEQ ID NO: 163142 - DNA, 25 bp, Homo sapien
caggagccgtagggccacgccgccc

SEQ ID NO: 163143 - DNA, 25 bp, Homo sapien
cagagcaggagccgtagggccacgc

SEQ ID NO: 163144 - DNA, 25 bp, Homo sapien
agagcaggagccgtagggccacgcc

SEQ ID NO: 163145 - DNA, 25 bp, Homo sapien
agcaggagccgtagggccacgccgc

SEQ ID NO: 163146 - DNA, 25 bp, Homo sapien
tgattgacaggtggacggccctgcc

SEQ ID NO: 163147 - DNA, 25 bp, Homo sapien
cctcccaaagaacggtgattgacag

SEQ ID NO: 163148 - DNA, 25 bp, Homo sapien
ccacagacgtgaacaagcagatgct

SEQ ID NO: 163149 - DNA, 25 bp, Homo sapien
tgtatagggcactgcaaggagcctc

SEQ ID NO: 163150 - DNA, 25 bp, Homo sapien
ggagtacagtggccatcatcgctca

SEQ ID NO: 163151 - DNA, 25 bp, Homo sapien
tactggtattgatactgaactccaa

SEQ ID NO: 163152 - DNA, 25 bp, Homo sapien
tgcagagacaagaactcgctacgtt

SEQ ID NO: 163153 - DNA, 25 bp, Homo sapien
aaagtcatcagctataaaagctctg

SEQ ID NO: 163154 - DNA, 25 bp, Homo sapien
tgcttctaacgttggttcatcttcc

SEQ ID NO: 163155 - DNA, 25 bp, Homo sapien
gcttctaacgttggttcatcttcct

SEQ ID NO: 163156 - DNA, 25 bp, Homo sapien
ctgcttctaacgttggttcatcttc

SEQ ID NO: 163157 - DNA, 25 bp, Homo sapien
cttctaacgttggttcatcttcctc

SEQ ID NO: 163158 - DNA, 25 bp, Homo sapien
gtttacgaggcccatgctactgagg

SEQ ID NO: 163159 - DNA, 25 bp, Homo sapien
acgaggcccatgctactgaggagga

SEQ ID NO: 163160 - DNA, 25 bp, Homo sapien
ctggccagaccagtgcgcccgctct

SEQ ID NO: 163161 - DNA, 25 bp, Homo sapien
ttttcttgtacatatgggtttacga

SEQ ID NO: 163162 - DNA, 25 bp, Homo sapien
cagtggccagcgcaggacctggggg

SEQ ID NO: 163163 - DNA, 25 bp, Homo sapien
gcagtggccagcgcaggacctgggg

SEQ ID NO: 163164 - DNA, 25 bp, Homo sapien
tcatgccgaccctggcgcctccttg

SEQ ID NO: 163165 - DNA, 25 bp, Homo sapien
gctctgctcatgccgaccctggcgc

SEQ ID NO: 163166 - DNA, 25 bp, Homo sapien
cgaccctggcgcctccttgccaacc

SEQ ID NO: 163167 - DNA, 25 bp, Homo sapien
tgctcatgccgaccctggcgcctcc

SEQ ID NO: 163168 - DNA, 25 bp, Homo sapien
ggatttgcagcctgtcgcctaggag

SEQ ID NO: 163169 - DNA, 25 bp, Homo sapien
gatgtggacccagaatcatgacctc

SEQ ID NO: 163170 - DNA, 25 bp, Homo sapien
cactgttcagggactacagggcaca

SEQ ID NO: 163171 - DNA, 25 bp, Homo sapien
ggcgcagagccaaccaaatacacag

SEQ ID NO: 163172 - DNA, 25 bp, Homo sapien
tacaaacttctgatcaatatatttc

SEQ ID NO: 163173 - DNA, 25 bp, Homo sapien
acaaacttctgatcaatatatttct

SEQ ID NO: 163174 - DNA, 25 bp, Homo sapien
catagattctgtgaagggtggtttt

SEQ ID NO: 163175 - DNA, 25 bp, Homo sapien
agattctgtgaagggtggttttaag

SEQ ID NO: 163176 - DNA, 25 bp, Homo sapien
ttcccatagattctgtgaagggtgg

SEQ ID NO: 163177 - DNA, 25 bp, Homo sapien
cccatagattctgtgaagggtggtt

SEQ ID NO: 163178 - DNA, 25 bp, Homo sapien
ggaacaatggagggacccaggatga

SEQ ID NO: 163179 - DNA, 25 bp, Homo sapien
aggaacaatggagggacccaggatg

SEQ ID NO: 163180 - DNA, 25 bp, Homo sapien
caggaacaatggagggacccaggat

SEQ ID NO: 163181 - DNA, 25 bp, Homo sapien
tatagttaatgtgtcaggtctgggc

SEQ ID NO: 163182 - DNA, 25 bp, Homo sapien
gaatgcaacccttatgactgcagag

SEQ ID NO: 163183 - DNA, 25 bp, Homo sapien
gggccctaatgactgcagacggaaa

SEQ ID NO: 163184 - DNA, 25 bp, Homo sapien
cgaaatgccctatcaggtgtgcagg

SEQ ID NO: 163185 - DNA, 25 bp, Homo sapien
gaagcagaacctttagcagggagac

SEQ ID NO: 163186 - DNA, 25 bp, Homo sapien
gggagacccagtagcacaacaatgc

SEQ ID NO: 163187 - DNA, 25 bp, Homo sapien
taatttacgaaactcaccctgcagg

SEQ ID NO: 163188 - DNA, 25 bp, Homo sapien
tgccgtgggtgacaggaacgacact

SEQ ID NO: 163189 - DNA, 25 bp, Homo sapien
gaagaactcgtttggctggaacaaa

SEQ ID NO: 163190 - DNA, 25 bp, Homo sapien
gaaaagccgaaatctggccgggcac

SEQ ID NO: 163191 - DNA, 25 bp, Homo sapien
ctggaaggccagcttagaaaagccg

SEQ ID NO: 163192 - DNA, 25 bp, Homo sapien
gaacaaaggtctgtgccgtggagtg

SEQ ID NO: 163193 - DNA, 25 bp, Homo sapien
aatatttccagtaactctgctatgc

SEQ ID NO: 163194 - DNA, 25 bp, Homo sapien
ctttgtgcaaaggtagtaacacctt

SEQ ID NO: 163195 - DNA, 25 bp, Homo sapien
caaaggtagtaacaccttcaataag

SEQ ID NO: 163196 - DNA, 25 bp, Homo sapien
tggtaaggcaaatccattaattata

SEQ ID NO: 163197 - DNA, 25 bp, Homo sapien
gtggtaaggcaaatccattaattat

SEQ ID NO: 163198 - DNA, 25 bp, Homo sapien
tctaaaaactgcactacacagtatg

SEQ ID NO: 163199 - DNA, 25 bp, Homo sapien
aaaactgcactacacagtatgccag

SEQ ID NO: 163200 - DNA, 25 bp, Homo sapien
tggttccgtgagggtgctgtccttt

SEQ ID NO: 163201 - DNA, 25 bp, Homo sapien
tccgtgagggtgctgtccttttcta

SEQ ID NO: 163202 - DNA, 25 bp, Homo sapien
cagatccacgcacagaacagcagta

SEQ ID NO: 163203 - DNA, 25 bp, Homo sapien
catgtctggctttgttaaccctggc

SEQ ID NO: 163204 - DNA, 25 bp, Homo sapien
cagatgtgaaactactgaattgcac

SEQ ID NO: 163205 - DNA, 25 bp, Homo sapien
taaatgcttaaactggcacctgaca

SEQ ID NO: 163206 - DNA, 25 bp, Homo sapien
tgagactttctctcaaaaaaataag

SEQ ID NO: 163207 - DNA, 25 bp, Homo sapien
taaataaaaagaaagcaacagcagc

SEQ ID NO: 163208 - DNA, 25 bp, Homo sapien
ataaaaagaaagcaacagcagcagc

SEQ ID NO: 163209 - DNA, 25 bp, Homo sapien
agactttctctcaaaaaaataagat

SEQ ID NO: 163210 - DNA, 25 bp, Homo sapien
tatacagattttggtcaacaagcgc

SEQ ID NO: 163211 - DNA, 25 bp, Homo sapien
attttggtcaacaagcgctgaaaag

SEQ ID NO: 163212 - DNA, 25 bp, Homo sapien
tacagattttggtcaacaagcgctg

SEQ ID NO: 163213 - DNA, 25 bp, Homo sapien
cagattttggtcaacaagcgctgaa

SEQ ID NO: 163214 - DNA, 25 bp, Homo sapien
tgaataggaaaaggtgggagaggag

SEQ ID NO: 163215 - DNA, 25 bp, Homo sapien
ccagttgtcttttatttttgaatag

SEQ ID NO: 163216 - DNA, 25 bp, Homo sapien
ttgaataggaaaaggtgggagagga

SEQ ID NO: 163217 - DNA, 25 bp, Homo sapien
gccactgtgcccagttgtcttttat

SEQ ID NO: 163218 - DNA, 25 bp, Homo sapien
cttcaggagtccctttggtgcaggc

SEQ ID NO: 163219 - DNA, 25 bp, Homo sapien
aacattcctgagcctggacatttga

SEQ ID NO: 163220 - DNA, 25 bp, Homo sapien
tttaaacattcctgagcctggacat

SEQ ID NO: 163221 - DNA, 25 bp, Homo sapien
ctgagcctggacatttgatggcttc

SEQ ID NO: 163222 - DNA, 25 bp, Homo sapien
acatttggccaactgccggaagagg

SEQ ID NO: 163223 - DNA, 25 bp, Homo sapien
catttggccaactgccggaagaggg

SEQ ID NO: 163224 - DNA, 25 bp, Homo sapien
tcttcacaaattctgatggttcaat

SEQ ID NO: 163225 - DNA, 25 bp, Homo sapien
tgggcagaatcttcgctgcgttgtc

SEQ ID NO: 163226 - DNA, 25 bp, Homo sapien
tattccagtaatagagagctcgctc

SEQ ID NO: 163227 - DNA, 25 bp, Homo sapien
ttcgctgcgttgtcactgattaaac

SEQ ID NO: 163228 - DNA, 25 bp, Homo sapien
gttgcggtacaaggaaggaaacatg

SEQ ID NO: 163229 - DNA, 25 bp, Homo sapien
ttattcttactgaagtagcagtaaa

SEQ ID NO: 163230 - DNA, 25 bp, Homo sapien
tattcttactgaagtagcagtaaaa

SEQ ID NO: 163231 - DNA, 25 bp, Homo sapien
ttcttactgaagtagcagtaaaacg

SEQ ID NO: 163232 - DNA, 25 bp, Homo sapien
atttattcttactgaagtagcagta

SEQ ID NO: 163233 - DNA, 25 bp, Homo sapien
catcgcacaggatccctaaggtcta

SEQ ID NO: 163234 - DNA, 25 bp, Homo sapien
ggcctgctcattccgcgttacttgt

SEQ ID NO: 163235 - DNA, 25 bp, Homo sapien
taaagaaaaccgcacggtgagcctg

SEQ ID NO: 163236 - DNA, 25 bp, Homo sapien
tgacagtagccaaaaacgaccttgc

SEQ ID NO: 163237 - DNA, 25 bp, Homo sapien
catgaagagcttcagggcgttgtat

SEQ ID NO: 163238 - DNA, 25 bp, Homo sapien
tccatgaagagcttcagggcgttgt

SEQ ID NO: 163239 - DNA, 25 bp, Homo sapien
ccatgaagagcttcagggcgttgta

SEQ ID NO: 163240 - DNA, 25 bp, Homo sapien
gagtgaagaataccgttttaggaca

SEQ ID NO: 163241 - DNA, 25 bp, Homo sapien
gaaacagtaacttgtgaaaggaaca

SEQ ID NO: 163242 - DNA, 25 bp, Homo sapien
gcttggttttgctttcgagtgaaga

SEQ ID NO: 163243 - DNA, 25 bp, Homo sapien
cagtggaagaggtttacttaggatt

SEQ ID NO: 163244 - DNA, 25 bp, Homo sapien
cagagaacacccacatcgctgagtt

SEQ ID NO: 163245 - DNA, 25 bp, Homo sapien
tgctctctgggataaaccttatagg

SEQ ID NO: 163246 - DNA, 25 bp, Homo sapien
actttgtcacttagatcatccctgg

SEQ ID NO: 163247 - DNA, 25 bp, Homo sapien
cattattacttgcacagcctaggga

SEQ ID NO: 163248 - DNA, 25 bp, Homo sapien
taagtacgtcttatgtctcaatcct

SEQ ID NO: 163249 - DNA, 25 bp, Homo sapien
catttccccacacttacgtgctgag

SEQ ID NO: 163250 - DNA, 25 bp, Homo sapien
gcacagcatgaaaaacgaactgaga

SEQ ID NO: 163251 - DNA, 25 bp, Homo sapien
gatgcatcagacacaagaacacact

SEQ ID NO: 163252 - DNA, 25 bp, Homo sapien
gattggctttggctagattttctat

SEQ ID NO: 163253 - DNA, 25 bp, Homo sapien
gattttctattttaacccatgcttc

SEQ ID NO: 163254 - DNA, 25 bp, Homo sapien
acccatgcttcttcccgttctttca

SEQ ID NO: 163255 - DNA, 25 bp, Homo sapien
catgcttcttcccgttctttcattt

SEQ ID NO: 163256 - DNA, 25 bp, Homo sapien
catatacaacgttagtgaaatcgag

SEQ ID NO: 163257 - DNA, 25 bp, Homo sapien
ttcatatacaacgttagtgaaatcg

SEQ ID NO: 163258 - DNA, 25 bp, Homo sapien
tcatatacaacgttagtgaaatcga

SEQ ID NO: 163259 - DNA, 25 bp, Homo sapien
tttcatatacaacgttagtgaaatc

SEQ ID NO: 163260 - DNA, 25 bp, Homo sapien
gaggacatcaaaacgtcatacttaa

SEQ ID NO: 163261 - DNA, 25 bp, Homo sapien
aagtcaattctgtggtaaaacgata

SEQ ID NO: 163262 - DNA, 25 bp, Homo sapien
aaaggctgggcttacagaaacctca

SEQ ID NO: 163263 - DNA, 25 bp, Homo sapien
cagtatatgcataagattcagatct

SEQ ID NO: 163264 - DNA, 25 bp, Homo sapien
aaggagggttggctgctaatgtggc

SEQ ID NO: 163265 - DNA, 25 bp, Homo sapien
gggttggctgctaatgtggcagaat

SEQ ID NO: 163266 - DNA, 25 bp, Homo sapien
tgggaaggagggttggctgctaatg

SEQ ID NO: 163267 - DNA, 25 bp, Homo sapien
gttggctgctaatgtggcagaattc

SEQ ID NO: 163268 - DNA, 25 bp, Homo sapien
tacagcagcgtacatcaaacccaaa

SEQ ID NO: 163269 - DNA, 25 bp, Homo sapien
ggacgtccggccatcggcgcagact

SEQ ID NO: 163270 - DNA, 25 bp, Homo sapien
tggcagccccggcagctggaactgc

SEQ ID NO: 163271 - DNA, 25 bp, Homo sapien
aaacccaaagaccatgacaccagga

SEQ ID NO: 163272 - DNA, 25 bp, Homo sapien
gcttgagaattcttaagagtggcaa

SEQ ID NO: 163273 - DNA, 25 bp, Homo sapien
ggtaactatgcatatctctcactaa

SEQ ID NO: 163274 - DNA, 25 bp, Homo sapien
ttaagaggcactgttataatcaggc

SEQ ID NO: 163275 - DNA, 25 bp, Homo sapien
taatcaggcacacagaacgtgaaga

SEQ ID NO: 163276 - DNA, 25 bp, Homo sapien
gatggcgtcaacacagacatgagga

SEQ ID NO: 163277 - DNA, 25 bp, Homo sapien
tgtttaggagaccatgtgccatgcg

SEQ ID NO: 163278 - DNA, 25 bp, Homo sapien
cagttcgtcaaagctcctatgcaga

SEQ ID NO: 163279 - DNA, 25 bp, Homo sapien
gaatgagaagcaagtacgaggccag

SEQ ID NO: 163280 - DNA, 25 bp, Homo sapien
catgaggcctatgggtgccctctgg

SEQ ID NO: 163281 - DNA, 25 bp, Homo sapien
ccgtctggtgttggccctcatcctc

SEQ ID NO: 163282 - DNA, 25 bp, Homo sapien
gcccagagcagctccgttctcagcc

SEQ ID NO: 163283 - DNA, 25 bp, Homo sapien
gaggaatgatgaccatggacgccat

SEQ ID NO: 163284 - DNA, 25 bp, Homo sapien
ctgcaacatgatgcggctgctgact

SEQ ID NO: 163285 - DNA, 25 bp, Homo sapien
tgcaacatgatgcggctgctgactt

SEQ ID NO: 163286 - DNA, 25 bp, Homo sapien
tgctggcttgactatacactgtgta

SEQ ID NO: 163287 - DNA, 25 bp, Homo sapien
gtgctggcttgactatacactgtgt

SEQ ID NO: 163288 - DNA, 25 bp, Homo sapien
ggtgctggcttgactatacactgtg

SEQ ID NO: 163289 - DNA, 25 bp, Homo sapien
tgatgagcctcgtccttcactgtct

SEQ ID NO: 163290 - DNA, 25 bp, Homo sapien
tgtctccattgcaaccggaatgctc

SEQ ID NO: 163291 - DNA, 25 bp, Homo sapien
ccatctgtctccattgcaaccggaa

SEQ ID NO: 163292 - DNA, 25 bp, Homo sapien
ctgatgagcctcgtccttcactgtc

SEQ ID NO: 163293 - DNA, 25 bp, Homo sapien
tatggctgtgaagctttcgattttg

SEQ ID NO: 163294 - DNA, 25 bp, Homo sapien
agggctgtgaagaaaacagcgaggg

SEQ ID NO: 163295 - DNA, 25 bp, Homo sapien
tctctgggtcgaagcagaagccaga

SEQ ID NO: 163296 - DNA, 25 bp, Homo sapien
gagcctctctgggtcgaagcagaag

SEQ ID NO: 163297 - DNA, 25 bp, Homo sapien
taactgtgtatagcctcgtgtctta

SEQ ID NO: 163298 - DNA, 25 bp, Homo sapien
ctgtgtgcagtaacaaggtcaactt

SEQ ID NO: 163299 - DNA, 25 bp, Homo sapien
tcttaaaaatgaacacgtggccaca

SEQ ID NO: 163300 - DNA, 25 bp, Homo sapien
gaagagacaccgactgtgatttcct

SEQ ID NO: 163301 - DNA, 25 bp, Homo sapien
ggtggtgccggtagtcactgctgct

SEQ ID NO: 163302 - DNA, 25 bp, Homo sapien
ctccaatccattgtctttctaaagt

SEQ ID NO: 163303 - DNA, 25 bp, Homo sapien
ttcctaagtaacctcctatttcata

SEQ ID NO: 163304 - DNA, 25 bp, Homo sapien
ttcatgggcatgtcccctacagaag

SEQ ID NO: 163305 - DNA, 25 bp, Homo sapien
agtaacctcctatttcataaatgtc

SEQ ID NO: 163306 - DNA, 25 bp, Homo sapien
tcatgggcatgtcccctacagaagc

SEQ ID NO: 163307 - DNA, 25 bp, Homo sapien
tcttgctactaaaaatcgtgactcg

SEQ ID NO: 163308 - DNA, 25 bp, Homo sapien
tcgtgactcgtttgaggacctgtgt

SEQ ID NO: 163309 - DNA, 25 bp, Homo sapien
gtcaaaggataaccgcgaggcacgt

SEQ ID NO: 163310 - DNA, 25 bp, Homo sapien
caatggcgttggctacaaactaagc

SEQ ID NO: 163311 - DNA, 25 bp, Homo sapien
ggtccttcttcggatctttctgtgc

SEQ ID NO: 163312 - DNA, 25 bp, Homo sapien
tcctgaggcagctcggacttgcggc

SEQ ID NO: 163313 - DNA, 25 bp, Homo sapien
cggcgtgcaagaggacggtccttct

SEQ ID NO: 163314 - DNA, 25 bp, Homo sapien
tagcggccgtcctgggaggccagct

SEQ ID NO: 163315 - DNA, 25 bp, Homo sapien
gaactcctaatctcgcgctgaggcg

SEQ ID NO: 163316 - DNA, 25 bp, Homo sapien
gaagtattcatctcacaaagcggac

SEQ ID NO: 163317 - DNA, 25 bp, Homo sapien
tacagaatccggaaaagaactggcg

SEQ ID NO: 163318 - DNA, 25 bp, Homo sapien
tctttgaaaggatacccgagacctc

SEQ ID NO: 163319 - DNA, 25 bp, Homo sapien
acagtcaccggtttattttcaatgt

SEQ ID NO: 163320 - DNA, 25 bp, Homo sapien
tgatatgtaagctgacaattagcac

SEQ ID NO: 163321 - DNA, 25 bp, Homo sapien
caggagtccgagtactaactaggga

SEQ ID NO: 163322 - DNA, 25 bp, Homo sapien
tcagtttggtacagaataaacagtc

SEQ ID NO: 163323 - DNA, 25 bp, Homo sapien
agacacttggaatagtgacatttct

SEQ ID NO: 163324 - DNA, 25 bp, Homo sapien
gaaagagtgaagatgccaaacgcag

SEQ ID NO: 163325 - DNA, 25 bp, Homo sapien
gaagccatactaaagccacactaaa

SEQ ID NO: 163326 - DNA, 25 bp, Homo sapien
tgacatttctgatgtacagatacat

SEQ ID NO: 163327 - DNA, 25 bp, Homo sapien
acttttttattctgtacataggaca

SEQ ID NO: 163328 - DNA, 25 bp, Homo sapien
tttattctgtacataggacattttg

SEQ ID NO: 163329 - DNA, 25 bp, Homo sapien
tgaacttttttattctgtacatagg

SEQ ID NO: 163330 - DNA, 25 bp, Homo sapien
tttttattctgtacataggacattt

SEQ ID NO: 163331 - DNA, 25 bp, Homo sapien
gtcggtacttaacatttcactaatg

SEQ ID NO: 163332 - DNA, 25 bp, Homo sapien
atggcaagtgtatgaagtttctctt

SEQ ID NO: 163333 - DNA, 25 bp, Homo sapien
aaaaataattgtgccacttacctat

SEQ ID NO: 163334 - DNA, 25 bp, Homo sapien
tttatttagtccatatgatacaccg

SEQ ID NO: 163335 - DNA, 25 bp, Homo sapien
gaaggagacacgaagccagtacagt

SEQ ID NO: 163336 - DNA, 25 bp, Homo sapien
gagcatctagtctgcggaaacatcg

SEQ ID NO: 163337 - DNA, 25 bp, Homo sapien
tgaaatcgcagcatgcctctgtgag

SEQ ID NO: 163338 - DNA, 25 bp, Homo sapien
aaacatcgacgtgagtagcggtgca

SEQ ID NO: 163339 - DNA, 25 bp, Homo sapien
cttgtcaattctgggtcatcaccca

SEQ ID NO: 163340 - DNA, 25 bp, Homo sapien
tcttgtcaattctgggtcatcaccc

SEQ ID NO: 163341 - DNA, 25 bp, Homo sapien
ttgtcaattctgggtcatcacccat

SEQ ID NO: 163342 - DNA, 25 bp, Homo sapien
ctcttgtcaattctgggtcatcacc

SEQ ID NO: 163343 - DNA, 25 bp, Homo sapien
ctgagatcctgcactcggctccagg

SEQ ID NO: 163344 - DNA, 25 bp, Homo sapien
gagatcctgcactcggctccaggta

SEQ ID NO: 163345 - DNA, 25 bp, Homo sapien
ctcgctgagatcctgcactcggctc

SEQ ID NO: 163346 - DNA, 25 bp, Homo sapien
ttctcgctgagatcctgcactcggc

SEQ ID NO: 163347 - DNA, 25 bp, Homo sapien
aggtgcccttaggtcccacaatgca

SEQ ID NO: 163348 - DNA, 25 bp, Homo sapien
cactcgcgagattgggcgtctgaca

SEQ ID NO: 163349 - DNA, 25 bp, Homo sapien
tctgcgttccgcgtgaatctcgctc

SEQ ID NO: 163350 - DNA, 25 bp, Homo sapien
gggcggtcctgcattgacgcaacct

SEQ ID NO: 163351 - DNA, 25 bp, Homo sapien
tttcctcagcaagtgacctaacccg

SEQ ID NO: 163352 - DNA, 25 bp, Homo sapien
cccggtcttagatcgaggtctctgg

SEQ ID NO: 163353 - DNA, 25 bp, Homo sapien
gaactgaggtccacgtcattgggag

SEQ ID NO: 163354 - DNA, 25 bp, Homo sapien
gagaggaacacgtgacatattgagc

SEQ ID NO: 163355 - DNA, 25 bp, Homo sapien
ttcatattcggcagggcatttccac

SEQ ID NO: 163356 - DNA, 25 bp, Homo sapien
ccagagcaccctttttcgggcaaca

SEQ ID NO: 163357 - DNA, 25 bp, Homo sapien
aggccatcgccccattcatattcgg

SEQ ID NO: 163358 - DNA, 25 bp, Homo sapien
ctatgtacgactggccgctaagtca

SEQ ID NO: 163359 - DNA, 25 bp, Homo sapien
tgtgggtcaagcagagtccagctct

SEQ ID NO: 163360 - DNA, 25 bp, Homo sapien
agtggtccacaacgactggcgtcgg

SEQ ID NO: 163361 - DNA, 25 bp, Homo sapien
taaagggctcaaaacgccagacagc

SEQ ID NO: 163362 - DNA, 25 bp, Homo sapien
tgtttaatgctagctgcccagtgcc

SEQ ID NO: 163363 - DNA, 25 bp, Homo sapien
actaaatgcgacgtggtgtcctgca

SEQ ID NO: 163364 - DNA, 25 bp, Homo sapien
tgtcctgcatgggatcccggaagag

SEQ ID NO: 163365 - DNA, 25 bp, Homo sapien
ggtggctcatgcgagcaactcctgg

SEQ ID NO: 163366 - DNA, 25 bp, Homo sapien
aaaccgtggtggacaactaaatgcg

SEQ ID NO: 163367 - DNA, 25 bp, Homo sapien
tttgcaaggacctagtgcctgctca

SEQ ID NO: 163368 - DNA, 25 bp, Homo sapien
gaattaaaactgtggtgggccaggc

SEQ ID NO: 163369 - DNA, 25 bp, Homo sapien
gtcaggcagaacaccgaaactcagc

SEQ ID NO: 163370 - DNA, 25 bp, Homo sapien
tgccatccccagcatataacgaagg

SEQ ID NO: 163371 - DNA, 25 bp, Homo sapien
tccgagcgggcgctggcagatatta

SEQ ID NO: 163372 - DNA, 25 bp, Homo sapien
gcagatattaacgtagctgtttcct

SEQ ID NO: 163373 - DNA, 25 bp, Homo sapien
agctgggcacgcaggaaggcctgga

SEQ ID NO: 163374 - DNA, 25 bp, Homo sapien
ggcgctggcagatattaacgtagct

SEQ ID NO: 163375 - DNA, 25 bp, Homo sapien
taggcaccatgcagagggtttcccc

SEQ ID NO: 163376 - DNA, 25 bp, Homo sapien
acaccactgacagcgaacgctgagt

SEQ ID NO: 163377 - DNA, 25 bp, Homo sapien
taggcaactgcgatgagtttgtgca

SEQ ID NO: 163378 - DNA, 25 bp, Homo sapien
agtgttcactgcgtgctaggcacca

SEQ ID NO: 163379 - DNA, 25 bp, Homo sapien
ctaattaccggttgctgggtcccag

SEQ ID NO: 163380 - DNA, 25 bp, Homo sapien
tgtgcctaagcagttccgagtaatc

SEQ ID NO: 163381 - DNA, 25 bp, Homo sapien
taaacatcaaagtgcactgtcagag

SEQ ID NO: 163382 - DNA, 25 bp, Homo sapien
gtccgccctggtgtgatgtgcctaa

SEQ ID NO: 163383 - DNA, 25 bp, Homo sapien
tccgcactgcgagtcctaggagatg

SEQ ID NO: 163384 - DNA, 25 bp, Homo sapien
taacgtttagtgagcgcttagcctg

SEQ ID NO: 163385 - DNA, 25 bp, Homo sapien
cagtgatgttattggcgagagctaa

SEQ ID NO: 163386 - DNA, 25 bp, Homo sapien
tcttcactgctgtggacgcagcgaa

SEQ ID NO: 163387 - DNA, 25 bp, Homo sapien
gccacattctgcacggccgacactt

SEQ ID NO: 163388 - DNA, 25 bp, Homo sapien
ggccgacacttccaatccggccgag

SEQ ID NO: 163389 - DNA, 25 bp, Homo sapien
cctgcgggtccgaaaggaacttgcg

SEQ ID NO: 163390 - DNA, 25 bp, Homo sapien
gcggcaccagcttgcgcaggtgctt

SEQ ID NO: 163391 - DNA, 25 bp, Homo sapien
attccgcgaggcctggctctggcga

SEQ ID NO: 163392 - DNA, 25 bp, Homo sapien
ctggcaggccctgcattccgcgagg

SEQ ID NO: 163393 - DNA, 25 bp, Homo sapien
aggccctgcattccgcgaggcctgg

SEQ ID NO: 163394 - DNA, 25 bp, Homo sapien
ctctggcgaccctgccctccgcggc

SEQ ID NO: 163395 - DNA, 25 bp, Homo sapien
tgagagcatccacctacaacagtga

SEQ ID NO: 163396 - DNA, 25 bp, Homo sapien
taggttcttagatggacacgccaca

SEQ ID NO: 163397 - DNA, 25 bp, Homo sapien
gaaaccgaaaagctcatgtgacact

SEQ ID NO: 163398 - DNA, 25 bp, Homo sapien
caggatacacccgttcagcaaggat

SEQ ID NO: 163399 - DNA, 25 bp, Homo sapien
tactttagctgtatagtacattttc

SEQ ID NO: 163400 - DNA, 25 bp, Homo sapien
caaggattagcaatggtcaagctac

SEQ ID NO: 163401 - DNA, 25 bp, Homo sapien
aataaaatgacgaatatgcattgaa

SEQ ID NO: 163402 - DNA, 25 bp, Homo sapien
gattatatctgggtcaaacaattcc

SEQ ID NO: 163403 - DNA, 25 bp, Homo sapien
ctttagaaagaaggtcttggccagg

SEQ ID NO: 163404 - DNA, 25 bp, Homo sapien
tcactataaagctgctttagaaaga

SEQ ID NO: 163405 - DNA, 25 bp, Homo sapien
actgaagaaagaaggtccagatttc

SEQ ID NO: 163406 - DNA, 25 bp, Homo sapien
ctaggtcacagggatcaatacaaat

SEQ ID NO: 163407 - DNA, 25 bp, Homo sapien
tgagtctgatctccctctttgtgtc

SEQ ID NO: 163408 - DNA, 25 bp, Homo sapien
tgtacggcctgcatctggcacagtt

SEQ ID NO: 163409 - DNA, 25 bp, Homo sapien
ggccaagaagcatctgagtctgatc

SEQ ID NO: 163410 - DNA, 25 bp, Homo sapien
gagctggaggtactggagcaacact

SEQ ID NO: 163411 - DNA, 25 bp, Homo sapien
cagaacacggtgagaaagtcggagt

SEQ ID NO: 163412 - DNA, 25 bp, Homo sapien
gagggctgggctaaatctctcttgc

SEQ ID NO: 163413 - DNA, 25 bp, Homo sapien
gacatgctccgatgctgacacgcaa

SEQ ID NO: 163414 - DNA, 25 bp, Homo sapien
cagcctcgctgaagtgcggatacca

SEQ ID NO: 163415 - DNA, 25 bp, Homo sapien
cataatgaatgtctatgttgatgtt

SEQ ID NO: 163416 - DNA, 25 bp, Homo sapien
cccataatgaatgtctatgttgatg

SEQ ID NO: 163417 - DNA, 25 bp, Homo sapien
tctatgttgatgttataggaaatga

SEQ ID NO: 163418 - DNA, 25 bp, Homo sapien
ccccataatgaatgtctatgttgat

SEQ ID NO: 163419 - DNA, 25 bp, Homo sapien
cgggagtacgtttaatgaatgccaa

SEQ ID NO: 163420 - DNA, 25 bp, Homo sapien
gtaaggacccggagctgagaagaca

SEQ ID NO: 163421 - DNA, 25 bp, Homo sapien
caaagtttcgtagggcgagtcttca

SEQ ID NO: 163422 - DNA, 25 bp, Homo sapien
tatctgcatcaatcacgggagtacg

SEQ ID NO: 163423 - DNA, 25 bp, Homo sapien
tgaaggagtcccatttcgagttctg

SEQ ID NO: 163424 - DNA, 25 bp, Homo sapien
ggcaggctgatctccggaatttcaa

SEQ ID NO: 163425 - DNA, 25 bp, Homo sapien
tttttgaatttctcggatccagcgg

SEQ ID NO: 163426 - DNA, 25 bp, Homo sapien
gatccagcggttaactccagattgt

SEQ ID NO: 163427 - DNA, 25 bp, Homo sapien
taatttcctgtaaggcagttcctga

SEQ ID NO: 163428 - DNA, 25 bp, Homo sapien
tgtttcaagatatccagagtcagga

SEQ ID NO: 163429 - DNA, 25 bp, Homo sapien
caggatctcgatccagtttggtcac

SEQ ID NO: 163430 - DNA, 25 bp, Homo sapien
taacgcacgttccaagtttagccaa

SEQ ID NO: 163431 - DNA, 25 bp, Homo sapien
aacgcagtgccctctgaataggata

SEQ ID NO: 163432 - DNA, 25 bp, Homo sapien
tcatcagaggattgtagtcattcac

SEQ ID NO: 163433 - DNA, 25 bp, Homo sapien
tattttgtccagctccgtggcagac

SEQ ID NO: 163434 - DNA, 25 bp, Homo sapien
tgtgaaaatggcaacaagcgcctgt

SEQ ID NO: 163435 - DNA, 25 bp, Homo sapien
tgggcagggttgatacgccacacca

SEQ ID NO: 163436 - DNA, 25 bp, Homo sapien
ttctcatctggtcaaggcgggcctg

SEQ ID NO: 163437 - DNA, 25 bp, Homo sapien
tcatgctggcgtctaaattttctca

SEQ ID NO: 163438 - DNA, 25 bp, Homo sapien
tcaggaccctgacgataacagctct

SEQ ID NO: 163439 - DNA, 25 bp, Homo sapien
ccacggatgtgaggcctgacaaaca

SEQ ID NO: 163440 - DNA, 25 bp, Homo sapien
tgtgccaagctgatcccgaaggcga

SEQ ID NO: 163441 - DNA, 25 bp, Homo sapien
gactctgtgggtactggaccttgaa

SEQ ID NO: 163442 - DNA, 25 bp, Homo sapien
tgtttagcccagatgatagaccctg

SEQ ID NO: 163443 - DNA, 25 bp, Homo sapien
gctttgttcacaatcgccagtggga

SEQ ID NO: 163444 - DNA, 25 bp, Homo sapien
gggacgcggaaaccaagccatttga

SEQ ID NO: 163445 - DNA, 25 bp, Homo sapien
ctttcgatggtgaaaatgcgccccg

SEQ ID NO: 163446 - DNA, 25 bp, Homo sapien
gctaagcgctgtacatatgggtcaa

SEQ ID NO: 163447 - DNA, 25 bp, Homo sapien
gacccagatgggcaaattggaatag

SEQ ID NO: 163448 - DNA, 25 bp, Homo sapien
caaggaacggacttctaggtctatt

SEQ ID NO: 163449 - DNA, 25 bp, Homo sapien
tctgttcaagatttccgagaatgtc

SEQ ID NO: 163450 - DNA, 25 bp, Homo sapien
atacatacaagtttccaaggaacgg

SEQ ID NO: 163451 - DNA, 25 bp, Homo sapien
tccaccaggcttgtgactaacttgt

SEQ ID NO: 163452 - DNA, 25 bp, Homo sapien
cttgcagacggacgcccaatattct

SEQ ID NO: 163453 - DNA, 25 bp, Homo sapien
tccaagaagaacctgcgtccaagct

SEQ ID NO: 163454 - DNA, 25 bp, Homo sapien
tctgtgtccatgtcaacttctgctt

SEQ ID NO: 163455 - DNA, 25 bp, Homo sapien
tgcccaccttggcctcccaaagtgc

SEQ ID NO: 163456 - DNA, 25 bp, Homo sapien
tcaaacttcagagctcaagcgatct

SEQ ID NO: 163457 - DNA, 25 bp, Homo sapien
ctcaaacttcagagctcaagcgatc

SEQ ID NO: 163458 - DNA, 25 bp, Homo sapien
tggtggattcaagtagattacctga

SEQ ID NO: 163459 - DNA, 25 bp, Homo sapien
catttcctgatacagcttgtatctg

SEQ ID NO: 163460 - DNA, 25 bp, Homo sapien
tacctgattggttattcttagctca

SEQ ID NO: 163461 - DNA, 25 bp, Homo sapien
gtatctgcactcttcaattggtgga

SEQ ID NO: 163462 - DNA, 25 bp, Homo sapien
gggccatcaggcatccgtgttaaag

SEQ ID NO: 163463 - DNA, 25 bp, Homo sapien
cagtcaattcgtaatgtacacccac

SEQ ID NO: 163464 - DNA, 25 bp, Homo sapien
catgacagcagaatacgactcttcc

SEQ ID NO: 163465 - DNA, 25 bp, Homo sapien
tgttcaacttcagatacaatgccca

SEQ ID NO: 163466 - DNA, 25 bp, Homo sapien
gcattgtcaaaggttcctctggcct

SEQ ID NO: 163467 - DNA, 25 bp, Homo sapien
ggccttccttatttggaccaggaga

SEQ ID NO: 163468 - DNA, 25 bp, Homo sapien
gcttgcatatcccataaacactgat

SEQ ID NO: 163469 - DNA, 25 bp, Homo sapien
taatctataactactggtccaaact

SEQ ID NO: 163470 - DNA, 25 bp, Homo sapien
catgtttgatcctagcatctgccca

SEQ ID NO: 163471 - DNA, 25 bp, Homo sapien
atttcaagttcaccttagattgtac

SEQ ID NO: 163472 - DNA, 25 bp, Homo sapien
catatttcaagttcaccttagattg

SEQ ID NO: 163473 - DNA, 25 bp, Homo sapien
aatggaattccgtcatgtttgatcc

SEQ ID NO: 163474 - DNA, 25 bp, Homo sapien
gctggccgtgtctactgagtgctgc

SEQ ID NO: 163475 - DNA, 25 bp, Homo sapien
ttccgtttcaaagactgcacatagg

SEQ ID NO: 163476 - DNA, 25 bp, Homo sapien
tcactgcatcggaggtgctggccgt

SEQ ID NO: 163477 - DNA, 25 bp, Homo sapien
tgcacataggtgatgaaggtcactg

SEQ ID NO: 163478 - DNA, 25 bp, Homo sapien
ttgtcaatataaagccaggaaggtg

SEQ ID NO: 163479 - DNA, 25 bp, Homo sapien
gcagagtcctttcgccgcatgatgt

SEQ ID NO: 163480 - DNA, 25 bp, Homo sapien
ttctcccagtcagtcagcaggtcgg

SEQ ID NO: 163481 - DNA, 25 bp, Homo sapien
tccagtaagcgctggccattgcggt

SEQ ID NO: 163482 - DNA, 25 bp, Homo sapien
tgtcgtccttcagcctaccaaactt

SEQ ID NO: 163483 - DNA, 25 bp, Homo sapien
gtgcctcttctgggcgaaggttgcc

SEQ ID NO: 163484 - DNA, 25 bp, Homo sapien
ccctcatatatggtgagagcctgaa

SEQ ID NO: 163485 - DNA, 25 bp, Homo sapien
cagtatctgtcaattccagcgcctc

SEQ ID NO: 163486 - DNA, 25 bp, Homo sapien
aaagcagttgactttggaaatagaa

SEQ ID NO: 163487 - DNA, 25 bp, Homo sapien
gaaatcaccccagaatctggcaggg

SEQ ID NO: 163488 - DNA, 25 bp, Homo sapien
ctgcgattgagaatagtaaagcagt

SEQ ID NO: 163489 - DNA, 25 bp, Homo sapien
gcgattgagaatagtaaagcagttg

SEQ ID NO: 163490 - DNA, 25 bp, Homo sapien
ggtcctgtaattcttctaaggccac

SEQ ID NO: 163491 - DNA, 25 bp, Homo sapien
agggttgctccttcatctgatcgat

SEQ ID NO: 163492 - DNA, 25 bp, Homo sapien
tcgaggctgtactgaaacccagggt

SEQ ID NO: 163493 - DNA, 25 bp, Homo sapien
gaaagttctgaccaaacgcctttga

SEQ ID NO: 163494 - DNA, 25 bp, Homo sapien
aagcctctgaacaaactcataggac

SEQ ID NO: 163495 - DNA, 25 bp, Homo sapien
ataggacgcatactgtcgcaaccgg

SEQ ID NO: 163496 - DNA, 25 bp, Homo sapien
aaccgggcagggaagcttttcagct

SEQ ID NO: 163497 - DNA, 25 bp, Homo sapien
ggagggcatccaaattttgtcgaag

SEQ ID NO: 163498 - DNA, 25 bp, Homo sapien
caatggcggtctttaagtgcttcgg

SEQ ID NO: 163499 - DNA, 25 bp, Homo sapien
tggccaagggttagctcagaaacaa

SEQ ID NO: 163500 - DNA, 25 bp, Homo sapien
cagtacatccttgacaatcgcttca

SEQ ID NO: 163501 - DNA, 25 bp, Homo sapien
gaagccttttcatgagctgtttcca

SEQ ID NO: 163502 - DNA, 25 bp, Homo sapien
tatgtaacagcccgaaacacaacgt

SEQ ID NO: 163503 - DNA, 25 bp, Homo sapien
caacgtaaagcagccgttcagtcct

SEQ ID NO: 163504 - DNA, 25 bp, Homo sapien
ccgaaacacaacgtaaagcagccgt

SEQ ID NO: 163505 - DNA, 25 bp, Homo sapien
taaagcagccgttcagtcctattac

SEQ ID NO: 163506 - DNA, 25 bp, Homo sapien
cagccacggatcaagcggcacttgt

SEQ ID NO: 163507 - DNA, 25 bp, Homo sapien
ttgttgaagaggtcatcccagccac

SEQ ID NO: 163508 - DNA, 25 bp, Homo sapien
gccgagacgctgttgatgtgttctt

SEQ ID NO: 163509 - DNA, 25 bp, Homo sapien
cttgtaatacggagagagcttcatg

SEQ ID NO: 163510 - DNA, 25 bp, Homo sapien
tctgaaaccgctgggtttccactgg

SEQ ID NO: 163511 - DNA, 25 bp, Homo sapien
aatccacacatcaaagagagccatg

SEQ ID NO: 163512 - DNA, 25 bp, Homo sapien
gcactgcctgtgaagataccttcca

SEQ ID NO: 163513 - DNA, 25 bp, Homo sapien
gcaggtgcttgatatctgcactgcc

SEQ ID NO: 163514 - DNA, 25 bp, Homo sapien
cattagagccaaaaactcagtgctg

SEQ ID NO: 163515 - DNA, 25 bp, Homo sapien
cttggacacttttttcattagagcc

SEQ ID NO: 163516 - DNA, 25 bp, Homo sapien
agatattctcccaatgctttctgga

SEQ ID NO: 163517 - DNA, 25 bp, Homo sapien
gcaggtctgccaatctttccagaga

SEQ ID NO: 163518 - DNA, 25 bp, Homo sapien
cacttacctaacaagatcttgaaga

SEQ ID NO: 163519 - DNA, 25 bp, Homo sapien
ggtggcaatctccagcccaaattca

SEQ ID NO: 163520 - DNA, 25 bp, Homo sapien
gaatttcttctagcccttggcaaaa

SEQ ID NO: 163521 - DNA, 25 bp, Homo sapien
tctccagcccaaattcagatcacat

SEQ ID NO: 163522 - DNA, 25 bp, Homo sapien
tccttcccgagatgaaatacccaaa

SEQ ID NO: 163523 - DNA, 25 bp, Homo sapien
ctgtaatttagcgacattcttgctg

SEQ ID NO: 163524 - DNA, 25 bp, Homo sapien
aacaacagagttatcctcgttcagg

SEQ ID NO: 163525 - DNA, 25 bp, Homo sapien
tcaggatgatgctcgaaactccagc

SEQ ID NO: 163526 - DNA, 25 bp, Homo sapien
cttccgtaacagactcagcaagcag

SEQ ID NO: 163527 - DNA, 25 bp, Homo sapien
cagcaagcagtttggccagggtgac

SEQ ID NO: 163528 - DNA, 25 bp, Homo sapien
caagtgatgtaggtatttgggtcaa

SEQ ID NO: 163529 - DNA, 25 bp, Homo sapien
ggatgttcagtaattgacacaggag

SEQ ID NO: 163530 - DNA, 25 bp, Homo sapien
cgttctcagaccaggctatctgggc

SEQ ID NO: 163531 - DNA, 25 bp, Homo sapien
cagagtctgctaacacattgagggt

SEQ ID NO: 163532 - DNA, 25 bp, Homo sapien
aagtgttctagcttccgccttcgga

SEQ ID NO: 163533 - DNA, 25 bp, Homo sapien
tcagtgcggtctccacgttctcaga

SEQ ID NO: 163534 - DNA, 25 bp, Homo sapien
cgtgccgtgcagcttagcactgctg

SEQ ID NO: 163535 - DNA, 25 bp, Homo sapien
gggctcgcagcaagcactgcccgtg

SEQ ID NO: 163536 - DNA, 25 bp, Homo sapien
tctatcctaggagtctgccacgtgc

SEQ ID NO: 163537 - DNA, 25 bp, Homo sapien
aggagtctgccacgtgccgccatgg

SEQ ID NO: 163538 - DNA, 25 bp, Homo sapien
taacacatcagtttgcttagggtca

SEQ ID NO: 163539 - DNA, 25 bp, Homo sapien
cattgtcaaatagcagcggtcagtg

SEQ ID NO: 163540 - DNA, 25 bp, Homo sapien
agtaaaatcgcatctggctgagcca

SEQ ID NO: 163541 - DNA, 25 bp, Homo sapien
tggaccagtttgtcctgaacaccca

SEQ ID NO: 163542 - DNA, 25 bp, Homo sapien
gagctttgacagactctgttttccc

SEQ ID NO: 163543 - DNA, 25 bp, Homo sapien
gctgatggccaagagctttgacaga

SEQ ID NO: 163544 - DNA, 25 bp, Homo sapien
ctaaaacaaaccgtccaagctgatg

SEQ ID NO: 163545 - DNA, 25 bp, Homo sapien
taaaacaaaccgtccaagctgatgg

SEQ ID NO: 163546 - DNA, 25 bp, Homo sapien
tagttggggttggaatgttcacgca

SEQ ID NO: 163547 - DNA, 25 bp, Homo sapien
ccccaggcacccacctggcaaaggc

SEQ ID NO: 163548 - DNA, 25 bp, Homo sapien
ctcctccaggcggttgaactcgtca

SEQ ID NO: 163549 - DNA, 25 bp, Homo sapien
tgctgggacacagccgagagcatcc

SEQ ID NO: 163550 - DNA, 25 bp, Homo sapien
cacacctgagtgtcatggagaactc

SEQ ID NO: 163551 - DNA, 25 bp, Homo sapien
acaaagctctcgttctcccagggag

SEQ ID NO: 163552 - DNA, 25 bp, Homo sapien
tagagatgcagtccaacaaattgtg

SEQ ID NO: 163553 - DNA, 25 bp, Homo sapien
aataaatgccgcgacactgactggc

SEQ ID NO: 163554 - DNA, 25 bp, Homo sapien
aacgggacgattttgttggcaagca

SEQ ID NO: 163555 - DNA, 25 bp, Homo sapien
tcagcagtgcggaaaccctgtgagt

SEQ ID NO: 163556 - DNA, 25 bp, Homo sapien
catgacctgggcgattaactgccgg

SEQ ID NO: 163557 - DNA, 25 bp, Homo sapien
tgaagatggccatgtccgggctcac

SEQ ID NO: 163558 - DNA, 25 bp, Homo sapien
tctctcttcacattgcctgcactca

SEQ ID NO: 163559 - DNA, 25 bp, Homo sapien
cgaagaccgaagtcataatggcttt

SEQ ID NO: 163560 - DNA, 25 bp, Homo sapien
catcaactgcttcccctcgttcctc

SEQ ID NO: 163561 - DNA, 25 bp, Homo sapien
acactcttcaaagcccgaagaccga

SEQ ID NO: 163562 - DNA, 25 bp, Homo sapien
gatcagtaactgttggtgaacaaag

SEQ ID NO: 163563 - DNA, 25 bp, Homo sapien
tgggctgtgagcagcgcagcatggc

SEQ ID NO: 163564 - DNA, 25 bp, Homo sapien
gcagcatggctcaagtactgcccgc

SEQ ID NO: 163565 - DNA, 25 bp, Homo sapien
tgaacaaagggtgcgagcaccactc

SEQ ID NO: 163566 - DNA, 25 bp, Homo sapien
tggactccagggaacacgtccgaca

SEQ ID NO: 163567 - DNA, 25 bp, Homo sapien
gtctcacagacgctctgtatcagaa

SEQ ID NO: 163568 - DNA, 25 bp, Homo sapien
agctttggcaccatcgtctcacaga

SEQ ID NO: 163569 - DNA, 25 bp, Homo sapien
ttcttcagctcctctcgaagggcag

SEQ ID NO: 163570 - DNA, 25 bp, Homo sapien
gacaggagacaccaatgagcagcct

SEQ ID NO: 163571 - DNA, 25 bp, Homo sapien
caaacatttccaaactgtggcgagt

SEQ ID NO: 163572 - DNA, 25 bp, Homo sapien
tcatctctggcactggaaagtctgg

SEQ ID NO: 163573 - DNA, 25 bp, Homo sapien
tcaatcccgtacagcatctctcagg

SEQ ID NO: 163574 - DNA, 25 bp, Homo sapien
tctcagcacgtgtgtgaagagccca

SEQ ID NO: 163575 - DNA, 25 bp, Homo sapien
caggccatgattgatctgggtgatc

SEQ ID NO: 163576 - DNA, 25 bp, Homo sapien
gttccgtagaggtggtctttgctga

SEQ ID NO: 163577 - DNA, 25 bp, Homo sapien
gggtcgatgatatgggccacacctt

SEQ ID NO: 163578 - DNA, 25 bp, Homo sapien
catcgaagacgatccactggcgctt

SEQ ID NO: 163579 - DNA, 25 bp, Homo sapien
caaagttaggagcttattgtcatcc

SEQ ID NO: 163580 - DNA, 25 bp, Homo sapien
tctggatccacatcgccatcgaaga

SEQ ID NO: 163581 - DNA, 25 bp, Homo sapien
gactgaggcgctctccattgggcaa

SEQ ID NO: 163582 - DNA, 25 bp, Homo sapien
tgacgacatacaaaaggctacttac

SEQ ID NO: 163583 - DNA, 25 bp, Homo sapien
gttgacgacatacaaaaggctactt

SEQ ID NO: 163584 - DNA, 25 bp, Homo sapien
tcagttgacgacatacaaaaggcta

SEQ ID NO: 163585 - DNA, 25 bp, Homo sapien
cagttgacgacatacaaaaggctac

SEQ ID NO: 163586 - DNA, 25 bp, Homo sapien
tgaaccagaccatgccgcagcgcga

SEQ ID NO: 163587 - DNA, 25 bp, Homo sapien
tgtggccaaggtcgcgtatttcaag

SEQ ID NO: 163588 - DNA, 25 bp, Homo sapien
tatttcaagtcctgtacctcaaaca

SEQ ID NO: 163589 - DNA, 25 bp, Homo sapien
cctggccaggaagttgttgaagatc

SEQ ID NO: 163590 - DNA, 25 bp, Homo sapien
cagcgcaggcgtgttaggtccatga

SEQ ID NO: 163591 - DNA, 25 bp, Homo sapien
tacggttgcatgatcgtagctgcat

SEQ ID NO: 163592 - DNA, 25 bp, Homo sapien
gaccaggccgttggacgtgaagtac

SEQ ID NO: 163593 - DNA, 25 bp, Homo sapien
ttatactgcgccacgttgcggcagg

SEQ ID NO: 163594 - DNA, 25 bp, Homo sapien
gagagcgcacatccccacaggtgca

SEQ ID NO: 163595 - DNA, 25 bp, Homo sapien
cagcaaagttaacctaaagacagtg

SEQ ID NO: 163596 - DNA, 25 bp, Homo sapien
tcccagtcttcttgcatcacagaca

SEQ ID NO: 163597 - DNA, 25 bp, Homo sapien
aacgaaggctctgcctcgcctagga

SEQ ID NO: 163598 - DNA, 25 bp, Homo sapien
atttttagccggctgtctccagaca

SEQ ID NO: 163599 - DNA, 25 bp, Homo sapien
gattcttctgatgtattcacccagc

SEQ ID NO: 163600 - DNA, 25 bp, Homo sapien
cagggaccagagtatggcataaacc

SEQ ID NO: 163601 - DNA, 25 bp, Homo sapien
aatcgataatgggtatgttgggcgc

SEQ ID NO: 163602 - DNA, 25 bp, Homo sapien
aagagtgtcatggtcttgccagacc

SEQ ID NO: 163603 - DNA, 25 bp, Homo sapien
cggagaccattctccgctgatggac

SEQ ID NO: 163604 - DNA, 25 bp, Homo sapien
cagcgttggcacgacgacatcaggg

SEQ ID NO: 163605 - DNA, 25 bp, Homo sapien
cttcgtggcggactgtgtccagcgt

SEQ ID NO: 163606 - DNA, 25 bp, Homo sapien
tccaagttgaacaggagccaaaacc

SEQ ID NO: 163607 - DNA, 25 bp, Homo sapien
gatgaaggatatgaccctctgggtc

SEQ ID NO: 163608 - DNA, 25 bp, Homo sapien
gcactggagaagttgagacccacca

SEQ ID NO: 163609 - DNA, 25 bp, Homo sapien
gcctgtactcgcagtagtgatcaaa

SEQ ID NO: 163610 - DNA, 25 bp, Homo sapien
atctgaggtacggtaaaagcctccg

SEQ ID NO: 163611 - DNA, 25 bp, Homo sapien
tttgatctgaggtacggtaaaagcc

SEQ ID NO: 163612 - DNA, 25 bp, Homo sapien
tgaggtacggtaaaagcctccgtgc

SEQ ID NO: 163613 - DNA, 25 bp, Homo sapien
atgtttgatctgaggtacggtaaaa

SEQ ID NO: 163614 - DNA, 25 bp, Homo sapien
tctgtggggggattacaagccccaa

SEQ ID NO: 163615 - DNA, 25 bp, Homo sapien
gtctgtggggggattacaagcccca

SEQ ID NO: 163616 - DNA, 25 bp, Homo sapien
tgtggggggattacaagccccaaca

SEQ ID NO: 163617 - DNA, 25 bp, Homo sapien
gcgtgtgtgaagcagagcagtctac

SEQ ID NO: 163618 - DNA, 25 bp, Homo sapien
ttttgtggcgctgtgtttacagcaa

SEQ ID NO: 163619 - DNA, 25 bp, Homo sapien
cagagcagtctaccgagctgtttta

SEQ ID NO: 163620 - DNA, 25 bp, Homo sapien
aaaccaggtttttgtggcgctgtgt

SEQ ID NO: 163621 - DNA, 25 bp, Homo sapien
atacacgacaggcacgtggcgcagg

SEQ ID NO: 163622 - DNA, 25 bp, Homo sapien
cacatacacgacaggcacgtggcgc

SEQ ID NO: 163623 - DNA, 25 bp, Homo sapien
cccgggtaatccacatacacgacag

SEQ ID NO: 163624 - DNA, 25 bp, Homo sapien
gggcccgggtaatccacatacacga

SEQ ID NO: 163625 - DNA, 25 bp, Homo sapien
ctgagacatggtgtagaactccacc

SEQ ID NO: 163626 - DNA, 25 bp, Homo sapien
tagaactccaccatggcagcagtga

SEQ ID NO: 163627 - DNA, 25 bp, Homo sapien
tgcatacgtccgcagggatggaatg

SEQ ID NO: 163628 - DNA, 25 bp, Homo sapien
tgagcctcagcatggcgcggttgaa

SEQ ID NO: 163629 - DNA, 25 bp, Homo sapien
tgaatagatatagtgaggttgtgta

SEQ ID NO: 163630 - DNA, 25 bp, Homo sapien
ccacctagtcatttcacggggtgaa

SEQ ID NO: 163631 - DNA, 25 bp, Homo sapien
ggtctcagcgcttcaaagatgcctc

SEQ ID NO: 163632 - DNA, 25 bp, Homo sapien
gttgtgtatcctgggtgaatctctc

SEQ ID NO: 163633 - DNA, 25 bp, Homo sapien
gaagagacgcagagcttcatgtgcc

SEQ ID NO: 163634 - DNA, 25 bp, Homo sapien
ttggaagagacgcagagcttcatgt

SEQ ID NO: 163635 - DNA, 25 bp, Homo sapien
tcatgtgcccaaatccgaatgaggc

SEQ ID NO: 163636 - DNA, 25 bp, Homo sapien
ctatcttggaagagacgcagagctt

SEQ ID NO: 163637 - DNA, 25 bp, Homo sapien
aagaattgatccaagtgggcaacag

SEQ ID NO: 163638 - DNA, 25 bp, Homo sapien
agagaaaaccagtgccccagagctg

SEQ ID NO: 163639 - DNA, 25 bp, Homo sapien
gagaaaaccagtgccccagagctgc

SEQ ID NO: 163640 - DNA, 25 bp, Homo sapien
aattgatccaagtgggcaacaggta

SEQ ID NO: 163641 - DNA, 25 bp, Homo sapien
caagcaggcgagactgtgactgcgc

SEQ ID NO: 163642 - DNA, 25 bp, Homo sapien
tgactgtaagatctcctatgcaggc

SEQ ID NO: 163643 - DNA, 25 bp, Homo sapien
gtgaggaccttttgagaagctgact

SEQ ID NO: 163644 - DNA, 25 bp, Homo sapien
cctatgcaggctaccaggtgagggt

SEQ ID NO: 163645 - DNA, 25 bp, Homo sapien
ctgtggggagagcagcatgtgcatt

SEQ ID NO: 163646 - DNA, 25 bp, Homo sapien
gggagagcagcatgtgcatttaggt

SEQ ID NO: 163647 - DNA, 25 bp, Homo sapien
gagagcagcatgtgcatttaggtaa

SEQ ID NO: 163648 - DNA, 25 bp, Homo sapien
tggggagagcagcatgtgcatttag

SEQ ID NO: 163649 - DNA, 25 bp, Homo sapien
tctctgtcgatgttagggaagtgct

SEQ ID NO: 163650 - DNA, 25 bp, Homo sapien
gaagtgcttcagagcaaccgtgtcg

SEQ ID NO: 163651 - DNA, 25 bp, Homo sapien
gacagccagttgctgtacaagatgg

SEQ ID NO: 163652 - DNA, 25 bp, Homo sapien
tacaagatgggtcggctcattgcct

SEQ ID NO: 163653 - DNA, 25 bp, Homo sapien
cataggcgtgagttaccttgcctgg

SEQ ID NO: 163654 - DNA, 25 bp, Homo sapien
gtgccattgcacctcgctgtatttt

SEQ ID NO: 163655 - DNA, 25 bp, Homo sapien
gtctgaaatgatgcgagtttgctac

SEQ ID NO: 163656 - DNA, 25 bp, Homo sapien
tcgttagtgttagaaagggatggca

SEQ ID NO: 163657 - DNA, 25 bp, Homo sapien
aagaactgaaaacggacccactgct

SEQ ID NO: 163658 - DNA, 25 bp, Homo sapien
tattaccataatcaggaccatgtgg

SEQ ID NO: 163659 - DNA, 25 bp, Homo sapien
tgggcctgccctattaaacagactt

SEQ ID NO: 163660 - DNA, 25 bp, Homo sapien
taacggatacctatgcacacaggga

SEQ ID NO: 163661 - DNA, 25 bp, Homo sapien
ttcattaaacagcaccagcggaaca

SEQ ID NO: 163662 - DNA, 25 bp, Homo sapien
gaccttcagcctagctttgacataa

SEQ ID NO: 163663 - DNA, 25 bp, Homo sapien
gacataatctcttaactcttcttgg

SEQ ID NO: 163664 - DNA, 25 bp, Homo sapien
tgtcaatcctcagcacgtggtctag

SEQ ID NO: 163665 - DNA, 25 bp, Homo sapien
actcaaaccgttcatccaggcgacg

SEQ ID NO: 163666 - DNA, 25 bp, Homo sapien
ccaggcgacgaaacgagacagggta

SEQ ID NO: 163667 - DNA, 25 bp, Homo sapien
caccaatcagaagcaagtggccttg

SEQ ID NO: 163668 - DNA, 25 bp, Homo sapien
caagtggccttgaggttgacggaat

SEQ ID NO: 163669 - DNA, 25 bp, Homo sapien
cttcccctgtgtacttcctatggac

SEQ ID NO: 163670 - DNA, 25 bp, Homo sapien
ttggccagaagggtattcattcgct

SEQ ID NO: 163671 - DNA, 25 bp, Homo sapien
tcgctccaggaatccagaatctaac

SEQ ID NO: 163672 - DNA, 25 bp, Homo sapien
catttttacagccagaacgtctcaa

SEQ ID NO: 163673 - DNA, 25 bp, Homo sapien
tagagctcctcgtgcgagtccagca

SEQ ID NO: 163674 - DNA, 25 bp, Homo sapien
cggataacctggctagtgaaccact

SEQ ID NO: 163675 - DNA, 25 bp, Homo sapien
ggtgatgtagctgcccggtccttga

SEQ ID NO: 163676 - DNA, 25 bp, Homo sapien
tttgcactgcgtcatcaaggtggca

SEQ ID NO: 163677 - DNA, 25 bp, Homo sapien
tcacaatggcttcccgatgggatgg

SEQ ID NO: 163678 - DNA, 25 bp, Homo sapien
taatcaggcacgatgtaatttggct

SEQ ID NO: 163679 - DNA, 25 bp, Homo sapien
agtgcttcggtggaccagtctccaa

SEQ ID NO: 163680 - DNA, 25 bp, Homo sapien
ggctgcggcagcttatcatacacaa

SEQ ID NO: 163681 - DNA, 25 bp, Homo sapien
ctacaagctcagagtggatttcaca

SEQ ID NO: 163682 - DNA, 25 bp, Homo sapien
tcagagtggatttcacaaagctctt

SEQ ID NO: 163683 - DNA, 25 bp, Homo sapien
aagctcagagtggatttcacaaagc

SEQ ID NO: 163684 - DNA, 25 bp, Homo sapien
caagctcagagtggatttcacaaag

SEQ ID NO: 163685 - DNA, 25 bp, Homo sapien
tgagccccacgttcaagtgcatctg

SEQ ID NO: 163686 - DNA, 25 bp, Homo sapien
agctcgctccgcttctcgtggaaca

SEQ ID NO: 163687 - DNA, 25 bp, Homo sapien
gggtgatggccatcgttctgccgcc

SEQ ID NO: 163688 - DNA, 25 bp, Homo sapien
ctcgctttgctagccgagcattcgc

SEQ ID NO: 163689 - DNA, 25 bp, Homo sapien
gctctttatcctcaagtcacgacgc

SEQ ID NO: 163690 - DNA, 25 bp, Homo sapien
ctcaagtcacgacgcagttcttcta

SEQ ID NO: 163691 - DNA, 25 bp, Homo sapien
ctttttcagcttgtcattggctgct

SEQ ID NO: 163692 - DNA, 25 bp, Homo sapien
tttcagcttgtcattggctgctgca

SEQ ID NO: 163693 - DNA, 25 bp, Homo sapien
gacggcaggttccaccttatcaaga

SEQ ID NO: 163694 - DNA, 25 bp, Homo sapien
tgtttgtctgcaattacctcctgct

SEQ ID NO: 163695 - DNA, 25 bp, Homo sapien
cttatcaagatcttctttgacactc

SEQ ID NO: 163696 - DNA, 25 bp, Homo sapien
ttctgggcctcaatgacggcaggtt

SEQ ID NO: 163697 - DNA, 25 bp, Homo sapien
catggtgagaatgaaccaaaacagc

SEQ ID NO: 163698 - DNA, 25 bp, Homo sapien
tatgaagatcttacaaaatgctagc

SEQ ID NO: 163699 - DNA, 25 bp, Homo sapien
gctagcattccttaaaaagcaggat

SEQ ID NO: 163700 - DNA, 25 bp, Homo sapien
tctggaatagggtaagtagctgatc

SEQ ID NO: 163701 - DNA, 25 bp, Homo sapien
gcatgatgatggagcggatctgctt

SEQ ID NO: 163702 - DNA, 25 bp, Homo sapien
gggatgaagttctcccgcatgatga

SEQ ID NO: 163703 - DNA, 25 bp, Homo sapien
ttctcccgcatgatgatggagcgga

SEQ ID NO: 163704 - DNA, 25 bp, Homo sapien
gcggatctgcttccagtctgtggtg

SEQ ID NO: 163705 - DNA, 25 bp, Homo sapien
gcaagccagggaagcccgattcaca

SEQ ID NO: 163706 - DNA, 25 bp, Homo sapien
cccatttcaccatagggccgcaagc

SEQ ID NO: 163707 - DNA, 25 bp, Homo sapien
cacaatttcataattgtaacttgga

SEQ ID NO: 163708 - DNA, 25 bp, Homo sapien
tgtaacttggattggacatgtaatt

SEQ ID NO: 163709 - DNA, 25 bp, Homo sapien
tattcctccttgtagcgggcgatgc

SEQ ID NO: 163710 - DNA, 25 bp, Homo sapien
agcttctgcagctcattgcgtaggg

SEQ ID NO: 163711 - DNA, 25 bp, Homo sapien
cctgggcctctgagatcaggacggc

SEQ ID NO: 163712 - DNA, 25 bp, Homo sapien
tctgctggttgtccttggcgtcatc

SEQ ID NO: 163713 - DNA, 25 bp, Homo sapien
gaaacgtgcccaagttgttcacagt

SEQ ID NO: 163714 - DNA, 25 bp, Homo sapien
gttaaagagcgaattcaccgaggcc

SEQ ID NO: 163715 - DNA, 25 bp, Homo sapien
aaggaaaaccgaacaagatgctcag

SEQ ID NO: 163716 - DNA, 25 bp, Homo sapien
gattcaacggctgaaaagtgtccag

SEQ ID NO: 163717 - DNA, 25 bp, Homo sapien
gtaggcaatgaacgcagctgacaag

SEQ ID NO: 163718 - DNA, 25 bp, Homo sapien
agagacagtccccagcaatggtgga

SEQ ID NO: 163719 - DNA, 25 bp, Homo sapien
catctgctggtcaaagtaacccgcg

SEQ ID NO: 163720 - DNA, 25 bp, Homo sapien
gaacaagttctgacgcatctgctgg

SEQ ID NO: 163721 - DNA, 25 bp, Homo sapien
gaaaggtattccgtcctggcaatat

SEQ ID NO: 163722 - DNA, 25 bp, Homo sapien
ccgtcctggcaatatctgtacggaa

SEQ ID NO: 163723 - DNA, 25 bp, Homo sapien
ccagcgaagacgctcatcagcattg

SEQ ID NO: 163724 - DNA, 25 bp, Homo sapien
gacgctcatcagcattggaaaggta

SEQ ID NO: 163725 - DNA, 25 bp, Homo sapien
tttctgtgcaaaggtcatcagcagg

SEQ ID NO: 163726 - DNA, 25 bp, Homo sapien
atcgtttcagcatgatggcattttc

SEQ ID NO: 163727 - DNA, 25 bp, Homo sapien
tattgaatcgtttcagcatgatggc

SEQ ID NO: 163728 - DNA, 25 bp, Homo sapien
ggcattttctgtgcaaaggtcatca

SEQ ID NO: 163729 - DNA, 25 bp, Homo sapien
aaattcaagatcaccacccacattc

SEQ ID NO: 163730 - DNA, 25 bp, Homo sapien
ttcctctcttcaaacaagggtgtat

SEQ ID NO: 163731 - DNA, 25 bp, Homo sapien
aaaaattcaagatcaccacccacat

SEQ ID NO: 163732 - DNA, 25 bp, Homo sapien
tctcttcaaacaagggtgtattttg

SEQ ID NO: 163733 - DNA, 25 bp, Homo sapien
aggatgaggccacagaagagaaggt

SEQ ID NO: 163734 - DNA, 25 bp, Homo sapien
ctgaggatgaggccacagaagagaa

SEQ ID NO: 163735 - DNA, 25 bp, Homo sapien
tgaggatgaggccacagaagagaag

SEQ ID NO: 163736 - DNA, 25 bp, Homo sapien
gaggatgaggccacagaagagaagg

SEQ ID NO: 163737 - DNA, 25 bp, Homo sapien
ccaggaagctggtccgtgtgatctt

SEQ ID NO: 163738 - DNA, 25 bp, Homo sapien
agttctttctgaaggcgtcatccag

SEQ ID NO: 163739 - DNA, 25 bp, Homo sapien
ccagaggggtcaatgatcagcggat

SEQ ID NO: 163740 - DNA, 25 bp, Homo sapien
gggttaccgaatctcagtgcactct

SEQ ID NO: 163741 - DNA, 25 bp, Homo sapien
tgtttcaagaattcaaaggccaaca

SEQ ID NO: 163742 - DNA, 25 bp, Homo sapien
gaaccaccgcaaagctttatccttc

SEQ ID NO: 163743 - DNA, 25 bp, Homo sapien
tcaagaattcaaaggccaacaccaa

SEQ ID NO: 163744 - DNA, 25 bp, Homo sapien
atttatctattacagaaccaccgca

SEQ ID NO: 163745 - DNA, 25 bp, Homo sapien
ttaagatacagtctctttctgtctc

SEQ ID NO: 163746 - DNA, 25 bp, Homo sapien
ttttaagatacagtctctttctgtc

SEQ ID NO: 163747 - DNA, 25 bp, Homo sapien
tttaagatacagtctctttctgtct

SEQ ID NO: 163748 - DNA, 25 bp, Homo sapien
taagatacagtctctttctgtctcc

SEQ ID NO: 163749 - DNA, 25 bp, Homo sapien
ctgcattccacacgggtggaacttg

SEQ ID NO: 163750 - DNA, 25 bp, Homo sapien
ggtggaacttgatggtcagggcttt

SEQ ID NO: 163751 - DNA, 25 bp, Homo sapien
attccacacgggtggaacttgatgg

SEQ ID NO: 163752 - DNA, 25 bp, Homo sapien
atggtcagggctttgtaactttatc

SEQ ID NO: 163753 - DNA, 25 bp, Homo sapien
gttcagcaccgggttcaaaactgga

SEQ ID NO: 163754 - DNA, 25 bp, Homo sapien
caggaagatgacaaacgatggcgac

SEQ ID NO: 163755 - DNA, 25 bp, Homo sapien
tgttcgccgcacttcacggttcagc

SEQ ID NO: 163756 - DNA, 25 bp, Homo sapien
tcctggtccccgagagtgatcagca

SEQ ID NO: 163757 - DNA, 25 bp, Homo sapien
gaagatcagatcgtttctcgtccac

SEQ ID NO: 163758 - DNA, 25 bp, Homo sapien
tttagacactggctttgtaaactgc

SEQ ID NO: 163759 - DNA, 25 bp, Homo sapien
aagtaacccgggaacagagatctgg

SEQ ID NO: 163760 - DNA, 25 bp, Homo sapien
tgtaaactgctacgggtaactgtga

SEQ ID NO: 163761 - DNA, 25 bp, Homo sapien
tctccagagtggttatgatcgtgtc

SEQ ID NO: 163762 - DNA, 25 bp, Homo sapien
gatcgtgtcgtcatccaaaatgcgc

SEQ ID NO: 163763 - DNA, 25 bp, Homo sapien
aaatgcgccctttcacctcgttcag

SEQ ID NO: 163764 - DNA, 25 bp, Homo sapien
gatttttccagctgacgcaaacgga

SEQ ID NO: 163765 - DNA, 25 bp, Homo sapien
tgtgtgtggtcggtgacacccttca

SEQ ID NO: 163766 - DNA, 25 bp, Homo sapien
cctttgttataatggacaggcgctg

SEQ ID NO: 163767 - DNA, 25 bp, Homo sapien
cgtataggacgttgtgataaatgtc

SEQ ID NO: 163768 - DNA, 25 bp, Homo sapien
tcaggttcgggttctcgtataggac

SEQ ID NO: 163769 - DNA, 25 bp, Homo sapien
gagcaggagacgatgttgttccata

SEQ ID NO: 163770 - DNA, 25 bp, Homo sapien
ggagacgatgttgttccataagaga

SEQ ID NO: 163771 - DNA, 25 bp, Homo sapien
caggagacgatgttgttccataaga

SEQ ID NO: 163772 - DNA, 25 bp, Homo sapien
aagagcaggagacgatgttgttcca

SEQ ID NO: 163773 - DNA, 25 bp, Homo sapien
taatgtggtcctgatgcagcatgcc

SEQ ID NO: 163774 - DNA, 25 bp, Homo sapien
agcatggcaaaggtaatgtggtcct

SEQ ID NO: 163775 - DNA, 25 bp, Homo sapien
tgcctcgagccactcggttaaacgc

SEQ ID NO: 163776 - DNA, 25 bp, Homo sapien
tcctgatgcagcatgcctcgagcca

SEQ ID NO: 163777 - DNA, 25 bp, Homo sapien
tgctggaattctgcatcgtaggtgg

SEQ ID NO: 163778 - DNA, 25 bp, Homo sapien
ctggaattctgcatcgtaggtgggc

SEQ ID NO: 163779 - DNA, 25 bp, Homo sapien
gaattctgcatcgtaggtgggctcc

SEQ ID NO: 163780 - DNA, 25 bp, Homo sapien
agtgctggaattctgcatcgtaggt

SEQ ID NO: 163781 - DNA, 25 bp, Homo sapien
tgaacctttgcaatcaagtccttaa

SEQ ID NO: 163782 - DNA, 25 bp, Homo sapien
tcaagtccttaaacgcgggaaggca

SEQ ID NO: 163783 - DNA, 25 bp, Homo sapien
caagtccttaaacgcgggaaggcag

SEQ ID NO: 163784 - DNA, 25 bp, Homo sapien
tgcctgaacctttgcaatcaagtcc

SEQ ID NO: 163785 - DNA, 25 bp, Homo sapien
ggtgtttcttcactccagaggtagg

SEQ ID NO: 163786 - DNA, 25 bp, Homo sapien
gtttcttcactccagaggtagggca

SEQ ID NO: 163787 - DNA, 25 bp, Homo sapien
ttgcaggtgtttcttcactccagag

SEQ ID NO: 163788 - DNA, 25 bp, Homo sapien
caggtgtttcttcactccagaggta

SEQ ID NO: 163789 - DNA, 25 bp, Homo sapien
cgatcgggccggaaagcctggatca

SEQ ID NO: 163790 - DNA, 25 bp, Homo sapien
gatggacatgaaagactccccaagg

SEQ ID NO: 163791 - DNA, 25 bp, Homo sapien
tgcccacaatgtgggtcaggtcgag

SEQ ID NO: 163792 - DNA, 25 bp, Homo sapien
gagcggctgctccatgatggacatg

SEQ ID NO: 163793 - DNA, 25 bp, Homo sapien
aagtgatctgcgtgttctgctcggc

SEQ ID NO: 163794 - DNA, 25 bp, Homo sapien
cactggcatcataaccaggcacaga

SEQ ID NO: 163795 - DNA, 25 bp, Homo sapien
caggcacagagcacattaagacagg

SEQ ID NO: 163796 - DNA, 25 bp, Homo sapien
tcggctgcaaggtcctcgacatgtc

SEQ ID NO: 163797 - DNA, 25 bp, Homo sapien
tacagcggtgtttattgccttatct

SEQ ID NO: 163798 - DNA, 25 bp, Homo sapien
tattgccttatctgcttggttaaag

SEQ ID NO: 163799 - DNA, 25 bp, Homo sapien
tctgcttggttaaagccttctgcag

SEQ ID NO: 163800 - DNA, 25 bp, Homo sapien
tttacagcggtgtttattgccttat

SEQ ID NO: 163801 - DNA, 25 bp, Homo sapien
ctggggccagatgcacattcttcag

SEQ ID NO: 163802 - DNA, 25 bp, Homo sapien
cagatgcacattcttcagcatcacc

SEQ ID NO: 163803 - DNA, 25 bp, Homo sapien
ccagatgcacattcttcagcatcac

SEQ ID NO: 163804 - DNA, 25 bp, Homo sapien
gggccagatgcacattcttcagcat

SEQ ID NO: 163805 - DNA, 25 bp, Homo sapien
gtgaggaagagtcggaagcaggcat

SEQ ID NO: 163806 - DNA, 25 bp, Homo sapien
atggtgaggaagagtcggaagcagg

SEQ ID NO: 163807 - DNA, 25 bp, Homo sapien
gagtcggaagcaggcatgcggctgc

SEQ ID NO: 163808 - DNA, 25 bp, Homo sapien
aggaagagtcggaagcaggcatgcg

SEQ ID NO: 163809 - DNA, 25 bp, Homo sapien
tgaacgtcctcagcatgttggcctt

SEQ ID NO: 163810 - DNA, 25 bp, Homo sapien
catatccgtgagacgggaatgctgc

SEQ ID NO: 163811 - DNA, 25 bp, Homo sapien
ggctcgaacacaaagatgcggcccg

SEQ ID NO: 163812 - DNA, 25 bp, Homo sapien
atgttggccttcacccctggcggtg

SEQ ID NO: 163813 - DNA, 25 bp, Homo sapien
cggtgcccggccatggaaggaaatt

SEQ ID NO: 163814 - DNA, 25 bp, Homo sapien
tgtgcagttcaccacacggcacttc

SEQ ID NO: 163815 - DNA, 25 bp, Homo sapien
gaaattttacctacagctgaaaagc

SEQ ID NO: 163816 - DNA, 25 bp, Homo sapien
tgggactgggctttagcttctatgg

SEQ ID NO: 163817 - DNA, 25 bp, Homo sapien
agagtttcggtcttcacttggcgcc

SEQ ID NO: 163818 - DNA, 25 bp, Homo sapien
taatagacgtgtcatccaatgagac

SEQ ID NO: 163819 - DNA, 25 bp, Homo sapien
agaattgacagaacgaaacccctgc

SEQ ID NO: 163820 - DNA, 25 bp, Homo sapien
tagaaaacagcacttcgccaagaac

SEQ ID NO: 163821 - DNA, 25 bp, Homo sapien
ccccagtggtgcgtatcgtaagcgt

SEQ ID NO: 163822 - DNA, 25 bp, Homo sapien
tgtccaccgtatcgcaagctgaccg

SEQ ID NO: 163823 - DNA, 25 bp, Homo sapien
ggatgatcgcatgaaaccaggccag

SEQ ID NO: 163824 - DNA, 25 bp, Homo sapien
agcaggaagtacaagcgggcacgct

SEQ ID NO: 163825 - DNA, 25 bp, Homo sapien
tcttccacgcagagtctggcctctc

SEQ ID NO: 163826 - DNA, 25 bp, Homo sapien
tcacgaggggtcagctcgctcttcc

SEQ ID NO: 163827 - DNA, 25 bp, Homo sapien
cactgtctgtcctggcatggcccac

SEQ ID NO: 163828 - DNA, 25 bp, Homo sapien
ccagctaggctttggcggtcacgag

SEQ ID NO: 163829 - DNA, 25 bp, Homo sapien
tggtcaaactcgttgtccacgcgcc

SEQ ID NO: 163830 - DNA, 25 bp, Homo sapien
tatgtccgtcgaccttgcatgccag

SEQ ID NO: 163831 - DNA, 25 bp, Homo sapien
taaactcactgtcgaaactcctggt

SEQ ID NO: 163832 - DNA, 25 bp, Homo sapien
tgcagaccacgggatcttatccggt

SEQ ID NO: 163833 - DNA, 25 bp, Homo sapien
agtgacaccagacgccctgacatca

SEQ ID NO: 163834 - DNA, 25 bp, Homo sapien
agacgccctgacatcacaactgtct

SEQ ID NO: 163835 - DNA, 25 bp, Homo sapien
accagacgccctgacatcacaactg

SEQ ID NO: 163836 - DNA, 25 bp, Homo sapien
gagtgacaccagacgccctgacatc

SEQ ID NO: 163837 - DNA, 25 bp, Homo sapien
actctctcggcgttgttgggcaggc

SEQ ID NO: 163838 - DNA, 25 bp, Homo sapien
gtgtcggggagcaactccacccact

SEQ ID NO: 163839 - DNA, 25 bp, Homo sapien
taaggaggactctctcggcgttgtt

SEQ ID NO: 163840 - DNA, 25 bp, Homo sapien
tctctcggcgttgttgggcaggccc

SEQ ID NO: 163841 - DNA, 25 bp, Homo sapien
tgcctcccctcggagtggagctagg

SEQ ID NO: 163842 - DNA, 25 bp, Homo sapien
gagatgaacatctaaatgttatttc

SEQ ID NO: 163843 - DNA, 25 bp, Homo sapien
cttttctctagaactgagttgatgc

SEQ ID NO: 163844 - DNA, 25 bp, Homo sapien
gctgcagagaagagccagttctttc

SEQ ID NO: 163845 - DNA, 25 bp, Homo sapien
gtcccacagtcgcagcaggaaggag

SEQ ID NO: 163846 - DNA, 25 bp, Homo sapien
gggccacagtcccacagtcgcagca

SEQ ID NO: 163847 - DNA, 25 bp, Homo sapien
gagggaggggacgggcaagaaatca

SEQ ID NO: 163848 - DNA, 25 bp, Homo sapien
gacgggcaagaaatcacagagggaa

SEQ ID NO: 163849 - DNA, 25 bp, Homo sapien
tggtgtgcagtgtccgcatccaggc

SEQ ID NO: 163850 - DNA, 25 bp, Homo sapien
tgatattctccacggtgcgcttgag

SEQ ID NO: 163851 - DNA, 25 bp, Homo sapien
agtctctgcgtaggccaggtcgtcc

SEQ ID NO: 163852 - DNA, 25 bp, Homo sapien
ggagtctgtcctcgtcttcttctca

SEQ ID NO: 163853 - DNA, 25 bp, Homo sapien
tagctcgttgatcagcgtgcgcaag

SEQ ID NO: 163854 - DNA, 25 bp, Homo sapien
cgtgcgcaagtagttggtctgcttc

SEQ ID NO: 163855 - DNA, 25 bp, Homo sapien
tttccttcgcacacctggacgacat

SEQ ID NO: 163856 - DNA, 25 bp, Homo sapien
ggtcctggcgaacgtcctgaagcag

SEQ ID NO: 163857 - DNA, 25 bp, Homo sapien
tgtttgatcctctcgctgaagtcgg

SEQ ID NO: 163858 - DNA, 25 bp, Homo sapien
atgcagctgccagtgagatgttctg

SEQ ID NO: 163859 - DNA, 25 bp, Homo sapien
tgaagtcggacacccactggatgac

SEQ ID NO: 163860 - DNA, 25 bp, Homo sapien
aggcaccgtgtagtgggaccagctc

SEQ ID NO: 163861 - DNA, 25 bp, Homo sapien
acccgagactcgtcaggagcgcctt

SEQ ID NO: 163862 - DNA, 25 bp, Homo sapien
tcagacctgggccctgtgtttttcc

SEQ ID NO: 163863 - DNA, 25 bp, Homo sapien
ctgtgtttttccccagagccactcc

SEQ ID NO: 163864 - DNA, 25 bp, Homo sapien
aggacagctgctgaccacccgagac

SEQ ID NO: 163865 - DNA, 25 bp, Homo sapien
cagcccccaggggaaggagctcagg

SEQ ID NO: 163866 - DNA, 25 bp, Homo sapien
tggaaagcagcagcccccaggggaa

SEQ ID NO: 163867 - DNA, 25 bp, Homo sapien
cagcagcccccaggggaaggagctc

SEQ ID NO: 163868 - DNA, 25 bp, Homo sapien
ctgtggaaagcagcagcccccaggg

SEQ ID NO: 163869 - DNA, 25 bp, Homo sapien
gatgtacgcctcaggcacgaacagg

SEQ ID NO: 163870 - DNA, 25 bp, Homo sapien
ccctgtgaggtggtgacgttgactt

SEQ ID NO: 163871 - DNA, 25 bp, Homo sapien
ctgcaagcgtcaagggtggcgccct

SEQ ID NO: 163872 - DNA, 25 bp, Homo sapien
tgggccacatactgcctggtggcag

SEQ ID NO: 163873 - DNA, 25 bp, Homo sapien
tctcggtgtttgtctgcttgaccca

SEQ ID NO: 163874 - DNA, 25 bp, Homo sapien
tgagatggcattggacagtgacagc

SEQ ID NO: 163875 - DNA, 25 bp, Homo sapien
gcacgtggccccttgaagtttcaaa

SEQ ID NO: 163876 - DNA, 25 bp, Homo sapien
tctgcttgacccagcgcagctgcgt

SEQ ID NO: 163877 - DNA, 25 bp, Homo sapien
tgaagttcaggtagacaggtaaggt

SEQ ID NO: 163878 - DNA, 25 bp, Homo sapien
tgtagcaatttcgaagtccacggtg

SEQ ID NO: 163879 - DNA, 25 bp, Homo sapien
gtccacggtgaagatgaggtctgca

SEQ ID NO: 163880 - DNA, 25 bp, Homo sapien
gaagctgcgaggatcctcctttgta

SEQ ID NO: 163881 - DNA, 25 bp, Homo sapien
tttcctcaaaggagccacgccattg

SEQ ID NO: 163882 - DNA, 25 bp, Homo sapien
taccaactttcactattacagaaag

SEQ ID NO: 163883 - DNA, 25 bp, Homo sapien
caaatacctcctggtatccttccaa

SEQ ID NO: 163884 - DNA, 25 bp, Homo sapien
tcttttcacaagctcagaccttcca

SEQ ID NO: 163885 - DNA, 25 bp, Homo sapien
gatgaaagcggagacagaagaggcg

SEQ ID NO: 163886 - DNA, 25 bp, Homo sapien
gggatgaaagcggagacagaagagg

SEQ ID NO: 163887 - DNA, 25 bp, Homo sapien
ggatgaaagcggagacagaagaggc

SEQ ID NO: 163888 - DNA, 25 bp, Homo sapien
ggaagctggagctcttccttgcaga

SEQ ID NO: 163889 - DNA, 25 bp, Homo sapien
agaggaagctggagctcttccttgc

SEQ ID NO: 163890 - DNA, 25 bp, Homo sapien
gaatctccttctccaagaggaagct

SEQ ID NO: 163891 - DNA, 25 bp, Homo sapien
agagaaaaggggcccagaatctcct

SEQ ID NO: 163892 - DNA, 25 bp, Homo sapien
tgagactggcagacacgtgccaagc

SEQ ID NO: 163893 - DNA, 25 bp, Homo sapien
agagctcgaggggcatggccaccac

SEQ ID NO: 163894 - DNA, 25 bp, Homo sapien
tggcagacacgtgccaagcagagct

SEQ ID NO: 163895 - DNA, 25 bp, Homo sapien
agacacgtgccaagcagagctcgag

SEQ ID NO: 163896 - DNA, 25 bp, Homo sapien
ccagctgggcccgtgtccctggaag

SEQ ID NO: 163897 - DNA, 25 bp, Homo sapien
ttgtcatagaagtggccagctgggc

SEQ ID NO: 163898 - DNA, 25 bp, Homo sapien
caaagatgagggcacgtagcccgag

SEQ ID NO: 163899 - DNA, 25 bp, Homo sapien
tagcccgaggactcgaggatggcgg

SEQ ID NO: 163900 - DNA, 25 bp, Homo sapien
gtggaggctccccagaacgcccttc

SEQ ID NO: 163901 - DNA, 25 bp, Homo sapien
accttggcggccttcggtgtgaagg

SEQ ID NO: 163902 - DNA, 25 bp, Homo sapien
atttcagcttcttgccaaccacctt

SEQ ID NO: 163903 - DNA, 25 bp, Homo sapien
gcggccttcggtgtgaaggtggagg

SEQ ID NO: 163904 - DNA, 25 bp, Homo sapien
aggaccggccgatcctgtctcatcg

SEQ ID NO: 163905 - DNA, 25 bp, Homo sapien
ccagcttcagagactgtcaaggacc

SEQ ID NO: 163906 - DNA, 25 bp, Homo sapien
aagaggaggcctttgtagacacagc

SEQ ID NO: 163907 - DNA, 25 bp, Homo sapien
tcgcgtgtctccctcaaagaggagg

SEQ ID NO: 163908 - DNA, 25 bp, Homo sapien
cagggagtctcacgatgttcttcca

SEQ ID NO: 163909 - DNA, 25 bp, Homo sapien
agtcagagtttgctaatcagctgcc

SEQ ID NO: 163910 - DNA, 25 bp, Homo sapien
ggagcatcggcaagttaccatctta

SEQ ID NO: 163911 - DNA, 25 bp, Homo sapien
agaacccattagagacttcagcggg

SEQ ID NO: 163912 - DNA, 25 bp, Homo sapien
aaaatggccaggggccatgggtcat

SEQ ID NO: 163913 - DNA, 25 bp, Homo sapien
ccatctacactaagaatacaaaatt

SEQ ID NO: 163914 - DNA, 25 bp, Homo sapien
atggaaaaaccccatctacactaag

SEQ ID NO: 163915 - DNA, 25 bp, Homo sapien
aaaaatggccaggggccatgggtca

SEQ ID NO: 163916 - DNA, 25 bp, Homo sapien
ggaatccggtcagtccattcttggg

SEQ ID NO: 163917 - DNA, 25 bp, Homo sapien
ccaccagcgtgcctgaggctttggg

SEQ ID NO: 163918 - DNA, 25 bp, Homo sapien
gaggccaccagcgtgcctgaggctt

SEQ ID NO: 163919 - DNA, 25 bp, Homo sapien
tggtggctccaggaatccggtcagt

SEQ ID NO: 163920 - DNA, 25 bp, Homo sapien
cgggtctcggtgcagatggtgcaga

SEQ ID NO: 163921 - DNA, 25 bp, Homo sapien
cctagcccgggtctcggtgcagatg

SEQ ID NO: 163922 - DNA, 25 bp, Homo sapien
cccgggtctcggtgcagatggtgca

SEQ ID NO: 163923 - DNA, 25 bp, Homo sapien
tagcccgggtctcggtgcagatggt

SEQ ID NO: 163924 - DNA, 25 bp, Homo sapien
tggccccagcttgagtaacaacacg

SEQ ID NO: 163925 - DNA, 25 bp, Homo sapien
taacaacacgctctgctcatagtcg

SEQ ID NO: 163926 - DNA, 25 bp, Homo sapien
ttatttgctacaccgggctgaattt

SEQ ID NO: 163927 - DNA, 25 bp, Homo sapien
tcatagtcggagatcatggaccaat

SEQ ID NO: 163928 - DNA, 25 bp, Homo sapien
ccttaggcactaaagcagagctagt

SEQ ID NO: 163929 - DNA, 25 bp, Homo sapien
tatggcatgacaactactttaaggg

SEQ ID NO: 163930 - DNA, 25 bp, Homo sapien
taaagtgtttagctgtcaagccgga

SEQ ID NO: 163931 - DNA, 25 bp, Homo sapien
caagccggatgcctaagtagaccaa

SEQ ID NO: 163932 - DNA, 25 bp, Homo sapien
tatgttacagtcatacacgtcgttc

SEQ ID NO: 163933 - DNA, 25 bp, Homo sapien
gaagactctcaaaatcggaagaagc

SEQ ID NO: 163934 - DNA, 25 bp, Homo sapien
tttctctcaaggactactgcaccag

SEQ ID NO: 163935 - DNA, 25 bp, Homo sapien
tcagcttggaatacacgaagactct

SEQ ID NO: 163936 - DNA, 25 bp, Homo sapien
ggttgagacgttcgcctttcaggca

SEQ ID NO: 163937 - DNA, 25 bp, Homo sapien
tagttgccgcgctccgaaatgaggt

SEQ ID NO: 163938 - DNA, 25 bp, Homo sapien
cggtgtcgttccagatgcctgagga

SEQ ID NO: 163939 - DNA, 25 bp, Homo sapien
gaagcgcgcacacgctcgtggtagt

SEQ ID NO: 163940 - DNA, 25 bp, Homo sapien
ggagtgggggatcaggccatacagc

SEQ ID NO: 163941 - DNA, 25 bp, Homo sapien
agtgggggatcaggccatacagcat

SEQ ID NO: 163942 - DNA, 25 bp, Homo sapien
tggtccatttcccaagttgaacttc

SEQ ID NO: 163943 - DNA, 25 bp, Homo sapien
ccagctccttactgggaccctggtc

SEQ ID NO: 163944 - DNA, 25 bp, Homo sapien
gctatatggctcacgctggaatgca

SEQ ID NO: 163945 - DNA, 25 bp, Homo sapien
aaattctgaaacactaagggctctg

SEQ ID NO: 163946 - DNA, 25 bp, Homo sapien
tgggaatcaccgtaaggcataaacc

SEQ ID NO: 163947 - DNA, 25 bp, Homo sapien
tttttctattggtccagggagcgcc

SEQ ID NO: 163948 - DNA, 25 bp, Homo sapien
gggtctagttgaccgttccgcagcc

SEQ ID NO: 163949 - DNA, 25 bp, Homo sapien
ccaggtgatgccggcttcagctagt

SEQ ID NO: 163950 - DNA, 25 bp, Homo sapien
tgtcatgagcctgaggtgaacttga

SEQ ID NO: 163951 - DNA, 25 bp, Homo sapien
agggccagcggaaagccggtcaggg

SEQ ID NO: 163952 - DNA, 25 bp, Homo sapien
gttcatcctgccctaagtgcccgga

SEQ ID NO: 163953 - DNA, 25 bp, Homo sapien
ttggaaagcagcgttcatcctgccc

SEQ ID NO: 163954 - DNA, 25 bp, Homo sapien
accgcgcaggcgctgttcctggtgc

SEQ ID NO: 163955 - DNA, 25 bp, Homo sapien
gcgcaggcgctgttcctggtgctcc

SEQ ID NO: 163956 - DNA, 25 bp, Homo sapien
tccttccctcctccctccgtcgcca

SEQ ID NO: 163957 - DNA, 25 bp, Homo sapien
ccttccctcctccctccgtcgccat

SEQ ID NO: 163958 - DNA, 25 bp, Homo sapien
tgaattgggtcttaatctcgttcat

SEQ ID NO: 163959 - DNA, 25 bp, Homo sapien
gtggtgaattgggtcttaatctcgt

SEQ ID NO: 163960 - DNA, 25 bp, Homo sapien
cgggtggtgaattgggtcttaatct

SEQ ID NO: 163961 - DNA, 25 bp, Homo sapien
ggtgaattgggtcttaatctcgttc

SEQ ID NO: 163962 - DNA, 25 bp, Homo sapien
cctgcgagttgaagggcacccggtt

SEQ ID NO: 163963 - DNA, 25 bp, Homo sapien
ttgggccggctgtactccgagtgcg

SEQ ID NO: 163964 - DNA, 25 bp, Homo sapien
tcgttgaggtttacgaaggagacgc

SEQ ID NO: 163965 - DNA, 25 bp, Homo sapien
ggtcgccgttgccagactggtcgtt

SEQ ID NO: 163966 - DNA, 25 bp, Homo sapien
agatatagaagtacagctcccggcc

SEQ ID NO: 163967 - DNA, 25 bp, Homo sapien
tgtagatatagaagtacagctcccg

SEQ ID NO: 163968 - DNA, 25 bp, Homo sapien
tgcggacccccttgtagatatagaa

SEQ ID NO: 163969 - DNA, 25 bp, Homo sapien
ccccttgtagatatagaagtacagc

SEQ ID NO: 163970 - DNA, 25 bp, Homo sapien
ctggctccggtgacgcccgggtcgg

SEQ ID NO: 163971 - DNA, 25 bp, Homo sapien
tggctggctccggtgacgcccgggt

SEQ ID NO: 163972 - DNA, 25 bp, Homo sapien
cgctggctggctccggtgacgcccg

SEQ ID NO: 163973 - DNA, 25 bp, Homo sapien
gctggctccggtgacgcccgggtcg

SEQ ID NO: 163974 - DNA, 25 bp, Homo sapien
aagtaagagcgacggccacccctct

SEQ ID NO: 163975 - DNA, 25 bp, Homo sapien
gagcgacggccacccctctcggtca

SEQ ID NO: 163976 - DNA, 25 bp, Homo sapien
taagagcgacggccacccctctcgg

SEQ ID NO: 163977 - DNA, 25 bp, Homo sapien
tcaaaagtaagagcgacggccaccc

SEQ ID NO: 163978 - DNA, 25 bp, Homo sapien
ccatgtcagagcctgatggaccagg

SEQ ID NO: 163979 - DNA, 25 bp, Homo sapien
gccatgtcagagcctgatggaccag

SEQ ID NO: 163980 - DNA, 25 bp, Homo sapien
cccgctccctggccatgtcagagcc

SEQ ID NO: 163981 - DNA, 25 bp, Homo sapien
tgttaagccgtcttgcgtccctgtt

SEQ ID NO: 163982 - DNA, 25 bp, Homo sapien
gaggcaatcgaagcagacaagacgg

SEQ ID NO: 163983 - DNA, 25 bp, Homo sapien
ccggttccgccttacagagatcttg

SEQ ID NO: 163984 - DNA, 25 bp, Homo sapien
tcctaggaagtgtcagtgcggcagc

SEQ ID NO: 163985 - DNA, 25 bp, Homo sapien
cagcagcttcttatttgacagtcag

SEQ ID NO: 163986 - DNA, 25 bp, Homo sapien
gaggtgcaaatagaagttaaataac

SEQ ID NO: 163987 - DNA, 25 bp, Homo sapien
ctgagtgtttcagggccttaaagtt

SEQ ID NO: 163988 - DNA, 25 bp, Homo sapien
tattattaattacaacgtgcactgt

SEQ ID NO: 163989 - DNA, 25 bp, Homo sapien
atatgtttgtaactactaactctaa

SEQ ID NO: 163990 - DNA, 25 bp, Homo sapien
aatatgtttgtaactactaactcta

SEQ ID NO: 163991 - DNA, 25 bp, Homo sapien
tatgagcattcccataacagaacgc

SEQ ID NO: 163992 - DNA, 25 bp, Homo sapien
gagacagaacatttcccatatgagc

SEQ ID NO: 163993 - DNA, 25 bp, Homo sapien
caatgtcaccaacaggtggtcctgc

SEQ ID NO: 163994 - DNA, 25 bp, Homo sapien
caaagcaggaattcctccaatgtca

SEQ ID NO: 163995 - DNA, 25 bp, Homo sapien
tacagacttctaaacctctttctaa

SEQ ID NO: 163996 - DNA, 25 bp, Homo sapien
taaatcagggtgcttaaactttctg

SEQ ID NO: 163997 - DNA, 25 bp, Homo sapien
ctaaatcagggtgcttaaactttct

SEQ ID NO: 163998 - DNA, 25 bp, Homo sapien
atggactccttacaactgttttttg

SEQ ID NO: 163999 - DNA, 25 bp, Homo sapien
ctttctgtgccatggactccttaca

SEQ ID NO: 164000 - DNA, 25 bp, Homo sapien
cttcagcctaacagataaggaatat

SEQ ID NO: 164001 - DNA, 25 bp, Homo sapien
gcctaacagataaggaatatacatc

SEQ ID NO: 164002 - DNA, 25 bp, Homo sapien
tcagcctaacagataaggaatatac

SEQ ID NO: 164003 - DNA, 25 bp, Homo sapien
cagcctaacagataaggaatataca

SEQ ID NO: 164004 - DNA, 25 bp, Homo sapien
caaggtgtaaaacagtgcagatgct

SEQ ID NO: 164005 - DNA, 25 bp, Homo sapien
taatactggttacttcagaggaggg

SEQ ID NO: 164006 - DNA, 25 bp, Homo sapien
cactaagttacttgagaaaggccgg

SEQ ID NO: 164007 - DNA, 25 bp, Homo sapien
taaaataggcctatgagacgtcaca

SEQ ID NO: 164008 - DNA, 25 bp, Homo sapien
cacaatttataccagaataaatctc

SEQ ID NO: 164009 - DNA, 25 bp, Homo sapien
taccagaataaatctcagcagtatc

SEQ ID NO: 164010 - DNA, 25 bp, Homo sapien
ttataccagaataaatctcagcagt

SEQ ID NO: 164011 - DNA, 25 bp, Homo sapien
ccagaataaatctcagcagtatcaa

SEQ ID NO: 164012 - DNA, 25 bp, Homo sapien
tggtccattcctacaaggaactcac

SEQ ID NO: 164013 - DNA, 25 bp, Homo sapien
atggtccattcctacaaggaactca

SEQ ID NO: 164014 - DNA, 25 bp, Homo sapien
taagggacaatgcatgtgacagcac

SEQ ID NO: 164015 - DNA, 25 bp, Homo sapien
tactagatcctataaggcagtggtt

SEQ ID NO: 164016 - DNA, 25 bp, Homo sapien
tagttacaccacagattgctgagcc

SEQ ID NO: 164017 - DNA, 25 bp, Homo sapien
gaattacctggcatgctagttacac

SEQ ID NO: 164018 - DNA, 25 bp, Homo sapien
tcagagattcccctctctcatctct

SEQ ID NO: 164019 - DNA, 25 bp, Homo sapien
gcaagttactacatccctcagagat

SEQ ID NO: 164020 - DNA, 25 bp, Homo sapien
ttggcaagttactacatccctcaga

SEQ ID NO: 164021 - DNA, 25 bp, Homo sapien
ccttggcaagttactacatccctca

SEQ ID NO: 164022 - DNA, 25 bp, Homo sapien
tgagacaaaaatagagtagcacata

SEQ ID NO: 164023 - DNA, 25 bp, Homo sapien
catatgatggctctacctgtgaaaa

SEQ ID NO: 164024 - DNA, 25 bp, Homo sapien
gttagaatatgatctcaaaggccgc

SEQ ID NO: 164025 - DNA, 25 bp, Homo sapien
agcaagagtttacatgaaaagcggg

SEQ ID NO: 164026 - DNA, 25 bp, Homo sapien
cctccttcattctcaaacatactag

SEQ ID NO: 164027 - DNA, 25 bp, Homo sapien
catactagtacagcccacacttgct

SEQ ID NO: 164028 - DNA, 25 bp, Homo sapien
ccttcattctcaaacatactagtac

SEQ ID NO: 164029 - DNA, 25 bp, Homo sapien
gcccacacttgcttggcattccaaa

SEQ ID NO: 164030 - DNA, 25 bp, Homo sapien
tctttctgccctaaatttcctgcag

SEQ ID NO: 164031 - DNA, 25 bp, Homo sapien
ctttctgccctaaatttcctgcaga

SEQ ID NO: 164032 - DNA, 25 bp, Homo sapien
gaaccggtcttgcagagtcttgcca

SEQ ID NO: 164033 - DNA, 25 bp, Homo sapien
taccaagtgcctaatgcaggcagac

SEQ ID NO: 164034 - DNA, 25 bp, Homo sapien
gaatcacctaagagagaaccggtct

SEQ ID NO: 164035 - DNA, 25 bp, Homo sapien
tatacttggcgctctgttgggtccc

SEQ ID NO: 164036 - DNA, 25 bp, Homo sapien
caccaacttagtgggcctcagtagg

SEQ ID NO: 164037 - DNA, 25 bp, Homo sapien
gtcacatcacataggcctggtaaag

SEQ ID NO: 164038 - DNA, 25 bp, Homo sapien
cacaaagggtctgcaaaagaagccc

SEQ ID NO: 164039 - DNA, 25 bp, Homo sapien
tcagctgggtcagtttagcatggca

SEQ ID NO: 164040 - DNA, 25 bp, Homo sapien
caaatgcactgcctgtagtacagac

SEQ ID NO: 164041 - DNA, 25 bp, Homo sapien
tttattagtctgcagtcaaatgcac

SEQ ID NO: 164042 - DNA, 25 bp, Homo sapien
actgctcttgaagtgtaccagtcca

SEQ ID NO: 164043 - DNA, 25 bp, Homo sapien
ccagtccaggactagtttattagtc

SEQ ID NO: 164044 - DNA, 25 bp, Homo sapien
taaaattatgcgctgaaatacacag

SEQ ID NO: 164045 - DNA, 25 bp, Homo sapien
tgacagttaactaggattgcaccac

SEQ ID NO: 164046 - DNA, 25 bp, Homo sapien
tgcacttcaggctagatgacatagc

SEQ ID NO: 164047 - DNA, 25 bp, Homo sapien
cacagatcaatttaaaggctggcca

SEQ ID NO: 164048 - DNA, 25 bp, Homo sapien
cggagatgagaatctctgttctacc

SEQ ID NO: 164049 - DNA, 25 bp, Homo sapien
aaaacggagatgagaatctctgttc

SEQ ID NO: 164050 - DNA, 25 bp, Homo sapien
gttaaaacggagatgagaatctctg

SEQ ID NO: 164051 - DNA, 25 bp, Homo sapien
tcagttaaaacggagatgagaatct

SEQ ID NO: 164052 - DNA, 25 bp, Homo sapien
ttgggtctataagctggacttggcc

SEQ ID NO: 164053 - DNA, 25 bp, Homo sapien
acttggcctgcggaaaagcccacta

SEQ ID NO: 164054 - DNA, 25 bp, Homo sapien
tcatgacaagtaggctgtgttcctt

SEQ ID NO: 164055 - DNA, 25 bp, Homo sapien
gctgttaggtggttgaagtcatgac

SEQ ID NO: 164056 - DNA, 25 bp, Homo sapien
tacttgaggctgaaagatgctccaa

SEQ ID NO: 164057 - DNA, 25 bp, Homo sapien
tactacaacactggcaaaagctatg

SEQ ID NO: 164058 - DNA, 25 bp, Homo sapien
tcatgtgaccaaactttaagcgcca

SEQ ID NO: 164059 - DNA, 25 bp, Homo sapien
gaagtactccttagccaaatgactg

SEQ ID NO: 164060 - DNA, 25 bp, Homo sapien
ccctgggtggatactgatttgcatg

SEQ ID NO: 164061 - DNA, 25 bp, Homo sapien
taagatcttatcaaatccactggca

SEQ ID NO: 164062 - DNA, 25 bp, Homo sapien
caatgtcaaacaggagcaccctggg

SEQ ID NO: 164063 - DNA, 25 bp, Homo sapien
tagaagagatggcatggttcataag

SEQ ID NO: 164064 - DNA, 25 bp, Homo sapien
ggctgcctccgggtcttgtttacta

SEQ ID NO: 164065 - DNA, 25 bp, Homo sapien
ttctctaagcggcattctgtaccat

SEQ ID NO: 164066 - DNA, 25 bp, Homo sapien
tgtttactaacagcccttacatggc

SEQ ID NO: 164067 - DNA, 25 bp, Homo sapien
attctgtaccatcctcggccagggc

SEQ ID NO: 164068 - DNA, 25 bp, Homo sapien
cttgctaccttcattctgtctttct

SEQ ID NO: 164069 - DNA, 25 bp, Homo sapien
ctggacagttactagagcctcctca

SEQ ID NO: 164070 - DNA, 25 bp, Homo sapien
gctaccttcattctgtctttcttca

SEQ ID NO: 164071 - DNA, 25 bp, Homo sapien
gacagttactagagcctcctcactg

SEQ ID NO: 164072 - DNA, 25 bp, Homo sapien
tcaagggccctcatgtgctattcct

SEQ ID NO: 164073 - DNA, 25 bp, Homo sapien
tctgcctcccagtttaaagtagacc

SEQ ID NO: 164074 - DNA, 25 bp, Homo sapien
taaaacatagcacttcgtccgagag

SEQ ID NO: 164075 - DNA, 25 bp, Homo sapien
cagttccttacctggttggccttct

SEQ ID NO: 164076 - DNA, 25 bp, Homo sapien
ttcattaccatataggaactgtccc

SEQ ID NO: 164077 - DNA, 25 bp, Homo sapien
tgagctgaatgtgaccgggtgactc

SEQ ID NO: 164078 - DNA, 25 bp, Homo sapien
caaagttactattctgtgaatatac

SEQ ID NO: 164079 - DNA, 25 bp, Homo sapien
aagcaaacttcagaacagggcagag

SEQ ID NO: 164080 - DNA, 25 bp, Homo sapien
taaatgccacaaggagacgtgggac

SEQ ID NO: 164081 - DNA, 25 bp, Homo sapien
taaggagtagatcattacgggctca

SEQ ID NO: 164082 - DNA, 25 bp, Homo sapien
gcaaaaatggcaactaaaggctctg

SEQ ID NO: 164083 - DNA, 25 bp, Homo sapien
cagcatgcccttcagtaagactgga

SEQ ID NO: 164084 - DNA, 25 bp, Homo sapien
gctgtggctgtgaagtcccaagcta

SEQ ID NO: 164085 - DNA, 25 bp, Homo sapien
gcatctgtcttgatcgcagcacatg

SEQ ID NO: 164086 - DNA, 25 bp, Homo sapien
caagctaaagggcttcggctgggac

SEQ ID NO: 164087 - DNA, 25 bp, Homo sapien
tctcaagtggaatgtgctgtcagtg

SEQ ID NO: 164088 - DNA, 25 bp, Homo sapien
gggccttgatctggatgaggatgtt

SEQ ID NO: 164089 - DNA, 25 bp, Homo sapien
tcagtgctcaatgataagtaatgga

SEQ ID NO: 164090 - DNA, 25 bp, Homo sapien
aagtaatggaattccctgttgggct

SEQ ID NO: 164091 - DNA, 25 bp, Homo sapien
tctctccaatgtcaatggggccttg

SEQ ID NO: 164092 - DNA, 25 bp, Homo sapien
gctgcagagtattcaactgtttgga

SEQ ID NO: 164093 - DNA, 25 bp, Homo sapien
tgtatgggcacaaagacagcatcct

SEQ ID NO: 164094 - DNA, 25 bp, Homo sapien
ggtgcttcaggtgagtgtcgccaca

SEQ ID NO: 164095 - DNA, 25 bp, Homo sapien
ccaagtgtatttgtacatcagtctg

SEQ ID NO: 164096 - DNA, 25 bp, Homo sapien
tcagcaatatcagggtgagtggcag

SEQ ID NO: 164097 - DNA, 25 bp, Homo sapien
tctctgtcaatcatgtgcttgacag

SEQ ID NO: 164098 - DNA, 25 bp, Homo sapien
tgcttgacagcagggaaaacacgtg

SEQ ID NO: 164099 - DNA, 25 bp, Homo sapien
gggcgccctgtgtctcagcaatatc

SEQ ID NO: 164100 - DNA, 25 bp, Homo sapien
atgcaccgccccacgtgcatctcca

SEQ ID NO: 164101 - DNA, 25 bp, Homo sapien
actgaggccgcctcactcccatgca

SEQ ID NO: 164102 - DNA, 25 bp, Homo sapien
acacacaactccaaaacagagcctg

SEQ ID NO: 164103 - DNA, 25 bp, Homo sapien
gcatctccataagcatctcctcgaa

SEQ ID NO: 164104 - DNA, 25 bp, Homo sapien
cctctgctctggcggctcgaaggtg

SEQ ID NO: 164105 - DNA, 25 bp, Homo sapien
ctcgaaggtggggagtgaaatccac

SEQ ID NO: 164106 - DNA, 25 bp, Homo sapien
tcactgtaggtaatgggctggttcc

SEQ ID NO: 164107 - DNA, 25 bp, Homo sapien
gggttcctctgcctttactgtcact

SEQ ID NO: 164108 - DNA, 25 bp, Homo sapien
tcgcccaccgtccacttaaggagag

SEQ ID NO: 164109 - DNA, 25 bp, Homo sapien
tgcaagtgtgcacggcaaagctctc

SEQ ID NO: 164110 - DNA, 25 bp, Homo sapien
taagtacatgttcccactcgagtgg

SEQ ID NO: 164111 - DNA, 25 bp, Homo sapien
gagaaagcaaactcgttgagggccc

SEQ ID NO: 164112 - DNA, 25 bp, Homo sapien
cactagtggtataagggtcaaacgc

SEQ ID NO: 164113 - DNA, 25 bp, Homo sapien
gagtcaaagttgaacacccgcagaa

SEQ ID NO: 164114 - DNA, 25 bp, Homo sapien
tactcggcagtctacaaaggaccag

SEQ ID NO: 164115 - DNA, 25 bp, Homo sapien
ggaagtcctcatcgctgccactaaa

SEQ ID NO: 164116 - DNA, 25 bp, Homo sapien
tatcagcggctctaacaagggaaca

SEQ ID NO: 164117 - DNA, 25 bp, Homo sapien
taaggtcccataaacagagctgtgt

SEQ ID NO: 164118 - DNA, 25 bp, Homo sapien
caggaggactcgtggcattcatgac

SEQ ID NO: 164119 - DNA, 25 bp, Homo sapien
gctcttgctagaaatgtgtcccatg

SEQ ID NO: 164120 - DNA, 25 bp, Homo sapien
gggactctatatactcccaggagga

SEQ ID NO: 164121 - DNA, 25 bp, Homo sapien
gaattacatggcatgcagtatccaa

SEQ ID NO: 164122 - DNA, 25 bp, Homo sapien
ggctctgatgcattgagatttacat

SEQ ID NO: 164123 - DNA, 25 bp, Homo sapien
tacaggagcgctaaccttgggactc

SEQ ID NO: 164124 - DNA, 25 bp, Homo sapien
tggattgccagaacaatgtaaaaat

SEQ ID NO: 164125 - DNA, 25 bp, Homo sapien
taatatcaatcaaccctgctaaacg

SEQ ID NO: 164126 - DNA, 25 bp, Homo sapien
cacattgatcaggtgtacaatattc

SEQ ID NO: 164127 - DNA, 25 bp, Homo sapien
taaatgacaattcatggccatctgt

SEQ ID NO: 164128 - DNA, 25 bp, Homo sapien
ctttacgaaacaaagcgcggaggag

SEQ ID NO: 164129 - DNA, 25 bp, Homo sapien
gaggagtcacgtgcctttctgaccc

SEQ ID NO: 164130 - DNA, 25 bp, Homo sapien
agttcccacgaactgtcaggctctg

SEQ ID NO: 164131 - DNA, 25 bp, Homo sapien
aaaaggtcttcgcttatgtggcaag

SEQ ID NO: 164132 - DNA, 25 bp, Homo sapien
ccagcgtcagcatcccaagagtaat

SEQ ID NO: 164133 - DNA, 25 bp, Homo sapien
actgaggacgaagcctacgcacatg

SEQ ID NO: 164134 - DNA, 25 bp, Homo sapien
cacagctgccatccaagaacaagga

SEQ ID NO: 164135 - DNA, 25 bp, Homo sapien
gcagagcctcccactgccgaggaag

SEQ ID NO: 164136 - DNA, 25 bp, Homo sapien
cgcaaactggtctaagtgatcgttg

SEQ ID NO: 164137 - DNA, 25 bp, Homo sapien
tggatggcgccaccgtgacatgttt

SEQ ID NO: 164138 - DNA, 25 bp, Homo sapien
ttaaggcccacgatgggcacagggt

SEQ ID NO: 164139 - DNA, 25 bp, Homo sapien
cagctaccagggtctttacactgca

SEQ ID NO: 164140 - DNA, 25 bp, Homo sapien
gtggcagcacgcggccatgccatca

SEQ ID NO: 164141 - DNA, 25 bp, Homo sapien
ctaggagcagtgctcagggatgtga

SEQ ID NO: 164142 - DNA, 25 bp, Homo sapien
gcagtgctcagggatgtgaaaggca

SEQ ID NO: 164143 - DNA, 25 bp, Homo sapien
tgctgtggttcccaggtggcagcac

SEQ ID NO: 164144 - DNA, 25 bp, Homo sapien
caaaggcccgtattccacaggtaga

SEQ ID NO: 164145 - DNA, 25 bp, Homo sapien
aaaggcccgtattccacaggtagag

SEQ ID NO: 164146 - DNA, 25 bp, Homo sapien
acaaaggcccgtattccacaggtag

SEQ ID NO: 164147 - DNA, 25 bp, Homo sapien
aggcccgtattccacaggtagagag

SEQ ID NO: 164148 - DNA, 25 bp, Homo sapien
tactagacagcacacttcggagttg

SEQ ID NO: 164149 - DNA, 25 bp, Homo sapien
tcacgttggttactcgggcacacac

SEQ ID NO: 164150 - DNA, 25 bp, Homo sapien
taaatgctacttacttgggatcggc

SEQ ID NO: 164151 - DNA, 25 bp, Homo sapien
tgcaaggtcgccagaaatgtcacca

SEQ ID NO: 164152 - DNA, 25 bp, Homo sapien
ggtcttggagaacaccttgcatcct

SEQ ID NO: 164153 - DNA, 25 bp, Homo sapien
tggtcttggagaacaccttgcatcc

SEQ ID NO: 164154 - DNA, 25 bp, Homo sapien
tttctcctagggttagcagcacgca

SEQ ID NO: 164155 - DNA, 25 bp, Homo sapien
gacgccagacgctgtgttccatgaa

SEQ ID NO: 164156 - DNA, 25 bp, Homo sapien
cagtcagacacgcatgatgtggcgc

SEQ ID NO: 164157 - DNA, 25 bp, Homo sapien
gatgaggaccttgtatgcaggcaac

SEQ ID NO: 164158 - DNA, 25 bp, Homo sapien
accgccgccatggtgcaaccccgca

SEQ ID NO: 164159 - DNA, 25 bp, Homo sapien
tccaccggcaccggaggcagggcag

SEQ ID NO: 164160 - DNA, 25 bp, Homo sapien
cgaccgccgccatggtgcaaccccg

SEQ ID NO: 164161 - DNA, 25 bp, Homo sapien
ccatccaccggcaccggaggcaggg

SEQ ID NO: 164162 - DNA, 25 bp, Homo sapien
tcactgctaaggaacgaaacctcag

SEQ ID NO: 164163 - DNA, 25 bp, Homo sapien
aaaggtaacagttgcatacgagtgc

SEQ ID NO: 164164 - DNA, 25 bp, Homo sapien
taacttaaagcaacacccgacagtc

SEQ ID NO: 164165 - DNA, 25 bp, Homo sapien
acagacttcacttcggccagactaa

SEQ ID NO: 164166 - DNA, 25 bp, Homo sapien
ttaatgtcagtatacagaggacagc

SEQ ID NO: 164167 - DNA, 25 bp, Homo sapien
tagctgtgacagtgacaaggcaaca

SEQ ID NO: 164168 - DNA, 25 bp, Homo sapien
caagtatgtagtaagtcttgttagc

SEQ ID NO: 164169 - DNA, 25 bp, Homo sapien
ggacagccccacagtacttcagaat

SEQ ID NO: 164170 - DNA, 25 bp, Homo sapien
agtaagagggagcaattccggtggc

SEQ ID NO: 164171 - DNA, 25 bp, Homo sapien
ggatttttaaagcttagatgtgaaa

SEQ ID NO: 164172 - DNA, 25 bp, Homo sapien
taagagggagcaattccggtggctg

SEQ ID NO: 164173 - DNA, 25 bp, Homo sapien
gagggagcaattccggtggctggct

SEQ ID NO: 164174 - DNA, 25 bp, Homo sapien
gccacccagagaaaaggattgtact

SEQ ID NO: 164175 - DNA, 25 bp, Homo sapien
gccagctttaacctgtccactgaca

SEQ ID NO: 164176 - DNA, 25 bp, Homo sapien
gaaagaccacgcagatgaagggcac

SEQ ID NO: 164177 - DNA, 25 bp, Homo sapien
tgccactcaacctggcatctaatga

SEQ ID NO: 164178 - DNA, 25 bp, Homo sapien
cagctggccggcgtgctgtggaggt

SEQ ID NO: 164179 - DNA, 25 bp, Homo sapien
gccttggccctgcacgtagcccctg

SEQ ID NO: 164180 - DNA, 25 bp, Homo sapien
ttggccctgcacgtagcccctgagg

SEQ ID NO: 164181 - DNA, 25 bp, Homo sapien
gcccctgaggctccaatgctggcct

SEQ ID NO: 164182 - DNA, 25 bp, Homo sapien
gctaacgccttgatgccaattgtgg

SEQ ID NO: 164183 - DNA, 25 bp, Homo sapien
tccatactggcataacggaactggg

SEQ ID NO: 164184 - DNA, 25 bp, Homo sapien
catcgccatgcagagaatgtgccca

SEQ ID NO: 164185 - DNA, 25 bp, Homo sapien
tgtttgtacttgtggaggaccccgc

SEQ ID NO: 164186 - DNA, 25 bp, Homo sapien
cattaagatggcgacagtgcagccc

SEQ ID NO: 164187 - DNA, 25 bp, Homo sapien
tgaaggtgacaatcggaaactgccc

SEQ ID NO: 164188 - DNA, 25 bp, Homo sapien
tgccggaagcctggaagcaagctgt

SEQ ID NO: 164189 - DNA, 25 bp, Homo sapien
tgttcagcgccttcagccagggttg

SEQ ID NO: 164190 - DNA, 25 bp, Homo sapien
ctacactacagttccacctggagaa

SEQ ID NO: 164191 - DNA, 25 bp, Homo sapien
actggcctggcttggggatgacaat

SEQ ID NO: 164192 - DNA, 25 bp, Homo sapien
acactacagttccacctggagaact

SEQ ID NO: 164193 - DNA, 25 bp, Homo sapien
cctggcttggggatgacaatgagcc

SEQ ID NO: 164194 - DNA, 25 bp, Homo sapien
gtccacacggctatcgccgacgtcc

SEQ ID NO: 164195 - DNA, 25 bp, Homo sapien
tccctcgagtccaagtcccgggaga

SEQ ID NO: 164196 - DNA, 25 bp, Homo sapien
tggcacggctcaggcgcagctcgga

SEQ ID NO: 164197 - DNA, 25 bp, Homo sapien
gactgtgcgcgcagcagtgaggtcg

SEQ ID NO: 164198 - DNA, 25 bp, Homo sapien
tcagagggccatgagtccttacacc

SEQ ID NO: 164199 - DNA, 25 bp, Homo sapien
taaaaagggcatcttcacgccgcac

SEQ ID NO: 164200 - DNA, 25 bp, Homo sapien
caacttctttgggtgagcagcggga

SEQ ID NO: 164201 - DNA, 25 bp, Homo sapien
tgtcttctgaccacctaaggtatag

SEQ ID NO: 164202 - DNA, 25 bp, Homo sapien
tccccaattgcagaattacaatatt

SEQ ID NO: 164203 - DNA, 25 bp, Homo sapien
tgatgaaaattactagtgaagtaac

SEQ ID NO: 164204 - DNA, 25 bp, Homo sapien
gaaatatcactcttaaatgatgaaa

SEQ ID NO: 164205 - DNA, 25 bp, Homo sapien
agtaactattttccccaattgcaga

SEQ ID NO: 164206 - DNA, 25 bp, Homo sapien
tggtgaaaatgtagcatacctcccc

SEQ ID NO: 164207 - DNA, 25 bp, Homo sapien
gctgtaactaatgtctcctccgaag

SEQ ID NO: 164208 - DNA, 25 bp, Homo sapien
ttcatggccccgtgatccagagtcc

SEQ ID NO: 164209 - DNA, 25 bp, Homo sapien
taaaccgagggctgagctgatgtga

SEQ ID NO: 164210 - DNA, 25 bp, Homo sapien
tatgaatcaaaacaaacgagcaggc

SEQ ID NO: 164211 - DNA, 25 bp, Homo sapien
gggttctgcgtgtcccttcccagcg

SEQ ID NO: 164212 - DNA, 25 bp, Homo sapien
catgtcttaccagtgacgctgctga

SEQ ID NO: 164213 - DNA, 25 bp, Homo sapien
ggtcagtcgtggagcgccatcatgt

SEQ ID NO: 164214 - DNA, 25 bp, Homo sapien
cgcaatggtggcctatgatcccgat

SEQ ID NO: 164215 - DNA, 25 bp, Homo sapien
gaatcgcgctctctatcctgaagag

SEQ ID NO: 164216 - DNA, 25 bp, Homo sapien
tgatcccgatgagagaatcgccgcc

SEQ ID NO: 164217 - DNA, 25 bp, Homo sapien
cagaggtaggcactctcgtgggttc

SEQ ID NO: 164218 - DNA, 25 bp, Homo sapien
tagaaaaacatgttctcctggtagg

SEQ ID NO: 164219 - DNA, 25 bp, Homo sapien
gaaaaacatgttctcctggtaggag

SEQ ID NO: 164220 - DNA, 25 bp, Homo sapien
aaaacatgttctcctggtaggaggg

SEQ ID NO: 164221 - DNA, 25 bp, Homo sapien
tttagaaaaacatgttctcctggta

SEQ ID NO: 164222 - DNA, 25 bp, Homo sapien
taccgtggcgcctagataaaggctt

SEQ ID NO: 164223 - DNA, 25 bp, Homo sapien
cacggagaagggttgcagagcatta

SEQ ID NO: 164224 - DNA, 25 bp, Homo sapien
gaagtctgctggctttaccgtggcg

SEQ ID NO: 164225 - DNA, 25 bp, Homo sapien
tgtattgaaggctccgatacggtcc

SEQ ID NO: 164226 - DNA, 25 bp, Homo sapien
ctacgagagatccaagcactgaggc

SEQ ID NO: 164227 - DNA, 25 bp, Homo sapien
gacctaaactgtgaatgagctatcc

SEQ ID NO: 164228 - DNA, 25 bp, Homo sapien
tgagcaagtcaacaacctacgagag

SEQ ID NO: 164229 - DNA, 25 bp, Homo sapien
tacctacacgatagtattgagcaag

SEQ ID NO: 164230 - DNA, 25 bp, Homo sapien
gggcctgacggttgctagggtgaca

SEQ ID NO: 164231 - DNA, 25 bp, Homo sapien
gcaggcgacagctcatggcgttcag

SEQ ID NO: 164232 - DNA, 25 bp, Homo sapien
tgcgcaggcgacagctcatggcgtt

SEQ ID NO: 164233 - DNA, 25 bp, Homo sapien
ggcgttcagggcctgacggttgcta

SEQ ID NO: 164234 - DNA, 25 bp, Homo sapien
tgattctcccactttaggcttctga

SEQ ID NO: 164235 - DNA, 25 bp, Homo sapien
gctggaggtcagtggtgcaaacatg

SEQ ID NO: 164236 - DNA, 25 bp, Homo sapien
gtcagtggtgcaaacatggcttatt

SEQ ID NO: 164237 - DNA, 25 bp, Homo sapien
gtgattctcccactttaggcttctg

SEQ ID NO: 164238 - DNA, 25 bp, Homo sapien
gatcgaacccgcgaccttggcgtta

SEQ ID NO: 164239 - DNA, 25 bp, Homo sapien
tctaaccaactgagctaaccggccg

SEQ ID NO: 164240 - DNA, 25 bp, Homo sapien
acccgcgaccttggcgttattagca

SEQ ID NO: 164241 - DNA, 25 bp, Homo sapien
tggcgttattagcaccacgctctaa

SEQ ID NO: 164242 - DNA, 25 bp, Homo sapien
cagacgcagcctcaggaaacgtggg

SEQ ID NO: 164243 - DNA, 25 bp, Homo sapien
tgggcatgcagtagctctccatatg

SEQ ID NO: 164244 - DNA, 25 bp, Homo sapien
cactaggcggtgatatctgcgagca

SEQ ID NO: 164245 - DNA, 25 bp, Homo sapien
gatgtgcatcggttggatgtccaga

SEQ ID NO: 164246 - DNA, 25 bp, Homo sapien
gccacacgtgcgacgctgccgctct

SEQ ID NO: 164247 - DNA, 25 bp, Homo sapien
tgccgctctggcccggaggagccgg

SEQ ID NO: 164248 - DNA, 25 bp, Homo sapien
acacgtgcgacgctgccgctctggc

SEQ ID NO: 164249 - DNA, 25 bp, Homo sapien
ctgccgctctggcccggaggagccg

SEQ ID NO: 164250 - DNA, 25 bp, Homo sapien
gccgcgtcccgcagcacgaaggggg

SEQ ID NO: 164251 - DNA, 25 bp, Homo sapien
gcgtcccgcagcacgaaggggggcg

SEQ ID NO: 164252 - DNA, 25 bp, Homo sapien
tgcagggcggcctgttgggccgcgt

SEQ ID NO: 164253 - DNA, 25 bp, Homo sapien
cagggcggcctgttgggccgcgtcc

SEQ ID NO: 164254 - DNA, 25 bp, Homo sapien
cagagaaggcacgagggcgttccag

SEQ ID NO: 164255 - DNA, 25 bp, Homo sapien
acagggcccagcgtgagcaaccgct

SEQ ID NO: 164256 - DNA, 25 bp, Homo sapien
cgaacgccgtccctaagaagctcag

SEQ ID NO: 164257 - DNA, 25 bp, Homo sapien
ccgctcctagagtgaggctcctggg

SEQ ID NO: 164258 - DNA, 25 bp, Homo sapien
ctcaccacacccggctggctttttg

SEQ ID NO: 164259 - DNA, 25 bp, Homo sapien
acctgcctcaccacacccggctggc

SEQ ID NO: 164260 - DNA, 25 bp, Homo sapien
cacacccggctggctttttgtttgt

SEQ ID NO: 164261 - DNA, 25 bp, Homo sapien
tgcctcaccacacccggctggcttt

SEQ ID NO: 164262 - DNA, 25 bp, Homo sapien
aggagcattggcctttcctgacctt

SEQ ID NO: 164263 - DNA, 25 bp, Homo sapien
gattgtggtcggtaggagcattggc

SEQ ID NO: 164264 - DNA, 25 bp, Homo sapien
gtaggagcattggcctttcctgacc

SEQ ID NO: 164265 - DNA, 25 bp, Homo sapien
gggctggattgtggtcggtaggagc

SEQ ID NO: 164266 - DNA, 25 bp, Homo sapien
gagcaggaggttggcataagtcact

SEQ ID NO: 164267 - DNA, 25 bp, Homo sapien
ggaggttggcataagtcacttagga

SEQ ID NO: 164268 - DNA, 25 bp, Homo sapien
ctgagcaggaggttggcataagtca

SEQ ID NO: 164269 - DNA, 25 bp, Homo sapien
gcaggaggttggcataagtcactta

SEQ ID NO: 164270 - DNA, 25 bp, Homo sapien
aataaatggatgtgctgaactggat

SEQ ID NO: 164271 - DNA, 25 bp, Homo sapien
tgaaagagatgttactgccagcggg

SEQ ID NO: 164272 - DNA, 25 bp, Homo sapien
aacatggagccctgttcatctggag

SEQ ID NO: 164273 - DNA, 25 bp, Homo sapien
agatgttactgccagcgggtcagag

SEQ ID NO: 164274 - DNA, 25 bp, Homo sapien
tcgataagtcaaagagtgcgtgcct

SEQ ID NO: 164275 - DNA, 25 bp, Homo sapien
gatacccgtccagaacgtgtcttta

SEQ ID NO: 164276 - DNA, 25 bp, Homo sapien
cacagagttctgagtaatcatcaga

SEQ ID NO: 164277 - DNA, 25 bp, Homo sapien
gaatctgacagatgaccatccgcca

SEQ ID NO: 164278 - DNA, 25 bp, Homo sapien
cacatggatccgctggcatggacag

SEQ ID NO: 164279 - DNA, 25 bp, Homo sapien
catctcggggtccaactggccgtgg

SEQ ID NO: 164280 - DNA, 25 bp, Homo sapien
ccctcacatggatccgctggcatgg

SEQ ID NO: 164281 - DNA, 25 bp, Homo sapien
ggatccgctggcatggacagcccca

SEQ ID NO: 164282 - DNA, 25 bp, Homo sapien
cagtgttgcacacccaaaagtaaaa

SEQ ID NO: 164283 - DNA, 25 bp, Homo sapien
aaacaatcatgctttatatacccca

SEQ ID NO: 164284 - DNA, 25 bp, Homo sapien
acagtgttgcacacccaaaagtaaa

SEQ ID NO: 164285 - DNA, 25 bp, Homo sapien
catgctttatataccccataaaaac

SEQ ID NO: 164286 - DNA, 25 bp, Homo sapien
ggcaatgtctcttcaacgtctacag

SEQ ID NO: 164287 - DNA, 25 bp, Homo sapien
ctccttgagcctggctttgcttggc

SEQ ID NO: 164288 - DNA, 25 bp, Homo sapien
tgagcatgcgcgtcttctaggtcct

SEQ ID NO: 164289 - DNA, 25 bp, Homo sapien
gctttgcttggcgacgccctctgct

SEQ ID NO: 164290 - DNA, 25 bp, Homo sapien
ccagggagatcacaagatcagtgct

SEQ ID NO: 164291 - DNA, 25 bp, Homo sapien
ggagatcacaagatcagtgcttaga

SEQ ID NO: 164292 - DNA, 25 bp, Homo sapien
cagggagatcacaagatcagtgctt

SEQ ID NO: 164293 - DNA, 25 bp, Homo sapien
gggagatcacaagatcagtgcttag

SEQ ID NO: 164294 - DNA, 25 bp, Homo sapien
acggtcacaacctgagccagctgag

SEQ ID NO: 164295 - DNA, 25 bp, Homo sapien
tcatacacggtcacaacctgagcca

SEQ ID NO: 164296 - DNA, 25 bp, Homo sapien
gaaactcatacacggtcacaacctg

SEQ ID NO: 164297 - DNA, 25 bp, Homo sapien
cagaagaaactcatacacggtcaca

SEQ ID NO: 164298 - DNA, 25 bp, Homo sapien
aacaactatgagctgggcacggtag

SEQ ID NO: 164299 - DNA, 25 bp, Homo sapien
tcagtggtgtgcgtttccttcagtc

SEQ ID NO: 164300 - DNA, 25 bp, Homo sapien
tcaaggcactgatatggaaaataca

SEQ ID NO: 164301 - DNA, 25 bp, Homo sapien
gtcaagggagtaaacgggcacctgc

SEQ ID NO: 164302 - DNA, 25 bp, Homo sapien
gctttgctagatgatctttttcaac

SEQ ID NO: 164303 - DNA, 25 bp, Homo sapien
tactgaggtaatcttggcacatttt

SEQ ID NO: 164304 - DNA, 25 bp, Homo sapien
tatcattgtttatttccagggtctc

SEQ ID NO: 164305 - DNA, 25 bp, Homo sapien
ttatcattgtttatttccagggtct

SEQ ID NO: 164306 - DNA, 25 bp, Homo sapien
cttatcattgtttatttccagggtc

SEQ ID NO: 164307 - DNA, 25 bp, Homo sapien
tgagtgggaagattatggtgttttc

SEQ ID NO: 164308 - DNA, 25 bp, Homo sapien
gtgagtgggaagattatggtgtttt

SEQ ID NO: 164309 - DNA, 25 bp, Homo sapien
aaagccggattctgtagggcaggca

SEQ ID NO: 164310 - DNA, 25 bp, Homo sapien
gccgagttccgcctcaaagcaggat

SEQ ID NO: 164311 - DNA, 25 bp, Homo sapien
tgtcatgctcccaagaggcgatggc

SEQ ID NO: 164312 - DNA, 25 bp, Homo sapien
gagggcatctacatgaggcttagca

SEQ ID NO: 164313 - DNA, 25 bp, Homo sapien
taaaacactctctttaatgctatca

SEQ ID NO: 164314 - DNA, 25 bp, Homo sapien
taatgctatcacgagcttaataatg

SEQ ID NO: 164315 - DNA, 25 bp, Homo sapien
tctctttaatgctatcacgagctta

SEQ ID NO: 164316 - DNA, 25 bp, Homo sapien
gctatcacgagcttaataatgttag

SEQ ID NO: 164317 - DNA, 25 bp, Homo sapien
cccatccatgtctcggctgaggtgc

SEQ ID NO: 164318 - DNA, 25 bp, Homo sapien
gtgcttgggtccaaggttgtctggg

SEQ ID NO: 164319 - DNA, 25 bp, Homo sapien
ccccatccatgtctcggctgaggtg

SEQ ID NO: 164320 - DNA, 25 bp, Homo sapien
tggcagcaagagattcagtggtatc

SEQ ID NO: 164321 - DNA, 25 bp, Homo sapien
cagtggtatcgttggacagggcttc

SEQ ID NO: 164322 - DNA, 25 bp, Homo sapien
tggtatcgttggacagggcttctct

SEQ ID NO: 164323 - DNA, 25 bp, Homo sapien
gagattcagtggtatcgttggacag

SEQ ID NO: 164324 - DNA, 25 bp, Homo sapien
gcacaggtcacccaacctgaaaaat

SEQ ID NO: 164325 - DNA, 25 bp, Homo sapien
tcaagactcgcagggaatgaatctg

SEQ ID NO: 164326 - DNA, 25 bp, Homo sapien
gaaaaatggcaatcctgggtacatc

SEQ ID NO: 164327 - DNA, 25 bp, Homo sapien
tggatacaccccacaaacagcattt

SEQ ID NO: 164328 - DNA, 25 bp, Homo sapien
caaaaccagctaggccaagtcacct

SEQ ID NO: 164329 - DNA, 25 bp, Homo sapien
ctaagagccaatcgacagtgtgctt

SEQ ID NO: 164330 - DNA, 25 bp, Homo sapien
tttgggaaacaggtgaacatggcgt

SEQ ID NO: 164331 - DNA, 25 bp, Homo sapien
cgtgtactgtgtcatggcccactca

SEQ ID NO: 164332 - DNA, 25 bp, Homo sapien
gaacggggagagacagtcacattta

SEQ ID NO: 164333 - DNA, 25 bp, Homo sapien
tcagaacggggagagacagtcacat

SEQ ID NO: 164334 - DNA, 25 bp, Homo sapien
cttcagaacggggagagacagtcac

SEQ ID NO: 164335 - DNA, 25 bp, Homo sapien
cagaacggggagagacagtcacatt

SEQ ID NO: 164336 - DNA, 25 bp, Homo sapien
cattgccaccagaaaccgtcgttgt

SEQ ID NO: 164337 - DNA, 25 bp, Homo sapien
tctaagttagccagtgcctgaagct

SEQ ID NO: 164338 - DNA, 25 bp, Homo sapien
gcataaacaggcagcccactgacat

SEQ ID NO: 164339 - DNA, 25 bp, Homo sapien
actgacatcccgggatgagagagca

SEQ ID NO: 164340 - DNA, 25 bp, Homo sapien
gaaaggcttctgagacacccttcag

SEQ ID NO: 164341 - DNA, 25 bp, Homo sapien
tgccacctctgtaggcaggacgctg

SEQ ID NO: 164342 - DNA, 25 bp, Homo sapien
ggtggaagtcacaaaccttgccgag

SEQ ID NO: 164343 - DNA, 25 bp, Homo sapien
tcagtcaatagtgatccatgtgggc

SEQ ID NO: 164344 - DNA, 25 bp, Homo sapien
taagcccatcggaagtctgaataaa

SEQ ID NO: 164345 - DNA, 25 bp, Homo sapien
tgtccctgagacagtaactcatggc

SEQ ID NO: 164346 - DNA, 25 bp, Homo sapien
gggacaagataagcccatcggaagt

SEQ ID NO: 164347 - DNA, 25 bp, Homo sapien
aaaagccatggcttcgccgacagca

SEQ ID NO: 164348 - DNA, 25 bp, Homo sapien
catccgcaggcacgcccctctgcat

SEQ ID NO: 164349 - DNA, 25 bp, Homo sapien
aggcacgcccctctgcatcagtcac

SEQ ID NO: 164350 - DNA, 25 bp, Homo sapien
tagcgggcccatccgcaggcacgcc

SEQ ID NO: 164351 - DNA, 25 bp, Homo sapien
ctagcgggcccatccgcaggcacgc

SEQ ID NO: 164352 - DNA, 25 bp, Homo sapien
tcagacgcgccacagggattcctga

SEQ ID NO: 164353 - DNA, 25 bp, Homo sapien
gaccttctctggataaaatcagacg

SEQ ID NO: 164354 - DNA, 25 bp, Homo sapien
gacagtgcagtgctactcatcacca

SEQ ID NO: 164355 - DNA, 25 bp, Homo sapien
gaaaaactcatgagcgtcagacgcg

SEQ ID NO: 164356 - DNA, 25 bp, Homo sapien
ttctatcaataaaatgctgcccaga

SEQ ID NO: 164357 - DNA, 25 bp, Homo sapien
gaccatggtcatactcgagtcagca

SEQ ID NO: 164358 - DNA, 25 bp, Homo sapien
ggcacgtggccgattcatgaggaca

SEQ ID NO: 164359 - DNA, 25 bp, Homo sapien
tcatagtagcacatacacagtggtg

SEQ ID NO: 164360 - DNA, 25 bp, Homo sapien
tcccaaagagtagggcccatgagtc

SEQ ID NO: 164361 - DNA, 25 bp, Homo sapien
taatgataataatatgacctggcta

SEQ ID NO: 164362 - DNA, 25 bp, Homo sapien
catgagtcattacgggctcacacct

SEQ ID NO: 164363 - DNA, 25 bp, Homo sapien
acctggctaggcatgagtcattacg

SEQ ID NO: 164364 - DNA, 25 bp, Homo sapien
aatatgacctggctaggcatgagtc

SEQ ID NO: 164365 - DNA, 25 bp, Homo sapien
atgtggcccaagtagtgtcaaactc

SEQ ID NO: 164366 - DNA, 25 bp, Homo sapien
gcccagcaataatgttgttggtgtt

SEQ ID NO: 164367 - DNA, 25 bp, Homo sapien
agataggctcttaccatgtggccca

SEQ ID NO: 164368 - DNA, 25 bp, Homo sapien
gatacttaataaacagcagttttag

SEQ ID NO: 164369 - DNA, 25 bp, Homo sapien
caccggggccagcaccgaagagcag

SEQ ID NO: 164370 - DNA, 25 bp, Homo sapien
ggcagcccctccggactcgtcggcc

SEQ ID NO: 164371 - DNA, 25 bp, Homo sapien
cggcagcccctccggactcgtcggc

SEQ ID NO: 164372 - DNA, 25 bp, Homo sapien
atcttaaggcgaaggagcagagccc

SEQ ID NO: 164373 - DNA, 25 bp, Homo sapien
caagccagaggtagaaactattctc

SEQ ID NO: 164374 - DNA, 25 bp, Homo sapien
caggcgctccgtgtgttgtggcatt

SEQ ID NO: 164375 - DNA, 25 bp, Homo sapien
taggattgggaaaggagtcattcac

SEQ ID NO: 164376 - DNA, 25 bp, Homo sapien
tttccacagactatcttcacgcagg

SEQ ID NO: 164377 - DNA, 25 bp, Homo sapien
tatttgtcatctagggaaacctggg

SEQ ID NO: 164378 - DNA, 25 bp, Homo sapien
ctatcttcacgcaggaaaaggaatg

SEQ ID NO: 164379 - DNA, 25 bp, Homo sapien
ggccaaggtttccacagactatctt

SEQ ID NO: 164380 - DNA, 25 bp, Homo sapien
cagtacagatagagcatgccgatgc

SEQ ID NO: 164381 - DNA, 25 bp, Homo sapien
tgtcgagggccgtgagatagaccac

SEQ ID NO: 164382 - DNA, 25 bp, Homo sapien
tagtacaacgggcagaactctctga

SEQ ID NO: 164383 - DNA, 25 bp, Homo sapien
tagaccacgatagagcggaaaccct

SEQ ID NO: 164384 - DNA, 25 bp, Homo sapien
gaagaactagagattattcaaaact

SEQ ID NO: 164385 - DNA, 25 bp, Homo sapien
tcaggatcccaatgctatagaagag

SEQ ID NO: 164386 - DNA, 25 bp, Homo sapien
cagctaagaggtgcatattctggca

SEQ ID NO: 164387 - DNA, 25 bp, Homo sapien
ctgcagaaacagattggtcaggatc

SEQ ID NO: 164388 - DNA, 25 bp, Homo sapien
cagtcaaataacatctccaccaata

SEQ ID NO: 164389 - DNA, 25 bp, Homo sapien
acacagtcaaataacatctccacca

SEQ ID NO: 164390 - DNA, 25 bp, Homo sapien
cacagtcaaataacatctccaccaa

SEQ ID NO: 164391 - DNA, 25 bp, Homo sapien
agtcaaataacatctccaccaatat

SEQ ID NO: 164392 - DNA, 25 bp, Homo sapien
tgagtctctcacaaaagtgacgtac

SEQ ID NO: 164393 - DNA, 25 bp, Homo sapien
gaatagagtcccatgtggtggaagc

SEQ ID NO: 164394 - DNA, 25 bp, Homo sapien
ggtggaagccacaactcagtcaact

SEQ ID NO: 164395 - DNA, 25 bp, Homo sapien
caaaagctgtatcttggtccataaa

SEQ ID NO: 164396 - DNA, 25 bp, Homo sapien
tgaagcatttgagagatttcagact

SEQ ID NO: 164397 - DNA, 25 bp, Homo sapien
catttgagagatttcagactattaa

SEQ ID NO: 164398 - DNA, 25 bp, Homo sapien
tgagagatttcagactattaaactc

SEQ ID NO: 164399 - DNA, 25 bp, Homo sapien
agcatttgagagatttcagactatt

SEQ ID NO: 164400 - DNA, 25 bp, Homo sapien
ggggttcatcgttggattcacgagt

SEQ ID NO: 164401 - DNA, 25 bp, Homo sapien
gatcttgttggggttcatcgttgga

SEQ ID NO: 164402 - DNA, 25 bp, Homo sapien
tgatagatcttgttggggttcatcg

SEQ ID NO: 164403 - DNA, 25 bp, Homo sapien
tgttggggttcatcgttggattcac

SEQ ID NO: 164404 - DNA, 25 bp, Homo sapien
agattgtgatgtttagcagtgtgac

SEQ ID NO: 164405 - DNA, 25 bp, Homo sapien
tgatgtttagcagtgtgactaggac

SEQ ID NO: 164406 - DNA, 25 bp, Homo sapien
gtttagcagtgtgactaggacgcct

SEQ ID NO: 164407 - DNA, 25 bp, Homo sapien
tttaagattgtgatgtttagcagtg

SEQ ID NO: 164408 - DNA, 25 bp, Homo sapien
gacgcctctgtgcacggattttaag

SEQ ID NO: 164409 - DNA, 25 bp, Homo sapien
cttcagcagtgtgactaggacgcct

SEQ ID NO: 164410 - DNA, 25 bp, Homo sapien
ctttagcagtgtgactaggacgcct

SEQ ID NO: 164411 - DNA, 25 bp, Homo sapien
tctttagcagtgtgactaggacgcc

SEQ ID NO: 164412 - DNA, 25 bp, Homo sapien
ttttaagactgtgatcttcagcagt

SEQ ID NO: 164413 - DNA, 25 bp, Homo sapien
aagctttcagggtattttcatggac

SEQ ID NO: 164414 - DNA, 25 bp, Homo sapien
tataaatatatctagtgtcagatcg

SEQ ID NO: 164415 - DNA, 25 bp, Homo sapien
aaatatatctagtgtcagatcgtga

SEQ ID NO: 164416 - DNA, 25 bp, Homo sapien
ttcatctggtacttgaaagctttca

SEQ ID NO: 164417 - DNA, 25 bp, Homo sapien
gccccagatccaagttctacttcac

SEQ ID NO: 164418 - DNA, 25 bp, Homo sapien
tgccccagatccaagttctacttca

SEQ ID NO: 164419 - DNA, 25 bp, Homo sapien
cctcaggttgaatccttttttgaga

SEQ ID NO: 164420 - DNA, 25 bp, Homo sapien
attgggggtcccttgtatatgagga

SEQ ID NO: 164421 - DNA, 25 bp, Homo sapien
tcctcaggttgaatccttttttgag

SEQ ID NO: 164422 - DNA, 25 bp, Homo sapien
tcccttgtatatgaggaggcatttc

SEQ ID NO: 164423 - DNA, 25 bp, Homo sapien
aaccaacattacaatactactagct

SEQ ID NO: 164424 - DNA, 25 bp, Homo sapien
caacattacaatactactagctttt

SEQ ID NO: 164425 - DNA, 25 bp, Homo sapien
cacaaaccaacattacaatactact

SEQ ID NO: 164426 - DNA, 25 bp, Homo sapien
caaaccaacattacaatactactag

SEQ ID NO: 164427 - DNA, 25 bp, Homo sapien
tctgatagtagaatagccaccccga

SEQ ID NO: 164428 - DNA, 25 bp, Homo sapien
ggaaaacatcccatctacatttgag

SEQ ID NO: 164429 - DNA, 25 bp, Homo sapien
taccctttggttgactaagagtata

SEQ ID NO: 164430 - DNA, 25 bp, Homo sapien
tcctgttgtggttgcaataagaaca

SEQ ID NO: 164431 - DNA, 25 bp, Homo sapien
gctaaaatttccagcactgtgttga

SEQ ID NO: 164432 - DNA, 25 bp, Homo sapien
tgaactgaagtgacaaaagcaggca

SEQ ID NO: 164433 - DNA, 25 bp, Homo sapien
tccagcactgtgttgaactgaagtg

SEQ ID NO: 164434 - DNA, 25 bp, Homo sapien
tttcatgtattagttcaaacaattt

SEQ ID NO: 164435 - DNA, 25 bp, Homo sapien
ccacagtgatagattccgtcttccc

SEQ ID NO: 164436 - DNA, 25 bp, Homo sapien
tccctggcaatgaagatacaagttg

SEQ ID NO: 164437 - DNA, 25 bp, Homo sapien
tcagcagcttcaccacagtgataga

SEQ ID NO: 164438 - DNA, 25 bp, Homo sapien
agttgaaaaactgcaaccctgccag

SEQ ID NO: 164439 - DNA, 25 bp, Homo sapien
taccagtgacatcaaatctccgaag

SEQ ID NO: 164440 - DNA, 25 bp, Homo sapien
ccaagccagagctgtaatgctattt

SEQ ID NO: 164441 - DNA, 25 bp, Homo sapien
ctagatccagagaagaataaacaat

SEQ ID NO: 164442 - DNA, 25 bp, Homo sapien
gtaatgctatttttgtgaataccag

SEQ ID NO: 164443 - DNA, 25 bp, Homo sapien
ttttttgagcaacatggctgtttat

SEQ ID NO: 164444 - DNA, 25 bp, Homo sapien
tttttttgagcaacatggctgttta

SEQ ID NO: 164445 - DNA, 25 bp, Homo sapien
ttttttttttgagcaacatggctgt

SEQ ID NO: 164446 - DNA, 25 bp, Homo sapien
tttttttttgagcaacatggctgtt

SEQ ID NO: 164447 - DNA, 25 bp, Homo sapien
ctggctataatccagctgcacaatg

SEQ ID NO: 164448 - DNA, 25 bp, Homo sapien
tttctggctataatccagctgcaca

SEQ ID NO: 164449 - DNA, 25 bp, Homo sapien
ctttctggctataatccagctgcac

SEQ ID NO: 164450 - DNA, 25 bp, Homo sapien
tctggctataatccagctgcacaat

SEQ ID NO: 164451 - DNA, 25 bp, Homo sapien
cgaggtcctgaacaccaggtggact

SEQ ID NO: 164452 - DNA, 25 bp, Homo sapien
tgggcatgagaaggcgaggtcctga

SEQ ID NO: 164453 - DNA, 25 bp, Homo sapien
gaaggcgaggtcctgaacaccaggt

SEQ ID NO: 164454 - DNA, 25 bp, Homo sapien
tgagaaggcgaggtcctgaacacca

SEQ ID NO: 164455 - DNA, 25 bp, Homo sapien
cgggccgtgacgcatacaaggttag

SEQ ID NO: 164456 - DNA, 25 bp, Homo sapien
cgcgggtgcagttcaaaaggcttga

SEQ ID NO: 164457 - DNA, 25 bp, Homo sapien
ggacatcagccttccatagccggag

SEQ ID NO: 164458 - DNA, 25 bp, Homo sapien
gataaacgtggcttgaacagtcccg

SEQ ID NO: 164459 - DNA, 25 bp, Homo sapien
tacggctgataataattcataaaac

SEQ ID NO: 164460 - DNA, 25 bp, Homo sapien
ccagtgttaccaggtacggctgata

SEQ ID NO: 164461 - DNA, 25 bp, Homo sapien
taccaggtacggctgataataattc

SEQ ID NO: 164462 - DNA, 25 bp, Homo sapien
tctttctgccaaaccagtgttacca

SEQ ID NO: 164463 - DNA, 25 bp, Homo sapien
attttctgtgcacgaaacagacaca

SEQ ID NO: 164464 - DNA, 25 bp, Homo sapien
cttataatgttcctatctcctttca

SEQ ID NO: 164465 - DNA, 25 bp, Homo sapien
ggcctgcttgaaattcttataatgt

SEQ ID NO: 164466 - DNA, 25 bp, Homo sapien
tgttgatgttaatccttcaggcctg

SEQ ID NO: 164467 - DNA, 25 bp, Homo sapien
ctagagctccctgtccaataggcag

SEQ ID NO: 164468 - DNA, 25 bp, Homo sapien
ctcagctgcacttgctatattgcaa

SEQ ID NO: 164469 - DNA, 25 bp, Homo sapien
taatggcagatcttgcctagagctc

SEQ ID NO: 164470 - DNA, 25 bp, Homo sapien
ggcagccaccagctacttgtaagta

SEQ ID NO: 164471 - DNA, 25 bp, Homo sapien
acgtggacacgctctgagcatccag

SEQ ID NO: 164472 - DNA, 25 bp, Homo sapien
tgcacgtggacacgctctgagcatc

SEQ ID NO: 164473 - DNA, 25 bp, Homo sapien
cacgtggacacgctctgagcatcca

SEQ ID NO: 164474 - DNA, 25 bp, Homo sapien
ctgcacgtggacacgctctgagcat

SEQ ID NO: 164475 - DNA, 25 bp, Homo sapien
tttgataggcttcacgacaagctcc

SEQ ID NO: 164476 - DNA, 25 bp, Homo sapien
tgatggcgttgaatctctgtgacag

SEQ ID NO: 164477 - DNA, 25 bp, Homo sapien
ccggagccgctgtcggtggagttga

SEQ ID NO: 164478 - DNA, 25 bp, Homo sapien
tcctggtcaaagtcctctgagctga

SEQ ID NO: 164479 - DNA, 25 bp, Homo sapien
attcggagcagggtgtcgattccag

SEQ ID NO: 164480 - DNA, 25 bp, Homo sapien
gaaattcggagcagggtgtcgattc

SEQ ID NO: 164481 - DNA, 25 bp, Homo sapien
cggagcagggtgtcgattccaggga

SEQ ID NO: 164482 - DNA, 25 bp, Homo sapien
agcagggtgtcgattccagggagct

SEQ ID NO: 164483 - DNA, 25 bp, Homo sapien
cacgctactgcccaggacacttgag

SEQ ID NO: 164484 - DNA, 25 bp, Homo sapien
ttaactgatccacgctactgcccag

SEQ ID NO: 164485 - DNA, 25 bp, Homo sapien
tgcacttaactgatccacgctactg

SEQ ID NO: 164486 - DNA, 25 bp, Homo sapien
cgctactgcccaggacacttgaggt

SEQ ID NO: 164487 - DNA, 25 bp, Homo sapien
ggctcatctccgagtcccgtgacat

SEQ ID NO: 164488 - DNA, 25 bp, Homo sapien
catcttcctcagccagagaatcagg

SEQ ID NO: 164489 - DNA, 25 bp, Homo sapien
atcatctgcaggacacggctcatct

SEQ ID NO: 164490 - DNA, 25 bp, Homo sapien
gaatcaggcattgatcctgacacct

SEQ ID NO: 164491 - DNA, 25 bp, Homo sapien
ccaagacacgttcagaaatgggtat

SEQ ID NO: 164492 - DNA, 25 bp, Homo sapien
ggccaatgggttggatgtcttcccc

SEQ ID NO: 164493 - DNA, 25 bp, Homo sapien
ctgatcccgtggaggctgctcaagc

SEQ ID NO: 164494 - DNA, 25 bp, Homo sapien
tccatgctggttaggatgtcctgct

SEQ ID NO: 164495 - DNA, 25 bp, Homo sapien
gcaactaggtccgagctctgtcaca

SEQ ID NO: 164496 - DNA, 25 bp, Homo sapien
atgaagaaggaagcccgtgggcata

SEQ ID NO: 164497 - DNA, 25 bp, Homo sapien
tgctgggagcaactaggtccgagct

SEQ ID NO: 164498 - DNA, 25 bp, Homo sapien
gaagcccgtgggcatagatgtcctc

SEQ ID NO: 164499 - DNA, 25 bp, Homo sapien
cttggagccactgttcggaggttga

SEQ ID NO: 164500 - DNA, 25 bp, Homo sapien
ccactgttcggaggttgaggagaca

SEQ ID NO: 164501 - DNA, 25 bp, Homo sapien
tcctgtacagctcgcaggggagcct

SEQ ID NO: 164502 - DNA, 25 bp, Homo sapien
agccttggagccactgttcggaggt

SEQ ID NO: 164503 - DNA, 25 bp, Homo sapien
tacttccacaccgaacctccaaata

SEQ ID NO: 164504 - DNA, 25 bp, Homo sapien
catggcaagtcttacttccacaccg

SEQ ID NO: 164505 - DNA, 25 bp, Homo sapien
tcttacttccacaccgaacctccaa

SEQ ID NO: 164506 - DNA, 25 bp, Homo sapien
ggcaagtcttacttccacaccgaac

SEQ ID NO: 164507 - DNA, 25 bp, Homo sapien
tgaggatgccatagccgggacccga

SEQ ID NO: 164508 - DNA, 25 bp, Homo sapien
tgtagtccaggcaccagatatactt

SEQ ID NO: 164509 - DNA, 25 bp, Homo sapien
gcgctgcagaacaggccgcctttgt

SEQ ID NO: 164510 - DNA, 25 bp, Homo sapien
tctcggagaccaccaagctgaggat

SEQ ID NO: 164511 - DNA, 25 bp, Homo sapien
gtgtcatcgctcagggccacaaaca

SEQ ID NO: 164512 - DNA, 25 bp, Homo sapien
agcaaaagcccggttagatttctgt

SEQ ID NO: 164513 - DNA, 25 bp, Homo sapien
cagggcttcgtaccagtgccgcttc

SEQ ID NO: 164514 - DNA, 25 bp, Homo sapien
ctgcaagtataggtccccactggtc

SEQ ID NO: 164515 - DNA, 25 bp, Homo sapien
cattgtaggatacgtgatatgcggt

SEQ ID NO: 164516 - DNA, 25 bp, Homo sapien
tgttactagcaaagcagggtgcagc

SEQ ID NO: 164517 - DNA, 25 bp, Homo sapien
ggttggccataggagaataagattc

SEQ ID NO: 164518 - DNA, 25 bp, Homo sapien
ggcctctaagcgtggcccgcggtta

SEQ ID NO: 164519 - DNA, 25 bp, Homo sapien
taagtatataggagccgggctttga

SEQ ID NO: 164520 - DNA, 25 bp, Homo sapien
ctggcccacgggtaagtaagtatat

SEQ ID NO: 164521 - DNA, 25 bp, Homo sapien
cacgggtaagtaagtatataggagc

SEQ ID NO: 164522 - DNA, 25 bp, Homo sapien
ccgggctttgatatggctgaaaaaa

SEQ ID NO: 164523 - DNA, 25 bp, Homo sapien
tgaactgctatttagagcaaattat

SEQ ID NO: 164524 - DNA, 25 bp, Homo sapien
taataagcaagtcccactgtgccct

SEQ ID NO: 164525 - DNA, 25 bp, Homo sapien
tggcctctggacaactgacgataac

SEQ ID NO: 164526 - DNA, 25 bp, Homo sapien
gatctttacataaatccaacgtggc

SEQ ID NO: 164527 - DNA, 25 bp, Homo sapien
cattaaacgcctggaagactgatct

SEQ ID NO: 164528 - DNA, 25 bp, Homo sapien
caccggcaggacttcttacacgaca

SEQ ID NO: 164529 - DNA, 25 bp, Homo sapien
ccagaggttcttacacagctaggag

SEQ ID NO: 164530 - DNA, 25 bp, Homo sapien
tatggcctatgaagccagcatggct

SEQ ID NO: 164531 - DNA, 25 bp, Homo sapien
taaactaggtgggaatcaccggcag

SEQ ID NO: 164532 - DNA, 25 bp, Homo sapien
taggcctgcaattaggtctcagtac

SEQ ID NO: 164533 - DNA, 25 bp, Homo sapien
tgtattccttgaccttaggcctgca

SEQ ID NO: 164534 - DNA, 25 bp, Homo sapien
caaatatgctccgtgactaatcaca

SEQ ID NO: 164535 - DNA, 25 bp, Homo sapien
aactgtcgcctacaaccctgtattc

SEQ ID NO: 164536 - DNA, 25 bp, Homo sapien
agatgaaatctgaggtctgtcaaac

SEQ ID NO: 164537 - DNA, 25 bp, Homo sapien
tgaaatctgaggtctgtcaaactgc

SEQ ID NO: 164538 - DNA, 25 bp, Homo sapien
gaaatctgaggtctgtcaaactgca

SEQ ID NO: 164539 - DNA, 25 bp, Homo sapien
gatgaaatctgaggtctgtcaaact

SEQ ID NO: 164540 - DNA, 25 bp, Homo sapien
tatattcttttatgatgagtgcttt

SEQ ID NO: 164541 - DNA, 25 bp, Homo sapien
cacaccacattgttccgggctgtga

SEQ ID NO: 164542 - DNA, 25 bp, Homo sapien
cctttacggctctggcacaagggcg

SEQ ID NO: 164543 - DNA, 25 bp, Homo sapien
gccttccggacagaagctgctcacg

SEQ ID NO: 164544 - DNA, 25 bp, Homo sapien
cagcgggtagggacagtccaccttt

SEQ ID NO: 164545 - DNA, 25 bp, Homo sapien
tgtgtctggactgcggacatccagg

SEQ ID NO: 164546 - DNA, 25 bp, Homo sapien
agagtgcccagtgtgtctggactgc

SEQ ID NO: 164547 - DNA, 25 bp, Homo sapien
tggactgcggacatccagggtctcc

SEQ ID NO: 164548 - DNA, 25 bp, Homo sapien
acatccagggtctcccggcaggcgt

SEQ ID NO: 164549 - DNA, 25 bp, Homo sapien
gagtctgctgatccccgagcgttat

SEQ ID NO: 164550 - DNA, 25 bp, Homo sapien
tatgcagacgggttctaaagcttgc

SEQ ID NO: 164551 - DNA, 25 bp, Homo sapien
taatgccagttctgaaccacaggtt

SEQ ID NO: 164552 - DNA, 25 bp, Homo sapien
gccaccaatggtcgtcatctccttg

SEQ ID NO: 164553 - DNA, 25 bp, Homo sapien
cattcttgcccgaggagatccagac

SEQ ID NO: 164554 - DNA, 25 bp, Homo sapien
tatcgtctgaaataagctgcactgg

SEQ ID NO: 164555 - DNA, 25 bp, Homo sapien
cgctgttattgaccccgagaaggct

SEQ ID NO: 164556 - DNA, 25 bp, Homo sapien
tatgagacttcccttagcgacgtgg

SEQ ID NO: 164557 - DNA, 25 bp, Homo sapien
cagtccagggtcgtggaggccatgc

SEQ ID NO: 164558 - DNA, 25 bp, Homo sapien
agccaacacaaaggcccattttgta

SEQ ID NO: 164559 - DNA, 25 bp, Homo sapien
ttccttcgtgggagctgcagaagcc

SEQ ID NO: 164560 - DNA, 25 bp, Homo sapien
cccacggggaaccacatgattccag

SEQ ID NO: 164561 - DNA, 25 bp, Homo sapien
cagaagctgtcccacggggaaccac

SEQ ID NO: 164562 - DNA, 25 bp, Homo sapien
tcttggagagcgtcctgatgaacac

SEQ ID NO: 164563 - DNA, 25 bp, Homo sapien
cgcatctcggcttcgggaggcagct

SEQ ID NO: 164564 - DNA, 25 bp, Homo sapien
ctctgggcgctgacgctgcacaggt

SEQ ID NO: 164565 - DNA, 25 bp, Homo sapien
agcctggtccagtgcatgcccgtgg

SEQ ID NO: 164566 - DNA, 25 bp, Homo sapien
gcagcgagtggccccttgacctgag

SEQ ID NO: 164567 - DNA, 25 bp, Homo sapien
tgaggacgcacaccctcctcgggtt

SEQ ID NO: 164568 - DNA, 25 bp, Homo sapien
tgcatcaccagtatccttcaagccg

SEQ ID NO: 164569 - DNA, 25 bp, Homo sapien
aagccgctcgcagcgagtggcccct

SEQ ID NO: 164570 - DNA, 25 bp, Homo sapien
caggtcataaagctatgttccatat

SEQ ID NO: 164571 - DNA, 25 bp, Homo sapien
tcaggtcataaagctatgttccata

SEQ ID NO: 164572 - DNA, 25 bp, Homo sapien
gaagcaaatgggtggcatgaacatg

SEQ ID NO: 164573 - DNA, 25 bp, Homo sapien
gaaatgacaggtagaagcacagtgc

SEQ ID NO: 164574 - DNA, 25 bp, Homo sapien
gggaggtgcgatctcaactgagtcc

SEQ ID NO: 164575 - DNA, 25 bp, Homo sapien
cagcccacggaaggaatgctaggcc

SEQ ID NO: 164576 - DNA, 25 bp, Homo sapien
cagtttccccaatggagatcctgtg

SEQ ID NO: 164577 - DNA, 25 bp, Homo sapien
ccgtgtctgcgggttctggctgccc

SEQ ID NO: 164578 - DNA, 25 bp, Homo sapien
ccacggcagccattctaggagaggt

SEQ ID NO: 164579 - DNA, 25 bp, Homo sapien
gaggagttctctgcacattgtaggt

SEQ ID NO: 164580 - DNA, 25 bp, Homo sapien
gaggctgagtccctacacggaagta

SEQ ID NO: 164581 - DNA, 25 bp, Homo sapien
ctggacaggtggctcaatcattatc

SEQ ID NO: 164582 - DNA, 25 bp, Homo sapien
tgctgatttccacatgccaagcttg

SEQ ID NO: 164583 - DNA, 25 bp, Homo sapien
catgagactgggattgagaggctga

SEQ ID NO: 164584 - DNA, 25 bp, Homo sapien
gatgaacgagagtgtgtagaccctg

SEQ ID NO: 164585 - DNA, 25 bp, Homo sapien
gaggctgtgcagatcctttttccca

SEQ ID NO: 164586 - DNA, 25 bp, Homo sapien
caaatcccgaattccagttgtgatg

SEQ ID NO: 164587 - DNA, 25 bp, Homo sapien
tagaggttccaatatataggcagat

SEQ ID NO: 164588 - DNA, 25 bp, Homo sapien
cgttctccatgtaacccttttgcca

SEQ ID NO: 164589 - DNA, 25 bp, Homo sapien
aacccttttgccaggtacctgtgtg

SEQ ID NO: 164590 - DNA, 25 bp, Homo sapien
atgtaacccttttgccaggtacctg

SEQ ID NO: 164591 - DNA, 25 bp, Homo sapien
tccatgtaacccttttgccaggtac

SEQ ID NO: 164592 - DNA, 25 bp, Homo sapien
tgaaacttcacaccaactatgcttg

SEQ ID NO: 164593 - DNA, 25 bp, Homo sapien
actatgcttgcgttagaggtacctc

SEQ ID NO: 164594 - DNA, 25 bp, Homo sapien
taagcacagtaagaacagacacctc

SEQ ID NO: 164595 - DNA, 25 bp, Homo sapien
gaggtacctctaacacagacagaaa

SEQ ID NO: 164596 - DNA, 25 bp, Homo sapien
taagctccagtaggtaggaccagag

SEQ ID NO: 164597 - DNA, 25 bp, Homo sapien
tatgggtgcatgtgatctgtccagc

SEQ ID NO: 164598 - DNA, 25 bp, Homo sapien
ggcaaaacactcctgggcatctgac

SEQ ID NO: 164599 - DNA, 25 bp, Homo sapien
cttcctcaaacatggtctgaccagg

SEQ ID NO: 164600 - DNA, 25 bp, Homo sapien
tcatttacgtgaggccacttgaagg

SEQ ID NO: 164601 - DNA, 25 bp, Homo sapien
cagacattgcaattttaatccctac

SEQ ID NO: 164602 - DNA, 25 bp, Homo sapien
cattttccagcctgttttccctctg

SEQ ID NO: 164603 - DNA, 25 bp, Homo sapien
ccagtgatatttttcagctcagaca

SEQ ID NO: 164604 - DNA, 25 bp, Homo sapien
cagcagttttccagcagcgcctgtg

SEQ ID NO: 164605 - DNA, 25 bp, Homo sapien
ggcccgaagaccagcagttttccag

SEQ ID NO: 164606 - DNA, 25 bp, Homo sapien
ccgaagaccagcagttttccagcag

SEQ ID NO: 164607 - DNA, 25 bp, Homo sapien
ctcactggcccgaagaccagcagtt

SEQ ID NO: 164608 - DNA, 25 bp, Homo sapien
tgggattatgggtgcccacctccaa

SEQ ID NO: 164609 - DNA, 25 bp, Homo sapien
caccgcacccgtccgagctagtttt

SEQ ID NO: 164610 - DNA, 25 bp, Homo sapien
ccaccgcacccgtccgagctagttt

SEQ ID NO: 164611 - DNA, 25 bp, Homo sapien
gattatgggtgcccacctccaagcc

SEQ ID NO: 164612 - DNA, 25 bp, Homo sapien
tccagaatgtcaggtgggccagact

SEQ ID NO: 164613 - DNA, 25 bp, Homo sapien
ctcacgggggagatggtcacttgtc

SEQ ID NO: 164614 - DNA, 25 bp, Homo sapien
aaaggacaggagacttccggaactg

SEQ ID NO: 164615 - DNA, 25 bp, Homo sapien
acgtcctgcccctagtgccagtctc

SEQ ID NO: 164616 - DNA, 25 bp, Homo sapien
ggaatggacgctgaccaagctgacc

SEQ ID NO: 164617 - DNA, 25 bp, Homo sapien
tgcacgttccacctgctgtcaagca

SEQ ID NO: 164618 - DNA, 25 bp, Homo sapien
tcggtgatcccggtccgcacgtgca

SEQ ID NO: 164619 - DNA, 25 bp, Homo sapien
caggcatctcctcggtgatcccggt

SEQ ID NO: 164620 - DNA, 25 bp, Homo sapien
gggttcttgtctgtgacgccgtacc

SEQ ID NO: 164621 - DNA, 25 bp, Homo sapien
tctgtgacgccgtaccgccgggcga

SEQ ID NO: 164622 - DNA, 25 bp, Homo sapien
gacagcgggcccacacggtcctggt

SEQ ID NO: 164623 - DNA, 25 bp, Homo sapien
ccgggcgaggtctccgtttggacag

SEQ ID NO: 164624 - DNA, 25 bp, Homo sapien
ggcttctttgagagccccccgacat

SEQ ID NO: 164625 - DNA, 25 bp, Homo sapien
gtggggtcggcttctttgagagccc

SEQ ID NO: 164626 - DNA, 25 bp, Homo sapien
agccccccgacatcgtccacaggag

SEQ ID NO: 164627 - DNA, 25 bp, Homo sapien
tgctttgagagattggagcccagtg

SEQ ID NO: 164628 - DNA, 25 bp, Homo sapien
tgcgagtggctgaacgtctttgtca

SEQ ID NO: 164629 - DNA, 25 bp, Homo sapien
gctgaacgtctttgtcagccgttgg

SEQ ID NO: 164630 - DNA, 25 bp, Homo sapien
ccgtgcgagtggctgaacgtctttg

SEQ ID NO: 164631 - DNA, 25 bp, Homo sapien
tctttgtcagccgttggaggaggta

SEQ ID NO: 164632 - DNA, 25 bp, Homo sapien
tatctgtggatgagaccaggacggc

SEQ ID NO: 164633 - DNA, 25 bp, Homo sapien
cactgtcctgagctaggaggcgcca

SEQ ID NO: 164634 - DNA, 25 bp, Homo sapien
cacgtgggtaatcggagtgcatgca

SEQ ID NO: 164635 - DNA, 25 bp, Homo sapien
tgaaagtaagtgtgcgggtccaacc

SEQ ID NO: 164636 - DNA, 25 bp, Homo sapien
tggttttaggatgtccgccagcagc

SEQ ID NO: 164637 - DNA, 25 bp, Homo sapien
tatgcagatttgtaatacaacaaca

SEQ ID NO: 164638 - DNA, 25 bp, Homo sapien
gacatttctaagtgagcgacccttg

SEQ ID NO: 164639 - DNA, 25 bp, Homo sapien
tagtagactcgtcctctgaggatgc

SEQ ID NO: 164640 - DNA, 25 bp, Homo sapien
tgaccgccctgccagtcaagtctgt

SEQ ID NO: 164641 - DNA, 25 bp, Homo sapien
aagtgtcaacccataccccgcagaa

SEQ ID NO: 164642 - DNA, 25 bp, Homo sapien
tctgtgcggggatgcctgcccctct

SEQ ID NO: 164643 - DNA, 25 bp, Homo sapien
acccataccccgcagaaggcatggg

SEQ ID NO: 164644 - DNA, 25 bp, Homo sapien
agccgtccatagaggcactggtttc

SEQ ID NO: 164645 - DNA, 25 bp, Homo sapien
tgtggcagggcggcctagccctcac

SEQ ID NO: 164646 - DNA, 25 bp, Homo sapien
ggcggcctagccctcacacgcagat

SEQ ID NO: 164647 - DNA, 25 bp, Homo sapien
cacagcagccgtccatagaggcact

SEQ ID NO: 164648 - DNA, 25 bp, Homo sapien
aacatattttatcaccctccacctg

SEQ ID NO: 164649 - DNA, 25 bp, Homo sapien
ctgggtcctgtcagagaacatattt

SEQ ID NO: 164650 - DNA, 25 bp, Homo sapien
gagaacatattttatcaccctccac

SEQ ID NO: 164651 - DNA, 25 bp, Homo sapien
atattttatcaccctccacctgcgg

SEQ ID NO: 164652 - DNA, 25 bp, Homo sapien
tttaaaagcatcacctagacgcggg

SEQ ID NO: 164653 - DNA, 25 bp, Homo sapien
tagacgcgggtttaattgcactaca

SEQ ID NO: 164654 - DNA, 25 bp, Homo sapien
gagagctttgccatccgtgaggcgc

SEQ ID NO: 164655 - DNA, 25 bp, Homo sapien
tggaaaacctccacctatgtggctg

SEQ ID NO: 164656 - DNA, 25 bp, Homo sapien
tgctgacgcactctccctgtggtgg

SEQ ID NO: 164657 - DNA, 25 bp, Homo sapien
gctaatgagacttccccttgcaggg

SEQ ID NO: 164658 - DNA, 25 bp, Homo sapien
cattcaatagagtggcccctgctgg

SEQ ID NO: 164659 - DNA, 25 bp, Homo sapien
gagaagcacattgggcacagtcatg

SEQ ID NO: 164660 - DNA, 25 bp, Homo sapien
agctttatgaatttgcgagtcatcc

SEQ ID NO: 164661 - DNA, 25 bp, Homo sapien
gactcgaagtgctcctcctattggt

SEQ ID NO: 164662 - DNA, 25 bp, Homo sapien
gaccagctgctgatcacaagtagag

SEQ ID NO: 164663 - DNA, 25 bp, Homo sapien
gaatttgctcacgttaacatggctg

SEQ ID NO: 164664 - DNA, 25 bp, Homo sapien
aagggcccttacactcgactcgaag

SEQ ID NO: 164665 - DNA, 25 bp, Homo sapien
tgacccagtcagtgtgtgtggacgc

SEQ ID NO: 164666 - DNA, 25 bp, Homo sapien
ccttattcacgagccgcggccgtga

SEQ ID NO: 164667 - DNA, 25 bp, Homo sapien
ggtcagggcctaagctcgattgcct

SEQ ID NO: 164668 - DNA, 25 bp, Homo sapien
gttactgccagtgatagtgacccag

SEQ ID NO: 164669 - DNA, 25 bp, Homo sapien
gacgcccggcctgtggcccccgcgc

SEQ ID NO: 164670 - DNA, 25 bp, Homo sapien
cccgctcgcccgcgggggacagcgc

SEQ ID NO: 164671 - DNA, 25 bp, Homo sapien
tttgcccgctcgcccgcgggggaca

SEQ ID NO: 164672 - DNA, 25 bp, Homo sapien
tgcccgctcgcccgcgggggacagc

SEQ ID NO: 164673 - DNA, 25 bp, Homo sapien
gcactggccgctgtcacccttggga

SEQ ID NO: 164674 - DNA, 25 bp, Homo sapien
aactctctccgaccatggcgcagtt

SEQ ID NO: 164675 - DNA, 25 bp, Homo sapien
gcctcgggcccggaaagtgatcttg

SEQ ID NO: 164676 - DNA, 25 bp, Homo sapien
agtgatcttgcggacgcagggaccc

SEQ ID NO: 164677 - DNA, 25 bp, Homo sapien
cctggacagcactggaccctcagtg

SEQ ID NO: 164678 - DNA, 25 bp, Homo sapien
ctggacagcactggaccctcagtgg

SEQ ID NO: 164679 - DNA, 25 bp, Homo sapien
acctggacagcactggaccctcagt

SEQ ID NO: 164680 - DNA, 25 bp, Homo sapien
caggccctcagatccctgctggaca

SEQ ID NO: 164681 - DNA, 25 bp, Homo sapien
gccctcagatccctgctggacatac

SEQ ID NO: 164682 - DNA, 25 bp, Homo sapien
aggccctcagatccctgctggacat

SEQ ID NO: 164683 - DNA, 25 bp, Homo sapien
tccaggccctcagatccctgctgga

SEQ ID NO: 164684 - DNA, 25 bp, Homo sapien
tcgtagctgaaatgcctcctctctc

SEQ ID NO: 164685 - DNA, 25 bp, Homo sapien
tatttcctgtcgtagctgaaatgcc

SEQ ID NO: 164686 - DNA, 25 bp, Homo sapien
tctaggacttattctcccgtctcac

SEQ ID NO: 164687 - DNA, 25 bp, Homo sapien
ttggtgaacgccctatgcaaatgaa

SEQ ID NO: 164688 - DNA, 25 bp, Homo sapien
tacagtcgactgcacagagtgggag

SEQ ID NO: 164689 - DNA, 25 bp, Homo sapien
gccggagcacgttggctcaagagcc

SEQ ID NO: 164690 - DNA, 25 bp, Homo sapien
aacaaaagtacagtcgactgcacag

SEQ ID NO: 164691 - DNA, 25 bp, Homo sapien
ttccattggttatttggtgtgcacc

SEQ ID NO: 164692 - DNA, 25 bp, Homo sapien
gtcagggatgtggcacagaaggctg

SEQ ID NO: 164693 - DNA, 25 bp, Homo sapien
tccttggatttacatcggccagagc

SEQ ID NO: 164694 - DNA, 25 bp, Homo sapien
ccttggatttacatcggccagagca

SEQ ID NO: 164695 - DNA, 25 bp, Homo sapien
agctccttggatttacatcggccag

SEQ ID NO: 164696 - DNA, 25 bp, Homo sapien
actgatccaatatcagctcccatgg

SEQ ID NO: 164697 - DNA, 25 bp, Homo sapien
ccaatatcagctcccatgggggaca

SEQ ID NO: 164698 - DNA, 25 bp, Homo sapien
tgaactgatccaatatcagctccca

SEQ ID NO: 164699 - DNA, 25 bp, Homo sapien
ctgatccaatatcagctcccatggg

SEQ ID NO: 164700 - DNA, 25 bp, Homo sapien
tctgggggctgggtggatacatgca

SEQ ID NO: 164701 - DNA, 25 bp, Homo sapien
gccgggcagagtggtccagtgtttg

SEQ ID NO: 164702 - DNA, 25 bp, Homo sapien
ctgtaaaatgcgtcaaggattcccc

SEQ ID NO: 164703 - DNA, 25 bp, Homo sapien
tcctggtctccggttaaagcactgc

SEQ ID NO: 164704 - DNA, 25 bp, Homo sapien
cccgaccctatgtgccgtctgtaaa

SEQ ID NO: 164705 - DNA, 25 bp, Homo sapien
caggctcctggtctccggttaaagc

SEQ ID NO: 164706 - DNA, 25 bp, Homo sapien
tctgtgacacatgtcacccttggaa

SEQ ID NO: 164707 - DNA, 25 bp, Homo sapien
tgggaatctctggatagccccttcc

SEQ ID NO: 164708 - DNA, 25 bp, Homo sapien
tgtcacccttggaaatggctcaggt

SEQ ID NO: 164709 - DNA, 25 bp, Homo sapien
aggtctccccgtgtctcctactggg

SEQ ID NO: 164710 - DNA, 25 bp, Homo sapien
tttctggatgtcttgacattgaagg

SEQ ID NO: 164711 - DNA, 25 bp, Homo sapien
tctggatgtcttgacattgaaggag

SEQ ID NO: 164712 - DNA, 25 bp, Homo sapien
gtgcagacttgggtgctgcgagaga

SEQ ID NO: 164713 - DNA, 25 bp, Homo sapien
gacttgggtgctgcgagagatcatt

SEQ ID NO: 164714 - DNA, 25 bp, Homo sapien
catcccagggcaggttcgtagggca

SEQ ID NO: 164715 - DNA, 25 bp, Homo sapien
gcatcccagggcaggttcgtagggc

SEQ ID NO: 164716 - DNA, 25 bp, Homo sapien
atcccagggcaggttcgtagggcat

SEQ ID NO: 164717 - DNA, 25 bp, Homo sapien
ggcatcccagggcaggttcgtaggg

SEQ ID NO: 164718 - DNA, 25 bp, Homo sapien
ccagccagggactgtgctccagaca

SEQ ID NO: 164719 - DNA, 25 bp, Homo sapien
gttctggaaatacaccagtgccaaa

SEQ ID NO: 164720 - DNA, 25 bp, Homo sapien
ttggttctggaaatacaccagtgcc

SEQ ID NO: 164721 - DNA, 25 bp, Homo sapien
tctggaaatacaccagtgccaaaat

SEQ ID NO: 164722 - DNA, 25 bp, Homo sapien
tggaaatacaccagtgccaaaatca

SEQ ID NO: 164723 - DNA, 25 bp, Homo sapien
aactcgcaacgctgaggcgggagaa

SEQ ID NO: 164724 - DNA, 25 bp, Homo sapien
tctggaacaagtgggagttcacctt

SEQ ID NO: 164725 - DNA, 25 bp, Homo sapien
tagcctgtgtagtgacacgtacctg

SEQ ID NO: 164726 - DNA, 25 bp, Homo sapien
caaccaagtggtctcagagtgggtg

SEQ ID NO: 164727 - DNA, 25 bp, Homo sapien
gctgggacctgtgcgcaagtactgc

SEQ ID NO: 164728 - DNA, 25 bp, Homo sapien
tgcgcaagtactgcgcttgggctgc

SEQ ID NO: 164729 - DNA, 25 bp, Homo sapien
tgaaagaaaagctcatcgcaggagt

SEQ ID NO: 164730 - DNA, 25 bp, Homo sapien
ggctgcgacctgtgcaatcccatag

SEQ ID NO: 164731 - DNA, 25 bp, Homo sapien
gatctgaagatgtaggaggccacca

SEQ ID NO: 164732 - DNA, 25 bp, Homo sapien
gaggttcgaagtctgcggcctttca

SEQ ID NO: 164733 - DNA, 25 bp, Homo sapien
ggaacgtcctggacaaaggcccaga

SEQ ID NO: 164734 - DNA, 25 bp, Homo sapien
gatttaagcagagctcagccgggat

SEQ ID NO: 164735 - DNA, 25 bp, Homo sapien
ggcccgggttgagtcgattcattca

SEQ ID NO: 164736 - DNA, 25 bp, Homo sapien
ctgaacacaacgtggcggcccgggt

SEQ ID NO: 164737 - DNA, 25 bp, Homo sapien
tggcctgggcgcgacaagacccaaa

SEQ ID NO: 164738 - DNA, 25 bp, Homo sapien
gattcattcatctaacgcccaggag

SEQ ID NO: 164739 - DNA, 25 bp, Homo sapien
gtggatgcgagtccacgcggttggg

SEQ ID NO: 164740 - DNA, 25 bp, Homo sapien
ggccccgccgggcacgtggatgcga

SEQ ID NO: 164741 - DNA, 25 bp, Homo sapien
ttgcctgggagcgactgtcggtgtt

SEQ ID NO: 164742 - DNA, 25 bp, Homo sapien
gggcgcagcaggtgctggttgcctg

SEQ ID NO: 164743 - DNA, 25 bp, Homo sapien
cgtcaccttcaggtcggagcacggg

SEQ ID NO: 164744 - DNA, 25 bp, Homo sapien
acgccaatgtcagcgcgagggtcgc

SEQ ID NO: 164745 - DNA, 25 bp, Homo sapien
gggtctttgtctcgcggtcactacg

SEQ ID NO: 164746 - DNA, 25 bp, Homo sapien
agaacaacccggctataagcccgag

SEQ ID NO: 164747 - DNA, 25 bp, Homo sapien
gctgcagcggacaaggtcctgtctc

SEQ ID NO: 164748 - DNA, 25 bp, Homo sapien
aggttttatccacaccatgtcccag

SEQ ID NO: 164749 - DNA, 25 bp, Homo sapien
cagggcaggaggacgcccactgtct

SEQ ID NO: 164750 - DNA, 25 bp, Homo sapien
tgtcccagctgcagcggacaaggtc

SEQ ID NO: 164751 - DNA, 25 bp, Homo sapien
ggcagctccttagacactccaagcg

SEQ ID NO: 164752 - DNA, 25 bp, Homo sapien
gatgctgggaccaatagaggtcccc

SEQ ID NO: 164753 - DNA, 25 bp, Homo sapien
acagcaggccgagagaccagaatct

SEQ ID NO: 164754 - DNA, 25 bp, Homo sapien
tcaggtgccaaggtaccaaggaaaa

SEQ ID NO: 164755 - DNA, 25 bp, Homo sapien
caccccgaggagtcctcatccccat

SEQ ID NO: 164756 - DNA, 25 bp, Homo sapien
ggccaccccgaggagtcctcatccc

SEQ ID NO: 164757 - DNA, 25 bp, Homo sapien
caaggccaccccgaggagtcctcat

SEQ ID NO: 164758 - DNA, 25 bp, Homo sapien
ccacaaggccaccccgaggagtcct

SEQ ID NO: 164759 - DNA, 25 bp, Homo sapien
gccatcctaagagttctgaacctgg

SEQ ID NO: 164760 - DNA, 25 bp, Homo sapien
taatcccaggtactttgaggcctcc

SEQ ID NO: 164761 - DNA, 25 bp, Homo sapien
caccctaaagccattcctgggaggt

SEQ ID NO: 164762 - DNA, 25 bp, Homo sapien
tttaacaccaagtgcggtggcactc

SEQ ID NO: 164763 - DNA, 25 bp, Homo sapien
gggaggcccaaacgggcagagcgcg

SEQ ID NO: 164764 - DNA, 25 bp, Homo sapien
gcagagcgcggagccgcttcaagcc

SEQ ID NO: 164765 - DNA, 25 bp, Homo sapien
cccacgggcgcgagtccgagtcggg

SEQ ID NO: 164766 - DNA, 25 bp, Homo sapien
ccagcgacgagccgagcgcaacttt

SEQ ID NO: 164767 - DNA, 25 bp, Homo sapien
gcggaggcggccgcgttgttcctcc

SEQ ID NO: 164768 - DNA, 25 bp, Homo sapien
aggcggccgcgttgttcctccctct

SEQ ID NO: 164769 - DNA, 25 bp, Homo sapien
ctggccattattgggggcggcggcg

SEQ ID NO: 164770 - DNA, 25 bp, Homo sapien
gaggcggccgcgttgttcctccctc

SEQ ID NO: 164771 - DNA, 25 bp, Homo sapien
gctgctgttgccattgggcgccgcc

SEQ ID NO: 164772 - DNA, 25 bp, Homo sapien
tgctgctgttgccattgggcgccgc

SEQ ID NO: 164773 - DNA, 25 bp, Homo sapien
tgctgttgccattgggcgccgccgc

SEQ ID NO: 164774 - DNA, 25 bp, Homo sapien
ctgctgctgttgccattgggcgccg

SEQ ID NO: 164775 - DNA, 25 bp, Homo sapien
ctggacgagcccgagctgccttcct

SEQ ID NO: 164776 - DNA, 25 bp, Homo sapien
gtcgctggacgagcccgagctgcct

SEQ ID NO: 164777 - DNA, 25 bp, Homo sapien
cctcgtcgctggacgagcccgagct

SEQ ID NO: 164778 - DNA, 25 bp, Homo sapien
tggacgagcccgagctgccttcctc

SEQ ID NO: 164779 - DNA, 25 bp, Homo sapien
tcgaagtcgggcaccaccgcctggt

SEQ ID NO: 164780 - DNA, 25 bp, Homo sapien
gtcgaagtcgggcaccaccgcctgg

SEQ ID NO: 164781 - DNA, 25 bp, Homo sapien
cgaagtcgggcaccaccgcctggta

SEQ ID NO: 164782 - DNA, 25 bp, Homo sapien
ggtcgaagtcgggcaccaccgcctg

SEQ ID NO: 164783 - DNA, 25 bp, Homo sapien
gtggccacctccgacgccacccgca

SEQ ID NO: 164784 - DNA, 25 bp, Homo sapien
gtgtggccacctccgacgccacccg

SEQ ID NO: 164785 - DNA, 25 bp, Homo sapien
ggccacctccgacgccacccgcagt

SEQ ID NO: 164786 - DNA, 25 bp, Homo sapien
aggtgtggccacctccgacgccacc

SEQ ID NO: 164787 - DNA, 25 bp, Homo sapien
cagagtgtccaagagctcacctagg

SEQ ID NO: 164788 - DNA, 25 bp, Homo sapien
taacagcttgagagcaatcgccttt

SEQ ID NO: 164789 - DNA, 25 bp, Homo sapien
gcttctacacagaatagcagccagg

SEQ ID NO: 164790 - DNA, 25 bp, Homo sapien
tgttaactccagctttacaagatgc

SEQ ID NO: 164791 - DNA, 25 bp, Homo sapien
catgcatctctaccatagttactta

SEQ ID NO: 164792 - DNA, 25 bp, Homo sapien
ctccattcatgcatctctaccatag

SEQ ID NO: 164793 - DNA, 25 bp, Homo sapien
aaagctgcctgttaagtttcacgtc

SEQ ID NO: 164794 - DNA, 25 bp, Homo sapien
tctgttcaaattctagtaaaagaga

SEQ ID NO: 164795 - DNA, 25 bp, Homo sapien
ggcaaatcacctgaggttgggagtt

SEQ ID NO: 164796 - DNA, 25 bp, Homo sapien
ggctcacgcctataatcccagcact

SEQ ID NO: 164797 - DNA, 25 bp, Homo sapien
cccagcactctgggaggccaaggca

SEQ ID NO: 164798 - DNA, 25 bp, Homo sapien
aaataccaaaattagggctgcgcag

SEQ ID NO: 164799 - DNA, 25 bp, Homo sapien
tccagcctaagaggcagaacgatat

SEQ ID NO: 164800 - DNA, 25 bp, Homo sapien
ctaagaggcagaacgatatcaagtc

SEQ ID NO: 164801 - DNA, 25 bp, Homo sapien
ggcagaacgatatcaagtctacaaa

SEQ ID NO: 164802 - DNA, 25 bp, Homo sapien
gcctaagaggcagaacgatatcaag

SEQ ID NO: 164803 - DNA, 25 bp, Homo sapien
aaagaactcacacaaatccatacaa

SEQ ID NO: 164804 - DNA, 25 bp, Homo sapien
tagtcaaataaactcaatcctcctc

SEQ ID NO: 164805 - DNA, 25 bp, Homo sapien
aaagaaagatacattcacaggagga

SEQ ID NO: 164806 - DNA, 25 bp, Homo sapien
caaaaaacatatgtgcaattctaac

SEQ ID NO: 164807 - DNA, 25 bp, Homo sapien
ttttctcttaaagaggattctggct

SEQ ID NO: 164808 - DNA, 25 bp, Homo sapien
gatcagatggagtacttcatcagga

SEQ ID NO: 164809 - DNA, 25 bp, Homo sapien
tcctgtctctcaggctaaaatgcag

SEQ ID NO: 164810 - DNA, 25 bp, Homo sapien
ccactgcacagggtaaccagcaagc

SEQ ID NO: 164811 - DNA, 25 bp, Homo sapien
tacaggtgcacgtagagacaaggtc

SEQ ID NO: 164812 - DNA, 25 bp, Homo sapien
ctctcagctccactaagaatgcggt

SEQ ID NO: 164813 - DNA, 25 bp, Homo sapien
ctagtttatagagttcggccctgta

SEQ ID NO: 164814 - DNA, 25 bp, Homo sapien
gaactaagcaacaactcaaaatgat

SEQ ID NO: 164815 - DNA, 25 bp, Homo sapien
ggaaactgacctgttgccaagcaag

SEQ ID NO: 164816 - DNA, 25 bp, Homo sapien
gtggagctgggaaataacttgaacc

SEQ ID NO: 164817 - DNA, 25 bp, Homo sapien
tcatgaaacagtccggaggtgagtg

SEQ ID NO: 164818 - DNA, 25 bp, Homo sapien
acaggaggaccaatccgaggaagct

SEQ ID NO: 164819 - DNA, 25 bp, Homo sapien
tccttcgtggtgacagtccccacta

SEQ ID NO: 164820 - DNA, 25 bp, Homo sapien
acaaatcctcaaataccagcagttg

SEQ ID NO: 164821 - DNA, 25 bp, Homo sapien
aatctgagtggttcggtgcactttc

SEQ ID NO: 164822 - DNA, 25 bp, Homo sapien
caaataccagcagttgttttaagcc

SEQ ID NO: 164823 - DNA, 25 bp, Homo sapien
taagccattaaatctgagtggttcg

SEQ ID NO: 164824 - DNA, 25 bp, Homo sapien
cattactcaacattccaaatctcaa

SEQ ID NO: 164825 - DNA, 25 bp, Homo sapien
tttcctggaagctctataaggtttg

SEQ ID NO: 164826 - DNA, 25 bp, Homo sapien
tcctggaagctctataaggtttgtt

SEQ ID NO: 164827 - DNA, 25 bp, Homo sapien
tatactgtttatactatcccattac

SEQ ID NO: 164828 - DNA, 25 bp, Homo sapien
ggagcacaaggtaggcggctcactt

SEQ ID NO: 164829 - DNA, 25 bp, Homo sapien
gagcacaaggtaggcggctcacttg

SEQ ID NO: 164830 - DNA, 25 bp, Homo sapien
aaataaaggattatagatatttgtc

SEQ ID NO: 164831 - DNA, 25 bp, Homo sapien
ttgggagcacaaggtaggcggctca

SEQ ID NO: 164832 - DNA, 25 bp, Homo sapien
gattccatgtctgggccaagctttc

SEQ ID NO: 164833 - DNA, 25 bp, Homo sapien
tctacttgttctgcccactaagagg

SEQ ID NO: 164834 - DNA, 25 bp, Homo sapien
cactaagagggctgaaaacaacaat

SEQ ID NO: 164835 - DNA, 25 bp, Homo sapien
cactgtcagagacgagagctacaaa

SEQ ID NO: 164836 - DNA, 25 bp, Homo sapien
caaattctacaccctttattaatag

SEQ ID NO: 164837 - DNA, 25 bp, Homo sapien
attaatagcaatactcagctctgaa

SEQ ID NO: 164838 - DNA, 25 bp, Homo sapien
aatagcaatactcagctctgaaggc

SEQ ID NO: 164839 - DNA, 25 bp, Homo sapien
aattctacaccctttattaatagca

SEQ ID NO: 164840 - DNA, 25 bp, Homo sapien
gaagagcgaggacaacaagacactt

SEQ ID NO: 164841 - DNA, 25 bp, Homo sapien
gaagaagagcgaggacaacaagaca

SEQ ID NO: 164842 - DNA, 25 bp, Homo sapien
gagcgaggacaacaagacacttgtg

SEQ ID NO: 164843 - DNA, 25 bp, Homo sapien
gcgaggacaacaagacacttgtgtt

SEQ ID NO: 164844 - DNA, 25 bp, Homo sapien
ggcccaaaacactgcgactccaggg

SEQ ID NO: 164845 - DNA, 25 bp, Homo sapien
agcttgaccaccatattatcatcaa

SEQ ID NO: 164846 - DNA, 25 bp, Homo sapien
gaccaccatattatcatcaagttgc

SEQ ID NO: 164847 - DNA, 25 bp, Homo sapien
aacaagcttgaccaccatattatca

SEQ ID NO: 164848 - DNA, 25 bp, Homo sapien
tcttatgaaatacagagagcccaga

SEQ ID NO: 164849 - DNA, 25 bp, Homo sapien
ggtgaggcaccacaatcttatgaaa

SEQ ID NO: 164850 - DNA, 25 bp, Homo sapien
gagcaactcagtcttacgtggatgg

SEQ ID NO: 164851 - DNA, 25 bp, Homo sapien
tacagtctgactgatggtgaggcac

SEQ ID NO: 164852 - DNA, 25 bp, Homo sapien
tagtactgttcggtcaattgctttc

SEQ ID NO: 164853 - DNA, 25 bp, Homo sapien
actgttcggtcaattgctttccata

SEQ ID NO: 164854 - DNA, 25 bp, Homo sapien
ctgacctgaagtagtactgttcggt

SEQ ID NO: 164855 - DNA, 25 bp, Homo sapien
gaagtagtactgttcggtcaattgc

SEQ ID NO: 164856 - DNA, 25 bp, Homo sapien
gacagacagaaagggcttcagcaga

SEQ ID NO: 164857 - DNA, 25 bp, Homo sapien
ggtagaaactatcatgccacaactg

SEQ ID NO: 164858 - DNA, 25 bp, Homo sapien
cttcagcagatagccgaggtagaaa

SEQ ID NO: 164859 - DNA, 25 bp, Homo sapien
gcctcaaagattagcgatttcacga

SEQ ID NO: 164860 - DNA, 25 bp, Homo sapien
actggttaggcccagacttattcat

SEQ ID NO: 164861 - DNA, 25 bp, Homo sapien
ttctacttgcaagtcctttcctact

SEQ ID NO: 164862 - DNA, 25 bp, Homo sapien
gatgggggaggcgagagtctgctga

SEQ ID NO: 164863 - DNA, 25 bp, Homo sapien
ctgtatctggcccaatgggccccac

SEQ ID NO: 164864 - DNA, 25 bp, Homo sapien
tgtatctggcccaatgggccccaca

SEQ ID NO: 164865 - DNA, 25 bp, Homo sapien
gggaggcgagagtctgctgaaacat

SEQ ID NO: 164866 - DNA, 25 bp, Homo sapien
caagattgtcccgttcttgactgcg

SEQ ID NO: 164867 - DNA, 25 bp, Homo sapien
tgattgggtgaccagaccaacatgc

SEQ ID NO: 164868 - DNA, 25 bp, Homo sapien
ggtgaccagaccaacatgccaagat

SEQ ID NO: 164869 - DNA, 25 bp, Homo sapien
tcttgactgcgtcttgccagtttgg

SEQ ID NO: 164870 - DNA, 25 bp, Homo sapien
ctcgtggctcgggagtctgtttttc

SEQ ID NO: 164871 - DNA, 25 bp, Homo sapien
aaccaaacctggactcgtggctcgg

SEQ ID NO: 164872 - DNA, 25 bp, Homo sapien
aaacctggactcgtggctcgggagt

SEQ ID NO: 164873 - DNA, 25 bp, Homo sapien
ctcgggagtctgtttttctggccgg

SEQ ID NO: 164874 - DNA, 25 bp, Homo sapien
tgctctggcttcttttccgtgctcc

SEQ ID NO: 164875 - DNA, 25 bp, Homo sapien
atcggggggacctgcgcccaggtgg

SEQ ID NO: 164876 - DNA, 25 bp, Homo sapien
tgggatcggggggacctgcgcccag

SEQ ID NO: 164877 - DNA, 25 bp, Homo sapien
cgctgctctggcttcttttccgtgc

SEQ ID NO: 164878 - DNA, 25 bp, Homo sapien
ccgcagagctagggactggtgtatg

SEQ ID NO: 164879 - DNA, 25 bp, Homo sapien
ggtgccccgggatgaacttgaggcc

SEQ ID NO: 164880 - DNA, 25 bp, Homo sapien
gtgccccgggatgaacttgaggccc

SEQ ID NO: 164881 - DNA, 25 bp, Homo sapien
cccccgcagagctagggactggtgt

SEQ ID NO: 164882 - DNA, 25 bp, Homo sapien
gaggcagagaggcgggatacggtca

SEQ ID NO: 164883 - DNA, 25 bp, Homo sapien
ggcgggatacggtcagagctgcggg

SEQ ID NO: 164884 - DNA, 25 bp, Homo sapien
agaggcgggatacggtcagagctgc

SEQ ID NO: 164885 - DNA, 25 bp, Homo sapien
gcagagaggcgggatacggtcagag

SEQ ID NO: 164886 - DNA, 25 bp, Homo sapien
catttccacgggtttgctatgcagc

SEQ ID NO: 164887 - DNA, 25 bp, Homo sapien
aggaacctgttcctagcgctcagcc

SEQ ID NO: 164888 - DNA, 25 bp, Homo sapien
cctcccgtgcgagttggattctgga

SEQ ID NO: 164889 - DNA, 25 bp, Homo sapien
cgctcagccgggtcctgcgatggct

SEQ ID NO: 164890 - DNA, 25 bp, Homo sapien
gaccagctgggtccagtagtgagaa

SEQ ID NO: 164891 - DNA, 25 bp, Homo sapien
aagaccagctgggtccagtagtgag

SEQ ID NO: 164892 - DNA, 25 bp, Homo sapien
aaagaccagctgggtccagtagtga

SEQ ID NO: 164893 - DNA, 25 bp, Homo sapien
gagacacaggtaatatgggggttca

SEQ ID NO: 164894 - DNA, 25 bp, Homo sapien
agagacacaggtaatatgggggttc

SEQ ID NO: 164895 - DNA, 25 bp, Homo sapien
ggttcatactggaggagatgagatg

SEQ ID NO: 164896 - DNA, 25 bp, Homo sapien
aatatgggggttcatactggaggag

SEQ ID NO: 164897 - DNA, 25 bp, Homo sapien
ctttggcaatggcaatgtattcatc

SEQ ID NO: 164898 - DNA, 25 bp, Homo sapien
catgttgtacccatgcttttctttg

SEQ ID NO: 164899 - DNA, 25 bp, Homo sapien
ctgttccatgttgtacccatgcttt

SEQ ID NO: 164900 - DNA, 25 bp, Homo sapien
gttgtacccatgcttttctttggca

SEQ ID NO: 164901 - DNA, 25 bp, Homo sapien
gaaagcattatgctcaagcatccag

SEQ ID NO: 164902 - DNA, 25 bp, Homo sapien
ggcacgagaattacgagaactactt

SEQ ID NO: 164903 - DNA, 25 bp, Homo sapien
tcaaagggtcctctaatattcatct

SEQ ID NO: 164904 - DNA, 25 bp, Homo sapien
taagtaatcagtgtcctaaaggctg

SEQ ID NO: 164905 - DNA, 25 bp, Homo sapien
gagattcgaaaacccacagcaggat

SEQ ID NO: 164906 - DNA, 25 bp, Homo sapien
gaggagctttctccctgcaccagag

SEQ ID NO: 164907 - DNA, 25 bp, Homo sapien
gctcaaaatgaatactgggtccaca

SEQ ID NO: 164908 - DNA, 25 bp, Homo sapien
gctccaacgtaagatgcctgcagat

SEQ ID NO: 164909 - DNA, 25 bp, Homo sapien
cttttcgatattatgtttatgccag

SEQ ID NO: 164910 - DNA, 25 bp, Homo sapien
aaatcagccaatgacttttcgatat

SEQ ID NO: 164911 - DNA, 25 bp, Homo sapien
gccaatgacttttcgatattatgtt

SEQ ID NO: 164912 - DNA, 25 bp, Homo sapien
gacttttcgatattatgtttatgcc

SEQ ID NO: 164913 - DNA, 25 bp, Homo sapien
gaatagtaaaatttcaccagacttg

SEQ ID NO: 164914 - DNA, 25 bp, Homo sapien
tttgtttccgggcatggcgatccat

SEQ ID NO: 164915 - DNA, 25 bp, Homo sapien
gacttgctatagatttatctggaag

SEQ ID NO: 164916 - DNA, 25 bp, Homo sapien
cacactagttttagtcctcgtcttc

SEQ ID NO: 164917 - DNA, 25 bp, Homo sapien
tagattcctaacttcccaatccaga

SEQ ID NO: 164918 - DNA, 25 bp, Homo sapien
ttttcaggctgctgagataaaaaca

SEQ ID NO: 164919 - DNA, 25 bp, Homo sapien
tttccgaatacaaacgataaattga

SEQ ID NO: 164920 - DNA, 25 bp, Homo sapien
taaaacactattgctctatatctgt

SEQ ID NO: 164921 - DNA, 25 bp, Homo sapien
ttttgatcaacctcaatgtcaatgg

SEQ ID NO: 164922 - DNA, 25 bp, Homo sapien
tcaacctcaatgtcaatgggattgt

SEQ ID NO: 164923 - DNA, 25 bp, Homo sapien
cctcaatgtcaatgggattgtttcc

SEQ ID NO: 164924 - DNA, 25 bp, Homo sapien
ttgatcaacctcaatgtcaatggga

SEQ ID NO: 164925 - DNA, 25 bp, Homo sapien
tctcagcaccgtggtagcagcagtg

SEQ ID NO: 164926 - DNA, 25 bp, Homo sapien
cagcagtggcattggcagaaacagc

SEQ ID NO: 164927 - DNA, 25 bp, Homo sapien
ctctatttttagcttgtgtgctatg

SEQ ID NO: 164928 - DNA, 25 bp, Homo sapien
ctgaaaccaattccatgtctagttg

SEQ ID NO: 164929 - DNA, 25 bp, Homo sapien
gctcagtggtctttcagttaccgaa

SEQ ID NO: 164930 - DNA, 25 bp, Homo sapien
ctaagaaagccaacggaagaggagc

SEQ ID NO: 164931 - DNA, 25 bp, Homo sapien
tacatgtcctcttcgcattccagtg

SEQ ID NO: 164932 - DNA, 25 bp, Homo sapien
tgctggctgccatgctagacattac

SEQ ID NO: 164933 - DNA, 25 bp, Homo sapien
aaactatataaaggtatgaaaacag

SEQ ID NO: 164934 - DNA, 25 bp, Homo sapien
agtttttctttgagagcactgtttg

SEQ ID NO: 164935 - DNA, 25 bp, Homo sapien
gagcactgtttgtctgtttaatatt

SEQ ID NO: 164936 - DNA, 25 bp, Homo sapien
ctctggaagtcgatatggttctatt

SEQ ID NO: 164937 - DNA, 25 bp, Homo sapien
gatatggttctattccaccatcaag

SEQ ID NO: 164938 - DNA, 25 bp, Homo sapien
tctcttatcggaattttaacatcaa

SEQ ID NO: 164939 - DNA, 25 bp, Homo sapien
ttaacatcaactgggttcataaaat

SEQ ID NO: 164940 - DNA, 25 bp, Homo sapien
gtccatatactcttccaagagatgt

SEQ ID NO: 164941 - DNA, 25 bp, Homo sapien
tatgtccttatgagcttaacgaacc

SEQ ID NO: 164942 - DNA, 25 bp, Homo sapien
cttgtacggcgagaagctgctcttc

SEQ ID NO: 164943 - DNA, 25 bp, Homo sapien
tctgtagtccaacgtgcattacatt

SEQ ID NO: 164944 - DNA, 25 bp, Homo sapien
gctcttctgtagtccaacgtgcatt

SEQ ID NO: 164945 - DNA, 25 bp, Homo sapien
aagctgctcttctgtagtccaacgt

SEQ ID NO: 164946 - DNA, 25 bp, Homo sapien
agcaaatgcgtcaaccttccaaaat

SEQ ID NO: 164947 - DNA, 25 bp, Homo sapien
ttttccctaaaatctaccaatgctc

SEQ ID NO: 164948 - DNA, 25 bp, Homo sapien
tctaccaatgctcctaagctctttt

SEQ ID NO: 164949 - DNA, 25 bp, Homo sapien
tgggctcaagcaaatgcgtcaacct

SEQ ID NO: 164950 - DNA, 25 bp, Homo sapien
ggttactgggcccattggtctcttc

SEQ ID NO: 164951 - DNA, 25 bp, Homo sapien
cacttgtaccactgatttgttccca

SEQ ID NO: 164952 - DNA, 25 bp, Homo sapien
caatcacgtctgagattgcctgaaa

SEQ ID NO: 164953 - DNA, 25 bp, Homo sapien
catctatgttgaagcggcgtcgata

SEQ ID NO: 164954 - DNA, 25 bp, Homo sapien
tcaagcgtgaacctgacaagagaag

SEQ ID NO: 164955 - DNA, 25 bp, Homo sapien
agcgtgaacctgacaagagaagtga

SEQ ID NO: 164956 - DNA, 25 bp, Homo sapien
cgtgaacctgacaagagaagtgact

SEQ ID NO: 164957 - DNA, 25 bp, Homo sapien
gtgaacctgacaagagaagtgactg

SEQ ID NO: 164958 - DNA, 25 bp, Homo sapien
ctcacgaggtacttccatgctcagg

SEQ ID NO: 164959 - DNA, 25 bp, Homo sapien
cctgcatggagtggcggcaccacgc

SEQ ID NO: 164960 - DNA, 25 bp, Homo sapien
ccaggggatgccaatacctcacgag

SEQ ID NO: 164961 - DNA, 25 bp, Homo sapien
gccctgcatggagtggcggcaccac

SEQ ID NO: 164962 - DNA, 25 bp, Homo sapien
cagcttttcaatgcttccgaaactg

SEQ ID NO: 164963 - DNA, 25 bp, Homo sapien
tgggaccgaagccggaaaacacaca

SEQ ID NO: 164964 - DNA, 25 bp, Homo sapien
aatgcttccgaaactgagtgctaac

SEQ ID NO: 164965 - DNA, 25 bp, Homo sapien
ggcaattagtgctggtacaaaaatc

SEQ ID NO: 164966 - DNA, 25 bp, Homo sapien
ttggaggagccataactagactgtg

SEQ ID NO: 164967 - DNA, 25 bp, Homo sapien
caaatgcgaagagggaatagagcca

SEQ ID NO: 164968 - DNA, 25 bp, Homo sapien
gaaaaactatgatctgctgcttgga

SEQ ID NO: 164969 - DNA, 25 bp, Homo sapien
gacatcctgttggtagggactcttg

SEQ ID NO: 164970 - DNA, 25 bp, Homo sapien
gctatttccagtgtactgaaaagag

SEQ ID NO: 164971 - DNA, 25 bp, Homo sapien
gagtaggtaaacaacacaagctgct

SEQ ID NO: 164972 - DNA, 25 bp, Homo sapien
ggatcaaagagtaggtaaacaacac

SEQ ID NO: 164973 - DNA, 25 bp, Homo sapien
ggtagccagcaaacctgcagagcaa

SEQ ID NO: 164974 - DNA, 25 bp, Homo sapien
aggcagatgcatatctgacatccag

SEQ ID NO: 164975 - DNA, 25 bp, Homo sapien
ggaggcagatgcatatctgacatcc

SEQ ID NO: 164976 - DNA, 25 bp, Homo sapien
gaggcagatgcatatctgacatcca

SEQ ID NO: 164977 - DNA, 25 bp, Homo sapien
aggaggcagatgcatatctgacatc

SEQ ID NO: 164978 - DNA, 25 bp, Homo sapien
gatatcccggataacacagtagtcc

SEQ ID NO: 164979 - DNA, 25 bp, Homo sapien
tatcccggataacacagtagtccac

SEQ ID NO: 164980 - DNA, 25 bp, Homo sapien
ctgatatcccggataacacagtagt

SEQ ID NO: 164981 - DNA, 25 bp, Homo sapien
atcccggataacacagtagtccaca

SEQ ID NO: 164982 - DNA, 25 bp, Homo sapien
ttgaaggcagaaagcattgaggtcc

SEQ ID NO: 164983 - DNA, 25 bp, Homo sapien
caccaggtacagtgatgtgggccga

SEQ ID NO: 164984 - DNA, 25 bp, Homo sapien
catgcaggaacagagtcgggccttc

SEQ ID NO: 164985 - DNA, 25 bp, Homo sapien
tttctagaaggccaacagggtcgcg

SEQ ID NO: 164986 - DNA, 25 bp, Homo sapien
aaagcgacttcagcgtattgagtgc

SEQ ID NO: 164987 - DNA, 25 bp, Homo sapien
caggcccatggtctgataagataac

SEQ ID NO: 164988 - DNA, 25 bp, Homo sapien
ggtgcttgggagacaaaacatatca

SEQ ID NO: 164989 - DNA, 25 bp, Homo sapien
cgagatgatgaagggcagcaagtcc

SEQ ID NO: 164990 - DNA, 25 bp, Homo sapien
tcttgagggaagcacggagaaccta

SEQ ID NO: 164991 - DNA, 25 bp, Homo sapien
cctattggcagggtgagaaacgcac

SEQ ID NO: 164992 - DNA, 25 bp, Homo sapien
ttacgcgggaaagcacaacaaaggc

SEQ ID NO: 164993 - DNA, 25 bp, Homo sapien
aaacacagtgctatcttacgcggga

SEQ ID NO: 164994 - DNA, 25 bp, Homo sapien
tgtgttacactagcacccgactgtg

SEQ ID NO: 164995 - DNA, 25 bp, Homo sapien
ccattttgaggaagtggcgtctcca

SEQ ID NO: 164996 - DNA, 25 bp, Homo sapien
tgtacacccagacaacgcggcattt

SEQ ID NO: 164997 - DNA, 25 bp, Homo sapien
cagggatccagttagcgtaatgcac

SEQ ID NO: 164998 - DNA, 25 bp, Homo sapien
cttccagtgtagttgtgagaagcac

SEQ ID NO: 164999 - DNA, 25 bp, Homo sapien
cccatgactgcgcaggtgggaccat

SEQ ID NO: 165000 - DNA, 25 bp, Homo sapien
gcgagccgctgtccttattcaactg

SEQ ID NO: 165001 - DNA, 25 bp, Homo sapien
gttgtgagaagcactacctgcccca

SEQ ID NO: 165002 - DNA, 25 bp, Homo sapien
atcctccacgaaggcatctgtggcc

SEQ ID NO: 165003 - DNA, 25 bp, Homo sapien
tctggcatcctccacgaaggcatct

SEQ ID NO: 165004 - DNA, 25 bp, Homo sapien
ggctctggcatcctccacgaaggca

SEQ ID NO: 165005 - DNA, 25 bp, Homo sapien
tctgtggcctgccactgcgggctgt

SEQ ID NO: 165006 - DNA, 25 bp, Homo sapien
ctctgaggtaggagctcacactcac

SEQ ID NO: 165007 - DNA, 25 bp, Homo sapien
ctataggaaggtgttgcactgggag

SEQ ID NO: 165008 - DNA, 25 bp, Homo sapien
agcctctgaggtaggagctcacact

SEQ ID NO: 165009 - DNA, 25 bp, Homo sapien
gaaggtgttgcactgggagccctgt

SEQ ID NO: 165010 - DNA, 25 bp, Homo sapien
gcgtgggactccctgcgtaccagcc

SEQ ID NO: 165011 - DNA, 25 bp, Homo sapien
tgcaggtgagaaactccttgcgctg

SEQ ID NO: 165012 - DNA, 25 bp, Homo sapien
tgcccatgggcggaagcacaagccc

SEQ ID NO: 165013 - DNA, 25 bp, Homo sapien
gcaaagctgcccatgggcggaagca

SEQ ID NO: 165014 - DNA, 25 bp, Homo sapien
aaaccgtggtgtcacaggcgtcagc

SEQ ID NO: 165015 - DNA, 25 bp, Homo sapien
tccattgagcacaaaccgtggtgtc

SEQ ID NO: 165016 - DNA, 25 bp, Homo sapien
acaggcgtcagcgttcatgcacggg

SEQ ID NO: 165017 - DNA, 25 bp, Homo sapien
caggcatccattgagcacaaaccgt

SEQ ID NO: 165018 - DNA, 25 bp, Homo sapien
gtcaagaggcccgaaacagcaggca

SEQ ID NO: 165019 - DNA, 25 bp, Homo sapien
ttcgcaagtgtgagcagcggctcca

SEQ ID NO: 165020 - DNA, 25 bp, Homo sapien
ggattggccttccattgtcttcgca

SEQ ID NO: 165021 - DNA, 25 bp, Homo sapien
agcggctccaggtctacagtcaaga

SEQ ID NO: 165022 - DNA, 25 bp, Homo sapien
atggcctggtccacaccgcacggct

SEQ ID NO: 165023 - DNA, 25 bp, Homo sapien
ggctgggaacgcagcgccaatctct

SEQ ID NO: 165024 - DNA, 25 bp, Homo sapien
ttgtcgtccccaagcatggcctggt

SEQ ID NO: 165025 - DNA, 25 bp, Homo sapien
ggtaggacttgcctcgattgtcgtc

SEQ ID NO: 165026 - DNA, 25 bp, Homo sapien
cagccagcgaccatgcatcatttaa

SEQ ID NO: 165027 - DNA, 25 bp, Homo sapien
ccagtcagaccggaggacagtgatg

SEQ ID NO: 165028 - DNA, 25 bp, Homo sapien
atgtcaagggtctgagtagaggcca

SEQ ID NO: 165029 - DNA, 25 bp, Homo sapien
tccaactggcaagtgggtcataggg

SEQ ID NO: 165030 - DNA, 25 bp, Homo sapien
caggaactcgggcaaggtttagctg

SEQ ID NO: 165031 - DNA, 25 bp, Homo sapien
tcggacaacggctggagttgactag

SEQ ID NO: 165032 - DNA, 25 bp, Homo sapien
taccccactggctacaagcaagtca

SEQ ID NO: 165033 - DNA, 25 bp, Homo sapien
caccatcggacgtcacatagtgtca

SEQ ID NO: 165034 - DNA, 25 bp, Homo sapien
gctgggctgcaaccccggctcgcgc

SEQ ID NO: 165035 - DNA, 25 bp, Homo sapien
gctccccgggctgccccatggcggg

SEQ ID NO: 165036 - DNA, 25 bp, Homo sapien
tgccgccggctggaaagtcccggct

SEQ ID NO: 165037 - DNA, 25 bp, Homo sapien
ccgccgcggtccgcagcgttctgct

SEQ ID NO: 165038 - DNA, 25 bp, Homo sapien
tactgtttccaaccgaagggagaga

SEQ ID NO: 165039 - DNA, 25 bp, Homo sapien
atactagaccgaagtccccacacgg

SEQ ID NO: 165040 - DNA, 25 bp, Homo sapien
tatctcctcgggtccaaatactaga

SEQ ID NO: 165041 - DNA, 25 bp, Homo sapien
aatacaactggtcccgtcaacagct

SEQ ID NO: 165042 - DNA, 25 bp, Homo sapien
ccaaagcctgctgcggtggtgcaaa

SEQ ID NO: 165043 - DNA, 25 bp, Homo sapien
tagctcagacttgcaacgccacagt

SEQ ID NO: 165044 - DNA, 25 bp, Homo sapien
tccatggagtggaccctaagggcct

SEQ ID NO: 165045 - DNA, 25 bp, Homo sapien
tcatttccacaatcaggcctcggct

SEQ ID NO: 165046 - DNA, 25 bp, Homo sapien
cgcttccagaattctacacaatcca

SEQ ID NO: 165047 - DNA, 25 bp, Homo sapien
caggatggtagatttgcatttttcc

SEQ ID NO: 165048 - DNA, 25 bp, Homo sapien
ctgtctcagtcaagtatctgctggt

SEQ ID NO: 165049 - DNA, 25 bp, Homo sapien
gatggccccactataccagagcttt

SEQ ID NO: 165050 - DNA, 25 bp, Homo sapien
catttaaacatggatgacagaggag

SEQ ID NO: 165051 - DNA, 25 bp, Homo sapien
taaattgtgaaatgaaatgtagggc

SEQ ID NO: 165052 - DNA, 25 bp, Homo sapien
cttgagaattaaggagacttaggtc

SEQ ID NO: 165053 - DNA, 25 bp, Homo sapien
aattgtgaaatgaaatgtagggccc

SEQ ID NO: 165054 - DNA, 25 bp, Homo sapien
tgagacacacggaaggtaactgccc

SEQ ID NO: 165055 - DNA, 25 bp, Homo sapien
caagccaggagcgtaagccactgat

SEQ ID NO: 165056 - DNA, 25 bp, Homo sapien
gcctccttatgtgcaccatctgggt

SEQ ID NO: 165057 - DNA, 25 bp, Homo sapien
gctgagggctgacattccaagactg

SEQ ID NO: 165058 - DNA, 25 bp, Homo sapien
tctcagcctggaaggatccctctcg

SEQ ID NO: 165059 - DNA, 25 bp, Homo sapien
ccactatatccagcccaactttttt

SEQ ID NO: 165060 - DNA, 25 bp, Homo sapien
cagccactatatccagcccaacttt

SEQ ID NO: 165061 - DNA, 25 bp, Homo sapien
atctcagcctggaaggatccctctc

SEQ ID NO: 165062 - DNA, 25 bp, Homo sapien
gacccacagggtcgagtctgcatgc

SEQ ID NO: 165063 - DNA, 25 bp, Homo sapien
aacctaacaggtccaacactgagcc

SEQ ID NO: 165064 - DNA, 25 bp, Homo sapien
gacagtcagcttcgtcttcaagata

SEQ ID NO: 165065 - DNA, 25 bp, Homo sapien
gtcttcaagatacgttccaaatcca

SEQ ID NO: 165066 - DNA, 25 bp, Homo sapien
ttctgtcaggacagcgatccttaga

SEQ ID NO: 165067 - DNA, 25 bp, Homo sapien
tctgggaccttaaccaagtggcatc

SEQ ID NO: 165068 - DNA, 25 bp, Homo sapien
ggtttctgatcctaggtctgattct

SEQ ID NO: 165069 - DNA, 25 bp, Homo sapien
gatccttagaagagtagggagccag

SEQ ID NO: 165070 - DNA, 25 bp, Homo sapien
tattactgctatgtctattagtgtg

SEQ ID NO: 165071 - DNA, 25 bp, Homo sapien
tctagggtaccaaacttcttgctgt

SEQ ID NO: 165072 - DNA, 25 bp, Homo sapien
aaaaatgctgagaaagtagacgtct

SEQ ID NO: 165073 - DNA, 25 bp, Homo sapien
tgtgtgtgtaggtagtgcttgataa

SEQ ID NO: 165074 - DNA, 25 bp, Homo sapien
tagttatccattctcatccccgagg

SEQ ID NO: 165075 - DNA, 25 bp, Homo sapien
gattgctagcttatactctaaagcc

SEQ ID NO: 165076 - DNA, 25 bp, Homo sapien
gatttttctggtacagctatctcaa

SEQ ID NO: 165077 - DNA, 25 bp, Homo sapien
gctttggagcaaatataaacacgac

SEQ ID NO: 165078 - DNA, 25 bp, Homo sapien
taatagttggtcaattctcacctgg

SEQ ID NO: 165079 - DNA, 25 bp, Homo sapien
ggagcaaagcaacgccaaccttatc

SEQ ID NO: 165080 - DNA, 25 bp, Homo sapien
ataccagtccaactaccaccaaggg

SEQ ID NO: 165081 - DNA, 25 bp, Homo sapien
taattactgtagtggagtcccttac

SEQ ID NO: 165082 - DNA, 25 bp, Homo sapien
tgttcctggtacctgatgccaaatg

SEQ ID NO: 165083 - DNA, 25 bp, Homo sapien
gttcctggtacctgatgccaaatgt

SEQ ID NO: 165084 - DNA, 25 bp, Homo sapien
gtaagtcagaagcaaagggcacaca

SEQ ID NO: 165085 - DNA, 25 bp, Homo sapien
aaagggcacacactacgatttcatc

SEQ ID NO: 165086 - DNA, 25 bp, Homo sapien
atctatccagacagtgaataccatt

SEQ ID NO: 165087 - DNA, 25 bp, Homo sapien
aatctatccagacagtgaataccat

SEQ ID NO: 165088 - DNA, 25 bp, Homo sapien
gtttcaacaactgcccagttcatgg

SEQ ID NO: 165089 - DNA, 25 bp, Homo sapien
cacatactggagtcggctagcaacc

SEQ ID NO: 165090 - DNA, 25 bp, Homo sapien
tgtactctttgtgtaggaatgcagg

SEQ ID NO: 165091 - DNA, 25 bp, Homo sapien
tagcaacccgatgtatcagtttggt

SEQ ID NO: 165092 - DNA, 25 bp, Homo sapien
ctgaaggtttgcaaaagttgtggaa

SEQ ID NO: 165093 - DNA, 25 bp, Homo sapien
tacagttccgtaaattgaacactgg

SEQ ID NO: 165094 - DNA, 25 bp, Homo sapien
gggtatgatacagttccgtaaattg

SEQ ID NO: 165095 - DNA, 25 bp, Homo sapien
taacaaggttttcttagagcactga

SEQ ID NO: 165096 - DNA, 25 bp, Homo sapien
ccacctggaaggtatggagatgtcc

SEQ ID NO: 165097 - DNA, 25 bp, Homo sapien
aatatgtggtaaaatcattgcactg

SEQ ID NO: 165098 - DNA, 25 bp, Homo sapien
gtgttctgtagcgtttctctttggg

SEQ ID NO: 165099 - DNA, 25 bp, Homo sapien
gtgtgtctggattaagagcatgctc

SEQ ID NO: 165100 - DNA, 25 bp, Homo sapien
tatattagaaagctcttagaagaaa

SEQ ID NO: 165101 - DNA, 25 bp, Homo sapien
taatgaccctgaatttggcaatgga

SEQ ID NO: 165102 - DNA, 25 bp, Homo sapien
cacaggaggtaaatctttaatgacc

SEQ ID NO: 165103 - DNA, 25 bp, Homo sapien
tgagatccccaaaaaatatattaga

SEQ ID NO: 165104 - DNA, 25 bp, Homo sapien
aaaaatacggaactgcttcatgaat

SEQ ID NO: 165105 - DNA, 25 bp, Homo sapien
tgcatgtcatccttgtgcaggggcc

SEQ ID NO: 165106 - DNA, 25 bp, Homo sapien
aattttagtatatgtgctgccaaag

SEQ ID NO: 165107 - DNA, 25 bp, Homo sapien
atgctaatcttctctgtatcattcc

SEQ ID NO: 165108 - DNA, 25 bp, Homo sapien
acctttacgaggcttctgcagggca

SEQ ID NO: 165109 - DNA, 25 bp, Homo sapien
atgcagctctcgcagaagcggtgcc

SEQ ID NO: 165110 - DNA, 25 bp, Homo sapien
ctttagcggcgggttagtctgcagc

SEQ ID NO: 165111 - DNA, 25 bp, Homo sapien
cacttgtacttgtcctccacggtct

SEQ ID NO: 165112 - DNA, 25 bp, Homo sapien
tgttcagggacaaaaactggcgtcc

SEQ ID NO: 165113 - DNA, 25 bp, Homo sapien
cgatgctctcttgacacgctgtaca

SEQ ID NO: 165114 - DNA, 25 bp, Homo sapien
gacacgctgtacattttggacttga

SEQ ID NO: 165115 - DNA, 25 bp, Homo sapien
tcttgacacgctgtacattttggac

SEQ ID NO: 165116 - DNA, 25 bp, Homo sapien
cttatctttaacgatgctctcttga

SEQ ID NO: 165117 - DNA, 25 bp, Homo sapien
catggatgactgtcagtctccatga

SEQ ID NO: 165118 - DNA, 25 bp, Homo sapien
catcctctgaatgtgcagagacgcc

SEQ ID NO: 165119 - DNA, 25 bp, Homo sapien
gtgcagagacgcccacgggctctag

SEQ ID NO: 165120 - DNA, 25 bp, Homo sapien
gcacatggatgactgtcagtctcca

SEQ ID NO: 165121 - DNA, 25 bp, Homo sapien
tgggctgctctgaccaacaaaccca

SEQ ID NO: 165122 - DNA, 25 bp, Homo sapien
ctgggctgctctgaccaacaaaccc

SEQ ID NO: 165123 - DNA, 25 bp, Homo sapien
actctggggccttccgggagccagc

SEQ ID NO: 165124 - DNA, 25 bp, Homo sapien
gccttccgggagccagcacggagca

SEQ ID NO: 165125 - DNA, 25 bp, Homo sapien
cagcacggagcaggtggccattatg

SEQ ID NO: 165126 - DNA, 25 bp, Homo sapien
gccagcacggagcaggtggccatta

SEQ ID NO: 165127 - DNA, 25 bp, Homo sapien
atctgaagagccagaatttctctct

SEQ ID NO: 165128 - DNA, 25 bp, Homo sapien
tcttgcagcaattatccttaaacac

SEQ ID NO: 165129 - DNA, 25 bp, Homo sapien
tgctttcattccgacaatagatctg

SEQ ID NO: 165130 - DNA, 25 bp, Homo sapien
ctctcttgcagcaattatccttaaa

SEQ ID NO: 165131 - DNA, 25 bp, Homo sapien
tttgcagtcaggacgcacacatgga

SEQ ID NO: 165132 - DNA, 25 bp, Homo sapien
tctccacgtggtctcgcaggtcttt

SEQ ID NO: 165133 - DNA, 25 bp, Homo sapien
ggctgcatgtggcttcccggtattt

SEQ ID NO: 165134 - DNA, 25 bp, Homo sapien
tcggaacctgactcttgcagtggct

SEQ ID NO: 165135 - DNA, 25 bp, Homo sapien
ggcctgtggaatgtatcatatagga

SEQ ID NO: 165136 - DNA, 25 bp, Homo sapien
ggaacggattatctacgaattgagc

SEQ ID NO: 165137 - DNA, 25 bp, Homo sapien
tctacgaattgagcggaaggcctgt

SEQ ID NO: 165138 - DNA, 25 bp, Homo sapien
tcatataggaattgagtggaaggcc

SEQ ID NO: 165139 - DNA, 25 bp, Homo sapien
attctatcgcacaatctttggcaat

SEQ ID NO: 165140 - DNA, 25 bp, Homo sapien
aattctatcgcacaatctttggcaa

SEQ ID NO: 165141 - DNA, 25 bp, Homo sapien
caattctatcgcacaatctttggca

SEQ ID NO: 165142 - DNA, 25 bp, Homo sapien
tcaggagagtctggacgctgcactt

SEQ ID NO: 165143 - DNA, 25 bp, Homo sapien
cagggacagtcggtgtcttcgtgtt

SEQ ID NO: 165144 - DNA, 25 bp, Homo sapien
tgtgagggcaggacaccaccacgca

SEQ ID NO: 165145 - DNA, 25 bp, Homo sapien
agagtctggacgctgcacttgtgag

SEQ ID NO: 165146 - DNA, 25 bp, Homo sapien
cacactctgacaagtgtgcactcaa

SEQ ID NO: 165147 - DNA, 25 bp, Homo sapien
gctgggggcattgacacactctgac

SEQ ID NO: 165148 - DNA, 25 bp, Homo sapien
atagcgcttaaaactacaggtgctg

SEQ ID NO: 165149 - DNA, 25 bp, Homo sapien
agcgcttaaaactacaggtgctggg

SEQ ID NO: 165150 - DNA, 25 bp, Homo sapien
cctatttgcgtcaagtgaacaggga

SEQ ID NO: 165151 - DNA, 25 bp, Homo sapien
catgtgaggcattcagcgaacctcg

SEQ ID NO: 165152 - DNA, 25 bp, Homo sapien
cagggaatctctgcgcctaaggagg

SEQ ID NO: 165153 - DNA, 25 bp, Homo sapien
catttcaaagggcagaacggctaac

SEQ ID NO: 165154 - DNA, 25 bp, Homo sapien
tccttcagcaggttgacgtgctgca

SEQ ID NO: 165155 - DNA, 25 bp, Homo sapien
tcagcaggttgacgtgctgcacggc

SEQ ID NO: 165156 - DNA, 25 bp, Homo sapien
ttcagcaggttgacgtgctgcacgg

SEQ ID NO: 165157 - DNA, 25 bp, Homo sapien
tgcacggcggagctggcctcgtggg

SEQ ID NO: 165158 - DNA, 25 bp, Homo sapien
taaataatctgaagagatgatacaa

SEQ ID NO: 165159 - DNA, 25 bp, Homo sapien
gatgatacaaatcccatagcagcag

SEQ ID NO: 165160 - DNA, 25 bp, Homo sapien
agagatgatacaaatcccatagcag

SEQ ID NO: 165161 - DNA, 25 bp, Homo sapien
gatacaaatcccatagcagcaggaa

SEQ ID NO: 165162 - DNA, 25 bp, Homo sapien
gaaacactctcttatggcagattaa

SEQ ID NO: 165163 - DNA, 25 bp, Homo sapien
caagctcagctcacgcatttacatg

SEQ ID NO: 165164 - DNA, 25 bp, Homo sapien
tccgtgtgtgtgcacaggatgccga

SEQ ID NO: 165165 - DNA, 25 bp, Homo sapien
tcagcgctgttctgctccgtgtgtg

SEQ ID NO: 165166 - DNA, 25 bp, Homo sapien
tctcagactctttattctcatatcc

SEQ ID NO: 165167 - DNA, 25 bp, Homo sapien
ccatatgcagcatcgcgtggtagtt

SEQ ID NO: 165168 - DNA, 25 bp, Homo sapien
tcgcgtggtagttgtgtccctctga

SEQ ID NO: 165169 - DNA, 25 bp, Homo sapien
ctgcacgaatgtggagcgggccata

SEQ ID NO: 165170 - DNA, 25 bp, Homo sapien
gattttggattcattatttcgaagc

SEQ ID NO: 165171 - DNA, 25 bp, Homo sapien
gattgtgcaaactttgtatgctctt

SEQ ID NO: 165172 - DNA, 25 bp, Homo sapien
gattcattatttcgaagcatttcct

SEQ ID NO: 165173 - DNA, 25 bp, Homo sapien
agctacatatctgattgtgcaaact

SEQ ID NO: 165174 - DNA, 25 bp, Homo sapien
ctattaacaagcaccccacagacac

SEQ ID NO: 165175 - DNA, 25 bp, Homo sapien
cacacccatgggaagtgctatcaca

SEQ ID NO: 165176 - DNA, 25 bp, Homo sapien
gattcttccacggtgtgtgacacac

SEQ ID NO: 165177 - DNA, 25 bp, Homo sapien
caggcccttcagtgacatgagtgat

SEQ ID NO: 165178 - DNA, 25 bp, Homo sapien
gctatcacaaatgcacacgagtaag

SEQ ID NO: 165179 - DNA, 25 bp, Homo sapien
tctcaaagatgccatgactctgtgc

SEQ ID NO: 165180 - DNA, 25 bp, Homo sapien
gtgctattagaagtagtttctcttc

SEQ ID NO: 165181 - DNA, 25 bp, Homo sapien
aaggcattctcaaagatgccatgac

SEQ ID NO: 165182 - DNA, 25 bp, Homo sapien
gatgccatgactctgtgctattaga

SEQ ID NO: 165183 - DNA, 25 bp, Homo sapien
cccacgggacaggtggccctgcatg

SEQ ID NO: 165184 - DNA, 25 bp, Homo sapien
gaggcctcacccctgtaagtgcagg

SEQ ID NO: 165185 - DNA, 25 bp, Homo sapien
aagtgcaggtcccacgggacaggtg

SEQ ID NO: 165186 - DNA, 25 bp, Homo sapien
aatcatgcccatgtggcctcatctt

SEQ ID NO: 165187 - DNA, 25 bp, Homo sapien
gggccacaaggctcccatggacatc

SEQ ID NO: 165188 - DNA, 25 bp, Homo sapien
ctcctctgcagccctcgtatacctc

SEQ ID NO: 165189 - DNA, 25 bp, Homo sapien
ggccacaaggctcccatggacatct

SEQ ID NO: 165190 - DNA, 25 bp, Homo sapien
ctctgcagccctcgtatacctcggg

SEQ ID NO: 165191 - DNA, 25 bp, Homo sapien
gagctccctgggatcaagtgcttgt

SEQ ID NO: 165192 - DNA, 25 bp, Homo sapien
caaagtgacaggtggcaagtgttca

SEQ ID NO: 165193 - DNA, 25 bp, Homo sapien
aacaggaggctccactaagtcagct

SEQ ID NO: 165194 - DNA, 25 bp, Homo sapien
gcactcgaggtgacatgaagccaca

SEQ ID NO: 165195 - DNA, 25 bp, Homo sapien
gcaaaacacagttaggactcggaaa

SEQ ID NO: 165196 - DNA, 25 bp, Homo sapien
aaacacagttaggactcggaaaatg

SEQ ID NO: 165197 - DNA, 25 bp, Homo sapien
aaagcaaaacacagttaggactcgg

SEQ ID NO: 165198 - DNA, 25 bp, Homo sapien
aagcaaaacacagttaggactcgga

SEQ ID NO: 165199 - DNA, 25 bp, Homo sapien
tctctgcttggctgtctatcactcg

SEQ ID NO: 165200 - DNA, 25 bp, Homo sapien
tgtgttccgagccacttgccccgcg

SEQ ID NO: 165201 - DNA, 25 bp, Homo sapien
gaagggccggatctccttgtcaagc

SEQ ID NO: 165202 - DNA, 25 bp, Homo sapien
ccagctcggtcacgcggttctggag

SEQ ID NO: 165203 - DNA, 25 bp, Homo sapien
tgacaaaaaacagcgacaagtgcgt

SEQ ID NO: 165204 - DNA, 25 bp, Homo sapien
tgggcagccagaggcgatattcatc

SEQ ID NO: 165205 - DNA, 25 bp, Homo sapien
aaatgacgtcgagaggacccctgat

SEQ ID NO: 165206 - DNA, 25 bp, Homo sapien
cactttctgcttaaacggccaagga

SEQ ID NO: 165207 - DNA, 25 bp, Homo sapien
tgggctgacaaggaatgaccccgct

SEQ ID NO: 165208 - DNA, 25 bp, Homo sapien
ttttgcctaagaagcacccgtcgcg

SEQ ID NO: 165209 - DNA, 25 bp, Homo sapien
gaatgatgctcaatgcaaacccagg

SEQ ID NO: 165210 - DNA, 25 bp, Homo sapien
gatgcacagcatccatgagcgaggc

SEQ ID NO: 165211 - DNA, 25 bp, Homo sapien
tcccgggagccaaggtaccacaggc

SEQ ID NO: 165212 - DNA, 25 bp, Homo sapien
cagacggaaggaccagcaaggctgt

SEQ ID NO: 165213 - DNA, 25 bp, Homo sapien
gaggatttgggatcccccagacgga

SEQ ID NO: 165214 - DNA, 25 bp, Homo sapien
gaaggaccagcaaggctgtgtcctg

SEQ ID NO: 165215 - DNA, 25 bp, Homo sapien
tgcctggtctccataggtgtcccgg

SEQ ID NO: 165216 - DNA, 25 bp, Homo sapien
ggtcagcggtgacaactgcacactg

SEQ ID NO: 165217 - DNA, 25 bp, Homo sapien
cagctcacacttgcggtcagcggtg

SEQ ID NO: 165218 - DNA, 25 bp, Homo sapien
ttcatcggcacatcgcgctggctgt

SEQ ID NO: 165219 - DNA, 25 bp, Homo sapien
gcagccacagcaggacccggcccag

SEQ ID NO: 165220 - DNA, 25 bp, Homo sapien
ctgcagccacagcaggacccggccc

SEQ ID NO: 165221 - DNA, 25 bp, Homo sapien
agccacagcaggacccggcccagga

SEQ ID NO: 165222 - DNA, 25 bp, Homo sapien
agctgcagccacagcaggacccggc

SEQ ID NO: 165223 - DNA, 25 bp, Homo sapien
atttcgcagacggaaaaaccgcgag

SEQ ID NO: 165224 - DNA, 25 bp, Homo sapien
cagaggacagcgttgttaaggacag

SEQ ID NO: 165225 - DNA, 25 bp, Homo sapien
gcgcaacccggtatgagaagtaaga

SEQ ID NO: 165226 - DNA, 25 bp, Homo sapien
caacggacttctactgatacctgca

SEQ ID NO: 165227 - DNA, 25 bp, Homo sapien
cttgtccgccgggaactcaacggcg

SEQ ID NO: 165228 - DNA, 25 bp, Homo sapien
ccagttggctgcgacgtcgaagtcc

SEQ ID NO: 165229 - DNA, 25 bp, Homo sapien
ttgtccgccgggaactcaacggcgc

SEQ ID NO: 165230 - DNA, 25 bp, Homo sapien
tggctgcgacgtcgaagtccgtgtt

SEQ ID NO: 165231 - DNA, 25 bp, Homo sapien
cttcttgcaccaggactgacaccat

SEQ ID NO: 165232 - DNA, 25 bp, Homo sapien
tgaccttcttgcaccaggactgaca

SEQ ID NO: 165233 - DNA, 25 bp, Homo sapien
acggcgtgaccttcttgcaccagga

SEQ ID NO: 165234 - DNA, 25 bp, Homo sapien
catgtctgagacggcgtgaccttct

SEQ ID NO: 165235 - DNA, 25 bp, Homo sapien
tactgtcgctgaggtgtgaatgtca

SEQ ID NO: 165236 - DNA, 25 bp, Homo sapien
caaacttacctactcatggaacccg

SEQ ID NO: 165237 - DNA, 25 bp, Homo sapien
tttggcctgtagcttgcggaactcc

SEQ ID NO: 165238 - DNA, 25 bp, Homo sapien
cctttaatacgtgatgaagctccag

SEQ ID NO: 165239 - DNA, 25 bp, Homo sapien
aacccttgctgccaggttgtgaggg

SEQ ID NO: 165240 - DNA, 25 bp, Homo sapien
gtagccccttgagaacgtgcacagg

SEQ ID NO: 165241 - DNA, 25 bp, Homo sapien
agtttcgaaagttgcccggctcctg

SEQ ID NO: 165242 - DNA, 25 bp, Homo sapien
cccaagtctcgggtgtcagcagaaa

SEQ ID NO: 165243 - DNA, 25 bp, Homo sapien
ccagtcccctgggacgagaagccga

SEQ ID NO: 165244 - DNA, 25 bp, Homo sapien
gtcccctgggacgagaagccgagac

SEQ ID NO: 165245 - DNA, 25 bp, Homo sapien
gggtccgggcctgctccgcgcccac

SEQ ID NO: 165246 - DNA, 25 bp, Homo sapien
tgaggcggcgccacgcgggggtccg

SEQ ID NO: 165247 - DNA, 25 bp, Homo sapien
cctgaagccaggacgagttccccat

SEQ ID NO: 165248 - DNA, 25 bp, Homo sapien
cgagttccccatccagcggcaggag

SEQ ID NO: 165249 - DNA, 25 bp, Homo sapien
gagacgccgaatccggctcctgaag

SEQ ID NO: 165250 - DNA, 25 bp, Homo sapien
cagtccaggtgcgagcccacgtctg

SEQ ID NO: 165251 - DNA, 25 bp, Homo sapien
tgagcacgacctcccaagccccgct

SEQ ID NO: 165252 - DNA, 25 bp, Homo sapien
ccacgccacgccacgcgtctgagca

SEQ ID NO: 165253 - DNA, 25 bp, Homo sapien
atccctgagctccacggaacaagcg

SEQ ID NO: 165254 - DNA, 25 bp, Homo sapien
tgagctccacggaacaagcgccgcg

SEQ ID NO: 165255 - DNA, 25 bp, Homo sapien
tcggcgtccacgaagaagaggccag

SEQ ID NO: 165256 - DNA, 25 bp, Homo sapien
agccccacgcggaaggaggcactag

SEQ ID NO: 165257 - DNA, 25 bp, Homo sapien
cactaggcggaaagaagacgtcgtc

SEQ ID NO: 165258 - DNA, 25 bp, Homo sapien
catgccaggagaagcggtcagagtc

SEQ ID NO: 165259 - DNA, 25 bp, Homo sapien
cagacccaacgtgtgcagaccagga

SEQ ID NO: 165260 - DNA, 25 bp, Homo sapien
ccaccggagccagcccgaggaagag

SEQ ID NO: 165261 - DNA, 25 bp, Homo sapien
cacctgagtgctcagacccaacgtg

SEQ ID NO: 165262 - DNA, 25 bp, Homo sapien
ccagcccgaggaagagacttcacct

SEQ ID NO: 165263 - DNA, 25 bp, Homo sapien
agacgcagcccgacgggtccgcgca

SEQ ID NO: 165264 - DNA, 25 bp, Homo sapien
cgtggaagcgtaggcggcccgcgcg

SEQ ID NO: 165265 - DNA, 25 bp, Homo sapien
cgcccggcccgtggaagcgtaggcg

SEQ ID NO: 165266 - DNA, 25 bp, Homo sapien
ccaggtcctcgtcgcgcgtgaacgt

SEQ ID NO: 165267 - DNA, 25 bp, Homo sapien
gggcacagtcccgaccctcgcgcgg

SEQ ID NO: 165268 - DNA, 25 bp, Homo sapien
gcaagccggcgagagaccgtgggag

SEQ ID NO: 165269 - DNA, 25 bp, Homo sapien
ccgagaagcaagccggcgagagacc

SEQ ID NO: 165270 - DNA, 25 bp, Homo sapien
ggcccccgcgactccactgcggcct

SEQ ID NO: 165271 - DNA, 25 bp, Homo sapien
cggaccgcagcgagaagggcgatgc

SEQ ID NO: 165272 - DNA, 25 bp, Homo sapien
gtgcgaggggcggtggtcagcgcgg

SEQ ID NO: 165273 - DNA, 25 bp, Homo sapien
gtggtcagcgcggagggccagagcg

SEQ ID NO: 165274 - DNA, 25 bp, Homo sapien
agggccagagcggaccgcagcgaga

SEQ ID NO: 165275 - DNA, 25 bp, Homo sapien
ctggagcagggccgcgcagatccac

SEQ ID NO: 165276 - DNA, 25 bp, Homo sapien
gcaggggtcagcgccgtggatccgg

SEQ ID NO: 165277 - DNA, 25 bp, Homo sapien
ggcaggggtcagcgccgtggatccg

SEQ ID NO: 165278 - DNA, 25 bp, Homo sapien
caggggtcagcgccgtggatccggg

SEQ ID NO: 165279 - DNA, 25 bp, Homo sapien
ccgtgggtcagcaacacaacggctc

SEQ ID NO: 165280 - DNA, 25 bp, Homo sapien
aggaaggtgtccagtatccgcgccc

SEQ ID NO: 165281 - DNA, 25 bp, Homo sapien
ggtgtccagtatccgcgcccggtac

SEQ ID NO: 165282 - DNA, 25 bp, Homo sapien
ggtaccgctccaggtcaaatgcggg

SEQ ID NO: 165283 - DNA, 25 bp, Homo sapien
cgggacgagcgtggcaccttggaca

SEQ ID NO: 165284 - DNA, 25 bp, Homo sapien
ctggatctccgtatcggcctcacgg

SEQ ID NO: 165285 - DNA, 25 bp, Homo sapien
ggatctccgtatcggcctcacggag

SEQ ID NO: 165286 - DNA, 25 bp, Homo sapien
tcacggagccgggacgagcgtggca

SEQ ID NO: 165287 - DNA, 25 bp, Homo sapien
tctcggcgacgtccgccaggagggc

SEQ ID NO: 165288 - DNA, 25 bp, Homo sapien
gccccgctccgcctgtctcgggccc

SEQ ID NO: 165289 - DNA, 25 bp, Homo sapien
cggcgacgtccgccaggagggcccg

SEQ ID NO: 165290 - DNA, 25 bp, Homo sapien
cgttctcggcgacgtccgccaggag

SEQ ID NO: 165291 - DNA, 25 bp, Homo sapien
gaggggccggctcagtcttccccgc

SEQ ID NO: 165292 - DNA, 25 bp, Homo sapien
tcccgcatggtcgcctccaggacgc

SEQ ID NO: 165293 - DNA, 25 bp, Homo sapien
catggtcgcctccaggacgccgagg

SEQ ID NO: 165294 - DNA, 25 bp, Homo sapien
ccgcatggtcgcctccaggacgccg

SEQ ID NO: 165295 - DNA, 25 bp, Homo sapien
gcatggtcgcctccaggacgccgag

SEQ ID NO: 165296 - DNA, 25 bp, Homo sapien
gctgccccagacgtgtgcgcccgac

SEQ ID NO: 165297 - DNA, 25 bp, Homo sapien
cagcggcggcgccaccagcaggacc

SEQ ID NO: 165298 - DNA, 25 bp, Homo sapien
gcagcgccagcagcacggcagccgc

SEQ ID NO: 165299 - DNA, 25 bp, Homo sapien
gcgccagcagcacggcagccgccac

SEQ ID NO: 165300 - DNA, 25 bp, Homo sapien
ctgagcctccccgcgcggcgcagca

SEQ ID NO: 165301 - DNA, 25 bp, Homo sapien
ctgagggcgtagcggggacgcagcg

SEQ ID NO: 165302 - DNA, 25 bp, Homo sapien
ggcgtagcggggacgcagcgtgagc

SEQ ID NO: 165303 - DNA, 25 bp, Homo sapien
gcgtagcggggacgcagcgtgagcc

SEQ ID NO: 165304 - DNA, 25 bp, Homo sapien
agggcgtagcggggacgcagcgtga

SEQ ID NO: 165305 - DNA, 25 bp, Homo sapien
cgggttgcggaagccgaggggcgct

SEQ ID NO: 165306 - DNA, 25 bp, Homo sapien
gggttgcggaagccgaggggcgctc

SEQ ID NO: 165307 - DNA, 25 bp, Homo sapien
tcggaggccgtcacgtcgaacaccg

SEQ ID NO: 165308 - DNA, 25 bp, Homo sapien
ccgtcacgtcgaacaccgggttgcg

SEQ ID NO: 165309 - DNA, 25 bp, Homo sapien
tcaggcggcggtcggcgccgagtcc

SEQ ID NO: 165310 - DNA, 25 bp, Homo sapien
cagggtcaggcggcggtcggcgccg

SEQ ID NO: 165311 - DNA, 25 bp, Homo sapien
gtcaggcggcggtcggcgccgagtc

SEQ ID NO: 165312 - DNA, 25 bp, Homo sapien
gtgacagggtcaggcggcggtcggc

SEQ ID NO: 165313 - DNA, 25 bp, Homo sapien
ccaggctgagccgccgcggcagggg

SEQ ID NO: 165314 - DNA, 25 bp, Homo sapien
cttcggaaccaggctgagccgccgc

SEQ ID NO: 165315 - DNA, 25 bp, Homo sapien
gaaccaggctgagccgccgcggcag

SEQ ID NO: 165316 - DNA, 25 bp, Homo sapien
ttcggaaccaggctgagccgccgcg

SEQ ID NO: 165317 - DNA, 25 bp, Homo sapien
cgaacagagggttgacgaagtaact

SEQ ID NO: 165318 - DNA, 25 bp, Homo sapien
ctcggccccggcgaacagagggttg

SEQ ID NO: 165319 - DNA, 25 bp, Homo sapien
gccccggcgaacagagggttgacga

SEQ ID NO: 165320 - DNA, 25 bp, Homo sapien
ccggcgaacagagggttgacgaagt

SEQ ID NO: 165321 - DNA, 25 bp, Homo sapien
ggtgaccccatatgatctgccttcg

SEQ ID NO: 165322 - DNA, 25 bp, Homo sapien
tttactgagtaaggccaccctgtcc

SEQ ID NO: 165323 - DNA, 25 bp, Homo sapien
actgtggcggtcactcaacgggaca

SEQ ID NO: 165324 - DNA, 25 bp, Homo sapien
tggcgcacgcttgcacatgggtgac

SEQ ID NO: 165325 - DNA, 25 bp, Homo sapien
tctgggtaactcactcggaggtcac

SEQ ID NO: 165326 - DNA, 25 bp, Homo sapien
gatgtggtaacatgtcacccgtgtg

SEQ ID NO: 165327 - DNA, 25 bp, Homo sapien
acagtccatctgtgacgggtgagca

SEQ ID NO: 165328 - DNA, 25 bp, Homo sapien
cagaagatgctattcgccagcagaa

SEQ ID NO: 165329 - DNA, 25 bp, Homo sapien
gcacttccccaagtcggcactgagt

SEQ ID NO: 165330 - DNA, 25 bp, Homo sapien
aagtcggcactgagtggcccagcac

SEQ ID NO: 165331 - DNA, 25 bp, Homo sapien
cagtctttgtaattaattattgaat

SEQ ID NO: 165332 - DNA, 25 bp, Homo sapien
tgttcaggacgtgcacttccccaag

SEQ ID NO: 165333 - DNA, 25 bp, Homo sapien
ttgtaccagatgttgagtgaccagc

SEQ ID NO: 165334 - DNA, 25 bp, Homo sapien
aggcttgtgattaactgtggcggca

SEQ ID NO: 165335 - DNA, 25 bp, Homo sapien
gccctgtgtcgtcagaggcttgtga

SEQ ID NO: 165336 - DNA, 25 bp, Homo sapien
gcttgtccacagcttgggccaggct

SEQ ID NO: 165337 - DNA, 25 bp, Homo sapien
ccccgtgattagtagcccgtatgat

SEQ ID NO: 165338 - DNA, 25 bp, Homo sapien
cagggcgccacgaagcagccactgg

SEQ ID NO: 165339 - DNA, 25 bp, Homo sapien
tgccataaaaccagcgagtgtcgtg

SEQ ID NO: 165340 - DNA, 25 bp, Homo sapien
cacagcaatcccctgcgcgtggatt

SEQ ID NO: 165341 - DNA, 25 bp, Homo sapien
agtgtcaccagtatctactactgtg

SEQ ID NO: 165342 - DNA, 25 bp, Homo sapien
gggtcgcagccatgaagtgtcacca

SEQ ID NO: 165343 - DNA, 25 bp, Homo sapien
cagtgacaccctgcgtccctgtgtg

SEQ ID NO: 165344 - DNA, 25 bp, Homo sapien
cattaagttcattctgggtcgcagc

SEQ ID NO: 165345 - DNA, 25 bp, Homo sapien
ctgacaacccgagagggcatatggg

SEQ ID NO: 165346 - DNA, 25 bp, Homo sapien
tcatgacgcggctgcttcggaagca

SEQ ID NO: 165347 - DNA, 25 bp, Homo sapien
ggaggtcctatagcattcccagtgt

SEQ ID NO: 165348 - DNA, 25 bp, Homo sapien
ccttaagagaatagtaggaggtcct

SEQ ID NO: 165349 - DNA, 25 bp, Homo sapien
tggcagtagaccacatctgttcgtc

SEQ ID NO: 165350 - DNA, 25 bp, Homo sapien
tatgccgcattgttcgtggcagtag

SEQ ID NO: 165351 - DNA, 25 bp, Homo sapien
cagctgtgaggcgatgctgttccat

SEQ ID NO: 165352 - DNA, 25 bp, Homo sapien
attgatcagttttatgccgcattgt

SEQ ID NO: 165353 - DNA, 25 bp, Homo sapien
agtgccaagactgagcgggccctcc

SEQ ID NO: 165354 - DNA, 25 bp, Homo sapien
agcagccggcctgtgacacctgaag

SEQ ID NO: 165355 - DNA, 25 bp, Homo sapien
gggccctccagtgttgtccaaggaa

SEQ ID NO: 165356 - DNA, 25 bp, Homo sapien
tcaactccatcgaatagctccaacc

SEQ ID NO: 165357 - DNA, 25 bp, Homo sapien
aagagcagttgcgacagttgtccct

SEQ ID NO: 165358 - DNA, 25 bp, Homo sapien
aagggccccacgaatcgctggtgta

SEQ ID NO: 165359 - DNA, 25 bp, Homo sapien
tgatttcttcactacagagttgctg

SEQ ID NO: 165360 - DNA, 25 bp, Homo sapien
tgttcacagcctgattcggactcca

SEQ ID NO: 165361 - DNA, 25 bp, Homo sapien
ccctcttagggtactgtgtcctgag

SEQ ID NO: 165362 - DNA, 25 bp, Homo sapien
gtccctcttagggtactgtgtcctg

SEQ ID NO: 165363 - DNA, 25 bp, Homo sapien
tggtgtccctcttagggtactgtgt

SEQ ID NO: 165364 - DNA, 25 bp, Homo sapien
gacatggtgtccctcttagggtact

SEQ ID NO: 165365 - DNA, 25 bp, Homo sapien
aatggctagctggttgtccaatacc

SEQ ID NO: 165366 - DNA, 25 bp, Homo sapien
tacaggatcaccatgggcttgggtc

SEQ ID NO: 165367 - DNA, 25 bp, Homo sapien
catacggttcgaggagtgtatccag

SEQ ID NO: 165368 - DNA, 25 bp, Homo sapien
agcaatctgactgccgtgtctccca

SEQ ID NO: 165369 - DNA, 25 bp, Homo sapien
tttacattcacaacggaaaggtatg

SEQ ID NO: 165370 - DNA, 25 bp, Homo sapien
ttacattcacaacggaaaggtatgt

SEQ ID NO: 165371 - DNA, 25 bp, Homo sapien
catagcaagctctccgtaatgtact

SEQ ID NO: 165372 - DNA, 25 bp, Homo sapien
caaatgtaagacagtttgaatcttg

SEQ ID NO: 165373 - DNA, 25 bp, Homo sapien
tgagagccggtcagaactgtgccct

SEQ ID NO: 165374 - DNA, 25 bp, Homo sapien
ccatggccagcctgaaaggaaaact

SEQ ID NO: 165375 - DNA, 25 bp, Homo sapien
atcctctcccgtgactcccgcctct

SEQ ID NO: 165376 - DNA, 25 bp, Homo sapien
ttcctggccagttgacctgcttcct

SEQ ID NO: 165377 - DNA, 25 bp, Homo sapien
gctccatcctctcccgtgactcccg

SEQ ID NO: 165378 - DNA, 25 bp, Homo sapien
tcctcacccgccctgttgtcttccc

SEQ ID NO: 165379 - DNA, 25 bp, Homo sapien
ctttttcttagttccgtgtcagtct

SEQ ID NO: 165380 - DNA, 25 bp, Homo sapien
agccgcgtgctctgccattggtctc

SEQ ID NO: 165381 - DNA, 25 bp, Homo sapien
agttccgtgtcagtcttcttggtgg

SEQ ID NO: 165382 - DNA, 25 bp, Homo sapien
ttggtggccattccatgcctctgac

SEQ ID NO: 165383 - DNA, 25 bp, Homo sapien
cagaataggtctttagattcccacc

SEQ ID NO: 165384 - DNA, 25 bp, Homo sapien
gaattaacacgtttggaccctgctc

SEQ ID NO: 165385 - DNA, 25 bp, Homo sapien
tagaggatcctcacgattagaaatg

SEQ ID NO: 165386 - DNA, 25 bp, Homo sapien
cgggagagtttcagcattgattgca

SEQ ID NO: 165387 - DNA, 25 bp, Homo sapien
gagtgcaccctcgagaatgttggcg

SEQ ID NO: 165388 - DNA, 25 bp, Homo sapien
tgttggcgggtcctgtttactgtaa

SEQ ID NO: 165389 - DNA, 25 bp, Homo sapien
tcagcgaccacttgcttgctggaca

SEQ ID NO: 165390 - DNA, 25 bp, Homo sapien
gacagagcgagcactctcttttgag

SEQ ID NO: 165391 - DNA, 25 bp, Homo sapien
cacatgctaggtgggaaacttggct

SEQ ID NO: 165392 - DNA, 25 bp, Homo sapien
ccagtgagtagcttacaggaagtgc

SEQ ID NO: 165393 - DNA, 25 bp, Homo sapien
taactgtcagtgctcatgggtcctc

SEQ ID NO: 165394 - DNA, 25 bp, Homo sapien
ttgggcccgtgtgtgagtgacttac

SEQ ID NO: 165395 - DNA, 25 bp, Homo sapien
agggataggggaggagagcagcccc

SEQ ID NO: 165396 - DNA, 25 bp, Homo sapien
gagagcagcccctgcaaggctcgtc

SEQ ID NO: 165397 - DNA, 25 bp, Homo sapien
aggagagcagcccctgcaaggctcg

SEQ ID NO: 165398 - DNA, 25 bp, Homo sapien
gagcagcccctgcaaggctcgtccc

SEQ ID NO: 165399 - DNA, 25 bp, Homo sapien
ctccacagacctgcctcggccttgc

SEQ ID NO: 165400 - DNA, 25 bp, Homo sapien
acctgcctcggccttgcagaacagt

SEQ ID NO: 165401 - DNA, 25 bp, Homo sapien
cctgcctcggccttgcagaacagtt

SEQ ID NO: 165402 - DNA, 25 bp, Homo sapien
acagacctgcctcggccttgcagaa

SEQ ID NO: 165403 - DNA, 25 bp, Homo sapien
caggtcccttgtatggggctgggag

SEQ ID NO: 165404 - DNA, 25 bp, Homo sapien
aggcccgtggcacggtgtggcctcg

SEQ ID NO: 165405 - DNA, 25 bp, Homo sapien
gtggcacggtgtggcctcgccttcc

SEQ ID NO: 165406 - DNA, 25 bp, Homo sapien
tcccttgtatggggctgggagccct

SEQ ID NO: 165407 - DNA, 25 bp, Homo sapien
gctgttgacacacgcggtgtggctc

SEQ ID NO: 165408 - DNA, 25 bp, Homo sapien
tctgggtccggttggctttgcctag

SEQ ID NO: 165409 - DNA, 25 bp, Homo sapien
ggagggccagtcatgcaggtgcagc

SEQ ID NO: 165410 - DNA, 25 bp, Homo sapien
cttgctgttgacacacgcggtgtgg

SEQ ID NO: 165411 - DNA, 25 bp, Homo sapien
gggacactatccagcccagtacagt

SEQ ID NO: 165412 - DNA, 25 bp, Homo sapien
tagggcctaccctattccagcaggt

SEQ ID NO: 165413 - DNA, 25 bp, Homo sapien
gcctgactggtggacattactgtta

SEQ ID NO: 165414 - DNA, 25 bp, Homo sapien
gaattagtctcagagagtccgcgtg

SEQ ID NO: 165415 - DNA, 25 bp, Homo sapien
agttgtggtgatcgaacctcagtgg

SEQ ID NO: 165416 - DNA, 25 bp, Homo sapien
tggtgatcgaacctcagtggtgttg

SEQ ID NO: 165417 - DNA, 25 bp, Homo sapien
tgtggctcttgcagttgtggtgatc

SEQ ID NO: 165418 - DNA, 25 bp, Homo sapien
atcgaacctcagtggtgttgagcaa

SEQ ID NO: 165419 - DNA, 25 bp, Homo sapien
tccgcgtaggtcttgctgggccgtc

SEQ ID NO: 165420 - DNA, 25 bp, Homo sapien
cggcctccgcgtaggtcttgctggg

SEQ ID NO: 165421 - DNA, 25 bp, Homo sapien
gctgggccgtcggtaggtgcctccc

SEQ ID NO: 165422 - DNA, 25 bp, Homo sapien
tcttgctgggccgtcggtaggtgcc

SEQ ID NO: 165423 - DNA, 25 bp, Homo sapien
gaaggagtgaggattcattctcgat

SEQ ID NO: 165424 - DNA, 25 bp, Homo sapien
tactctggcgttgtactaggaagga

SEQ ID NO: 165425 - DNA, 25 bp, Homo sapien
tcagttaaacagagacaagtccgag

SEQ ID NO: 165426 - DNA, 25 bp, Homo sapien
gaggaagatgcgtagacggttctct

SEQ ID NO: 165427 - DNA, 25 bp, Homo sapien
ggccacaaagatttacatgtggttt

SEQ ID NO: 165428 - DNA, 25 bp, Homo sapien
gttttacctgtaagaatccattgcc

SEQ ID NO: 165429 - DNA, 25 bp, Homo sapien
tacctgtaagaatccattgcctaat

SEQ ID NO: 165430 - DNA, 25 bp, Homo sapien
catgttttacctgtaagaatccatt

SEQ ID NO: 165431 - DNA, 25 bp, Homo sapien
ttaaaagctgattttgataagtcta

SEQ ID NO: 165432 - DNA, 25 bp, Homo sapien
gctgattttgataagtctaaaagtc

SEQ ID NO: 165433 - DNA, 25 bp, Homo sapien
ggctcacgcctataagaggtgggca

SEQ ID NO: 165434 - DNA, 25 bp, Homo sapien
tgggcagatatacctgagtccagcc

SEQ ID NO: 165435 - DNA, 25 bp, Homo sapien
ggccacgagccagctgccagtcctt

SEQ ID NO: 165436 - DNA, 25 bp, Homo sapien
gtggggcttccatgccattctggct

SEQ ID NO: 165437 - DNA, 25 bp, Homo sapien
agtggggcttccatgccattctggc

SEQ ID NO: 165438 - DNA, 25 bp, Homo sapien
gtcccaacgcggtgtgcagggcaat

SEQ ID NO: 165439 - DNA, 25 bp, Homo sapien
ggtggactcgtactgcctccttgga

SEQ ID NO: 165440 - DNA, 25 bp, Homo sapien
cgcaccttggtgtgatttcgcactg

SEQ ID NO: 165441 - DNA, 25 bp, Homo sapien
acagacgtttgggatgggcatgacc

SEQ ID NO: 165442 - DNA, 25 bp, Homo sapien
tccttgtctctttgccggtatgcca

SEQ ID NO: 165443 - DNA, 25 bp, Homo sapien
agagccgggcgtcagcatggaccat

SEQ ID NO: 165444 - DNA, 25 bp, Homo sapien
gtatgccaaagagccgggcgtcagc

SEQ ID NO: 165445 - DNA, 25 bp, Homo sapien
gatttattacaagtcccaagagggc

SEQ ID NO: 165446 - DNA, 25 bp, Homo sapien
gaaactctggtgattactggctgtc

SEQ ID NO: 165447 - DNA, 25 bp, Homo sapien
gaggaaatagagcatggaccctgcc

SEQ ID NO: 165448 - DNA, 25 bp, Homo sapien
gaaactccctgtatgcatagggccg

SEQ ID NO: 165449 - DNA, 25 bp, Homo sapien
tatgaatgggacgattggaaactcc

SEQ ID NO: 165450 - DNA, 25 bp, Homo sapien
tcgtctgcctgtacaccgagtgcag

SEQ ID NO: 165451 - DNA, 25 bp, Homo sapien
tggaaacgctgctcgacgtgctcgt

SEQ ID NO: 165452 - DNA, 25 bp, Homo sapien
agagcgccctgagcgtggaaacgct

SEQ ID NO: 165453 - DNA, 25 bp, Homo sapien
accatgtcggccaaggtgcggctca

SEQ ID NO: 165454 - DNA, 25 bp, Homo sapien
gcgccgtcgggacggagcccaagat

SEQ ID NO: 165455 - DNA, 25 bp, Homo sapien
agcccaagatgtcggcctaggccgg

SEQ ID NO: 165456 - DNA, 25 bp, Homo sapien
ggacggagcccaagatgtcggccta

SEQ ID NO: 165457 - DNA, 25 bp, Homo sapien
ggcgccccagactctgcgccgtcgg

SEQ ID NO: 165458 - DNA, 25 bp, Homo sapien
ggcggcgccgaggggaggagagcgg

SEQ ID NO: 165459 - DNA, 25 bp, Homo sapien
gaggggaggagagcggcccatggac

SEQ ID NO: 165460 - DNA, 25 bp, Homo sapien
cggcgggggcgggccgcccgagctg

SEQ ID NO: 165461 - DNA, 25 bp, Homo sapien
ggcgggccgcccgagctgggagggc

SEQ ID NO: 165462 - DNA, 25 bp, Homo sapien
tgataccccaaaggcaaccagtact

SEQ ID NO: 165463 - DNA, 25 bp, Homo sapien
gtgacatgcactcatcttaagaaga

SEQ ID NO: 165464 - DNA, 25 bp, Homo sapien
gcatagaacattaccagcagcccag

SEQ ID NO: 165465 - DNA, 25 bp, Homo sapien
gaatgtttacttatgcgtgctccca

SEQ ID NO: 165466 - DNA, 25 bp, Homo sapien
gcagagactgtagggttcataaaac

SEQ ID NO: 165467 - DNA, 25 bp, Homo sapien
gctacgggtctgcaggccaaattta

SEQ ID NO: 165468 - DNA, 25 bp, Homo sapien
agcaaggagcagcaagctacgggtc

SEQ ID NO: 165469 - DNA, 25 bp, Homo sapien
gctgttgagctgaagtctcaccatc

SEQ ID NO: 165470 - DNA, 25 bp, Homo sapien
gggcctccgcgctccgctggctccg

SEQ ID NO: 165471 - DNA, 25 bp, Homo sapien
tgctggcgctggggcctccgcgctc

SEQ ID NO: 165472 - DNA, 25 bp, Homo sapien
cgctggctccgcgctctcccggctc

SEQ ID NO: 165473 - DNA, 25 bp, Homo sapien
ctggggcctccgcgctccgctggct

SEQ ID NO: 165474 - DNA, 25 bp, Homo sapien
ccagcgccgcgggatcccaggtctt

SEQ ID NO: 165475 - DNA, 25 bp, Homo sapien
gcgccgcgggatcccaggtcttgct

SEQ ID NO: 165476 - DNA, 25 bp, Homo sapien
ccccggggacacaagcgcgcggagg

SEQ ID NO: 165477 - DNA, 25 bp, Homo sapien
cacagccccggggacacaagcgcgc

SEQ ID NO: 165478 - DNA, 25 bp, Homo sapien
ctgcgctcgggccgtgtgggctctt

SEQ ID NO: 165479 - DNA, 25 bp, Homo sapien
gcgctcgggccgtgtgggctcttgg

SEQ ID NO: 165480 - DNA, 25 bp, Homo sapien
cgctcgggccgtgtgggctcttggg

SEQ ID NO: 165481 - DNA, 25 bp, Homo sapien
tgcgctcgggccgtgtgggctcttg

SEQ ID NO: 165482 - DNA, 25 bp, Homo sapien
ctgctgccgccactgcgccactaag

SEQ ID NO: 165483 - DNA, 25 bp, Homo sapien
gctgctgccgccactgcgccactaa

SEQ ID NO: 165484 - DNA, 25 bp, Homo sapien
ctcagcagcgcctggctgtggtgga

SEQ ID NO: 165485 - DNA, 25 bp, Homo sapien
ttctgggcctccagccccctcagca

SEQ ID NO: 165486 - DNA, 25 bp, Homo sapien
cccctcagcagcgcctggctgtggt

SEQ ID NO: 165487 - DNA, 25 bp, Homo sapien
tgtggtggagcaggccggggggtgc

SEQ ID NO: 165488 - DNA, 25 bp, Homo sapien
ctgcaaggaggatgggcaggatcat

SEQ ID NO: 165489 - DNA, 25 bp, Homo sapien
gcccagccgagggcccttctcccag

SEQ ID NO: 165490 - DNA, 25 bp, Homo sapien
cacgattgagggcagccgctggccc

SEQ ID NO: 165491 - DNA, 25 bp, Homo sapien
ggcccagccgagggcccttctccca

SEQ ID NO: 165492 - DNA, 25 bp, Homo sapien
ccactttccacagggtccgcctcgc

SEQ ID NO: 165493 - DNA, 25 bp, Homo sapien
cccgaaatgagcgtttggcaggcaa

SEQ ID NO: 165494 - DNA, 25 bp, Homo sapien
ctgcagaaacataaaggcggccgtg

SEQ ID NO: 165495 - DNA, 25 bp, Homo sapien
aaatgagcgtttggcaggcaactgg

SEQ ID NO: 165496 - DNA, 25 bp, Homo sapien
cagaaacataaaggcggccgtgttg

SEQ ID NO: 165497 - DNA, 25 bp, Homo sapien
aggcacactcgctgccagcgttatc

SEQ ID NO: 165498 - DNA, 25 bp, Homo sapien
gttctccgggcagactcggcgaggg

SEQ ID NO: 165499 - DNA, 25 bp, Homo sapien
ctgccagcgttatctgcagctttcc

SEQ ID NO: 165500 - DNA, 25 bp, Homo sapien
acactcgctgccagcgttatctgca

SEQ ID NO: 165501 - DNA, 25 bp, Homo sapien
tctgcttcaaaccacggaacaaagc

SEQ ID NO: 165502 - DNA, 25 bp, Homo sapien
tgcttcaaaccacggaacaaagcgg

SEQ ID NO: 165503 - DNA, 25 bp, Homo sapien
cggtccagaccctgtgacacaggaa

SEQ ID NO: 165504 - DNA, 25 bp, Homo sapien
tgacacaggaagcagcctctgggct

SEQ ID NO: 165505 - DNA, 25 bp, Homo sapien
cacccagtgtcctagggctgagggc

SEQ ID NO: 165506 - DNA, 25 bp, Homo sapien
gccccgtgcagcagcatcctaggac

SEQ ID NO: 165507 - DNA, 25 bp, Homo sapien
ggccccgtgcagcagcatcctagga

SEQ ID NO: 165508 - DNA, 25 bp, Homo sapien
ccccgtgcagcagcatcctaggact

SEQ ID NO: 165509 - DNA, 25 bp, Homo sapien
attccgcagcgagcgtcttaggaaa

SEQ ID NO: 165510 - DNA, 25 bp, Homo sapien
gcgtcttaggaaacaactcagggaa

SEQ ID NO: 165511 - DNA, 25 bp, Homo sapien
taggaaacaactcagggaaaatcca

SEQ ID NO: 165512 - DNA, 25 bp, Homo sapien
cctgcatagggggattccgcagcga

SEQ ID NO: 165513 - DNA, 25 bp, Homo sapien
ttgagagccacatgccattcctggg

SEQ ID NO: 165514 - DNA, 25 bp, Homo sapien
gcaaaggcagcagttgagagccaca

SEQ ID NO: 165515 - DNA, 25 bp, Homo sapien
ggtgacagcaaaggcagcagttgag

SEQ ID NO: 165516 - DNA, 25 bp, Homo sapien
ccacatgccattcctgggggcttca

SEQ ID NO: 165517 - DNA, 25 bp, Homo sapien
ctcagtccaagggtcagagaacaag

SEQ ID NO: 165518 - DNA, 25 bp, Homo sapien
cagggctcagtccaagggtcagaga

SEQ ID NO: 165519 - DNA, 25 bp, Homo sapien
tttccattccagacagctcagggct

SEQ ID NO: 165520 - DNA, 25 bp, Homo sapien
cattccagacagctcagggctcagt

SEQ ID NO: 165521 - DNA, 25 bp, Homo sapien
ttgcaagctttccttttccttccag

SEQ ID NO: 165522 - DNA, 25 bp, Homo sapien
aagctttccttgcaagctttccttt

SEQ ID NO: 165523 - DNA, 25 bp, Homo sapien
cttgcaagctttccttttccttcca

SEQ ID NO: 165524 - DNA, 25 bp, Homo sapien
tgcaagctttccttttccttccagc

SEQ ID NO: 165525 - DNA, 25 bp, Homo sapien
atccaccttcacctgatcacagcct

SEQ ID NO: 165526 - DNA, 25 bp, Homo sapien
tccaccttcacctgatcacagcctc

SEQ ID NO: 165527 - DNA, 25 bp, Homo sapien
tggaccatcgctccactcctcaacg

SEQ ID NO: 165528 - DNA, 25 bp, Homo sapien
atcgctccactcctcaacgctccaa

SEQ ID NO: 165529 - DNA, 25 bp, Homo sapien
gctccactcctcaacgctccaaagg

SEQ ID NO: 165530 - DNA, 25 bp, Homo sapien
ctgggactggaccatcgctccactc

SEQ ID NO: 165531 - DNA, 25 bp, Homo sapien
ttcagatgccttgcaccaccggccg

SEQ ID NO: 165532 - DNA, 25 bp, Homo sapien
tgggtactcggcactgtccctgtga

SEQ ID NO: 165533 - DNA, 25 bp, Homo sapien
catctatctgctcagtgggtactcg

SEQ ID NO: 165534 - DNA, 25 bp, Homo sapien
tatctgctcagtgggtactcggcac

SEQ ID NO: 165535 - DNA, 25 bp, Homo sapien
gtgttgtgaagagaacggttcagca

SEQ ID NO: 165536 - DNA, 25 bp, Homo sapien
tcatgcttggcatgggggccggcgc

SEQ ID NO: 165537 - DNA, 25 bp, Homo sapien
ggggtgttgtgaagagaacggttca

SEQ ID NO: 165538 - DNA, 25 bp, Homo sapien
cttcatgcttggcatgggggccggc

SEQ ID NO: 165539 - DNA, 25 bp, Homo sapien
ctgcctgattcggacttgacccaca

SEQ ID NO: 165540 - DNA, 25 bp, Homo sapien
cctgcctgattcggacttgacccac

SEQ ID NO: 165541 - DNA, 25 bp, Homo sapien
tgcctgattcggacttgacccacac

SEQ ID NO: 165542 - DNA, 25 bp, Homo sapien
ttcccccagcgccagggttcaggga

SEQ ID NO: 165543 - DNA, 25 bp, Homo sapien
tgaggttcccagaggcggctaagca

SEQ ID NO: 165544 - DNA, 25 bp, Homo sapien
atggagctttatcagccccgccctg

SEQ ID NO: 165545 - DNA, 25 bp, Homo sapien
gacagtcaagtgattgatggagctt

SEQ ID NO: 165546 - DNA, 25 bp, Homo sapien
aaggcctgactactttggctcaacg

SEQ ID NO: 165547 - DNA, 25 bp, Homo sapien
gcccaaaaggcctgactactttggc

SEQ ID NO: 165548 - DNA, 25 bp, Homo sapien
ggcctgactactttggctcaacggg

SEQ ID NO: 165549 - DNA, 25 bp, Homo sapien
caaaaggcctgactactttggctca

SEQ ID NO: 165550 - DNA, 25 bp, Homo sapien
gatgcagaaacctgttgtggccctg

SEQ ID NO: 165551 - DNA, 25 bp, Homo sapien
gcagatgcagaaacctgttgtggcc

SEQ ID NO: 165552 - DNA, 25 bp, Homo sapien
cacacccaggggcttggtcaaggaa

SEQ ID NO: 165553 - DNA, 25 bp, Homo sapien
cagaaacctgttgtggccctgtggg

SEQ ID NO: 165554 - DNA, 25 bp, Homo sapien
tcctgctgcttgttcgccgggagcc

SEQ ID NO: 165555 - DNA, 25 bp, Homo sapien
gctccggcccaggagtgtctgtctg

SEQ ID NO: 165556 - DNA, 25 bp, Homo sapien
ttggagacctgggtcaaagcccgct

SEQ ID NO: 165557 - DNA, 25 bp, Homo sapien
ttgcggtgggcattgggctctttcc

SEQ ID NO: 165558 - DNA, 25 bp, Homo sapien
tgacaccattcatgacccccgaggg

SEQ ID NO: 165559 - DNA, 25 bp, Homo sapien
tcattcagggcttgccggaaggacc

SEQ ID NO: 165560 - DNA, 25 bp, Homo sapien
tgcctcgggtttcagttcctcagac

SEQ ID NO: 165561 - DNA, 25 bp, Homo sapien
ttcgccggaacaggcccgtatcttc

SEQ ID NO: 165562 - DNA, 25 bp, Homo sapien
cacaggcgggcgagaagggcggtga

SEQ ID NO: 165563 - DNA, 25 bp, Homo sapien
gaacctggacgaagacctgcaggcc

SEQ ID NO: 165564 - DNA, 25 bp, Homo sapien
tgcaggccacggctcaatccatcgg

SEQ ID NO: 165565 - DNA, 25 bp, Homo sapien
catcggggctggattgtctgtcctc

SEQ ID NO: 165566 - DNA, 25 bp, Homo sapien
gtaaagcaggcacacgtccatagcg

SEQ ID NO: 165567 - DNA, 25 bp, Homo sapien
tctccaggcgcagaagctgttcgaa

SEQ ID NO: 165568 - DNA, 25 bp, Homo sapien
cagcagttgccgttcagtaatgagg

SEQ ID NO: 165569 - DNA, 25 bp, Homo sapien
aatgaggtcggccacggatttgcct

SEQ ID NO: 165570 - DNA, 25 bp, Homo sapien
ggtctgaccccacacaatttaagga

SEQ ID NO: 165571 - DNA, 25 bp, Homo sapien
agtctaacgccaatcccgaacctgg

SEQ ID NO: 165572 - DNA, 25 bp, Homo sapien
tctggccaggctcaaagtctaacgc

SEQ ID NO: 165573 - DNA, 25 bp, Homo sapien
tcctgcagaacgctgaaggacggct

SEQ ID NO: 165574 - DNA, 25 bp, Homo sapien
tggtgtagtcgctctccagtcgggc

SEQ ID NO: 165575 - DNA, 25 bp, Homo sapien
ggtgtagtcgctctccagtcgggcc

SEQ ID NO: 165576 - DNA, 25 bp, Homo sapien
gctggtgtagtcgctctccagtcgg

SEQ ID NO: 165577 - DNA, 25 bp, Homo sapien
tgtagtcgctctccagtcgggccca

SEQ ID NO: 165578 - DNA, 25 bp, Homo sapien
tatggacgtccatggacagcggcgc

SEQ ID NO: 165579 - DNA, 25 bp, Homo sapien
gctgcaagatgctgtcgaagcagct

SEQ ID NO: 165580 - DNA, 25 bp, Homo sapien
tcggcggccgcccagtgactctgct

SEQ ID NO: 165581 - DNA, 25 bp, Homo sapien
tgtcgaagcagcttgcgatcttggc

SEQ ID NO: 165582 - DNA, 25 bp, Homo sapien
tcaggctcccatctaacggaagggt

SEQ ID NO: 165583 - DNA, 25 bp, Homo sapien
tcgttctggaaatcgccaccgtgtg

SEQ ID NO: 165584 - DNA, 25 bp, Homo sapien
tttcagccgcccaactggagagtca

SEQ ID NO: 165585 - DNA, 25 bp, Homo sapien
ccaccgtgtgcgtgaggcttgaaca

SEQ ID NO: 165586 - DNA, 25 bp, Homo sapien
tccagctccgcggagatggcgccgg

SEQ ID NO: 165587 - DNA, 25 bp, Homo sapien
ctgggcacgaagaggccgagcgccc

SEQ ID NO: 165588 - DNA, 25 bp, Homo sapien
agatggcgccggccgccttcacgtg

SEQ ID NO: 165589 - DNA, 25 bp, Homo sapien
cgtgcagattcgcagggtggtggcc

SEQ ID NO: 165590 - DNA, 25 bp, Homo sapien
ctggggcgggatacacagagccttt

SEQ ID NO: 165591 - DNA, 25 bp, Homo sapien
cctcccaatcaggtccctacgcaga

SEQ ID NO: 165592 - DNA, 25 bp, Homo sapien
gggaccctccctagctgcgcgatga

SEQ ID NO: 165593 - DNA, 25 bp, Homo sapien
aggtcgctcccctactgaggatgcg

SEQ ID NO: 165594 - DNA, 25 bp, Homo sapien
tcgcaggcgttgatgtaggcgccca

SEQ ID NO: 165595 - DNA, 25 bp, Homo sapien
taggcgcccaggtgcggctcgctca

SEQ ID NO: 165596 - DNA, 25 bp, Homo sapien
ctgagctcctcgcaggcgttgatgt

SEQ ID NO: 165597 - DNA, 25 bp, Homo sapien
cgcctccgacgccagaaaagccttt

SEQ ID NO: 165598 - DNA, 25 bp, Homo sapien
aactcacgctgcaagccctgaagca

SEQ ID NO: 165599 - DNA, 25 bp, Homo sapien
tgcaactcacgctgcaagccctgaa

SEQ ID NO: 165600 - DNA, 25 bp, Homo sapien
agccctgaagcaagtgcttctggaa

SEQ ID NO: 165601 - DNA, 25 bp, Homo sapien
gaagctgcaggtggccgtcaccagg

SEQ ID NO: 165602 - DNA, 25 bp, Homo sapien
tggtgcacacaaccctgaagagcgg

SEQ ID NO: 165603 - DNA, 25 bp, Homo sapien
cacacgctggagatgaccggcgaag

SEQ ID NO: 165604 - DNA, 25 bp, Homo sapien
ggccacacgctggagatgaccggcg

SEQ ID NO: 165605 - DNA, 25 bp, Homo sapien
ggagatgaccggcgaaggtcaccac

SEQ ID NO: 165606 - DNA, 25 bp, Homo sapien
ccctggaaggtgtcgctgatggcct

SEQ ID NO: 165607 - DNA, 25 bp, Homo sapien
tccatgccccggaaccgctcccgtg

SEQ ID NO: 165608 - DNA, 25 bp, Homo sapien
agcgcccgcgccaggtactcgcgga

SEQ ID NO: 165609 - DNA, 25 bp, Homo sapien
tactcgcggaccacgaaccggtgca

SEQ ID NO: 165610 - DNA, 25 bp, Homo sapien
gatggcttggtccaaccatgtggcc

SEQ ID NO: 165611 - DNA, 25 bp, Homo sapien
gtcatctttgtaggtctcgcccagg

SEQ ID NO: 165612 - DNA, 25 bp, Homo sapien
ctgatgtcggggtagctccggataa

SEQ ID NO: 165613 - DNA, 25 bp, Homo sapien
tagctccggataagagtctccaggt

SEQ ID NO: 165614 - DNA, 25 bp, Homo sapien
ctgcagagacatgcgggcactcact

SEQ ID NO: 165615 - DNA, 25 bp, Homo sapien
tgcagagacatgcgggcactcactg

SEQ ID NO: 165616 - DNA, 25 bp, Homo sapien
cagcgccagaatggccagtatgtgg

SEQ ID NO: 165617 - DNA, 25 bp, Homo sapien
tgcaagagatgctggttccgctggc

SEQ ID NO: 165618 - DNA, 25 bp, Homo sapien
gcccagtcggcgcagcgccagaatg

SEQ ID NO: 165619 - DNA, 25 bp, Homo sapien
agcaggtcttgagtgtgctgcaaga

SEQ ID NO: 165620 - DNA, 25 bp, Homo sapien
ctagacgcaggtgatcagcacagcc

SEQ ID NO: 165621 - DNA, 25 bp, Homo sapien
agacgcaggtgatcagcacagccat

SEQ ID NO: 165622 - DNA, 25 bp, Homo sapien
tagacgcaggtgatcagcacagcca

SEQ ID NO: 165623 - DNA, 25 bp, Homo sapien
gacgcaggtgatcagcacagccatg

SEQ ID NO: 165624 - DNA, 25 bp, Homo sapien
aaattccctaactgcagtgtcagag

SEQ ID NO: 165625 - DNA, 25 bp, Homo sapien
ctgctgacgacaaaaattccctaac

SEQ ID NO: 165626 - DNA, 25 bp, Homo sapien
ccctaactgcagtgtcagagttggg

SEQ ID NO: 165627 - DNA, 25 bp, Homo sapien
ccacagctccctgccagcggccggc

SEQ ID NO: 165628 - DNA, 25 bp, Homo sapien
actcccctcaacgatgcctgaaatg

SEQ ID NO: 165629 - DNA, 25 bp, Homo sapien
ccccccgcccgataggcagcattga

SEQ ID NO: 165630 - DNA, 25 bp, Homo sapien
ggtgaagctggacagtcgggcggga

SEQ ID NO: 165631 - DNA, 25 bp, Homo sapien
tgaaatgcctcctgcacggctgctc

SEQ ID NO: 165632 - DNA, 25 bp, Homo sapien
ccctgggcctcatgatggcctgtga

SEQ ID NO: 165633 - DNA, 25 bp, Homo sapien
tggcctgtgagttgcatgcgccgac

SEQ ID NO: 165634 - DNA, 25 bp, Homo sapien
cagtcttgttgcagcacagtggccg

SEQ ID NO: 165635 - DNA, 25 bp, Homo sapien
aaggaagagggcacgctgtgcaggc

SEQ ID NO: 165636 - DNA, 25 bp, Homo sapien
cagcatcacatgctgggtggcgatg

SEQ ID NO: 165637 - DNA, 25 bp, Homo sapien
cctcttctcgcagatgcagaaagca

SEQ ID NO: 165638 - DNA, 25 bp, Homo sapien
agtggccagcggctgtcccattccc

SEQ ID NO: 165639 - DNA, 25 bp, Homo sapien
gcgatgtttgtgaccagtggccagc

SEQ ID NO: 165640 - DNA, 25 bp, Homo sapien
agttcatccacacaggggcgatgag

SEQ ID NO: 165641 - DNA, 25 bp, Homo sapien
gtggctgccttcacggctggctgct

SEQ ID NO: 165642 - DNA, 25 bp, Homo sapien
tcctaggactccagggatgacattt

SEQ ID NO: 165643 - DNA, 25 bp, Homo sapien
gcaccgcgcagatggagttcatcca

SEQ ID NO: 165644 - DNA, 25 bp, Homo sapien
tgccatccatcatcctgtctctggg

SEQ ID NO: 165645 - DNA, 25 bp, Homo sapien
ggtttgcactcggattgccatccat

SEQ ID NO: 165646 - DNA, 25 bp, Homo sapien
tggccaagcgccaggtttgcactcg

SEQ ID NO: 165647 - DNA, 25 bp, Homo sapien
agagtgctggccaagcgccaggttt

SEQ ID NO: 165648 - DNA, 25 bp, Homo sapien
agccgcccctctgaagtgttccggt

SEQ ID NO: 165649 - DNA, 25 bp, Homo sapien
gcccctctgaagtgttccggtgtca

SEQ ID NO: 165650 - DNA, 25 bp, Homo sapien
ctctgaagtgttccggtgtcaccgt

SEQ ID NO: 165651 - DNA, 25 bp, Homo sapien
gaagtgttccggtgtcaccgtggcc

SEQ ID NO: 165652 - DNA, 25 bp, Homo sapien
tgtcctggcccgggttccgcaaggc

SEQ ID NO: 165653 - DNA, 25 bp, Homo sapien
ccgcgcgtcgcatggtatgtggagt

SEQ ID NO: 165654 - DNA, 25 bp, Homo sapien
ggatgcggggcgctgtcacttcctc

SEQ ID NO: 165655 - DNA, 25 bp, Homo sapien
caaggcctgaaatagtcgcagagtc

SEQ ID NO: 165656 - DNA, 25 bp, Homo sapien
gcaggatgtggaaggcgcacccatc

SEQ ID NO: 165657 - DNA, 25 bp, Homo sapien
aagtgactcggcctgtgtcgcccgg

SEQ ID NO: 165658 - DNA, 25 bp, Homo sapien
cgcggcgacaggctctttcctcggg

SEQ ID NO: 165659 - DNA, 25 bp, Homo sapien
tggacgtgtggaagcggaggtcact

SEQ ID NO: 165660 - DNA, 25 bp, Homo sapien
ccccacagcatcaccgccttctccc

SEQ ID NO: 165661 - DNA, 25 bp, Homo sapien
ccacagcatcaccgccttctcccct

SEQ ID NO: 165662 - DNA, 25 bp, Homo sapien
cccccacagcatcaccgccttctcc

SEQ ID NO: 165663 - DNA, 25 bp, Homo sapien
cccacagcatcaccgccttctcccc

SEQ ID NO: 165664 - DNA, 25 bp, Homo sapien
cattgtcagagcaaggccaggtcca

SEQ ID NO: 165665 - DNA, 25 bp, Homo sapien
aggtccactggagaagagcatggct

SEQ ID NO: 165666 - DNA, 25 bp, Homo sapien
caaggccaggtccactggagaagag

SEQ ID NO: 165667 - DNA, 25 bp, Homo sapien
agcaaggccaggtccactggagaag

SEQ ID NO: 165668 - DNA, 25 bp, Homo sapien
gctgatggctctagaggccttggaa

SEQ ID NO: 165669 - DNA, 25 bp, Homo sapien
ctggcacaggctgatggctctagag

SEQ ID NO: 165670 - DNA, 25 bp, Homo sapien
taggcaagtcgagggtgcctggcac

SEQ ID NO: 165671 - DNA, 25 bp, Homo sapien
gatggctctagaggccttggaagaa

SEQ ID NO: 165672 - DNA, 25 bp, Homo sapien
tctgatgtggactgcaacttttggg

SEQ ID NO: 165673 - DNA, 25 bp, Homo sapien
tcctcgggctccgctgagctgggct

SEQ ID NO: 165674 - DNA, 25 bp, Homo sapien
ttggtgaagacgcagaacacattgg

SEQ ID NO: 165675 - DNA, 25 bp, Homo sapien
gtgaagacgcagaacacattggcca

SEQ ID NO: 165676 - DNA, 25 bp, Homo sapien
ctggacccggctgcgtcctcgggct

SEQ ID NO: 165677 - DNA, 25 bp, Homo sapien
agctcgtacagcgcctccaccttgc

SEQ ID NO: 165678 - DNA, 25 bp, Homo sapien
gtacagcgcctccaccttgctctgg

SEQ ID NO: 165679 - DNA, 25 bp, Homo sapien
ctcctcctcgctcacaccgcccgcc

SEQ ID NO: 165680 - DNA, 25 bp, Homo sapien
tcgtacagcgcctccaccttgctct

SEQ ID NO: 165681 - DNA, 25 bp, Homo sapien
gcagccgctcgggcggcgcctccag

SEQ ID NO: 165682 - DNA, 25 bp, Homo sapien
tccagcggccgccgcagcacgccca

SEQ ID NO: 165683 - DNA, 25 bp, Homo sapien
acggccagcgcctggcgcagccgct

SEQ ID NO: 165684 - DNA, 25 bp, Homo sapien
cagcggccgccgcagcacgcccagc

SEQ ID NO: 165685 - DNA, 25 bp, Homo sapien
tgcagccagcgccgcgggcgcgtgg

SEQ ID NO: 165686 - DNA, 25 bp, Homo sapien
gcgtggccgccagccccgaggtccc

SEQ ID NO: 165687 - DNA, 25 bp, Homo sapien
gcctggcggtcctcgcgctcctgct

SEQ ID NO: 165688 - DNA, 25 bp, Homo sapien
gccgccgcctggcggtcctcgcgct

SEQ ID NO: 165689 - DNA, 25 bp, Homo sapien
gccgcctccgccacgccgcgccgcc

SEQ ID NO: 165690 - DNA, 25 bp, Homo sapien
cctccgccacgccgcgccgccacag

SEQ ID NO: 165691 - DNA, 25 bp, Homo sapien
ccgcctccgccacgccgcgccgcca

SEQ ID NO: 165692 - DNA, 25 bp, Homo sapien
ctcggccgcctccgccacgccgcgc

SEQ ID NO: 165693 - DNA, 25 bp, Homo sapien
gcccaagtgcagaaagacgctctcg

SEQ ID NO: 165694 - DNA, 25 bp, Homo sapien
agcagcatgtaggtgtcgcgctcgc

SEQ ID NO: 165695 - DNA, 25 bp, Homo sapien
ctccttcatggtgcggcccaagtgc

SEQ ID NO: 165696 - DNA, 25 bp, Homo sapien
ccgcgaagtgctggtggtagctctc

SEQ ID NO: 165697 - DNA, 25 bp, Homo sapien
gcctccagcagtcggatctgcctgg

SEQ ID NO: 165698 - DNA, 25 bp, Homo sapien
cccaccagcttggggctgttgatga

SEQ ID NO: 165699 - DNA, 25 bp, Homo sapien
ccgagccccataccctgcagctcac

SEQ ID NO: 165700 - DNA, 25 bp, Homo sapien
gctcccgagccccataccctgcagc

SEQ ID NO: 165701 - DNA, 25 bp, Homo sapien
gcgccgtgcctctagctccagagct

SEQ ID NO: 165702 - DNA, 25 bp, Homo sapien
agctccagagctcggtccatcaact

SEQ ID NO: 165703 - DNA, 25 bp, Homo sapien
tgtcgatggccagctcgctgtggca

SEQ ID NO: 165704 - DNA, 25 bp, Homo sapien
gtggcagtggccgtccagcctctgg

SEQ ID NO: 165705 - DNA, 25 bp, Homo sapien
ccatgcacgtgcacgggcggtacgt

SEQ ID NO: 165706 - DNA, 25 bp, Homo sapien
gcacgggcggtacgtgtgccctggg

SEQ ID NO: 165707 - DNA, 25 bp, Homo sapien
ctccccatgcacgtgcacgggcggt

SEQ ID NO: 165708 - DNA, 25 bp, Homo sapien
cgtgcacgggcggtacgtgtgccct

SEQ ID NO: 165709 - DNA, 25 bp, Homo sapien
tgagcaggggctcgcctggacaagg

SEQ ID NO: 165710 - DNA, 25 bp, Homo sapien
agctgagcaggggctcgcctggaca

SEQ ID NO: 165711 - DNA, 25 bp, Homo sapien
caggggctcgcctggacaagggggc

SEQ ID NO: 165712 - DNA, 25 bp, Homo sapien
aggggctcgcctggacaagggggca

SEQ ID NO: 165713 - DNA, 25 bp, Homo sapien
tccagcgtgatgctctcggccttgg

SEQ ID NO: 165714 - DNA, 25 bp, Homo sapien
aagtccagcgtgatgctctcggcct

SEQ ID NO: 165715 - DNA, 25 bp, Homo sapien
cagcgtgatgctctcggccttggcc

SEQ ID NO: 165716 - DNA, 25 bp, Homo sapien
ccaagtccagcgtgatgctctcggc

SEQ ID NO: 165717 - DNA, 25 bp, Homo sapien
tggaactggcttcacaagctaaggc

SEQ ID NO: 165718 - DNA, 25 bp, Homo sapien
ggcgcaagaggctcccacgttgaat

SEQ ID NO: 165719 - DNA, 25 bp, Homo sapien
caggccctctctagagttgggagac

SEQ ID NO: 165720 - DNA, 25 bp, Homo sapien
tcctgaagagggtaccagcccatct

SEQ ID NO: 165721 - DNA, 25 bp, Homo sapien
cagaaattcattaaaggcgcgctgg

SEQ ID NO: 165722 - DNA, 25 bp, Homo sapien
ggccctgtaattcgtcagctgcttg

SEQ ID NO: 165723 - DNA, 25 bp, Homo sapien
taacattggccctgtaattcgtcag

SEQ ID NO: 165724 - DNA, 25 bp, Homo sapien
gcagttgttgatgttggcaataaca

SEQ ID NO: 165725 - DNA, 25 bp, Homo sapien
tggggtacctgccaattctgctcca

SEQ ID NO: 165726 - DNA, 25 bp, Homo sapien
aggtcctcatgcaggttctggagca

SEQ ID NO: 165727 - DNA, 25 bp, Homo sapien
cagggtgtcaaagccgtggctcttg

SEQ ID NO: 165728 - DNA, 25 bp, Homo sapien
gccgtggctcttgagctcacccagg

SEQ ID NO: 165729 - DNA, 25 bp, Homo sapien
cgtgtctacagtggcgatgatgttt

SEQ ID NO: 165730 - DNA, 25 bp, Homo sapien
aactcaggcagcctcgtgtctacag

SEQ ID NO: 165731 - DNA, 25 bp, Homo sapien
ccgcccagcgggtgtgcgtgaacct

SEQ ID NO: 165732 - DNA, 25 bp, Homo sapien
cgggtgtgcgtgaacctcttgaaca

SEQ ID NO: 165733 - DNA, 25 bp, Homo sapien
tgctgggtgcagaagtgctggatgg

SEQ ID NO: 165734 - DNA, 25 bp, Homo sapien
ttggccaggatgtacccagccagct

SEQ ID NO: 165735 - DNA, 25 bp, Homo sapien
gctgagttggatgatgtactccttc

SEQ ID NO: 165736 - DNA, 25 bp, Homo sapien
gtcttgaggaccaggcgccccttgc

SEQ ID NO: 165737 - DNA, 25 bp, Homo sapien
gtagcaggtggcataagtggccacc

SEQ ID NO: 165738 - DNA, 25 bp, Homo sapien
tcggccagcgtagggagagcaggct

SEQ ID NO: 165739 - DNA, 25 bp, Homo sapien
ccacctcaatcttgatggcactggg

SEQ ID NO: 165740 - DNA, 25 bp, Homo sapien
tcctgcaggcgaatgatctcggcca

SEQ ID NO: 165741 - DNA, 25 bp, Homo sapien
ccaggatagcgctcaggtggccttt

SEQ ID NO: 165742 - DNA, 25 bp, Homo sapien
tgacgtccaagatgctccggatgcg

SEQ ID NO: 165743 - DNA, 25 bp, Homo sapien
gataggttccccttgatggccagga

SEQ ID NO: 165744 - DNA, 25 bp, Homo sapien
ggatgcgcttgacctcactgttgga

SEQ ID NO: 165745 - DNA, 25 bp, Homo sapien
gctatcgtttacaaagagtccttgg

SEQ ID NO: 165746 - DNA, 25 bp, Homo sapien
caaaccaaggtctgtccagttccag

SEQ ID NO: 165747 - DNA, 25 bp, Homo sapien
ggttctttccttgcgtgcacacgat

SEQ ID NO: 165748 - DNA, 25 bp, Homo sapien
ccgccagggctaggcagaagtagca

SEQ ID NO: 165749 - DNA, 25 bp, Homo sapien
ctggatgtgacgtctaatgctggcg

SEQ ID NO: 165750 - DNA, 25 bp, Homo sapien
gcccctgccagacgagagctcatct

SEQ ID NO: 165751 - DNA, 25 bp, Homo sapien
attgctgaatcccgctcacggcggc

SEQ ID NO: 165752 - DNA, 25 bp, Homo sapien
acgtctaatgctggcggtgctcaca

SEQ ID NO: 165753 - DNA, 25 bp, Homo sapien
ggccagcctgtaggggccgtggggc

SEQ ID NO: 165754 - DNA, 25 bp, Homo sapien
ccagcctgtaggggccgtggggcca

SEQ ID NO: 165755 - DNA, 25 bp, Homo sapien
gccagcctgtaggggccgtggggcc

SEQ ID NO: 165756 - DNA, 25 bp, Homo sapien
cagcctgtaggggccgtggggccac

SEQ ID NO: 165757 - DNA, 25 bp, Homo sapien
tgggcccttcggtagtagacaccaa

SEQ ID NO: 165758 - DNA, 25 bp, Homo sapien
tcttgggcccttcggtagtagacac

SEQ ID NO: 165759 - DNA, 25 bp, Homo sapien
gcccttcggtagtagacaccaagcc

SEQ ID NO: 165760 - DNA, 25 bp, Homo sapien
gtcttgggcccttcggtagtagaca

SEQ ID NO: 165761 - DNA, 25 bp, Homo sapien
gaactggaagacctcgttttgatcc

SEQ ID NO: 165762 - DNA, 25 bp, Homo sapien
gaagtcaagaattacggtcagcctc

SEQ ID NO: 165763 - DNA, 25 bp, Homo sapien
tcaacagtgagaggtcaagcttgcc

SEQ ID NO: 165764 - DNA, 25 bp, Homo sapien
aagtttgtggaaacctgtcacggca

SEQ ID NO: 165765 - DNA, 25 bp, Homo sapien
cctgggttctctgggtaggcgcaat

SEQ ID NO: 165766 - DNA, 25 bp, Homo sapien
gaggctaaggctacaagatcccttg

SEQ ID NO: 165767 - DNA, 25 bp, Homo sapien
gcctcaatgaggtgacgggaaaaag

SEQ ID NO: 165768 - DNA, 25 bp, Homo sapien
taagcgtccttaaaagcggtagagc

SEQ ID NO: 165769 - DNA, 25 bp, Homo sapien
ttcctggccacagctttgtaaggca

SEQ ID NO: 165770 - DNA, 25 bp, Homo sapien
tacacacgtacaaagaccttgggca

SEQ ID NO: 165771 - DNA, 25 bp, Homo sapien
tgcggtgggcagaataacggcctcc

SEQ ID NO: 165772 - DNA, 25 bp, Homo sapien
tgagtcatgcctgagtccgaagggc

SEQ ID NO: 165773 - DNA, 25 bp, Homo sapien
atctcactgcacgagggggccctcg

SEQ ID NO: 165774 - DNA, 25 bp, Homo sapien
cgagagctcgctccatctcactgca

SEQ ID NO: 165775 - DNA, 25 bp, Homo sapien
agctcgctccatctcactgcacgag

SEQ ID NO: 165776 - DNA, 25 bp, Homo sapien
agagctcgctccatctcactgcacg

SEQ ID NO: 165777 - DNA, 25 bp, Homo sapien
taaacctttgctgatcttgcttacg

SEQ ID NO: 165778 - DNA, 25 bp, Homo sapien
gcttacgttcaatgcatctgggcag

SEQ ID NO: 165779 - DNA, 25 bp, Homo sapien
ttttaaggccaaccctgcggcttgc

SEQ ID NO: 165780 - DNA, 25 bp, Homo sapien
atctgggcagcgtctttgatgagcc

SEQ ID NO: 165781 - DNA, 25 bp, Homo sapien
ggggcgaccagggactgctgggtat

SEQ ID NO: 165782 - DNA, 25 bp, Homo sapien
agtcagtatgggtatcgcccatcgg

SEQ ID NO: 165783 - DNA, 25 bp, Homo sapien
cagcagtcagtatgggtatcgccca

SEQ ID NO: 165784 - DNA, 25 bp, Homo sapien
tgggggcgaccagggactgctgggt

SEQ ID NO: 165785 - DNA, 25 bp, Homo sapien
gcggggtctcactgcagggatggtg

SEQ ID NO: 165786 - DNA, 25 bp, Homo sapien
cggggtctcactgcagggatggtgg

SEQ ID NO: 165787 - DNA, 25 bp, Homo sapien
ggctgcggggtctcactgcagggat

SEQ ID NO: 165788 - DNA, 25 bp, Homo sapien
tagctttgcagcaagttctgaggca

SEQ ID NO: 165789 - DNA, 25 bp, Homo sapien
ggcttcccccgccttgcataagtag

SEQ ID NO: 165790 - DNA, 25 bp, Homo sapien
ccccgccttgcataagtagctttgc

SEQ ID NO: 165791 - DNA, 25 bp, Homo sapien
gcataagtagctttgcagcaagttc

SEQ ID NO: 165792 - DNA, 25 bp, Homo sapien
gatcaccaactagctgaggtcccgg

SEQ ID NO: 165793 - DNA, 25 bp, Homo sapien
tcggctcccaactgtcacggaagca

SEQ ID NO: 165794 - DNA, 25 bp, Homo sapien
gaaccatggacttcaagcctcggct

SEQ ID NO: 165795 - DNA, 25 bp, Homo sapien
cacggaagcaaggagtgtagtagtt

SEQ ID NO: 165796 - DNA, 25 bp, Homo sapien
ttccggctgaaagggctttgttatc

SEQ ID NO: 165797 - DNA, 25 bp, Homo sapien
ttccacaaggcctggagaacataca

SEQ ID NO: 165798 - DNA, 25 bp, Homo sapien
cacaaggcctggagaacatacatcg

SEQ ID NO: 165799 - DNA, 25 bp, Homo sapien
ttccatgttttccacaaggcctgga

SEQ ID NO: 165800 - DNA, 25 bp, Homo sapien
aaattccatgttttccacaaggcct

SEQ ID NO: 165801 - DNA, 25 bp, Homo sapien
ttcccattcccttgatgtctacagt

SEQ ID NO: 165802 - DNA, 25 bp, Homo sapien
ccattcccttgatgtctacagtatc

SEQ ID NO: 165803 - DNA, 25 bp, Homo sapien
cttgtgcggcttcctttttgaacag

SEQ ID NO: 165804 - DNA, 25 bp, Homo sapien
attcccttgatgtctacagtatcac

SEQ ID NO: 165805 - DNA, 25 bp, Homo sapien
ctggggaacatcgtagactcttcca

SEQ ID NO: 165806 - DNA, 25 bp, Homo sapien
tggggaacatcgtagactcttccag

SEQ ID NO: 165807 - DNA, 25 bp, Homo sapien
catgtgctcaatacgcacattagtt

SEQ ID NO: 165808 - DNA, 25 bp, Homo sapien
aggaatcttgcccttagcttgtttg

SEQ ID NO: 165809 - DNA, 25 bp, Homo sapien
gcgtctcaggaagctgtctcggctc

SEQ ID NO: 165810 - DNA, 25 bp, Homo sapien
gtctcggctcttagagtgcttcatg

SEQ ID NO: 165811 - DNA, 25 bp, Homo sapien
tttctctgtggcctctttctttttc

SEQ ID NO: 165812 - DNA, 25 bp, Homo sapien
ctttctctgtggcctctttcttttt

SEQ ID NO: 165813 - DNA, 25 bp, Homo sapien
gagccacagtgcccggcccaggtac

SEQ ID NO: 165814 - DNA, 25 bp, Homo sapien
ctggagcttagttgaacccaggtac

SEQ ID NO: 165815 - DNA, 25 bp, Homo sapien
cagctcgggctccttcctgttggtt

SEQ ID NO: 165816 - DNA, 25 bp, Homo sapien
cagcagctcgggctccttcctgttg

SEQ ID NO: 165817 - DNA, 25 bp, Homo sapien
gcagctcgggctccttcctgttggt

SEQ ID NO: 165818 - DNA, 25 bp, Homo sapien
gctcgggctccttcctgttggttct

SEQ ID NO: 165819 - DNA, 25 bp, Homo sapien
gcctctctcaggttgtgcctcggta

SEQ ID NO: 165820 - DNA, 25 bp, Homo sapien
gcctcggtaggtcatttgttggcac

SEQ ID NO: 165821 - DNA, 25 bp, Homo sapien
ggctttttcaggaatgacgattata

SEQ ID NO: 165822 - DNA, 25 bp, Homo sapien
ttatatttgatcttcgcctgcctgc

SEQ ID NO: 165823 - DNA, 25 bp, Homo sapien
cgcgcctgattgatcatcggaatca

SEQ ID NO: 165824 - DNA, 25 bp, Homo sapien
atggcccagtcagtgactcgtcctc

SEQ ID NO: 165825 - DNA, 25 bp, Homo sapien
tgggtctctgggcttcgcgcctgat

SEQ ID NO: 165826 - DNA, 25 bp, Homo sapien
cagtgactcgtcctcctgggtctct

SEQ ID NO: 165827 - DNA, 25 bp, Homo sapien
ggagaagtgagcaggaatgcaggca

SEQ ID NO: 165828 - DNA, 25 bp, Homo sapien
aagtgagcaggaatgcaggcaggag

SEQ ID NO: 165829 - DNA, 25 bp, Homo sapien
tgagcaggaatgcaggcaggaggct

SEQ ID NO: 165830 - DNA, 25 bp, Homo sapien
gaagtgagcaggaatgcaggcagga

SEQ ID NO: 165831 - DNA, 25 bp, Homo sapien
cagttccgcatgctctagtgttcct

SEQ ID NO: 165832 - DNA, 25 bp, Homo sapien
tcattctgtcctgttgttaccctgt

SEQ ID NO: 165833 - DNA, 25 bp, Homo sapien
cctccagttccgcatgctctagtgt

SEQ ID NO: 165834 - DNA, 25 bp, Homo sapien
tgacaatgcgtcctccagttccgca

SEQ ID NO: 165835 - DNA, 25 bp, Homo sapien
ggcataggatgaggtgtgggggcgg

SEQ ID NO: 165836 - DNA, 25 bp, Homo sapien
tgggcataggatgaggtgtgggggc

SEQ ID NO: 165837 - DNA, 25 bp, Homo sapien
gcataggatgaggtgtgggggcggg

SEQ ID NO: 165838 - DNA, 25 bp, Homo sapien
cataggatgaggtgtgggggcgggc

SEQ ID NO: 165839 - DNA, 25 bp, Homo sapien
tggagcaatgccatcaagccgtctc

SEQ ID NO: 165840 - DNA, 25 bp, Homo sapien
ttgttgatgaaagtggcactcagtg

SEQ ID NO: 165841 - DNA, 25 bp, Homo sapien
ccaactgtactctctgatgtccaga

SEQ ID NO: 165842 - DNA, 25 bp, Homo sapien
tgccatcaagccgtctctgtgaagt

SEQ ID NO: 165843 - DNA, 25 bp, Homo sapien
aattcatgcaccgagagcagggcgg

SEQ ID NO: 165844 - DNA, 25 bp, Homo sapien
aggtgccaaggccccgctcaagctg

SEQ ID NO: 165845 - DNA, 25 bp, Homo sapien
ccacgtttccccgagaattcatgca

SEQ ID NO: 165846 - DNA, 25 bp, Homo sapien
ggttccacgcacaaaccgtgcccat

SEQ ID NO: 165847 - DNA, 25 bp, Homo sapien
caatacttcctgtgcaaaatgcctg

SEQ ID NO: 165848 - DNA, 25 bp, Homo sapien
aatacttcctgtgcaaaatgcctga

SEQ ID NO: 165849 - DNA, 25 bp, Homo sapien
caattttgtcccagcttcaggcaga

SEQ ID NO: 165850 - DNA, 25 bp, Homo sapien
tcaattttgtcccagcttcaggcag

SEQ ID NO: 165851 - DNA, 25 bp, Homo sapien
gaatggagttcatgaacagctttca

SEQ ID NO: 165852 - DNA, 25 bp, Homo sapien
tggagttcatgaacagctttcacac

SEQ ID NO: 165853 - DNA, 25 bp, Homo sapien
ggagaatggagttcatgaacagctt

SEQ ID NO: 165854 - DNA, 25 bp, Homo sapien
gagttcatgaacagctttcacactt

SEQ ID NO: 165855 - DNA, 25 bp, Homo sapien
gtgtcatcttgatcggccaaacatt

SEQ ID NO: 165856 - DNA, 25 bp, Homo sapien
aagatttgtcaataagttctgtatt

SEQ ID NO: 165857 - DNA, 25 bp, Homo sapien
catcttgatcggccaaacattttta

SEQ ID NO: 165858 - DNA, 25 bp, Homo sapien
tcttgatcggccaaacatttttata

SEQ ID NO: 165859 - DNA, 25 bp, Homo sapien
acgtccagtgccagcgcaggagccg

SEQ ID NO: 165860 - DNA, 25 bp, Homo sapien
gggcgccaggtacagccggcgggac

SEQ ID NO: 165861 - DNA, 25 bp, Homo sapien
tcggcggtcgggaggcctctgcggg

SEQ ID NO: 165862 - DNA, 25 bp, Homo sapien
gcagcggtcgggagcgaggccacgg

SEQ ID NO: 165863 - DNA, 25 bp, Homo sapien
acaagttccccattagatccatctt

SEQ ID NO: 165864 - DNA, 25 bp, Homo sapien
gcttgagttccacttggaatattcg

SEQ ID NO: 165865 - DNA, 25 bp, Homo sapien
cagacccggagactccccacaagtt

SEQ ID NO: 165866 - DNA, 25 bp, Homo sapien
tagatccatcttgcttgagttccac

SEQ ID NO: 165867 - DNA, 25 bp, Homo sapien
ttcggaagtgagagagtgcccattc

SEQ ID NO: 165868 - DNA, 25 bp, Homo sapien
cctggtcaccttcggaagtgagaga

SEQ ID NO: 165869 - DNA, 25 bp, Homo sapien
tcaccttcggaagtgagagagtgcc

SEQ ID NO: 165870 - DNA, 25 bp, Homo sapien
aacctggtcaccttcggaagtgaga

SEQ ID NO: 165871 - DNA, 25 bp, Homo sapien
cagcgtgaacacctggtccatcctc

SEQ ID NO: 165872 - DNA, 25 bp, Homo sapien
catcctccgctggatcttggccgtg

SEQ ID NO: 165873 - DNA, 25 bp, Homo sapien
agcacctggcgctcggagtcccggt

SEQ ID NO: 165874 - DNA, 25 bp, Homo sapien
tggagcgtgaccaggtgctcggcgt

SEQ ID NO: 165875 - DNA, 25 bp, Homo sapien
ggcgggatcagggcctccgtctcgc

SEQ ID NO: 165876 - DNA, 25 bp, Homo sapien
ctcgggcgggatcagggcctccgtc

SEQ ID NO: 165877 - DNA, 25 bp, Homo sapien
gggatcagggcctccgtctcgcgca

SEQ ID NO: 165878 - DNA, 25 bp, Homo sapien
tcgggcgggatcagggcctccgtct

SEQ ID NO: 165879 - DNA, 25 bp, Homo sapien
tttccgacagcctcgtgtgctgggc

SEQ ID NO: 165880 - DNA, 25 bp, Homo sapien
tccgacagcctcgtgtgctgggcat

SEQ ID NO: 165881 - DNA, 25 bp, Homo sapien
cgacagcctcgtgtgctgggcattg

SEQ ID NO: 165882 - DNA, 25 bp, Homo sapien
ctttccgacagcctcgtgtgctggg

SEQ ID NO: 165883 - DNA, 25 bp, Homo sapien
gagatcgtggtgcttttcccctcag

SEQ ID NO: 165884 - DNA, 25 bp, Homo sapien
gctttacttctacgtcagcacctga

SEQ ID NO: 165885 - DNA, 25 bp, Homo sapien
tgcaaacaacgcaccgggagatcgt

SEQ ID NO: 165886 - DNA, 25 bp, Homo sapien
gactgctgaagcactcttgcaaaca

SEQ ID NO: 165887 - DNA, 25 bp, Homo sapien
ccgcctagccctcttcggaggtgaa

SEQ ID NO: 165888 - DNA, 25 bp, Homo sapien
aatcaactagttcagatcacaggca

SEQ ID NO: 165889 - DNA, 25 bp, Homo sapien
gaacttgccattaggttctaaaatg

SEQ ID NO: 165890 - DNA, 25 bp, Homo sapien
gagccttctctaaccatcactatat

SEQ ID NO: 165891 - DNA, 25 bp, Homo sapien
caacttttgagatcccagcccacag

SEQ ID NO: 165892 - DNA, 25 bp, Homo sapien
cttccaggatgcaacttttgagatc

SEQ ID NO: 165893 - DNA, 25 bp, Homo sapien
tacctggattcctaatcttggtgag

SEQ ID NO: 165894 - DNA, 25 bp, Homo sapien
tttacctggattcctaatcttggtg

SEQ ID NO: 165895 - DNA, 25 bp, Homo sapien
tccgcctgtccgggaaaggcccatc

SEQ ID NO: 165896 - DNA, 25 bp, Homo sapien
cgcctgtccgggaaaggcccatccg

SEQ ID NO: 165897 - DNA, 25 bp, Homo sapien
ctccgcctgtccgggaaaggcccat

SEQ ID NO: 165898 - DNA, 25 bp, Homo sapien
ctgtccgggaaaggcccatccggct

SEQ ID NO: 165899 - DNA, 25 bp, Homo sapien
gaagaagctcgtcctcaaggctggg

SEQ ID NO: 165900 - DNA, 25 bp, Homo sapien
gaacattcttcagacgcctcctgga

SEQ ID NO: 165901 - DNA, 25 bp, Homo sapien
caagcgtgctctgggaataaccaaa

SEQ ID NO: 165902 - DNA, 25 bp, Homo sapien
tggccgcacaggacattcagggttg

SEQ ID NO: 165903 - DNA, 25 bp, Homo sapien
cctcattagggaggctttcgggctg

SEQ ID NO: 165904 - DNA, 25 bp, Homo sapien
ggtgagactgaacaacctccctcat

SEQ ID NO: 165905 - DNA, 25 bp, Homo sapien
aggtgcgcagatgcccccaataacc

SEQ ID NO: 165906 - DNA, 25 bp, Homo sapien
accaggtgtgcgtgggacagagcca

SEQ ID NO: 165907 - DNA, 25 bp, Homo sapien
cagggcccgagcacagggcagttcc

SEQ ID NO: 165908 - DNA, 25 bp, Homo sapien
aggtctggatctggatcacagctgg

SEQ ID NO: 165909 - DNA, 25 bp, Homo sapien
ccaggacaatgtgtgtctgggacag

SEQ ID NO: 165910 - DNA, 25 bp, Homo sapien
ctgcagatctgtgggcccgggctct

SEQ ID NO: 165911 - DNA, 25 bp, Homo sapien
ggaaactctccctgatgactctcgg

SEQ ID NO: 165912 - DNA, 25 bp, Homo sapien
tgcatcctggtatcctgggcggtcg

SEQ ID NO: 165913 - DNA, 25 bp, Homo sapien
ggctgttttcttgacacggcgcccg

SEQ ID NO: 165914 - DNA, 25 bp, Homo sapien
aaggacccgggactcctcagtctct

SEQ ID NO: 165915 - DNA, 25 bp, Homo sapien
ttgcattcatcattttggcgaattc

SEQ ID NO: 165916 - DNA, 25 bp, Homo sapien
cctttgcattcatcattttggcgaa

SEQ ID NO: 165917 - DNA, 25 bp, Homo sapien
gatggcggttctggccaaaaggcac

SEQ ID NO: 165918 - DNA, 25 bp, Homo sapien
gttctggccaaaaggcactgatgcc

SEQ ID NO: 165919 - DNA, 25 bp, Homo sapien
ttttccaaaacgcctggagaacatg

SEQ ID NO: 165920 - DNA, 25 bp, Homo sapien
tccaaaacgcctggagaacatgtac

SEQ ID NO: 165921 - DNA, 25 bp, Homo sapien
tgttttccaaaacgcctggagaaca

SEQ ID NO: 165922 - DNA, 25 bp, Homo sapien
catgttttccaaaacgcctggagaa

SEQ ID NO: 165923 - DNA, 25 bp, Homo sapien
ctggggaacactgtagactcttcca

SEQ ID NO: 165924 - DNA, 25 bp, Homo sapien
gaacactgtagactcttccagcttt

SEQ ID NO: 165925 - DNA, 25 bp, Homo sapien
tggggaacactgtagactcttccag

SEQ ID NO: 165926 - DNA, 25 bp, Homo sapien
gggaacactgtagactcttccagct

SEQ ID NO: 165927 - DNA, 25 bp, Homo sapien
ctgtggcttctgtctctttctgatc

SEQ ID NO: 165928 - DNA, 25 bp, Homo sapien
tctcggctcatagagggcttaatgt

SEQ ID NO: 165929 - DNA, 25 bp, Homo sapien
ctatctcggctcatagagggcttaa

SEQ ID NO: 165930 - DNA, 25 bp, Homo sapien
gtggcttctgtctctttctgatcat

SEQ ID NO: 165931 - DNA, 25 bp, Homo sapien
cagttcaggctccttcccgttggtt

SEQ ID NO: 165932 - DNA, 25 bp, Homo sapien
cagcagttcaggctccttcccgttg

SEQ ID NO: 165933 - DNA, 25 bp, Homo sapien
tccagcagttcaggctccttcccgt

SEQ ID NO: 165934 - DNA, 25 bp, Homo sapien
agcagttcaggctccttcccgttgg

SEQ ID NO: 165935 - DNA, 25 bp, Homo sapien
ctttccagattgggattttatttgc

SEQ ID NO: 165936 - DNA, 25 bp, Homo sapien
ttcacttgattaggctttgtatttc

SEQ ID NO: 165937 - DNA, 25 bp, Homo sapien
attcttcacttgattaggctttgta

SEQ ID NO: 165938 - DNA, 25 bp, Homo sapien
tttccagattgggattttatttgca

SEQ ID NO: 165939 - DNA, 25 bp, Homo sapien
gggatgccgccacatgcgagtaaag

SEQ ID NO: 165940 - DNA, 25 bp, Homo sapien
tgcgagtaaagacaagggtcccacc

SEQ ID NO: 165941 - DNA, 25 bp, Homo sapien
cgccacatgcgagtaaagacaaggg

SEQ ID NO: 165942 - DNA, 25 bp, Homo sapien
cacatgcgagtaaagacaagggtcc

SEQ ID NO: 165943 - DNA, 25 bp, Homo sapien
taagcaaatcgcagtgggaaaggga

SEQ ID NO: 165944 - DNA, 25 bp, Homo sapien
gactatggaggaagcattactagct

SEQ ID NO: 165945 - DNA, 25 bp, Homo sapien
tcggcatccccttatcaaactagaa

SEQ ID NO: 165946 - DNA, 25 bp, Homo sapien
gcatccatgccaggaaattccctcg

SEQ ID NO: 165947 - DNA, 25 bp, Homo sapien
ccctgcgacctgacaccccccaggc

SEQ ID NO: 165948 - DNA, 25 bp, Homo sapien
gccctgcgacctgacaccccccagg

SEQ ID NO: 165949 - DNA, 25 bp, Homo sapien
aagagggtgttcaggccctgcgacc

SEQ ID NO: 165950 - DNA, 25 bp, Homo sapien
agggtgttcaggccctgcgacctga

SEQ ID NO: 165951 - DNA, 25 bp, Homo sapien
tagtgccgtataagatgtaaccgaa

SEQ ID NO: 165952 - DNA, 25 bp, Homo sapien
tacttgtgtatgtggctgcctcgca

SEQ ID NO: 165953 - DNA, 25 bp, Homo sapien
gtaaccgaaaatgcgtacactgacg

SEQ ID NO: 165954 - DNA, 25 bp, Homo sapien
tgactatatccggatggtctttctc

SEQ ID NO: 165955 - DNA, 25 bp, Homo sapien
cgcacgcgaactgcgtgtccagcgt

SEQ ID NO: 165956 - DNA, 25 bp, Homo sapien
ggccgcacgcgaactgcgtgtccag

SEQ ID NO: 165957 - DNA, 25 bp, Homo sapien
cgcgaactgcgtgtccagcgtggtc

SEQ ID NO: 165958 - DNA, 25 bp, Homo sapien
cacgcgaactgcgtgtccagcgtgg

SEQ ID NO: 165959 - DNA, 25 bp, Homo sapien
tcgccgtggcggatgtccaggtcct

SEQ ID NO: 165960 - DNA, 25 bp, Homo sapien
gcggagccgctcctccgcccacgcc

SEQ ID NO: 165961 - DNA, 25 bp, Homo sapien
aggtcctggagcgtgaccaggtgct

SEQ ID NO: 165962 - DNA, 25 bp, Homo sapien
ggaacgaggcctcgctgcacacgcc

SEQ ID NO: 165963 - DNA, 25 bp, Homo sapien
ggaccaaggcctccgtctcgcgcac

SEQ ID NO: 165964 - DNA, 25 bp, Homo sapien
ggcgggaccaaggcctccgtctcgc

SEQ ID NO: 165965 - DNA, 25 bp, Homo sapien
gggaccaaggcctccgtctcgcgca

SEQ ID NO: 165966 - DNA, 25 bp, Homo sapien
cgggaccaaggcctccgtctcgcgc

SEQ ID NO: 165967 - DNA, 25 bp, Homo sapien
tccccgcgcttcgaggctgccacca

SEQ ID NO: 165968 - DNA, 25 bp, Homo sapien
ccccgcgcttcgaggctgccaccag

SEQ ID NO: 165969 - DNA, 25 bp, Homo sapien
cccgcgcttcgaggctgccaccagg

SEQ ID NO: 165970 - DNA, 25 bp, Homo sapien
cctccccgcgcttcgaggctgccac

SEQ ID NO: 165971 - DNA, 25 bp, Homo sapien
tgtccagcatggctcagcagggtct

SEQ ID NO: 165972 - DNA, 25 bp, Homo sapien
agccagcagccgagcagggtagagc

SEQ ID NO: 165973 - DNA, 25 bp, Homo sapien
ccacagagctctcccggagcattcc

SEQ ID NO: 165974 - DNA, 25 bp, Homo sapien
gtagagccgtggcatctgcgtgagg

SEQ ID NO: 165975 - DNA, 25 bp, Homo sapien
gttccaaggtgaccacgaagatttg

SEQ ID NO: 165976 - DNA, 25 bp, Homo sapien
ccaaggtgaccacgaagatttgaac

SEQ ID NO: 165977 - DNA, 25 bp, Homo sapien
cacaagtgttccaaggtgaccacga

SEQ ID NO: 165978 - DNA, 25 bp, Homo sapien
caagtgttccaaggtgaccacgaag

SEQ ID NO: 165979 - DNA, 25 bp, Homo sapien
caactccctgactgtaacgttggaa

SEQ ID NO: 165980 - DNA, 25 bp, Homo sapien
ttcgcagtaaggatcatttcgatgc

SEQ ID NO: 165981 - DNA, 25 bp, Homo sapien
gttccttcgcagtaaggatcatttc

SEQ ID NO: 165982 - DNA, 25 bp, Homo sapien
aggatcatttcgatgcgacagggag

SEQ ID NO: 165983 - DNA, 25 bp, Homo sapien
cagtaaggatcatttcgatgcgaca

SEQ ID NO: 165984 - DNA, 25 bp, Homo sapien
tgtttcctcagggatatctttttct

SEQ ID NO: 165985 - DNA, 25 bp, Homo sapien
tattttagtgctgaatttattcctg

SEQ ID NO: 165986 - DNA, 25 bp, Homo sapien
cttgtgggcaatcttctggtttagg

SEQ ID NO: 165987 - DNA, 25 bp, Homo sapien
ttttcttgtgggcaatcttctggtt

SEQ ID NO: 165988 - DNA, 25 bp, Homo sapien
ccaagccacgtttgacgggcgttgg

SEQ ID NO: 165989 - DNA, 25 bp, Homo sapien
gccaagccacgtttgacgggcgttg

SEQ ID NO: 165990 - DNA, 25 bp, Homo sapien
gcgttggggttaaaatggaatgtga

SEQ ID NO: 165991 - DNA, 25 bp, Homo sapien
caagccacgtttgacgggcgttggg

SEQ ID NO: 165992 - DNA, 25 bp, Homo sapien
gacctgtcgttaatccagcaaacac

SEQ ID NO: 165993 - DNA, 25 bp, Homo sapien
gggtgtcctgtattggcatcgacct

SEQ ID NO: 165994 - DNA, 25 bp, Homo sapien
ctgtattggcatcgacctgtcgtta

SEQ ID NO: 165995 - DNA, 25 bp, Homo sapien
tggcatcgacctgtcgttaatccag

SEQ ID NO: 165996 - DNA, 25 bp, Homo sapien
cactatgagcagtgccgtgctgcag

SEQ ID NO: 165997 - DNA, 25 bp, Homo sapien
tacagaggttgatctgctacacgct

SEQ ID NO: 165998 - DNA, 25 bp, Homo sapien
ctgtctctgtcatcccggccggatt

SEQ ID NO: 165999 - DNA, 25 bp, Homo sapien
cggactatgtatgtttgtggcttca

SEQ ID NO: 166000 - DNA, 25 bp, Homo sapien
agggatcactggagactgacacaaa

SEQ ID NO: 166001 - DNA, 25 bp, Homo sapien
tccgaagtgtggagctgtgatccca

SEQ ID NO: 166002 - DNA, 25 bp, Homo sapien
gaagaaaggattctggactttggct

SEQ ID NO: 166003 - DNA, 25 bp, Homo sapien
tgaggaacaggcctttagttccaaa

SEQ ID NO: 166004 - DNA, 25 bp, Homo sapien
tcgctccgttgccaggctggaatgc

SEQ ID NO: 166005 - DNA, 25 bp, Homo sapien
aatggcacgatctcagctcttgcaa

SEQ ID NO: 166006 - DNA, 25 bp, Homo sapien
ctgctaccatgcccggctagttttg

SEQ ID NO: 166007 - DNA, 25 bp, Homo sapien
cctctgcctcctgggttcaagtgat

SEQ ID NO: 166008 - DNA, 25 bp, Homo sapien
cgaaactgctttcgaggccgtgttt

SEQ ID NO: 166009 - DNA, 25 bp, Homo sapien
tccgggcctcgaggaatgagttgtt

SEQ ID NO: 166010 - DNA, 25 bp, Homo sapien
ggagccatcgtcctcgaaactgctt

SEQ ID NO: 166011 - DNA, 25 bp, Homo sapien
tgtttttgcggctgccaccttcggg

SEQ ID NO: 166012 - DNA, 25 bp, Homo sapien
tgccacagctcgctcgtcattggtt

SEQ ID NO: 166013 - DNA, 25 bp, Homo sapien
ttgcgacgtcaatcgcatctttccg

SEQ ID NO: 166014 - DNA, 25 bp, Homo sapien
tcactgcccattggctggaggcctg

SEQ ID NO: 166015 - DNA, 25 bp, Homo sapien
tctggaatgttctcgctctgactga

SEQ ID NO: 166016 - DNA, 25 bp, Homo sapien
gcggagagacggcgccgtgagccgt

SEQ ID NO: 166017 - DNA, 25 bp, Homo sapien
gcgccgtgagccgtgggcggtcggg

SEQ ID NO: 166018 - DNA, 25 bp, Homo sapien
agccagcggcccgaggggtcgaggg

SEQ ID NO: 166019 - DNA, 25 bp, Homo sapien
gccgtgggcggtcggggagtgcacc

SEQ ID NO: 166020 - DNA, 25 bp, Homo sapien
ggctgtcccagcgacgtccgcggtc

SEQ ID NO: 166021 - DNA, 25 bp, Homo sapien
taaagacataaacccaacgctgctc

SEQ ID NO: 166022 - DNA, 25 bp, Homo sapien
gaagtgaggcgcgatataaacccga

SEQ ID NO: 166023 - DNA, 25 bp, Homo sapien
tgctcgcccgggactgggatgaagt

SEQ ID NO: 166024 - DNA, 25 bp, Homo sapien
gagcgcgcgatgactcacaaatgca

SEQ ID NO: 166025 - DNA, 25 bp, Homo sapien
ccggagggtgcacagccgggaagcg

SEQ ID NO: 166026 - DNA, 25 bp, Homo sapien
aaccgggcagctccgcgaaggaggg

SEQ ID NO: 166027 - DNA, 25 bp, Homo sapien
taccgcgctccgaggcgtttccgcg

SEQ ID NO: 166028 - DNA, 25 bp, Homo sapien
aagcagcacttccttaaacgcagcg

SEQ ID NO: 166029 - DNA, 25 bp, Homo sapien
gcgctcgcccacaatttgccattaa

SEQ ID NO: 166030 - DNA, 25 bp, Homo sapien
tttgccattaagcaagagagcgcga

SEQ ID NO: 166031 - DNA, 25 bp, Homo sapien
ttttcctcgctattcaaatactcgg

SEQ ID NO: 166032 - DNA, 25 bp, Homo sapien
caatctgcgggaacataaaaaggcc

SEQ ID NO: 166033 - DNA, 25 bp, Homo sapien
tcatcgctggatggaaacgcctcct

SEQ ID NO: 166034 - DNA, 25 bp, Homo sapien
tcagccgccgtgagattccatcaga

SEQ ID NO: 166035 - DNA, 25 bp, Homo sapien
tcctggaagtgctgaagaacgaacc

SEQ ID NO: 166036 - DNA, 25 bp, Homo sapien
ggctgtaagcttcttgcttgtatgc

SEQ ID NO: 166037 - DNA, 25 bp, Homo sapien
gcttgtatgctatgtttccccaata

SEQ ID NO: 166038 - DNA, 25 bp, Homo sapien
aattttcgccactgaggctgtaagc

SEQ ID NO: 166039 - DNA, 25 bp, Homo sapien
tacaggtaccaatggctgcgcaaca

SEQ ID NO: 166040 - DNA, 25 bp, Homo sapien
taaacgactgcaagagttctcggtc

SEQ ID NO: 166041 - DNA, 25 bp, Homo sapien
gactgcaagagttctcggtctctga

SEQ ID NO: 166042 - DNA, 25 bp, Homo sapien
gagaagaagggatgacataaacgac

SEQ ID NO: 166043 - DNA, 25 bp, Homo sapien
gggatgacataaacgactgcaagag

SEQ ID NO: 166044 - DNA, 25 bp, Homo sapien
tttggcttattagtggctttatcaa

SEQ ID NO: 166045 - DNA, 25 bp, Homo sapien
ctttgattgcaactttttggtatct

SEQ ID NO: 166046 - DNA, 25 bp, Homo sapien
atgaagagatctttgattgcaactt

SEQ ID NO: 166047 - DNA, 25 bp, Homo sapien
agatctttgattgcaactttttggt

SEQ ID NO: 166048 - DNA, 25 bp, Homo sapien
ggcatcttgtagcgatagaactggt

SEQ ID NO: 166049 - DNA, 25 bp, Homo sapien
tcttgtagcgatagaactggtctga

SEQ ID NO: 166050 - DNA, 25 bp, Homo sapien
gtagcgatagaactggtctgacacg

SEQ ID NO: 166051 - DNA, 25 bp, Homo sapien
tcagacggggcatcttgtagcgata

SEQ ID NO: 166052 - DNA, 25 bp, Homo sapien
ctttgcaacgtcaaccatgttgact

SEQ ID NO: 166053 - DNA, 25 bp, Homo sapien
tccataatatgccctgtggactttt

SEQ ID NO: 166054 - DNA, 25 bp, Homo sapien
gccctgtggacttttccaagcttta

SEQ ID NO: 166055 - DNA, 25 bp, Homo sapien
tgtggacttttccaagctttactta

SEQ ID NO: 166056 - DNA, 25 bp, Homo sapien
ccataatatgccctgtggacttttc

SEQ ID NO: 166057 - DNA, 25 bp, Homo sapien
gagatccattgacaatgtaacggtc

SEQ ID NO: 166058 - DNA, 25 bp, Homo sapien
tcttaacatcaaactgggtctgtgc

SEQ ID NO: 166059 - DNA, 25 bp, Homo sapien
cttattcgcctcatgagatccattg

SEQ ID NO: 166060 - DNA, 25 bp, Homo sapien
caatgtaacggtcattcttaacatc

SEQ ID NO: 166061 - DNA, 25 bp, Homo sapien
aaccacagacagcttcacatgcaaa

SEQ ID NO: 166062 - DNA, 25 bp, Homo sapien
tagcggtatcacagaagcaggtata

SEQ ID NO: 166063 - DNA, 25 bp, Homo sapien
gaatggaaatatctcgaaaactgga

SEQ ID NO: 166064 - DNA, 25 bp, Homo sapien
taatcagaggacatctaaaccacag

SEQ ID NO: 166065 - DNA, 25 bp, Homo sapien
aagcatgcctcgatagccacaggct

SEQ ID NO: 166066 - DNA, 25 bp, Homo sapien
agtttatgatgtgtgtcaagcatgc

SEQ ID NO: 166067 - DNA, 25 bp, Homo sapien
gagaatgaatgtgcagagtttatga

SEQ ID NO: 166068 - DNA, 25 bp, Homo sapien
tgtcaagcatgcctcgatagccaca

SEQ ID NO: 166069 - DNA, 25 bp, Homo sapien
ttaggagttcatcatggaagactca

SEQ ID NO: 166070 - DNA, 25 bp, Homo sapien
taggagttcatcatggaagactcac

SEQ ID NO: 166071 - DNA, 25 bp, Homo sapien
acttcatctaccctcagataatgtc

SEQ ID NO: 166072 - DNA, 25 bp, Homo sapien
catctaccctcagataatgtcttaa

SEQ ID NO: 166073 - DNA, 25 bp, Homo sapien
cagtctcccttacattcctattaca

SEQ ID NO: 166074 - DNA, 25 bp, Homo sapien
gccctctttaccaaacaatgccagt

SEQ ID NO: 166075 - DNA, 25 bp, Homo sapien
ccggaataggttagactttcttgct

SEQ ID NO: 166076 - DNA, 25 bp, Homo sapien
tgctatagcaagctcaaattgtgtc

SEQ ID NO: 166077 - DNA, 25 bp, Homo sapien
ctatataacggcttgtctcatggga

SEQ ID NO: 166078 - DNA, 25 bp, Homo sapien
ggagagagaacaccggaataggtta

SEQ ID NO: 166079 - DNA, 25 bp, Homo sapien
taaggatccctgtcatccctcatga

SEQ ID NO: 166080 - DNA, 25 bp, Homo sapien
cacacacaatgctacctaagaggct

SEQ ID NO: 166081 - DNA, 25 bp, Homo sapien
tgatgatgcctccactagggagagg

SEQ ID NO: 166082 - DNA, 25 bp, Homo sapien
tatggatcccctcagaaaaaccaca

SEQ ID NO: 166083 - DNA, 25 bp, Homo sapien
tggtgtctcactgctggatacggag

SEQ ID NO: 166084 - DNA, 25 bp, Homo sapien
tttcctgtaccactgtcactattct

SEQ ID NO: 166085 - DNA, 25 bp, Homo sapien
tggtggtgtctcactgctggatacg

SEQ ID NO: 166086 - DNA, 25 bp, Homo sapien
ctttcctgtaccactgtcactattc

SEQ ID NO: 166087 - DNA, 25 bp, Homo sapien
aaaatcaaagaggatattgaccctc

SEQ ID NO: 166088 - DNA, 25 bp, Homo sapien
catcactgagtgtcagaacttttgc

SEQ ID NO: 166089 - DNA, 25 bp, Homo sapien
ggatattgaccctctcctcaattgt

SEQ ID NO: 166090 - DNA, 25 bp, Homo sapien
tgatttcatccattcgacgcctttg

SEQ ID NO: 166091 - DNA, 25 bp, Homo sapien
aggaaatggcgcctgtatttcttaa

SEQ ID NO: 166092 - DNA, 25 bp, Homo sapien
tcgtaggaaatggcgcctgtatttc

SEQ ID NO: 166093 - DNA, 25 bp, Homo sapien
tctgttctctaatcttctcattaaa

SEQ ID NO: 166094 - DNA, 25 bp, Homo sapien
aatctgttctctaatcttctcatta

SEQ ID NO: 166095 - DNA, 25 bp, Homo sapien
ctttgtaagggcctaggtatggcac

SEQ ID NO: 166096 - DNA, 25 bp, Homo sapien
taatatgaccatctcgaaagccaca

SEQ ID NO: 166097 - DNA, 25 bp, Homo sapien
ctcagaggcttgtaaggtgggtcaa

SEQ ID NO: 166098 - DNA, 25 bp, Homo sapien
catttatgaatccagagcactttgc

SEQ ID NO: 166099 - DNA, 25 bp, Homo sapien
cacactccaaaccatgaagaaggta

SEQ ID NO: 166100 - DNA, 25 bp, Homo sapien
gcttgatgcattgctaccacacact

SEQ ID NO: 166101 - DNA, 25 bp, Homo sapien
ttcttctaaaaggtctgcatcgtac

SEQ ID NO: 166102 - DNA, 25 bp, Homo sapien
taaaaggtctgcatcgtacatctcc

SEQ ID NO: 166103 - DNA, 25 bp, Homo sapien
agttctttggagacatatttcttag

SEQ ID NO: 166104 - DNA, 25 bp, Homo sapien
gttctttggagacatatttcttaga

SEQ ID NO: 166105 - DNA, 25 bp, Homo sapien
acactggcagccttcgaatacacca

SEQ ID NO: 166106 - DNA, 25 bp, Homo sapien
tttacagtctcaactttcggtacac

SEQ ID NO: 166107 - DNA, 25 bp, Homo sapien
tacactggcagccttcgaatacacc

SEQ ID NO: 166108 - DNA, 25 bp, Homo sapien
agtctcaactttcggtacactggca

SEQ ID NO: 166109 - DNA, 25 bp, Homo sapien
gcatcaatatcgatgtcgtcatcct

SEQ ID NO: 166110 - DNA, 25 bp, Homo sapien
aatggcatcaatatcgatgtcgtca

SEQ ID NO: 166111 - DNA, 25 bp, Homo sapien
tcaatatcgatgtcgtcatccttgt

SEQ ID NO: 166112 - DNA, 25 bp, Homo sapien
ttaaatggcatcaatatcgatgtcg

SEQ ID NO: 166113 - DNA, 25 bp, Homo sapien
ttgcagcattatactgttaagctag

SEQ ID NO: 166114 - DNA, 25 bp, Homo sapien
gcagcattatactgttaagctaggt

SEQ ID NO: 166115 - DNA, 25 bp, Homo sapien
aatttgcagcattatactgttaagc

SEQ ID NO: 166116 - DNA, 25 bp, Homo sapien
gaaaatttgcagcattatactgtta

SEQ ID NO: 166117 - DNA, 25 bp, Homo sapien
gatttttagtgtaaagtgtagcatg

SEQ ID NO: 166118 - DNA, 25 bp, Homo sapien
cactcacagtaatagatttttagtg

SEQ ID NO: 166119 - DNA, 25 bp, Homo sapien
taagccattttagcttttgcacata

SEQ ID NO: 166120 - DNA, 25 bp, Homo sapien
tagcatgatgttaagccattttagc

SEQ ID NO: 166121 - DNA, 25 bp, Homo sapien
ataagcaaactacatctgctcactg

SEQ ID NO: 166122 - DNA, 25 bp, Homo sapien
caaactacatctgctcactgatgtg

SEQ ID NO: 166123 - DNA, 25 bp, Homo sapien
agcaaactacatctgctcactgatg

SEQ ID NO: 166124 - DNA, 25 bp, Homo sapien
ataaataagcaaactacatctgctc

SEQ ID NO: 166125 - DNA, 25 bp, Homo sapien
ttataactgtataaatgtgatccaa

SEQ ID NO: 166126 - DNA, 25 bp, Homo sapien
gatgccaatttgaggaactacagag

SEQ ID NO: 166127 - DNA, 25 bp, Homo sapien
caggacctaacaatatctggcaggc

SEQ ID NO: 166128 - DNA, 25 bp, Homo sapien
caggctccaagaatgctcatcaggt

SEQ ID NO: 166129 - DNA, 25 bp, Homo sapien
tgttgaggacctctttgcagcccca

SEQ ID NO: 166130 - DNA, 25 bp, Homo sapien
catgcttaggttgctagttaagtgc

SEQ ID NO: 166131 - DNA, 25 bp, Homo sapien
gaaagcaaccaaaatctaaaaagca

SEQ ID NO: 166132 - DNA, 25 bp, Homo sapien
aagcataaactatgtgtccaaatgt

SEQ ID NO: 166133 - DNA, 25 bp, Homo sapien
aaatacagtatgtctaacattttgg

SEQ ID NO: 166134 - DNA, 25 bp, Homo sapien
actcaggtggccatcagacttcttg

SEQ ID NO: 166135 - DNA, 25 bp, Homo sapien
gtgtccaaatctaaagccctgcatg

SEQ ID NO: 166136 - DNA, 25 bp, Homo sapien
atgaaagcagatcagccttgcggca

SEQ ID NO: 166137 - DNA, 25 bp, Homo sapien
caagtcttacaccaaaatagaggct

SEQ ID NO: 166138 - DNA, 25 bp, Homo sapien
taactttaatattaaagcaaagaca

SEQ ID NO: 166139 - DNA, 25 bp, Homo sapien
gcagatatggaaaggcaatccccta

SEQ ID NO: 166140 - DNA, 25 bp, Homo sapien
gagtgctgcacataagggtctccac

SEQ ID NO: 166141 - DNA, 25 bp, Homo sapien
aagcaacggctacaaaacagggcag

SEQ ID NO: 166142 - DNA, 25 bp, Homo sapien
taaccgaactgcagggtcaactcag

SEQ ID NO: 166143 - DNA, 25 bp, Homo sapien
tattgggcataccagcatgagaccc

SEQ ID NO: 166144 - DNA, 25 bp, Homo sapien
tgttttgagattaccacctgtggct

SEQ ID NO: 166145 - DNA, 25 bp, Homo sapien
acaagggcgatgcaagtccacagct

SEQ ID NO: 166146 - DNA, 25 bp, Homo sapien
cacgcgtggccgagaatggttttta

SEQ ID NO: 166147 - DNA, 25 bp, Homo sapien
caggtcaaggacaagagcagagttg

SEQ ID NO: 166148 - DNA, 25 bp, Homo sapien
tgattcggcgtgtgtaatataccca

SEQ ID NO: 166149 - DNA, 25 bp, Homo sapien
tctccctcggatgtgacctcagaca

SEQ ID NO: 166150 - DNA, 25 bp, Homo sapien
gagtcagccctgagtcccaactata

SEQ ID NO: 166151 - DNA, 25 bp, Homo sapien
gccggaagtgacgacaggccgccac

SEQ ID NO: 166152 - DNA, 25 bp, Homo sapien
ctgccggaagtgacgacaggccgcc

SEQ ID NO: 166153 - DNA, 25 bp, Homo sapien
cggaagtgacgacaggccgccaccc

SEQ ID NO: 166154 - DNA, 25 bp, Homo sapien
gaagtgacgacaggccgccacccgg

SEQ ID NO: 166155 - DNA, 25 bp, Homo sapien
tgtgggcgccgaccatggagcgggc

SEQ ID NO: 166156 - DNA, 25 bp, Homo sapien
aggaggcgcctgcgcccgactgctt

SEQ ID NO: 166157 - DNA, 25 bp, Homo sapien
tctctagcgagcttgctgcctcagc

SEQ ID NO: 166158 - DNA, 25 bp, Homo sapien
ggaagtggagcgcaagacaggccgc

SEQ ID NO: 166159 - DNA, 25 bp, Homo sapien
cctcccgtcgcaccgcgaatttcag

SEQ ID NO: 166160 - DNA, 25 bp, Homo sapien
gcaccgcgaatttcagctcgcgggc

SEQ ID NO: 166161 - DNA, 25 bp, Homo sapien
gctcgcgggcctccacacagcgccg

SEQ ID NO: 166162 - DNA, 25 bp, Homo sapien
actccctcccgtcgcaccgcgaatt

SEQ ID NO: 166163 - DNA, 25 bp, Homo sapien
taggaggccggcgaccagcgtcctc

SEQ ID NO: 166164 - DNA, 25 bp, Homo sapien
gtccacggcagttccgaaaaggcgc

SEQ ID NO: 166165 - DNA, 25 bp, Homo sapien
tttaattctgcacaatgcgagggtc

SEQ ID NO: 166166 - DNA, 25 bp, Homo sapien
tacggccgtctagatcccgggcctg

SEQ ID NO: 166167 - DNA, 25 bp, Homo sapien
caccgttggcaatggggtcctagtg

SEQ ID NO: 166168 - DNA, 25 bp, Homo sapien
tcattcaccgttggcaatggggtcc

SEQ ID NO: 166169 - DNA, 25 bp, Homo sapien
cgttcattcaccgttggcaatgggg

SEQ ID NO: 166170 - DNA, 25 bp, Homo sapien
tttcagtgtctcgttcattcaccgt

SEQ ID NO: 166171 - DNA, 25 bp, Homo sapien
gatactctacaaagtattgctggct

SEQ ID NO: 166172 - DNA, 25 bp, Homo sapien
taagtgatcaccaaatggcaactat

SEQ ID NO: 166173 - DNA, 25 bp, Homo sapien
ggctggtatacagttaagtgatcac

SEQ ID NO: 166174 - DNA, 25 bp, Homo sapien
caccaaatggcaactattgttattt

SEQ ID NO: 166175 - DNA, 25 bp, Homo sapien
taaagcagtccatatccccatgagg

SEQ ID NO: 166176 - DNA, 25 bp, Homo sapien
tactcaactaaatcagagctgaggg

SEQ ID NO: 166177 - DNA, 25 bp, Homo sapien
aaactttactagtgccaatgacctg

SEQ ID NO: 166178 - DNA, 25 bp, Homo sapien
taatggctactgaaacaacttgttg

SEQ ID NO: 166179 - DNA, 25 bp, Homo sapien
aacacagagtacttgccaagttcta

SEQ ID NO: 166180 - DNA, 25 bp, Homo sapien
agaacacagagtacttgccaagttc

SEQ ID NO: 166181 - DNA, 25 bp, Homo sapien
gaacacagagtacttgccaagttct

SEQ ID NO: 166182 - DNA, 25 bp, Homo sapien
gagaacacagagtacttgccaagtt

SEQ ID NO: 166183 - DNA, 25 bp, Homo sapien
gcacaggaggctatagagtttctac

SEQ ID NO: 166184 - DNA, 25 bp, Homo sapien
gacgcccatctccatgtgacgtgtg

SEQ ID NO: 166185 - DNA, 25 bp, Homo sapien
tacgagaggtaacttcttgacgccc

SEQ ID NO: 166186 - DNA, 25 bp, Homo sapien
cagtctgtagtttccgatgtgaggt

SEQ ID NO: 166187 - DNA, 25 bp, Homo sapien
aacagagcaactgtcataacagaaa

SEQ ID NO: 166188 - DNA, 25 bp, Homo sapien
atggaaataaacagagcaactgtca

SEQ ID NO: 166189 - DNA, 25 bp, Homo sapien
cagaaataagcataactggtattta

SEQ ID NO: 166190 - DNA, 25 bp, Homo sapien
taaacagagcaactgtcataacaga

SEQ ID NO: 166191 - DNA, 25 bp, Homo sapien
ggcagctcagcaacaaggagtctta

SEQ ID NO: 166192 - DNA, 25 bp, Homo sapien
gaaactcagaggtctcaccgttcct

SEQ ID NO: 166193 - DNA, 25 bp, Homo sapien
gaagctggcaagtagccacctggaa

SEQ ID NO: 166194 - DNA, 25 bp, Homo sapien
gaactggtgggaactaagaaactca

SEQ ID NO: 166195 - DNA, 25 bp, Homo sapien
cctggatgaggcggtgcaggaagtc

SEQ ID NO: 166196 - DNA, 25 bp, Homo sapien
ttcccaatatctgaaaacctttcat

SEQ ID NO: 166197 - DNA, 25 bp, Homo sapien
tgagcttcccattctttaactaact

SEQ ID NO: 166198 - DNA, 25 bp, Homo sapien
caagtttgagcttcccattctttaa

SEQ ID NO: 166199 - DNA, 25 bp, Homo sapien
tcatgatccaagtttgagcttccca

SEQ ID NO: 166200 - DNA, 25 bp, Homo sapien
gcagacacaggaacccagctaactt

SEQ ID NO: 166201 - DNA, 25 bp, Homo sapien
tacttaaatagtgtgaatgcagagc

SEQ ID NO: 166202 - DNA, 25 bp, Homo sapien
tttaattgaagcaaatcattctggg

SEQ ID NO: 166203 - DNA, 25 bp, Homo sapien
taaaaattcatcactgtctacccac

SEQ ID NO: 166204 - DNA, 25 bp, Homo sapien
aagcaatcttgatcccaatccccat

SEQ ID NO: 166205 - DNA, 25 bp, Homo sapien
agcaatcttgatcccaatccccatc

SEQ ID NO: 166206 - DNA, 25 bp, Homo sapien
aaagcaactatgtccccagagtgaa

SEQ ID NO: 166207 - DNA, 25 bp, Homo sapien
tgacatgtgtacgtgcagcaaggaa

SEQ ID NO: 166208 - DNA, 25 bp, Homo sapien
gggtatccccgattgcagtgcctca

SEQ ID NO: 166209 - DNA, 25 bp, Homo sapien
cctggagagctcaggcaaagctgaa

SEQ ID NO: 166210 - DNA, 25 bp, Homo sapien
tgaaaccgttagacatacacactct

SEQ ID NO: 166211 - DNA, 25 bp, Homo sapien
tcacacctggactcttaatcactag

SEQ ID NO: 166212 - DNA, 25 bp, Homo sapien
gagacgtggtttctattttcacacc

SEQ ID NO: 166213 - DNA, 25 bp, Homo sapien
tacatggtatacctagatctcccaa

SEQ ID NO: 166214 - DNA, 25 bp, Homo sapien
aatgctgagttgatctgaggccttg

SEQ ID NO: 166215 - DNA, 25 bp, Homo sapien
tatataaatcaaagtcgaatgaatt

SEQ ID NO: 166216 - DNA, 25 bp, Homo sapien
caaagtcgaatgaattttcttcaaa

SEQ ID NO: 166217 - DNA, 25 bp, Homo sapien
tgaacactcataatcagtaaccaaa

SEQ ID NO: 166218 - DNA, 25 bp, Homo sapien
caaaccaatctgtgggctaaccaag

SEQ ID NO: 166219 - DNA, 25 bp, Homo sapien
taaccaagtgaatatacagagcggc

SEQ ID NO: 166220 - DNA, 25 bp, Homo sapien
ccagggaatatcaagtaactcggct

SEQ ID NO: 166221 - DNA, 25 bp, Homo sapien
aaatagttttgactcggcagactcc

SEQ ID NO: 166222 - DNA, 25 bp, Homo sapien
ttcaactgagttttgtcaattattt

SEQ ID NO: 166223 - DNA, 25 bp, Homo sapien
attcaactgagttttgtcaattatt

SEQ ID NO: 166224 - DNA, 25 bp, Homo sapien
gattcaactgagttttgtcaattat

SEQ ID NO: 166225 - DNA, 25 bp, Homo sapien
taagatacttggtgaaaaagaattg

SEQ ID NO: 166226 - DNA, 25 bp, Homo sapien
taagcatatgaagttatatacacaa

SEQ ID NO: 166227 - DNA, 25 bp, Homo sapien
aaatgcttctaatttacttcataag

SEQ ID NO: 166228 - DNA, 25 bp, Homo sapien
tatttaacttgggatagagctggct

SEQ ID NO: 166229 - DNA, 25 bp, Homo sapien
caagaagggttgaaaagtactggct

SEQ ID NO: 166230 - DNA, 25 bp, Homo sapien
ttctagacccgccaagataggacct

SEQ ID NO: 166231 - DNA, 25 bp, Homo sapien
gacagactaggagccattctcatct

SEQ ID NO: 166232 - DNA, 25 bp, Homo sapien
agtgcccaaaataacccagtggtgg

SEQ ID NO: 166233 - DNA, 25 bp, Homo sapien
ctcaaggttctggtggtcaagattc

SEQ ID NO: 166234 - DNA, 25 bp, Homo sapien
ctagaatcagagcaacatcaggaaa

SEQ ID NO: 166235 - DNA, 25 bp, Homo sapien
ggaacattcttttgtatgcagtcag

SEQ ID NO: 166236 - DNA, 25 bp, Homo sapien
caggtagtataagggtgctcatctc

SEQ ID NO: 166237 - DNA, 25 bp, Homo sapien
tgttgttactgatgtgtatcgattc

SEQ ID NO: 166238 - DNA, 25 bp, Homo sapien
ttcagagttgcagaaaaggttcctt

SEQ ID NO: 166239 - DNA, 25 bp, Homo sapien
caatttctttggatattctaacatt

SEQ ID NO: 166240 - DNA, 25 bp, Homo sapien
caatcatgaattccaggtttggcaa

SEQ ID NO: 166241 - DNA, 25 bp, Homo sapien
tgtgtctgacgcatagagccagatg

SEQ ID NO: 166242 - DNA, 25 bp, Homo sapien
tacagcagaggtcataccagggatg

SEQ ID NO: 166243 - DNA, 25 bp, Homo sapien
tcccaagagaggtagtggcaggata

SEQ ID NO: 166244 - DNA, 25 bp, Homo sapien
ttatctagtgcctgctgtgtctgac

SEQ ID NO: 166245 - DNA, 25 bp, Homo sapien
catcctttaagtctcaggcagattc

SEQ ID NO: 166246 - DNA, 25 bp, Homo sapien
gcccatctgttcacttctttcctgg

SEQ ID NO: 166247 - DNA, 25 bp, Homo sapien
tgaaaacgtatctaagtaggtctcc

SEQ ID NO: 166248 - DNA, 25 bp, Homo sapien
ttgttttacatcatagcccatctgt

SEQ ID NO: 166249 - DNA, 25 bp, Homo sapien
aagcagcggcctatgtggaaaggaa

SEQ ID NO: 166250 - DNA, 25 bp, Homo sapien
cagctaagaggagatggacatggac

SEQ ID NO: 166251 - DNA, 25 bp, Homo sapien
gaaaaagatcttctaaggtcctgct

SEQ ID NO: 166252 - DNA, 25 bp, Homo sapien
ttctgagatgagaagatagtcaccc

SEQ ID NO: 166253 - DNA, 25 bp, Homo sapien
gatgaagggtagttatttaaagaga

SEQ ID NO: 166254 - DNA, 25 bp, Homo sapien
gccacacaagtgaacccaggtgaga

SEQ ID NO: 166255 - DNA, 25 bp, Homo sapien
tgccaaaccaccagctgaattcagc

SEQ ID NO: 166256 - DNA, 25 bp, Homo sapien
taagaaaaaccagccgagcacggtg

SEQ ID NO: 166257 - DNA, 25 bp, Homo sapien
aacacataatccccccaacacaagt

SEQ ID NO: 166258 - DNA, 25 bp, Homo sapien
cacataatccccccaacacaagtta

SEQ ID NO: 166259 - DNA, 25 bp, Homo sapien
cataatccccccaacacaagttatt

SEQ ID NO: 166260 - DNA, 25 bp, Homo sapien
caaaacacataatccccccaacaca

SEQ ID NO: 166261 - DNA, 25 bp, Homo sapien
tcattattcttacttctctgaagag

SEQ ID NO: 166262 - DNA, 25 bp, Homo sapien
taaaatcttcattattcttacttct

SEQ ID NO: 166263 - DNA, 25 bp, Homo sapien
tatattgggatgatttaaaatcttc

SEQ ID NO: 166264 - DNA, 25 bp, Homo sapien
ctatattgggatgatttaaaatctt

SEQ ID NO: 166265 - DNA, 25 bp, Homo sapien
agaatacgtgtttagctttatgaca

SEQ ID NO: 166266 - DNA, 25 bp, Homo sapien
tattttactagaagtgtactctacc

SEQ ID NO: 166267 - DNA, 25 bp, Homo sapien
tctgacttcctataattcccttcta

SEQ ID NO: 166268 - DNA, 25 bp, Homo sapien
cagagtacagatgtttctaccagat

SEQ ID NO: 166269 - DNA, 25 bp, Homo sapien
tccacttgcatattccatgattagg

SEQ ID NO: 166270 - DNA, 25 bp, Homo sapien
ctccacttgcatattccatgattag

SEQ ID NO: 166271 - DNA, 25 bp, Homo sapien
gtggaaccatatgtcacactcataa

SEQ ID NO: 166272 - DNA, 25 bp, Homo sapien
ttcaatacaaacctcttaagagatt

SEQ ID NO: 166273 - DNA, 25 bp, Homo sapien
taaaccaggaattcaatccagatct

SEQ ID NO: 166274 - DNA, 25 bp, Homo sapien
ttactaaattataattcaggagttc

SEQ ID NO: 166275 - DNA, 25 bp, Homo sapien
taaatgtcagctcggtaaagtgtca

SEQ ID NO: 166276 - DNA, 25 bp, Homo sapien
aattaaacgattaagcctaccagct

SEQ ID NO: 166277 - DNA, 25 bp, Homo sapien
gcacacaatgtcaaaacaagtggtt

SEQ ID NO: 166278 - DNA, 25 bp, Homo sapien
cagcattttctatgcgaatgaccta

SEQ ID NO: 166279 - DNA, 25 bp, Homo sapien
cttcatcctgccatgtgcaaccaaa

SEQ ID NO: 166280 - DNA, 25 bp, Homo sapien
catcctgccatgtgcaaccaaatag

SEQ ID NO: 166281 - DNA, 25 bp, Homo sapien
tcctgccatgtgcaaccaaatagtc

SEQ ID NO: 166282 - DNA, 25 bp, Homo sapien
tgccatgtgcaaccaaatagtcaaa

SEQ ID NO: 166283 - DNA, 25 bp, Homo sapien
cacttggccttggtttatgtcagac

SEQ ID NO: 166284 - DNA, 25 bp, Homo sapien
tgcttgctaaaaactctgaaatggc

SEQ ID NO: 166285 - DNA, 25 bp, Homo sapien
gactctgagtctatggcaggtctcc

SEQ ID NO: 166286 - DNA, 25 bp, Homo sapien
gttgaattgaatggccaacccctgc

SEQ ID NO: 166287 - DNA, 25 bp, Homo sapien
tgtaaacatcagactaagcaaatca

SEQ ID NO: 166288 - DNA, 25 bp, Homo sapien
catcagactaagcaaatcaaaggag

SEQ ID NO: 166289 - DNA, 25 bp, Homo sapien
tttaatagtctgtccagcttgacaa

SEQ ID NO: 166290 - DNA, 25 bp, Homo sapien
caaaggagacttgaactttaatagt

SEQ ID NO: 166291 - DNA, 25 bp, Homo sapien
tcatcaatattaccagcccaccaat

SEQ ID NO: 166292 - DNA, 25 bp, Homo sapien
cagcccaccaataaagaggtaagta

SEQ ID NO: 166293 - DNA, 25 bp, Homo sapien
ttaccagcccaccaataaagaggta

SEQ ID NO: 166294 - DNA, 25 bp, Homo sapien
caaatcatcaatattaccagcccac

SEQ ID NO: 166295 - DNA, 25 bp, Homo sapien
cttgaggtctcgatgtacgatccgt

SEQ ID NO: 166296 - DNA, 25 bp, Homo sapien
ggtctcgatgtacgatccgtttctg

SEQ ID NO: 166297 - DNA, 25 bp, Homo sapien
tgtacgatccgtttctgatggcagt

SEQ ID NO: 166298 - DNA, 25 bp, Homo sapien
tccgtttctgatggcagtattgaac

SEQ ID NO: 166299 - DNA, 25 bp, Homo sapien
attcattgctaaaaccgaaatctgc

SEQ ID NO: 166300 - DNA, 25 bp, Homo sapien
acttctggcccgtcatatttcttgc

SEQ ID NO: 166301 - DNA, 25 bp, Homo sapien
tgctgcgtatggaggactgccacaa

SEQ ID NO: 166302 - DNA, 25 bp, Homo sapien
cgtgtcgagtttaccgccaacagta

SEQ ID NO: 166303 - DNA, 25 bp, Homo sapien
gaagtgagccactgactagtgtgta

SEQ ID NO: 166304 - DNA, 25 bp, Homo sapien
aggttttgcccatcaaagggaagtg

SEQ ID NO: 166305 - DNA, 25 bp, Homo sapien
tgactagtgtgtataaaatgacccc

SEQ ID NO: 166306 - DNA, 25 bp, Homo sapien
gcccatcaaagggaagtgagccact

SEQ ID NO: 166307 - DNA, 25 bp, Homo sapien
tgaaaccccccgcactgatataatg

SEQ ID NO: 166308 - DNA, 25 bp, Homo sapien
gccatgtaatattaggaaacttctt

SEQ ID NO: 166309 - DNA, 25 bp, Homo sapien
ccccgcactgatataatgttaaaaa

SEQ ID NO: 166310 - DNA, 25 bp, Homo sapien
agtacatgggtgcagcttcttatac

SEQ ID NO: 166311 - DNA, 25 bp, Homo sapien
ctctagagtgccgcgtttaattgga

SEQ ID NO: 166312 - DNA, 25 bp, Homo sapien
ctgtagacatgtagaagggaattct

SEQ ID NO: 166313 - DNA, 25 bp, Homo sapien
aaggttttcacagtctgtagacatg

SEQ ID NO: 166314 - DNA, 25 bp, Homo sapien
agagtgccgcgtttaattggattta

SEQ ID NO: 166315 - DNA, 25 bp, Homo sapien
ggtcactctaaagactctccaaagt

SEQ ID NO: 166316 - DNA, 25 bp, Homo sapien
aagttactgcttgtttccacctaca

SEQ ID NO: 166317 - DNA, 25 bp, Homo sapien
tcaagcaaagatctaaggtcactct

SEQ ID NO: 166318 - DNA, 25 bp, Homo sapien
caggatatatccagtatggcataca

SEQ ID NO: 166319 - DNA, 25 bp, Homo sapien
tcatgccctgcattgatccacctgt

SEQ ID NO: 166320 - DNA, 25 bp, Homo sapien
ttttggtctgagatgtctagctctg

SEQ ID NO: 166321 - DNA, 25 bp, Homo sapien
caacaaatggtttgagttcatcttc

SEQ ID NO: 166322 - DNA, 25 bp, Homo sapien
tgtctagctctggttcaacaaatgg

SEQ ID NO: 166323 - DNA, 25 bp, Homo sapien
gatttcatcgtatttcatcttacta

SEQ ID NO: 166324 - DNA, 25 bp, Homo sapien
tcttactaagagattcttgaatttc

SEQ ID NO: 166325 - DNA, 25 bp, Homo sapien
gattttctccccaataacaaatatg

SEQ ID NO: 166326 - DNA, 25 bp, Homo sapien
gctgtgatttcatcgtatttcatct

SEQ ID NO: 166327 - DNA, 25 bp, Homo sapien
gatttgctatttgcaagtaaatcta

SEQ ID NO: 166328 - DNA, 25 bp, Homo sapien
tacatacagggtatttcagctcttt

SEQ ID NO: 166329 - DNA, 25 bp, Homo sapien
taaaatagcttataatagtcatagg

SEQ ID NO: 166330 - DNA, 25 bp, Homo sapien
cctggccaatatccatcattaaggg

SEQ ID NO: 166331 - DNA, 25 bp, Homo sapien
ctgcctctcagggtcaagcagttct

SEQ ID NO: 166332 - DNA, 25 bp, Homo sapien
gcctctcagggtcaagcagttctct

SEQ ID NO: 166333 - DNA, 25 bp, Homo sapien
ctctgcctctcagggtcaagcagtt

SEQ ID NO: 166334 - DNA, 25 bp, Homo sapien
cctctcagggtcaagcagttctctt

SEQ ID NO: 166335 - DNA, 25 bp, Homo sapien
tcataaaccgttcattcagagagag

SEQ ID NO: 166336 - DNA, 25 bp, Homo sapien
gaggaggaatcacaacgtacaaaaa

SEQ ID NO: 166337 - DNA, 25 bp, Homo sapien
tgacaaccctaaactcaagcaaaag

SEQ ID NO: 166338 - DNA, 25 bp, Homo sapien
agagcaaaccacaacacgaacccaa

SEQ ID NO: 166339 - DNA, 25 bp, Homo sapien
tgaaagattgctgctagaactggaa

SEQ ID NO: 166340 - DNA, 25 bp, Homo sapien
tagcaagtgaaagattgctgctaga

SEQ ID NO: 166341 - DNA, 25 bp, Homo sapien
tagaactggaatcactagcatccag

SEQ ID NO: 166342 - DNA, 25 bp, Homo sapien
tgctgctagaactggaatcactagc

SEQ ID NO: 166343 - DNA, 25 bp, Homo sapien
ttctctgcactttgtggtgaggaga

SEQ ID NO: 166344 - DNA, 25 bp, Homo sapien
gaggagactggccagtactgttgtt

SEQ ID NO: 166345 - DNA, 25 bp, Homo sapien
tgttgagatcactgctcggcctaac

SEQ ID NO: 166346 - DNA, 25 bp, Homo sapien
catggtcactgtagcgtctttgctt

SEQ ID NO: 166347 - DNA, 25 bp, Homo sapien
tgccctgtgcagtcctaagtgtcaa

SEQ ID NO: 166348 - DNA, 25 bp, Homo sapien
taaaccatgtagaaaggcaagcaac

SEQ ID NO: 166349 - DNA, 25 bp, Homo sapien
gatcaacacgtcacctacaaatgct

SEQ ID NO: 166350 - DNA, 25 bp, Homo sapien
cagttacaccctagaatagcaggca

SEQ ID NO: 166351 - DNA, 25 bp, Homo sapien
gagtgtacaataccatgtctaaagc

SEQ ID NO: 166352 - DNA, 25 bp, Homo sapien
gggaaaaaggcactaataatctgga

SEQ ID NO: 166353 - DNA, 25 bp, Homo sapien
tgtggtccataagcactagaaaccc

SEQ ID NO: 166354 - DNA, 25 bp, Homo sapien
tggtttcagggcaatatatgggcat

SEQ ID NO: 166355 - DNA, 25 bp, Homo sapien
tcaccattcgcagaaaaagtgcaca

SEQ ID NO: 166356 - DNA, 25 bp, Homo sapien
tctcaaacgaggaaggacagctaca

SEQ ID NO: 166357 - DNA, 25 bp, Homo sapien
gatgaggtgaaagttagcccggcta

SEQ ID NO: 166358 - DNA, 25 bp, Homo sapien
tacatcgtagctttagagaagcagg

SEQ ID NO: 166359 - DNA, 25 bp, Homo sapien
aacatcttaaggtggtggtactgca

SEQ ID NO: 166360 - DNA, 25 bp, Homo sapien
tcttttgtaggagagatgccatcac

SEQ ID NO: 166361 - DNA, 25 bp, Homo sapien
gaagtcggtggaggtcactagtcat

SEQ ID NO: 166362 - DNA, 25 bp, Homo sapien
cagaggaatcatgcaagcgacaggg

SEQ ID NO: 166363 - DNA, 25 bp, Homo sapien
tcggatacgccacaacagaaggaat

SEQ ID NO: 166364 - DNA, 25 bp, Homo sapien
tctgcagtgctggtctgactccttt

SEQ ID NO: 166365 - DNA, 25 bp, Homo sapien
gtggagcttttcttgcgttcaggaa

SEQ ID NO: 166366 - DNA, 25 bp, Homo sapien
cactgccacttgatttccgggagga

SEQ ID NO: 166367 - DNA, 25 bp, Homo sapien
aaacataagtatttcgtcgtgtcat

SEQ ID NO: 166368 - DNA, 25 bp, Homo sapien
aatcactgagtgtctatcagctgta

SEQ ID NO: 166369 - DNA, 25 bp, Homo sapien
taagtatttcgtcgtgtcattccac

SEQ ID NO: 166370 - DNA, 25 bp, Homo sapien
tcagctgtagttctctcactgcaaa

SEQ ID NO: 166371 - DNA, 25 bp, Homo sapien
gaacaaatgttactcctcatatcaa

SEQ ID NO: 166372 - DNA, 25 bp, Homo sapien
tgctatactcaagttcttagtagtt

SEQ ID NO: 166373 - DNA, 25 bp, Homo sapien
tatcaactcaatcctaagtggccta

SEQ ID NO: 166374 - DNA, 25 bp, Homo sapien
cacacacacacgagtcataaaagag

SEQ ID NO: 166375 - DNA, 25 bp, Homo sapien
gagaaagacgacaccttcagaagca

SEQ ID NO: 166376 - DNA, 25 bp, Homo sapien
ggagactgactctgcacctcagaca

SEQ ID NO: 166377 - DNA, 25 bp, Homo sapien
cagaagttaacataggtccaggcat

SEQ ID NO: 166378 - DNA, 25 bp, Homo sapien
gaacaatttgccgaagaagtcatct

SEQ ID NO: 166379 - DNA, 25 bp, Homo sapien
caaaccttctcatgcctagtttaca

SEQ ID NO: 166380 - DNA, 25 bp, Homo sapien
tagaatcatacaattgaaggtgtaa

SEQ ID NO: 166381 - DNA, 25 bp, Homo sapien
cctataccatcatgatagaatcata

SEQ ID NO: 166382 - DNA, 25 bp, Homo sapien
tacaattgaaggtgtaatcaaacct

SEQ ID NO: 166383 - DNA, 25 bp, Homo sapien
cactgtgctcagccctttttttttg

SEQ ID NO: 166384 - DNA, 25 bp, Homo sapien
ttttgagacagagtcttgctctgtt

SEQ ID NO: 166385 - DNA, 25 bp, Homo sapien
actgtgctcagccctttttttttgt

SEQ ID NO: 166386 - DNA, 25 bp, Homo sapien
ccactgtgctcagcccttttttttt

SEQ ID NO: 166387 - DNA, 25 bp, Homo sapien
ccatctcccaggctcaaaccatcct

SEQ ID NO: 166388 - DNA, 25 bp, Homo sapien
cctccatctcccaggctcaaaccat

SEQ ID NO: 166389 - DNA, 25 bp, Homo sapien
ctctaccgtccaggctggaatacaa

SEQ ID NO: 166390 - DNA, 25 bp, Homo sapien
tggtgtgatctcggctcactacaac

SEQ ID NO: 166391 - DNA, 25 bp, Homo sapien
ctaaaaggtcatcaagctaattgtt

SEQ ID NO: 166392 - DNA, 25 bp, Homo sapien
ccaacatcacaatggtctacatata

SEQ ID NO: 166393 - DNA, 25 bp, Homo sapien
gatttctacagtaggcctaacaccc

SEQ ID NO: 166394 - DNA, 25 bp, Homo sapien
cagaaggaaacagtaaactcagtaa

SEQ ID NO: 166395 - DNA, 25 bp, Homo sapien
gacaggccaagctagatctttaagg

SEQ ID NO: 166396 - DNA, 25 bp, Homo sapien
gattcccaatgaagcacactgctga

SEQ ID NO: 166397 - DNA, 25 bp, Homo sapien
gcttttagtcagcttgcaggcagga

SEQ ID NO: 166398 - DNA, 25 bp, Homo sapien
caggagggtgctgcatcgattccca

SEQ ID NO: 166399 - DNA, 25 bp, Homo sapien
tagcaactggaattctgatagcccc

SEQ ID NO: 166400 - DNA, 25 bp, Homo sapien
taccagggcctcagtatagagcctc

SEQ ID NO: 166401 - DNA, 25 bp, Homo sapien
tggcagggcaggtattcaacaaacg

SEQ ID NO: 166402 - DNA, 25 bp, Homo sapien
gataaaaaacagtcagcagagcccc

SEQ ID NO: 166403 - DNA, 25 bp, Homo sapien
ggctgacatggacatcgacttctga

SEQ ID NO: 166404 - DNA, 25 bp, Homo sapien
gccgacaggtagatgtacaaactga

SEQ ID NO: 166405 - DNA, 25 bp, Homo sapien
gacttctgatgtctcagccgacagg

SEQ ID NO: 166406 - DNA, 25 bp, Homo sapien
tgcgtaagcgaacatttctgtcagg

SEQ ID NO: 166407 - DNA, 25 bp, Homo sapien
cacacaatacacaaccgaggacatc

SEQ ID NO: 166408 - DNA, 25 bp, Homo sapien
cattttgtagtacgcgaaggcacga

SEQ ID NO: 166409 - DNA, 25 bp, Homo sapien
gaggaaggacgccttgtggacaact

SEQ ID NO: 166410 - DNA, 25 bp, Homo sapien
gcagtgggtacacattagtttcaca

SEQ ID NO: 166411 - DNA, 25 bp, Homo sapien
aatccagatccaaggggtattttat

SEQ ID NO: 166412 - DNA, 25 bp, Homo sapien
gaagctctcagaacatgatatacaa

SEQ ID NO: 166413 - DNA, 25 bp, Homo sapien
atccagatccaaggggtattttata

SEQ ID NO: 166414 - DNA, 25 bp, Homo sapien
tgcctcttgggaagcggattcgatc

SEQ ID NO: 166415 - DNA, 25 bp, Homo sapien
tatatgttgcggttcgccgttcccg

SEQ ID NO: 166416 - DNA, 25 bp, Homo sapien
aagagattagtggagcctcggcttc

SEQ ID NO: 166417 - DNA, 25 bp, Homo sapien
gaaagtgctacgactggcagtgcct

SEQ ID NO: 166418 - DNA, 25 bp, Homo sapien
gactcttctcagattgaactcactg

SEQ ID NO: 166419 - DNA, 25 bp, Homo sapien
gaatggtttattctgggagtcacca

SEQ ID NO: 166420 - DNA, 25 bp, Homo sapien
gaaaccttctgatgcgtctgacttc

SEQ ID NO: 166421 - DNA, 25 bp, Homo sapien
tcatgaatgggtgtcccaaacctgg

SEQ ID NO: 166422 - DNA, 25 bp, Homo sapien
gggtcatcgacagtacaatcatgca

SEQ ID NO: 166423 - DNA, 25 bp, Homo sapien
tatgatcaatgcgatcagcttccct

SEQ ID NO: 166424 - DNA, 25 bp, Homo sapien
tcagtagtatacagcagggtcatcg

SEQ ID NO: 166425 - DNA, 25 bp, Homo sapien
ccttggttgggataactttggcatt

SEQ ID NO: 166426 - DNA, 25 bp, Homo sapien
ttaaaagttcttcagatggacacac

SEQ ID NO: 166427 - DNA, 25 bp, Homo sapien
cactgcaatggccagatacactttc

SEQ ID NO: 166428 - DNA, 25 bp, Homo sapien
aaaaggtttagcagtacatattgac

SEQ ID NO: 166429 - DNA, 25 bp, Homo sapien
aatctaatcaattacagagagaaag

SEQ ID NO: 166430 - DNA, 25 bp, Homo sapien
ttttgataaacctgaatgacatgtt

SEQ ID NO: 166431 - DNA, 25 bp, Homo sapien
cttttgataaacctgaatgacatgt

SEQ ID NO: 166432 - DNA, 25 bp, Homo sapien
tttgataaacctgaatgacatgttt

SEQ ID NO: 166433 - DNA, 25 bp, Homo sapien
tcagccttttgttgcatgggtacca

SEQ ID NO: 166434 - DNA, 25 bp, Homo sapien
caccagccgggcttatgaaaactct

SEQ ID NO: 166435 - DNA, 25 bp, Homo sapien
gaggcacaggtacaatgtagccctt

SEQ ID NO: 166436 - DNA, 25 bp, Homo sapien
tacttaccttttgcatgcctgtgga

SEQ ID NO: 166437 - DNA, 25 bp, Homo sapien
tatctcccgttcctctcatattcag

SEQ ID NO: 166438 - DNA, 25 bp, Homo sapien
tcatatctcccgttcctctcatatt

SEQ ID NO: 166439 - DNA, 25 bp, Homo sapien
cttgagccctcatatctcccgttcc

SEQ ID NO: 166440 - DNA, 25 bp, Homo sapien
gccctcatatctcccgttcctctca

SEQ ID NO: 166441 - DNA, 25 bp, Homo sapien
tgagcacttgtggtggtcaggcccc

SEQ ID NO: 166442 - DNA, 25 bp, Homo sapien
acagctggtggcacttaatgagcac

SEQ ID NO: 166443 - DNA, 25 bp, Homo sapien
gaaacaaaccaggatctagagcctg

SEQ ID NO: 166444 - DNA, 25 bp, Homo sapien
acttgatgcccacgtaggtcctatt

SEQ ID NO: 166445 - DNA, 25 bp, Homo sapien
caattaagacagtgagtgcctagca

SEQ ID NO: 166446 - DNA, 25 bp, Homo sapien
caagaggcagcctaagtagagccca

SEQ ID NO: 166447 - DNA, 25 bp, Homo sapien
catatgcacatagctctccgtgtca

SEQ ID NO: 166448 - DNA, 25 bp, Homo sapien
gggctacagcttttgcatatgcaca

SEQ ID NO: 166449 - DNA, 25 bp, Homo sapien
gaatcactgtaactggcactcaggg

SEQ ID NO: 166450 - DNA, 25 bp, Homo sapien
tcaggcaaaaaggacagcatgcccc

SEQ ID NO: 166451 - DNA, 25 bp, Homo sapien
cacacaaaaagatctacctagctgg

SEQ ID NO: 166452 - DNA, 25 bp, Homo sapien
taaaattgctttgctgtacagccct

SEQ ID NO: 166453 - DNA, 25 bp, Homo sapien
atttcccactgcacgaggttctccg

SEQ ID NO: 166454 - DNA, 25 bp, Homo sapien
gtccccgggatccattgaactagtg

SEQ ID NO: 166455 - DNA, 25 bp, Homo sapien
tcatagtcgcagttattggcgtcca

SEQ ID NO: 166456 - DNA, 25 bp, Homo sapien
gaagagcaagaagcgctccctctgc

SEQ ID NO: 166457 - DNA, 25 bp, Homo sapien
caggaaaacactttaattgctactt

SEQ ID NO: 166458 - DNA, 25 bp, Homo sapien
cttaatttacatcataatcactggg

SEQ ID NO: 166459 - DNA, 25 bp, Homo sapien
gctacttaatttacatcataatcac

SEQ ID NO: 166460 - DNA, 25 bp, Homo sapien
aattgctacttaatttacatcataa

SEQ ID NO: 166461 - DNA, 25 bp, Homo sapien
gatgcagacgttattgcctaaatat

SEQ ID NO: 166462 - DNA, 25 bp, Homo sapien
ttagaagatgcagacgttattgcct

SEQ ID NO: 166463 - DNA, 25 bp, Homo sapien
gcagacgttattgcctaaatattat

SEQ ID NO: 166464 - DNA, 25 bp, Homo sapien
gaagatgcagacgttattgcctaaa

SEQ ID NO: 166465 - DNA, 25 bp, Homo sapien
tttaatgtagtgcattcgtagaaaa

SEQ ID NO: 166466 - DNA, 25 bp, Homo sapien
agtgcattcgtagaaaaaaggccag

SEQ ID NO: 166467 - DNA, 25 bp, Homo sapien
gaaaaaaggccagctttcgctccca

SEQ ID NO: 166468 - DNA, 25 bp, Homo sapien
aaaaaaggccagctttcgctcccag

SEQ ID NO: 166469 - DNA, 25 bp, Homo sapien
cacacaccgactctcagggtaacgg

SEQ ID NO: 166470 - DNA, 25 bp, Homo sapien
tcccgcagaggtactagtaatgact

SEQ ID NO: 166471 - DNA, 25 bp, Homo sapien
aatgttttagcaccggatgatctcc

SEQ ID NO: 166472 - DNA, 25 bp, Homo sapien
ggcatgaactgtaaacctgtattaa

SEQ ID NO: 166473 - DNA, 25 bp, Homo sapien
cagtgtgacaacttccctgtgagaa

SEQ ID NO: 166474 - DNA, 25 bp, Homo sapien
gaacccagaatagcacaccaatcag

SEQ ID NO: 166475 - DNA, 25 bp, Homo sapien
catgtaggtgttggacaaaagctgc

SEQ ID NO: 166476 - DNA, 25 bp, Homo sapien
cagaactgtcaagacctggtgtttc

SEQ ID NO: 166477 - DNA, 25 bp, Homo sapien
cacaggaacctgctgtgatgggtgt

SEQ ID NO: 166478 - DNA, 25 bp, Homo sapien
aattatgcacaggaacctgctgtga

SEQ ID NO: 166479 - DNA, 25 bp, Homo sapien
tatgcacaggaacctgctgtgatgg

SEQ ID NO: 166480 - DNA, 25 bp, Homo sapien
gaaattatgcacaggaacctgctgt

SEQ ID NO: 166481 - DNA, 25 bp, Homo sapien
gctgtgctcctaaaagccagtcatg

SEQ ID NO: 166482 - DNA, 25 bp, Homo sapien
acagttttctgcatggaccctcact

SEQ ID NO: 166483 - DNA, 25 bp, Homo sapien
cattattgtctaggcttttggagaa

SEQ ID NO: 166484 - DNA, 25 bp, Homo sapien
aaatgatcacggctgtgctcctaaa

SEQ ID NO: 166485 - DNA, 25 bp, Homo sapien
tgcctgcccagaaatgaagcccggc

SEQ ID NO: 166486 - DNA, 25 bp, Homo sapien
tgctcatcgagatggagcagcggct

SEQ ID NO: 166487 - DNA, 25 bp, Homo sapien
atgcacccctgatgttcgccgtctg

SEQ ID NO: 166488 - DNA, 25 bp, Homo sapien
tagccttgctgtagagacttccgtc

SEQ ID NO: 166489 - DNA, 25 bp, Homo sapien
tgggcggggtcttcgacgtctccaa

SEQ ID NO: 166490 - DNA, 25 bp, Homo sapien
gcggggtcttcgacgtctccaacgc

SEQ ID NO: 166491 - DNA, 25 bp, Homo sapien
ggtcttcgacgtctccaacgctgac

SEQ ID NO: 166492 - DNA, 25 bp, Homo sapien
aacgctgaccgcctgggcttctcag

SEQ ID NO: 166493 - DNA, 25 bp, Homo sapien
gtcgcccgggccgtgaggactggac

SEQ ID NO: 166494 - DNA, 25 bp, Homo sapien
atctgcgcgcgcccgggttcagttt

SEQ ID NO: 166495 - DNA, 25 bp, Homo sapien
gccgtcgcgctcttatctgcgcgcg

SEQ ID NO: 166496 - DNA, 25 bp, Homo sapien
gtgaggactggacgcccgcagatcc

SEQ ID NO: 166497 - DNA, 25 bp, Homo sapien
ctgctgctgtccccgtcacagctgc

SEQ ID NO: 166498 - DNA, 25 bp, Homo sapien
gctgctgctgtccccgtcacagctg

SEQ ID NO: 166499 - DNA, 25 bp, Homo sapien
ccacacgtgcctccgcgacgcgcgg

SEQ ID NO: 166500 - DNA, 25 bp, Homo sapien
gcggcggcggccacaacacttccgg

SEQ ID NO: 166501 - DNA, 25 bp, Homo sapien
cggcggcggccacaacacttccggc

SEQ ID NO: 166502 - DNA, 25 bp, Homo sapien
tgctgccggggctccacacgtgcct

SEQ ID NO: 166503 - DNA, 25 bp, Homo sapien
gggacaggccctgcgcgccgtgccc

SEQ ID NO: 166504 - DNA, 25 bp, Homo sapien
agggacaggccctgcgcgccgtgcc

SEQ ID NO: 166505 - DNA, 25 bp, Homo sapien
ggagctggccgtccacgcaaacacc

SEQ ID NO: 166506 - DNA, 25 bp, Homo sapien
tccacgcaaacaccgcccagccgat

SEQ ID NO: 166507 - DNA, 25 bp, Homo sapien
gcaaacaccgcccagccgatgcaga

SEQ ID NO: 166508 - DNA, 25 bp, Homo sapien
cgcccagccgatgcagaggcaacaa

SEQ ID NO: 166509 - DNA, 25 bp, Homo sapien
caggcttgattcctcaccccagtct

SEQ ID NO: 166510 - DNA, 25 bp, Homo sapien
cgcctttgcgaggtgtccaccggcg

SEQ ID NO: 166511 - DNA, 25 bp, Homo sapien
aatggtcaatgaggtcacctccaag

SEQ ID NO: 166512 - DNA, 25 bp, Homo sapien
atgtgagatgaggaagcgcctttgc

SEQ ID NO: 166513 - DNA, 25 bp, Homo sapien
caaggattcccggagtgaggacccg

SEQ ID NO: 166514 - DNA, 25 bp, Homo sapien
agcccaatagcgctgcactctggcc

SEQ ID NO: 166515 - DNA, 25 bp, Homo sapien
ggcctggcctctgaagcctttcttg

SEQ ID NO: 166516 - DNA, 25 bp, Homo sapien
actctggcctggcctctgaagcctt

SEQ ID NO: 166517 - DNA, 25 bp, Homo sapien
tctggcctggcctctgaagcctttc

SEQ ID NO: 166518 - DNA, 25 bp, Homo sapien
taggtagaaggcttcgaggcctaca

SEQ ID NO: 166519 - DNA, 25 bp, Homo sapien
cctagggtctaggtagaaggcttcg

SEQ ID NO: 166520 - DNA, 25 bp, Homo sapien
tgtgtgtaggcatgagcaagtcagg

SEQ ID NO: 166521 - DNA, 25 bp, Homo sapien
tcgaggcctacatcccagcagtggg

SEQ ID NO: 166522 - DNA, 25 bp, Homo sapien
ggtgctaatgtctggcaagggccaa

SEQ ID NO: 166523 - DNA, 25 bp, Homo sapien
ctaatgtctggcaagggccaaggac

SEQ ID NO: 166524 - DNA, 25 bp, Homo sapien
gctaatgtctggcaagggccaagga

SEQ ID NO: 166525 - DNA, 25 bp, Homo sapien
gtgctaatgtctggcaagggccaag

SEQ ID NO: 166526 - DNA, 25 bp, Homo sapien
gcccagtgacaggatggccgtgtca

SEQ ID NO: 166527 - DNA, 25 bp, Homo sapien
taaggtcaactgagtgccgcaggac

SEQ ID NO: 166528 - DNA, 25 bp, Homo sapien
ccgcacgtcaccttggagccgaagg

SEQ ID NO: 166529 - DNA, 25 bp, Homo sapien
tgatcagctcctcgtatgccacgaa

SEQ ID NO: 166530 - DNA, 25 bp, Homo sapien
tggtggaactccaccgtgtgcaggt

SEQ ID NO: 166531 - DNA, 25 bp, Homo sapien
cggatgatggcgtgggacacagagc

SEQ ID NO: 166532 - DNA, 25 bp, Homo sapien
ccgtgggtgcaatggtgcggatgat

SEQ ID NO: 166533 - DNA, 25 bp, Homo sapien
tgcaggtgacccgtgggtgcaatgg

SEQ ID NO: 166534 - DNA, 25 bp, Homo sapien
ctgggtgcgcacagtcacccagcgg

SEQ ID NO: 166535 - DNA, 25 bp, Homo sapien
tgggtgcgcacagtcacccagcggc

SEQ ID NO: 166536 - DNA, 25 bp, Homo sapien
ggtgcgcacagtcacccagcggccc

SEQ ID NO: 166537 - DNA, 25 bp, Homo sapien
tgcgcacagtcacccagcggcccac

SEQ ID NO: 166538 - DNA, 25 bp, Homo sapien
tgtccaggaagacggcgtcggccac

SEQ ID NO: 166539 - DNA, 25 bp, Homo sapien
gtggctcacgccaaagccactgcgg

SEQ ID NO: 166540 - DNA, 25 bp, Homo sapien
ccttgagggcgtcccaggcgtggcc

SEQ ID NO: 166541 - DNA, 25 bp, Homo sapien
ccacgtggctcacgccaaagccact

SEQ ID NO: 166542 - DNA, 25 bp, Homo sapien
agccggcagggccatctgtgcctgt

SEQ ID NO: 166543 - DNA, 25 bp, Homo sapien
tccttcatgggcgtgccgctgcgga

SEQ ID NO: 166544 - DNA, 25 bp, Homo sapien
ccagcgcctggcatgtgcgttgcac

SEQ ID NO: 166545 - DNA, 25 bp, Homo sapien
tgcgttgcacctgctcgatgcacgg

SEQ ID NO: 166546 - DNA, 25 bp, Homo sapien
tgaccatataaggtgcctctggcct

SEQ ID NO: 166547 - DNA, 25 bp, Homo sapien
tcctgcttaggcccacctgggaggg

SEQ ID NO: 166548 - DNA, 25 bp, Homo sapien
gcacgagatggtctcaggccccgtg

SEQ ID NO: 166549 - DNA, 25 bp, Homo sapien
tgcaccctttggcttcaacacccag

SEQ ID NO: 166550 - DNA, 25 bp, Homo sapien
agggcagggattctgggtcagctca

SEQ ID NO: 166551 - DNA, 25 bp, Homo sapien
gggattctgggtcagctcaccccag

SEQ ID NO: 166552 - DNA, 25 bp, Homo sapien
cagagagcagggtcacctccctggt

SEQ ID NO: 166553 - DNA, 25 bp, Homo sapien
tgggctggcctggtctcctagcgct

SEQ ID NO: 166554 - DNA, 25 bp, Homo sapien
tgggaaatgcccctaagcttagcct

SEQ ID NO: 166555 - DNA, 25 bp, Homo sapien
gggacggtacgtttattgctcatca

SEQ ID NO: 166556 - DNA, 25 bp, Homo sapien
tcttggacatgagtggacgaaggcc

SEQ ID NO: 166557 - DNA, 25 bp, Homo sapien
tttaagaggtgatcacataggcact

SEQ ID NO: 166558 - DNA, 25 bp, Homo sapien
tataaaccatggagctgcgcctcaa

SEQ ID NO: 166559 - DNA, 25 bp, Homo sapien
caaagctcctggcattagggtcacc

SEQ ID NO: 166560 - DNA, 25 bp, Homo sapien
acagtgtgacacttcgcagggacca

SEQ ID NO: 166561 - DNA, 25 bp, Homo sapien
tggaaaatgggcacaacctggaccc

SEQ ID NO: 166562 - DNA, 25 bp, Homo sapien
ccccgagacagaggccacgaagagg

SEQ ID NO: 166563 - DNA, 25 bp, Homo sapien
cacgaagaggtgagcaggccagagc

SEQ ID NO: 166564 - DNA, 25 bp, Homo sapien
gccacgaagaggtgagcaggccaga

SEQ ID NO: 166565 - DNA, 25 bp, Homo sapien
aggccacgaagaggtgagcaggcca

SEQ ID NO: 166566 - DNA, 25 bp, Homo sapien
caggaagcccacgtggtctggcctg

SEQ ID NO: 166567 - DNA, 25 bp, Homo sapien
cgccttggggatggagcacgtgccc

SEQ ID NO: 166568 - DNA, 25 bp, Homo sapien
tggcctgatgtgctcagcgccttgg

SEQ ID NO: 166569 - DNA, 25 bp, Homo sapien
gcccacgtggtctggcctgatgtgc

SEQ ID NO: 166570 - DNA, 25 bp, Homo sapien
ggggacagcgccaggactgccaggg

SEQ ID NO: 166571 - DNA, 25 bp, Homo sapien
cctccaactctgctcctcgggcgca

SEQ ID NO: 166572 - DNA, 25 bp, Homo sapien
ctggaagaacttcaggcagcgggta

SEQ ID NO: 166573 - DNA, 25 bp, Homo sapien
cagccggcatttctctgcacgtggg

SEQ ID NO: 166574 - DNA, 25 bp, Homo sapien
cccacagagggccatagccgtgtgg

SEQ ID NO: 166575 - DNA, 25 bp, Homo sapien
agacccacagagggccatagccgtg

SEQ ID NO: 166576 - DNA, 25 bp, Homo sapien
gccgcatccccagtgctttcacaga

SEQ ID NO: 166577 - DNA, 25 bp, Homo sapien
cacgggcacgtgaactcgccgcatc

SEQ ID NO: 166578 - DNA, 25 bp, Homo sapien
ctgtgtgactggtgaggcccaccca

SEQ ID NO: 166579 - DNA, 25 bp, Homo sapien
tctagaagagctgtgacactggaaa

SEQ ID NO: 166580 - DNA, 25 bp, Homo sapien
gggacacgctcagagctgcactggc

SEQ ID NO: 166581 - DNA, 25 bp, Homo sapien
tttgtgtccctctggctggatggga

SEQ ID NO: 166582 - DNA, 25 bp, Homo sapien
ggatccatcgcaagaagcattggcc

SEQ ID NO: 166583 - DNA, 25 bp, Homo sapien
tgcagaggtcacgtggctttctgag

SEQ ID NO: 166584 - DNA, 25 bp, Homo sapien
gcaagggcccctgcagaggtcacgt

SEQ ID NO: 166585 - DNA, 25 bp, Homo sapien
tctgagggatccatcgcaagaagca

SEQ ID NO: 166586 - DNA, 25 bp, Homo sapien
ggaaatagtgtccttagctcctggc

SEQ ID NO: 166587 - DNA, 25 bp, Homo sapien
gatgactttgctgttcatggccctg

SEQ ID NO: 166588 - DNA, 25 bp, Homo sapien
tgcttatcggatccaaaggaccttc

SEQ ID NO: 166589 - DNA, 25 bp, Homo sapien
ttaatagctctcctaacacagtggc

SEQ ID NO: 166590 - DNA, 25 bp, Homo sapien
tctgtccgtacgtcttccacttgtg

SEQ ID NO: 166591 - DNA, 25 bp, Homo sapien
tctttggtctttccggagctgccag

SEQ ID NO: 166592 - DNA, 25 bp, Homo sapien
catttggtaaggactcagtgccgca

SEQ ID NO: 166593 - DNA, 25 bp, Homo sapien
ctatttccccgcttcggattctttg

SEQ ID NO: 166594 - DNA, 25 bp, Homo sapien
tctaggcagtcagctgttaaccact

SEQ ID NO: 166595 - DNA, 25 bp, Homo sapien
ttttacaacgtgagggtagacgctg

SEQ ID NO: 166596 - DNA, 25 bp, Homo sapien
gatgaatactggagacgggttacca

SEQ ID NO: 166597 - DNA, 25 bp, Homo sapien
tagacgctgtcagtaacccagaggg

SEQ ID NO: 166598 - DNA, 25 bp, Homo sapien
cctttgagattgcattaaagagaag

SEQ ID NO: 166599 - DNA, 25 bp, Homo sapien
ttccccatcctctacgttttagaga

SEQ ID NO: 166600 - DNA, 25 bp, Homo sapien
gctgtgaggcttgcgcagaatattc

SEQ ID NO: 166601 - DNA, 25 bp, Homo sapien
tctcgacctgaaatctgatgaatgg

SEQ ID NO: 166602 - DNA, 25 bp, Homo sapien
gaatattctcagctatctcgacctg

SEQ ID NO: 166603 - DNA, 25 bp, Homo sapien
cagcacgttaacttttccattcgga

SEQ ID NO: 166604 - DNA, 25 bp, Homo sapien
cgggcgggacaggtgagcgaagcgc

SEQ ID NO: 166605 - DNA, 25 bp, Homo sapien
aagcgtcggcgacgcatcgcgcgat

SEQ ID NO: 166606 - DNA, 25 bp, Homo sapien
gccgctggcggtgggcgtggcgctg

SEQ ID NO: 166607 - DNA, 25 bp, Homo sapien
gactgccggagctgcggaagtcgtg

SEQ ID NO: 166608 - DNA, 25 bp, Homo sapien
ggcggcgcggccgaccgtgcgcttt

SEQ ID NO: 166609 - DNA, 25 bp, Homo sapien
cgtgcgctttcccagcggtgcgacg

SEQ ID NO: 166610 - DNA, 25 bp, Homo sapien
ccgctttacggcagggtcgcgaagc

SEQ ID NO: 166611 - DNA, 25 bp, Homo sapien
ggcgcacggcagcattgcgacggcg

SEQ ID NO: 166612 - DNA, 25 bp, Homo sapien
cgctccggagcgagttgacagccgc

SEQ ID NO: 166613 - DNA, 25 bp, Homo sapien
tgggcgccgtatccctgcgctcggc

SEQ ID NO: 166614 - DNA, 25 bp, Homo sapien
cgccgcgctccggagcgagttgaca

SEQ ID NO: 166615 - DNA, 25 bp, Homo sapien
gcggcaggcgaaggcgcggcagaga

SEQ ID NO: 166616 - DNA, 25 bp, Homo sapien
ctgtgcagaacagggagtggccccg

SEQ ID NO: 166617 - DNA, 25 bp, Homo sapien
cagaacagggagtggccccgaggcc

SEQ ID NO: 166618 - DNA, 25 bp, Homo sapien
ccggcccaatgtccccaggcccctg

SEQ ID NO: 166619 - DNA, 25 bp, Homo sapien
gtgcagaacagggagtggccccgag

SEQ ID NO: 166620 - DNA, 25 bp, Homo sapien
ttcgggataggacgcgagagcacct

SEQ ID NO: 166621 - DNA, 25 bp, Homo sapien
gtcccatccgactgagggcgttgat

SEQ ID NO: 166622 - DNA, 25 bp, Homo sapien
caggtgactctgttacgcttaaagg

SEQ ID NO: 166623 - DNA, 25 bp, Homo sapien
cgcttaaaggttctggctgtcaaca

SEQ ID NO: 166624 - DNA, 25 bp, Homo sapien
taaaaaataatcattctcgggaaca

SEQ ID NO: 166625 - DNA, 25 bp, Homo sapien
aaaataatcattctcgggaacaaat

SEQ ID NO: 166626 - DNA, 25 bp, Homo sapien
actatattgcaagtcatcacggcag

SEQ ID NO: 166627 - DNA, 25 bp, Homo sapien
tatattgcaagtcatcacggcaggg

SEQ ID NO: 166628 - DNA, 25 bp, Homo sapien
tattgcaagtcatcacggcagggta

SEQ ID NO: 166629 - DNA, 25 bp, Homo sapien
ttgcaagtcatcacggcagggtatt

SEQ ID NO: 166630 - DNA, 25 bp, Homo sapien
tgtgattgcacccagaccaatcggc

SEQ ID NO: 166631 - DNA, 25 bp, Homo sapien
gaagccactcggcatgcaggaggat

SEQ ID NO: 166632 - DNA, 25 bp, Homo sapien
ccccagatgcgaggagagactgatt

SEQ ID NO: 166633 - DNA, 25 bp, Homo sapien
taataactcttccatgtagcatggc

SEQ ID NO: 166634 - DNA, 25 bp, Homo sapien
aaggtgccagccatcattccagagg

SEQ ID NO: 166635 - DNA, 25 bp, Homo sapien
taaggtgccagccatcattccagag

SEQ ID NO: 166636 - DNA, 25 bp, Homo sapien
aggtgccagccatcattccagaggt

SEQ ID NO: 166637 - DNA, 25 bp, Homo sapien
gtaaggtgccagccatcattccaga

SEQ ID NO: 166638 - DNA, 25 bp, Homo sapien
taagcttttgttccaatggagattc

SEQ ID NO: 166639 - DNA, 25 bp, Homo sapien
ctggtttgcccagaactgttgattc

SEQ ID NO: 166640 - DNA, 25 bp, Homo sapien
tcaggtatgtaaaagtgaacaggtc

SEQ ID NO: 166641 - DNA, 25 bp, Homo sapien
caggtcgaaggtttgaatatttatc

SEQ ID NO: 166642 - DNA, 25 bp, Homo sapien
ccaagtcatggggatcacaggcata

SEQ ID NO: 166643 - DNA, 25 bp, Homo sapien
gagataaggtttcgctacgttggcc

SEQ ID NO: 166644 - DNA, 25 bp, Homo sapien
gcctcccaagtcatggggatcacag

SEQ ID NO: 166645 - DNA, 25 bp, Homo sapien
tagagataaggtttcgctacgttgg

SEQ ID NO: 166646 - DNA, 25 bp, Homo sapien
ttagtttttagtcttgagtgaataa

SEQ ID NO: 166647 - DNA, 25 bp, Homo sapien
ctgattcagttctcaggcccaggcc

SEQ ID NO: 166648 - DNA, 25 bp, Homo sapien
agttctcaggcccaggcctttagtt

SEQ ID NO: 166649 - DNA, 25 bp, Homo sapien
caggcctttagtttttagtcttgag

SEQ ID NO: 166650 - DNA, 25 bp, Homo sapien
aggagggagctgagattggagagcc

SEQ ID NO: 166651 - DNA, 25 bp, Homo sapien
agctgagattggagagccatgcctg

SEQ ID NO: 166652 - DNA, 25 bp, Homo sapien
agggagctgagattggagagccatg

SEQ ID NO: 166653 - DNA, 25 bp, Homo sapien
gagctgagattggagagccatgcct

SEQ ID NO: 166654 - DNA, 25 bp, Homo sapien
gctgagacctcagtacgaaagtcaa

SEQ ID NO: 166655 - DNA, 25 bp, Homo sapien
taaggagaggctattttgagcactg

SEQ ID NO: 166656 - DNA, 25 bp, Homo sapien
gaatggcactttagcccaatgacag

SEQ ID NO: 166657 - DNA, 25 bp, Homo sapien
tatcagaacaactttttggcagcag

SEQ ID NO: 166658 - DNA, 25 bp, Homo sapien
tatgcacaggacttgcacagtgtcc

SEQ ID NO: 166659 - DNA, 25 bp, Homo sapien
cagcaaatagcaacagaggtcctgg

SEQ ID NO: 166660 - DNA, 25 bp, Homo sapien
acaggacccaaaactgtgagtgctc

SEQ ID NO: 166661 - DNA, 25 bp, Homo sapien
tgggaaatgcaacaggtgatatatg

SEQ ID NO: 166662 - DNA, 25 bp, Homo sapien
tgttagggtgaccacgggagtatcc

SEQ ID NO: 166663 - DNA, 25 bp, Homo sapien
gcactgcagcttaataccgaaccta

SEQ ID NO: 166664 - DNA, 25 bp, Homo sapien
tctctagtgtgtgacagcaaccgcg

SEQ ID NO: 166665 - DNA, 25 bp, Homo sapien
catatagggcgctcaaaactgtgtc

SEQ ID NO: 166666 - DNA, 25 bp, Homo sapien
ccagcctgggtgacagagtgagact

SEQ ID NO: 166667 - DNA, 25 bp, Homo sapien
cctgggtgacagagtgagactccat

SEQ ID NO: 166668 - DNA, 25 bp, Homo sapien
tgagccgagatcgtgccactgcact

SEQ ID NO: 166669 - DNA, 25 bp, Homo sapien
ttgaaccaggaggcagagtttgcag

SEQ ID NO: 166670 - DNA, 25 bp, Homo sapien
agctgtcccctccatccatggtttt

SEQ ID NO: 166671 - DNA, 25 bp, Homo sapien
tgtgtaagggagatggcggcagcac

SEQ ID NO: 166672 - DNA, 25 bp, Homo sapien
ggcagcacagctgtcccctccatcc

SEQ ID NO: 166673 - DNA, 25 bp, Homo sapien
tgtaagggagatggcggcagcacag

SEQ ID NO: 166674 - DNA, 25 bp, Homo sapien
gcagttcacctgtaggtatacacag

SEQ ID NO: 166675 - DNA, 25 bp, Homo sapien
caaaacatggtatatccgtatagaa

SEQ ID NO: 166676 - DNA, 25 bp, Homo sapien
ggccaaaaagactcttaactcagca

SEQ ID NO: 166677 - DNA, 25 bp, Homo sapien
aaatgttcatcaactagtaagtgga

SEQ ID NO: 166678 - DNA, 25 bp, Homo sapien
tgtagaagtccgccatttcttctgc

SEQ ID NO: 166679 - DNA, 25 bp, Homo sapien
ccttgtagaagtccgccatttcttc

SEQ ID NO: 166680 - DNA, 25 bp, Homo sapien
ttgtagaagtccgccatttcttctg

SEQ ID NO: 166681 - DNA, 25 bp, Homo sapien
tccttgtagaagtccgccatttctt

SEQ ID NO: 166682 - DNA, 25 bp, Homo sapien
cccaaagtcatgggattccaggtgc

SEQ ID NO: 166683 - DNA, 25 bp, Homo sapien
aaagtcatgggattccaggtgcgag

SEQ ID NO: 166684 - DNA, 25 bp, Homo sapien
caaagtcatgggattccaggtgcga

SEQ ID NO: 166685 - DNA, 25 bp, Homo sapien
agtcatgggattccaggtgcgagcc

SEQ ID NO: 166686 - DNA, 25 bp, Homo sapien
gatggcaaaattgcgcttgtaccaa

SEQ ID NO: 166687 - DNA, 25 bp, Homo sapien
tgatggcaaaattgcgcttgtacca

SEQ ID NO: 166688 - DNA, 25 bp, Homo sapien
gtgatggcaaaattgcgcttgtacc

SEQ ID NO: 166689 - DNA, 25 bp, Homo sapien
aggtgatggcaaaattgcgcttgta

SEQ ID NO: 166690 - DNA, 25 bp, Homo sapien
ctagttgctcctcttcttttgtttc

SEQ ID NO: 166691 - DNA, 25 bp, Homo sapien
agttgctcctcttcttttgtttctg

SEQ ID NO: 166692 - DNA, 25 bp, Homo sapien
gttgctcctcttcttttgtttctgt

SEQ ID NO: 166693 - DNA, 25 bp, Homo sapien
ttgctcctcttcttttgtttctgtt

SEQ ID NO: 166694 - DNA, 25 bp, Homo sapien
cctggactctggctgggtcagagtg

SEQ ID NO: 166695 - DNA, 25 bp, Homo sapien
ggctttatttcacaccacgtacgtg

SEQ ID NO: 166696 - DNA, 25 bp, Homo sapien
cagtgccccaggacctaccctgccc

SEQ ID NO: 166697 - DNA, 25 bp, Homo sapien
gccatggggccccttaggaagatgt

SEQ ID NO: 166698 - DNA, 25 bp, Homo sapien
tttgaattggtataattcgaaacac

SEQ ID NO: 166699 - DNA, 25 bp, Homo sapien
tggtataattcgaaacacaggaaac

SEQ ID NO: 166700 - DNA, 25 bp, Homo sapien
tgatacagagtctcgtttggtcttc

SEQ ID NO: 166701 - DNA, 25 bp, Homo sapien
cagagtctcgtttggtcttccaggc

SEQ ID NO: 166702 - DNA, 25 bp, Homo sapien
acagtgagggtggtgctgactccac

SEQ ID NO: 166703 - DNA, 25 bp, Homo sapien
actgcattcaggacgcagcctgtga

SEQ ID NO: 166704 - DNA, 25 bp, Homo sapien
tgcctggccatttaaccttcgtgtt

SEQ ID NO: 166705 - DNA, 25 bp, Homo sapien
gatcgcttggcagtcagcttccaca

SEQ ID NO: 166706 - DNA, 25 bp, Homo sapien
gaatatggctgttacaattatatta

SEQ ID NO: 166707 - DNA, 25 bp, Homo sapien
aatatggctgttacaattatattaa

SEQ ID NO: 166708 - DNA, 25 bp, Homo sapien
agcctccctagtagcgggtctacag

SEQ ID NO: 166709 - DNA, 25 bp, Homo sapien
ccctagtagcgggtctacaggtgtg

SEQ ID NO: 166710 - DNA, 25 bp, Homo sapien
gcctccctagtagcgggtctacagg

SEQ ID NO: 166711 - DNA, 25 bp, Homo sapien
tccctagtagcgggtctacaggtgt

SEQ ID NO: 166712 - DNA, 25 bp, Homo sapien
tgtgagacagggtcttactctgttt

SEQ ID NO: 166713 - DNA, 25 bp, Homo sapien
ccatgcccggccacttttatttatt

SEQ ID NO: 166714 - DNA, 25 bp, Homo sapien
tactctgtttcccaggctggagtgc

SEQ ID NO: 166715 - DNA, 25 bp, Homo sapien
agtgacatgattttggctcactgca

SEQ ID NO: 166716 - DNA, 25 bp, Homo sapien
tgttgcaatctcgactcacggcaag

SEQ ID NO: 166717 - DNA, 25 bp, Homo sapien
cttcgcctcctgggtctcctgggtt

SEQ ID NO: 166718 - DNA, 25 bp, Homo sapien
gcagtgttgcaatctcgactcacgg

SEQ ID NO: 166719 - DNA, 25 bp, Homo sapien
ttcgcctcctgggtctcctgggttc

SEQ ID NO: 166720 - DNA, 25 bp, Homo sapien
aaagcacgtgtttcctgcggctgca

SEQ ID NO: 166721 - DNA, 25 bp, Homo sapien
caggtgcaacccatgtcacagatgg

SEQ ID NO: 166722 - DNA, 25 bp, Homo sapien
taagcagcagtcagagcaggtgcaa

SEQ ID NO: 166723 - DNA, 25 bp, Homo sapien
tcagttctgcgatggaagtccggaa

SEQ ID NO: 166724 - DNA, 25 bp, Homo sapien
ttcaacctgtaacagggaagcccag

SEQ ID NO: 166725 - DNA, 25 bp, Homo sapien
tagtaggaccccactttaatcacat

SEQ ID NO: 166726 - DNA, 25 bp, Homo sapien
gagcagtccatgtattcagtcccct

SEQ ID NO: 166727 - DNA, 25 bp, Homo sapien
ctagttccaaataaggtactaactg

SEQ ID NO: 166728 - DNA, 25 bp, Homo sapien
gcaggaccatactccccgtgaaggt

SEQ ID NO: 166729 - DNA, 25 bp, Homo sapien
tttccctgtgttcatggctctgtcc

SEQ ID NO: 166730 - DNA, 25 bp, Homo sapien
gatgtgatcccctggtgtcctagct

SEQ ID NO: 166731 - DNA, 25 bp, Homo sapien
tgtcctagctcctatagttccttgg

SEQ ID NO: 166732 - DNA, 25 bp, Homo sapien
aaagtgtgcagtttaggctgagcgc

SEQ ID NO: 166733 - DNA, 25 bp, Homo sapien
tagccgggcgtagtgttgggacctg

SEQ ID NO: 166734 - DNA, 25 bp, Homo sapien
tggtaaaatacccacaacatggaat

SEQ ID NO: 166735 - DNA, 25 bp, Homo sapien
caacatggaatgtgccatcttaact

SEQ ID NO: 166736 - DNA, 25 bp, Homo sapien
ccagtgccggccgaagctttaagac

SEQ ID NO: 166737 - DNA, 25 bp, Homo sapien
cggccgaagctttaagacagctgga

SEQ ID NO: 166738 - DNA, 25 bp, Homo sapien
cggtcccctgggaccagaatttctg

SEQ ID NO: 166739 - DNA, 25 bp, Homo sapien
gggaggctgcgccagtgccggccga

SEQ ID NO: 166740 - DNA, 25 bp, Homo sapien
cccactcccaggcccgcgagcttca

SEQ ID NO: 166741 - DNA, 25 bp, Homo sapien
ccactcccaggcccgcgagcttcat

SEQ ID NO: 166742 - DNA, 25 bp, Homo sapien
tgtgggccctaccagaatgcggccg

SEQ ID NO: 166743 - DNA, 25 bp, Homo sapien
atgaccgagcgcttcggcagcttcc

SEQ ID NO: 166744 - DNA, 25 bp, Homo sapien
cgcgatgaccgagcgcttcggcagc

SEQ ID NO: 166745 - DNA, 25 bp, Homo sapien
gagcgcttcggcagcttcccttcca

SEQ ID NO: 166746 - DNA, 25 bp, Homo sapien
ccgccgccgaaaatggcgtctcagt

SEQ ID NO: 166747 - DNA, 25 bp, Homo sapien
tgagggccgcgctctctcgcgctgt

SEQ ID NO: 166748 - DNA, 25 bp, Homo sapien
gcgcggagcagcgactgtgcgccga

SEQ ID NO: 166749 - DNA, 25 bp, Homo sapien
aggcacggcgcagcagtcaccagct

SEQ ID NO: 166750 - DNA, 25 bp, Homo sapien
aggtgtgacggcacccactgctggt

SEQ ID NO: 166751 - DNA, 25 bp, Homo sapien
agggcactgccagcccggcagcaaa

SEQ ID NO: 166752 - DNA, 25 bp, Homo sapien
tactaagattgctaagggcactgcc

SEQ ID NO: 166753 - DNA, 25 bp, Homo sapien
ctcaaggctagtaagggctactaag

SEQ ID NO: 166754 - DNA, 25 bp, Homo sapien
tggaattgtgctcattcttcaaagc

SEQ ID NO: 166755 - DNA, 25 bp, Homo sapien
gtctccagcaaactttgtaaaatgg

SEQ ID NO: 166756 - DNA, 25 bp, Homo sapien
caacatctccagtgacttccggatc

SEQ ID NO: 166757 - DNA, 25 bp, Homo sapien
ttcaaagcttccagcccctgaatta

SEQ ID NO: 166758 - DNA, 25 bp, Homo sapien
aagttcctgataacgtctgagtcat

SEQ ID NO: 166759 - DNA, 25 bp, Homo sapien
caaaagttcctgataacgtctgagt

SEQ ID NO: 166760 - DNA, 25 bp, Homo sapien
cctgataacgtctgagtcattctca

SEQ ID NO: 166761 - DNA, 25 bp, Homo sapien
catcaaaagttcctgataacgtctg

SEQ ID NO: 166762 - DNA, 25 bp, Homo sapien
tgagcagacagaaacgtgtgcagca

SEQ ID NO: 166763 - DNA, 25 bp, Homo sapien
ctgagcagacagaaacgtgtgcagc

SEQ ID NO: 166764 - DNA, 25 bp, Homo sapien
tcctccagttgagccacagactgct

SEQ ID NO: 166765 - DNA, 25 bp, Homo sapien
cagtttctgcttctcggactccaca

SEQ ID NO: 166766 - DNA, 25 bp, Homo sapien
tgcgtgttggccagttcatcccgta

SEQ ID NO: 166767 - DNA, 25 bp, Homo sapien
ttctcctggcacagacgacgaacct

SEQ ID NO: 166768 - DNA, 25 bp, Homo sapien
catttagttggcccctaacctagag

SEQ ID NO: 166769 - DNA, 25 bp, Homo sapien
ttccttgccctgggtcgtcttcatc

SEQ ID NO: 166770 - DNA, 25 bp, Homo sapien
ccttgccctgggtcgtcttcatcat

SEQ ID NO: 166771 - DNA, 25 bp, Homo sapien
tccttgccctgggtcgtcttcatca

SEQ ID NO: 166772 - DNA, 25 bp, Homo sapien
tccgggtggtcgtgtcctgaagtct

SEQ ID NO: 166773 - DNA, 25 bp, Homo sapien
agcgcccctgcgaggcgtactggat

SEQ ID NO: 166774 - DNA, 25 bp, Homo sapien
gggcagccgcggctgcactgctgtg

SEQ ID NO: 166775 - DNA, 25 bp, Homo sapien
atctcgtagccgccctgctgggcag

SEQ ID NO: 166776 - DNA, 25 bp, Homo sapien
caaggccaggatgttgagcatggtg

SEQ ID NO: 166777 - DNA, 25 bp, Homo sapien
aggccaggatgttgagcatggtggc

SEQ ID NO: 166778 - DNA, 25 bp, Homo sapien
gccaggatgttgagcatggtggcca

SEQ ID NO: 166779 - DNA, 25 bp, Homo sapien
ccaggatgttgagcatggtggccac

SEQ ID NO: 166780 - DNA, 25 bp, Homo sapien
taaccttcccatctaggccactggg

SEQ ID NO: 166781 - DNA, 25 bp, Homo sapien
tgttgtcctgcctatgccagctggc

SEQ ID NO: 166782 - DNA, 25 bp, Homo sapien
taagtgcaacagtctagaacaatgg

SEQ ID NO: 166783 - DNA, 25 bp, Homo sapien
gcctgaccaagaatgataagaccct

SEQ ID NO: 166784 - DNA, 25 bp, Homo sapien
agtgcagtggtgccatcttggctca

SEQ ID NO: 166785 - DNA, 25 bp, Homo sapien
cagagtctgactctgttgcacaggt

SEQ ID NO: 166786 - DNA, 25 bp, Homo sapien
ggagtgcagtggtgccatcttggct

SEQ ID NO: 166787 - DNA, 25 bp, Homo sapien
agagtctgactctgttgcacaggtt

SEQ ID NO: 166788 - DNA, 25 bp, Homo sapien
ttttctcacgaatagccaaggcatc

SEQ ID NO: 166789 - DNA, 25 bp, Homo sapien
tgcccaaagttttctcacgaatagc

SEQ ID NO: 166790 - DNA, 25 bp, Homo sapien
aaagttttctcacgaatagccaagg

SEQ ID NO: 166791 - DNA, 25 bp, Homo sapien
cagtaggttagctgcatctttgtat

SEQ ID NO: 166792 - DNA, 25 bp, Homo sapien
caaggttattcaaagtcgccgccac

SEQ ID NO: 166793 - DNA, 25 bp, Homo sapien
gctcttttacacaacggctctgctt

SEQ ID NO: 166794 - DNA, 25 bp, Homo sapien
tccagagctcttttacacaacggct

SEQ ID NO: 166795 - DNA, 25 bp, Homo sapien
acacaacggctctgcttctttgtac

SEQ ID NO: 166796 - DNA, 25 bp, Homo sapien
tatttaactgcttggcaacatcggg

SEQ ID NO: 166797 - DNA, 25 bp, Homo sapien
ctggttctggcacagtaaggccaag

SEQ ID NO: 166798 - DNA, 25 bp, Homo sapien
agatctcgagggctctttgataata

SEQ ID NO: 166799 - DNA, 25 bp, Homo sapien
cagttttgtctggtagatctcgagg

SEQ ID NO: 166800 - DNA, 25 bp, Homo sapien
aaccaaactccctttcatgtgcacg

SEQ ID NO: 166801 - DNA, 25 bp, Homo sapien
catgtgcacgagtgagaatctcttt

SEQ ID NO: 166802 - DNA, 25 bp, Homo sapien
tccctttcatgtgcacgagtgagaa

SEQ ID NO: 166803 - DNA, 25 bp, Homo sapien
tctacagaaccaaactccctttcat

SEQ ID NO: 166804 - DNA, 25 bp, Homo sapien
tttcttcagcatgcatccagatggg

SEQ ID NO: 166805 - DNA, 25 bp, Homo sapien
atgcatccagatgggtttattttca

SEQ ID NO: 166806 - DNA, 25 bp, Homo sapien
ttctctttcttcagcatgcatccag

SEQ ID NO: 166807 - DNA, 25 bp, Homo sapien
cagcatgcatccagatgggtttatt

SEQ ID NO: 166808 - DNA, 25 bp, Homo sapien
ggctttgtaccagccgccatactct

SEQ ID NO: 166809 - DNA, 25 bp, Homo sapien
tatcaactttgcaggctttgtacca

SEQ ID NO: 166810 - DNA, 25 bp, Homo sapien
ccagccgccatactctccaaaagat

SEQ ID NO: 166811 - DNA, 25 bp, Homo sapien
ctatcaactttgcaggctttgtacc

SEQ ID NO: 166812 - DNA, 25 bp, Homo sapien
tttttccagccaaacgcaattccag

SEQ ID NO: 166813 - DNA, 25 bp, Homo sapien
tttccagccaaacgcaattccagac

SEQ ID NO: 166814 - DNA, 25 bp, Homo sapien
cagccaaacgcaattccagacatac

SEQ ID NO: 166815 - DNA, 25 bp, Homo sapien
tggtttttccagccaaacgcaattc

SEQ ID NO: 166816 - DNA, 25 bp, Homo sapien
gcagcttcttctaacgtttctgcag

SEQ ID NO: 166817 - DNA, 25 bp, Homo sapien
tgccttgacgtctgtaaagtgcccc

SEQ ID NO: 166818 - DNA, 25 bp, Homo sapien
ttttagagtggttgtaacagttgga

SEQ ID NO: 166819 - DNA, 25 bp, Homo sapien
gtttacgagacctcatagcagcttc

SEQ ID NO: 166820 - DNA, 25 bp, Homo sapien
agattttcttaggtatttctgagat

SEQ ID NO: 166821 - DNA, 25 bp, Homo sapien
gtttgacccattagcacttaagatt

SEQ ID NO: 166822 - DNA, 25 bp, Homo sapien
ggtttgacccattagcacttaagat

SEQ ID NO: 166823 - DNA, 25 bp, Homo sapien
ttgacccattagcacttaagatttt

SEQ ID NO: 166824 - DNA, 25 bp, Homo sapien
acgttgaggctctcacggctcctgc

SEQ ID NO: 166825 - DNA, 25 bp, Homo sapien
ttgaccacgtccacgttgaggctct

SEQ ID NO: 166826 - DNA, 25 bp, Homo sapien
tccatgttctcagggtcattgagca

SEQ ID NO: 166827 - DNA, 25 bp, Homo sapien
gggccactctcgtacttgaccacgt

SEQ ID NO: 166828 - DNA, 25 bp, Homo sapien
taacaaaatctagagcagcctggtc

SEQ ID NO: 166829 - DNA, 25 bp, Homo sapien
gaagttaggagcactggagttagca

SEQ ID NO: 166830 - DNA, 25 bp, Homo sapien
acgtgcccgctgtgtactgtactta

SEQ ID NO: 166831 - DNA, 25 bp, Homo sapien
cagaaggtctagcacatgagacagg

SEQ ID NO: 166832 - DNA, 25 bp, Homo sapien
caaaagttggtcgagtttagcattc

SEQ ID NO: 166833 - DNA, 25 bp, Homo sapien
gatacacagcctgcacatggcctat

SEQ ID NO: 166834 - DNA, 25 bp, Homo sapien
catgcacaaagtgagtctaggaacc

SEQ ID NO: 166835 - DNA, 25 bp, Homo sapien
tgttttggtagatcacccgtggcca

SEQ ID NO: 166836 - DNA, 25 bp, Homo sapien
gtgatcttggctcacggcaaggtcc

SEQ ID NO: 166837 - DNA, 25 bp, Homo sapien
gcaaccatgcacggctaatttttta

SEQ ID NO: 166838 - DNA, 25 bp, Homo sapien
gatcttggctcacggcaaggtccgc

SEQ ID NO: 166839 - DNA, 25 bp, Homo sapien
actacaggcgcccgcaaccatgcac

SEQ ID NO: 166840 - DNA, 25 bp, Homo sapien
gttctgtgtgacaccaacgcccagg

SEQ ID NO: 166841 - DNA, 25 bp, Homo sapien
gaggtgccgctgtcaagtagtttaa

SEQ ID NO: 166842 - DNA, 25 bp, Homo sapien
gaagccacacggacagcagttatag

SEQ ID NO: 166843 - DNA, 25 bp, Homo sapien
catgtgtcacacgaaaatgaggtca

SEQ ID NO: 166844 - DNA, 25 bp, Homo sapien
tgaacttgccacctgaggaccttgg

SEQ ID NO: 166845 - DNA, 25 bp, Homo sapien
tcaactaaatgcttggcagaacaca

SEQ ID NO: 166846 - DNA, 25 bp, Homo sapien
tatcgtcattaacagtgcagcccct

SEQ ID NO: 166847 - DNA, 25 bp, Homo sapien
ttcgcacagacgagttttcgccatg

SEQ ID NO: 166848 - DNA, 25 bp, Homo sapien
tcagttaaccagcccgagcttcatt

SEQ ID NO: 166849 - DNA, 25 bp, Homo sapien
agttaaccagcccgagcttcatttt

SEQ ID NO: 166850 - DNA, 25 bp, Homo sapien
cagttaaccagcccgagcttcattt

SEQ ID NO: 166851 - DNA, 25 bp, Homo sapien
gttaaccagcccgagcttcattttc

SEQ ID NO: 166852 - DNA, 25 bp, Homo sapien
tctaggtcacaagtctcagcagcct

SEQ ID NO: 166853 - DNA, 25 bp, Homo sapien
cgaggaaaggcaacaggctctgcat

SEQ ID NO: 166854 - DNA, 25 bp, Homo sapien
ccaaaataaaggctacaggtatgac

SEQ ID NO: 166855 - DNA, 25 bp, Homo sapien
tggaaagccgacgtctcgacagaag

SEQ ID NO: 166856 - DNA, 25 bp, Homo sapien
gcgccacccgtcatgcaggagacag

SEQ ID NO: 166857 - DNA, 25 bp, Homo sapien
tatctggcaaagctacatgtataca

SEQ ID NO: 166858 - DNA, 25 bp, Homo sapien
tagaggctgctagacacagcgggca

SEQ ID NO: 166859 - DNA, 25 bp, Homo sapien
gcagcaccgaaaggaatggccagtt

SEQ ID NO: 166860 - DNA, 25 bp, Homo sapien
aacaggtcaccgtcatgccattgca

SEQ ID NO: 166861 - DNA, 25 bp, Homo sapien
taaggcttagttacgtcaacaggtc

SEQ ID NO: 166862 - DNA, 25 bp, Homo sapien
ctaagtaccacggagcacgtgcggc

SEQ ID NO: 166863 - DNA, 25 bp, Homo sapien
gcatatcctagggagacccggagtc

SEQ ID NO: 166864 - DNA, 25 bp, Homo sapien
gaagctcattcaaacaagtgatcgc

SEQ ID NO: 166865 - DNA, 25 bp, Homo sapien
tacaagtaacacagtacaggaccca

SEQ ID NO: 166866 - DNA, 25 bp, Homo sapien
gtgatcgcatcccaaaagcaatgtg

SEQ ID NO: 166867 - DNA, 25 bp, Homo sapien
caaaccatttggatctgacagaggc

SEQ ID NO: 166868 - DNA, 25 bp, Homo sapien
tggctcactctctcgtgaacttcct

SEQ ID NO: 166869 - DNA, 25 bp, Homo sapien
cgtctaatggaagcccggagtttgc

SEQ ID NO: 166870 - DNA, 25 bp, Homo sapien
gaaccactgcgttttaaagatccag

SEQ ID NO: 166871 - DNA, 25 bp, Homo sapien
cggagtttgctaaaggaaccactgc

SEQ ID NO: 166872 - DNA, 25 bp, Homo sapien
agtcggtcaccatttaggaagtcag

SEQ ID NO: 166873 - DNA, 25 bp, Homo sapien
tgagaaatacgtccaagccaggagc

SEQ ID NO: 166874 - DNA, 25 bp, Homo sapien
gaagaactcggtttcaccatcctga

SEQ ID NO: 166875 - DNA, 25 bp, Homo sapien
cactgcggcagggacaatctgtcaa

SEQ ID NO: 166876 - DNA, 25 bp, Homo sapien
caccctggtccttgagcgattctca

SEQ ID NO: 166877 - DNA, 25 bp, Homo sapien
ggactcaggaattggaaactcaggg

SEQ ID NO: 166878 - DNA, 25 bp, Homo sapien
taccactcttgcgaactgccttgtt

SEQ ID NO: 166879 - DNA, 25 bp, Homo sapien
actgtgggaacttgtgtgaaatgca

SEQ ID NO: 166880 - DNA, 25 bp, Homo sapien
cctctgccctactgggttccagtga

SEQ ID NO: 166881 - DNA, 25 bp, Homo sapien
aagtgatccacccacctaggcctcc

SEQ ID NO: 166882 - DNA, 25 bp, Homo sapien
agtgatccacccacctaggcctccc

SEQ ID NO: 166883 - DNA, 25 bp, Homo sapien
ctctgccctactgggttccagtgat

SEQ ID NO: 166884 - DNA, 25 bp, Homo sapien
caaggacaaacgatcagcacatcgg

SEQ ID NO: 166885 - DNA, 25 bp, Homo sapien
cactctatttagtgcccaggagaaa

SEQ ID NO: 166886 - DNA, 25 bp, Homo sapien
aacccggacacggacatgcaaggac

SEQ ID NO: 166887 - DNA, 25 bp, Homo sapien
catcggtcaaccagcaacaggaagc

SEQ ID NO: 166888 - DNA, 25 bp, Homo sapien
agcagccttgccacccacgttaagg

SEQ ID NO: 166889 - DNA, 25 bp, Homo sapien
gccttgccacccacgttaaggacat

SEQ ID NO: 166890 - DNA, 25 bp, Homo sapien
ttgccacccacgttaaggacattca

SEQ ID NO: 166891 - DNA, 25 bp, Homo sapien
gcagccttgccacccacgttaagga

SEQ ID NO: 166892 - DNA, 25 bp, Homo sapien
aaacaggttctagagcagccacagg

SEQ ID NO: 166893 - DNA, 25 bp, Homo sapien
tggatgaaaactcaaacggcctccg

SEQ ID NO: 166894 - DNA, 25 bp, Homo sapien
tgacagccacaccaaagggcggagt

SEQ ID NO: 166895 - DNA, 25 bp, Homo sapien
aatctaggttggcactcgagaggcc

SEQ ID NO: 166896 - DNA, 25 bp, Homo sapien
ctggtgtcatggcaaaaaggtggca

SEQ ID NO: 166897 - DNA, 25 bp, Homo sapien
tgaaaaggcacctccaaggttggtg

SEQ ID NO: 166898 - DNA, 25 bp, Homo sapien
taacagaatgctgaggcacggcctc

SEQ ID NO: 166899 - DNA, 25 bp, Homo sapien
gaaatgcaacagcatccgtgagcag

SEQ ID NO: 166900 - DNA, 25 bp, Homo sapien
gaaaaggttcctgtcagagtccacc

SEQ ID NO: 166901 - DNA, 25 bp, Homo sapien
gaatcactgatcacctcggcgtctg

SEQ ID NO: 166902 - DNA, 25 bp, Homo sapien
gatggctggtgtttcacagaccgcc

SEQ ID NO: 166903 - DNA, 25 bp, Homo sapien
caagctgagctttcacgggatggct

SEQ ID NO: 166904 - DNA, 25 bp, Homo sapien
caccagaatctgcaagaatggagtc

SEQ ID NO: 166905 - DNA, 25 bp, Homo sapien
ggacaacgctggctccacagggcag

SEQ ID NO: 166906 - DNA, 25 bp, Homo sapien
gcttgtcttgtggaaacaaacgcgc

SEQ ID NO: 166907 - DNA, 25 bp, Homo sapien
gctggcgactacacggagcttgtct

SEQ ID NO: 166908 - DNA, 25 bp, Homo sapien
ccctgtcgcctgtgcacagacatag

SEQ ID NO: 166909 - DNA, 25 bp, Homo sapien
acaagggaagctccggagccctcct

SEQ ID NO: 166910 - DNA, 25 bp, Homo sapien
gccacggcacctgtcaggggaagct

SEQ ID NO: 166911 - DNA, 25 bp, Homo sapien
cagacatagcccactacgggggcag

SEQ ID NO: 166912 - DNA, 25 bp, Homo sapien
gaagaaacaggtgctgactctcgcg

SEQ ID NO: 166913 - DNA, 25 bp, Homo sapien
tgggaaatggctgaaatcaccgcac

SEQ ID NO: 166914 - DNA, 25 bp, Homo sapien
gaaaaattcagaccgccagatggga

SEQ ID NO: 166915 - DNA, 25 bp, Homo sapien
tcggccctaaagtcccatggctgga

SEQ ID NO: 166916 - DNA, 25 bp, Homo sapien
tacccagagatatgctgtccgccca

SEQ ID NO: 166917 - DNA, 25 bp, Homo sapien
gcttcagggaagcatccatgtcaca

SEQ ID NO: 166918 - DNA, 25 bp, Homo sapien
tacacgtctacatatcagccctgag

SEQ ID NO: 166919 - DNA, 25 bp, Homo sapien
gatgtgaatccctccaatactgtaa

SEQ ID NO: 166920 - DNA, 25 bp, Homo sapien
gacatgccagcgattagaaaatgag

SEQ ID NO: 166921 - DNA, 25 bp, Homo sapien
ccaaatgcttttctaggcaagacat

SEQ ID NO: 166922 - DNA, 25 bp, Homo sapien
ttttctaggcaagacatgccagcga

SEQ ID NO: 166923 - DNA, 25 bp, Homo sapien
tgagacagcttaaagacagaggtac

SEQ ID NO: 166924 - DNA, 25 bp, Homo sapien
ttcaggcccagaaccgttaagtagc

SEQ ID NO: 166925 - DNA, 25 bp, Homo sapien
tcacaactcctagggataggtactg

SEQ ID NO: 166926 - DNA, 25 bp, Homo sapien
tgccgttttccagggtgggacaatc

SEQ ID NO: 166927 - DNA, 25 bp, Homo sapien
ggtactgttacatctccacttgcag

SEQ ID NO: 166928 - DNA, 25 bp, Homo sapien
tggcacgtgacaggctcgtcagcca

SEQ ID NO: 166929 - DNA, 25 bp, Homo sapien
caaagaggatccgaggttgagagga

SEQ ID NO: 166930 - DNA, 25 bp, Homo sapien
tgtctctagtagtgtggcctgtgcc

SEQ ID NO: 166931 - DNA, 25 bp, Homo sapien
gaacacagttctgggcaaagaggat

SEQ ID NO: 166932 - DNA, 25 bp, Homo sapien
tccactttctcatccgaagatggtg

SEQ ID NO: 166933 - DNA, 25 bp, Homo sapien
ggacaggcccgcttgctgggtacct

SEQ ID NO: 166934 - DNA, 25 bp, Homo sapien
cagggcagcggctccactttctcat

SEQ ID NO: 166935 - DNA, 25 bp, Homo sapien
ttaaaacgcgtctgcctgggccgtg

SEQ ID NO: 166936 - DNA, 25 bp, Homo sapien
tgtgctgtgcatcaaccaggtgagc

SEQ ID NO: 166937 - DNA, 25 bp, Homo sapien
tgtgcctaaccatcgagaagaccct

SEQ ID NO: 166938 - DNA, 25 bp, Homo sapien
gaataagaaggtccccgtactgctg

SEQ ID NO: 166939 - DNA, 25 bp, Homo sapien
cctggtggtcatcgactcggtggca

SEQ ID NO: 166940 - DNA, 25 bp, Homo sapien
cgagtttcactcagggcgtgcaggc

SEQ ID NO: 166941 - DNA, 25 bp, Homo sapien
gactcgcctgagtaacgcctgaagg

SEQ ID NO: 166942 - DNA, 25 bp, Homo sapien
tacagaggacggtgttggcacagcc

SEQ ID NO: 166943 - DNA, 25 bp, Homo sapien
ccttgctgagcgtctgaagaggtca

SEQ ID NO: 166944 - DNA, 25 bp, Homo sapien
cacaaaaagaggctcggccagagac

SEQ ID NO: 166945 - DNA, 25 bp, Homo sapien
ccacaaaaagaggctcggccagaga

SEQ ID NO: 166946 - DNA, 25 bp, Homo sapien
tccacaaaaagaggctcggccagag

SEQ ID NO: 166947 - DNA, 25 bp, Homo sapien
cggtggcgtcttccaggccactgct

SEQ ID NO: 166948 - DNA, 25 bp, Homo sapien
gcggtggcgtcttccaggccactgc

SEQ ID NO: 166949 - DNA, 25 bp, Homo sapien
ggtggcgtcttccaggccactgctg

SEQ ID NO: 166950 - DNA, 25 bp, Homo sapien
caagagaagatagaaggtcagggct

SEQ ID NO: 166951 - DNA, 25 bp, Homo sapien
ggtgttgctggttgtgagcctccct

SEQ ID NO: 166952 - DNA, 25 bp, Homo sapien
tgggccgccaaaacctgacagtgtt

SEQ ID NO: 166953 - DNA, 25 bp, Homo sapien
tggagcaccaaaggcctgcgtctgg

SEQ ID NO: 166954 - DNA, 25 bp, Homo sapien
gtatcatgtcctatgcacacagacg

SEQ ID NO: 166955 - DNA, 25 bp, Homo sapien
caaggtcacgccagccgtgtggtta

SEQ ID NO: 166956 - DNA, 25 bp, Homo sapien
gcacacagacgcaggagaaatgagt

SEQ ID NO: 166957 - DNA, 25 bp, Homo sapien
tacgttatcgcacacaacgtgagga

SEQ ID NO: 166958 - DNA, 25 bp, Homo sapien
cagtgcttagtttatagacatcatc

SEQ ID NO: 166959 - DNA, 25 bp, Homo sapien
gctgtgagctgtcagtgcttagttt

SEQ ID NO: 166960 - DNA, 25 bp, Homo sapien
ggccagtggagtccgtcctgtagcc

SEQ ID NO: 166961 - DNA, 25 bp, Homo sapien
agtccgtcctgtagccaagaagcag

SEQ ID NO: 166962 - DNA, 25 bp, Homo sapien
gctccatgcaagtgcagccggacag

SEQ ID NO: 166963 - DNA, 25 bp, Homo sapien
gtggtctcgtgacaggcttcctgca

SEQ ID NO: 166964 - DNA, 25 bp, Homo sapien
ggaaaccctacccatgagcagtcag

SEQ ID NO: 166965 - DNA, 25 bp, Homo sapien
gctggagcaggtgtcagaactgcct

SEQ ID NO: 166966 - DNA, 25 bp, Homo sapien
taatacatgcatattgtctaaaagg

SEQ ID NO: 166967 - DNA, 25 bp, Homo sapien
tcagtgttactgattatccatggac

SEQ ID NO: 166968 - DNA, 25 bp, Homo sapien
catctgggctcctaaacgtgtttat

SEQ ID NO: 166969 - DNA, 25 bp, Homo sapien
ccatggacttctcttgggggctgtg

SEQ ID NO: 166970 - DNA, 25 bp, Homo sapien
gacagacatgttgccctagatgtag

SEQ ID NO: 166971 - DNA, 25 bp, Homo sapien
cagcccaccgacaaaatggatttgg

SEQ ID NO: 166972 - DNA, 25 bp, Homo sapien
tcccacaggctttgaattgaaggcg

SEQ ID NO: 166973 - DNA, 25 bp, Homo sapien
tctggaatgggttctaagctgctaa

SEQ ID NO: 166974 - DNA, 25 bp, Homo sapien
gctgaacatgggcatacgagtgacc

SEQ ID NO: 166975 - DNA, 25 bp, Homo sapien
taccaggtgcgaggttcatactccc

SEQ ID NO: 166976 - DNA, 25 bp, Homo sapien
aaatgacctcttttcgagccgggca

SEQ ID NO: 166977 - DNA, 25 bp, Homo sapien
tccaagttttgtatccagacccagc

SEQ ID NO: 166978 - DNA, 25 bp, Homo sapien
gataagacatcacactcttgcaggg

SEQ ID NO: 166979 - DNA, 25 bp, Homo sapien
gctccaggcagtaaccacggcattt

SEQ ID NO: 166980 - DNA, 25 bp, Homo sapien
tgtttttgcagtccagcagtcaggg

SEQ ID NO: 166981 - DNA, 25 bp, Homo sapien
ttcaaagctacacagcaggtcccag

SEQ ID NO: 166982 - DNA, 25 bp, Homo sapien
ctcgcccagcccggggcaccgcccg

SEQ ID NO: 166983 - DNA, 25 bp, Homo sapien
gcctcagcctctcggccagcggccc

SEQ ID NO: 166984 - DNA, 25 bp, Homo sapien
gacgccgcctcagcctctcggccag

SEQ ID NO: 166985 - DNA, 25 bp, Homo sapien
cgcacccggcccctcgcccagcccg

SEQ ID NO: 166986 - DNA, 25 bp, Homo sapien
gcttcttggcgtcgcggcgcgcgga

SEQ ID NO: 166987 - DNA, 25 bp, Homo sapien
ctccaggccgaacgggcttccgaag

SEQ ID NO: 166988 - DNA, 25 bp, Homo sapien
gttcgggcaccatgcgcaggccgct

SEQ ID NO: 166989 - DNA, 25 bp, Homo sapien
tcggggagcgcaccagcttcttggc

SEQ ID NO: 166990 - DNA, 25 bp, Homo sapien
tgcacagcggcaaggattttaagga

SEQ ID NO: 166991 - DNA, 25 bp, Homo sapien
gattctcaactggttctgcgtcaga

SEQ ID NO: 166992 - DNA, 25 bp, Homo sapien
tatccatcaaagtgtcaacccgcca

SEQ ID NO: 166993 - DNA, 25 bp, Homo sapien
tatccaaagtggtgtcgcacgaagc

SEQ ID NO: 166994 - DNA, 25 bp, Homo sapien
cggcctgaacattttttttaatgag

SEQ ID NO: 166995 - DNA, 25 bp, Homo sapien
cattttttttaatgagccaggcatg

SEQ ID NO: 166996 - DNA, 25 bp, Homo sapien
tggtggtgcacacctgtagtcccag

SEQ ID NO: 166997 - DNA, 25 bp, Homo sapien
atggtggtgcacacctgtagtccca

SEQ ID NO: 166998 - DNA, 25 bp, Homo sapien
aggtcccggttgtggcgcacatcag

SEQ ID NO: 166999 - DNA, 25 bp, Homo sapien
gccacgtgtaccctcactgtaggag

SEQ ID NO: 167000 - DNA, 25 bp, Homo sapien
caagtgcccactgtgcttagttggc

SEQ ID NO: 167001 - DNA, 25 bp, Homo sapien
tctgagccccagaagacgctggtgt

SEQ ID NO: 167002 - DNA, 25 bp, Homo sapien
tacctggcgagcataaactgagggc

SEQ ID NO: 167003 - DNA, 25 bp, Homo sapien
gagaacaagaccctcgtgctctggg

SEQ ID NO: 167004 - DNA, 25 bp, Homo sapien
tctgatgattaagggctcggctgaa

SEQ ID NO: 167005 - DNA, 25 bp, Homo sapien
ttcaatgaaccagcgacggaacggt

SEQ ID NO: 167006 - DNA, 25 bp, Homo sapien
aaggtggtactgtcccggcacctca

SEQ ID NO: 167007 - DNA, 25 bp, Homo sapien
ccatggcaaggtggtactgtcccgg

SEQ ID NO: 167008 - DNA, 25 bp, Homo sapien
ccggcacctcagatgcttggtcggc

SEQ ID NO: 167009 - DNA, 25 bp, Homo sapien
gtactgtcccggcacctcagatgct

SEQ ID NO: 167010 - DNA, 25 bp, Homo sapien
caaacttggcgtcacactgcataca

SEQ ID NO: 167011 - DNA, 25 bp, Homo sapien
tttctggtgagaaagtcaaacttgg

SEQ ID NO: 167012 - DNA, 25 bp, Homo sapien
ggcgtcacactgcatacatctccga

SEQ ID NO: 167013 - DNA, 25 bp, Homo sapien
tgagaaagtcaaacttggcgtcaca

SEQ ID NO: 167014 - DNA, 25 bp, Homo sapien
tctttcaactacccaagtcccactg

SEQ ID NO: 167015 - DNA, 25 bp, Homo sapien
ctttcaactacccaagtcccactgc

SEQ ID NO: 167016 - DNA, 25 bp, Homo sapien
cagatgcgggaggattggcagtgag

SEQ ID NO: 167017 - DNA, 25 bp, Homo sapien
cggggatccgcctcacctgggaaat

SEQ ID NO: 167018 - DNA, 25 bp, Homo sapien
gcctaaacgcgaggcccctgtgccg

SEQ ID NO: 167019 - DNA, 25 bp, Homo sapien
tggcactccccgggccacgcctaaa

SEQ ID NO: 167020 - DNA, 25 bp, Homo sapien
cttgagggacacgagggcgcactcc

SEQ ID NO: 167021 - DNA, 25 bp, Homo sapien
tgtcgcagaagcacttcccgcagcg

SEQ ID NO: 167022 - DNA, 25 bp, Homo sapien
gagctgcttgtcgtagaactccgcc

SEQ ID NO: 167023 - DNA, 25 bp, Homo sapien
gcacggggtccacaaagcacatgcg

SEQ ID NO: 167024 - DNA, 25 bp, Homo sapien
cccttcccacgagtaccagtaggag

SEQ ID NO: 167025 - DNA, 25 bp, Homo sapien
ggaacacaaaagcaaacgtgagaac

SEQ ID NO: 167026 - DNA, 25 bp, Homo sapien
gagacgcacgcacagaggacagagt

SEQ ID NO: 167027 - DNA, 25 bp, Homo sapien
caaaagcaaacgtgagaacagggcc

SEQ ID NO: 167028 - DNA, 25 bp, Homo sapien
tggaaagacgacaagtcatagtttc

SEQ ID NO: 167029 - DNA, 25 bp, Homo sapien
ggttattggaaagacgacaagtcat

SEQ ID NO: 167030 - DNA, 25 bp, Homo sapien
ctctggttattggaaagacgacaag

SEQ ID NO: 167031 - DNA, 25 bp, Homo sapien
gacaagtcatagtttcaggtttctc

SEQ ID NO: 167032 - DNA, 25 bp, Homo sapien
atttcgatttcatagtggctgtctc

SEQ ID NO: 167033 - DNA, 25 bp, Homo sapien
ttctgtgaggatctgcacggtggaa

SEQ ID NO: 167034 - DNA, 25 bp, Homo sapien
tgtacaatttcgatttcatagtggc

SEQ ID NO: 167035 - DNA, 25 bp, Homo sapien
cacggtggaaatgtgtacaatttcg

SEQ ID NO: 167036 - DNA, 25 bp, Homo sapien
tgagtaaatacacgccccgcgaaag

SEQ ID NO: 167037 - DNA, 25 bp, Homo sapien
gcatgctcctcttgtcacccacgca

SEQ ID NO: 167038 - DNA, 25 bp, Homo sapien
taaagccactgagtaaatacacgcc

SEQ ID NO: 167039 - DNA, 25 bp, Homo sapien
gcttaggaaaggacgtgctggcatt

SEQ ID NO: 167040 - DNA, 25 bp, Homo sapien
cacagtttgcagataacgggatgcg

SEQ ID NO: 167041 - DNA, 25 bp, Homo sapien
tcagcagagtttagtggagaggccc

SEQ ID NO: 167042 - DNA, 25 bp, Homo sapien
aaggagcaaccaagagccggtgaga

SEQ ID NO: 167043 - DNA, 25 bp, Homo sapien
aaagcaacatgggttacggcacacg

SEQ ID NO: 167044 - DNA, 25 bp, Homo sapien
ccccggaggctggtgtaagcgtgaa

SEQ ID NO: 167045 - DNA, 25 bp, Homo sapien
aggctggtgtaagcgtgaatgtctt

SEQ ID NO: 167046 - DNA, 25 bp, Homo sapien
tcccccggaggctggtgtaagcgtg

SEQ ID NO: 167047 - DNA, 25 bp, Homo sapien
cggaggctggtgtaagcgtgaatgt

SEQ ID NO: 167048 - DNA, 25 bp, Homo sapien
gctgtcaattgctgggtaaccctcc

SEQ ID NO: 167049 - DNA, 25 bp, Homo sapien
gaatgagtgtgtggcctgccctaca

SEQ ID NO: 167050 - DNA, 25 bp, Homo sapien
gagaaagtacatctgctgcggtatc

SEQ ID NO: 167051 - DNA, 25 bp, Homo sapien
aagggctctactgagactgggcaga

SEQ ID NO: 167052 - DNA, 25 bp, Homo sapien
gatcatagccatggccgtctgtcac

SEQ ID NO: 167053 - DNA, 25 bp, Homo sapien
cacgtggctggcaaaggtttactat

SEQ ID NO: 167054 - DNA, 25 bp, Homo sapien
caccactggatcatagccatggccg

SEQ ID NO: 167055 - DNA, 25 bp, Homo sapien
catttgcctgataaagcaccactgg

SEQ ID NO: 167056 - DNA, 25 bp, Homo sapien
acactttcataagcccggttctgtg

SEQ ID NO: 167057 - DNA, 25 bp, Homo sapien
aacgtcctgcctaggctctagagca

SEQ ID NO: 167058 - DNA, 25 bp, Homo sapien
tagagcagggcgaccatggctctgc

SEQ ID NO: 167059 - DNA, 25 bp, Homo sapien
accttgcctgtcagtgtaacgtcct

SEQ ID NO: 167060 - DNA, 25 bp, Homo sapien
gaaagagacccatgggatgcagcct

SEQ ID NO: 167061 - DNA, 25 bp, Homo sapien
tgtgctgctccaagagtagcctggc

SEQ ID NO: 167062 - DNA, 25 bp, Homo sapien
gattgtcactacaaaggcccagtgt

SEQ ID NO: 167063 - DNA, 25 bp, Homo sapien
taattgaggcgctgctatgccctgg

SEQ ID NO: 167064 - DNA, 25 bp, Homo sapien
cgtccccggcactgtatactgcagg

SEQ ID NO: 167065 - DNA, 25 bp, Homo sapien
tcagctgggtcacaccctccgtccc

SEQ ID NO: 167066 - DNA, 25 bp, Homo sapien
gaacatgcctgtggcccgtgcgttg

SEQ ID NO: 167067 - DNA, 25 bp, Homo sapien
ttgtgcatggccactagccacgcca

SEQ ID NO: 167068 - DNA, 25 bp, Homo sapien
tggtcccgagattcatagaggagct

SEQ ID NO: 167069 - DNA, 25 bp, Homo sapien
tcccgagattcatagaggagcttgg

SEQ ID NO: 167070 - DNA, 25 bp, Homo sapien
ttactggtcccgagattcatagagg

SEQ ID NO: 167071 - DNA, 25 bp, Homo sapien
cgagattcatagaggagcttggcag

SEQ ID NO: 167072 - DNA, 25 bp, Homo sapien
tattagaggcgaacaggctccactg

SEQ ID NO: 167073 - DNA, 25 bp, Homo sapien
tgtgaaacaggctaaggcaagtgct

SEQ ID NO: 167074 - DNA, 25 bp, Homo sapien
taatccctgtggtacgcaaggagca

SEQ ID NO: 167075 - DNA, 25 bp, Homo sapien
tagacctgcgaactcataaaaatgg

SEQ ID NO: 167076 - DNA, 25 bp, Homo sapien
ctcaaggcaaggagggcgcttcact

SEQ ID NO: 167077 - DNA, 25 bp, Homo sapien
caaagctacccgaactatgttggaa

SEQ ID NO: 167078 - DNA, 25 bp, Homo sapien
tgtggtgaagaaaagtgaacgccct

SEQ ID NO: 167079 - DNA, 25 bp, Homo sapien
gctgtgaggccacctttgtcccagg

SEQ ID NO: 167080 - DNA, 25 bp, Homo sapien
cctaaaggctgattgtgcaggccca

SEQ ID NO: 167081 - DNA, 25 bp, Homo sapien
agcatatactcttctcctccgatct

SEQ ID NO: 167082 - DNA, 25 bp, Homo sapien
tgggagagcctcagcatatactctt

SEQ ID NO: 167083 - DNA, 25 bp, Homo sapien
gacccctaagaccaagtgacaactg

SEQ ID NO: 167084 - DNA, 25 bp, Homo sapien
aagtctcctctcagattttatagag

SEQ ID NO: 167085 - DNA, 25 bp, Homo sapien
caagatggttagtggaggccacctg

SEQ ID NO: 167086 - DNA, 25 bp, Homo sapien
ttaattgtagacagaataaagacac

SEQ ID NO: 167087 - DNA, 25 bp, Homo sapien
gaagacactcaggtgactaccacgg

SEQ ID NO: 167088 - DNA, 25 bp, Homo sapien
tgcacttgttcccttcgcctgaatg

SEQ ID NO: 167089 - DNA, 25 bp, Homo sapien
atggtcttccttcaagctgtcatta

SEQ ID NO: 167090 - DNA, 25 bp, Homo sapien
tgtcattatggctcatcctttctcc

SEQ ID NO: 167091 - DNA, 25 bp, Homo sapien
tgttcccttcgcctgaatggtcttc

SEQ ID NO: 167092 - DNA, 25 bp, Homo sapien
gcctgcaccaccatgtctaggtctt

SEQ ID NO: 167093 - DNA, 25 bp, Homo sapien
tctgtgcttgttccccgcctcagtc

SEQ ID NO: 167094 - DNA, 25 bp, Homo sapien
tgtctaggtcttcctaattctgtgc

SEQ ID NO: 167095 - DNA, 25 bp, Homo sapien
ggtcttcctaattctgtgcttgttc

SEQ ID NO: 167096 - DNA, 25 bp, Homo sapien
cgttgattagcagtccggccctgct

SEQ ID NO: 167097 - DNA, 25 bp, Homo sapien
ggtaacactgccttacactatgggt

SEQ ID NO: 167098 - DNA, 25 bp, Homo sapien
gagtgatcctgtaaatgtaaccaat

SEQ ID NO: 167099 - DNA, 25 bp, Homo sapien
tctgtcttaaccttccgtggcgtcc

SEQ ID NO: 167100 - DNA, 25 bp, Homo sapien
gaaccagaataaggttcacttcatg

SEQ ID NO: 167101 - DNA, 25 bp, Homo sapien
acttcatgcagtgtcctgtcagtca

SEQ ID NO: 167102 - DNA, 25 bp, Homo sapien
tcttggggtctctacctcgatggca

SEQ ID NO: 167103 - DNA, 25 bp, Homo sapien
tgtcagtcagctgaaaagcccttct

SEQ ID NO: 167104 - DNA, 25 bp, Homo sapien
tctgagcgcctatatcgtaagtaaa

SEQ ID NO: 167105 - DNA, 25 bp, Homo sapien
tagtggtggtgtctttgtcctgccc

SEQ ID NO: 167106 - DNA, 25 bp, Homo sapien
tgcccttaaggatgctttcgcctag

SEQ ID NO: 167107 - DNA, 25 bp, Homo sapien
tagatttgccatcgtcctaccgacc

SEQ ID NO: 167108 - DNA, 25 bp, Homo sapien
tagccttcgcggttgtactgaggaa

SEQ ID NO: 167109 - DNA, 25 bp, Homo sapien
ccgagtgcacggatttggagagcca

SEQ ID NO: 167110 - DNA, 25 bp, Homo sapien
ggaattcccttttcccgtatctgca

SEQ ID NO: 167111 - DNA, 25 bp, Homo sapien
tgcaggcgcattcccgtagccttcg

SEQ ID NO: 167112 - DNA, 25 bp, Homo sapien
cggtcctctcaggtgcgcggtcgga

SEQ ID NO: 167113 - DNA, 25 bp, Homo sapien
ctcaggtgcgcggtcggacgctggg

SEQ ID NO: 167114 - DNA, 25 bp, Homo sapien
ggtgggtggcgcagctgtgacccgc

SEQ ID NO: 167115 - DNA, 25 bp, Homo sapien
tgacccgcctgaaacgaacgttctg

SEQ ID NO: 167116 - DNA, 25 bp, Homo sapien
ctcatttggatcaccttaccccggg

SEQ ID NO: 167117 - DNA, 25 bp, Homo sapien
gaagtaccccttcgtgactcaggga

SEQ ID NO: 167118 - DNA, 25 bp, Homo sapien
gcccagagaaggagtgcaagttgcc

SEQ ID NO: 167119 - DNA, 25 bp, Homo sapien
tctctgaagagccttggcaaaacct

SEQ ID NO: 167120 - DNA, 25 bp, Homo sapien
acggtagctgccactgtctgtgccc

SEQ ID NO: 167121 - DNA, 25 bp, Homo sapien
ctggaggatataggatgctttggtg

SEQ ID NO: 167122 - DNA, 25 bp, Homo sapien
tgaggcacggtagctgccactgtct

SEQ ID NO: 167123 - DNA, 25 bp, Homo sapien
gatgctttggtgtgaggcacggtag

SEQ ID NO: 167124 - DNA, 25 bp, Homo sapien
acacagaagggctttacagggttgg

SEQ ID NO: 167125 - DNA, 25 bp, Homo sapien
gatgggctgctcgtgaactttggtc

SEQ ID NO: 167126 - DNA, 25 bp, Homo sapien
ttggtctgtgtaatggagagacaca

SEQ ID NO: 167127 - DNA, 25 bp, Homo sapien
cacattaacaacattcacggcgatt

SEQ ID NO: 167128 - DNA, 25 bp, Homo sapien
tgtgttcttgtctatcgtcttcttg

SEQ ID NO: 167129 - DNA, 25 bp, Homo sapien
gcctggccggaatacaaactctgtg

SEQ ID NO: 167130 - DNA, 25 bp, Homo sapien
ctatcgtcttcttgcctggccggaa

SEQ ID NO: 167131 - DNA, 25 bp, Homo sapien
ttgcctggccggaatacaaactctg

SEQ ID NO: 167132 - DNA, 25 bp, Homo sapien
ctatgggaccctgactgatgtgaca

SEQ ID NO: 167133 - DNA, 25 bp, Homo sapien
tgtgtgcagggaccaagactcctac

SEQ ID NO: 167134 - DNA, 25 bp, Homo sapien
tagcacggaggacgcaagaaaggtc

SEQ ID NO: 167135 - DNA, 25 bp, Homo sapien
tggcctgacacaacatccagaggga

SEQ ID NO: 167136 - DNA, 25 bp, Homo sapien
ggtgtccggctctcgtcctcccaga

SEQ ID NO: 167137 - DNA, 25 bp, Homo sapien
ctgtgctgggtgtccggctctcgtc

SEQ ID NO: 167138 - DNA, 25 bp, Homo sapien
tcgtcctcccagattgatgctccat

SEQ ID NO: 167139 - DNA, 25 bp, Homo sapien
ctcgtcctcccagattgatgctcca

SEQ ID NO: 167140 - DNA, 25 bp, Homo sapien
tacatttgcactatcggaggaggcc

SEQ ID NO: 167141 - DNA, 25 bp, Homo sapien
tgttcttacaaaccaggaaggctct

SEQ ID NO: 167142 - DNA, 25 bp, Homo sapien
tgttacatgacagccatagatggtg

SEQ ID NO: 167143 - DNA, 25 bp, Homo sapien
gccttgaaggacagaccacgtgtca

SEQ ID NO: 167144 - DNA, 25 bp, Homo sapien
tcaggagtgggacccaaggttgacc

SEQ ID NO: 167145 - DNA, 25 bp, Homo sapien
agcgtgccagccgagtcgcttctcc

SEQ ID NO: 167146 - DNA, 25 bp, Homo sapien
gggacccaaggttgacctggaagca

SEQ ID NO: 167147 - DNA, 25 bp, Homo sapien
ccagccgagtcgcttctccccaggc

SEQ ID NO: 167148 - DNA, 25 bp, Homo sapien
gagatcattgttcccgggcacaggt

SEQ ID NO: 167149 - DNA, 25 bp, Homo sapien
cacaaaataatgtgtcggagatcat

SEQ ID NO: 167150 - DNA, 25 bp, Homo sapien
cgaaggccaaacgtgcccgttaatg

SEQ ID NO: 167151 - DNA, 25 bp, Homo sapien
ttaaacctctggagtcagtgctcag

SEQ ID NO: 167152 - DNA, 25 bp, Homo sapien
tagataatttgtcatgcagcgcatg

SEQ ID NO: 167153 - DNA, 25 bp, Homo sapien
ggagcgtggaacgtcactgtacact

SEQ ID NO: 167154 - DNA, 25 bp, Homo sapien
tccggcgtgtcaggcatactctgag

SEQ ID NO: 167155 - DNA, 25 bp, Homo sapien
tgatcaggatccaggcactcacttg

SEQ ID NO: 167156 - DNA, 25 bp, Homo sapien
ccagagtgacaatgaaactgtagcc

SEQ ID NO: 167157 - DNA, 25 bp, Homo sapien
tctctctttgcgctgtgggtgacca

SEQ ID NO: 167158 - DNA, 25 bp, Homo sapien
gaaagcgccttataaatttatgcca

SEQ ID NO: 167159 - DNA, 25 bp, Homo sapien
tacatgaacccttaagcactctggg

SEQ ID NO: 167160 - DNA, 25 bp, Homo sapien
catcccccaactgccgggtctccgc

SEQ ID NO: 167161 - DNA, 25 bp, Homo sapien
ccccaactgccgggtctccgcggcg

SEQ ID NO: 167162 - DNA, 25 bp, Homo sapien
cctcaaggcccaggcgtcggcatcc

SEQ ID NO: 167163 - DNA, 25 bp, Homo sapien
cggcatcccccaactgccgggtctc

SEQ ID NO: 167164 - DNA, 25 bp, Homo sapien
tcttgccgatggtgaaccagtcgtt

SEQ ID NO: 167165 - DNA, 25 bp, Homo sapien
gaaccagtcgttgatctgctcgatg

SEQ ID NO: 167166 - DNA, 25 bp, Homo sapien
ggtcaccgtcttgccgatggtgaac

SEQ ID NO: 167167 - DNA, 25 bp, Homo sapien
cgttgatctgctcgatggtgagctt

SEQ ID NO: 167168 - DNA, 25 bp, Homo sapien
ctttcgaacgcagcggccggccggg

SEQ ID NO: 167169 - DNA, 25 bp, Homo sapien
cggccgggccggagcttgggccaga

SEQ ID NO: 167170 - DNA, 25 bp, Homo sapien
gccggccgggccggagcttgggcca

SEQ ID NO: 167171 - DNA, 25 bp, Homo sapien
ggccgggccggagcttgggccagag

SEQ ID NO: 167172 - DNA, 25 bp, Homo sapien
ctcccgtgatcaaatgtcacatttc

SEQ ID NO: 167173 - DNA, 25 bp, Homo sapien
aaatgtcacatttccatatccttcc

SEQ ID NO: 167174 - DNA, 25 bp, Homo sapien
tcaaatgtcacatttccatatcctt

SEQ ID NO: 167175 - DNA, 25 bp, Homo sapien
atgtcacatttccatatccttccat

SEQ ID NO: 167176 - DNA, 25 bp, Homo sapien
taaagcattgcgatgggaattacac

SEQ ID NO: 167177 - DNA, 25 bp, Homo sapien
aacagggtgatgctagtctgaagct

SEQ ID NO: 167178 - DNA, 25 bp, Homo sapien
aattagtagtacacaattgttctga

SEQ ID NO: 167179 - DNA, 25 bp, Homo sapien
gtctgaagctggtcaagcagtggct

SEQ ID NO: 167180 - DNA, 25 bp, Homo sapien
ctggcccactggttggttggacact

SEQ ID NO: 167181 - DNA, 25 bp, Homo sapien
taatatactctacttctgagctcct

SEQ ID NO: 167182 - DNA, 25 bp, Homo sapien
tgtgcttcgagctgtctgtatttgt

SEQ ID NO: 167183 - DNA, 25 bp, Homo sapien
actgcgacacacatcaagctcttgt

SEQ ID NO: 167184 - DNA, 25 bp, Homo sapien
taagtagcccaaacctccataaata

SEQ ID NO: 167185 - DNA, 25 bp, Homo sapien
agtggctaagtagcccaaacctcca

SEQ ID NO: 167186 - DNA, 25 bp, Homo sapien
ggctaagtagcccaaacctccataa

SEQ ID NO: 167187 - DNA, 25 bp, Homo sapien
aatgtcagtggctaagtagcccaaa

SEQ ID NO: 167188 - DNA, 25 bp, Homo sapien
cttgtatcgacttataggcaaatca

SEQ ID NO: 167189 - DNA, 25 bp, Homo sapien
cactgcttaatttagccaaagatgg

SEQ ID NO: 167190 - DNA, 25 bp, Homo sapien
aatttagccaaagatggccttggac

SEQ ID NO: 167191 - DNA, 25 bp, Homo sapien
tatttataagttgtccctgggatgc

SEQ ID NO: 167192 - DNA, 25 bp, Homo sapien
tggtccaagatatactgcgggagct

SEQ ID NO: 167193 - DNA, 25 bp, Homo sapien
tgagtgcttttaccgcttcccgtgg

SEQ ID NO: 167194 - DNA, 25 bp, Homo sapien
acaatgctgcagtaggcggagcgct

SEQ ID NO: 167195 - DNA, 25 bp, Homo sapien
gagcgctgaacgtagtggtccaaga

SEQ ID NO: 167196 - DNA, 25 bp, Homo sapien
gtgtgaattccatcaaactcttggc

SEQ ID NO: 167197 - DNA, 25 bp, Homo sapien
gaagcaggactccagttgtcatata

SEQ ID NO: 167198 - DNA, 25 bp, Homo sapien
ttcatcaatgatgatatgtgtgaat

SEQ ID NO: 167199 - DNA, 25 bp, Homo sapien
aactcttggcactaactattttctg

SEQ ID NO: 167200 - DNA, 25 bp, Homo sapien
taccaatagcaggaaatccatttct

SEQ ID NO: 167201 - DNA, 25 bp, Homo sapien
ttcttaagagtttgcggactaccaa

SEQ ID NO: 167202 - DNA, 25 bp, Homo sapien
gagtttgcggactaccaatagcagg

SEQ ID NO: 167203 - DNA, 25 bp, Homo sapien
ccatttcttctgttcgttcgtgtac

SEQ ID NO: 167204 - DNA, 25 bp, Homo sapien
gtggtacttattcaaccaaaagcaa

SEQ ID NO: 167205 - DNA, 25 bp, Homo sapien
tgtggtacttattcaaccaaaagca

SEQ ID NO: 167206 - DNA, 25 bp, Homo sapien
tcattatagtcaactagaccatttt

SEQ ID NO: 167207 - DNA, 25 bp, Homo sapien
tgcaggattcatcttgttttgaaca

SEQ ID NO: 167208 - DNA, 25 bp, Homo sapien
gaatgtgctccaaatcattaagata

SEQ ID NO: 167209 - DNA, 25 bp, Homo sapien
ttcatcttgttttgaacaggaacag

SEQ ID NO: 167210 - DNA, 25 bp, Homo sapien
caggattcatcttgttttgaacagg

SEQ ID NO: 167211 - DNA, 25 bp, Homo sapien
ttcatatatatccttagttatcacc

SEQ ID NO: 167212 - DNA, 25 bp, Homo sapien
ccttagttatcaccggttcctccag

SEQ ID NO: 167213 - DNA, 25 bp, Homo sapien
tatatccttagttatcaccggttcc

SEQ ID NO: 167214 - DNA, 25 bp, Homo sapien
tagttatcaccggttcctccaggag

SEQ ID NO: 167215 - DNA, 25 bp, Homo sapien
cagcaagaggataatgacatgccac

SEQ ID NO: 167216 - DNA, 25 bp, Homo sapien
ccaaggagctcagtttagtagtcaa

SEQ ID NO: 167217 - DNA, 25 bp, Homo sapien
gtattaccatgcatccaaaagcagg

SEQ ID NO: 167218 - DNA, 25 bp, Homo sapien
aaagatactgatttgccctcatgga

SEQ ID NO: 167219 - DNA, 25 bp, Homo sapien
cactgcttcgctccaacacaaactg

SEQ ID NO: 167220 - DNA, 25 bp, Homo sapien
acactgcttcgctccaacacaaact

SEQ ID NO: 167221 - DNA, 25 bp, Homo sapien
tgagaagttcatgcatataatttat

SEQ ID NO: 167222 - DNA, 25 bp, Homo sapien
cttgtgagaagttcatgcatataat

SEQ ID NO: 167223 - DNA, 25 bp, Homo sapien
tgtgagaagttcatgcatataattt

SEQ ID NO: 167224 - DNA, 25 bp, Homo sapien
ggcttgtgagaagttcatgcatata

SEQ ID NO: 167225 - DNA, 25 bp, Homo sapien
tctaaagccacacttgaatggagtg

SEQ ID NO: 167226 - DNA, 25 bp, Homo sapien
aagccacacttgaatggagtggata

SEQ ID NO: 167227 - DNA, 25 bp, Homo sapien
ccacacttgaatggagtggatagac

SEQ ID NO: 167228 - DNA, 25 bp, Homo sapien
tctgtacccagggactggacttaaa

SEQ ID NO: 167229 - DNA, 25 bp, Homo sapien
tattcctgacttctggtgtggtaac

SEQ ID NO: 167230 - DNA, 25 bp, Homo sapien
aaggctgctcctagagattccaaag

SEQ ID NO: 167231 - DNA, 25 bp, Homo sapien
tgccctagaataccacccaaggctg

SEQ ID NO: 167232 - DNA, 25 bp, Homo sapien
caagacacgggcaaagggagctatt

SEQ ID NO: 167233 - DNA, 25 bp, Homo sapien
ctctgcaatattggtggacagaata

SEQ ID NO: 167234 - DNA, 25 bp, Homo sapien
tctgcaatattggtggacagaataa

SEQ ID NO: 167235 - DNA, 25 bp, Homo sapien
caaagcacctgtggagtgttgtgtg

SEQ ID NO: 167236 - DNA, 25 bp, Homo sapien
ccttcacttactgccccatttcctc

SEQ ID NO: 167237 - DNA, 25 bp, Homo sapien
agtgttgtgtgccgccaccggttct

SEQ ID NO: 167238 - DNA, 25 bp, Homo sapien
tcccctacagcaaagcacctgtgga

SEQ ID NO: 167239 - DNA, 25 bp, Homo sapien
catcacagaccaaagttctagtcaa

SEQ ID NO: 167240 - DNA, 25 bp, Homo sapien
cagctggttttagaagcccaactca

SEQ ID NO: 167241 - DNA, 25 bp, Homo sapien
cagaccaaagttctagtcaaacaaa

SEQ ID NO: 167242 - DNA, 25 bp, Homo sapien
gcccaactcaatcgcagactctgat

SEQ ID NO: 167243 - DNA, 25 bp, Homo sapien
acagtgtttggcattaattacttta

SEQ ID NO: 167244 - DNA, 25 bp, Homo sapien
gccggtaacagtaccctctagacac

SEQ ID NO: 167245 - DNA, 25 bp, Homo sapien
cagccggtaacagtaccctctagac

SEQ ID NO: 167246 - DNA, 25 bp, Homo sapien
cagtaccctctagacactcgtccag

SEQ ID NO: 167247 - DNA, 25 bp, Homo sapien
cctctagacactcgtccagcacggc

SEQ ID NO: 167248 - DNA, 25 bp, Homo sapien
caacatctcaggaacaacatgatca

SEQ ID NO: 167249 - DNA, 25 bp, Homo sapien
gatcagggatggagttgtcccagaa

SEQ ID NO: 167250 - DNA, 25 bp, Homo sapien
aacatgatcagggatggagttgtcc

SEQ ID NO: 167251 - DNA, 25 bp, Homo sapien
acatctcaggaacaacatgatcagg

SEQ ID NO: 167252 - DNA, 25 bp, Homo sapien
ctttagtagaaggatggtgcgctca

SEQ ID NO: 167253 - DNA, 25 bp, Homo sapien
tgcgctcaatgtcactcagaccagg

SEQ ID NO: 167254 - DNA, 25 bp, Homo sapien
ggctcacccatgtcaagtaatttca

SEQ ID NO: 167255 - DNA, 25 bp, Homo sapien
caagatcgtgcttcctaatggacaa

SEQ ID NO: 167256 - DNA, 25 bp, Homo sapien
gctaaaactcttcctaagaaggtca

SEQ ID NO: 167257 - DNA, 25 bp, Homo sapien
catgtccaaggactatgagtttacc

SEQ ID NO: 167258 - DNA, 25 bp, Homo sapien
aagaaggtcaattcaccatcatggg

SEQ ID NO: 167259 - DNA, 25 bp, Homo sapien
taataagacattcatctagacatcc

SEQ ID NO: 167260 - DNA, 25 bp, Homo sapien
catcgagatgctgccggaaaggcat

SEQ ID NO: 167261 - DNA, 25 bp, Homo sapien
ctatatccatcgagatgctgccgga

SEQ ID NO: 167262 - DNA, 25 bp, Homo sapien
tgctgccggaaaggcattgcaaaaa

SEQ ID NO: 167263 - DNA, 25 bp, Homo sapien
gagatgctgccggaaaggcattgca

SEQ ID NO: 167264 - DNA, 25 bp, Homo sapien
tcaacaagtgcaatacagtcactct

SEQ ID NO: 167265 - DNA, 25 bp, Homo sapien
caatacagtcactcttgctactgcc

SEQ ID NO: 167266 - DNA, 25 bp, Homo sapien
caagtgcaatacagtcactcttgct

SEQ ID NO: 167267 - DNA, 25 bp, Homo sapien
aaatgcctcaacaagtgcaatacag

SEQ ID NO: 167268 - DNA, 25 bp, Homo sapien
ttcgggtaccgcagctcccctgtct

SEQ ID NO: 167269 - DNA, 25 bp, Homo sapien
cttcgggtaccgcagctcccctgtc

SEQ ID NO: 167270 - DNA, 25 bp, Homo sapien
tcgggtaccgcagctcccctgtctg

SEQ ID NO: 167271 - DNA, 25 bp, Homo sapien
tcttgatttgaatgtaatttaaccg

SEQ ID NO: 167272 - DNA, 25 bp, Homo sapien
tgatttgaatgtaatttaaccgtcc

SEQ ID NO: 167273 - DNA, 25 bp, Homo sapien
ctcttgatttgaatgtaatttaacc

SEQ ID NO: 167274 - DNA, 25 bp, Homo sapien
ctctctaattctcttgatttgaatg

SEQ ID NO: 167275 - DNA, 25 bp, Homo sapien
aatcccacacggatcaacacaggag

SEQ ID NO: 167276 - DNA, 25 bp, Homo sapien
ttgcgtttaatgcaacacccaatca

SEQ ID NO: 167277 - DNA, 25 bp, Homo sapien
tggctcccaagaggttaccacatca

SEQ ID NO: 167278 - DNA, 25 bp, Homo sapien
caaacaaccggcaatacaggcgtgt

SEQ ID NO: 167279 - DNA, 25 bp, Homo sapien
ctgtgagattctagtcttcaattct

SEQ ID NO: 167280 - DNA, 25 bp, Homo sapien
gaatcaacatgcatgttgaactgtg

SEQ ID NO: 167281 - DNA, 25 bp, Homo sapien
ctgtaggatgaatcgctgcttatat

SEQ ID NO: 167282 - DNA, 25 bp, Homo sapien
tactcttggtccatgacaggtcgcc

SEQ ID NO: 167283 - DNA, 25 bp, Homo sapien
catccggctgtccaaaagtaaagta

SEQ ID NO: 167284 - DNA, 25 bp, Homo sapien
ttgtcttggggtccttgccagccag

SEQ ID NO: 167285 - DNA, 25 bp, Homo sapien
cacgacagttgtcttggggtccttg

SEQ ID NO: 167286 - DNA, 25 bp, Homo sapien
ctcaccgccatctcctcatccggct

SEQ ID NO: 167287 - DNA, 25 bp, Homo sapien
gaaatccatagggaggaatgtgttt

SEQ ID NO: 167288 - DNA, 25 bp, Homo sapien
atccatagggaggaatgtgtttcaa

SEQ ID NO: 167289 - DNA, 25 bp, Homo sapien
taaagaaatccatagggaggaatgt

SEQ ID NO: 167290 - DNA, 25 bp, Homo sapien
tagtaaagaaatccatagggaggaa

SEQ ID NO: 167291 - DNA, 25 bp, Homo sapien
tttgcaccatcaaatacaatggatt

SEQ ID NO: 167292 - DNA, 25 bp, Homo sapien
tgcaccatcaaatacaatggatttg

SEQ ID NO: 167293 - DNA, 25 bp, Homo sapien
ttgcaccatcaaatacaatggattt

SEQ ID NO: 167294 - DNA, 25 bp, Homo sapien
ggatttcgtgagaattccacaaagg

SEQ ID NO: 167295 - DNA, 25 bp, Homo sapien
tgcaggaagggttttaaatctctct

SEQ ID NO: 167296 - DNA, 25 bp, Homo sapien
aaatctctctgttggatttcgtgag

SEQ ID NO: 167297 - DNA, 25 bp, Homo sapien
taattgccatatatactgcaggaag

SEQ ID NO: 167298 - DNA, 25 bp, Homo sapien
gtgttcctgagctttgagacgttca

SEQ ID NO: 167299 - DNA, 25 bp, Homo sapien
aatgaacgctgagttcaagtgaaac

SEQ ID NO: 167300 - DNA, 25 bp, Homo sapien
tgagacgttcatgccttgcaccttc

SEQ ID NO: 167301 - DNA, 25 bp, Homo sapien
ctctgcagaatgaacgctgagttca

SEQ ID NO: 167302 - DNA, 25 bp, Homo sapien
tctgatgtgttaaaggagacttgca

SEQ ID NO: 167303 - DNA, 25 bp, Homo sapien
caatagttagaaggagatctgtaac

SEQ ID NO: 167304 - DNA, 25 bp, Homo sapien
ctctgtgacatcaatagttagaagg

SEQ ID NO: 167305 - DNA, 25 bp, Homo sapien
ggatctaccgtctgcttctggaagt

SEQ ID NO: 167306 - DNA, 25 bp, Homo sapien
ttcatcaatcctgtatccccaaaag

SEQ ID NO: 167307 - DNA, 25 bp, Homo sapien
ccagcgtcagttggttgatttcagc

SEQ ID NO: 167308 - DNA, 25 bp, Homo sapien
tcagcaaaaggtgccagacagacca

SEQ ID NO: 167309 - DNA, 25 bp, Homo sapien
taaaggacttgagctctaaagtagc

SEQ ID NO: 167310 - DNA, 25 bp, Homo sapien
caaaagatgtagatctacatgagac

SEQ ID NO: 167311 - DNA, 25 bp, Homo sapien
aatctccatcaaaagatgtagatct

SEQ ID NO: 167312 - DNA, 25 bp, Homo sapien
catgagacttattgccataatctac

SEQ ID NO: 167313 - DNA, 25 bp, Homo sapien
gtagatctacatgagacttattgcc

SEQ ID NO: 167314 - DNA, 25 bp, Homo sapien
gaggacgtctcttatgttgatggca

SEQ ID NO: 167315 - DNA, 25 bp, Homo sapien
tgagctcggcatagccctgctggat

SEQ ID NO: 167316 - DNA, 25 bp, Homo sapien
tgcttgccacaaacaagagactttg

SEQ ID NO: 167317 - DNA, 25 bp, Homo sapien
gttgatggcatcctggacccctgag

SEQ ID NO: 167318 - DNA, 25 bp, Homo sapien
aaagaggcccttgagaacttcatgg

SEQ ID NO: 167319 - DNA, 25 bp, Homo sapien
aaagctctctaacaaaatccggatg

SEQ ID NO: 167320 - DNA, 25 bp, Homo sapien
ccagtttattggtagaaaagctctc

SEQ ID NO: 167321 - DNA, 25 bp, Homo sapien
gatgagatatttctcgtcgtctttc

SEQ ID NO: 167322 - DNA, 25 bp, Homo sapien
aactatggcactttagttcataagg

SEQ ID NO: 167323 - DNA, 25 bp, Homo sapien
ctgaatttggatattctggtcaaac

SEQ ID NO: 167324 - DNA, 25 bp, Homo sapien
tggcactttagttcataagggttaa

SEQ ID NO: 167325 - DNA, 25 bp, Homo sapien
tattctggtcaaactatggcacttt

SEQ ID NO: 167326 - DNA, 25 bp, Homo sapien
cagcattctctggtgaaggtcttca

SEQ ID NO: 167327 - DNA, 25 bp, Homo sapien
cagtcgcattgatggaaagggaagc

SEQ ID NO: 167328 - DNA, 25 bp, Homo sapien
gagttgatgctctccttctcaatcc

SEQ ID NO: 167329 - DNA, 25 bp, Homo sapien
tcaggggcgtcactgataatgacag

SEQ ID NO: 167330 - DNA, 25 bp, Homo sapien
ctagtagctgaagtcaaggaaaaga

SEQ ID NO: 167331 - DNA, 25 bp, Homo sapien
agaggacaaggaataaacaggatct

SEQ ID NO: 167332 - DNA, 25 bp, Homo sapien
cgggaggccagggatatgaggcatc

SEQ ID NO: 167333 - DNA, 25 bp, Homo sapien
agccgggaggccagggatatgaggc

SEQ ID NO: 167334 - DNA, 25 bp, Homo sapien
agggatatgaggcatcagagaggtt

SEQ ID NO: 167335 - DNA, 25 bp, Homo sapien
atatgaggcatcagagaggtttctc

SEQ ID NO: 167336 - DNA, 25 bp, Homo sapien
ctctatcaccggtgcgaataacatg

SEQ ID NO: 167337 - DNA, 25 bp, Homo sapien
taactctatcaccggtgcgaataac

SEQ ID NO: 167338 - DNA, 25 bp, Homo sapien
actctatcaccggtgcgaataacat

SEQ ID NO: 167339 - DNA, 25 bp, Homo sapien
cttaactctatcaccggtgcgaata

SEQ ID NO: 167340 - DNA, 25 bp, Homo sapien
aaatggaatgttttcagaagagtcc

SEQ ID NO: 167341 - DNA, 25 bp, Homo sapien
taaatggaatgttttcagaagagtc

SEQ ID NO: 167342 - DNA, 25 bp, Homo sapien
ctaaatggaatgttttcagaagagt

SEQ ID NO: 167343 - DNA, 25 bp, Homo sapien
atggaatgttttcagaagagtccat

SEQ ID NO: 167344 - DNA, 25 bp, Homo sapien
acgcaagctccatgtcgtgctcggg

SEQ ID NO: 167345 - DNA, 25 bp, Homo sapien
gaagcccctgtagctggattccacc

SEQ ID NO: 167346 - DNA, 25 bp, Homo sapien
gacgacatcctccacgctgaattga

SEQ ID NO: 167347 - DNA, 25 bp, Homo sapien
tgctcgggcagtatggaagcccctg

SEQ ID NO: 167348 - DNA, 25 bp, Homo sapien
gacacttgcatccatttggtccatc

SEQ ID NO: 167349 - DNA, 25 bp, Homo sapien
gcttctgacgggcaatgtcttgaag

SEQ ID NO: 167350 - DNA, 25 bp, Homo sapien
ttgaagctgcgcaactctctctggc

SEQ ID NO: 167351 - DNA, 25 bp, Homo sapien
acagactagcttgttaatagcagcc

SEQ ID NO: 167352 - DNA, 25 bp, Homo sapien
tgtttaaaggtcaacatttatgcag

SEQ ID NO: 167353 - DNA, 25 bp, Homo sapien
aaagaaatggagtgtgacagatctg

SEQ ID NO: 167354 - DNA, 25 bp, Homo sapien
tttaaatcctatatgcttcccacag

SEQ ID NO: 167355 - DNA, 25 bp, Homo sapien
ttaatctatggcatattcaaaagca

SEQ ID NO: 167356 - DNA, 25 bp, Homo sapien
ctgattccactcgtagggcttttca

SEQ ID NO: 167357 - DNA, 25 bp, Homo sapien
agggcttttcatgccacttgggaac

SEQ ID NO: 167358 - DNA, 25 bp, Homo sapien
cactcgtagggcttttcatgccact

SEQ ID NO: 167359 - DNA, 25 bp, Homo sapien
gattccactcgtagggcttttcatg

SEQ ID NO: 167360 - DNA, 25 bp, Homo sapien
tttgccgggacatcacatagaagac

SEQ ID NO: 167361 - DNA, 25 bp, Homo sapien
gcagtgagttatcctggtgtctgac

SEQ ID NO: 167362 - DNA, 25 bp, Homo sapien
ctcacaggcagtgagttatcctggt

SEQ ID NO: 167363 - DNA, 25 bp, Homo sapien
tctgactctttgccgggacatcaca

SEQ ID NO: 167364 - DNA, 25 bp, Homo sapien
tccaaccgagcctgatggccatggg

SEQ ID NO: 167365 - DNA, 25 bp, Homo sapien
gctctgcacacaatggggccggctg

SEQ ID NO: 167366 - DNA, 25 bp, Homo sapien
cctcagacactccaaccgagcctga

SEQ ID NO: 167367 - DNA, 25 bp, Homo sapien
gagctctgcacacaatggggccggc

SEQ ID NO: 167368 - DNA, 25 bp, Homo sapien
tcaggtgccgagcacaaccagtttg

SEQ ID NO: 167369 - DNA, 25 bp, Homo sapien
cgagcacaaccagtttgtggagctg

SEQ ID NO: 167370 - DNA, 25 bp, Homo sapien
gagctggtagagaaaggtgttcttc

SEQ ID NO: 167371 - DNA, 25 bp, Homo sapien
tcacggtcggcctgctccatgacca

SEQ ID NO: 167372 - DNA, 25 bp, Homo sapien
cccagacacagaggaaagtcagtct

SEQ ID NO: 167373 - DNA, 25 bp, Homo sapien
gaaagtcagtctgcggagggagcct

SEQ ID NO: 167374 - DNA, 25 bp, Homo sapien
cctccacagcttcctgaggggtgtg

SEQ ID NO: 167375 - DNA, 25 bp, Homo sapien
tccacagcttcctgaggggtgtgct

SEQ ID NO: 167376 - DNA, 25 bp, Homo sapien
gaaagaaaaggcctttaggatgcag

SEQ ID NO: 167377 - DNA, 25 bp, Homo sapien
aaaaacaccactctctgactatcac

SEQ ID NO: 167378 - DNA, 25 bp, Homo sapien
gactagagtttccaatccttcccac

SEQ ID NO: 167379 - DNA, 25 bp, Homo sapien
ctagaaaagactagagtttccaatc

SEQ ID NO: 167380 - DNA, 25 bp, Homo sapien
tttatccaaacagacttctttcaga

SEQ ID NO: 167381 - DNA, 25 bp, Homo sapien
ctggaaccttacatctaagattaac

SEQ ID NO: 167382 - DNA, 25 bp, Homo sapien
taacagaacagaatatgtaagcaca

SEQ ID NO: 167383 - DNA, 25 bp, Homo sapien
ctatactactggtttaaatcactgt

SEQ ID NO: 167384 - DNA, 25 bp, Homo sapien
tgtgaaccaagaagtataactcaac

SEQ ID NO: 167385 - DNA, 25 bp, Homo sapien
tatggccatgtaatctgtaatctct

SEQ ID NO: 167386 - DNA, 25 bp, Homo sapien
caacttagtcttataaaaattagat

SEQ ID NO: 167387 - DNA, 25 bp, Homo sapien
acacagataagctatggccatgtaa

SEQ ID NO: 167388 - DNA, 25 bp, Homo sapien
ggtgtgacgccagcaaaaaaccgca

SEQ ID NO: 167389 - DNA, 25 bp, Homo sapien
tctgggaggcattttgcaacacggg

SEQ ID NO: 167390 - DNA, 25 bp, Homo sapien
aaaggagcgtggcaactcaacaggc

SEQ ID NO: 167391 - DNA, 25 bp, Homo sapien
gaagccgatccaactagaaaggagc

SEQ ID NO: 167392 - DNA, 25 bp, Homo sapien
tcaagaacctgcctaaaggccgtag

SEQ ID NO: 167393 - DNA, 25 bp, Homo sapien
cgattattgagatactgcctgtgct

SEQ ID NO: 167394 - DNA, 25 bp, Homo sapien
tcaggaactgggtcatgtacatctt

SEQ ID NO: 167395 - DNA, 25 bp, Homo sapien
tcagtgagtcttaacgtggcatcag

SEQ ID NO: 167396 - DNA, 25 bp, Homo sapien
ttcttcagccgctcaggcgtcgtct

SEQ ID NO: 167397 - DNA, 25 bp, Homo sapien
gttgccctacactgtgagtcttcat

SEQ ID NO: 167398 - DNA, 25 bp, Homo sapien
cgctcaggcgtcgtctgttgcccta

SEQ ID NO: 167399 - DNA, 25 bp, Homo sapien
caggcgtcgtctgttgccctacact

SEQ ID NO: 167400 - DNA, 25 bp, Homo sapien
ccacgggagtggacgggggtgtgca

SEQ ID NO: 167401 - DNA, 25 bp, Homo sapien
cacgggagtggacgggggtgtgcag

SEQ ID NO: 167402 - DNA, 25 bp, Homo sapien
ggagtggacgggggtgtgcagcggg

SEQ ID NO: 167403 - DNA, 25 bp, Homo sapien
cgggagtggacgggggtgtgcagcg

SEQ ID NO: 167404 - DNA, 25 bp, Homo sapien
cgccggtgtagacggccagcagcct

SEQ ID NO: 167405 - DNA, 25 bp, Homo sapien
catgccaatggtgccgccggtgtag

SEQ ID NO: 167406 - DNA, 25 bp, Homo sapien
tccgcatgccaatggtgccgccggt

SEQ ID NO: 167407 - DNA, 25 bp, Homo sapien
gctcactccgcatgccaatggtgcc

SEQ ID NO: 167408 - DNA, 25 bp, Homo sapien
ctcgggcgtgctcctcgtcatggaa

SEQ ID NO: 167409 - DNA, 25 bp, Homo sapien
ctcctcgtcatggaacatgggcagt

SEQ ID NO: 167410 - DNA, 25 bp, Homo sapien
cgggctcgggcgtgctcctcgtcat

SEQ ID NO: 167411 - DNA, 25 bp, Homo sapien
gcgtgctcctcgtcatggaacatgg

SEQ ID NO: 167412 - DNA, 25 bp, Homo sapien
agcaaatggctcacgtgggcctggc

SEQ ID NO: 167413 - DNA, 25 bp, Homo sapien
gctggtcagtcctaaagccctgtaa

SEQ ID NO: 167414 - DNA, 25 bp, Homo sapien
agcagccatgccctgtccgggactg

SEQ ID NO: 167415 - DNA, 25 bp, Homo sapien
ccagctggctcctgatatacaggat

SEQ ID NO: 167416 - DNA, 25 bp, Homo sapien
gacagaaacagcaggaggcggaaca

SEQ ID NO: 167417 - DNA, 25 bp, Homo sapien
atgggccactcccagcagtcttctt

SEQ ID NO: 167418 - DNA, 25 bp, Homo sapien
cagaggcaaggacgtaggtcaggat

SEQ ID NO: 167419 - DNA, 25 bp, Homo sapien
gctctaaatgccctgacccgctctg

SEQ ID NO: 167420 - DNA, 25 bp, Homo sapien
cactcagcgatggtcatgtcactgg

SEQ ID NO: 167421 - DNA, 25 bp, Homo sapien
tgatggtctgggcaaggcaaaccca

SEQ ID NO: 167422 - DNA, 25 bp, Homo sapien
tggcactccagcacggtgtagagaa

SEQ ID NO: 167423 - DNA, 25 bp, Homo sapien
gagaatcctctggttgcggctggcc

SEQ ID NO: 167424 - DNA, 25 bp, Homo sapien
tgtcggtgccgtggatgaccacaaa

SEQ ID NO: 167425 - DNA, 25 bp, Homo sapien
aaaggccatggtgtcggtgccgtgg

SEQ ID NO: 167426 - DNA, 25 bp, Homo sapien
cacaaagccgtggtactgctcgtag

SEQ ID NO: 167427 - DNA, 25 bp, Homo sapien
atgaaggacagcatcgaggcagcaa

SEQ ID NO: 167428 - DNA, 25 bp, Homo sapien
ggccgtcgctccacagggcatggat

SEQ ID NO: 167429 - DNA, 25 bp, Homo sapien
gttctcacggccgtcgctccacagg

SEQ ID NO: 167430 - DNA, 25 bp, Homo sapien
ccgtcgctccacagggcatggatgg

SEQ ID NO: 167431 - DNA, 25 bp, Homo sapien
acggccgtcgctccacagggcatgg

SEQ ID NO: 167432 - DNA, 25 bp, Homo sapien
cggttgccccgaaacagctgattct

SEQ ID NO: 167433 - DNA, 25 bp, Homo sapien
aagctgcgaacctccgagcgtctac

SEQ ID NO: 167434 - DNA, 25 bp, Homo sapien
gcgtctaccttggttgcccggttgc

SEQ ID NO: 167435 - DNA, 25 bp, Homo sapien
tcggggagcagaaagctgcgaacct

SEQ ID NO: 167436 - DNA, 25 bp, Homo sapien
cagggcggcagggatcccagggtag

SEQ ID NO: 167437 - DNA, 25 bp, Homo sapien
gcagggatcccagggtagaggcgca

SEQ ID NO: 167438 - DNA, 25 bp, Homo sapien
cagccttcccgtccaccttccgcac

SEQ ID NO: 167439 - DNA, 25 bp, Homo sapien
agaggcgcagcaggcccacgtcctg

SEQ ID NO: 167440 - DNA, 25 bp, Homo sapien
gcaggatggccggggcggtccctac

SEQ ID NO: 167441 - DNA, 25 bp, Homo sapien
cagctgcatagtctgtggtcacagc

SEQ ID NO: 167442 - DNA, 25 bp, Homo sapien
cagtgggtacagttgacgatgacca

SEQ ID NO: 167443 - DNA, 25 bp, Homo sapien
tgaccacgcccttcaggggaggctg

SEQ ID NO: 167444 - DNA, 25 bp, Homo sapien
gttccctgaaccgaaggtctccatg

SEQ ID NO: 167445 - DNA, 25 bp, Homo sapien
tgtcatgtcgaagcctgagatgacg

SEQ ID NO: 167446 - DNA, 25 bp, Homo sapien
cacatacgatagcttggccagggcg

SEQ ID NO: 167447 - DNA, 25 bp, Homo sapien
ggctggcccagcacatacgatagct

SEQ ID NO: 167448 - DNA, 25 bp, Homo sapien
gccagggcggcctccgatgtcatgt

SEQ ID NO: 167449 - DNA, 25 bp, Homo sapien
gcccacagcccgagagcgcccgcac

SEQ ID NO: 167450 - DNA, 25 bp, Homo sapien
cgagggttgcccacagcccgagagc

SEQ ID NO: 167451 - DNA, 25 bp, Homo sapien
gggttgcccacagcccgagagcgcc

SEQ ID NO: 167452 - DNA, 25 bp, Homo sapien
tgcccacagcccgagagcgcccgca

SEQ ID NO: 167453 - DNA, 25 bp, Homo sapien
atgcagtctgagaaggcacaaggac

SEQ ID NO: 167454 - DNA, 25 bp, Homo sapien
acagttaggggagcctcaggtctcc

SEQ ID NO: 167455 - DNA, 25 bp, Homo sapien
agtctgagaaggcacaaggacaggc

SEQ ID NO: 167456 - DNA, 25 bp, Homo sapien
agaggatttcctggcgacagttagg

SEQ ID NO: 167457 - DNA, 25 bp, Homo sapien
gaggctggcaacccaagggtctggg

SEQ ID NO: 167458 - DNA, 25 bp, Homo sapien
ccagaggctggcaacccaagggtct

SEQ ID NO: 167459 - DNA, 25 bp, Homo sapien
agaggctggcaacccaagggtctgg

SEQ ID NO: 167460 - DNA, 25 bp, Homo sapien
cagaggctggcaacccaagggtctg

SEQ ID NO: 167461 - DNA, 25 bp, Homo sapien
ccccccgaaggtccttggtcagcag

SEQ ID NO: 167462 - DNA, 25 bp, Homo sapien
caggagaccccaccgcccagcgtgt

SEQ ID NO: 167463 - DNA, 25 bp, Homo sapien
tgagggccggcgctcttccaccgag

SEQ ID NO: 167464 - DNA, 25 bp, Homo sapien
ttccaccgagggtggcgtcatctcc

SEQ ID NO: 167465 - DNA, 25 bp, Homo sapien
gcaccagggcattccgcagggcatc

SEQ ID NO: 167466 - DNA, 25 bp, Homo sapien
gggcattccgcagggcatctgcctc

SEQ ID NO: 167467 - DNA, 25 bp, Homo sapien
tccacgtcaccggcgtgggcagcag

SEQ ID NO: 167468 - DNA, 25 bp, Homo sapien
agcgcctccacgtcaccggcgtggg

SEQ ID NO: 167469 - DNA, 25 bp, Homo sapien
tccgtgtcccgggtgttcacgtcca

SEQ ID NO: 167470 - DNA, 25 bp, Homo sapien
cgggcggccgcgtgcagtggggttt

SEQ ID NO: 167471 - DNA, 25 bp, Homo sapien
cccgggcggccgcgtgcagtggggt

SEQ ID NO: 167472 - DNA, 25 bp, Homo sapien
gtgtcccgggtgttcacgtccacac

SEQ ID NO: 167473 - DNA, 25 bp, Homo sapien
gcagcaacccaatgacacccggatg

SEQ ID NO: 167474 - DNA, 25 bp, Homo sapien
ggcttcccgcagcaacccaatgaca

SEQ ID NO: 167475 - DNA, 25 bp, Homo sapien
gggaggccccggcttcccgcagcaa

SEQ ID NO: 167476 - DNA, 25 bp, Homo sapien
cacagctccgtccctgcttcctcca

SEQ ID NO: 167477 - DNA, 25 bp, Homo sapien
agggcgctgtgcccgtcatagcccg

SEQ ID NO: 167478 - DNA, 25 bp, Homo sapien
ggccttcgaggtcggccctgtatgc

SEQ ID NO: 167479 - DNA, 25 bp, Homo sapien
ctgcaggccttcgaggtcggccctg

SEQ ID NO: 167480 - DNA, 25 bp, Homo sapien
gctgtgcccgtcatagcccggctgc

SEQ ID NO: 167481 - DNA, 25 bp, Homo sapien
agagcagtgagctggtgaattgtcc

SEQ ID NO: 167482 - DNA, 25 bp, Homo sapien
ccaccactcagagccccgggaaggg

SEQ ID NO: 167483 - DNA, 25 bp, Homo sapien
tgactagcagcctggcccaaggatc

SEQ ID NO: 167484 - DNA, 25 bp, Homo sapien
gacccagtctgtgcgggtcctgcat

SEQ ID NO: 167485 - DNA, 25 bp, Homo sapien
aaggccaccactgccaggttcccgg

SEQ ID NO: 167486 - DNA, 25 bp, Homo sapien
ctccaggctctgtagaaaggccacc

SEQ ID NO: 167487 - DNA, 25 bp, Homo sapien
ccaggctctgtagaaaggccaccac

SEQ ID NO: 167488 - DNA, 25 bp, Homo sapien
accactgccaggttcccggctgcct

SEQ ID NO: 167489 - DNA, 25 bp, Homo sapien
tgggcatggggcctgggcaccaacc

SEQ ID NO: 167490 - DNA, 25 bp, Homo sapien
catggggcctgggcaccaaccgcac

SEQ ID NO: 167491 - DNA, 25 bp, Homo sapien
gggcatggggcctgggcaccaaccg

SEQ ID NO: 167492 - DNA, 25 bp, Homo sapien
gcatggggcctgggcaccaaccgca

SEQ ID NO: 167493 - DNA, 25 bp, Homo sapien
tcacctctaaactgtgttccaccct

SEQ ID NO: 167494 - DNA, 25 bp, Homo sapien
cagaccctaaactggctgggaccca

SEQ ID NO: 167495 - DNA, 25 bp, Homo sapien
caggatccagccctgcactagaagc

SEQ ID NO: 167496 - DNA, 25 bp, Homo sapien
agccctgcactagaagctcactggg

SEQ ID NO: 167497 - DNA, 25 bp, Homo sapien
aaggcagggcagagagacaagccca

SEQ ID NO: 167498 - DNA, 25 bp, Homo sapien
cctgggagacaagcggaagcaccca

SEQ ID NO: 167499 - DNA, 25 bp, Homo sapien
gagcaaacccagcttgagactatgg

SEQ ID NO: 167500 - DNA, 25 bp, Homo sapien
gcacagcccaagagcctgagcaaac

SEQ ID NO: 167501 - DNA, 25 bp, Homo sapien
aggaaggaatggcttatactgcagc

SEQ ID NO: 167502 - DNA, 25 bp, Homo sapien
gctttacatgagagcaggctgggaa

SEQ ID NO: 167503 - DNA, 25 bp, Homo sapien
tcaggctttacatgagagcaggctg

SEQ ID NO: 167504 - DNA, 25 bp, Homo sapien
tatactgcagcaggacgccttcagg

SEQ ID NO: 167505 - DNA, 25 bp, Homo sapien
ggatgtcagagactttattgccgtc

SEQ ID NO: 167506 - DNA, 25 bp, Homo sapien
cacagtcccggacccagacagagcc

SEQ ID NO: 167507 - DNA, 25 bp, Homo sapien
tccacagtcccggacccagacagag

SEQ ID NO: 167508 - DNA, 25 bp, Homo sapien
acagtcccggacccagacagagcct

SEQ ID NO: 167509 - DNA, 25 bp, Homo sapien
ccacagtcccggacccagacagagc

SEQ ID NO: 167510 - DNA, 25 bp, Homo sapien
caccagagtgtgaagcccccttgac

SEQ ID NO: 167511 - DNA, 25 bp, Homo sapien
ttgacactcacaggcttccgcagcc

SEQ ID NO: 167512 - DNA, 25 bp, Homo sapien
cttccgcagccctatggagccctgg

SEQ ID NO: 167513 - DNA, 25 bp, Homo sapien
ccccttgacactcacaggcttccgc

SEQ ID NO: 167514 - DNA, 25 bp, Homo sapien
gcttgggaaccaggctgaggagcct

SEQ ID NO: 167515 - DNA, 25 bp, Homo sapien
agctctggggtcatgcttttgccct

SEQ ID NO: 167516 - DNA, 25 bp, Homo sapien
ggccagccaaacagagggacaaaag

SEQ ID NO: 167517 - DNA, 25 bp, Homo sapien
agcaaggatgccagcggcagtacca

SEQ ID NO: 167518 - DNA, 25 bp, Homo sapien
agcaagagacaaggcggccctgatt

SEQ ID NO: 167519 - DNA, 25 bp, Homo sapien
tctgccctgtgccaacgcagagccc

SEQ ID NO: 167520 - DNA, 25 bp, Homo sapien
ttaccaggtgtgagcggcgccaccc

SEQ ID NO: 167521 - DNA, 25 bp, Homo sapien
caacgcagagccctgggcgcaggac

SEQ ID NO: 167522 - DNA, 25 bp, Homo sapien
gctcccgtgtccagcatccaaggga

SEQ ID NO: 167523 - DNA, 25 bp, Homo sapien
caagtacaagcacctgcagttccca

SEQ ID NO: 167524 - DNA, 25 bp, Homo sapien
taattctaagttctggtctagccca

SEQ ID NO: 167525 - DNA, 25 bp, Homo sapien
tccagcatccaagggaactgacgag

SEQ ID NO: 167526 - DNA, 25 bp, Homo sapien
aacatttcacaattgcgctacagaa

SEQ ID NO: 167527 - DNA, 25 bp, Homo sapien
gcgcccgccgggtctagtggtccta

SEQ ID NO: 167528 - DNA, 25 bp, Homo sapien
cgccgggtctagtggtcctaaacat

SEQ ID NO: 167529 - DNA, 25 bp, Homo sapien
ttgcgctacagaactgttgaactgt

SEQ ID NO: 167530 - DNA, 25 bp, Homo sapien
agttcctgtgcctcgaggtccttca

SEQ ID NO: 167531 - DNA, 25 bp, Homo sapien
agcgctccctaaggcctcagtgagt

SEQ ID NO: 167532 - DNA, 25 bp, Homo sapien
gtttagcgcgcactcgtaggagccg

SEQ ID NO: 167533 - DNA, 25 bp, Homo sapien
ctgggtgtagtctgcaaacttcctc

SEQ ID NO: 167534 - DNA, 25 bp, Homo sapien
tgagggcccatgcagagggcacggg

SEQ ID NO: 167535 - DNA, 25 bp, Homo sapien
gggaacgtgcttgtaaaatgaaatg

SEQ ID NO: 167536 - DNA, 25 bp, Homo sapien
actggccagtggtggatgctctccc

SEQ ID NO: 167537 - DNA, 25 bp, Homo sapien
tgagaggtggccacaatggcatttg

SEQ ID NO: 167538 - DNA, 25 bp, Homo sapien
taaggatacagtgggcttgaacaac

SEQ ID NO: 167539 - DNA, 25 bp, Homo sapien
gttgacatttgtagaacagtgcccc

SEQ ID NO: 167540 - DNA, 25 bp, Homo sapien
ggagactttaacagtcctctctcag

SEQ ID NO: 167541 - DNA, 25 bp, Homo sapien
tattcaccatataacagaggtccag

SEQ ID NO: 167542 - DNA, 25 bp, Homo sapien
agtagacatggagtttcaccgtgtc

SEQ ID NO: 167543 - DNA, 25 bp, Homo sapien
gtagacatggagtttcaccgtgtca

SEQ ID NO: 167544 - DNA, 25 bp, Homo sapien
tagacatggagtttcaccgtgtcag

SEQ ID NO: 167545 - DNA, 25 bp, Homo sapien
tagtagacatggagtttcaccgtgt

SEQ ID NO: 167546 - DNA, 25 bp, Homo sapien
aagcccaggatgatctccgagtcca

SEQ ID NO: 167547 - DNA, 25 bp, Homo sapien
cttgcctcgtcgccgcaggaggtgg

SEQ ID NO: 167548 - DNA, 25 bp, Homo sapien
ggctgggagccttgcggggcgcgcc

SEQ ID NO: 167549 - DNA, 25 bp, Homo sapien
gtgaagcccaggatgatctccgagt

SEQ ID NO: 167550 - DNA, 25 bp, Homo sapien
gcagcgcacagagggacgccgcggc

SEQ ID NO: 167551 - DNA, 25 bp, Homo sapien
tttcggggggacacctccagcagcg

SEQ ID NO: 167552 - DNA, 25 bp, Homo sapien
ctttcggggggacacctccagcagc

SEQ ID NO: 167553 - DNA, 25 bp, Homo sapien
gcggctcgcgggccgggccgccctc

SEQ ID NO: 167554 - DNA, 25 bp, Homo sapien
tcgcgggccgggccgccctcggcca

SEQ ID NO: 167555 - DNA, 25 bp, Homo sapien
cgggagcagggcggctgccgcatgg

SEQ ID NO: 167556 - DNA, 25 bp, Homo sapien
gagcagggcggctgccgcatgggtc

SEQ ID NO: 167557 - DNA, 25 bp, Homo sapien
cttcgggagcagggcggctgccgca

SEQ ID NO: 167558 - DNA, 25 bp, Homo sapien
ggagcagggcggctgccgcatgggt

SEQ ID NO: 167559 - DNA, 25 bp, Homo sapien
ccagcttccacgcctgtcgcttgag

SEQ ID NO: 167560 - DNA, 25 bp, Homo sapien
gggcccgctgaccagcttccacgcc

SEQ ID NO: 167561 - DNA, 25 bp, Homo sapien
agcttccacgcctgtcgcttgagct

SEQ ID NO: 167562 - DNA, 25 bp, Homo sapien
gtggtcccgggcccgctgaccagct

SEQ ID NO: 167563 - DNA, 25 bp, Homo sapien
cgtggcggtctccacgtgagctcca

SEQ ID NO: 167564 - DNA, 25 bp, Homo sapien
tgccccgtggcggtctccacgtgag

SEQ ID NO: 167565 - DNA, 25 bp, Homo sapien
ctggcctgccccgtggcggtctcca

SEQ ID NO: 167566 - DNA, 25 bp, Homo sapien
tggcggtctccacgtgagctccagc

SEQ ID NO: 167567 - DNA, 25 bp, Homo sapien
cgcaagagccgcaggatcgggtaca

SEQ ID NO: 167568 - DNA, 25 bp, Homo sapien
caggatcgggtacagcccagggccc

SEQ ID NO: 167569 - DNA, 25 bp, Homo sapien
cacccaggtctgagctgtacgctgg

SEQ ID NO: 167570 - DNA, 25 bp, Homo sapien
ccacccaggtctgagctgtacgctg

SEQ ID NO: 167571 - DNA, 25 bp, Homo sapien
aatgtccttgttaactgtccacctt

SEQ ID NO: 167572 - DNA, 25 bp, Homo sapien
catccgtaacagattaataagccca

SEQ ID NO: 167573 - DNA, 25 bp, Homo sapien
tcatcgtgaggctcacaatgtcctt

SEQ ID NO: 167574 - DNA, 25 bp, Homo sapien
gcaggaaaataatgatcgggcttca

SEQ ID NO: 167575 - DNA, 25 bp, Homo sapien
ccaggtgctggtagcttgtcgagaa

SEQ ID NO: 167576 - DNA, 25 bp, Homo sapien
tgtccctcgagctggtcgtggtgct

SEQ ID NO: 167577 - DNA, 25 bp, Homo sapien
caggtgctacagacacctggacact

SEQ ID NO: 167578 - DNA, 25 bp, Homo sapien
cctggatggtgaccgtgctcagcgc

SEQ ID NO: 167579 - DNA, 25 bp, Homo sapien
aggagtccggcacgcgcctcggctc

SEQ ID NO: 167580 - DNA, 25 bp, Homo sapien
gcctcggctccaccgtcccacgcgc

SEQ ID NO: 167581 - DNA, 25 bp, Homo sapien
actgccaattcctgccggaagcaga

SEQ ID NO: 167582 - DNA, 25 bp, Homo sapien
catccgccgggacggccactgccaa

SEQ ID NO: 167583 - DNA, 25 bp, Homo sapien
ccaacccatggccggtaccagcttc

SEQ ID NO: 167584 - DNA, 25 bp, Homo sapien
tgcccaacccatggccggtaccagc

SEQ ID NO: 167585 - DNA, 25 bp, Homo sapien
caacccatggccggtaccagcttcc

SEQ ID NO: 167586 - DNA, 25 bp, Homo sapien
cccaacccatggccggtaccagctt

SEQ ID NO: 167587 - DNA, 25 bp, Homo sapien
atcagggccggccacgggggggcat

SEQ ID NO: 167588 - DNA, 25 bp, Homo sapien
gaccgtgtctgccaccgccacggcc

SEQ ID NO: 167589 - DNA, 25 bp, Homo sapien
ggggggcattctcggaccgtgtctg

SEQ ID NO: 167590 - DNA, 25 bp, Homo sapien
ggcattctcggaccgtgtctgccac

SEQ ID NO: 167591 - DNA, 25 bp, Homo sapien
agctgaggggcctgtggagcccccc

SEQ ID NO: 167592 - DNA, 25 bp, Homo sapien
tgcagctgaggggcctgtggagccc

SEQ ID NO: 167593 - DNA, 25 bp, Homo sapien
gaggctgcagctgaggggcctgtgg

SEQ ID NO: 167594 - DNA, 25 bp, Homo sapien
cttatgaagaaggaggctgcagctg

SEQ ID NO: 167595 - DNA, 25 bp, Homo sapien
ggtccccagcccgatgcgctggttt

SEQ ID NO: 167596 - DNA, 25 bp, Homo sapien
gacccagggtgcctaacaggctgga

SEQ ID NO: 167597 - DNA, 25 bp, Homo sapien
gctggaagtaatggcagccggcagc

SEQ ID NO: 167598 - DNA, 25 bp, Homo sapien
gccttgggagaaccgcctctgggtc

SEQ ID NO: 167599 - DNA, 25 bp, Homo sapien
aacactgccagggagcggcggccct

SEQ ID NO: 167600 - DNA, 25 bp, Homo sapien
gccagggagcggcggccctcagtgg

SEQ ID NO: 167601 - DNA, 25 bp, Homo sapien
ccaacactgccagggagcggcggcc

SEQ ID NO: 167602 - DNA, 25 bp, Homo sapien
ctgccagggagcggcggccctcagt

SEQ ID NO: 167603 - DNA, 25 bp, Homo sapien
ggtatgactcaaagacctgccactg

SEQ ID NO: 167604 - DNA, 25 bp, Homo sapien
ttcaacagcccttgagggcccacgg

SEQ ID NO: 167605 - DNA, 25 bp, Homo sapien
catctggctaccacgcttgggttca

SEQ ID NO: 167606 - DNA, 25 bp, Homo sapien
tggaaacgaccatcagacacagcag

SEQ ID NO: 167607 - DNA, 25 bp, Homo sapien
gacaggatggaggccgacacactcg

SEQ ID NO: 167608 - DNA, 25 bp, Homo sapien
aggatggaggccgacacactcgccc

SEQ ID NO: 167609 - DNA, 25 bp, Homo sapien
actcgcccacgctgtctgtgtgtct

SEQ ID NO: 167610 - DNA, 25 bp, Homo sapien
gtgcgtctgtccacagggcaagaag

SEQ ID NO: 167611 - DNA, 25 bp, Homo sapien
gcccacagctggcacggtattgggt

SEQ ID NO: 167612 - DNA, 25 bp, Homo sapien
tattgggtaaatgctggcgatgccg

SEQ ID NO: 167613 - DNA, 25 bp, Homo sapien
ggttcgtgaccctctggtagctgag

SEQ ID NO: 167614 - DNA, 25 bp, Homo sapien
aggttcgtgaccctctggtagctga

SEQ ID NO: 167615 - DNA, 25 bp, Homo sapien
agggacggctttcctcctagtgagg

SEQ ID NO: 167616 - DNA, 25 bp, Homo sapien
tctcttaagagaccccagggacggc

SEQ ID NO: 167617 - DNA, 25 bp, Homo sapien
cagcgctggcgttttgcttaatttc

SEQ ID NO: 167618 - DNA, 25 bp, Homo sapien
aggtgtcatcgtggaaagtaaaagt

SEQ ID NO: 167619 - DNA, 25 bp, Homo sapien
taggtggaggtgccgcgggtggctg

SEQ ID NO: 167620 - DNA, 25 bp, Homo sapien
gcaggaccccgctgaagtcggtggg

SEQ ID NO: 167621 - DNA, 25 bp, Homo sapien
ctgcaggaccccgctgaagtcggtg

SEQ ID NO: 167622 - DNA, 25 bp, Homo sapien
agctgcaggaccccgctgaagtcgg

SEQ ID NO: 167623 - DNA, 25 bp, Homo sapien
tgcgtcttctcagacgcctctggcc

SEQ ID NO: 167624 - DNA, 25 bp, Homo sapien
ggccccgaactcggggctgcgtcta

SEQ ID NO: 167625 - DNA, 25 bp, Homo sapien
cgtcttctcagacgcctctggcctc

SEQ ID NO: 167626 - DNA, 25 bp, Homo sapien
tcctgcgtcttctcagacgcctctg

SEQ ID NO: 167627 - DNA, 25 bp, Homo sapien
cctgggggaagacggcatcgaaggc

SEQ ID NO: 167628 - DNA, 25 bp, Homo sapien
gcggcgggatcgtagaggatcacct

SEQ ID NO: 167629 - DNA, 25 bp, Homo sapien
cctgtgcgggccagatccgcagcat

SEQ ID NO: 167630 - DNA, 25 bp, Homo sapien
tcaggaaggacatggcctcggccga

SEQ ID NO: 167631 - DNA, 25 bp, Homo sapien
gccacacggtgcacggctcagcatg

SEQ ID NO: 167632 - DNA, 25 bp, Homo sapien
gggcggatggagacacccaaggacg

SEQ ID NO: 167633 - DNA, 25 bp, Homo sapien
gtggacttggcccagagcctcggca

SEQ ID NO: 167634 - DNA, 25 bp, Homo sapien
gggcagaccaccacgcgcagagaga

SEQ ID NO: 167635 - DNA, 25 bp, Homo sapien
atcagccccactgaccaccgactgg

SEQ ID NO: 167636 - DNA, 25 bp, Homo sapien
tgaccaccgactggagcacgtcggc

SEQ ID NO: 167637 - DNA, 25 bp, Homo sapien
gccacggtccccgagcagacttcgg

SEQ ID NO: 167638 - DNA, 25 bp, Homo sapien
acgtcggccacggtccccgagcaga

SEQ ID NO: 167639 - DNA, 25 bp, Homo sapien
ggtacactcccggagactgggtgtc

SEQ ID NO: 167640 - DNA, 25 bp, Homo sapien
gctcctcgatgagcctgaagagcca

SEQ ID NO: 167641 - DNA, 25 bp, Homo sapien
acggagaagcgggtgcccgtcctct

SEQ ID NO: 167642 - DNA, 25 bp, Homo sapien
ttcccgatcatggtgtacgacttgc

SEQ ID NO: 167643 - DNA, 25 bp, Homo sapien
tactggtagacgtgcagcgtgaaca

SEQ ID NO: 167644 - DNA, 25 bp, Homo sapien
agcgtgaacaacatgtgggagctgc

SEQ ID NO: 167645 - DNA, 25 bp, Homo sapien
ggccgcacttctccatgcggtactg

SEQ ID NO: 167646 - DNA, 25 bp, Homo sapien
tccaggtagaaagccgccttctcgg

SEQ ID NO: 167647 - DNA, 25 bp, Homo sapien
tgcttggctccgttgaccagggcca

SEQ ID NO: 167648 - DNA, 25 bp, Homo sapien
gcacatgcttggctccgttgaccag

SEQ ID NO: 167649 - DNA, 25 bp, Homo sapien
ttggctccgttgaccagggccaaga

SEQ ID NO: 167650 - DNA, 25 bp, Homo sapien
cgatacggcacatgcttggctccgt

SEQ ID NO: 167651 - DNA, 25 bp, Homo sapien
tgggcgatcatggtggtgcggcagc

SEQ ID NO: 167652 - DNA, 25 bp, Homo sapien
ctggcgcatccgacacgtgggcgat

SEQ ID NO: 167653 - DNA, 25 bp, Homo sapien
gcgcaggcggtggatgcgggcggcg

SEQ ID NO: 167654 - DNA, 25 bp, Homo sapien
tctctgcgtgctgggctggcgcatc

SEQ ID NO: 167655 - DNA, 25 bp, Homo sapien
ggtgtaggcgtcaaactcatcattg

SEQ ID NO: 167656 - DNA, 25 bp, Homo sapien
actgtcgaagctagccaggctggtg

SEQ ID NO: 167657 - DNA, 25 bp, Homo sapien
aagtcaggcggaccttcgttgtcgg

SEQ ID NO: 167658 - DNA, 25 bp, Homo sapien
ccagacaatggccttgcagggctca

SEQ ID NO: 167659 - DNA, 25 bp, Homo sapien
ccccagggaaccatccagggcaggg

SEQ ID NO: 167660 - DNA, 25 bp, Homo sapien
tggcccaggactgtcaggtctgtct

SEQ ID NO: 167661 - DNA, 25 bp, Homo sapien
ctgcggatgcccaccgcgagggccc

SEQ ID NO: 167662 - DNA, 25 bp, Homo sapien
tcaagccctgccagcgagtcggggc

SEQ ID NO: 167663 - DNA, 25 bp, Homo sapien
ggcagaggcagtcctcggtttccgg

SEQ ID NO: 167664 - DNA, 25 bp, Homo sapien
cagaggcagtcctcggtttccgggg

SEQ ID NO: 167665 - DNA, 25 bp, Homo sapien
gcagaggcagtcctcggtttccggg

SEQ ID NO: 167666 - DNA, 25 bp, Homo sapien
gcagaagctgcctgggtatcacact

SEQ ID NO: 167667 - DNA, 25 bp, Homo sapien
ctgctttgtgcccatgacggtaccc

SEQ ID NO: 167668 - DNA, 25 bp, Homo sapien
aggccgtagacagcttcaccgaagg

SEQ ID NO: 167669 - DNA, 25 bp, Homo sapien
ttcgtaccgctccagagacgcgtgt

SEQ ID NO: 167670 - DNA, 25 bp, Homo sapien
tgccatggccgctgctgtagcgctg

SEQ ID NO: 167671 - DNA, 25 bp, Homo sapien
gctgtcgcgccgcaggctctcatag

SEQ ID NO: 167672 - DNA, 25 bp, Homo sapien
tggctgacagctcatggacgcggct

SEQ ID NO: 167673 - DNA, 25 bp, Homo sapien
tgtcatggccgctgtctgagtccgc

SEQ ID NO: 167674 - DNA, 25 bp, Homo sapien
tgtggccctcttcttgggggacttg

SEQ ID NO: 167675 - DNA, 25 bp, Homo sapien
gggacttgaggctgcgggtgcgggc

SEQ ID NO: 167676 - DNA, 25 bp, Homo sapien
gaggctgcgggtgcgggcgcctggg

SEQ ID NO: 167677 - DNA, 25 bp, Homo sapien
gggaggcagccccactctcgctcat

SEQ ID NO: 167678 - DNA, 25 bp, Homo sapien
gaacggctccttcagggagccagcc

SEQ ID NO: 167679 - DNA, 25 bp, Homo sapien
acgtcatcgatctcgtacaccttga

SEQ ID NO: 167680 - DNA, 25 bp, Homo sapien
ccttgatctcgaacggctccttcag

SEQ ID NO: 167681 - DNA, 25 bp, Homo sapien
gaggctgggcttacggcccagggca

SEQ ID NO: 167682 - DNA, 25 bp, Homo sapien
ccagccgcagccttgtactgacgca

SEQ ID NO: 167683 - DNA, 25 bp, Homo sapien
gcagccttgtactgacgcacgccag

SEQ ID NO: 167684 - DNA, 25 bp, Homo sapien
agccttgtactgacgcacgccagac

SEQ ID NO: 167685 - DNA, 25 bp, Homo sapien
agccgcagccttgtactgacgcacg

SEQ ID NO: 167686 - DNA, 25 bp, Homo sapien
aggctccagcatcagccggccctgg

SEQ ID NO: 167687 - DNA, 25 bp, Homo sapien
agcatcagccggccctgggtctcgg

SEQ ID NO: 167688 - DNA, 25 bp, Homo sapien
agccagcggccaggctccagcatca

SEQ ID NO: 167689 - DNA, 25 bp, Homo sapien
ctgggtctcggccagctcctcacac

SEQ ID NO: 167690 - DNA, 25 bp, Homo sapien
ttgcacaggttcacgcactgctcca

SEQ ID NO: 167691 - DNA, 25 bp, Homo sapien
cactggctgcaacgctgatgtcgaa

SEQ ID NO: 167692 - DNA, 25 bp, Homo sapien
agggccgccaggtactcggccgact

SEQ ID NO: 167693 - DNA, 25 bp, Homo sapien
gaagcaggtgaccatcatgacgtgc

SEQ ID NO: 167694 - DNA, 25 bp, Homo sapien
tgcatttggcaagaagcgcctccca

SEQ ID NO: 167695 - DNA, 25 bp, Homo sapien
gatggatctgcgttgagaaccccac

SEQ ID NO: 167696 - DNA, 25 bp, Homo sapien
tcctgccgtggaagaggcaacctgt

SEQ ID NO: 167697 - DNA, 25 bp, Homo sapien
gctctgccgagaggaaaccattgta

SEQ ID NO: 167698 - DNA, 25 bp, Homo sapien
tatgctatgcacgatcctcagaaag

SEQ ID NO: 167699 - DNA, 25 bp, Homo sapien
caagatgtcatctacacatttgtac

SEQ ID NO: 167700 - DNA, 25 bp, Homo sapien
cagaaagtatgagcctgtcgtgcgg

SEQ ID NO: 167701 - DNA, 25 bp, Homo sapien
tttgtacaaaggttcagacgtccta

SEQ ID NO: 167702 - DNA, 25 bp, Homo sapien
tgccgacgcccagtgaactcggcag

SEQ ID NO: 167703 - DNA, 25 bp, Homo sapien
cgcccagtgaactcggcagccgtgg

SEQ ID NO: 167704 - DNA, 25 bp, Homo sapien
cgacgcccagtgaactcggcagccg

SEQ ID NO: 167705 - DNA, 25 bp, Homo sapien
ctgccgacgcccagtgaactcggca

SEQ ID NO: 167706 - DNA, 25 bp, Homo sapien
atgtgtccttcccacgcttactgcc

SEQ ID NO: 167707 - DNA, 25 bp, Homo sapien
tgggtccccgtggatgtgtccttcc

SEQ ID NO: 167708 - DNA, 25 bp, Homo sapien
ggtccccgtggatgtgtccttccca

SEQ ID NO: 167709 - DNA, 25 bp, Homo sapien
acgcttactgcccgtcaccccaggg

SEQ ID NO: 167710 - DNA, 25 bp, Homo sapien
gaggctctctgcagacggctcagag

SEQ ID NO: 167711 - DNA, 25 bp, Homo sapien
tggccacacgaaggactgtgtctgt

SEQ ID NO: 167712 - DNA, 25 bp, Homo sapien
tattccttcttcagccagtgtctcc

SEQ ID NO: 167713 - DNA, 25 bp, Homo sapien
accgcagccggagcctctttaaggg

SEQ ID NO: 167714 - DNA, 25 bp, Homo sapien
catggccatcgctatgggttgcact

SEQ ID NO: 167715 - DNA, 25 bp, Homo sapien
ccatggccatcgctatgggttgcac

SEQ ID NO: 167716 - DNA, 25 bp, Homo sapien
tccccatggccatcgctatgggttg

SEQ ID NO: 167717 - DNA, 25 bp, Homo sapien
tggccatcgctatgggttgcacttg

SEQ ID NO: 167718 - DNA, 25 bp, Homo sapien
ggcaggggcctcctcggattcccag

SEQ ID NO: 167719 - DNA, 25 bp, Homo sapien
caccgtccatttcacggtagccggg

SEQ ID NO: 167720 - DNA, 25 bp, Homo sapien
agagcccagagcaccgtccatttca

SEQ ID NO: 167721 - DNA, 25 bp, Homo sapien
ctcggattcccagggaaccagggtg

SEQ ID NO: 167722 - DNA, 25 bp, Homo sapien
ctcagccagcccgttgggtaaagct

SEQ ID NO: 167723 - DNA, 25 bp, Homo sapien
cgttgggtaaagctaacaggagcct

SEQ ID NO: 167724 - DNA, 25 bp, Homo sapien
tgggtaaagctaacaggagccttct

SEQ ID NO: 167725 - DNA, 25 bp, Homo sapien
cagcccgttgggtaaagctaacagg

SEQ ID NO: 167726 - DNA, 25 bp, Homo sapien
ggcagataccagagaaacgatggaa

SEQ ID NO: 167727 - DNA, 25 bp, Homo sapien
gggcagataccagagaaacgatgga

SEQ ID NO: 167728 - DNA, 25 bp, Homo sapien
catggggcagataccagagaaacga

SEQ ID NO: 167729 - DNA, 25 bp, Homo sapien
tggggcagataccagagaaacgatg

SEQ ID NO: 167730 - DNA, 25 bp, Homo sapien
ttgatgccccggttccggaagagga

SEQ ID NO: 167731 - DNA, 25 bp, Homo sapien
tgatgccccggttccggaagaggat

SEQ ID NO: 167732 - DNA, 25 bp, Homo sapien
cctggaccagccctgagagcttgag

SEQ ID NO: 167733 - DNA, 25 bp, Homo sapien
tgtccttggccgcacgagaactctg

SEQ ID NO: 167734 - DNA, 25 bp, Homo sapien
cgcacgagaactctgcacagggtct

SEQ ID NO: 167735 - DNA, 25 bp, Homo sapien
tcgctgtggcccggtccgctagcag

SEQ ID NO: 167736 - DNA, 25 bp, Homo sapien
tggcccggtccgctagcaggagggt

SEQ ID NO: 167737 - DNA, 25 bp, Homo sapien
tgtttggtccggaggactatgccat

SEQ ID NO: 167738 - DNA, 25 bp, Homo sapien
ggcaggtctgcataacggatgcttg

SEQ ID NO: 167739 - DNA, 25 bp, Homo sapien
ctgaaaagcgtgtcctcatcgaatg

SEQ ID NO: 167740 - DNA, 25 bp, Homo sapien
ctgcataacggatgcttgttcctgc

SEQ ID NO: 167741 - DNA, 25 bp, Homo sapien
cagagtcctgtatcggcggcacgtg

SEQ ID NO: 167742 - DNA, 25 bp, Homo sapien
gggtgctccacaccttgtctctggc

SEQ ID NO: 167743 - DNA, 25 bp, Homo sapien
cctgcagagtcctgtatcggcggca

SEQ ID NO: 167744 - DNA, 25 bp, Homo sapien
tcggcggcacgtggactgaggcaga

SEQ ID NO: 167745 - DNA, 25 bp, Homo sapien
agagaactccccactacgacagaga

SEQ ID NO: 167746 - DNA, 25 bp, Homo sapien
gaactccccactacgacagagagct

SEQ ID NO: 167747 - DNA, 25 bp, Homo sapien
ctgatggcagcttcaatgcaccaaa

SEQ ID NO: 167748 - DNA, 25 bp, Homo sapien
caaactgcatcgtcctggctactct

SEQ ID NO: 167749 - DNA, 25 bp, Homo sapien
cagaaagccctcgacactcacaagt

SEQ ID NO: 167750 - DNA, 25 bp, Homo sapien
gccctcgacactcacaagtcagggt

SEQ ID NO: 167751 - DNA, 25 bp, Homo sapien
gctgatctcgcctctctagtcccag

SEQ ID NO: 167752 - DNA, 25 bp, Homo sapien
gaaagccctcgacactcacaagtca

SEQ ID NO: 167753 - DNA, 25 bp, Homo sapien
actgagtggtcaccattggatggat

SEQ ID NO: 167754 - DNA, 25 bp, Homo sapien
ccattggatggatggcgaaactgag

SEQ ID NO: 167755 - DNA, 25 bp, Homo sapien
tggtcaccattggatggatggcgaa

SEQ ID NO: 167756 - DNA, 25 bp, Homo sapien
cccctgatggtccactccccagggc

SEQ ID NO: 167757 - DNA, 25 bp, Homo sapien
gtgtcccggctctggtgctgtcgca

SEQ ID NO: 167758 - DNA, 25 bp, Homo sapien
tgtcccggctctggtgctgtcgcag

SEQ ID NO: 167759 - DNA, 25 bp, Homo sapien
cccggctctggtgctgtcgcagctc

SEQ ID NO: 167760 - DNA, 25 bp, Homo sapien
tcccggctctggtgctgtcgcagct

SEQ ID NO: 167761 - DNA, 25 bp, Homo sapien
ctctggtggtgtcccggctctgctg

SEQ ID NO: 167762 - DNA, 25 bp, Homo sapien
tcacggctctggtggtgtcccggct

SEQ ID NO: 167763 - DNA, 25 bp, Homo sapien
gctctggtggtctcgcagctctggt

SEQ ID NO: 167764 - DNA, 25 bp, Homo sapien
tcgcggctctgctggtgtcgcagct

SEQ ID NO: 167765 - DNA, 25 bp, Homo sapien
gtgtcacggctctggtggtctcgca

SEQ ID NO: 167766 - DNA, 25 bp, Homo sapien
gctctggtggtgtcccggctctgct

SEQ ID NO: 167767 - DNA, 25 bp, Homo sapien
gcagctctggtggtgtcccggctct

SEQ ID NO: 167768 - DNA, 25 bp, Homo sapien
tgtcacggctctggtggtctcgcag

SEQ ID NO: 167769 - DNA, 25 bp, Homo sapien
ctcagcgagggccgggacagtgaca

SEQ ID NO: 167770 - DNA, 25 bp, Homo sapien
ccagctcagccagcgtgctcttcac

SEQ ID NO: 167771 - DNA, 25 bp, Homo sapien
atttcctcctcgcactgaggtctga

SEQ ID NO: 167772 - DNA, 25 bp, Homo sapien
tgaggtctgagaacgggaagaggct

SEQ ID NO: 167773 - DNA, 25 bp, Homo sapien
gaaagttcagggacaatcaccccca

SEQ ID NO: 167774 - DNA, 25 bp, Homo sapien
ccagagcctaaatccagccctgagc

SEQ ID NO: 167775 - DNA, 25 bp, Homo sapien
ggagtcacagcctcgagcatggctt

SEQ ID NO: 167776 - DNA, 25 bp, Homo sapien
tggcttcggtcttcaagaaacaccc

SEQ ID NO: 167777 - DNA, 25 bp, Homo sapien
gccaggagcccgaagtcatttttct

SEQ ID NO: 167778 - DNA, 25 bp, Homo sapien
tggaagcttccaacaggctcgcgtt

SEQ ID NO: 167779 - DNA, 25 bp, Homo sapien
tctcccaagcacacgcagagaagtg

SEQ ID NO: 167780 - DNA, 25 bp, Homo sapien
tctcatgctgagaactgcagcgcct

SEQ ID NO: 167781 - DNA, 25 bp, Homo sapien
gaagaggcgcacatctcatgacctg

SEQ ID NO: 167782 - DNA, 25 bp, Homo sapien
gccaattcagataccacccaagtgt

SEQ ID NO: 167783 - DNA, 25 bp, Homo sapien
gaccctaggacaagtgggcacatgg

SEQ ID NO: 167784 - DNA, 25 bp, Homo sapien
gttcacagtagcatgggccactcag

SEQ ID NO: 167785 - DNA, 25 bp, Homo sapien
tttaaagaactttgcagcctcagga

SEQ ID NO: 167786 - DNA, 25 bp, Homo sapien
aagtaaatcagtccttgtgtgggcc

SEQ ID NO: 167787 - DNA, 25 bp, Homo sapien
tcagcatggcattagggacaacaga

SEQ ID NO: 167788 - DNA, 25 bp, Homo sapien
ttccagacaggtagtgccccactag

SEQ ID NO: 167789 - DNA, 25 bp, Homo sapien
tgttgggcagcagtactattgagag

SEQ ID NO: 167790 - DNA, 25 bp, Homo sapien
cttgagaagtgcaggagatgtgttc

SEQ ID NO: 167791 - DNA, 25 bp, Homo sapien
gccctggctggttgttatgctttcc

SEQ ID NO: 167792 - DNA, 25 bp, Homo sapien
aggagccagccgtaaccagctgtct

SEQ ID NO: 167793 - DNA, 25 bp, Homo sapien
tttgctgagcagctacggagcccaa

SEQ ID NO: 167794 - DNA, 25 bp, Homo sapien
agcagctacggagcccaaactgcag

SEQ ID NO: 167795 - DNA, 25 bp, Homo sapien
cagctgaggagccttgcttctggac

SEQ ID NO: 167796 - DNA, 25 bp, Homo sapien
ttgcttctggacctgctgacatttg

SEQ ID NO: 167797 - DNA, 25 bp, Homo sapien
tgaactgggaagcaccctctatggg

SEQ ID NO: 167798 - DNA, 25 bp, Homo sapien
ggtaacaggctctatcttggcacag

SEQ ID NO: 167799 - DNA, 25 bp, Homo sapien
cactaaacgtgaatgtcccagggcc

SEQ ID NO: 167800 - DNA, 25 bp, Homo sapien
aaagggcgccaagtgtcagtgacca

SEQ ID NO: 167801 - DNA, 25 bp, Homo sapien
gcccgtctgtagaatagaagcacaa

SEQ ID NO: 167802 - DNA, 25 bp, Homo sapien
actcctcctagtgatgtaatggtgc

SEQ ID NO: 167803 - DNA, 25 bp, Homo sapien
gcacaaggctggaagacattgtaca

SEQ ID NO: 167804 - DNA, 25 bp, Homo sapien
tccctggctggtaggtggtacaact

SEQ ID NO: 167805 - DNA, 25 bp, Homo sapien
tgacttccaactgtacagtgcccgg

SEQ ID NO: 167806 - DNA, 25 bp, Homo sapien
caaataggtcttgcgttagaactga

SEQ ID NO: 167807 - DNA, 25 bp, Homo sapien
gccagggacaccctagcacggttta

SEQ ID NO: 167808 - DNA, 25 bp, Homo sapien
taaggatagttacacacggccacac

SEQ ID NO: 167809 - DNA, 25 bp, Homo sapien
ccaggccggccagacccacaagatg

SEQ ID NO: 167810 - DNA, 25 bp, Homo sapien
gagtcgtgactatcactacgaagga

SEQ ID NO: 167811 - DNA, 25 bp, Homo sapien
aagcggaagcggaagcggaggtttg

SEQ ID NO: 167812 - DNA, 25 bp, Homo sapien
aaacgtgcatctgcaatcaggagtc

SEQ ID NO: 167813 - DNA, 25 bp, Homo sapien
aatgtggtagcctgttctttggagc

SEQ ID NO: 167814 - DNA, 25 bp, Homo sapien
ggagcaggaaacttctaaccggaga

SEQ ID NO: 167815 - DNA, 25 bp, Homo sapien
gtaatttacacatcgcagctccctt

SEQ ID NO: 167816 - DNA, 25 bp, Homo sapien
gctctggaagccaaaacatggatca

SEQ ID NO: 167817 - DNA, 25 bp, Homo sapien
ttgaaatgatacatgagaggccctc

SEQ ID NO: 167818 - DNA, 25 bp, Homo sapien
tcaactgagtggacgccctggagcg

SEQ ID NO: 167819 - DNA, 25 bp, Homo sapien
ttcaactgagtggacgccctggagc

SEQ ID NO: 167820 - DNA, 25 bp, Homo sapien
tgcacccggtgagcccttctccaca

SEQ ID NO: 167821 - DNA, 25 bp, Homo sapien
cacggggaggcctctatagctgttg

SEQ ID NO: 167822 - DNA, 25 bp, Homo sapien
ggaggcctctatagctgttgtcttc

SEQ ID NO: 167823 - DNA, 25 bp, Homo sapien
ctgcacccggtgagcccttctccac

SEQ ID NO: 167824 - DNA, 25 bp, Homo sapien
gggcccgaggattcgtctccacttg

SEQ ID NO: 167825 - DNA, 25 bp, Homo sapien
cgtgccttccttcactcggttcttt

SEQ ID NO: 167826 - DNA, 25 bp, Homo sapien
cgaggattcgtctccacttgcagga

SEQ ID NO: 167827 - DNA, 25 bp, Homo sapien
actcggttctttctcctcgttagca

SEQ ID NO: 167828 - DNA, 25 bp, Homo sapien
gtttttccttggactcttcaaggca

SEQ ID NO: 167829 - DNA, 25 bp, Homo sapien
ttggactcttcaaggcagacaggac

SEQ ID NO: 167830 - DNA, 25 bp, Homo sapien
ttgcccacccggcagatgggtcctc

SEQ ID NO: 167831 - DNA, 25 bp, Homo sapien
gcaagaggggacgtgggactgcgtg

SEQ ID NO: 167832 - DNA, 25 bp, Homo sapien
cagagcacatgtgtgtcggcagcag

SEQ ID NO: 167833 - DNA, 25 bp, Homo sapien
gacgttcgctcagggttgactgcac

SEQ ID NO: 167834 - DNA, 25 bp, Homo sapien
gctgctcgggatagaaaatgaggct

SEQ ID NO: 167835 - DNA, 25 bp, Homo sapien
tgggcccgtctcacagagcgaggct

SEQ ID NO: 167836 - DNA, 25 bp, Homo sapien
gcaggggacggccagttgccaccag

SEQ ID NO: 167837 - DNA, 25 bp, Homo sapien
cagttgccaccagctccacttgggg

SEQ ID NO: 167838 - DNA, 25 bp, Homo sapien
aggggacggccagttgccaccagct

SEQ ID NO: 167839 - DNA, 25 bp, Homo sapien
ggacggccagttgccaccagctcca

SEQ ID NO: 167840 - DNA, 25 bp, Homo sapien
tcccgcagggcgctcgttcattctt

SEQ ID NO: 167841 - DNA, 25 bp, Homo sapien
cgctcgttcattctttggtgcatcc

SEQ ID NO: 167842 - DNA, 25 bp, Homo sapien
cagaccggcctgaggacctgcgatg

SEQ ID NO: 167843 - DNA, 25 bp, Homo sapien
tgcgatgactcagccaccacggtct

SEQ ID NO: 167844 - DNA, 25 bp, Homo sapien
cctgcccctaagagtgaaggtgagc

SEQ ID NO: 167845 - DNA, 25 bp, Homo sapien
gaggctttggccgaagcatcctgcc

SEQ ID NO: 167846 - DNA, 25 bp, Homo sapien
tggtgacctcagcacccatgtgacc

SEQ ID NO: 167847 - DNA, 25 bp, Homo sapien
tgccacttggcgtctccaacacaag

SEQ ID NO: 167848 - DNA, 25 bp, Homo sapien
gctcacctcacagcaagggtcgaaa

SEQ ID NO: 167849 - DNA, 25 bp, Homo sapien
caagggtcgaaagtcaccgagccca

SEQ ID NO: 167850 - DNA, 25 bp, Homo sapien
tcacagcaagggtcgaaagtcaccg

SEQ ID NO: 167851 - DNA, 25 bp, Homo sapien
acctcacagcaagggtcgaaagtca

SEQ ID NO: 167852 - DNA, 25 bp, Homo sapien
tgtgcctgcgttgtctcggcattgg

SEQ ID NO: 167853 - DNA, 25 bp, Homo sapien
ggaccttggttcgtctaacttctga

SEQ ID NO: 167854 - DNA, 25 bp, Homo sapien
cgttgtctcggcattggagctggtt

SEQ ID NO: 167855 - DNA, 25 bp, Homo sapien
gccatccctgacgttcggaccttgg

SEQ ID NO: 167856 - DNA, 25 bp, Homo sapien
tctttgggatatagagctacgcttc

SEQ ID NO: 167857 - DNA, 25 bp, Homo sapien
tagagctacgcttctttgggatata

SEQ ID NO: 167858 - DNA, 25 bp, Homo sapien
ggcagatgctgccaatcaactttcc

SEQ ID NO: 167859 - DNA, 25 bp, Homo sapien
cagccaagggggacttctttgggat

SEQ ID NO: 167860 - DNA, 25 bp, Homo sapien
cagagagcttccgggcaagggggct

SEQ ID NO: 167861 - DNA, 25 bp, Homo sapien
gagagcttccgggcaagggggctgc

SEQ ID NO: 167862 - DNA, 25 bp, Homo sapien
gacagagagcttccgggcaaggggg

SEQ ID NO: 167863 - DNA, 25 bp, Homo sapien
gaagacagagagcttccgggcaagg

SEQ ID NO: 167864 - DNA, 25 bp, Homo sapien
tctcccagttggcatcagggcaggc

SEQ ID NO: 167865 - DNA, 25 bp, Homo sapien
gacttcatctcccagttggcatcag

SEQ ID NO: 167866 - DNA, 25 bp, Homo sapien
tgtgacttcatctcccagttggcat

SEQ ID NO: 167867 - DNA, 25 bp, Homo sapien
ttcatctcccagttggcatcagggc

SEQ ID NO: 167868 - DNA, 25 bp, Homo sapien
gggtgggctgcagcgtggaaacccg

SEQ ID NO: 167869 - DNA, 25 bp, Homo sapien
gcagcgtggaaacccgctcgccgat

SEQ ID NO: 167870 - DNA, 25 bp, Homo sapien
gagggacagatgggcggccgccggg

SEQ ID NO: 167871 - DNA, 25 bp, Homo sapien
gctcgccgatactcccttggttccg

SEQ ID NO: 167872 - DNA, 25 bp, Homo sapien
actgtcccccaagatgggataagac

SEQ ID NO: 167873 - DNA, 25 bp, Homo sapien
tgtcccccaagatgggataagacca

SEQ ID NO: 167874 - DNA, 25 bp, Homo sapien
ctaactgtcccccaagatgggataa

SEQ ID NO: 167875 - DNA, 25 bp, Homo sapien
caagatgggataagaccagcggtgg

SEQ ID NO: 167876 - DNA, 25 bp, Homo sapien
cgtccttgggaaccgcaggtggtgc

SEQ ID NO: 167877 - DNA, 25 bp, Homo sapien
aactggggcccggagtgctcctcca

SEQ ID NO: 167878 - DNA, 25 bp, Homo sapien
tccttgggaaccgcaggtggtgcca

SEQ ID NO: 167879 - DNA, 25 bp, Homo sapien
ctgggtccagggcggtgaactgggg

SEQ ID NO: 167880 - DNA, 25 bp, Homo sapien
gaccttctgcccaatcgatgattga

SEQ ID NO: 167881 - DNA, 25 bp, Homo sapien
tctggaagaacacttagtcctggac

SEQ ID NO: 167882 - DNA, 25 bp, Homo sapien
gcagatttcttgctcaggccaccca

SEQ ID NO: 167883 - DNA, 25 bp, Homo sapien
gacactgaagctatccccactcgtg

SEQ ID NO: 167884 - DNA, 25 bp, Homo sapien
ttagcagccgtgagacttctgtcag

SEQ ID NO: 167885 - DNA, 25 bp, Homo sapien
tagcagccgtgagacttctgtcagc

SEQ ID NO: 167886 - DNA, 25 bp, Homo sapien
attagcagccgtgagacttctgtca

SEQ ID NO: 167887 - DNA, 25 bp, Homo sapien
gcagccgtgagacttctgtcagcat

SEQ ID NO: 167888 - DNA, 25 bp, Homo sapien
gattccatttgccagccgggagagg

SEQ ID NO: 167889 - DNA, 25 bp, Homo sapien
gattccgggttcattgatagcagcg

SEQ ID NO: 167890 - DNA, 25 bp, Homo sapien
aagcccgtgagctcgatagcatcca

SEQ ID NO: 167891 - DNA, 25 bp, Homo sapien
caaattgtggataatgcgccctgca

SEQ ID NO: 167892 - DNA, 25 bp, Homo sapien
ggatactgccggaagagcccttgcc

SEQ ID NO: 167893 - DNA, 25 bp, Homo sapien
cttccacggctagttccatcctgtc

SEQ ID NO: 167894 - DNA, 25 bp, Homo sapien
atccaccttccacggctagttccat

SEQ ID NO: 167895 - DNA, 25 bp, Homo sapien
ccgtgcggatactgccggaagagcc

SEQ ID NO: 167896 - DNA, 25 bp, Homo sapien
tcacccctgggcattctatggacac

SEQ ID NO: 167897 - DNA, 25 bp, Homo sapien
aggggctcaggacagctcgtcaccc

SEQ ID NO: 167898 - DNA, 25 bp, Homo sapien
ggcattctatggacacgtcctccgg

SEQ ID NO: 167899 - DNA, 25 bp, Homo sapien
ggcctcgcctgggttgcgtgctcct

SEQ ID NO: 167900 - DNA, 25 bp, Homo sapien
tggactccgtggtgggcagggtgta

SEQ ID NO: 167901 - DNA, 25 bp, Homo sapien
ccgtggtgggcagggtgtatgggac

SEQ ID NO: 167902 - DNA, 25 bp, Homo sapien
ctccgtggtgggcagggtgtatggg

SEQ ID NO: 167903 - DNA, 25 bp, Homo sapien
ctctggactccgtggtgggcagggt

SEQ ID NO: 167904 - DNA, 25 bp, Homo sapien
ttcaggttgccgtggttgttgagaa

SEQ ID NO: 167905 - DNA, 25 bp, Homo sapien
cctcggtggtggcctgggtcacctt

SEQ ID NO: 167906 - DNA, 25 bp, Homo sapien
cttccagggctcggtcaagggggat

SEQ ID NO: 167907 - DNA, 25 bp, Homo sapien
gttgcatcaggactgctgggcacca

SEQ ID NO: 167908 - DNA, 25 bp, Homo sapien
ctcgacccctaggcccccgctggca

SEQ ID NO: 167909 - DNA, 25 bp, Homo sapien
acccctaggcccccgctggcagcct

SEQ ID NO: 167910 - DNA, 25 bp, Homo sapien
ctaggcccccgctggcagcctcgtc

SEQ ID NO: 167911 - DNA, 25 bp, Homo sapien
tcgacccctaggcccccgctggcag

SEQ ID NO: 167912 - DNA, 25 bp, Homo sapien
gagatctgcacaggaagtggctctg

SEQ ID NO: 167913 - DNA, 25 bp, Homo sapien
agggtgggctcgagcatcttctcca

SEQ ID NO: 167914 - DNA, 25 bp, Homo sapien
gataagggtgaattctgcatgcgct

SEQ ID NO: 167915 - DNA, 25 bp, Homo sapien
ttcaagttctcgcaggaacagggac

SEQ ID NO: 167916 - DNA, 25 bp, Homo sapien
caataggtcttaaaaccgctttcat

SEQ ID NO: 167917 - DNA, 25 bp, Homo sapien
tcaataggtcttaaaaccgctttca

SEQ ID NO: 167918 - DNA, 25 bp, Homo sapien
cagggcaggctgataactgctcctc

SEQ ID NO: 167919 - DNA, 25 bp, Homo sapien
gggcaggctgataactgctcctccc

SEQ ID NO: 167920 - DNA, 25 bp, Homo sapien
tgcctgcagttgctgacatttagcc

SEQ ID NO: 167921 - DNA, 25 bp, Homo sapien
tcagggcaggctgataactgctcct

SEQ ID NO: 167922 - DNA, 25 bp, Homo sapien
cttagcagctcatgtctccagggca

SEQ ID NO: 167923 - DNA, 25 bp, Homo sapien
ttagcagctcatgtctccagggcac

SEQ ID NO: 167924 - DNA, 25 bp, Homo sapien
cagctgacaccccacggtggctgct

SEQ ID NO: 167925 - DNA, 25 bp, Homo sapien
agaaggtgaccccggccagctgaca

SEQ ID NO: 167926 - DNA, 25 bp, Homo sapien
accccacggtggctgctctgcgatg

SEQ ID NO: 167927 - DNA, 25 bp, Homo sapien
gaaatggccaaacactgagaaggtg

SEQ ID NO: 167928 - DNA, 25 bp, Homo sapien
aaaagagaacacactctctgcaggg

SEQ ID NO: 167929 - DNA, 25 bp, Homo sapien
ttgggccccccagttacagagctcc

SEQ ID NO: 167930 - DNA, 25 bp, Homo sapien
ccccagttgcagagctgcagaatgg

SEQ ID NO: 167931 - DNA, 25 bp, Homo sapien
tgcagaatggcagaattgggccccc

SEQ ID NO: 167932 - DNA, 25 bp, Homo sapien
atctcccatctgcacgcctctcggc

SEQ ID NO: 167933 - DNA, 25 bp, Homo sapien
gggtggtgcacgagtgaccctcaac

SEQ ID NO: 167934 - DNA, 25 bp, Homo sapien
gcctctcggccggagcttcctgtgc

SEQ ID NO: 167935 - DNA, 25 bp, Homo sapien
gtgcacgagtgaccctcaacttcca

SEQ ID NO: 167936 - DNA, 25 bp, Homo sapien
ggatgctgctgaacaaacccgaggg

SEQ ID NO: 167937 - DNA, 25 bp, Homo sapien
cactcgatgtgaaaggtccaggctg

SEQ ID NO: 167938 - DNA, 25 bp, Homo sapien
gacgcgatgggcttctggtgaactc

SEQ ID NO: 167939 - DNA, 25 bp, Homo sapien
tgggtctgaaatccccgctctgagc

SEQ ID NO: 167940 - DNA, 25 bp, Homo sapien
cagggaaggcccatgcagtgggggt

SEQ ID NO: 167941 - DNA, 25 bp, Homo sapien
tgatgttcagggaaggcccatgcag

SEQ ID NO: 167942 - DNA, 25 bp, Homo sapien
ttcagggaaggcccatgcagtgggg

SEQ ID NO: 167943 - DNA, 25 bp, Homo sapien
atgttcagggaaggcccatgcagtg

SEQ ID NO: 167944 - DNA, 25 bp, Homo sapien
ccacaatccggatgttgctgttatc

SEQ ID NO: 167945 - DNA, 25 bp, Homo sapien
catggccacaatccggatgttgctg

SEQ ID NO: 167946 - DNA, 25 bp, Homo sapien
tccatggccacaatccggatgttgc

SEQ ID NO: 167947 - DNA, 25 bp, Homo sapien
agctccatggccacaatccggatgt

SEQ ID NO: 167948 - DNA, 25 bp, Homo sapien
tctgggtctcttgtccagtgatggc

SEQ ID NO: 167949 - DNA, 25 bp, Homo sapien
gctctgggtctcttgtccagtgatg

SEQ ID NO: 167950 - DNA, 25 bp, Homo sapien
gggctctgggtctcttgtccagtga

SEQ ID NO: 167951 - DNA, 25 bp, Homo sapien
tgggtctcttgtccagtgatggcct

SEQ ID NO: 167952 - DNA, 25 bp, Homo sapien
tgctcccgagaagcttggaaatctg

SEQ ID NO: 167953 - DNA, 25 bp, Homo sapien
agggtgctcccgagaagcttggaaa

SEQ ID NO: 167954 - DNA, 25 bp, Homo sapien
catttggtgttagcatgtgaaataa

SEQ ID NO: 167955 - DNA, 25 bp, Homo sapien
tcaaatatctggctctcatttggtg

SEQ ID NO: 167956 - DNA, 25 bp, Homo sapien
agggactcggtcttgatggttcccg

SEQ ID NO: 167957 - DNA, 25 bp, Homo sapien
tgggccatcagtacagccaggaaag

SEQ ID NO: 167958 - DNA, 25 bp, Homo sapien
ctccagagggactcggtcttgatgg

SEQ ID NO: 167959 - DNA, 25 bp, Homo sapien
ttgggccatcagtacagccaggaaa

SEQ ID NO: 167960 - DNA, 25 bp, Homo sapien
tgtgtacagcccgtgtctgttccaa

SEQ ID NO: 167961 - DNA, 25 bp, Homo sapien
accagctcggtccttctcatggcca

SEQ ID NO: 167962 - DNA, 25 bp, Homo sapien
ttgtcacctggtcattcacagcctc

SEQ ID NO: 167963 - DNA, 25 bp, Homo sapien
tgtctgttccaacgagccttgccac

SEQ ID NO: 167964 - DNA, 25 bp, Homo sapien
ctgcacacctggactggatagggac

SEQ ID NO: 167965 - DNA, 25 bp, Homo sapien
cagaggatgggtgggccgtgggata

SEQ ID NO: 167966 - DNA, 25 bp, Homo sapien
atagggaccttgactggataaggga

SEQ ID NO: 167967 - DNA, 25 bp, Homo sapien
gataggctgtaattttgaccccgac

SEQ ID NO: 167968 - DNA, 25 bp, Homo sapien
gcagaagttctttgggcagttccag

SEQ ID NO: 167969 - DNA, 25 bp, Homo sapien
gacagagccttcaatcgacatttca

SEQ ID NO: 167970 - DNA, 25 bp, Homo sapien
gacatcaaaaccgattccccacgag

SEQ ID NO: 167971 - DNA, 25 bp, Homo sapien
ttatggacgggtttattgcaaagta

SEQ ID NO: 167972 - DNA, 25 bp, Homo sapien
tcatccgtggaggatgccaagagga

SEQ ID NO: 167973 - DNA, 25 bp, Homo sapien
tgtcagcagctgtgggcgtccctgc

SEQ ID NO: 167974 - DNA, 25 bp, Homo sapien
cctttgctgatgtggcttccgcaga

SEQ ID NO: 167975 - DNA, 25 bp, Homo sapien
gcagagagacgccttctccaccagg

SEQ ID NO: 167976 - DNA, 25 bp, Homo sapien
gtctgttggtgtgtcctggaatggt

SEQ ID NO: 167977 - DNA, 25 bp, Homo sapien
ctcttggtggcccactcctcacaag

SEQ ID NO: 167978 - DNA, 25 bp, Homo sapien
caagcctgggacatcagacccttgg

SEQ ID NO: 167979 - DNA, 25 bp, Homo sapien
acagggtctgttggtgtgtcctgga

SEQ ID NO: 167980 - DNA, 25 bp, Homo sapien
cgggcaggttggcggtcccggctgt

SEQ ID NO: 167981 - DNA, 25 bp, Homo sapien
cacccaggaggcaccggtgcctgga

SEQ ID NO: 167982 - DNA, 25 bp, Homo sapien
caggttggcggtcccggctgtcgtg

SEQ ID NO: 167983 - DNA, 25 bp, Homo sapien
gctcgggtcgggcaggttggcggtc

SEQ ID NO: 167984 - DNA, 25 bp, Homo sapien
ccggggccggtgtgctccagctctg

SEQ ID NO: 167985 - DNA, 25 bp, Homo sapien
ggcccggggccggtgtgctccagct

SEQ ID NO: 167986 - DNA, 25 bp, Homo sapien
gagcccgtacctgtgactgtctgag

SEQ ID NO: 167987 - DNA, 25 bp, Homo sapien
tcgctcacaccttgtacaccggtgg

SEQ ID NO: 167988 - DNA, 25 bp, Homo sapien
actgtctgagcacctgctcgctcac

SEQ ID NO: 167989 - DNA, 25 bp, Homo sapien
tacaccggtggtgagtcagagaccc

SEQ ID NO: 167990 - DNA, 25 bp, Homo sapien
tccctgttgccgcctggagccctcc

SEQ ID NO: 167991 - DNA, 25 bp, Homo sapien
atctttccaccgtgtcaggagcagc

SEQ ID NO: 167992 - DNA, 25 bp, Homo sapien
gatctttccaccgtgtcaggagcag

SEQ ID NO: 167993 - DNA, 25 bp, Homo sapien
cctgatctttccaccgtgtcaggag

SEQ ID NO: 167994 - DNA, 25 bp, Homo sapien
gggcacacaggtgaacgggccaggc

SEQ ID NO: 167995 - DNA, 25 bp, Homo sapien
tccttcccgagggctctgatctgga

SEQ ID NO: 167996 - DNA, 25 bp, Homo sapien
ctctgatctggaggcgccaccgccc

SEQ ID NO: 167997 - DNA, 25 bp, Homo sapien
gccgggtctgttgtggccttcgtcc

SEQ ID NO: 167998 - DNA, 25 bp, Homo sapien
tgaggtcctggaccctcttggccgg

SEQ ID NO: 167999 - DNA, 25 bp, Homo sapien
agaaacaggctcttcgggatctccc

SEQ ID NO: 168000 - DNA, 25 bp, Homo sapien
ccctcccaggcccttgagagttgag

SEQ ID NO: 168001 - DNA, 25 bp, Homo sapien
ccttgagagttgagcctcgggcaga

SEQ ID NO: 168002 - DNA, 25 bp, Homo sapien
ctgggaaaagccttggctcccagcc

SEQ ID NO: 168003 - DNA, 25 bp, Homo sapien
ccagcccaacgctcaccactggaac

SEQ ID NO: 168004 - DNA, 25 bp, Homo sapien
ctgggctcctgggaaaagccttggc

SEQ ID NO: 168005 - DNA, 25 bp, Homo sapien
agggcggaggcagaacacagccagg

SEQ ID NO: 168006 - DNA, 25 bp, Homo sapien
caggttgtgccttcttccggtggaa

SEQ ID NO: 168007 - DNA, 25 bp, Homo sapien
gccttcttccggtggaagaagactg

SEQ ID NO: 168008 - DNA, 25 bp, Homo sapien
cagatgcaggttgtgccttcttccg

SEQ ID NO: 168009 - DNA, 25 bp, Homo sapien
gatgcaggttgtgccttcttccggt

SEQ ID NO: 168010 - DNA, 25 bp, Homo sapien
ccagcaccttagtagtttggccaca

SEQ ID NO: 168011 - DNA, 25 bp, Homo sapien
cctcgctgtcgcagggtgtgaacca

SEQ ID NO: 168012 - DNA, 25 bp, Homo sapien
tgttgcggctcacaaccagctgaga

SEQ ID NO: 168013 - DNA, 25 bp, Homo sapien
ctgagaagtttccattacggcgaca

SEQ ID NO: 168014 - DNA, 25 bp, Homo sapien
ccacgcggcctcctcattctttctg

SEQ ID NO: 168015 - DNA, 25 bp, Homo sapien
gagtcagggctcacggctcctgctg

SEQ ID NO: 168016 - DNA, 25 bp, Homo sapien
cctcattctttctggtctgacgtcg

SEQ ID NO: 168017 - DNA, 25 bp, Homo sapien
acgtcgtgtctctggccgggagtca

SEQ ID NO: 168018 - DNA, 25 bp, Homo sapien
aggccgctggtacccaggtctgagc

SEQ ID NO: 168019 - DNA, 25 bp, Homo sapien
ggggcccagcagcaccgtcctggaa

SEQ ID NO: 168020 - DNA, 25 bp, Homo sapien
agactggtgagtccccggcgggagg

SEQ ID NO: 168021 - DNA, 25 bp, Homo sapien
ctggaacctgtaccctgtcctggct

SEQ ID NO: 168022 - DNA, 25 bp, Homo sapien
ccggccggctccgtttcaggatgga

SEQ ID NO: 168023 - DNA, 25 bp, Homo sapien
ctccggccggctccgtttcaggatg

SEQ ID NO: 168024 - DNA, 25 bp, Homo sapien
ctctgggcggtggtgctccggccgg

SEQ ID NO: 168025 - DNA, 25 bp, Homo sapien
gcctctgggcggtggtgctccggcc

SEQ ID NO: 168026 - DNA, 25 bp, Homo sapien
tgggggttctcggaaccacacgcgc

SEQ ID NO: 168027 - DNA, 25 bp, Homo sapien
gctgggggttctcggaaccacacgc

SEQ ID NO: 168028 - DNA, 25 bp, Homo sapien
tggacggtcaccgctgggggttctc

SEQ ID NO: 168029 - DNA, 25 bp, Homo sapien
cgctgggggttctcggaaccacacg

SEQ ID NO: 168030 - DNA, 25 bp, Homo sapien
gacagtggctgtggcgttcttgtca

SEQ ID NO: 168031 - DNA, 25 bp, Homo sapien
ccctgacagtggctgtggcgttctt

SEQ ID NO: 168032 - DNA, 25 bp, Homo sapien
ggctgtggcgttcttgtcagcaatg

SEQ ID NO: 168033 - DNA, 25 bp, Homo sapien
agtggctgtggcgttcttgtcagca

SEQ ID NO: 168034 - DNA, 25 bp, Homo sapien
ggtgcaggacaaggccgaggagccg

SEQ ID NO: 168035 - DNA, 25 bp, Homo sapien
agggagccgccgtgtggcctgggcc

SEQ ID NO: 168036 - DNA, 25 bp, Homo sapien
ttggcccggccgcagtataggccca

SEQ ID NO: 168037 - DNA, 25 bp, Homo sapien
tccagtgccgttgccacgggcttgg

SEQ ID NO: 168038 - DNA, 25 bp, Homo sapien
agccgcaggaggccgcgccagcagg

SEQ ID NO: 168039 - DNA, 25 bp, Homo sapien
gccgcaggaggccgcgccagcaggt

SEQ ID NO: 168040 - DNA, 25 bp, Homo sapien
agagccgcaggaggccgcgccagca

SEQ ID NO: 168041 - DNA, 25 bp, Homo sapien
gagccgcaggaggccgcgccagcag

SEQ ID NO: 168042 - DNA, 25 bp, Homo sapien
tcctcaagagggtgcacacggtgat

SEQ ID NO: 168043 - DNA, 25 bp, Homo sapien
gccataatcgcaaaaggctgggttt

SEQ ID NO: 168044 - DNA, 25 bp, Homo sapien
ttttcctagttagccctcaggcagc

SEQ ID NO: 168045 - DNA, 25 bp, Homo sapien
ggagcctcaactgttagcagtcgaa

SEQ ID NO: 168046 - DNA, 25 bp, Homo sapien
cacagatggctgttctgaaggtcgg

SEQ ID NO: 168047 - DNA, 25 bp, Homo sapien
gtcccctcggcttctacacctgaag

SEQ ID NO: 168048 - DNA, 25 bp, Homo sapien
acaaagccacaaccacagacggtct

SEQ ID NO: 168049 - DNA, 25 bp, Homo sapien
ttcagctctgcaatccggcgacaaa

SEQ ID NO: 168050 - DNA, 25 bp, Homo sapien
gttctgcctggtgtctaaccgtggg

SEQ ID NO: 168051 - DNA, 25 bp, Homo sapien
tcaggctaacctcgaggacgctggt

SEQ ID NO: 168052 - DNA, 25 bp, Homo sapien
gaggacgctggtctgattgtccctg

SEQ ID NO: 168053 - DNA, 25 bp, Homo sapien
taagtggtgggacaaacaggaacca

SEQ ID NO: 168054 - DNA, 25 bp, Homo sapien
gtttctctcatttctataaaaacac

SEQ ID NO: 168055 - DNA, 25 bp, Homo sapien
ctctcatttctataaaaacaccaag

SEQ ID NO: 168056 - DNA, 25 bp, Homo sapien
ctcatttctataaaaacaccaagac

SEQ ID NO: 168057 - DNA, 25 bp, Homo sapien
ttctctcatttctataaaaacacca

SEQ ID NO: 168058 - DNA, 25 bp, Homo sapien
tcagcgccttcgtggtcttcctggt

SEQ ID NO: 168059 - DNA, 25 bp, Homo sapien
catgtggtgcgacaccatcaccgag

SEQ ID NO: 168060 - DNA, 25 bp, Homo sapien
tcattgccagcaccatcgtgagcgt

SEQ ID NO: 168061 - DNA, 25 bp, Homo sapien
accatcgtgagcgtgggcttcacca

SEQ ID NO: 168062 - DNA, 25 bp, Homo sapien
gtggctgagcgccaacctcacggtg

SEQ ID NO: 168063 - DNA, 25 bp, Homo sapien
acgcctggcgcacgctcttcttcct

SEQ ID NO: 168064 - DNA, 25 bp, Homo sapien
aacctcacggtgcaggagcgcgagc

SEQ ID NO: 168065 - DNA, 25 bp, Homo sapien
gagcgcttcacggtgcaggagtggg

SEQ ID NO: 168066 - DNA, 25 bp, Homo sapien
gatgtcttaatgaggcgctcgggac

SEQ ID NO: 168067 - DNA, 25 bp, Homo sapien
taaaccaggaggagcaatgttaagg

SEQ ID NO: 168068 - DNA, 25 bp, Homo sapien
tgttaaggcttcctcactctgggaa

SEQ ID NO: 168069 - DNA, 25 bp, Homo sapien
tctgggaattggactaaaggtgact

SEQ ID NO: 168070 - DNA, 25 bp, Homo sapien
ttgaagtggtcacccctggtagtgt

SEQ ID NO: 168071 - DNA, 25 bp, Homo sapien
tatgtgtaggcagggaataatctcc

SEQ ID NO: 168072 - DNA, 25 bp, Homo sapien
taatggagtcttatgcagttattaa

SEQ ID NO: 168073 - DNA, 25 bp, Homo sapien
tgtgtgtgcttatgtgcttagcaaa

SEQ ID NO: 168074 - DNA, 25 bp, Homo sapien
tccagggttgctgctttgcaaaggt

SEQ ID NO: 168075 - DNA, 25 bp, Homo sapien
ggcgcgtcgggaggcacagccggca

SEQ ID NO: 168076 - DNA, 25 bp, Homo sapien
tctccagggttgctgctttgcaaag

SEQ ID NO: 168077 - DNA, 25 bp, Homo sapien
ctggaggcgcgtcgggaggcacagc

SEQ ID NO: 168078 - DNA, 25 bp, Homo sapien
gaaatcagcaaagaccctctggcgt

SEQ ID NO: 168079 - DNA, 25 bp, Homo sapien
ggaaatcagcaaagaccctctggcg

SEQ ID NO: 168080 - DNA, 25 bp, Homo sapien
aaatcagcaaagaccctctggcgtc

SEQ ID NO: 168081 - DNA, 25 bp, Homo sapien
aatcagcaaagaccctctggcgtcc

SEQ ID NO: 168082 - DNA, 25 bp, Homo sapien
cagagtggtctgagaaaggcagctg

SEQ ID NO: 168083 - DNA, 25 bp, Homo sapien
gagtggtctgagaaaggcagctgcc

SEQ ID NO: 168084 - DNA, 25 bp, Homo sapien
tcagagtggtctgagaaaggcagct

SEQ ID NO: 168085 - DNA, 25 bp, Homo sapien
ctcagagtggtctgagaaaggcagc

SEQ ID NO: 168086 - DNA, 25 bp, Homo sapien
gttggcgttgagaaacacggtgaat

SEQ ID NO: 168087 - DNA, 25 bp, Homo sapien
gggttggcgttgagaaacacggtga

SEQ ID NO: 168088 - DNA, 25 bp, Homo sapien
cgttgagaaacacggtgaataatgg

SEQ ID NO: 168089 - DNA, 25 bp, Homo sapien
tggcgttgagaaacacggtgaataa

SEQ ID NO: 168090 - DNA, 25 bp, Homo sapien
accttgagggatcccggatggagtc

SEQ ID NO: 168091 - DNA, 25 bp, Homo sapien
ttccgaccttgagggatcccggatg

SEQ ID NO: 168092 - DNA, 25 bp, Homo sapien
gagggatcccggatggagtcctgtg

SEQ ID NO: 168093 - DNA, 25 bp, Homo sapien
ccgaccttgagggatcccggatgga

SEQ ID NO: 168094 - DNA, 25 bp, Homo sapien
cttcaaggcgaagtacgatggtaat

SEQ ID NO: 168095 - DNA, 25 bp, Homo sapien
tacgatggtaatattcccacaatgc

SEQ ID NO: 168096 - DNA, 25 bp, Homo sapien
gacctggctctccttaggtctgtga

SEQ ID NO: 168097 - DNA, 25 bp, Homo sapien
ggcgaagtacgatggtaatattccc

SEQ ID NO: 168098 - DNA, 25 bp, Homo sapien
attggtgggcttgggacgccatgga

SEQ ID NO: 168099 - DNA, 25 bp, Homo sapien
ggcgagcacgaggaagctgaaagca

SEQ ID NO: 168100 - DNA, 25 bp, Homo sapien
ggcttgggacgccatggacctcctc

SEQ ID NO: 168101 - DNA, 25 bp, Homo sapien
ctggtggctggcgagcacgaggaag

SEQ ID NO: 168102 - DNA, 25 bp, Homo sapien
cagtggtcagtaagattcgggtggt

SEQ ID NO: 168103 - DNA, 25 bp, Homo sapien
gattcgggtggtgttggacatcacc

SEQ ID NO: 168104 - DNA, 25 bp, Homo sapien
gggtggtgttggacatcacctgaac

SEQ ID NO: 168105 - DNA, 25 bp, Homo sapien
taagattcgggtggtgttggacatc

SEQ ID NO: 168106 - DNA, 25 bp, Homo sapien
tgccttctccctaggtaagacatta

SEQ ID NO: 168107 - DNA, 25 bp, Homo sapien
agccagggggtgccggggaagatgc

SEQ ID NO: 168108 - DNA, 25 bp, Homo sapien
ggggtgccggggaagatgccctgca

SEQ ID NO: 168109 - DNA, 25 bp, Homo sapien
gggaagatgccctgcaggtgccctc

SEQ ID NO: 168110 - DNA, 25 bp, Homo sapien
tgcagccagggggtgccggggaaga

SEQ ID NO: 168111 - DNA, 25 bp, Homo sapien
tttcctcctgcatatgccagtctgt

SEQ ID NO: 168112 - DNA, 25 bp, Homo sapien
tcctgcatatgccagtctgtggatc

SEQ ID NO: 168113 - DNA, 25 bp, Homo sapien
agcatggggcattgatgaggcccct

SEQ ID NO: 168114 - DNA, 25 bp, Homo sapien
cccctattacagtggggcgctggga

SEQ ID NO: 168115 - DNA, 25 bp, Homo sapien
cgtgtgccggtaactagggcttagc

SEQ ID NO: 168116 - DNA, 25 bp, Homo sapien
gtgctttctacatcaggcctcctag

SEQ ID NO: 168117 - DNA, 25 bp, Homo sapien
cataagacgtggagtttgctgagag

SEQ ID NO: 168118 - DNA, 25 bp, Homo sapien
cagatgtgacataaccagctccgtg

SEQ ID NO: 168119 - DNA, 25 bp, Homo sapien
agcagaggctcgtaggaacctggcc

SEQ ID NO: 168120 - DNA, 25 bp, Homo sapien
caaacctatccgctgaaagctgagg

SEQ ID NO: 168121 - DNA, 25 bp, Homo sapien
tccacgcggtggtgtgcatcgttca

SEQ ID NO: 168122 - DNA, 25 bp, Homo sapien
ccttaggagcagaggttcggcattc

SEQ ID NO: 168123 - DNA, 25 bp, Homo sapien
gacgtctgaccctcagtcagagctg

SEQ ID NO: 168124 - DNA, 25 bp, Homo sapien
aaagccagcctggttggatgagagc

SEQ ID NO: 168125 - DNA, 25 bp, Homo sapien
gggcgtgcccatagtcggctctgaa

SEQ ID NO: 168126 - DNA, 25 bp, Homo sapien
tggaagtcccttctgacgtctgacc

SEQ ID NO: 168127 - DNA, 25 bp, Homo sapien
ccggtgaggcaacggccagagggcg

SEQ ID NO: 168128 - DNA, 25 bp, Homo sapien
cgcgctccgcaaggctcggacggtg

SEQ ID NO: 168129 - DNA, 25 bp, Homo sapien
gcgcccactgccgcgctccgcaagg

SEQ ID NO: 168130 - DNA, 25 bp, Homo sapien
tggtgcggccggcgctccgtccggg

SEQ ID NO: 168131 - DNA, 25 bp, Homo sapien
gggaactgtaccctgcgccgccgga

SEQ ID NO: 168132 - DNA, 25 bp, Homo sapien
cggaacctcgctcctggacccaagc

SEQ ID NO: 168133 - DNA, 25 bp, Homo sapien
ctgaagctccaagcggaccccgagg

SEQ ID NO: 168134 - DNA, 25 bp, Homo sapien
cgcagcccggaacctcgctcctgga

SEQ ID NO: 168135 - DNA, 25 bp, Homo sapien
ctgccctgggagtaggcccggccga

SEQ ID NO: 168136 - DNA, 25 bp, Homo sapien
tgggcccaccactctgcggccagtg

SEQ ID NO: 168137 - DNA, 25 bp, Homo sapien
ttcatggtcaggatgtggcagccgc

SEQ ID NO: 168138 - DNA, 25 bp, Homo sapien
tattttcccaactgtggctgattca

SEQ ID NO: 168139 - DNA, 25 bp, Homo sapien
ctgtgatggaggctgattcccctaa

SEQ ID NO: 168140 - DNA, 25 bp, Homo sapien
tgatggaggctgattcccctaagcc

SEQ ID NO: 168141 - DNA, 25 bp, Homo sapien
gatggaggctgattcccctaagcct

SEQ ID NO: 168142 - DNA, 25 bp, Homo sapien
tgtgatggaggctgattcccctaag

SEQ ID NO: 168143 - DNA, 25 bp, Homo sapien
gccttcccctccttagtcatggtca

SEQ ID NO: 168144 - DNA, 25 bp, Homo sapien
cattggggacggtcagggacacagc

SEQ ID NO: 168145 - DNA, 25 bp, Homo sapien
gccctgggtggggagcttgagcccc

SEQ ID NO: 168146 - DNA, 25 bp, Homo sapien
cctggggcgactccccagttagagg

SEQ ID NO: 168147 - DNA, 25 bp, Homo sapien
agcgccttctgggtgtgcctgacct

SEQ ID NO: 168148 - DNA, 25 bp, Homo sapien
ctctggcccggttcctgggttcctg

SEQ ID NO: 168149 - DNA, 25 bp, Homo sapien
ggtgtgcctgacctctggcccggtt

SEQ ID NO: 168150 - DNA, 25 bp, Homo sapien
ttcctacgtccagcgccttctgggt

SEQ ID NO: 168151 - DNA, 25 bp, Homo sapien
cccacccttcagagtgcagatgtgg

SEQ ID NO: 168152 - DNA, 25 bp, Homo sapien
aaactgaggccggaagagggcgagt

SEQ ID NO: 168153 - DNA, 25 bp, Homo sapien
cagggagcaggtcccagcctgagct

SEQ ID NO: 168154 - DNA, 25 bp, Homo sapien
agctgctgtcccacccttcagagtg

SEQ ID NO: 168155 - DNA, 25 bp, Homo sapien
ctgagcaccgacaccccaaaagccc

SEQ ID NO: 168156 - DNA, 25 bp, Homo sapien
tgagcaccgacaccccaaaagcccc

SEQ ID NO: 168157 - DNA, 25 bp, Homo sapien
tggcttttagaacagaaaattgctg

SEQ ID NO: 168158 - DNA, 25 bp, Homo sapien
ttggtccgtccccactagcgacatc

SEQ ID NO: 168159 - DNA, 25 bp, Homo sapien
tggccacttggtccgtccccactag

SEQ ID NO: 168160 - DNA, 25 bp, Homo sapien
gcttttagaacagaaaattgctgct

SEQ ID NO: 168161 - DNA, 25 bp, Homo sapien
cactttggaccttggggtgctcaga

SEQ ID NO: 168162 - DNA, 25 bp, Homo sapien
tgcaaaggccttgatcggcggccag

SEQ ID NO: 168163 - DNA, 25 bp, Homo sapien
tataacgctgtcacagcacgggagc

SEQ ID NO: 168164 - DNA, 25 bp, Homo sapien
ctctgaccctgcaaaggccttgatc

SEQ ID NO: 168165 - DNA, 25 bp, Homo sapien
ggacgttgcatgaatcttcccagcc

SEQ ID NO: 168166 - DNA, 25 bp, Homo sapien
aacaagatcctcagcgtgggtgcaa

SEQ ID NO: 168167 - DNA, 25 bp, Homo sapien
cctgtttggcggctgggacggagct

SEQ ID NO: 168168 - DNA, 25 bp, Homo sapien
cagggagcccgtcaggcccaactgg

SEQ ID NO: 168169 - DNA, 25 bp, Homo sapien
tggccaggagctcgtcaccagaatc

SEQ ID NO: 168170 - DNA, 25 bp, Homo sapien
gcaggtggccaggagctcgtcacca

SEQ ID NO: 168171 - DNA, 25 bp, Homo sapien
tgctgggcaatgagggcaggtggcc

SEQ ID NO: 168172 - DNA, 25 bp, Homo sapien
tccccccggaccagacatactcaga

SEQ ID NO: 168173 - DNA, 25 bp, Homo sapien
aggcacaggaatttgcgttcttcgc

SEQ ID NO: 168174 - DNA, 25 bp, Homo sapien
atcttttctacagccggcaccagct

SEQ ID NO: 168175 - DNA, 25 bp, Homo sapien
caggaatttgcgttcttcgcaatct

SEQ ID NO: 168176 - DNA, 25 bp, Homo sapien
gcgttcttcgcaatcttttctacag

SEQ ID NO: 168177 - DNA, 25 bp, Homo sapien
gatgcgcaagaccttccggccacct

SEQ ID NO: 168178 - DNA, 25 bp, Homo sapien
cagatgcgcaagaccttccggccac

SEQ ID NO: 168179 - DNA, 25 bp, Homo sapien
gcgcaagaccttccggccacctctg

SEQ ID NO: 168180 - DNA, 25 bp, Homo sapien
ccagatgcgcaagaccttccggcca

SEQ ID NO: 168181 - DNA, 25 bp, Homo sapien
ttgcgcaggccggagtagttgacca

SEQ ID NO: 168182 - DNA, 25 bp, Homo sapien
gcgtcggagatacgtgcaacgccgc

SEQ ID NO: 168183 - DNA, 25 bp, Homo sapien
cgcacgtagccctggttgctgagga

SEQ ID NO: 168184 - DNA, 25 bp, Homo sapien
tgaggatgtactcgatgccctgccg

SEQ ID NO: 168185 - DNA, 25 bp, Homo sapien
accatcacgttggatgtgtccaggg

SEQ ID NO: 168186 - DNA, 25 bp, Homo sapien
tggccctcgggagagtagatgcaca

SEQ ID NO: 168187 - DNA, 25 bp, Homo sapien
gcttcttcaccatcacgttggatgt

SEQ ID NO: 168188 - DNA, 25 bp, Homo sapien
cgtggccctcgggagagtagatgca

SEQ ID NO: 168189 - DNA, 25 bp, Homo sapien
gggcccaagatgacggcgttgatca

SEQ ID NO: 168190 - DNA, 25 bp, Homo sapien
gcgttgatcacgctaagcagggtga

SEQ ID NO: 168191 - DNA, 25 bp, Homo sapien
cgataaactcgttccgcagctgggt

SEQ ID NO: 168192 - DNA, 25 bp, Homo sapien
cacgtagggcacgttgtcgctgccg

SEQ ID NO: 168193 - DNA, 25 bp, Homo sapien
tccccaggtggatgcagcatgggat

SEQ ID NO: 168194 - DNA, 25 bp, Homo sapien
caaatgagaacggtccagggttgac

SEQ ID NO: 168195 - DNA, 25 bp, Homo sapien
ggcagcttttgtggcgctcccacct

SEQ ID NO: 168196 - DNA, 25 bp, Homo sapien
gatgcttactcagggctcactgcca

SEQ ID NO: 168197 - DNA, 25 bp, Homo sapien
cgcaggcgagccaggacgtccagca

SEQ ID NO: 168198 - DNA, 25 bp, Homo sapien
cactgtgtaacgtaggcgatttgcc

SEQ ID NO: 168199 - DNA, 25 bp, Homo sapien
gcgacgaacactgtaccctgtaggt

SEQ ID NO: 168200 - DNA, 25 bp, Homo sapien
tagtgggcctgacaccaagtagcga

SEQ ID NO: 168201 - DNA, 25 bp, Homo sapien
ggttggttcacttaggatcacggcc

SEQ ID NO: 168202 - DNA, 25 bp, Homo sapien
gctggatcagcaggtcggcatcctc

SEQ ID NO: 168203 - DNA, 25 bp, Homo sapien
gaacagggaggcaaagacctcctgg

SEQ ID NO: 168204 - DNA, 25 bp, Homo sapien
ctggtggctgctcatgtcgaccccg

SEQ ID NO: 168205 - DNA, 25 bp, Homo sapien
agcctcctcgaaagcctccagctgg

SEQ ID NO: 168206 - DNA, 25 bp, Homo sapien
gccctgcagcaccgacaggagctgg

SEQ ID NO: 168207 - DNA, 25 bp, Homo sapien
gccaggagcacggcccggttcacga

SEQ ID NO: 168208 - DNA, 25 bp, Homo sapien
agcacggcccggttcacgaggctct

SEQ ID NO: 168209 - DNA, 25 bp, Homo sapien
gcccggttcacgaggctctccaggg

SEQ ID NO: 168210 - DNA, 25 bp, Homo sapien
ggcccggttcacgaggctctccagg

SEQ ID NO: 168211 - DNA, 25 bp, Homo sapien
ctcggtctgggtcgccccttgacag

SEQ ID NO: 168212 - DNA, 25 bp, Homo sapien
tctggtctaggttggcctggacgct

SEQ ID NO: 168213 - DNA, 25 bp, Homo sapien
ggacgcttttatgggccttgaccag

SEQ ID NO: 168214 - DNA, 25 bp, Homo sapien
tggctgctggccctccacgctgggc

SEQ ID NO: 168215 - DNA, 25 bp, Homo sapien
ggctgcgaaactttcaggatgctct

SEQ ID NO: 168216 - DNA, 25 bp, Homo sapien
ggtgcagggcagtagtggaggtggg

SEQ ID NO: 168217 - DNA, 25 bp, Homo sapien
ctgcaggtgcagggcagtagtggag

SEQ ID NO: 168218 - DNA, 25 bp, Homo sapien
gcaggtgcagggcagtagtggaggt

SEQ ID NO: 168219 - DNA, 25 bp, Homo sapien
gcagggcagtagtggaggtgggggt

SEQ ID NO: 168220 - DNA, 25 bp, Homo sapien
tccacctgggccacgatgacctcct

SEQ ID NO: 168221 - DNA, 25 bp, Homo sapien
cagtgtgggtgggttcacccgccga

SEQ ID NO: 168222 - DNA, 25 bp, Homo sapien
gccagttcagcttcttcatgcgcag

SEQ ID NO: 168223 - DNA, 25 bp, Homo sapien
ccgccgatggctggggacccatgct

SEQ ID NO: 168224 - DNA, 25 bp, Homo sapien
gaatagtcgctcgatgctggagaag

SEQ ID NO: 168225 - DNA, 25 bp, Homo sapien
gagaatagtcgctcgatgctggaga

SEQ ID NO: 168226 - DNA, 25 bp, Homo sapien
tagtcgctcgatgctggagaagtcg

SEQ ID NO: 168227 - DNA, 25 bp, Homo sapien
ggaaggagaatagtcgctcgatgct

SEQ ID NO: 168228 - DNA, 25 bp, Homo sapien
caggcggccccggtctgagtcccct

SEQ ID NO: 168229 - DNA, 25 bp, Homo sapien
tcaggaagatgttgaggttcaggct

SEQ ID NO: 168230 - DNA, 25 bp, Homo sapien
aaattgcttcaggaagatgttgagg

SEQ ID NO: 168231 - DNA, 25 bp, Homo sapien
tgttgaggttcaggctcttcttggc

SEQ ID NO: 168232 - DNA, 25 bp, Homo sapien
tcttcttggcatcgaggaaagtgat

SEQ ID NO: 168233 - DNA, 25 bp, Homo sapien
aacctccacatcaaacttggtggta

SEQ ID NO: 168234 - DNA, 25 bp, Homo sapien
atctccagcccggatcatagcagcg

SEQ ID NO: 168235 - DNA, 25 bp, Homo sapien
taaggagttgtttgagaacctccac

SEQ ID NO: 168236 - DNA, 25 bp, Homo sapien
tgcttctcgggaaggagcttaagga

SEQ ID NO: 168237 - DNA, 25 bp, Homo sapien
tcggcgctggccagcttggctcgct

SEQ ID NO: 168238 - DNA, 25 bp, Homo sapien
tcctctgtgaatgcccgcaggtttt

SEQ ID NO: 168239 - DNA, 25 bp, Homo sapien
gcaggaggaggtagaagtggtcggc

SEQ ID NO: 168240 - DNA, 25 bp, Homo sapien
aggtagaagtggtcggcgctggcca

SEQ ID NO: 168241 - DNA, 25 bp, Homo sapien
cagcatgcactcgattcgcagctgg

SEQ ID NO: 168242 - DNA, 25 bp, Homo sapien
agcagcatgcactcgattcgcagct

SEQ ID NO: 168243 - DNA, 25 bp, Homo sapien
catgcactcgattcgcagctggtag

SEQ ID NO: 168244 - DNA, 25 bp, Homo sapien
gcatgcactcgattcgcagctggta

SEQ ID NO: 168245 - DNA, 25 bp, Homo sapien
agcaccagctgggccttgggccgca

SEQ ID NO: 168246 - DNA, 25 bp, Homo sapien
caccagctgggccttgggccgcacc

SEQ ID NO: 168247 - DNA, 25 bp, Homo sapien
tttcgcaggcagccagcaccagctg

SEQ ID NO: 168248 - DNA, 25 bp, Homo sapien
ccagctgggccttgggccgcaccat

SEQ ID NO: 168249 - DNA, 25 bp, Homo sapien
tcccaattctcaggatcagctggca

SEQ ID NO: 168250 - DNA, 25 bp, Homo sapien
tccgtgagcttcagcaatgtgctga

SEQ ID NO: 168251 - DNA, 25 bp, Homo sapien
tgggacttggtctccgtgagcttca

SEQ ID NO: 168252 - DNA, 25 bp, Homo sapien
gcgtcacgcggttctgctgggactt

SEQ ID NO: 168253 - DNA, 25 bp, Homo sapien
tgtgctgatcttgaagccgtcggcg

SEQ ID NO: 168254 - DNA, 25 bp, Homo sapien
tgctgcttgcgagggctgttccagg

SEQ ID NO: 168255 - DNA, 25 bp, Homo sapien
ctgctgcttgcgagggctgttccag

SEQ ID NO: 168256 - DNA, 25 bp, Homo sapien
ttccgctcggtctccagaagcttct

SEQ ID NO: 168257 - DNA, 25 bp, Homo sapien
gagctggcctctgagcggatgatct

SEQ ID NO: 168258 - DNA, 25 bp, Homo sapien
tccgctcggtctccagaagcttctt

SEQ ID NO: 168259 - DNA, 25 bp, Homo sapien
cctctgagcggatgatctccaggtt

SEQ ID NO: 168260 - DNA, 25 bp, Homo sapien
ctggacctcggccacggaggcagac

SEQ ID NO: 168261 - DNA, 25 bp, Homo sapien
ggacctcggccacggaggcagacac

SEQ ID NO: 168262 - DNA, 25 bp, Homo sapien
tggacctcggccacggaggcagaca

SEQ ID NO: 168263 - DNA, 25 bp, Homo sapien
gccagccccaggcccaggtgcccac

SEQ ID NO: 168264 - DNA, 25 bp, Homo sapien
tcccgccagccccaggcccaggtgc

SEQ ID NO: 168265 - DNA, 25 bp, Homo sapien
tctatcagggcagcctctcccgcca

SEQ ID NO: 168266 - DNA, 25 bp, Homo sapien
tatcagggcagcctctcccgccagc

SEQ ID NO: 168267 - DNA, 25 bp, Homo sapien
ctgagttgcgggagggtgacggcca

SEQ ID NO: 168268 - DNA, 25 bp, Homo sapien
tgagttgcgggagggtgacggccac

SEQ ID NO: 168269 - DNA, 25 bp, Homo sapien
agttgcgggagggtgacggccacag

SEQ ID NO: 168270 - DNA, 25 bp, Homo sapien
tgcgggagggtgacggccacaggga

SEQ ID NO: 168271 - DNA, 25 bp, Homo sapien
gcacgtgacagtcccgtgagagccc

SEQ ID NO: 168272 - DNA, 25 bp, Homo sapien
gcaagggcacgtgacagtcccgtga

SEQ ID NO: 168273 - DNA, 25 bp, Homo sapien
aagggcacgtgacagtcccgtgaga

SEQ ID NO: 168274 - DNA, 25 bp, Homo sapien
gggcaagggcacgtgacagtcccgt

SEQ ID NO: 168275 - DNA, 25 bp, Homo sapien
gcttctgctcgatggcctcaaacag

SEQ ID NO: 168276 - DNA, 25 bp, Homo sapien
tcccgttgcttctgctcgatggcct

SEQ ID NO: 168277 - DNA, 25 bp, Homo sapien
gatggcctcaaacagctcatccagt

SEQ ID NO: 168278 - DNA, 25 bp, Homo sapien
tagtcggccagctcccgttgcttct

SEQ ID NO: 168279 - DNA, 25 bp, Homo sapien
tccagggacagctgctgggcgtcct

SEQ ID NO: 168280 - DNA, 25 bp, Homo sapien
ggacagctgctgggcgtcctcacac

SEQ ID NO: 168281 - DNA, 25 bp, Homo sapien
ggtgctgaacgtgtcctccagggac

SEQ ID NO: 168282 - DNA, 25 bp, Homo sapien
cagggacagctgctgggcgtcctca

SEQ ID NO: 168283 - DNA, 25 bp, Homo sapien
tcggcccgacgaaaggtgcctctgc

SEQ ID NO: 168284 - DNA, 25 bp, Homo sapien
gcgtggcatccctcaggggctccat

SEQ ID NO: 168285 - DNA, 25 bp, Homo sapien
ctgtgtcggcccgacgaaaggtgcc

SEQ ID NO: 168286 - DNA, 25 bp, Homo sapien
gtcaccccagcgtggcatccctcag

SEQ ID NO: 168287 - DNA, 25 bp, Homo sapien
tcctctctgccttcgccgcctgctc

SEQ ID NO: 168288 - DNA, 25 bp, Homo sapien
cctctctgccttcgccgcctgctcc

SEQ ID NO: 168289 - DNA, 25 bp, Homo sapien
tctctgccttcgccgcctgctcctt

SEQ ID NO: 168290 - DNA, 25 bp, Homo sapien
ctcctctctgccttcgccgcctgct

SEQ ID NO: 168291 - DNA, 25 bp, Homo sapien
agccagcagggcatcgatgacacac

SEQ ID NO: 168292 - DNA, 25 bp, Homo sapien
ccagcagggcatcgatgacacacac

SEQ ID NO: 168293 - DNA, 25 bp, Homo sapien
tgctgcccccgtcggtgtccccgcg

SEQ ID NO: 168294 - DNA, 25 bp, Homo sapien
tgccttgctgcccccgtcggtgtcc

SEQ ID NO: 168295 - DNA, 25 bp, Homo sapien
tttcctgccacctctagcaccctct

SEQ ID NO: 168296 - DNA, 25 bp, Homo sapien
accctctgagcccaagggcatcggt

SEQ ID NO: 168297 - DNA, 25 bp, Homo sapien
caagggcatcggtcagtgggcctgg

SEQ ID NO: 168298 - DNA, 25 bp, Homo sapien
ctctgagcccaagggcatcggtcag

SEQ ID NO: 168299 - DNA, 25 bp, Homo sapien
tcagaggcgggacagcgcgtgctgc

SEQ ID NO: 168300 - DNA, 25 bp, Homo sapien
gtgctgcccacgggatctcctgcag

SEQ ID NO: 168301 - DNA, 25 bp, Homo sapien
ctgttgtagcatcaaggccgggctc

SEQ ID NO: 168302 - DNA, 25 bp, Homo sapien
ttgtagcatcaaggccgggctcaga

SEQ ID NO: 168303 - DNA, 25 bp, Homo sapien
cctcagtggttaggacatcgctggc

SEQ ID NO: 168304 - DNA, 25 bp, Homo sapien
agtcggtcaccgcatcctcggagaa

SEQ ID NO: 168305 - DNA, 25 bp, Homo sapien
gggtcacggcgtctacaaggtccca

SEQ ID NO: 168306 - DNA, 25 bp, Homo sapien
tggcatcttgccttgaacttccggc

SEQ ID NO: 168307 - DNA, 25 bp, Homo sapien
tactccctaacggaggtggcgtgaa

SEQ ID NO: 168308 - DNA, 25 bp, Homo sapien
taaaagaaacgcactcaacggctta

SEQ ID NO: 168309 - DNA, 25 bp, Homo sapien
gcttatcacacagaagcaaccctga

SEQ ID NO: 168310 - DNA, 25 bp, Homo sapien
gctggaacttgcagtgcccaatggg

SEQ ID NO: 168311 - DNA, 25 bp, Homo sapien
tattatcatcagaatcagggggaac

SEQ ID NO: 168312 - DNA, 25 bp, Homo sapien
tttattatcatcagaatcaggggga

SEQ ID NO: 168313 - DNA, 25 bp, Homo sapien
ttttattatcatcagaatcaggggg

SEQ ID NO: 168314 - DNA, 25 bp, Homo sapien
ttatcatcagaatcagggggaacct

SEQ ID NO: 168315 - DNA, 25 bp, Homo sapien
cctgcaggaggcaccagttgagcag

SEQ ID NO: 168316 - DNA, 25 bp, Homo sapien
aggaggcaccagttgagcaggtaac

SEQ ID NO: 168317 - DNA, 25 bp, Homo sapien
cccggggccagcactgaggttgcgt

SEQ ID NO: 168318 - DNA, 25 bp, Homo sapien
cactgaggttgcgtcctgcctgcag

SEQ ID NO: 168319 - DNA, 25 bp, Homo sapien
gactgtcccggtctcctcacagact

SEQ ID NO: 168320 - DNA, 25 bp, Homo sapien
cccacgccattgacacacttagagt

SEQ ID NO: 168321 - DNA, 25 bp, Homo sapien
ctggcagcatctgcccttgcgactg

SEQ ID NO: 168322 - DNA, 25 bp, Homo sapien
ttcctggggacatgccccagaaggc

SEQ ID NO: 168323 - DNA, 25 bp, Homo sapien
gtgcggggggtaatctgcttctcca

SEQ ID NO: 168324 - DNA, 25 bp, Homo sapien
tgcttctccatagacccacccatgg

SEQ ID NO: 168325 - DNA, 25 bp, Homo sapien
ccccccagaagactcggtgtgcggg

SEQ ID NO: 168326 - DNA, 25 bp, Homo sapien
tgattgacctttggctggtcgcccc

SEQ ID NO: 168327 - DNA, 25 bp, Homo sapien
aagttccagcctctaagggagatgc

SEQ ID NO: 168328 - DNA, 25 bp, Homo sapien
tcagggccagcaagtccaagttcca

SEQ ID NO: 168329 - DNA, 25 bp, Homo sapien
gctccagtgccatgatgtttataag

SEQ ID NO: 168330 - DNA, 25 bp, Homo sapien
taagcacgtgtagcaggttcaggag

SEQ ID NO: 168331 - DNA, 25 bp, Homo sapien
ggcgcaatcaggcaaacccaaagtg

SEQ ID NO: 168332 - DNA, 25 bp, Homo sapien
tagaagcatgtggacgtgaagcgcc

SEQ ID NO: 168333 - DNA, 25 bp, Homo sapien
ggcaagtggcacatctgcactggga

SEQ ID NO: 168334 - DNA, 25 bp, Homo sapien
gcactgggaccgagtattagaagca

SEQ ID NO: 168335 - DNA, 25 bp, Homo sapien
ccagcagcgctttctccagtgggct

SEQ ID NO: 168336 - DNA, 25 bp, Homo sapien
gagaaccactactctaaacagacag

SEQ ID NO: 168337 - DNA, 25 bp, Homo sapien
caacttatctaggtggaaggtgccg

SEQ ID NO: 168338 - DNA, 25 bp, Homo sapien
ggttgtgccatgcatcgcaggtcca

SEQ ID NO: 168339 - DNA, 25 bp, Homo sapien
acttggccttgggcctgggcctgag

SEQ ID NO: 168340 - DNA, 25 bp, Homo sapien
cacttggccttgggcctgggcctga

SEQ ID NO: 168341 - DNA, 25 bp, Homo sapien
tcacttggccttgggcctgggcctg

SEQ ID NO: 168342 - DNA, 25 bp, Homo sapien
tgggaggctggcacgtgcaggcggt

SEQ ID NO: 168343 - DNA, 25 bp, Homo sapien
agagcctctcttggcagaatggcag

SEQ ID NO: 168344 - DNA, 25 bp, Homo sapien
ggcactggtgcctgtcgggttccca

SEQ ID NO: 168345 - DNA, 25 bp, Homo sapien
tgcaccgggcgcatgcgggtgtggg

SEQ ID NO: 168346 - DNA, 25 bp, Homo sapien
ggaccctggcctgccatggcactgc

SEQ ID NO: 168347 - DNA, 25 bp, Homo sapien
gctggacatgctggaacgggggcca

SEQ ID NO: 168348 - DNA, 25 bp, Homo sapien
ggacctgtattgtccccagggcctg

SEQ ID NO: 168349 - DNA, 25 bp, Homo sapien
ctcaggtggacctgtattgtcccca

SEQ ID NO: 168350 - DNA, 25 bp, Homo sapien
aggtctgctttttattggccacgca

SEQ ID NO: 168351 - DNA, 25 bp, Homo sapien
tgtgggagcccacgtccaccgccca

SEQ ID NO: 168352 - DNA, 25 bp, Homo sapien
catgtttgtgggagcccacgtccac

SEQ ID NO: 168353 - DNA, 25 bp, Homo sapien
tgtttgtgggagcccacgtccaccg

SEQ ID NO: 168354 - DNA, 25 bp, Homo sapien
tttgtgggagcccacgtccaccgcc

SEQ ID NO: 168355 - DNA, 25 bp, Homo sapien
gcatccacacgaggactacgcaaat

SEQ ID NO: 168356 - DNA, 25 bp, Homo sapien
tccacacgaggactacgcaaatgtc

SEQ ID NO: 168357 - DNA, 25 bp, Homo sapien
atccacacgaggactacgcaaatgt

SEQ ID NO: 168358 - DNA, 25 bp, Homo sapien
catccacacgaggactacgcaaatg

SEQ ID NO: 168359 - DNA, 25 bp, Homo sapien
cgcagcatccacatgagactacaca

SEQ ID NO: 168360 - DNA, 25 bp, Homo sapien
cagagcaacgaaaactcgcagcatc

SEQ ID NO: 168361 - DNA, 25 bp, Homo sapien
gctacgaatctaccccagagcaacg

SEQ ID NO: 168362 - DNA, 25 bp, Homo sapien
taaacataaacttagcgtgtcgccc

SEQ ID NO: 168363 - DNA, 25 bp, Homo sapien
gaggcgaacgctagtgactcactga

SEQ ID NO: 168364 - DNA, 25 bp, Homo sapien
caaagtcccatcagacaaggaggtg

SEQ ID NO: 168365 - DNA, 25 bp, Homo sapien
cggactataaatagccacgggcccg

SEQ ID NO: 168366 - DNA, 25 bp, Homo sapien
ggctcagcccgaattagaacacctc

SEQ ID NO: 168367 - DNA, 25 bp, Homo sapien
gatggtctgcgaggctcccgtgttc

SEQ ID NO: 168368 - DNA, 25 bp, Homo sapien
cgtgttcccggctggttgtcctgtc

SEQ ID NO: 168369 - DNA, 25 bp, Homo sapien
aaagggacccatcctgtcagcgtca

SEQ ID NO: 168370 - DNA, 25 bp, Homo sapien
cccaagggcggaaaagagaatcagg

SEQ ID NO: 168371 - DNA, 25 bp, Homo sapien
gctggcttggctcttccgctgcgct

SEQ ID NO: 168372 - DNA, 25 bp, Homo sapien
ctggcttggctcttccgctgcgctg

SEQ ID NO: 168373 - DNA, 25 bp, Homo sapien
ggcttggctcttccgctgcgctggc

SEQ ID NO: 168374 - DNA, 25 bp, Homo sapien
cccagcaccaccgtcacgcgggagc

SEQ ID NO: 168375 - DNA, 25 bp, Homo sapien
ccccgcttgacgccgcctgcgccgg

SEQ ID NO: 168376 - DNA, 25 bp, Homo sapien
gcaccaccgtcacgcgggagccggt

SEQ ID NO: 168377 - DNA, 25 bp, Homo sapien
gcgcccagcaccaccgtcacgcggg

SEQ ID NO: 168378 - DNA, 25 bp, Homo sapien
ggctgatgatgtcggcgtccgtggc

SEQ ID NO: 168379 - DNA, 25 bp, Homo sapien
gcggctgatgatgtcggcgtccgtg

SEQ ID NO: 168380 - DNA, 25 bp, Homo sapien
ctgatgatgtcggcgtccgtggcca

SEQ ID NO: 168381 - DNA, 25 bp, Homo sapien
cagcggctgatgatgtcggcgtccg

SEQ ID NO: 168382 - DNA, 25 bp, Homo sapien
cctccaccacctgcagaccttgcgg

SEQ ID NO: 168383 - DNA, 25 bp, Homo sapien
caccacctgcagaccttgcggggag

SEQ ID NO: 168384 - DNA, 25 bp, Homo sapien
agcaggcagcttttaccccctccac

SEQ ID NO: 168385 - DNA, 25 bp, Homo sapien
gaccttgcggggagccaggtaagcc

SEQ ID NO: 168386 - DNA, 25 bp, Homo sapien
gcctgggcctcacgggagcagagag

SEQ ID NO: 168387 - DNA, 25 bp, Homo sapien
ggcctcacgggagcagagaggtcta

SEQ ID NO: 168388 - DNA, 25 bp, Homo sapien
ctgggcctcacgggagcagagaggt

SEQ ID NO: 168389 - DNA, 25 bp, Homo sapien
tgggcctcacgggagcagagaggtc

SEQ ID NO: 168390 - DNA, 25 bp, Homo sapien
gccggagtgcgggatgggctccagc

SEQ ID NO: 168391 - DNA, 25 bp, Homo sapien
ctggtggccggagtgcgggatgggc

SEQ ID NO: 168392 - DNA, 25 bp, Homo sapien
ggtggccggagtgcgggatgggctc

SEQ ID NO: 168393 - DNA, 25 bp, Homo sapien
caggctatagggtggcctggtgggg

SEQ ID NO: 168394 - DNA, 25 bp, Homo sapien
cagagtggaaagtccatgtccaggg

SEQ ID NO: 168395 - DNA, 25 bp, Homo sapien
agctgggctcgaagtgatggctctg

SEQ ID NO: 168396 - DNA, 25 bp, Homo sapien
gcaaagcagcaactcttgccaagtg

SEQ ID NO: 168397 - DNA, 25 bp, Homo sapien
gtgagcaaagcagcaactcttgcca

SEQ ID NO: 168398 - DNA, 25 bp, Homo sapien
gctcctccccacgacgccgacgcca

SEQ ID NO: 168399 - DNA, 25 bp, Homo sapien
acgctcctccccacgacgccgacgc

SEQ ID NO: 168400 - DNA, 25 bp, Homo sapien
cgctcctccccacgacgccgacgcc

SEQ ID NO: 168401 - DNA, 25 bp, Homo sapien
ctcctccccacgacgccgacgccac

SEQ ID NO: 168402 - DNA, 25 bp, Homo sapien
tgagctggcacggagtggccactca

SEQ ID NO: 168403 - DNA, 25 bp, Homo sapien
tgtggcctcctgcatttgacccgtg

SEQ ID NO: 168404 - DNA, 25 bp, Homo sapien
ccctccaggtgttaaggatccggct

SEQ ID NO: 168405 - DNA, 25 bp, Homo sapien
gagtggccactcagtaactggagac

SEQ ID NO: 168406 - DNA, 25 bp, Homo sapien
cacaggctcctaggaacaggcgcgg

SEQ ID NO: 168407 - DNA, 25 bp, Homo sapien
tgtcgtaggccagtgggtgtccaat

SEQ ID NO: 168408 - DNA, 25 bp, Homo sapien
ggtgtccaatgaccgcagggccagt

SEQ ID NO: 168409 - DNA, 25 bp, Homo sapien
agagtgcccagtgcccacgtcaaca

SEQ ID NO: 168410 - DNA, 25 bp, Homo sapien
tggccagctctgatgcgtctgtgcg

SEQ ID NO: 168411 - DNA, 25 bp, Homo sapien
cgtctgtgcgggactgggatgtggg

SEQ ID NO: 168412 - DNA, 25 bp, Homo sapien
tctgtgcgggactgggatgtgggca

SEQ ID NO: 168413 - DNA, 25 bp, Homo sapien
agctctgatgcgtctgtgcgggact

SEQ ID NO: 168414 - DNA, 25 bp, Homo sapien
acagaaacccggctgagctgaaggc

SEQ ID NO: 168415 - DNA, 25 bp, Homo sapien
tggaacagaaacccggctgagctga

SEQ ID NO: 168416 - DNA, 25 bp, Homo sapien
gaacagaaacccggctgagctgaag

SEQ ID NO: 168417 - DNA, 25 bp, Homo sapien
ctggaacagaaacccggctgagctg

SEQ ID NO: 168418 - DNA, 25 bp, Homo sapien
ggtgttgatgatgccgctgggcagc

SEQ ID NO: 168419 - DNA, 25 bp, Homo sapien
agcaggtggaagtcgtactctttcc

SEQ ID NO: 168420 - DNA, 25 bp, Homo sapien
gaaggacacggccttggtgttgatg

SEQ ID NO: 168421 - DNA, 25 bp, Homo sapien
ccaccaccgtgtggccggcgttgtt

SEQ ID NO: 168422 - DNA, 25 bp, Homo sapien
gaacacggtctacccatacgatgga

SEQ ID NO: 168423 - DNA, 25 bp, Homo sapien
ctgacacaggcctcgaagacattat

SEQ ID NO: 168424 - DNA, 25 bp, Homo sapien
gaaacctgcgcgtagatgtgcagct

SEQ ID NO: 168425 - DNA, 25 bp, Homo sapien
tccgaaaaggcgacatactgtacaa

SEQ ID NO: 168426 - DNA, 25 bp, Homo sapien
tcaaacaagcctggcaagtggatga

SEQ ID NO: 168427 - DNA, 25 bp, Homo sapien
tggcaagtggatgaccaccccgttg

SEQ ID NO: 168428 - DNA, 25 bp, Homo sapien
tgcttcctcaaacaagcctggcaag

SEQ ID NO: 168429 - DNA, 25 bp, Homo sapien
caagcctggcaagtggatgaccacc

SEQ ID NO: 168430 - DNA, 25 bp, Homo sapien
tgggctctgtcagagatgatgagcc

SEQ ID NO: 168431 - DNA, 25 bp, Homo sapien
caaggtgggctctgtcagagatgat

SEQ ID NO: 168432 - DNA, 25 bp, Homo sapien
tctgtcagagatgatgagcctcttc

SEQ ID NO: 168433 - DNA, 25 bp, Homo sapien
ctgtcagagatgatgagcctcttct

SEQ ID NO: 168434 - DNA, 25 bp, Homo sapien
ggctgttccctgtactccagtggga

SEQ ID NO: 168435 - DNA, 25 bp, Homo sapien
aaaagggtaatgtacaagctaatgg

SEQ ID NO: 168436 - DNA, 25 bp, Homo sapien
gggacttccctgatctcggtggcca

SEQ ID NO: 168437 - DNA, 25 bp, Homo sapien
cccaacttgaagctctttgaaaagg

SEQ ID NO: 168438 - DNA, 25 bp, Homo sapien
acaaactggggtgtgaccatgagtg

SEQ ID NO: 168439 - DNA, 25 bp, Homo sapien
aactggggtgtgaccatgagtgtct

SEQ ID NO: 168440 - DNA, 25 bp, Homo sapien
gggtggttgagatttcaaagaggac

SEQ ID NO: 168441 - DNA, 25 bp, Homo sapien
atttcaaagaggacaaactggggtg

SEQ ID NO: 168442 - DNA, 25 bp, Homo sapien
gcagcaggagacaggagagaagcag

SEQ ID NO: 168443 - DNA, 25 bp, Homo sapien
acagatgtgtatacatggacctcac

SEQ ID NO: 168444 - DNA, 25 bp, Homo sapien
ctgtcgggcgggccaggtgagggca

SEQ ID NO: 168445 - DNA, 25 bp, Homo sapien
agaagcagaggacagatgtgtatac

SEQ ID NO: 168446 - DNA, 25 bp, Homo sapien
cctcttgtgcctggcgctgcacttc

SEQ ID NO: 168447 - DNA, 25 bp, Homo sapien
cccctcttgtgcctggcgctgcact

SEQ ID NO: 168448 - DNA, 25 bp, Homo sapien
ccctcttgtgcctggcgctgcactt

SEQ ID NO: 168449 - DNA, 25 bp, Homo sapien
tcgcagatgcggaggcctgtccggg

SEQ ID NO: 168450 - DNA, 25 bp, Homo sapien
ttggaagagtaggttggtccgattc

SEQ ID NO: 168451 - DNA, 25 bp, Homo sapien
tggaagagtaggttggtccgattcc

SEQ ID NO: 168452 - DNA, 25 bp, Homo sapien
atcaaaatctgacaggaggtcgcag

SEQ ID NO: 168453 - DNA, 25 bp, Homo sapien
gggaacatcgactggtgctggtggg

SEQ ID NO: 168454 - DNA, 25 bp, Homo sapien
gggtggggaacatcgactggtgctg

SEQ ID NO: 168455 - DNA, 25 bp, Homo sapien
tggggaacatcgactggtgctggtg

SEQ ID NO: 168456 - DNA, 25 bp, Homo sapien
agggtggggaacatcgactggtgct

SEQ ID NO: 168457 - DNA, 25 bp, Homo sapien
catgggtctgatccgctcagcaaag

SEQ ID NO: 168458 - DNA, 25 bp, Homo sapien
tacataaagtaaacaccatctcgga

SEQ ID NO: 168459 - DNA, 25 bp, Homo sapien
gggccgtggagtgcctcatacataa

SEQ ID NO: 168460 - DNA, 25 bp, Homo sapien
aagtcaatgtcgaggagggcggcgt

SEQ ID NO: 168461 - DNA, 25 bp, Homo sapien
cccacacgtgtggtataggctttca

SEQ ID NO: 168462 - DNA, 25 bp, Homo sapien
atacacgtcacctatgttctgcggg

SEQ ID NO: 168463 - DNA, 25 bp, Homo sapien
cacggtgcagttggatgaagtcaca

SEQ ID NO: 168464 - DNA, 25 bp, Homo sapien
taggctttcaccacgccatacacgt

SEQ ID NO: 168465 - DNA, 25 bp, Homo sapien
atccgttgaccatgtgagcatatct

SEQ ID NO: 168466 - DNA, 25 bp, Homo sapien
cactcgtggccgcgggtctgcagca

SEQ ID NO: 168467 - DNA, 25 bp, Homo sapien
agaatcatcaggtcgagccagccgc

SEQ ID NO: 168468 - DNA, 25 bp, Homo sapien
gcctgtggtcactccccactcgtgg

SEQ ID NO: 168469 - DNA, 25 bp, Homo sapien
acctgccctgtctgtgggaaaatca

SEQ ID NO: 168470 - DNA, 25 bp, Homo sapien
tgagtggcgggcaagctagcattac

SEQ ID NO: 168471 - DNA, 25 bp, Homo sapien
ggaaaatcatctcccgccaaactgg

SEQ ID NO: 168472 - DNA, 25 bp, Homo sapien
ttagggactgctgatttacactgag

SEQ ID NO: 168473 - DNA, 25 bp, Homo sapien
acctcacccagtacgtccaggatgt

SEQ ID NO: 168474 - DNA, 25 bp, Homo sapien
agacaccgactttaacctcacccag

SEQ ID NO: 168475 - DNA, 25 bp, Homo sapien
cacccagtacgtccaggatgtccag

SEQ ID NO: 168476 - DNA, 25 bp, Homo sapien
ttaacctcacccagtacgtccagga

SEQ ID NO: 168477 - DNA, 25 bp, Homo sapien
gcctctcaaaggtcaagggtcagga

SEQ ID NO: 168478 - DNA, 25 bp, Homo sapien
tacaaagatctgctgagtggagacc

SEQ ID NO: 168479 - DNA, 25 bp, Homo sapien
gtcagaacatgaccctggaccgagg

SEQ ID NO: 168480 - DNA, 25 bp, Homo sapien
gaaatagtcatcctgtacgtccgca

SEQ ID NO: 168481 - DNA, 25 bp, Homo sapien
agcggatatttggtgacacggccac

SEQ ID NO: 168482 - DNA, 25 bp, Homo sapien
tatcaccagggaagcggatatttgg

SEQ ID NO: 168483 - DNA, 25 bp, Homo sapien
agacctcctatcaccagggaagcgg

SEQ ID NO: 168484 - DNA, 25 bp, Homo sapien
tgagtggggcccacagacctcctat

SEQ ID NO: 168485 - DNA, 25 bp, Homo sapien
ccacccaggcagcgtttcatactca

SEQ ID NO: 168486 - DNA, 25 bp, Homo sapien
tactcaacttcgaccttctgaagca

SEQ ID NO: 168487 - DNA, 25 bp, Homo sapien
agcgtttcatactcaacttcgacct

SEQ ID NO: 168488 - DNA, 25 bp, Homo sapien
aacttcgaccttctgaagcatctcc

SEQ ID NO: 168489 - DNA, 25 bp, Homo sapien
ctgtgggggcaggtcctcccacctc

SEQ ID NO: 168490 - DNA, 25 bp, Homo sapien
ccacaaagcggatgtagttctgggc

SEQ ID NO: 168491 - DNA, 25 bp, Homo sapien
ctccacaaagcggatgtagttctgg

SEQ ID NO: 168492 - DNA, 25 bp, Homo sapien
tcccacgtgattctccacaaagcgg

SEQ ID NO: 168493 - DNA, 25 bp, Homo sapien
tgcgactcccacgtgattctccaca

SEQ ID NO: 168494 - DNA, 25 bp, Homo sapien
agagcagaaaagactgttatgatac

SEQ ID NO: 168495 - DNA, 25 bp, Homo sapien
ctgagagagcagaaaagactgttat

SEQ ID NO: 168496 - DNA, 25 bp, Homo sapien
gcagaaaagactgttatgatacaca

SEQ ID NO: 168497 - DNA, 25 bp, Homo sapien
tgagagagcagaaaagactgttatg

SEQ ID NO: 168498 - DNA, 25 bp, Homo sapien
cttgacttgccaacaccaacccatt

SEQ ID NO: 168499 - DNA, 25 bp, Homo sapien
aacagctggatcatcgactctcttg

SEQ ID NO: 168500 - DNA, 25 bp, Homo sapien
catcgactctcttgacttgccaaca

SEQ ID NO: 168501 - DNA, 25 bp, Homo sapien
tggatcatcgactctcttgacttgc

SEQ ID NO: 168502 - DNA, 25 bp, Homo sapien
gctgtttacacaagtccagacgctg

SEQ ID NO: 168503 - DNA, 25 bp, Homo sapien
ttcggctggacacgcaaccatgtga

SEQ ID NO: 168504 - DNA, 25 bp, Homo sapien
ccagggcctgttgggatcagctcag

SEQ ID NO: 168505 - DNA, 25 bp, Homo sapien
tgtttattacactgcttcggctgga

SEQ ID NO: 168506 - DNA, 25 bp, Homo sapien
ttaccaacgacgccgtgacgtcaca

SEQ ID NO: 168507 - DNA, 25 bp, Homo sapien
gctgcgcgcccatccgcgggcgaga

SEQ ID NO: 168508 - DNA, 25 bp, Homo sapien
gacgccgtgacgtcacagctgcgcg

SEQ ID NO: 168509 - DNA, 25 bp, Homo sapien
caacgacgccgtgacgtcacagctg

SEQ ID NO: 168510 - DNA, 25 bp, Homo sapien
cggggccgggagctacgcagctccc

SEQ ID NO: 168511 - DNA, 25 bp, Homo sapien
cgggagctacgcagctccccggccg

SEQ ID NO: 168512 - DNA, 25 bp, Homo sapien
ccgggagctacgcagctccccggcc

SEQ ID NO: 168513 - DNA, 25 bp, Homo sapien
gggccgggagctacgcagctccccg

SEQ ID NO: 168514 - DNA, 25 bp, Homo sapien
tcacgcggaccttgagctgtagcgg

SEQ ID NO: 168515 - DNA, 25 bp, Homo sapien
cgaagacctcctgcgagtagcgctc

SEQ ID NO: 168516 - DNA, 25 bp, Homo sapien
aactccctctggctcacgcggacct

SEQ ID NO: 168517 - DNA, 25 bp, Homo sapien
aagacctcctgcgagtagcgctcgg

SEQ ID NO: 168518 - DNA, 25 bp, Homo sapien
ggtccaatcagcatctgcccacgtg

SEQ ID NO: 168519 - DNA, 25 bp, Homo sapien
atcaggcggccgtctggtccaatca

SEQ ID NO: 168520 - DNA, 25 bp, Homo sapien
gactctggcaggtgaacgacggcac

SEQ ID NO: 168521 - DNA, 25 bp, Homo sapien
tcatcccacacgtggtccaggtagg

SEQ ID NO: 168522 - DNA, 25 bp, Homo sapien
tgtgaggaagaaacgccaagccgtc

SEQ ID NO: 168523 - DNA, 25 bp, Homo sapien
tgacaacccgtgagcctggtacagt

SEQ ID NO: 168524 - DNA, 25 bp, Homo sapien
tgagaccccacactgcatagggatg

SEQ ID NO: 168525 - DNA, 25 bp, Homo sapien
tcaagaaaaatgctcgtgccaccac

SEQ ID NO: 168526 - DNA, 25 bp, Homo sapien
gcccgcacagggctcgctcacactg

SEQ ID NO: 168527 - DNA, 25 bp, Homo sapien
gcagaccgccttcccatccacggct

SEQ ID NO: 168528 - DNA, 25 bp, Homo sapien
agggctcgctcacactgaccgcaga

SEQ ID NO: 168529 - DNA, 25 bp, Homo sapien
atccacggctcgcacgcatgaggaa

SEQ ID NO: 168530 - DNA, 25 bp, Homo sapien
ccacacagggtacaggccacggagc

SEQ ID NO: 168531 - DNA, 25 bp, Homo sapien
cacacagggtacaggccacggagcc

SEQ ID NO: 168532 - DNA, 25 bp, Homo sapien
acacagggtacaggccacggagccg

SEQ ID NO: 168533 - DNA, 25 bp, Homo sapien
tgagagggtctacaaccaaacggca

SEQ ID NO: 168534 - DNA, 25 bp, Homo sapien
caaacggcacgcatgactgtggtga

SEQ ID NO: 168535 - DNA, 25 bp, Homo sapien
ctgaagacagggactagagccggat

SEQ ID NO: 168536 - DNA, 25 bp, Homo sapien
catgtcccgttaggcaatgccagat

SEQ ID NO: 168537 - DNA, 25 bp, Homo sapien
tagctgcgataaaagagtgtgtcca

SEQ ID NO: 168538 - DNA, 25 bp, Homo sapien
tgagagggccaccagacaatgagaa

SEQ ID NO: 168539 - DNA, 25 bp, Homo sapien
taaaccagagccgtgtggacagatc

SEQ ID NO: 168540 - DNA, 25 bp, Homo sapien
caacgtgaactctgtgggtatggga

SEQ ID NO: 168541 - DNA, 25 bp, Homo sapien
atcagcaggacgccaaaggctgctg

SEQ ID NO: 168542 - DNA, 25 bp, Homo sapien
tcagcaggacgccaaaggctgctgg

SEQ ID NO: 168543 - DNA, 25 bp, Homo sapien
cagaggacgggccaggcgtgggcca

SEQ ID NO: 168544 - DNA, 25 bp, Homo sapien
ctgcagaggacgggccaggcgtggg

SEQ ID NO: 168545 - DNA, 25 bp, Homo sapien
tatatcaagactaagggtagggccg

SEQ ID NO: 168546 - DNA, 25 bp, Homo sapien
tatgccactgggtctgcgaactcag

SEQ ID NO: 168547 - DNA, 25 bp, Homo sapien
aatggctaccccaaacacgacaggg

SEQ ID NO: 168548 - DNA, 25 bp, Homo sapien
gacaggatcactgcgggcatcatca

SEQ ID NO: 168549 - DNA, 25 bp, Homo sapien
tgcacagcactttctcgtacatgtc

SEQ ID NO: 168550 - DNA, 25 bp, Homo sapien
gtgcacagcactttctcgtacatgt

SEQ ID NO: 168551 - DNA, 25 bp, Homo sapien
aaggctgccatgcacggcgtggctc

SEQ ID NO: 168552 - DNA, 25 bp, Homo sapien
ttctgtcattaggatacaaaataga

SEQ ID NO: 168553 - DNA, 25 bp, Homo sapien
gtgtgaacaccgagcgctcgtccag

SEQ ID NO: 168554 - DNA, 25 bp, Homo sapien
cgtcgaccccacagttcagtgtgaa

SEQ ID NO: 168555 - DNA, 25 bp, Homo sapien
tacaatccaggatactgtgttgcat

SEQ ID NO: 168556 - DNA, 25 bp, Homo sapien
tgaatgaatgtagctccccagccct

SEQ ID NO: 168557 - DNA, 25 bp, Homo sapien
tacacatacaatccaggatactgtg

SEQ ID NO: 168558 - DNA, 25 bp, Homo sapien
ccaggatactgtgttgcatttagaa

SEQ ID NO: 168559 - DNA, 25 bp, Homo sapien
agtttgtttctcacatgcccacatc

SEQ ID NO: 168560 - DNA, 25 bp, Homo sapien
ttttgctgttctccggtctctgagg

SEQ ID NO: 168561 - DNA, 25 bp, Homo sapien
tgtttctcacatgcccacatcatgc

SEQ ID NO: 168562 - DNA, 25 bp, Homo sapien
gctgttctccggtctctgaggtctc

SEQ ID NO: 168563 - DNA, 25 bp, Homo sapien
caaaacgttgggattataaggtgtg

SEQ ID NO: 168564 - DNA, 25 bp, Homo sapien
caccacacctggcctcttagggata

SEQ ID NO: 168565 - DNA, 25 bp, Homo sapien
cacacctggcctcttagggatagtt

SEQ ID NO: 168566 - DNA, 25 bp, Homo sapien
agccaccacacctggcctcttaggg

SEQ ID NO: 168567 - DNA, 25 bp, Homo sapien
caggcccctggcgatggcaattggc

SEQ ID NO: 168568 - DNA, 25 bp, Homo sapien
actgccgagcaactgacagcgggtt

SEQ ID NO: 168569 - DNA, 25 bp, Homo sapien
agaatgtgccggtgctgccacctgg

SEQ ID NO: 168570 - DNA, 25 bp, Homo sapien
ctcaaatggactccccgtaggtgtg

SEQ ID NO: 168571 - DNA, 25 bp, Homo sapien
tgcatttgagagaagccacgctgtc

SEQ ID NO: 168572 - DNA, 25 bp, Homo sapien
gaacaatccgattcacgtagggaaa

SEQ ID NO: 168573 - DNA, 25 bp, Homo sapien
taaggacttctgcagctatgcgcaa

SEQ ID NO: 168574 - DNA, 25 bp, Homo sapien
cactaaggccgtgtctctgaggacg

SEQ ID NO: 168575 - DNA, 25 bp, Homo sapien
gagttcacggcccagatgatcacca

SEQ ID NO: 168576 - DNA, 25 bp, Homo sapien
tttgatgaggagttcacggcccaga

SEQ ID NO: 168577 - DNA, 25 bp, Homo sapien
ggtattttgatgaggagttcacggc

SEQ ID NO: 168578 - DNA, 25 bp, Homo sapien
gactgacaccaggtattttgatgag

SEQ ID NO: 168579 - DNA, 25 bp, Homo sapien
ggaggagtggacaaccgccatccag

SEQ ID NO: 168580 - DNA, 25 bp, Homo sapien
cgccatccagactgtggctgacggc

SEQ ID NO: 168581 - DNA, 25 bp, Homo sapien
tcgggctcacccagtgacaactcag

SEQ ID NO: 168582 - DNA, 25 bp, Homo sapien
gaggagatggacttccggtcgggct

SEQ ID NO: 168583 - DNA, 25 bp, Homo sapien
ggaccactgtcatcgaacgcacctt

SEQ ID NO: 168584 - DNA, 25 bp, Homo sapien
cctgcagtggaccactgtcatcgaa

SEQ ID NO: 168585 - DNA, 25 bp, Homo sapien
gtcatcgaacgcaccttccatgtgg

SEQ ID NO: 168586 - DNA, 25 bp, Homo sapien
cagtggaccactgtcatcgaacgca

SEQ ID NO: 168587 - DNA, 25 bp, Homo sapien
ccggtcgccgctcgcgcgcgcgccc

SEQ ID NO: 168588 - DNA, 25 bp, Homo sapien
ccgccccgagctcctctccggtcgc

SEQ ID NO: 168589 - DNA, 25 bp, Homo sapien
agctcctctccggtcgccgctcgcg

SEQ ID NO: 168590 - DNA, 25 bp, Homo sapien
gcggccctggcgcgcgtggagctgc

SEQ ID NO: 168591 - DNA, 25 bp, Homo sapien
ccgtcagcgcgcctggaggcgccca

SEQ ID NO: 168592 - DNA, 25 bp, Homo sapien
cggctgcaggcagcgcggaaagagc

SEQ ID NO: 168593 - DNA, 25 bp, Homo sapien
ggcacaaacgggacgcccgtcagcg

SEQ ID NO: 168594 - DNA, 25 bp, Homo sapien
tggaggcgcccacgaagcgcccttc

SEQ ID NO: 168595 - DNA, 25 bp, Homo sapien
ccgtgacgatgtcgccgttgagccg

SEQ ID NO: 168596 - DNA, 25 bp, Homo sapien
gtacatgaagtccagtaggcggccg

SEQ ID NO: 168597 - DNA, 25 bp, Homo sapien
aagagatggaagtagacgctgcacg

SEQ ID NO: 168598 - DNA, 25 bp, Homo sapien
acggtgcagtcgcataggaagccca

SEQ ID NO: 168599 - DNA, 25 bp, Homo sapien
cagacttcgatccttctcctggagc

SEQ ID NO: 168600 - DNA, 25 bp, Homo sapien
gggtccagacttcgatccttctcct

SEQ ID NO: 168601 - DNA, 25 bp, Homo sapien
cccgggtccagacttcgatccttct

SEQ ID NO: 168602 - DNA, 25 bp, Homo sapien
tccagacttcgatccttctcctgga

SEQ ID NO: 168603 - DNA, 25 bp, Homo sapien
agaggtccgcggtccagacaggcca

SEQ ID NO: 168604 - DNA, 25 bp, Homo sapien
gggcagaggtccgcggtccagacag

SEQ ID NO: 168605 - DNA, 25 bp, Homo sapien
gggagcttggcctttcgggcagctg

SEQ ID NO: 168606 - DNA, 25 bp, Homo sapien
agcttggcctttcgggcagctgggc

SEQ ID NO: 168607 - DNA, 25 bp, Homo sapien
gccagacttcaacgacaggtccagg

SEQ ID NO: 168608 - DNA, 25 bp, Homo sapien
ggtgtctggaggacgcacggtgggt

SEQ ID NO: 168609 - DNA, 25 bp, Homo sapien
gccttgggccagacttcaacgacag

SEQ ID NO: 168610 - DNA, 25 bp, Homo sapien
acgcacggtgggtggacccgctcct

SEQ ID NO: 168611 - DNA, 25 bp, Homo sapien
gctctcctcctgttcggacagtgag

SEQ ID NO: 168612 - DNA, 25 bp, Homo sapien
tcctgttcggacagtgagtcccgtt

SEQ ID NO: 168613 - DNA, 25 bp, Homo sapien
acagtgagtcccgttcgtccttcac

SEQ ID NO: 168614 - DNA, 25 bp, Homo sapien
tcggacagtgagtcccgttcgtcct

SEQ ID NO: 168615 - DNA, 25 bp, Homo sapien
ggccccagctcgtcctcactcgcca

SEQ ID NO: 168616 - DNA, 25 bp, Homo sapien
agtcgccctgcaccaagctccagct

SEQ ID NO: 168617 - DNA, 25 bp, Homo sapien
gtcctcactcgccagtcgccctgca

SEQ ID NO: 168618 - DNA, 25 bp, Homo sapien
gggcagcggctgcaagcccaccacc

SEQ ID NO: 168619 - DNA, 25 bp, Homo sapien
cagcacgtgggagctgggaaacagc

SEQ ID NO: 168620 - DNA, 25 bp, Homo sapien
tgcagcacgtgggagctgggaaaca

SEQ ID NO: 168621 - DNA, 25 bp, Homo sapien
cacgtgggagctgggaaacagcttg

SEQ ID NO: 168622 - DNA, 25 bp, Homo sapien
ctgcagcacgtgggagctgggaaac

SEQ ID NO: 168623 - DNA, 25 bp, Homo sapien
caggcatgcggcttctctcgagtgt

SEQ ID NO: 168624 - DNA, 25 bp, Homo sapien
tgtatgtgcacgagaaggtcttccc

SEQ ID NO: 168625 - DNA, 25 bp, Homo sapien
cgggtgctgtctcgctcacggaagt

SEQ ID NO: 168626 - DNA, 25 bp, Homo sapien
tgacgaggccacagtgaaacttgcg

SEQ ID NO: 168627 - DNA, 25 bp, Homo sapien
tattcatgttcgaggagcgtcagtc

SEQ ID NO: 168628 - DNA, 25 bp, Homo sapien
ggcgacctgaaccaacgacatgtgt

SEQ ID NO: 168629 - DNA, 25 bp, Homo sapien
gagtgaccgtcaaggtaaggcccac

SEQ ID NO: 168630 - DNA, 25 bp, Homo sapien
gaaggctgcccaagttaccgagtct

SEQ ID NO: 168631 - DNA, 25 bp, Homo sapien
tccttcccgacctgttggtggtgca

SEQ ID NO: 168632 - DNA, 25 bp, Homo sapien
caaaggggacctggactgtcccaca

SEQ ID NO: 168633 - DNA, 25 bp, Homo sapien
tgtccaggagaacaagcacaaaggg

SEQ ID NO: 168634 - DNA, 25 bp, Homo sapien
agcagtgcatgggacagcagcgggg

SEQ ID NO: 168635 - DNA, 25 bp, Homo sapien
ggaagtgcaaactcccttgggcaat

SEQ ID NO: 168636 - DNA, 25 bp, Homo sapien
gtatcgcaccaagtaacgcgcagcg

SEQ ID NO: 168637 - DNA, 25 bp, Homo sapien
ggcccgtaaccaagaagcgagcaag

SEQ ID NO: 168638 - DNA, 25 bp, Homo sapien
agaaatccgtgttccacccgggcat

SEQ ID NO: 168639 - DNA, 25 bp, Homo sapien
tgagacggggtcgggattctccctc

SEQ ID NO: 168640 - DNA, 25 bp, Homo sapien
gacggggtcgggattctccctcatc

SEQ ID NO: 168641 - DNA, 25 bp, Homo sapien
gagacggggtcgggattctccctca

SEQ ID NO: 168642 - DNA, 25 bp, Homo sapien
agacggggtcgggattctccctcat

SEQ ID NO: 168643 - DNA, 25 bp, Homo sapien
acttcgagctctgcctcagttgtca

SEQ ID NO: 168644 - DNA, 25 bp, Homo sapien
cagttgtcacatggtggatggttaa

SEQ ID NO: 168645 - DNA, 25 bp, Homo sapien
tagtaaactgcgtacagaagaccca

SEQ ID NO: 168646 - DNA, 25 bp, Homo sapien
ggtgagcactgtccaatctgagggc

SEQ ID NO: 168647 - DNA, 25 bp, Homo sapien
gctgtgtagcttataggactctcgc

SEQ ID NO: 168648 - DNA, 25 bp, Homo sapien
aaggatcgctctgctcccagggaga

SEQ ID NO: 168649 - DNA, 25 bp, Homo sapien
ggaatgtagcttggctggctcccag

SEQ ID NO: 168650 - DNA, 25 bp, Homo sapien
gatatgtgctctgaattccctcccc

SEQ ID NO: 168651 - DNA, 25 bp, Homo sapien
tcggaaatacccaaggtggtgggca

SEQ ID NO: 168652 - DNA, 25 bp, Homo sapien
gtggtgggcatcgtctccacgttca

SEQ ID NO: 168653 - DNA, 25 bp, Homo sapien
tcgtctccacgttcatctggacagc

SEQ ID NO: 168654 - DNA, 25 bp, Homo sapien
tcatgggctcccacattcggaaata

SEQ ID NO: 168655 - DNA, 25 bp, Homo sapien
tgcctgcacctctaaatgagttcga

SEQ ID NO: 168656 - DNA, 25 bp, Homo sapien
aagggcgtgaaggtcagggtccctg

SEQ ID NO: 168657 - DNA, 25 bp, Homo sapien
tgtaaattatgtcacatgactctgc

SEQ ID NO: 168658 - DNA, 25 bp, Homo sapien
tgcaagtacatttctggggtccctc

SEQ ID NO: 168659 - DNA, 25 bp, Homo sapien
gtcgaggtgcctggtagagacccca

SEQ ID NO: 168660 - DNA, 25 bp, Homo sapien
ggtccgtggaaaactagggcagctc

SEQ ID NO: 168661 - DNA, 25 bp, Homo sapien
tcagagccggcctgagtgaggactc

SEQ ID NO: 168662 - DNA, 25 bp, Homo sapien
cagaagctgttacgggtcgaattgt

SEQ ID NO: 168663 - DNA, 25 bp, Homo sapien
cccactctggtaaggtggggtcgca

SEQ ID NO: 168664 - DNA, 25 bp, Homo sapien
actgccgagctgaccgctggagaag

SEQ ID NO: 168665 - DNA, 25 bp, Homo sapien
tctggggcactgctcgatattccca

SEQ ID NO: 168666 - DNA, 25 bp, Homo sapien
ggtgggaatgctgcctcaggtgagg

SEQ ID NO: 168667 - DNA, 25 bp, Homo sapien
cagaatgccgaactggaggtggcca

SEQ ID NO: 168668 - DNA, 25 bp, Homo sapien
gagactgcaccccttaacactgaga

SEQ ID NO: 168669 - DNA, 25 bp, Homo sapien
gaacaggcttctaacctgggaccga

SEQ ID NO: 168670 - DNA, 25 bp, Homo sapien
cacagagtggccgtgacagctaatc

SEQ ID NO: 168671 - DNA, 25 bp, Homo sapien
tcggtggacggacacatcatggcct

SEQ ID NO: 168672 - DNA, 25 bp, Homo sapien
tggatcctcaaagggacgggtcctc

SEQ ID NO: 168673 - DNA, 25 bp, Homo sapien
ccagtgtggcgataagcttgtgtcc

SEQ ID NO: 168674 - DNA, 25 bp, Homo sapien
acacggcgtgccttttgtcgagagc

SEQ ID NO: 168675 - DNA, 25 bp, Homo sapien
actggttgcgcacctcatctggagg

SEQ ID NO: 168676 - DNA, 25 bp, Homo sapien
taggcctaactcacaggcaggagat

SEQ ID NO: 168677 - DNA, 25 bp, Homo sapien
tattttcaaacgtccagcagcacca

SEQ ID NO: 168678 - DNA, 25 bp, Homo sapien
cagatttacgttgattaggcctaac

SEQ ID NO: 168679 - DNA, 25 bp, Homo sapien
acaaagcgacctccccgaatgcaaa

SEQ ID NO: 168680 - DNA, 25 bp, Homo sapien
gaatgcaaacccgaccagccgcact

SEQ ID NO: 168681 - DNA, 25 bp, Homo sapien
tcaagagacaaagcgacctccccga

SEQ ID NO: 168682 - DNA, 25 bp, Homo sapien
cttaaaatccttcgacgcttcccat

SEQ ID NO: 168683 - DNA, 25 bp, Homo sapien
gatcctagactaaggcaataagcaa

SEQ ID NO: 168684 - DNA, 25 bp, Homo sapien
tactagaccatgtgcctgacactgt

SEQ ID NO: 168685 - DNA, 25 bp, Homo sapien
aaacaactccatctgcatgcgatag

SEQ ID NO: 168686 - DNA, 25 bp, Homo sapien
taaaatgttaggtagtggcaggtac

SEQ ID NO: 168687 - DNA, 25 bp, Homo sapien
gagaaatcccacagacccggagtgt

SEQ ID NO: 168688 - DNA, 25 bp, Homo sapien
gcactgagcgcggattctgggaata

SEQ ID NO: 168689 - DNA, 25 bp, Homo sapien
taagagacctgaacgctggacacat

SEQ ID NO: 168690 - DNA, 25 bp, Homo sapien
catccgttgccagaaagaggcgcta

SEQ ID NO: 168691 - DNA, 25 bp, Homo sapien
tctcgagaatcgttgtgcaatgccc

SEQ ID NO: 168692 - DNA, 25 bp, Homo sapien
taattcgtgtacacgctgcatgcca

SEQ ID NO: 168693 - DNA, 25 bp, Homo sapien
gagacggtagcatttggacagccca

SEQ ID NO: 168694 - DNA, 25 bp, Homo sapien
gaagctgttgaaacgcctctcagag

SEQ ID NO: 168695 - DNA, 25 bp, Homo sapien
aagtgtcctctgtgtggcggcccag

SEQ ID NO: 168696 - DNA, 25 bp, Homo sapien
tacaagtgtcctctgtgtggcggcc

SEQ ID NO: 168697 - DNA, 25 bp, Homo sapien
agcggctcccccgttctacaagtgt

SEQ ID NO: 168698 - DNA, 25 bp, Homo sapien
ccccgttctacaagtgtcctctgtg

SEQ ID NO: 168699 - DNA, 25 bp, Homo sapien
cagggacacgggttcaggtctgctg

SEQ ID NO: 168700 - DNA, 25 bp, Homo sapien
tacgttctgcaggatttggtccagg

SEQ ID NO: 168701 - DNA, 25 bp, Homo sapien
ggtctgctgtctgctgaacctacgt

SEQ ID NO: 168702 - DNA, 25 bp, Homo sapien
gggctgagattgtgaccaccctcag

SEQ ID NO: 168703 - DNA, 25 bp, Homo sapien
gcacctgggcctgctcgcaatccag

SEQ ID NO: 168704 - DNA, 25 bp, Homo sapien
cttcacggatctcagccccagcaga

SEQ ID NO: 168705 - DNA, 25 bp, Homo sapien
ggcgcctctccgcatctgccttcac

SEQ ID NO: 168706 - DNA, 25 bp, Homo sapien
tgggcctgctcgcaatccagcggcg

SEQ ID NO: 168707 - DNA, 25 bp, Homo sapien
cggcttgttccccagctcggcccgg

SEQ ID NO: 168708 - DNA, 25 bp, Homo sapien
tgctgttcgggctcggtctccggct

SEQ ID NO: 168709 - DNA, 25 bp, Homo sapien
gctcgccttagtccccggcttggtc

SEQ ID NO: 168710 - DNA, 25 bp, Homo sapien
gccgcctaggacatgcccggcgagg

SEQ ID NO: 168711 - DNA, 25 bp, Homo sapien
tcacactcctcacgccccacgaaga

SEQ ID NO: 168712 - DNA, 25 bp, Homo sapien
cccacgaagatgagctcccgaggga

SEQ ID NO: 168713 - DNA, 25 bp, Homo sapien
gaaccaggacgtggcactcatcttg

SEQ ID NO: 168714 - DNA, 25 bp, Homo sapien
accaggaaccaggacgtggcactca

SEQ ID NO: 168715 - DNA, 25 bp, Homo sapien
cctcagcacaacataggcaggtgtc

SEQ ID NO: 168716 - DNA, 25 bp, Homo sapien
ggcaggtgtctgctgaccgcccagt

SEQ ID NO: 168717 - DNA, 25 bp, Homo sapien
cttgggcctcagcacaacataggca

SEQ ID NO: 168718 - DNA, 25 bp, Homo sapien
cagcacaacataggcaggtgtctgc

SEQ ID NO: 168719 - DNA, 25 bp, Homo sapien
ccggctcgatgcacggggcacagaa

SEQ ID NO: 168720 - DNA, 25 bp, Homo sapien
acccgcagcagaccggctcgatgca

SEQ ID NO: 168721 - DNA, 25 bp, Homo sapien
gagttccccattggcggccacaggc

SEQ ID NO: 168722 - DNA, 25 bp, Homo sapien
cgagttccccattggcggccacagg

SEQ ID NO: 168723 - DNA, 25 bp, Homo sapien
caagccacggtggttgcgctgcaga

SEQ ID NO: 168724 - DNA, 25 bp, Homo sapien
tggttgcgctgcagaggaggaccgg

SEQ ID NO: 168725 - DNA, 25 bp, Homo sapien
tggctcaagccacggtggttgcgct

SEQ ID NO: 168726 - DNA, 25 bp, Homo sapien
agtgggcactcagaagccctgggtg

SEQ ID NO: 168727 - DNA, 25 bp, Homo sapien
cagtgctcgtccctgtcctggtcgt

SEQ ID NO: 168728 - DNA, 25 bp, Homo sapien
agtgctcgtccctgtcctggtcgta

SEQ ID NO: 168729 - DNA, 25 bp, Homo sapien
cattgaggctgcccaggtccttcac

SEQ ID NO: 168730 - DNA, 25 bp, Homo sapien
cccattgaggctgcccaggtccttc

SEQ ID NO: 168731 - DNA, 25 bp, Homo sapien
attgaggctgcccaggtccttcacc

SEQ ID NO: 168732 - DNA, 25 bp, Homo sapien
ccattgaggctgcccaggtccttca

SEQ ID NO: 168733 - DNA, 25 bp, Homo sapien
agcccatgtgggtgacgcagtccac

SEQ ID NO: 168734 - DNA, 25 bp, Homo sapien
acaggcagaggagcggccacttgct

SEQ ID NO: 168735 - DNA, 25 bp, Homo sapien
gggtgacgcagtccacacaggcaga

SEQ ID NO: 168736 - DNA, 25 bp, Homo sapien
ggacagccgcttcatcagacaggca

SEQ ID NO: 168737 - DNA, 25 bp, Homo sapien
atcgttgagcttcagcgtgacgtac

SEQ ID NO: 168738 - DNA, 25 bp, Homo sapien
agcgtgacgtacttctggtccggga

SEQ ID NO: 168739 - DNA, 25 bp, Homo sapien
ggatgcgcatgtcattcacaaacgt

SEQ ID NO: 168740 - DNA, 25 bp, Homo sapien
cttctggtccgggatgcgcatgtca

SEQ ID NO: 168741 - DNA, 25 bp, Homo sapien
agggtgactgtggtcctggggactg

SEQ ID NO: 168742 - DNA, 25 bp, Homo sapien
gtcctggggactgagaagaagccca

SEQ ID NO: 168743 - DNA, 25 bp, Homo sapien
tggtcctggggactgagaagaagcc

SEQ ID NO: 168744 - DNA, 25 bp, Homo sapien
tgtggtcctggggactgagaagaag

SEQ ID NO: 168745 - DNA, 25 bp, Homo sapien
gtgacagccctgcttctggagtaac

SEQ ID NO: 168746 - DNA, 25 bp, Homo sapien
cagtgacagccctgcttctggagta

SEQ ID NO: 168747 - DNA, 25 bp, Homo sapien
cagcagtgacagccctgcttctgga

SEQ ID NO: 168748 - DNA, 25 bp, Homo sapien
cccagcagtgacagccctgcttctg

SEQ ID NO: 168749 - DNA, 25 bp, Homo sapien
gacacgtgttaaggcgaacacagag

SEQ ID NO: 168750 - DNA, 25 bp, Homo sapien
acgcccagcaacaggtgtgccagct

SEQ ID NO: 168751 - DNA, 25 bp, Homo sapien
gaagtccacgcccagcaacaggtgt

SEQ ID NO: 168752 - DNA, 25 bp, Homo sapien
gtgccagctcaagggcccatcgagg

SEQ ID NO: 168753 - DNA, 25 bp, Homo sapien
agtgcctcctccgggactcggtgct

SEQ ID NO: 168754 - DNA, 25 bp, Homo sapien
tgagtgcctcctccgggactcggtg

SEQ ID NO: 168755 - DNA, 25 bp, Homo sapien
tcctccgggactcggtgctgcacac

SEQ ID NO: 168756 - DNA, 25 bp, Homo sapien
tgcctcctccgggactcggtgctgc

SEQ ID NO: 168757 - DNA, 25 bp, Homo sapien
tcgcagtatggtgtgtgttccggca

SEQ ID NO: 168758 - DNA, 25 bp, Homo sapien
tcttgggcgccaaacccttcacgct

SEQ ID NO: 168759 - DNA, 25 bp, Homo sapien
tgtgttccggcagtgcctcgctcct

SEQ ID NO: 168760 - DNA, 25 bp, Homo sapien
ttcgaggcctcgcagtatggtgtgt

SEQ ID NO: 168761 - DNA, 25 bp, Homo sapien
aggcagcgtgctaccatcgtcctca

SEQ ID NO: 168762 - DNA, 25 bp, Homo sapien
gcgtcaggcagcgtgctaccatcgt

SEQ ID NO: 168763 - DNA, 25 bp, Homo sapien
cccatacaggggtgtgcggtaagag

SEQ ID NO: 168764 - DNA, 25 bp, Homo sapien
tggcgctgggcgtcaggcagcgtgc

SEQ ID NO: 168765 - DNA, 25 bp, Homo sapien
gcaggctcgggtcattctgcaccag

SEQ ID NO: 168766 - DNA, 25 bp, Homo sapien
tgcatccttcgtgggcatctcgtgt

SEQ ID NO: 168767 - DNA, 25 bp, Homo sapien
tcaaactcgatggtgaaggaggcgt

SEQ ID NO: 168768 - DNA, 25 bp, Homo sapien
gctcttggtgctgtggcggtcatcc

SEQ ID NO: 168769 - DNA, 25 bp, Homo sapien
tgaaggactgggagcgcttctttcg

SEQ ID NO: 168770 - DNA, 25 bp, Homo sapien
cctcggtctcgatggtgtatgtccc

SEQ ID NO: 168771 - DNA, 25 bp, Homo sapien
tatgtccctgcgtcactgaggctgt

SEQ ID NO: 168772 - DNA, 25 bp, Homo sapien
ggtgtgtcctcgtcgaagaactcga

SEQ ID NO: 168773 - DNA, 25 bp, Homo sapien
tctgtcccctctgatgactgggcga

SEQ ID NO: 168774 - DNA, 25 bp, Homo sapien
tcctgcagtagcgccatccgctggg

SEQ ID NO: 168775 - DNA, 25 bp, Homo sapien
tgggcgaaaggtggccgaagatgcc

SEQ ID NO: 168776 - DNA, 25 bp, Homo sapien
cagtggccgggaggcaaactcctgc

SEQ ID NO: 168777 - DNA, 25 bp, Homo sapien
aggcccgggtctgagtagctgtcag

SEQ ID NO: 168778 - DNA, 25 bp, Homo sapien
ccagcgggacacccacttctgaccc

SEQ ID NO: 168779 - DNA, 25 bp, Homo sapien
cagcgggacacccacttctgacccc

SEQ ID NO: 168780 - DNA, 25 bp, Homo sapien
gcccgggtctgagtagctgtcagcc

SEQ ID NO: 168781 - DNA, 25 bp, Homo sapien
tgagggagccgtcgccgcatgcgca

SEQ ID NO: 168782 - DNA, 25 bp, Homo sapien
gccgcatgcgcacaggcagggaccc

SEQ ID NO: 168783 - DNA, 25 bp, Homo sapien
ccactggcatcgctgaggctgtcag

SEQ ID NO: 168784 - DNA, 25 bp, Homo sapien
aggatccaactcctcctggccgaag

SEQ ID NO: 168785 - DNA, 25 bp, Homo sapien
gggctcctgcgtctgctgtcctgtg

SEQ ID NO: 168786 - DNA, 25 bp, Homo sapien
gctcctgcgtctgctgtcctgtggc

SEQ ID NO: 168787 - DNA, 25 bp, Homo sapien
tcctgcgtctgctgtcctgtggctc

SEQ ID NO: 168788 - DNA, 25 bp, Homo sapien
ctgggggctcctgcgtctgctgtcc

SEQ ID NO: 168789 - DNA, 25 bp, Homo sapien
gcaagcggtttcctagataacacag

SEQ ID NO: 168790 - DNA, 25 bp, Homo sapien
ccctggagccgcaagcggtttccta

SEQ ID NO: 168791 - DNA, 25 bp, Homo sapien
gctgggctgtctgccctaggccctc

SEQ ID NO: 168792 - DNA, 25 bp, Homo sapien
ttggcactgacatagacgccatccc

SEQ ID NO: 168793 - DNA, 25 bp, Homo sapien
ctggggcagggccgtcgggttctgg

SEQ ID NO: 168794 - DNA, 25 bp, Homo sapien
gagaaaggctggggcagggccgtcg

SEQ ID NO: 168795 - DNA, 25 bp, Homo sapien
cttgccggagaaaggctggggcagg

SEQ ID NO: 168796 - DNA, 25 bp, Homo sapien
gctggggcagggccgtcgggttctg

SEQ ID NO: 168797 - DNA, 25 bp, Homo sapien
tctccttcaagatcaggtgggtgtc

SEQ ID NO: 168798 - DNA, 25 bp, Homo sapien
cactcggcatccacagaattagaga

SEQ ID NO: 168799 - DNA, 25 bp, Homo sapien
gaattagagaggagtcgggcctcca

SEQ ID NO: 168800 - DNA, 25 bp, Homo sapien
ggtttcgtggttggaggccatcaca

SEQ ID NO: 168801 - DNA, 25 bp, Homo sapien
tgagccacagtactgcggcagagat

SEQ ID NO: 168802 - DNA, 25 bp, Homo sapien
gagccgcatgcttgggtcaaacacc

SEQ ID NO: 168803 - DNA, 25 bp, Homo sapien
aagggtgttagagcagctaccagcg

SEQ ID NO: 168804 - DNA, 25 bp, Homo sapien
gcctgcttgagtttgtcagacccaa

SEQ ID NO: 168805 - DNA, 25 bp, Homo sapien
agccgtggcgggagccgtactcctc

SEQ ID NO: 168806 - DNA, 25 bp, Homo sapien
ctcctcagaggtggacgtgtaatcc

SEQ ID NO: 168807 - DNA, 25 bp, Homo sapien
cgggagccgtactcctcctcagagg

SEQ ID NO: 168808 - DNA, 25 bp, Homo sapien
tggacgtgtaatccgagccctgctg

SEQ ID NO: 168809 - DNA, 25 bp, Homo sapien
tctgcacgatgaaaccataagggtc

SEQ ID NO: 168810 - DNA, 25 bp, Homo sapien
tggcaatctccgcaatctctgccgt

SEQ ID NO: 168811 - DNA, 25 bp, Homo sapien
gcccgggaacgagcccggctggagc

SEQ ID NO: 168812 - DNA, 25 bp, Homo sapien
tcctcatcgtcgtccgtgtcccggg

SEQ ID NO: 168813 - DNA, 25 bp, Homo sapien
gcagccggcaggaaagacggcaggt

SEQ ID NO: 168814 - DNA, 25 bp, Homo sapien
tgcagccggcaggaaagacggcagg

SEQ ID NO: 168815 - DNA, 25 bp, Homo sapien
cagccggcaggaaagacggcaggtt

SEQ ID NO: 168816 - DNA, 25 bp, Homo sapien
ctgcagccggcaggaaagacggcag

SEQ ID NO: 168817 - DNA, 25 bp, Homo sapien
cctgggctaggatggccacgtcctt

SEQ ID NO: 168818 - DNA, 25 bp, Homo sapien
ctgagggaggcgctgtgggcaggct

SEQ ID NO: 168819 - DNA, 25 bp, Homo sapien
cgtccccagccacatcgtggatctc

SEQ ID NO: 168820 - DNA, 25 bp, Homo sapien
aggctccgaggagcccagtgtgtca

SEQ ID NO: 168821 - DNA, 25 bp, Homo sapien
tcaaagtcccgagagttcagcgagc

SEQ ID NO: 168822 - DNA, 25 bp, Homo sapien
tctcggttccgaggccgcgtcttgt

SEQ ID NO: 168823 - DNA, 25 bp, Homo sapien
tcttgttggccagggcgtcctcaca

SEQ ID NO: 168824 - DNA, 25 bp, Homo sapien
tcacagctgtcgttcatgttctggt

SEQ ID NO: 168825 - DNA, 25 bp, Homo sapien
ccagctccgtggcggtagtgggcac

SEQ ID NO: 168826 - DNA, 25 bp, Homo sapien
ctctgtgttctcacggatggcctgc

SEQ ID NO: 168827 - DNA, 25 bp, Homo sapien
tcatcttctcggcaaggtgctctgt

SEQ ID NO: 168828 - DNA, 25 bp, Homo sapien
catcttctcggcaaggtgctctgtg

SEQ ID NO: 168829 - DNA, 25 bp, Homo sapien
gttctcacggatggcctgcgacagc

SEQ ID NO: 168830 - DNA, 25 bp, Homo sapien
catgaaaccgctgcccttgagggat

SEQ ID NO: 168831 - DNA, 25 bp, Homo sapien
catctgtgcctgacactcggcggtg

SEQ ID NO: 168832 - DNA, 25 bp, Homo sapien
catacacgtgcacacgggagggctg

SEQ ID NO: 168833 - DNA, 25 bp, Homo sapien
gtgcacacgagtacccatgaaaccg

SEQ ID NO: 168834 - DNA, 25 bp, Homo sapien
ctcggcgttgatcctggcttccagg

SEQ ID NO: 168835 - DNA, 25 bp, Homo sapien
gcacctcgttctcggcgttgatcct

SEQ ID NO: 168836 - DNA, 25 bp, Homo sapien
ttctcggcgttgatcctggcttcca

SEQ ID NO: 168837 - DNA, 25 bp, Homo sapien
ctcgttctcggcgttgatcctggct

SEQ ID NO: 168838 - DNA, 25 bp, Homo sapien
cctcagttccttcaggatggagctg

SEQ ID NO: 168839 - DNA, 25 bp, Homo sapien
cttccagctgtttctgcacccgcct

SEQ ID NO: 168840 - DNA, 25 bp, Homo sapien
agttccttcaggatggagctgattt

SEQ ID NO: 168841 - DNA, 25 bp, Homo sapien
agctgtttctgcacccgcctcagtt

SEQ ID NO: 168842 - DNA, 25 bp, Homo sapien
tcccactggggtccacgatggcatt

SEQ ID NO: 168843 - DNA, 25 bp, Homo sapien
ctggggtccacgatggcattgataa

SEQ ID NO: 168844 - DNA, 25 bp, Homo sapien
ccactggggtccacgatggcattga

SEQ ID NO: 168845 - DNA, 25 bp, Homo sapien
cactggggtccacgatggcattgat

SEQ ID NO: 168846 - DNA, 25 bp, Homo sapien
ctggcccgctgtgggaaattcctca

SEQ ID NO: 168847 - DNA, 25 bp, Homo sapien
ggctcagaggaacagaacccgtaca

SEQ ID NO: 168848 - DNA, 25 bp, Homo sapien
cacgtaaacatcaggtgggccgcag

SEQ ID NO: 168849 - DNA, 25 bp, Homo sapien
gccgcaggccagcacaaagggttat

SEQ ID NO: 168850 - DNA, 25 bp, Homo sapien
tctttggcttagaggctccggcaac

SEQ ID NO: 168851 - DNA, 25 bp, Homo sapien
gatttattagaacaaattccatgac

SEQ ID NO: 168852 - DNA, 25 bp, Homo sapien
ccattttccgaaagacagccacaag

SEQ ID NO: 168853 - DNA, 25 bp, Homo sapien
gaatgtacagtgaaccctccgagaa

SEQ ID NO: 168854 - DNA, 25 bp, Homo sapien
agccacaagaccacctgagaacgaa

SEQ ID NO: 168855 - DNA, 25 bp, Homo sapien
ctgcagcgacagctccctgcccgtc

SEQ ID NO: 168856 - DNA, 25 bp, Homo sapien
tgcccgtcctggctcgcggttccca

SEQ ID NO: 168857 - DNA, 25 bp, Homo sapien
tccctgcccgtcctggctcgcggtt

SEQ ID NO: 168858 - DNA, 25 bp, Homo sapien
gctcgcggttcccacctgcagcgac

SEQ ID NO: 168859 - DNA, 25 bp, Homo sapien
ctccctttccctttgagagtgcaga

SEQ ID NO: 168860 - DNA, 25 bp, Homo sapien
tgctgttccagggtctcccacacgt

SEQ ID NO: 168861 - DNA, 25 bp, Homo sapien
gctgttccagggtctcccacacgtt

SEQ ID NO: 168862 - DNA, 25 bp, Homo sapien
aacttttcagggctgtggtccttct

SEQ ID NO: 168863 - DNA, 25 bp, Homo sapien
tctatcctgattccagccgcagact

SEQ ID NO: 168864 - DNA, 25 bp, Homo sapien
tgctgcctgtgctccacaccaacct

SEQ ID NO: 168865 - DNA, 25 bp, Homo sapien
tgattccagccgcagactgcaggcc

SEQ ID NO: 168866 - DNA, 25 bp, Homo sapien
tcctgccttggtgtctatcctgatt

SEQ ID NO: 168867 - DNA, 25 bp, Homo sapien
tcctcctgcaatggaacctgggagg

SEQ ID NO: 168868 - DNA, 25 bp, Homo sapien
tgagagacccctgcagagtagggct

SEQ ID NO: 168869 - DNA, 25 bp, Homo sapien
cccctggtcccatggtagatagcgt

SEQ ID NO: 168870 - DNA, 25 bp, Homo sapien
aacctgggaggaccgccagccaggt

SEQ ID NO: 168871 - DNA, 25 bp, Homo sapien
gccactgctgctttccaaagaggct

SEQ ID NO: 168872 - DNA, 25 bp, Homo sapien
actgctgctttccaaagaggcttca

SEQ ID NO: 168873 - DNA, 25 bp, Homo sapien
gggggccactgctgctttccaaaga

SEQ ID NO: 168874 - DNA, 25 bp, Homo sapien
ggagcatggccatgtgggggccact

SEQ ID NO: 168875 - DNA, 25 bp, Homo sapien
cagcctctctgtcccacgggcggcg

SEQ ID NO: 168876 - DNA, 25 bp, Homo sapien
gccagcctctctgtcccacgggcgg

SEQ ID NO: 168877 - DNA, 25 bp, Homo sapien
cctctctgtcccacgggcggcgggg

SEQ ID NO: 168878 - DNA, 25 bp, Homo sapien
agcctctctgtcccacgggcggcgg

SEQ ID NO: 168879 - DNA, 25 bp, Homo sapien
gaggacggggcacttgccacaggag

SEQ ID NO: 168880 - DNA, 25 bp, Homo sapien
gaggcagataagagccacggagccc

SEQ ID NO: 168881 - DNA, 25 bp, Homo sapien
aggaggcagataagagccacggagc

SEQ ID NO: 168882 - DNA, 25 bp, Homo sapien
gggaggacggggcacttgccacagg

SEQ ID NO: 168883 - DNA, 25 bp, Homo sapien
ccacgtggacgctctcctgggcagt

SEQ ID NO: 168884 - DNA, 25 bp, Homo sapien
ttgaccccgatgtcaggccctgtga

SEQ ID NO: 168885 - DNA, 25 bp, Homo sapien
cagctgggaagacgagtcgttgacc

SEQ ID NO: 168886 - DNA, 25 bp, Homo sapien
tgagggaccagtagtatgaagccac

SEQ ID NO: 168887 - DNA, 25 bp, Homo sapien
ccgagacgcctgcatagataggcag

SEQ ID NO: 168888 - DNA, 25 bp, Homo sapien
tgcccgagacgcctgcatagatagg

SEQ ID NO: 168889 - DNA, 25 bp, Homo sapien
gcctggtgcccgagacgcctgcata

SEQ ID NO: 168890 - DNA, 25 bp, Homo sapien
gacgcctgcatagataggcagcctg

SEQ ID NO: 168891 - DNA, 25 bp, Homo sapien
acctgcaggtcggtggatgtcctgg

SEQ ID NO: 168892 - DNA, 25 bp, Homo sapien
ggccacagccagggaaatgttcctg

SEQ ID NO: 168893 - DNA, 25 bp, Homo sapien
actgcccatgtatatgtgccgtcca

SEQ ID NO: 168894 - DNA, 25 bp, Homo sapien
cagaatttggagtgcaaaacacccc

SEQ ID NO: 168895 - DNA, 25 bp, Homo sapien
catgggcacctgtcgtacatgggca

SEQ ID NO: 168896 - DNA, 25 bp, Homo sapien
gcgtcagagaccgccagtccatgtt

SEQ ID NO: 168897 - DNA, 25 bp, Homo sapien
cagtggtgggcaccccatcaaagag

SEQ ID NO: 168898 - DNA, 25 bp, Homo sapien
ccaggtggctgcagttatagatgac

SEQ ID NO: 168899 - DNA, 25 bp, Homo sapien
agatgacagcgccaagctccttcac

SEQ ID NO: 168900 - DNA, 25 bp, Homo sapien
cagtacccagtaggtctggaaggtc

SEQ ID NO: 168901 - DNA, 25 bp, Homo sapien
ctggggacagagtgctggtggcgac

SEQ ID NO: 168902 - DNA, 25 bp, Homo sapien
tggggacagagtgctggtggcgacg

SEQ ID NO: 168903 - DNA, 25 bp, Homo sapien
ggggacagagtgctggtggcgacgc

SEQ ID NO: 168904 - DNA, 25 bp, Homo sapien
ctcggggggtggctgaagcgcgtgg

SEQ ID NO: 168905 - DNA, 25 bp, Homo sapien
agatgaactcctgggcgctccccat

SEQ ID NO: 168906 - DNA, 25 bp, Homo sapien
gcatagatgaactcctgggcgctcc

SEQ ID NO: 168907 - DNA, 25 bp, Homo sapien
acggaggcatagatgaactcctggg

SEQ ID NO: 168908 - DNA, 25 bp, Homo sapien
agcgcgttgtccagcaccggccagt

SEQ ID NO: 168909 - DNA, 25 bp, Homo sapien
tccgtgttgagtccgcagccgacca

SEQ ID NO: 168910 - DNA, 25 bp, Homo sapien
cacgtccacagagacgttggccgcg

SEQ ID NO: 168911 - DNA, 25 bp, Homo sapien
agcgcctgcagggaccgcaggtagg

SEQ ID NO: 168912 - DNA, 25 bp, Homo sapien
ggagcagaggcagcgcgtcaggaag

SEQ ID NO: 168913 - DNA, 25 bp, Homo sapien
gctgccttctccgtgaccatgaact

SEQ ID NO: 168914 - DNA, 25 bp, Homo sapien
tgctgtggttcaccctgctgaatgg

SEQ ID NO: 168915 - DNA, 25 bp, Homo sapien
tggttcaccctgctgaatgggatgt

SEQ ID NO: 168916 - DNA, 25 bp, Homo sapien
ctatgtaggctgccttctccgtgac

SEQ ID NO: 168917 - DNA, 25 bp, Homo sapien
gggctctgggtgaccaccaagccca

SEQ ID NO: 168918 - DNA, 25 bp, Homo sapien
aggccgacggcgtagcgcgaactcc

SEQ ID NO: 168919 - DNA, 25 bp, Homo sapien
ctgaagtaatcctccgaccagttgg

SEQ ID NO: 168920 - DNA, 25 bp, Homo sapien
gcgaactccagtcccgctcaaagag

SEQ ID NO: 168921 - DNA, 25 bp, Homo sapien
ggctggactcggaaatcagagagca

SEQ ID NO: 168922 - DNA, 25 bp, Homo sapien
tggactcggaaatcagagagcaggc

SEQ ID NO: 168923 - DNA, 25 bp, Homo sapien
tggcgcagtgcggacccgggctgct

SEQ ID NO: 168924 - DNA, 25 bp, Homo sapien
agcaggcgggcggtttgcgacgccc

SEQ ID NO: 168925 - DNA, 25 bp, Homo sapien
tgagccaatctggaggaccgcagtg

SEQ ID NO: 168926 - DNA, 25 bp, Homo sapien
tggtgagaagcgcttatggccccct

SEQ ID NO: 168927 - DNA, 25 bp, Homo sapien
cacaggaagcaaatccacgtggcgt

SEQ ID NO: 168928 - DNA, 25 bp, Homo sapien
ttcatgggtatgcagtgttcaaggg

SEQ ID NO: 168929 - DNA, 25 bp, Homo sapien
gacaaggatgtgactgccaaagaca

SEQ ID NO: 168930 - DNA, 25 bp, Homo sapien
caagagccaaactggatagtgcaca

SEQ ID NO: 168931 - DNA, 25 bp, Homo sapien
tctctgcccagcgtggaggtggacg

SEQ ID NO: 168932 - DNA, 25 bp, Homo sapien
aggtggacgtccaggccccaagagc

SEQ ID NO: 168933 - DNA, 25 bp, Homo sapien
aaggtggaagtgacagcccccgatg

SEQ ID NO: 168934 - DNA, 25 bp, Homo sapien
gccccaaggtggaagtgacagcccc

SEQ ID NO: 168935 - DNA, 25 bp, Homo sapien
ggtggaagtgacagcccccgatgtg

SEQ ID NO: 168936 - DNA, 25 bp, Homo sapien
aaggccccaaggtggaagtgacagc

SEQ ID NO: 168937 - DNA, 25 bp, Homo sapien
ctgcagatgcccagtttcaaggtgc

SEQ ID NO: 168938 - DNA, 25 bp, Homo sapien
ttggacgtgaaactcccagagggcc

SEQ ID NO: 168939 - DNA, 25 bp, Homo sapien
caaggtggaagtgacagcccctgat

SEQ ID NO: 168940 - DNA, 25 bp, Homo sapien
tccctggccgacaaggacttgacta

SEQ ID NO: 168941 - DNA, 25 bp, Homo sapien
gagctggccttaaagggcacttgcc

SEQ ID NO: 168942 - DNA, 25 bp, Homo sapien
gctggccttaaagggcacttgccca

SEQ ID NO: 168943 - DNA, 25 bp, Homo sapien
tgaccaggtggatgtgaagctcccg

SEQ ID NO: 168944 - DNA, 25 bp, Homo sapien
gtgaagctcccggagggccacctgc

SEQ ID NO: 168945 - DNA, 25 bp, Homo sapien
cacgtgctgctgtggaactgacaca

SEQ ID NO: 168946 - DNA, 25 bp, Homo sapien
gatgctggctttcccatcggacagg

SEQ ID NO: 168947 - DNA, 25 bp, Homo sapien
tcctggaggtcactcaaaggctctc

SEQ ID NO: 168948 - DNA, 25 bp, Homo sapien
caaggtccaccctggcatggttggt

SEQ ID NO: 168949 - DNA, 25 bp, Homo sapien
tcccggacaggtcggaatgggcatc

SEQ ID NO: 168950 - DNA, 25 bp, Homo sapien
tcagaaagagcgacccagctcaggt

SEQ ID NO: 168951 - DNA, 25 bp, Homo sapien
aattcattacaagctcccggacagg

SEQ ID NO: 168952 - DNA, 25 bp, Homo sapien
gaaggagcggaagtgtcaccaaacg

SEQ ID NO: 168953 - DNA, 25 bp, Homo sapien
aaatgttctcatagctgagaatggg

SEQ ID NO: 168954 - DNA, 25 bp, Homo sapien
gaaatggtctatggtggaaacgtct

SEQ ID NO: 168955 - DNA, 25 bp, Homo sapien
ctatggtggaaacgtcttcagctgc

SEQ ID NO: 168956 - DNA, 25 bp, Homo sapien
gcttatttctaggaaatggtctatg

SEQ ID NO: 168957 - DNA, 25 bp, Homo sapien
tatgtacacgttcaacgccaggttt

SEQ ID NO: 168958 - DNA, 25 bp, Homo sapien
cacaatttatgtacacgttcaacgc

SEQ ID NO: 168959 - DNA, 25 bp, Homo sapien
tttatgtacacgttcaacgccaggt

SEQ ID NO: 168960 - DNA, 25 bp, Homo sapien
caatttatgtacacgttcaacgcca

SEQ ID NO: 168961 - DNA, 25 bp, Homo sapien
aaatggccatctgcgagtgactgcg

SEQ ID NO: 168962 - DNA, 25 bp, Homo sapien
gaactctgtggctgagaaccatgag

SEQ ID NO: 168963 - DNA, 25 bp, Homo sapien
gagatgctactctccataaaggcaa

SEQ ID NO: 168964 - DNA, 25 bp, Homo sapien
tgactgcgggtgcactttcccctag

SEQ ID NO: 168965 - DNA, 25 bp, Homo sapien
gagcttctcaaccactgcggcctaa

SEQ ID NO: 168966 - DNA, 25 bp, Homo sapien
tgcggcctaatccactcgagcgctg

SEQ ID NO: 168967 - DNA, 25 bp, Homo sapien
taatccactcgagcgctgtctgtct

SEQ ID NO: 168968 - DNA, 25 bp, Homo sapien
gcgctgtctgtctttcaatgctcag

SEQ ID NO: 168969 - DNA, 25 bp, Homo sapien
ctctaaaaacagtgttcccgggctg

SEQ ID NO: 168970 - DNA, 25 bp, Homo sapien
taaaaggtgaccttgagagccttct

SEQ ID NO: 168971 - DNA, 25 bp, Homo sapien
agatcatgaggcacggcccgaggca

SEQ ID NO: 168972 - DNA, 25 bp, Homo sapien
gccaagaggcgtatggctgttaaga

SEQ ID NO: 168973 - DNA, 25 bp, Homo sapien
aagaagttctcctggcaacgggact

SEQ ID NO: 168974 - DNA, 25 bp, Homo sapien
tgcgcagcatctattccgagaacaa

SEQ ID NO: 168975 - DNA, 25 bp, Homo sapien
actcgctccagaggcgctgagaagt

SEQ ID NO: 168976 - DNA, 25 bp, Homo sapien
gaagtagacgtggtgtgtatgctct

SEQ ID NO: 168977 - DNA, 25 bp, Homo sapien
atgtggccctggcctccagaaaggt

SEQ ID NO: 168978 - DNA, 25 bp, Homo sapien
tgtggccctggcctccagaaaggtt

SEQ ID NO: 168979 - DNA, 25 bp, Homo sapien
gatgtggccctggcctccagaaagg

SEQ ID NO: 168980 - DNA, 25 bp, Homo sapien
ggctctttgaggtcacaatcttcca

SEQ ID NO: 168981 - DNA, 25 bp, Homo sapien
cttcaggctctttgaggtcacaatc

SEQ ID NO: 168982 - DNA, 25 bp, Homo sapien
caggctctttgaggtcacaatcttc

SEQ ID NO: 168983 - DNA, 25 bp, Homo sapien
gctctttgaggtcacaatcttccat

SEQ ID NO: 168984 - DNA, 25 bp, Homo sapien
gctggagacagaagctgctgacagt

SEQ ID NO: 168985 - DNA, 25 bp, Homo sapien
tctggatcagggctttgcaatgctg

SEQ ID NO: 168986 - DNA, 25 bp, Homo sapien
tggagacagaagctgctgacagtga

SEQ ID NO: 168987 - DNA, 25 bp, Homo sapien
ttggtctggatcagggctttgcaat

SEQ ID NO: 168988 - DNA, 25 bp, Homo sapien
gagaggcgcccagggaaaacatgct

SEQ ID NO: 168989 - DNA, 25 bp, Homo sapien
tcctcatggtgcagtctgtggctct

SEQ ID NO: 168990 - DNA, 25 bp, Homo sapien
caatgagaagcgctagcttgggcgt

SEQ ID NO: 168991 - DNA, 25 bp, Homo sapien
agccagccccgaagacagcagtggg

SEQ ID NO: 168992 - DNA, 25 bp, Homo sapien
caaacgtcgctattaaagagtgtca

SEQ ID NO: 168993 - DNA, 25 bp, Homo sapien
gaagcggctgcatgtcatcagcctc

SEQ ID NO: 168994 - DNA, 25 bp, Homo sapien
tgtgctggccacctccgcatgaggg

SEQ ID NO: 168995 - DNA, 25 bp, Homo sapien
cagtttgagcttgcgtggagtgaac

SEQ ID NO: 168996 - DNA, 25 bp, Homo sapien
catggatttggccacaagttgctcc

SEQ ID NO: 168997 - DNA, 25 bp, Homo sapien
cagagggtttctgagcggtctcaac

SEQ ID NO: 168998 - DNA, 25 bp, Homo sapien
tgtcatggcatccagaaacctctgt

SEQ ID NO: 168999 - DNA, 25 bp, Homo sapien
tccacaaccgtgagggacaaaggcc

SEQ ID NO: 169000 - DNA, 25 bp, Homo sapien
agtcagggctgacttcttggctctg

SEQ ID NO: 169001 - DNA, 25 bp, Homo sapien
cttggctctgcccttcgaagagcac

SEQ ID NO: 169002 - DNA, 25 bp, Homo sapien
ttggctctgcccttcgaagagcaca

SEQ ID NO: 169003 - DNA, 25 bp, Homo sapien
aaaagtcagggctgacttcttggct

SEQ ID NO: 169004 - DNA, 25 bp, Homo sapien
tgtagttaggccttcagacgccctg

SEQ ID NO: 169005 - DNA, 25 bp, Homo sapien
gcttggcagccgcactagtggacaa

SEQ ID NO: 169006 - DNA, 25 bp, Homo sapien
acatcagcctgtgtgtcgcagccaa

SEQ ID NO: 169007 - DNA, 25 bp, Homo sapien
caagtggtttgcatgtacgtcgcct

SEQ ID NO: 169008 - DNA, 25 bp, Homo sapien
ttctgctgaacatccctatctcttg

SEQ ID NO: 169009 - DNA, 25 bp, Homo sapien
atccctatctcttggtgaatgtcac

SEQ ID NO: 169010 - DNA, 25 bp, Homo sapien
ctgaagtgtccctgtttctgctgaa

SEQ ID NO: 169011 - DNA, 25 bp, Homo sapien
tgtttctgctgaacatccctatctc

SEQ ID NO: 169012 - DNA, 25 bp, Homo sapien
agttaactgatccattcctctgtga

SEQ ID NO: 169013 - DNA, 25 bp, Homo sapien
tgactttggcccacagatcttggac

SEQ ID NO: 169014 - DNA, 25 bp, Homo sapien
agttacacccagttaggccatctga

SEQ ID NO: 169015 - DNA, 25 bp, Homo sapien
gatgtgttcaggtacggttttctcc

SEQ ID NO: 169016 - DNA, 25 bp, Homo sapien
gagagctccacgtccactagaaaga

SEQ ID NO: 169017 - DNA, 25 bp, Homo sapien
cagttatctgcttggagagagctcc

SEQ ID NO: 169018 - DNA, 25 bp, Homo sapien
tgatggtcacgttccttcagggcct

SEQ ID NO: 169019 - DNA, 25 bp, Homo sapien
cctctgatgtggctgacggctcagt

SEQ ID NO: 169020 - DNA, 25 bp, Homo sapien
tagcttggctatggtgactagtgct

SEQ ID NO: 169021 - DNA, 25 bp, Homo sapien
tagtatcccattgtgcgtatgtacc

SEQ ID NO: 169022 - DNA, 25 bp, Homo sapien
gtatcccattgtgcgtatgtaccac

SEQ ID NO: 169023 - DNA, 25 bp, Homo sapien
atagcttggctatggtgactagtgc

SEQ ID NO: 169024 - DNA, 25 bp, Homo sapien
gctgcgaggagcacgggccgtgcat

SEQ ID NO: 169025 - DNA, 25 bp, Homo sapien
tcgactgtggcctcatggttcccca

SEQ ID NO: 169026 - DNA, 25 bp, Homo sapien
gtgcattttcctcctcgcccgtggg

SEQ ID NO: 169027 - DNA, 25 bp, Homo sapien
aaacacttggccctcgactgtggcc

SEQ ID NO: 169028 - DNA, 25 bp, Homo sapien
catttggttgacagacaggactttc

SEQ ID NO: 169029 - DNA, 25 bp, Homo sapien
ggctgcccggtgatcctcttactgg

SEQ ID NO: 169030 - DNA, 25 bp, Homo sapien
tcattacaggtgggttcatttcccg

SEQ ID NO: 169031 - DNA, 25 bp, Homo sapien
tactggagctgatgcagagcacagc

SEQ ID NO: 169032 - DNA, 25 bp, Homo sapien
tggtcaatgccagaacaagaggctt

SEQ ID NO: 169033 - DNA, 25 bp, Homo sapien
tgccttccacgctgggcctgaatga

SEQ ID NO: 169034 - DNA, 25 bp, Homo sapien
tccatggactgttcctgaagctgtc

SEQ ID NO: 169035 - DNA, 25 bp, Homo sapien
gcttcttgggtgacaatttggtcaa

SEQ ID NO: 169036 - DNA, 25 bp, Homo sapien
tctgaggtgtggacacttgatgtgt

SEQ ID NO: 169037 - DNA, 25 bp, Homo sapien
tgggcccggcagtgatggaaggagg

SEQ ID NO: 169038 - DNA, 25 bp, Homo sapien
ggacacttgatgtgttgccttggtg

SEQ ID NO: 169039 - DNA, 25 bp, Homo sapien
caaactgcggaacaagtgtggacat

SEQ ID NO: 169040 - DNA, 25 bp, Homo sapien
ggttaaggctaggttgaagtctaga

SEQ ID NO: 169041 - DNA, 25 bp, Homo sapien
ttaaggctaggttgaagtctagaat

SEQ ID NO: 169042 - DNA, 25 bp, Homo sapien
gttaaggctaggttgaagtctagaa

SEQ ID NO: 169043 - DNA, 25 bp, Homo sapien
aggttaaggctaggttgaagtctag

SEQ ID NO: 169044 - DNA, 25 bp, Homo sapien
gaaacgcctgcgctgctctgttaga

SEQ ID NO: 169045 - DNA, 25 bp, Homo sapien
tttgtagatcacaggcaccagttgg

SEQ ID NO: 169046 - DNA, 25 bp, Homo sapien
caccagttggtcttcagggacctca

SEQ ID NO: 169047 - DNA, 25 bp, Homo sapien
atagcccctcggtggtgccttctca

SEQ ID NO: 169048 - DNA, 25 bp, Homo sapien
tcttcattatgtcctgcgctgcagt

SEQ ID NO: 169049 - DNA, 25 bp, Homo sapien
gagacctgggtgaaaatcaggagcc

SEQ ID NO: 169050 - DNA, 25 bp, Homo sapien
agtgtgaatgtatcatgttttactt

SEQ ID NO: 169051 - DNA, 25 bp, Homo sapien
agccacatcttcctagacctaagag

SEQ ID NO: 169052 - DNA, 25 bp, Homo sapien
tggtcctatgtcctagcaagcctgt

SEQ ID NO: 169053 - DNA, 25 bp, Homo sapien
cctgttctgttctccggatagtgaa

SEQ ID NO: 169054 - DNA, 25 bp, Homo sapien
gactccaatcttggtgtaaccatag

SEQ ID NO: 169055 - DNA, 25 bp, Homo sapien
tcaaatttgttagccctgtagaaca

SEQ ID NO: 169056 - DNA, 25 bp, Homo sapien
aaggtcatggtagatcaagtaagcg

SEQ ID NO: 169057 - DNA, 25 bp, Homo sapien
atcgcaggagtgagccagcccccag

SEQ ID NO: 169058 - DNA, 25 bp, Homo sapien
aggagtgagccagcccccagtgcta

SEQ ID NO: 169059 - DNA, 25 bp, Homo sapien
ggatcgcaggagtgagccagccccc

SEQ ID NO: 169060 - DNA, 25 bp, Homo sapien
gcaggagtgagccagcccccagtgc

SEQ ID NO: 169061 - DNA, 25 bp, Homo sapien
acctcggagagctgtgtttgaggca

SEQ ID NO: 169062 - DNA, 25 bp, Homo sapien
ggttgctgagatcactttgatctcc

SEQ ID NO: 169063 - DNA, 25 bp, Homo sapien
ctctcccacatttaaggacttttgt

SEQ ID NO: 169064 - DNA, 25 bp, Homo sapien
aaggatgagtttctgacctcggaga

SEQ ID NO: 169065 - DNA, 25 bp, Homo sapien
caaatgcggagcgagtgcttcctgg

SEQ ID NO: 169066 - DNA, 25 bp, Homo sapien
tgagaaggttctgccgacggatgct

SEQ ID NO: 169067 - DNA, 25 bp, Homo sapien
agaatgtgaatgtgcccaatgctac

SEQ ID NO: 169068 - DNA, 25 bp, Homo sapien
aatggaataccatcccgcctttgaa

SEQ ID NO: 169069 - DNA, 25 bp, Homo sapien
aaccatttgtctctcgcctacacag

SEQ ID NO: 169070 - DNA, 25 bp, Homo sapien
cctacacaggtaggcgagagacaaa

SEQ ID NO: 169071 - DNA, 25 bp, Homo sapien
ttgaggacacgcgtctgtgacacag

SEQ ID NO: 169072 - DNA, 25 bp, Homo sapien
gaagtcctgatgacgtgcccagggt

SEQ ID NO: 169073 - DNA, 25 bp, Homo sapien
gcagggaggctcgtgtgccctggga

SEQ ID NO: 169074 - DNA, 25 bp, Homo sapien
ccccagtgtgtctgcacggcaggac

SEQ ID NO: 169075 - DNA, 25 bp, Homo sapien
agtgtgtctgcacggcaggacccca

SEQ ID NO: 169076 - DNA, 25 bp, Homo sapien
cagtccttaaggcttctgcggagtc

SEQ ID NO: 169077 - DNA, 25 bp, Homo sapien
cagctgccaaatgggcttccacctt

SEQ ID NO: 169078 - DNA, 25 bp, Homo sapien
ctcccttgatggcctcaggcaccag

SEQ ID NO: 169079 - DNA, 25 bp, Homo sapien
cagggcctcagctgccaaatgggct

SEQ ID NO: 169080 - DNA, 25 bp, Homo sapien
tcccttgatggcctcaggcaccagg

SEQ ID NO: 169081 - DNA, 25 bp, Homo sapien
aactccaggccagtcaagccacccc

SEQ ID NO: 169082 - DNA, 25 bp, Homo sapien
ccatgcttgcggtgatcaggagggt

SEQ ID NO: 169083 - DNA, 25 bp, Homo sapien
ctgtcccacccgcagcgtgctgggg

SEQ ID NO: 169084 - DNA, 25 bp, Homo sapien
ttacagccggcggaggggcttccca

SEQ ID NO: 169085 - DNA, 25 bp, Homo sapien
ggtgagagctagttacctgggcccc

SEQ ID NO: 169086 - DNA, 25 bp, Homo sapien
gaagtgcagttggataccaggcatc

SEQ ID NO: 169087 - DNA, 25 bp, Homo sapien
catggcatgcagaccaactagtagg

SEQ ID NO: 169088 - DNA, 25 bp, Homo sapien
cattagaaaatagacaccagccaac

SEQ ID NO: 169089 - DNA, 25 bp, Homo sapien
gcttgtgtgcacgagggcaacctcg

SEQ ID NO: 169090 - DNA, 25 bp, Homo sapien
ccagcagaagtttatttagggcaca

SEQ ID NO: 169091 - DNA, 25 bp, Homo sapien
taggccacccttggtgtggacaaca

SEQ ID NO: 169092 - DNA, 25 bp, Homo sapien
acagaatgctgatggctcaatccca

SEQ ID NO: 169093 - DNA, 25 bp, Homo sapien
acaacagcttgggtttgatcttgca

SEQ ID NO: 169094 - DNA, 25 bp, Homo sapien
tgggctctattgaggttgtggccac

SEQ ID NO: 169095 - DNA, 25 bp, Homo sapien
ttgggtttgatcttgcaggtactgg

SEQ ID NO: 169096 - DNA, 25 bp, Homo sapien
aaatagccagacatagcctgacggg

SEQ ID NO: 169097 - DNA, 25 bp, Homo sapien
tcgcagggagactgcccgtgacctc

SEQ ID NO: 169098 - DNA, 25 bp, Homo sapien
aaggttgggaagcaccgggcggctg

SEQ ID NO: 169099 - DNA, 25 bp, Homo sapien
tggccagcatcgcagggagactgcc

SEQ ID NO: 169100 - DNA, 25 bp, Homo sapien
tgacctccctctaaggttgggaagc

SEQ ID NO: 169101 - DNA, 25 bp, Homo sapien
tcaaatcagacatgttaacacagaa

SEQ ID NO: 169102 - DNA, 25 bp, Homo sapien
aatatcagaagggttcaaatcagac

SEQ ID NO: 169103 - DNA, 25 bp, Homo sapien
gtttatctcaggaatatcagaaggg

SEQ ID NO: 169104 - DNA, 25 bp, Homo sapien
cagaaattcaccaggttcaagaaga

SEQ ID NO: 169105 - DNA, 25 bp, Homo sapien
caaacatgacggcaatgcaatgttc

SEQ ID NO: 169106 - DNA, 25 bp, Homo sapien
agctgcccaaccgtaccattgccat

SEQ ID NO: 169107 - DNA, 25 bp, Homo sapien
cagtcttgctgcctcctatttgcaa

SEQ ID NO: 169108 - DNA, 25 bp, Homo sapien
tctgaagcaggatggcatttccctc

SEQ ID NO: 169109 - DNA, 25 bp, Homo sapien
gatctgaggagttttcaaccgttat

SEQ ID NO: 169110 - DNA, 25 bp, Homo sapien
tgtcccttgctgtaaatgtctttga

SEQ ID NO: 169111 - DNA, 25 bp, Homo sapien
tagtgaagaacagtgtcagcttttg

SEQ ID NO: 169112 - DNA, 25 bp, Homo sapien
ttgtctggaaagtatgtcgctcatc

SEQ ID NO: 169113 - DNA, 25 bp, Homo sapien
tccccctctgtgagaaacacccaag

SEQ ID NO: 169114 - DNA, 25 bp, Homo sapien
caaatccccctctgtgagaaacacc

SEQ ID NO: 169115 - DNA, 25 bp, Homo sapien
cccctctgtgagaaacacccaagaa

SEQ ID NO: 169116 - DNA, 25 bp, Homo sapien
aatccccctctgtgagaaacaccca

SEQ ID NO: 169117 - DNA, 25 bp, Homo sapien
tgtgcagtgtgggtctggtgatggc

SEQ ID NO: 169118 - DNA, 25 bp, Homo sapien
tgatggcagcacagtacagcgggca

SEQ ID NO: 169119 - DNA, 25 bp, Homo sapien
gttgggcttttcaaatgctgagctc

SEQ ID NO: 169120 - DNA, 25 bp, Homo sapien
tctgagctgcactggagagtctcag

SEQ ID NO: 169121 - DNA, 25 bp, Homo sapien
ttggtgggtgagattctggatggtt

SEQ ID NO: 169122 - DNA, 25 bp, Homo sapien
tggatggtttctatgacctggttgg

SEQ ID NO: 169123 - DNA, 25 bp, Homo sapien
aagggatatttggagtccgtggcac

SEQ ID NO: 169124 - DNA, 25 bp, Homo sapien
ccatgaggatgaagggatatttgga

SEQ ID NO: 169125 - DNA, 25 bp, Homo sapien
tcctacagtatttgacaccagaagt

SEQ ID NO: 169126 - DNA, 25 bp, Homo sapien
taagtttttgttatccacagctgaa

SEQ ID NO: 169127 - DNA, 25 bp, Homo sapien
ccaaagtagccaggataagtttttg

SEQ ID NO: 169128 - DNA, 25 bp, Homo sapien
ctcctacagtatttgacaccagaag

SEQ ID NO: 169129 - DNA, 25 bp, Homo sapien
tgttctgcagcaatattgttatcct

SEQ ID NO: 169130 - DNA, 25 bp, Homo sapien
tctgcagcaatattgttatcctgct

SEQ ID NO: 169131 - DNA, 25 bp, Homo sapien
attgttatcctgctgtcgatctggg

SEQ ID NO: 169132 - DNA, 25 bp, Homo sapien
agcaatattgttatcctgctgtcga

SEQ ID NO: 169133 - DNA, 25 bp, Homo sapien
gctctgacagctgcgtctccgaaga

SEQ ID NO: 169134 - DNA, 25 bp, Homo sapien
ttctgcttggcgacagctctgacag

SEQ ID NO: 169135 - DNA, 25 bp, Homo sapien
cgtccttgctgttcggcccctggga

SEQ ID NO: 169136 - DNA, 25 bp, Homo sapien
gcccctgggactgcgtctgctggtt

SEQ ID NO: 169137 - DNA, 25 bp, Homo sapien
ttcctggagcccgctgtgtcttgca

SEQ ID NO: 169138 - DNA, 25 bp, Homo sapien
tggagcccgctgtgtcttgcactgc

SEQ ID NO: 169139 - DNA, 25 bp, Homo sapien
cctggagcccgctgtgtcttgcact

SEQ ID NO: 169140 - DNA, 25 bp, Homo sapien
ttgcactgccatgaagcgggggccc

SEQ ID NO: 169141 - DNA, 25 bp, Homo sapien
gcaggtcaacctcgcgcttgctggc

SEQ ID NO: 169142 - DNA, 25 bp, Homo sapien
ggctggcaggtcaacctcgcgcttg

SEQ ID NO: 169143 - DNA, 25 bp, Homo sapien
ccaaggctggcaggtcaacctcgcg

SEQ ID NO: 169144 - DNA, 25 bp, Homo sapien
gtcaacctcgcgcttgctggccagt

SEQ ID NO: 169145 - DNA, 25 bp, Homo sapien
gactcgtggctgtcaatgggacctg

SEQ ID NO: 169146 - DNA, 25 bp, Homo sapien
taaagtttccgtgcgtggcactcgc

SEQ ID NO: 169147 - DNA, 25 bp, Homo sapien
aaatcgtagcgtttgttaccagagg

SEQ ID NO: 169148 - DNA, 25 bp, Homo sapien
caaagggtgtctgcgtcgtcaccaa

SEQ ID NO: 169149 - DNA, 25 bp, Homo sapien
atcctgtcctcctagcccgtggtct

SEQ ID NO: 169150 - DNA, 25 bp, Homo sapien
tgggtacatctcagagggcggcctc

SEQ ID NO: 169151 - DNA, 25 bp, Homo sapien
tgtccctgcccctgtatgttgggta

SEQ ID NO: 169152 - DNA, 25 bp, Homo sapien
agagggcggcctctaccctgcaggc

SEQ ID NO: 169153 - DNA, 25 bp, Homo sapien
cctcctagggtgtcaccttctccca

SEQ ID NO: 169154 - DNA, 25 bp, Homo sapien
caatccgaccctcttggcagtggaa

SEQ ID NO: 169155 - DNA, 25 bp, Homo sapien
tctgagggggcaccactcatccttt

SEQ ID NO: 169156 - DNA, 25 bp, Homo sapien
taccacttgaaggaggagatagctg

SEQ ID NO: 169157 - DNA, 25 bp, Homo sapien
ggggagaagaaccacgaggtgtcca

SEQ ID NO: 169158 - DNA, 25 bp, Homo sapien
attcggggagaagaaccacgaggtg

SEQ ID NO: 169159 - DNA, 25 bp, Homo sapien
tcggggagaagaaccacgaggtgtc

SEQ ID NO: 169160 - DNA, 25 bp, Homo sapien
gggagaagaaccacgaggtgtccat

SEQ ID NO: 169161 - DNA, 25 bp, Homo sapien
tgccaggatagaattgctgagccgc

SEQ ID NO: 169162 - DNA, 25 bp, Homo sapien
gatagaattgctgagccgccagagg

SEQ ID NO: 169163 - DNA, 25 bp, Homo sapien
ccagaggtagtcagcgtcttgatct

SEQ ID NO: 169164 - DNA, 25 bp, Homo sapien
ttgctgagccgccagaggtagtcag

SEQ ID NO: 169165 - DNA, 25 bp, Homo sapien
agcgcagcccggccaggcccggccg

SEQ ID NO: 169166 - DNA, 25 bp, Homo sapien
gcagcccggccaggcccggccgcgg

SEQ ID NO: 169167 - DNA, 25 bp, Homo sapien
gcgcagcccggccaggcccggccgc

SEQ ID NO: 169168 - DNA, 25 bp, Homo sapien
cagcccggccaggcccggccgcggg

SEQ ID NO: 169169 - DNA, 25 bp, Homo sapien
cgcccctgcgaccctgcccgagccc

SEQ ID NO: 169170 - DNA, 25 bp, Homo sapien
gcccctgcgaccctgcccgagccca

SEQ ID NO: 169171 - DNA, 25 bp, Homo sapien
ctcgggagcggctctgcaagcaaaa

SEQ ID NO: 169172 - DNA, 25 bp, Homo sapien
tcgggagcggctctgcaagcaaaag

SEQ ID NO: 169173 - DNA, 25 bp, Homo sapien
gggagcggctctgcaagcaaaagca

SEQ ID NO: 169174 - DNA, 25 bp, Homo sapien
gcctcgggagcggctctgcaagcaa

SEQ ID NO: 169175 - DNA, 25 bp, Homo sapien
cccggccttcctgcccacggcggcg

SEQ ID NO: 169176 - DNA, 25 bp, Homo sapien
tggggcggcagcaccgccagccggg

SEQ ID NO: 169177 - DNA, 25 bp, Homo sapien
ctggtggttgttgccgagtgtgggc

SEQ ID NO: 169178 - DNA, 25 bp, Homo sapien
ctctcgcgcagcgtggggcggcagc

SEQ ID NO: 169179 - DNA, 25 bp, Homo sapien
cagccggggctctcctggtggttgt

SEQ ID NO: 169180 - DNA, 25 bp, Homo sapien
ctgcaaaggtagaggcacgggctgg

SEQ ID NO: 169181 - DNA, 25 bp, Homo sapien
tgcaaaggtagaggcacgggctggg

SEQ ID NO: 169182 - DNA, 25 bp, Homo sapien
ttgtgggcgggcaccgtcctggtcg

SEQ ID NO: 169183 - DNA, 25 bp, Homo sapien
ccacgacgaagtgcacgtcggccat

SEQ ID NO: 169184 - DNA, 25 bp, Homo sapien
gggccccacgacgaagtgcacgtcg

SEQ ID NO: 169185 - DNA, 25 bp, Homo sapien
acgaagtgcacgtcggccatgagct

SEQ ID NO: 169186 - DNA, 25 bp, Homo sapien
tgcgggctccacgtctggaatgtga

SEQ ID NO: 169187 - DNA, 25 bp, Homo sapien
cgggctccacgtctggaatgtgaat

SEQ ID NO: 169188 - DNA, 25 bp, Homo sapien
ctccacgtctggaatgtgaatttca

SEQ ID NO: 169189 - DNA, 25 bp, Homo sapien
ggctccacgtctggaatgtgaattt

SEQ ID NO: 169190 - DNA, 25 bp, Homo sapien
gaggcagggcccgcgtcaggggctg

SEQ ID NO: 169191 - DNA, 25 bp, Homo sapien
gcgaggcagggcccgcgtcaggggc

SEQ ID NO: 169192 - DNA, 25 bp, Homo sapien
gctcctgtgtgcttcccttcagaag

SEQ ID NO: 169193 - DNA, 25 bp, Homo sapien
tcccaagcacccatcgcggggctgg

SEQ ID NO: 169194 - DNA, 25 bp, Homo sapien
agctgagttcgctgccgtccaggac

SEQ ID NO: 169195 - DNA, 25 bp, Homo sapien
ttcttagcagcgtacagagtggcca

SEQ ID NO: 169196 - DNA, 25 bp, Homo sapien
cgtccaggacggcactggccgtgta

SEQ ID NO: 169197 - DNA, 25 bp, Homo sapien
tccgtctgacatgaacttggtcaag

SEQ ID NO: 169198 - DNA, 25 bp, Homo sapien
catagaaaatgagctcagggatctg

SEQ ID NO: 169199 - DNA, 25 bp, Homo sapien
tcaggcatagaaaatgagctcaggg

SEQ ID NO: 169200 - DNA, 25 bp, Homo sapien
tagaaaatgagctcagggatctgcc

SEQ ID NO: 169201 - DNA, 25 bp, Homo sapien
ggcatagaaaatgagctcagggatc

SEQ ID NO: 169202 - DNA, 25 bp, Homo sapien
aagatccaacccctcaaagcaggtg

SEQ ID NO: 169203 - DNA, 25 bp, Homo sapien
cgtgcaccccactgtaccagagatg

SEQ ID NO: 169204 - DNA, 25 bp, Homo sapien
gatgcctaagactccaatccctggg

SEQ ID NO: 169205 - DNA, 25 bp, Homo sapien
tcatggtgtcaagaagcagttagca

SEQ ID NO: 169206 - DNA, 25 bp, Homo sapien
ctgtttgcatctaggagcgtatgtc

SEQ ID NO: 169207 - DNA, 25 bp, Homo sapien
atggcccgcttagaggcccctttct

SEQ ID NO: 169208 - DNA, 25 bp, Homo sapien
cttactttgcctgtttgcatctagg

SEQ ID NO: 169209 - DNA, 25 bp, Homo sapien
accaagcagatgactggtttccatg

SEQ ID NO: 169210 - DNA, 25 bp, Homo sapien
ggaactcctgtatgcctttcttgat

SEQ ID NO: 169211 - DNA, 25 bp, Homo sapien
tgtgtgcgagtttgtggaactcctg

SEQ ID NO: 169212 - DNA, 25 bp, Homo sapien
ggtgtagggtaagtcctgtctctcc

SEQ ID NO: 169213 - DNA, 25 bp, Homo sapien
cagcagcagtgttcatgcatgcaga

SEQ ID NO: 169214 - DNA, 25 bp, Homo sapien
tgttgtcagtgcctgtcaggtggca

SEQ ID NO: 169215 - DNA, 25 bp, Homo sapien
gagcatcttgtgtggacaaggttta

SEQ ID NO: 169216 - DNA, 25 bp, Homo sapien
acagggaaacaagtgctgcgtgctg

SEQ ID NO: 169217 - DNA, 25 bp, Homo sapien
caggtggcaggaaggtgtagacagg

SEQ ID NO: 169218 - DNA, 25 bp, Homo sapien
gctgctgtagggaccagcgtgccaa

SEQ ID NO: 169219 - DNA, 25 bp, Homo sapien
ttctcttggcaagagagctctgcat

SEQ ID NO: 169220 - DNA, 25 bp, Homo sapien
tgcgccggccataggtaggcatctg

SEQ ID NO: 169221 - DNA, 25 bp, Homo sapien
ggaaagacgtttcttctcttggcaa

SEQ ID NO: 169222 - DNA, 25 bp, Homo sapien
cttaaataccaatgctgtttctggt

SEQ ID NO: 169223 - DNA, 25 bp, Homo sapien
ttaaataccaatgctgtttctggtt

SEQ ID NO: 169224 - DNA, 25 bp, Homo sapien
ccttaaataccaatgctgtttctgg

SEQ ID NO: 169225 - DNA, 25 bp, Homo sapien
actgccagccctcggcgttgccctt

SEQ ID NO: 169226 - DNA, 25 bp, Homo sapien
ctcggcgttgcccttctcggtctgg

SEQ ID NO: 169227 - DNA, 25 bp, Homo sapien
tcactgccagccctcggcgttgccc

SEQ ID NO: 169228 - DNA, 25 bp, Homo sapien
cagccctcggcgttgcccttctcgg

SEQ ID NO: 169229 - DNA, 25 bp, Homo sapien
tcaggctgcagaaccgtccgttcag

SEQ ID NO: 169230 - DNA, 25 bp, Homo sapien
acactcccttcagacccagctcctc

SEQ ID NO: 169231 - DNA, 25 bp, Homo sapien
gaaccgtccgttcaggtcagcaggg

SEQ ID NO: 169232 - DNA, 25 bp, Homo sapien
tccatggcgtgcctggccacgcgtg

SEQ ID NO: 169233 - DNA, 25 bp, Homo sapien
tggccccgtagcctggtggctgaca

SEQ ID NO: 169234 - DNA, 25 bp, Homo sapien
tctcttggccccgtagcctggtggc

SEQ ID NO: 169235 - DNA, 25 bp, Homo sapien
ctctcttggccccgtagcctggtgg

SEQ ID NO: 169236 - DNA, 25 bp, Homo sapien
tcttggccccgtagcctggtggctg

SEQ ID NO: 169237 - DNA, 25 bp, Homo sapien
gagatgacgagctggtagcctgctg

SEQ ID NO: 169238 - DNA, 25 bp, Homo sapien
atgacgagctggtagcctgctgacg

SEQ ID NO: 169239 - DNA, 25 bp, Homo sapien
ctcctggagatgacgagctggtagc

SEQ ID NO: 169240 - DNA, 25 bp, Homo sapien
ggctcctggagatgacgagctggta

SEQ ID NO: 169241 - DNA, 25 bp, Homo sapien
acttgtggacctactgcgccttggg

SEQ ID NO: 169242 - DNA, 25 bp, Homo sapien
tgcagcttggccttgtgtgtggaca

SEQ ID NO: 169243 - DNA, 25 bp, Homo sapien
ttctgtcggtgcctgagaatcatgc

SEQ ID NO: 169244 - DNA, 25 bp, Homo sapien
cagcttggccttgcgtggagatcca

SEQ ID NO: 169245 - DNA, 25 bp, Homo sapien
cagaggcggggttacatggatggtc

SEQ ID NO: 169246 - DNA, 25 bp, Homo sapien
agcagaggcggggttacatggatgg

SEQ ID NO: 169247 - DNA, 25 bp, Homo sapien
aggcggggttacatggatggtctca

SEQ ID NO: 169248 - DNA, 25 bp, Homo sapien
cggggttacatggatggtctcaatc

SEQ ID NO: 169249 - DNA, 25 bp, Homo sapien
ctagctagctggtacctggccttgg

SEQ ID NO: 169250 - DNA, 25 bp, Homo sapien
catgatggttgctctgcatatcaaa

SEQ ID NO: 169251 - DNA, 25 bp, Homo sapien
caagctgagcagaattagaactggg

SEQ ID NO: 169252 - DNA, 25 bp, Homo sapien
ctagtgttcaggaatgcaggagcct

SEQ ID NO: 169253 - DNA, 25 bp, Homo sapien
cggcgtcggacaggcccgcgggcgg

SEQ ID NO: 169254 - DNA, 25 bp, Homo sapien
ccggcgtcggacaggcccgcgggcg

SEQ ID NO: 169255 - DNA, 25 bp, Homo sapien
gcgtcggacaggcccgcgggcggcg

SEQ ID NO: 169256 - DNA, 25 bp, Homo sapien
ggcgtcggacaggcccgcgggcggc

SEQ ID NO: 169257 - DNA, 25 bp, Homo sapien
acgggcgtgttgagcgcgccgggcg

SEQ ID NO: 169258 - DNA, 25 bp, Homo sapien
ggcacgggcgtgttgagcgcgccgg

SEQ ID NO: 169259 - DNA, 25 bp, Homo sapien
gaacaggttcatgggcacgggcgtg

SEQ ID NO: 169260 - DNA, 25 bp, Homo sapien
cccaggtggcgaacaggttcatggg

SEQ ID NO: 169261 - DNA, 25 bp, Homo sapien
agcaccgggtcctcggaagctgagc

SEQ ID NO: 169262 - DNA, 25 bp, Homo sapien
caggtgtgcaggtgcggttgcggcg

SEQ ID NO: 169263 - DNA, 25 bp, Homo sapien
cggttgcggcgagccaggtgagcgc

SEQ ID NO: 169264 - DNA, 25 bp, Homo sapien
cggccggcaccgcattgaggcaggt

SEQ ID NO: 169265 - DNA, 25 bp, Homo sapien
cgtgcaggccacggcgatgggccag

SEQ ID NO: 169266 - DNA, 25 bp, Homo sapien
cagggctacgggcaccgtcctgctg

SEQ ID NO: 169267 - DNA, 25 bp, Homo sapien
gggcaccgtcctgctgccccttggc

SEQ ID NO: 169268 - DNA, 25 bp, Homo sapien
acgggcaccgtcctgctgccccttg

SEQ ID NO: 169269 - DNA, 25 bp, Homo sapien
ctgccagctgctcttaggacacggg

SEQ ID NO: 169270 - DNA, 25 bp, Homo sapien
ctgcaggtctgcctcgctgtggatc

SEQ ID NO: 169271 - DNA, 25 bp, Homo sapien
ttccccgtgctcaccagaacaagaa

SEQ ID NO: 169272 - DNA, 25 bp, Homo sapien
gactcccagaaggttggagagtaaa

SEQ ID NO: 169273 - DNA, 25 bp, Homo sapien
catcagcattggcttggtgccgttc

SEQ ID NO: 169274 - DNA, 25 bp, Homo sapien
agcttcaaggatggcgagcccagag

SEQ ID NO: 169275 - DNA, 25 bp, Homo sapien
gtgcgtggcacttgtggaatattcc

SEQ ID NO: 169276 - DNA, 25 bp, Homo sapien
tggagcgtccgtgtccaactcacag

SEQ ID NO: 169277 - DNA, 25 bp, Homo sapien
cagtgggtggtttgcaccaggtcac

SEQ ID NO: 169278 - DNA, 25 bp, Homo sapien
cacagagaggagaaaccacgacgca

SEQ ID NO: 169279 - DNA, 25 bp, Homo sapien
gaaaccacgacgcagcccacaggag

SEQ ID NO: 169280 - DNA, 25 bp, Homo sapien
tgcctgagtgggtatgcgtctctct

SEQ ID NO: 169281 - DNA, 25 bp, Homo sapien
gaggatgcacttaggaccaacttct

SEQ ID NO: 169282 - DNA, 25 bp, Homo sapien
cagcaggagggggtggggactggta

SEQ ID NO: 169283 - DNA, 25 bp, Homo sapien
tggggactggtagggaacagggcca

SEQ ID NO: 169284 - DNA, 25 bp, Homo sapien
agcaggagggggtggggactggtag

SEQ ID NO: 169285 - DNA, 25 bp, Homo sapien
atgcagcaggagggggtggggactg

SEQ ID NO: 169286 - DNA, 25 bp, Homo sapien
tacagccttatctggacatggctgc

SEQ ID NO: 169287 - DNA, 25 bp, Homo sapien
tttctctgatgtacagccttatctg

SEQ ID NO: 169288 - DNA, 25 bp, Homo sapien
cagcccgtcccaaggctcgcccggg

SEQ ID NO: 169289 - DNA, 25 bp, Homo sapien
cacccagcccgtcccaaggctcgcc

SEQ ID NO: 169290 - DNA, 25 bp, Homo sapien
ccttgcgcaactgaaactacccatt

SEQ ID NO: 169291 - DNA, 25 bp, Homo sapien
tgaatgcaatgactctagggacctg

SEQ ID NO: 169292 - DNA, 25 bp, Homo sapien
actacgtgcgtggatgctgttgtgc

SEQ ID NO: 169293 - DNA, 25 bp, Homo sapien
tagggacctgacacaaatgggatca

SEQ ID NO: 169294 - DNA, 25 bp, Homo sapien
ctccagggtcactctgagaacccag

SEQ ID NO: 169295 - DNA, 25 bp, Homo sapien
ccagggtcactctgagaacccagca

SEQ ID NO: 169296 - DNA, 25 bp, Homo sapien
ctggaggacccggaatcctgcacag

SEQ ID NO: 169297 - DNA, 25 bp, Homo sapien
ggaggacccggaatcctgcacagcc

SEQ ID NO: 169298 - DNA, 25 bp, Homo sapien
gatcaccacggagatcagctccttc

SEQ ID NO: 169299 - DNA, 25 bp, Homo sapien
tgacagcgatcaccacggagatcag

SEQ ID NO: 169300 - DNA, 25 bp, Homo sapien
tcttgacagcgatcaccacggagat

SEQ ID NO: 169301 - DNA, 25 bp, Homo sapien
ctgcatcttgacagcgatcaccacg

SEQ ID NO: 169302 - DNA, 25 bp, Homo sapien
gggaccgcaggattcgtttggagcc

SEQ ID NO: 169303 - DNA, 25 bp, Homo sapien
aggtctgtctccacttgtccactgg

SEQ ID NO: 169304 - DNA, 25 bp, Homo sapien
gggggcagcacaatctcatgggacc

SEQ ID NO: 169305 - DNA, 25 bp, Homo sapien
gcacaatctcatgggaccgcaggat

SEQ ID NO: 169306 - DNA, 25 bp, Homo sapien
caggatggttctgttcttgtagcgc

SEQ ID NO: 169307 - DNA, 25 bp, Homo sapien
gcggccagcgtcttgtagcccagga

SEQ ID NO: 169308 - DNA, 25 bp, Homo sapien
gccttccctcttcaagaagtgagga

SEQ ID NO: 169309 - DNA, 25 bp, Homo sapien
catgatctgaagcttgttgccttcc

SEQ ID NO: 169310 - DNA, 25 bp, Homo sapien
gtggccagcccgacgcaggccacgc

SEQ ID NO: 169311 - DNA, 25 bp, Homo sapien
aggccacgccagacggagcactcac

SEQ ID NO: 169312 - DNA, 25 bp, Homo sapien
caggtggccagcccgacgcaggcca

SEQ ID NO: 169313 - DNA, 25 bp, Homo sapien
ccgacgcaggccacgccagacggag

SEQ ID NO: 169314 - DNA, 25 bp, Homo sapien
cttgaaataccaacacttggccggg

SEQ ID NO: 169315 - DNA, 25 bp, Homo sapien
cagcctatatgagagacagcctcct

SEQ ID NO: 169316 - DNA, 25 bp, Homo sapien
ctgtaggcaattgttacagatggta

SEQ ID NO: 169317 - DNA, 25 bp, Homo sapien
tggggtggcctagaactgaacacac

SEQ ID NO: 169318 - DNA, 25 bp, Homo sapien
tgcgcgtggcctggattcaccattc

SEQ ID NO: 169319 - DNA, 25 bp, Homo sapien
catgggaaaaagttgagatatcagc

SEQ ID NO: 169320 - DNA, 25 bp, Homo sapien
tttgagggctcaaggcttcagtgca

SEQ ID NO: 169321 - DNA, 25 bp, Homo sapien
gcattgacaggaatttgggagaagt

SEQ ID NO: 169322 - DNA, 25 bp, Homo sapien
cctggccaccttcagacgggtgttg

SEQ ID NO: 169323 - DNA, 25 bp, Homo sapien
gcgatccagatctcggccgccttga

SEQ ID NO: 169324 - DNA, 25 bp, Homo sapien
ctgtcttcgtggtcaatgggctggc

SEQ ID NO: 169325 - DNA, 25 bp, Homo sapien
gccaccttcagacgggtgttgcatc

SEQ ID NO: 169326 - DNA, 25 bp, Homo sapien
tcatactcctcctcggagtagttat

SEQ ID NO: 169327 - DNA, 25 bp, Homo sapien
gcacggcgtcgtcactggcctcctg

SEQ ID NO: 169328 - DNA, 25 bp, Homo sapien
ctcatactcctcctcggagtagtta

SEQ ID NO: 169329 - DNA, 25 bp, Homo sapien
ctgcccctgcacggcgtcgtcactg

SEQ ID NO: 169330 - DNA, 25 bp, Homo sapien
acgtcaaagtcgtcctcgtccaagt

SEQ ID NO: 169331 - DNA, 25 bp, Homo sapien
tccccacgtcaaagtcgtcctcgtc

SEQ ID NO: 169332 - DNA, 25 bp, Homo sapien
gcttcttcggcttccccacgtcaaa

SEQ ID NO: 169333 - DNA, 25 bp, Homo sapien
aatcgatctccgctgcttcttcggc

SEQ ID NO: 169334 - DNA, 25 bp, Homo sapien
gacactttgaacctccgcagcagcg

SEQ ID NO: 169335 - DNA, 25 bp, Homo sapien
acctccgcagcagcgctaccacttt

SEQ ID NO: 169336 - DNA, 25 bp, Homo sapien
tcggacactttgaacctccgcagca

SEQ ID NO: 169337 - DNA, 25 bp, Homo sapien
tcgtcggacactttgaacctccgca

SEQ ID NO: 169338 - DNA, 25 bp, Homo sapien
tcccgaccaggtgctgttgcaggcg

SEQ ID NO: 169339 - DNA, 25 bp, Homo sapien
gtgcagacggtgagcggcagaacca

SEQ ID NO: 169340 - DNA, 25 bp, Homo sapien
gacttccagggtattcacgacttct

SEQ ID NO: 169341 - DNA, 25 bp, Homo sapien
cctcgcagactgtgcgatgctggcg

SEQ ID NO: 169342 - DNA, 25 bp, Homo sapien
ccgagtatgttaggacacagcgcca

SEQ ID NO: 169343 - DNA, 25 bp, Homo sapien
tcaaggctgagacgcttaaacgcca

SEQ ID NO: 169344 - DNA, 25 bp, Homo sapien
caaagcacctgtttcggcacatgga

SEQ ID NO: 169345 - DNA, 25 bp, Homo sapien
tgaaaacgatgtcctctccctgaac

SEQ ID NO: 169346 - DNA, 25 bp, Homo sapien
tatgtggacttatgcaatctgcctg

SEQ ID NO: 169347 - DNA, 25 bp, Homo sapien
gctgggaatctgatacgcacttgaa

SEQ ID NO: 169348 - DNA, 25 bp, Homo sapien
actgatctccatgcctgtccctggg

SEQ ID NO: 169349 - DNA, 25 bp, Homo sapien
gaagggttcacttctggactatcac

SEQ ID NO: 169350 - DNA, 25 bp, Homo sapien
tcaaagacttggcaggcatcagaac

SEQ ID NO: 169351 - DNA, 25 bp, Homo sapien
gcaatggtgatgtcaaccgcggctc

SEQ ID NO: 169352 - DNA, 25 bp, Homo sapien
ttctcagtacaagtggacagcagcg

SEQ ID NO: 169353 - DNA, 25 bp, Homo sapien
taattcaaggaatcactccacgggc

SEQ ID NO: 169354 - DNA, 25 bp, Homo sapien
gcacgcgtgagttccctgcagcagc

SEQ ID NO: 169355 - DNA, 25 bp, Homo sapien
ctgcacgggtgccaggcacgcgtga

SEQ ID NO: 169356 - DNA, 25 bp, Homo sapien
tgcagcagcccacattgccccactg

SEQ ID NO: 169357 - DNA, 25 bp, Homo sapien
tgccaggcacgcgtgagttccctgc

SEQ ID NO: 169358 - DNA, 25 bp, Homo sapien
cctcggggatgtgctccgcagggtc

SEQ ID NO: 169359 - DNA, 25 bp, Homo sapien
tccatgtccagggtgtcatacagga

SEQ ID NO: 169360 - DNA, 25 bp, Homo sapien
gtgctgaggacgctgtcgtcatcct

SEQ ID NO: 169361 - DNA, 25 bp, Homo sapien
gtgtcatacaggaggtccaggtcct

SEQ ID NO: 169362 - DNA, 25 bp, Homo sapien
agctcgagtgcgacaggccttcaaa

SEQ ID NO: 169363 - DNA, 25 bp, Homo sapien
ggctccttgtggctgcgggcgctgt

SEQ ID NO: 169364 - DNA, 25 bp, Homo sapien
tgcgggcgctgtggatgctcccaat

SEQ ID NO: 169365 - DNA, 25 bp, Homo sapien
caatctccgtctgcgagctcgagtg

SEQ ID NO: 169366 - DNA, 25 bp, Homo sapien
cgtgtcagagacactgtcgctcggc

SEQ ID NO: 169367 - DNA, 25 bp, Homo sapien
gagacactgtcgctcggctgcctgc

SEQ ID NO: 169368 - DNA, 25 bp, Homo sapien
ggaccgcgtcttctcgggcacgtca

SEQ ID NO: 169369 - DNA, 25 bp, Homo sapien
gagggccaccgtgtcagagacactg

SEQ ID NO: 169370 - DNA, 25 bp, Homo sapien
tgtcctcaggctgtccagggtgctc

SEQ ID NO: 169371 - DNA, 25 bp, Homo sapien
gtcttggtgatcctcccgctgggcg

SEQ ID NO: 169372 - DNA, 25 bp, Homo sapien
tctccgtgaacacatccagggtgga

SEQ ID NO: 169373 - DNA, 25 bp, Homo sapien
aggggatgacaagggactctgtctt

SEQ ID NO: 169374 - DNA, 25 bp, Homo sapien
caggctgttggcccgctcattctgg

SEQ ID NO: 169375 - DNA, 25 bp, Homo sapien
ccgggcagcgctcgttgtccaggct

SEQ ID NO: 169376 - DNA, 25 bp, Homo sapien
ttcaaggatgtgctccggccccgtc

SEQ ID NO: 169377 - DNA, 25 bp, Homo sapien
gcctgccgctccttcaaggatgtgc

SEQ ID NO: 169378 - DNA, 25 bp, Homo sapien
cacacccagaagagaagcacagcgc

SEQ ID NO: 169379 - DNA, 25 bp, Homo sapien
ctgtccacacccagaagagaagcac

SEQ ID NO: 169380 - DNA, 25 bp, Homo sapien
agaagagaagcacagcgcccatccc

SEQ ID NO: 169381 - DNA, 25 bp, Homo sapien
cccaccacgccagccctggtgcctg

SEQ ID NO: 169382 - DNA, 25 bp, Homo sapien
aaggatgatgttttcgggaagctgg

SEQ ID NO: 169383 - DNA, 25 bp, Homo sapien
atgttttcgggaagctggtcatcgg

SEQ ID NO: 169384 - DNA, 25 bp, Homo sapien
gatgatgttttcgggaagctggtca

SEQ ID NO: 169385 - DNA, 25 bp, Homo sapien
tgatgttttcgggaagctggtcatc

SEQ ID NO: 169386 - DNA, 25 bp, Homo sapien
gcctctgcaggacgtcggagaggaa

SEQ ID NO: 169387 - DNA, 25 bp, Homo sapien
caggagagcacgtgcacaccacggg

SEQ ID NO: 169388 - DNA, 25 bp, Homo sapien
tatccgtgagacgatggtgctgaag

SEQ ID NO: 169389 - DNA, 25 bp, Homo sapien
gctgaaggccgcctggacgtccgca

SEQ ID NO: 169390 - DNA, 25 bp, Homo sapien
gaccacacagtcatggcctcagccc

SEQ ID NO: 169391 - DNA, 25 bp, Homo sapien
gacagacgcctcaggggagccgtcc

SEQ ID NO: 169392 - DNA, 25 bp, Homo sapien
tgtggccgctcatgccacaactgcc

SEQ ID NO: 169393 - DNA, 25 bp, Homo sapien
tcctccatccaaggatgccagtgtg

SEQ ID NO: 169394 - DNA, 25 bp, Homo sapien
ctgctccacaaagagccgcaggatg

SEQ ID NO: 169395 - DNA, 25 bp, Homo sapien
tagccgagccagtcgggtgtcttgt

SEQ ID NO: 169396 - DNA, 25 bp, Homo sapien
gcactgaggtaatgctgcgctcccg

SEQ ID NO: 169397 - DNA, 25 bp, Homo sapien
cgccacggcgatcttcacgggggtc

SEQ ID NO: 169398 - DNA, 25 bp, Homo sapien
taatggagttcgacgacacaggacc

SEQ ID NO: 169399 - DNA, 25 bp, Homo sapien
ccttcagagggcgatggctttatct

SEQ ID NO: 169400 - DNA, 25 bp, Homo sapien
tatcacagcgactgatggaggagac

SEQ ID NO: 169401 - DNA, 25 bp, Homo sapien
tctgacgtcggcatcgtgagggcca

SEQ ID NO: 169402 - DNA, 25 bp, Homo sapien
ttgttgtagcggtagtccacggagc

SEQ ID NO: 169403 - DNA, 25 bp, Homo sapien
gggcctccagcttgttgaacaggtc

SEQ ID NO: 169404 - DNA, 25 bp, Homo sapien
agcttgttgaacaggtctctccagg

SEQ ID NO: 169405 - DNA, 25 bp, Homo sapien
agtccacggagcctaggtacctggc

SEQ ID NO: 169406 - DNA, 25 bp, Homo sapien
tgcgtgatgcgtgacacaatgtctg

SEQ ID NO: 169407 - DNA, 25 bp, Homo sapien
gacacaatgtctggcgtgtcctgta

SEQ ID NO: 169408 - DNA, 25 bp, Homo sapien
cacagttggcccctgcgatgtactg

SEQ ID NO: 169409 - DNA, 25 bp, Homo sapien
ccctgcgatgtactgcgtgatgcgt

SEQ ID NO: 169410 - DNA, 25 bp, Homo sapien
cagggcccgaggcccagggaatcct

SEQ ID NO: 169411 - DNA, 25 bp, Homo sapien
gaatccttcgttccccagcccgaga

SEQ ID NO: 169412 - DNA, 25 bp, Homo sapien
cacagggcccgaggcccagggaatc

SEQ ID NO: 169413 - DNA, 25 bp, Homo sapien
ccacagggcccgaggcccagggaat

SEQ ID NO: 169414 - DNA, 25 bp, Homo sapien
agggtaaagtcaaaatgaaaatgct

SEQ ID NO: 169415 - DNA, 25 bp, Homo sapien
tagggtaaagtcaaaatgaaaatgc

SEQ ID NO: 169416 - DNA, 25 bp, Homo sapien
ctgggagatacaagcagctgcgtcc

SEQ ID NO: 169417 - DNA, 25 bp, Homo sapien
tgggagatacaagcagctgcgtcca

SEQ ID NO: 169418 - DNA, 25 bp, Homo sapien
gggagatacaagcagctgcgtccac

SEQ ID NO: 169419 - DNA, 25 bp, Homo sapien
ggagatacaagcagctgcgtccacg

SEQ ID NO: 169420 - DNA, 25 bp, Homo sapien
agacagttaagctctcctcagggca

SEQ ID NO: 169421 - DNA, 25 bp, Homo sapien
tgcacccatggtcaggaggacaggc

SEQ ID NO: 169422 - DNA, 25 bp, Homo sapien
aaggaaacagacagttaagctctcc

SEQ ID NO: 169423 - DNA, 25 bp, Homo sapien
aaggacaaaggggtctctgtgcacc

SEQ ID NO: 169424 - DNA, 25 bp, Homo sapien
gaacttttgggaggactcttcgtca

SEQ ID NO: 169425 - DNA, 25 bp, Homo sapien
aacttttgggaggactcttcgtcag

SEQ ID NO: 169426 - DNA, 25 bp, Homo sapien
atgaacttttgggaggactcttcgt

SEQ ID NO: 169427 - DNA, 25 bp, Homo sapien
cttttgggaggactcttcgtcaggg

SEQ ID NO: 169428 - DNA, 25 bp, Homo sapien
gccacaggcggctacgtagatctac

SEQ ID NO: 169429 - DNA, 25 bp, Homo sapien
tcccatgatgctggagcggccaggt

SEQ ID NO: 169430 - DNA, 25 bp, Homo sapien
tgaaagccgtgcaattcagctagcc

SEQ ID NO: 169431 - DNA, 25 bp, Homo sapien
tagatctaccgtgaatcccagtgac

SEQ ID NO: 169432 - DNA, 25 bp, Homo sapien
ctgatgtggccgaggatggctccac

SEQ ID NO: 169433 - DNA, 25 bp, Homo sapien
tgatgtggccgaggatggctccaca

SEQ ID NO: 169434 - DNA, 25 bp, Homo sapien
gatgtggccgaggatggctccacaa

SEQ ID NO: 169435 - DNA, 25 bp, Homo sapien
atgtggccgaggatggctccacaat

SEQ ID NO: 169436 - DNA, 25 bp, Homo sapien
ggactcgaatgaccgtgctcctgca

SEQ ID NO: 169437 - DNA, 25 bp, Homo sapien
gacaaccctgccagccttgatgtgg

SEQ ID NO: 169438 - DNA, 25 bp, Homo sapien
gctttgtgacagcagtccttggagg

SEQ ID NO: 169439 - DNA, 25 bp, Homo sapien
caggccctgaaaggttgatctggtc

SEQ ID NO: 169440 - DNA, 25 bp, Homo sapien
cttggccgcaggagatgcggacggc

SEQ ID NO: 169441 - DNA, 25 bp, Homo sapien
aggagagcgtgccagagcccgaggg

SEQ ID NO: 169442 - DNA, 25 bp, Homo sapien
gagggggccgcgtcgtccgagtcgc

SEQ ID NO: 169443 - DNA, 25 bp, Homo sapien
aggacaggcctccgctcaccgacgg

SEQ ID NO: 169444 - DNA, 25 bp, Homo sapien
ggcgggtaagtgaaacgtgctgagc

SEQ ID NO: 169445 - DNA, 25 bp, Homo sapien
gaaacgtgctgagccgtgaggcacc

SEQ ID NO: 169446 - DNA, 25 bp, Homo sapien
taagtgaaacgtgctgagccgtgag

SEQ ID NO: 169447 - DNA, 25 bp, Homo sapien
cgtgctgagccgtgaggcaccttta

SEQ ID NO: 169448 - DNA, 25 bp, Homo sapien
caagctgccccttggagtcgtgagg

SEQ ID NO: 169449 - DNA, 25 bp, Homo sapien
acttgagtgaggtctgctccggaga

SEQ ID NO: 169450 - DNA, 25 bp, Homo sapien
catgaggaccgtctagagactcacg

SEQ ID NO: 169451 - DNA, 25 bp, Homo sapien
tgcttaaattacagggaccctggcg

SEQ ID NO: 169452 - DNA, 25 bp, Homo sapien
ctggagggaccggaaagtgcacttg

SEQ ID NO: 169453 - DNA, 25 bp, Homo sapien
cttgagcgtgtttttggtgacaggc

SEQ ID NO: 169454 - DNA, 25 bp, Homo sapien
gtgctgccgtccagtagtccacctg

SEQ ID NO: 169455 - DNA, 25 bp, Homo sapien
ggctgtgctgccgtccagtagtcca

SEQ ID NO: 169456 - DNA, 25 bp, Homo sapien
gtgaccacggtcatggacatggtgg

SEQ ID NO: 169457 - DNA, 25 bp, Homo sapien
cttggtgaccacggtcatggacatg

SEQ ID NO: 169458 - DNA, 25 bp, Homo sapien
tgaccacggtcatggacatggtggg

SEQ ID NO: 169459 - DNA, 25 bp, Homo sapien
tccttggtgaccacggtcatggaca

SEQ ID NO: 169460 - DNA, 25 bp, Homo sapien
ttgctgctccttcggggctggggcc

SEQ ID NO: 169461 - DNA, 25 bp, Homo sapien
gaaaagaggccctgctgtcatcttg

SEQ ID NO: 169462 - DNA, 25 bp, Homo sapien
gctgtcatcttgctgctccttcggg

SEQ ID NO: 169463 - DNA, 25 bp, Homo sapien
catcttgctgctccttcggggctgg

SEQ ID NO: 169464 - DNA, 25 bp, Homo sapien
tccttcgctttcttgggcagaaaca

SEQ ID NO: 169465 - DNA, 25 bp, Homo sapien
cctcaatgcactggctcttagactc

SEQ ID NO: 169466 - DNA, 25 bp, Homo sapien
tggctcttagactccacgtccttgt

SEQ ID NO: 169467 - DNA, 25 bp, Homo sapien
tgagccggctgatgccctcaatgca

SEQ ID NO: 169468 - DNA, 25 bp, Homo sapien
tgtgcgtgtcacagcgagacacccg

SEQ ID NO: 169469 - DNA, 25 bp, Homo sapien
tgaatcgtggaatgtgcgtgtcaca

SEQ ID NO: 169470 - DNA, 25 bp, Homo sapien
aatgtgcttgcaccttgaatcgtgg

SEQ ID NO: 169471 - DNA, 25 bp, Homo sapien
tcagcatttggaaggttgtcagcct

SEQ ID NO: 169472 - DNA, 25 bp, Homo sapien
acagggccacgtcgacctggaggtc

SEQ ID NO: 169473 - DNA, 25 bp, Homo sapien
ccgtttctgaaacagttacttgcag

SEQ ID NO: 169474 - DNA, 25 bp, Homo sapien
gcctctgcgctcagccaacactttt

SEQ ID NO: 169475 - DNA, 25 bp, Homo sapien
tctgacccgtgctcaaaaagaggaa

SEQ ID NO: 169476 - DNA, 25 bp, Homo sapien
gcacaggtgtgggaagaagacagtg

SEQ ID NO: 169477 - DNA, 25 bp, Homo sapien
cacaggtgtgggaagaagacagtgg

SEQ ID NO: 169478 - DNA, 25 bp, Homo sapien
tgcacaggtgtgggaagaagacagt

SEQ ID NO: 169479 - DNA, 25 bp, Homo sapien
agggcatcaacactttcctcaggga

SEQ ID NO: 169480 - DNA, 25 bp, Homo sapien
tggctcctgagggacgccattcctg

SEQ ID NO: 169481 - DNA, 25 bp, Homo sapien
tggcagccgggcgtacaggatgaga

SEQ ID NO: 169482 - DNA, 25 bp, Homo sapien
ggcgtacaggatgagaaggagcccc

SEQ ID NO: 169483 - DNA, 25 bp, Homo sapien
gcccggcctgcccaccctatccacc

SEQ ID NO: 169484 - DNA, 25 bp, Homo sapien
ggagagggctgcctgaccgcctgcc

SEQ ID NO: 169485 - DNA, 25 bp, Homo sapien
gcctgaccgcctgcccccctgcccg

SEQ ID NO: 169486 - DNA, 25 bp, Homo sapien
cccggcctgcccaccctatccacct

SEQ ID NO: 169487 - DNA, 25 bp, Homo sapien
tgcttcacgtgcgaggaccactgcg

SEQ ID NO: 169488 - DNA, 25 bp, Homo sapien
aagtgcttcacgtgcgaggaccact

SEQ ID NO: 169489 - DNA, 25 bp, Homo sapien
tggaagaacttgacgtcgctgcact

SEQ ID NO: 169490 - DNA, 25 bp, Homo sapien
gccttggagtgtccgaagatgcaga

SEQ ID NO: 169491 - DNA, 25 bp, Homo sapien
cagagtcctgacttccaggaaggac

SEQ ID NO: 169492 - DNA, 25 bp, Homo sapien
aacgttcgggttaataagcagagca

SEQ ID NO: 169493 - DNA, 25 bp, Homo sapien
gaggcaagaactcagcctgtgaggc

SEQ ID NO: 169494 - DNA, 25 bp, Homo sapien
cccgttagtttccacgttgtgagca

SEQ ID NO: 169495 - DNA, 25 bp, Homo sapien
cattagaacatgtattgaaaagcat

SEQ ID NO: 169496 - DNA, 25 bp, Homo sapien
catgtttggcagctacattagaaca

SEQ ID NO: 169497 - DNA, 25 bp, Homo sapien
ttagaacatgtattgaaaagcatta

SEQ ID NO: 169498 - DNA, 25 bp, Homo sapien
tagaacatgtattgaaaagcattaa

SEQ ID NO: 169499 - DNA, 25 bp, Homo sapien
cagaagcctcatggtgtttcaagaa

SEQ ID NO: 169500 - DNA, 25 bp, Homo sapien
gctgacctcagacatacccactggg

SEQ ID NO: 169501 - DNA, 25 bp, Homo sapien
tgacacaaacacatctggacgcctg

SEQ ID NO: 169502 - DNA, 25 bp, Homo sapien
accaaaacctgaatctcaacccaga

SEQ ID NO: 169503 - DNA, 25 bp, Homo sapien
tggaacattttctggggccacctgg

SEQ ID NO: 169504 - DNA, 25 bp, Homo sapien
tggtcaggccatcccgctggaatct

SEQ ID NO: 169505 - DNA, 25 bp, Homo sapien
cagtgctccatcttacgaaaccagg

SEQ ID NO: 169506 - DNA, 25 bp, Homo sapien
aagagcagggcggtcacaagtaaga

SEQ ID NO: 169507 - DNA, 25 bp, Homo sapien
ggacccaacacgctctgaggactgt

SEQ ID NO: 169508 - DNA, 25 bp, Homo sapien
cagctgaacgagtcagtcagggtcc

SEQ ID NO: 169509 - DNA, 25 bp, Homo sapien
catgttctccccttgcgtggctaag

SEQ ID NO: 169510 - DNA, 25 bp, Homo sapien
gccaggattcaatgggagaccttcc

SEQ ID NO: 169511 - DNA, 25 bp, Homo sapien
acagccaggatgcactaggcagcct

SEQ ID NO: 169512 - DNA, 25 bp, Homo sapien
gaaatagtccacacggtcacatacg

SEQ ID NO: 169513 - DNA, 25 bp, Homo sapien
tctacgtaatagtggacagtggcca

SEQ ID NO: 169514 - DNA, 25 bp, Homo sapien
tccttggtgggacagagtgctcctc

SEQ ID NO: 169515 - DNA, 25 bp, Homo sapien
aaactacagtggtgcttctttggcc

SEQ ID NO: 169516 - DNA, 25 bp, Homo sapien
gcgcatatccgggtctatggccgct

SEQ ID NO: 169517 - DNA, 25 bp, Homo sapien
ggtccccggcgcatatccgggtcta

SEQ ID NO: 169518 - DNA, 25 bp, Homo sapien
atatccgggtctatggccgctaccg

SEQ ID NO: 169519 - DNA, 25 bp, Homo sapien
ccccggcgcatatccgggtctatgg

SEQ ID NO: 169520 - DNA, 25 bp, Homo sapien
ggagaggccacagggggccgctgga

SEQ ID NO: 169521 - DNA, 25 bp, Homo sapien
ccgccgcggatggagaggccacagg

SEQ ID NO: 169522 - DNA, 25 bp, Homo sapien
cggatggagaggccacagggggccg

SEQ ID NO: 169523 - DNA, 25 bp, Homo sapien
gatggagaggccacagggggccgct

SEQ ID NO: 169524 - DNA, 25 bp, Homo sapien
gagcccttacgtgcccgccctctcc

SEQ ID NO: 169525 - DNA, 25 bp, Homo sapien
gaaggctcaggacacacgctggagg

SEQ ID NO: 169526 - DNA, 25 bp, Homo sapien
agccccgcttccgaccctgagacct

SEQ ID NO: 169527 - DNA, 25 bp, Homo sapien
gtgggcacccggagacagaaggagg

SEQ ID NO: 169528 - DNA, 25 bp, Homo sapien
ctgccagccttctcaaacgttccag

SEQ ID NO: 169529 - DNA, 25 bp, Homo sapien
gccagccttctcaaacgttccaggg

SEQ ID NO: 169530 - DNA, 25 bp, Homo sapien
agcactgcgggcacgctctcagggc

SEQ ID NO: 169531 - DNA, 25 bp, Homo sapien
ttccaggggcatcagccctcagcca

SEQ ID NO: 169532 - DNA, 25 bp, Homo sapien
gcagatggtggcagtatcgcggtct

SEQ ID NO: 169533 - DNA, 25 bp, Homo sapien
aggtcaggcatcactgacccctctg

SEQ ID NO: 169534 - DNA, 25 bp, Homo sapien
cagtatcgcggtctgctagggtcac

SEQ ID NO: 169535 - DNA, 25 bp, Homo sapien
aaaggtcaggcatcactgacccctc

SEQ ID NO: 169536 - DNA, 25 bp, Homo sapien
ctagccctagtaggctgcttgtcca

SEQ ID NO: 169537 - DNA, 25 bp, Homo sapien
ccatctctagccctagtaggctgct

SEQ ID NO: 169538 - DNA, 25 bp, Homo sapien
gagaggtgcgactccagcttcttcc

SEQ ID NO: 169539 - DNA, 25 bp, Homo sapien
ccaggctgctatcaggcccagtggg

SEQ ID NO: 169540 - DNA, 25 bp, Homo sapien
gccagctgccaaagcattgccagtg

SEQ ID NO: 169541 - DNA, 25 bp, Homo sapien
gcggcccacggttctggaagcaaga

SEQ ID NO: 169542 - DNA, 25 bp, Homo sapien
tctgccctcagagaacgtcctaagg

SEQ ID NO: 169543 - DNA, 25 bp, Homo sapien
tggccttggaagacctctctacaga

SEQ ID NO: 169544 - DNA, 25 bp, Homo sapien
gcaagctcttgagagctcccctccg

SEQ ID NO: 169545 - DNA, 25 bp, Homo sapien
agaacctacaggtttctatacttcg

SEQ ID NO: 169546 - DNA, 25 bp, Homo sapien
atcttatccagaacctacaggtttc

SEQ ID NO: 169547 - DNA, 25 bp, Homo sapien
tccgtcaggctatggagatgtccat

SEQ ID NO: 169548 - DNA, 25 bp, Homo sapien
cctgttgctaagttgaatagtatcc

SEQ ID NO: 169549 - DNA, 25 bp, Homo sapien
tggattttccaagtaggtaacatat

SEQ ID NO: 169550 - DNA, 25 bp, Homo sapien
aaactccctcttttatctgtactca

SEQ ID NO: 169551 - DNA, 25 bp, Homo sapien
agttgtgaatggtgatcacatatcc

SEQ ID NO: 169552 - DNA, 25 bp, Homo sapien
tcaccctgcggttggaatattcctg

SEQ ID NO: 169553 - DNA, 25 bp, Homo sapien
cacggccgtttggtgtccatcttca

SEQ ID NO: 169554 - DNA, 25 bp, Homo sapien
caatgtgaactgatgcacggccgtt

SEQ ID NO: 169555 - DNA, 25 bp, Homo sapien
tcccaaatccgaggtaagtttgctg

SEQ ID NO: 169556 - DNA, 25 bp, Homo sapien
tcaggaacaggtctatgagactcac

SEQ ID NO: 169557 - DNA, 25 bp, Homo sapien
tttgaactctgaacaaagccacatg

SEQ ID NO: 169558 - DNA, 25 bp, Homo sapien
tgtttacttctgcatgcttttgaac

SEQ ID NO: 169559 - DNA, 25 bp, Homo sapien
gaatattggcaatatcttgtttact

SEQ ID NO: 169560 - DNA, 25 bp, Homo sapien
ttttgagagacggacccgcactcta

SEQ ID NO: 169561 - DNA, 25 bp, Homo sapien
tccgggttacttgtccaggcagtgg

SEQ ID NO: 169562 - DNA, 25 bp, Homo sapien
tgcggacaagccaggccttgctctt

SEQ ID NO: 169563 - DNA, 25 bp, Homo sapien
cagtgctcacatggtttgggtttaa

SEQ ID NO: 169564 - DNA, 25 bp, Homo sapien
cccggagctcgagcactgatgcgtg

SEQ ID NO: 169565 - DNA, 25 bp, Homo sapien
cgtgcctcaggaaaggcaggactaa

SEQ ID NO: 169566 - DNA, 25 bp, Homo sapien
aggactaaggccagctccagactgc

SEQ ID NO: 169567 - DNA, 25 bp, Homo sapien
tgtggaccgcttagtcctcacggcc

SEQ ID NO: 169568 - DNA, 25 bp, Homo sapien
gccggcgctcgtcgatgctgacgct

SEQ ID NO: 169569 - DNA, 25 bp, Homo sapien
ggcgcctgcgttccggcggctcgca

SEQ ID NO: 169570 - DNA, 25 bp, Homo sapien
gctcgtcgatgctgacgctccagcg

SEQ ID NO: 169571 - DNA, 25 bp, Homo sapien
tcgatgctgacgctccagcggcggc

SEQ ID NO: 169572 - DNA, 25 bp, Homo sapien
gtggtcagggagcctcgaggggcgg

SEQ ID NO: 169573 - DNA, 25 bp, Homo sapien
ctgcgggcgagggtggtcagggagc

SEQ ID NO: 169574 - DNA, 25 bp, Homo sapien
cagggagcctcgaggggcgggaagg

SEQ ID NO: 169575 - DNA, 25 bp, Homo sapien
ggtcagggagcctcgaggggcggga

SEQ ID NO: 169576 - DNA, 25 bp, Homo sapien
ggcctggaaggcgttggtggactcg

SEQ ID NO: 169577 - DNA, 25 bp, Homo sapien
agaaaggcgcactgcgcgccaggaa

SEQ ID NO: 169578 - DNA, 25 bp, Homo sapien
ggaaggagcacgtccttgtccacgt

SEQ ID NO: 169579 - DNA, 25 bp, Homo sapien
tcgaggcctcgaaagtcgcattatg

SEQ ID NO: 169580 - DNA, 25 bp, Homo sapien
tagggtgcaccaaatgacattcaga

SEQ ID NO: 169581 - DNA, 25 bp, Homo sapien
caaaatgcagctgggacacgttacc

SEQ ID NO: 169582 - DNA, 25 bp, Homo sapien
gaaatgcagaggatccctagggtgc

SEQ ID NO: 169583 - DNA, 25 bp, Homo sapien
cagaggattcaactcgggccaggga

SEQ ID NO: 169584 - DNA, 25 bp, Homo sapien
aggctggaacccagcgcctgctgac

SEQ ID NO: 169585 - DNA, 25 bp, Homo sapien
gccgtgctctttccgcagtgaggca

SEQ ID NO: 169586 - DNA, 25 bp, Homo sapien
caggagcggccgtgctctttccgca

SEQ ID NO: 169587 - DNA, 25 bp, Homo sapien
ggatgccttcccgtgtgtgcttgtg

SEQ ID NO: 169588 - DNA, 25 bp, Homo sapien
ccaggcagggcgtgtccttggcctt

SEQ ID NO: 169589 - DNA, 25 bp, Homo sapien
ggtcgtgcgcgccttggtgtgggca

SEQ ID NO: 169590 - DNA, 25 bp, Homo sapien
gtgtgggcaggctccgtagccggca

SEQ ID NO: 169591 - DNA, 25 bp, Homo sapien
catctctggacaggtggtcgtgcgc

SEQ ID NO: 169592 - DNA, 25 bp, Homo sapien
gcaggcgtttaaaggggccgcgctg

SEQ ID NO: 169593 - DNA, 25 bp, Homo sapien
aaatggaggcgcgatggcgggggcg

SEQ ID NO: 169594 - DNA, 25 bp, Homo sapien
cgcaggcgtttaaaggggccgcgct

SEQ ID NO: 169595 - DNA, 25 bp, Homo sapien
cgggaaaatggaggcgcgatggcgg

SEQ ID NO: 169596 - DNA, 25 bp, Homo sapien
ctccgaccctgtacatgttggcggc

SEQ ID NO: 169597 - DNA, 25 bp, Homo sapien
ccgaccctgtacatgttggcggcca

SEQ ID NO: 169598 - DNA, 25 bp, Homo sapien
tccgaccctgtacatgttggcggcc

SEQ ID NO: 169599 - DNA, 25 bp, Homo sapien
cgaccctgtacatgttggcggccat

SEQ ID NO: 169600 - DNA, 25 bp, Homo sapien
acgcagaagcagtctggatcccacg

SEQ ID NO: 169601 - DNA, 25 bp, Homo sapien
caacctcccatgctcctcatcacag

SEQ ID NO: 169602 - DNA, 25 bp, Homo sapien
ctgcacacgcagaagcagtctggat

SEQ ID NO: 169603 - DNA, 25 bp, Homo sapien
agtctggatcccacgcgtggctgtg

SEQ ID NO: 169604 - DNA, 25 bp, Homo sapien
tgacagctccgagcacacccggcca

SEQ ID NO: 169605 - DNA, 25 bp, Homo sapien
gacagctccgagcacacccggccac

SEQ ID NO: 169606 - DNA, 25 bp, Homo sapien
ctgacagctccgagcacacccggcc

SEQ ID NO: 169607 - DNA, 25 bp, Homo sapien
ccagggttccggtccagaagccagg

SEQ ID NO: 169608 - DNA, 25 bp, Homo sapien
aagacaggaagccaacctgcaatgc

SEQ ID NO: 169609 - DNA, 25 bp, Homo sapien
aagccagggataaatgccgcttctc

SEQ ID NO: 169610 - DNA, 25 bp, Homo sapien
tctgggggctcaagaatccagacgc

SEQ ID NO: 169611 - DNA, 25 bp, Homo sapien
agaatattaaatgctctgccgggca

SEQ ID NO: 169612 - DNA, 25 bp, Homo sapien
gcctagagggtggtgcaaagcccat

SEQ ID NO: 169613 - DNA, 25 bp, Homo sapien
gccttgcactatgagggtggcccca

SEQ ID NO: 169614 - DNA, 25 bp, Homo sapien
caagagcactccaagttcagcagga

SEQ ID NO: 169615 - DNA, 25 bp, Homo sapien
ttctccgacactgaactcacgtggg

SEQ ID NO: 169616 - DNA, 25 bp, Homo sapien
gcagagcctgtccaacacacgttct

SEQ ID NO: 169617 - DNA, 25 bp, Homo sapien
caaatgcaagaagcatggccctcag

SEQ ID NO: 169618 - DNA, 25 bp, Homo sapien
ttagcagcctgtgcgtgcccgcaaa

SEQ ID NO: 169619 - DNA, 25 bp, Homo sapien
acacgcccgtgaggacacatctgtg

SEQ ID NO: 169620 - DNA, 25 bp, Homo sapien
gacgcacctgtttgggcacccatgt

SEQ ID NO: 169621 - DNA, 25 bp, Homo sapien
gatcagatgaggctacgcccacata

SEQ ID NO: 169622 - DNA, 25 bp, Homo sapien
acatagagctccacaggacaacggg

SEQ ID NO: 169623 - DNA, 25 bp, Homo sapien
caggcacacgcccatgaggacgcac

SEQ ID NO: 169624 - DNA, 25 bp, Homo sapien
actcccatgaggacgcacctgcagg

SEQ ID NO: 169625 - DNA, 25 bp, Homo sapien
gccacacacccatgaggacactccc

SEQ ID NO: 169626 - DNA, 25 bp, Homo sapien
cacacacccatgaggacactcccat

SEQ ID NO: 169627 - DNA, 25 bp, Homo sapien
ggacacgccagtgaggacgcacctg

SEQ ID NO: 169628 - DNA, 25 bp, Homo sapien
gacacgccagtgaggacgcacctgc

SEQ ID NO: 169629 - DNA, 25 bp, Homo sapien
ggctcatgcccctgaggacacgcca

SEQ ID NO: 169630 - DNA, 25 bp, Homo sapien
atgcccctgaggacacgccagtgag

SEQ ID NO: 169631 - DNA, 25 bp, Homo sapien
agtgccccaagatcggccatcaggt

SEQ ID NO: 169632 - DNA, 25 bp, Homo sapien
ttccctcagcgatgaaaccatctgg

SEQ ID NO: 169633 - DNA, 25 bp, Homo sapien
cagagagccacggaaccttccggag

SEQ ID NO: 169634 - DNA, 25 bp, Homo sapien
gccatcaggtgagtacagcgcttcc

SEQ ID NO: 169635 - DNA, 25 bp, Homo sapien
ctgcaaacagcaacagagagagtgc

SEQ ID NO: 169636 - DNA, 25 bp, Homo sapien
tgcaaacagcaacagagagagtgcc

SEQ ID NO: 169637 - DNA, 25 bp, Homo sapien
caaacagcaacagagagagtgccac

SEQ ID NO: 169638 - DNA, 25 bp, Homo sapien
gcaaacagcaacagagagagtgcca

SEQ ID NO: 169639 - DNA, 25 bp, Homo sapien
gctcctcgattctccggatcaggta

SEQ ID NO: 169640 - DNA, 25 bp, Homo sapien
gttgagctcctcgattctccggatc

SEQ ID NO: 169641 - DNA, 25 bp, Homo sapien
gagctcctcgattctccggatcagg

SEQ ID NO: 169642 - DNA, 25 bp, Homo sapien
tcgattctccggatcaggtatgggt

SEQ ID NO: 169643 - DNA, 25 bp, Homo sapien
gcagcaacaccagggccccccagta

SEQ ID NO: 169644 - DNA, 25 bp, Homo sapien
ccctgcagcaacaccagggcccccc

SEQ ID NO: 169645 - DNA, 25 bp, Homo sapien
ctgcagcaacaccagggccccccag

SEQ ID NO: 169646 - DNA, 25 bp, Homo sapien
ccccctgcagcaacaccagggcccc

SEQ ID NO: 169647 - DNA, 25 bp, Homo sapien
cacagaccaagtgtagagtgggcag

SEQ ID NO: 169648 - DNA, 25 bp, Homo sapien
agaatcacaccattccgctcgggct

SEQ ID NO: 169649 - DNA, 25 bp, Homo sapien
agcacccacagaccaagtgtagagt

SEQ ID NO: 169650 - DNA, 25 bp, Homo sapien
ggcaccgagtatggctttctgcagc

SEQ ID NO: 169651 - DNA, 25 bp, Homo sapien
gctgccccctctgatcccaagaacc

SEQ ID NO: 169652 - DNA, 25 bp, Homo sapien
ccgctgccccctctgatcccaagaa

SEQ ID NO: 169653 - DNA, 25 bp, Homo sapien
tcccaagaaccccacgtcaccgctg

SEQ ID NO: 169654 - DNA, 25 bp, Homo sapien
ccacgtcaccgctgccaccaagcct

SEQ ID NO: 169655 - DNA, 25 bp, Homo sapien
tgctgggcagctcgctgcatgggct

SEQ ID NO: 169656 - DNA, 25 bp, Homo sapien
cattctgctgggtccccgatgccag

SEQ ID NO: 169657 - DNA, 25 bp, Homo sapien
gtagcgggcattctgctgggtcccc

SEQ ID NO: 169658 - DNA, 25 bp, Homo sapien
ctttagaagtctggccgctagggtc

SEQ ID NO: 169659 - DNA, 25 bp, Homo sapien
actgcaagaattgtgctgtaattct

SEQ ID NO: 169660 - DNA, 25 bp, Homo sapien
cagtgcaagtgcctaatggaatact

SEQ ID NO: 169661 - DNA, 25 bp, Homo sapien
aacatctttgctactgcaagaattg

SEQ ID NO: 169662 - DNA, 25 bp, Homo sapien
gtaattctaatcacagtgcaagtgc

SEQ ID NO: 169663 - DNA, 25 bp, Homo sapien
cagcagccacggccctagcggcgga

SEQ ID NO: 169664 - DNA, 25 bp, Homo sapien
agccacggccctagcggcggacgca

SEQ ID NO: 169665 - DNA, 25 bp, Homo sapien
gccctagcggcggacgcagcctgga

SEQ ID NO: 169666 - DNA, 25 bp, Homo sapien
tagcggcggacgcagcctggacccc

SEQ ID NO: 169667 - DNA, 25 bp, Homo sapien
agatgtcccgcctccggtagaagca

SEQ ID NO: 169668 - DNA, 25 bp, Homo sapien
actttggcctccacgttcccattgg

SEQ ID NO: 169669 - DNA, 25 bp, Homo sapien
agggtgctggagatgtcccgcctcc

SEQ ID NO: 169670 - DNA, 25 bp, Homo sapien
cggtagaagcacaccactttggcct

SEQ ID NO: 169671 - DNA, 25 bp, Homo sapien
ggcgtgcgaggacttcattcaccca

SEQ ID NO: 169672 - DNA, 25 bp, Homo sapien
gaagcctcgatcaatgatgcccaca

SEQ ID NO: 169673 - DNA, 25 bp, Homo sapien
agtctccagaagtcatcatagaagg

SEQ ID NO: 169674 - DNA, 25 bp, Homo sapien
gccacaccatgacaagcttgcagag

SEQ ID NO: 169675 - DNA, 25 bp, Homo sapien
acagaagcctctccgcaaaattaaa

SEQ ID NO: 169676 - DNA, 25 bp, Homo sapien
tcgtaaagaataaggagaggactgc

SEQ ID NO: 169677 - DNA, 25 bp, Homo sapien
aaaacactactcagaatcccaacag

SEQ ID NO: 169678 - DNA, 25 bp, Homo sapien
tcggcaggccctgtgtcagtagcat

SEQ ID NO: 169679 - DNA, 25 bp, Homo sapien
tggccgactcccagcaaaggctcag

SEQ ID NO: 169680 - DNA, 25 bp, Homo sapien
ggaacaaggcatcggtggcaggatg

SEQ ID NO: 169681 - DNA, 25 bp, Homo sapien
ggcagaagatgcgagggtcctccca

SEQ ID NO: 169682 - DNA, 25 bp, Homo sapien
aggatggtctgtcctgtccctaagc

SEQ ID NO: 169683 - DNA, 25 bp, Homo sapien
gaaagcccatggtcaactggcagct

SEQ ID NO: 169684 - DNA, 25 bp, Homo sapien
agtgtccagagtggacccaggctcg

SEQ ID NO: 169685 - DNA, 25 bp, Homo sapien
cgtccgcatccactggttgctgagg

SEQ ID NO: 169686 - DNA, 25 bp, Homo sapien
acagcccagtgtccagagtggaccc

SEQ ID NO: 169687 - DNA, 25 bp, Homo sapien
aatgtgtagcctgtggaccttcaac

SEQ ID NO: 169688 - DNA, 25 bp, Homo sapien
ctgcagagtcgacataggccagcct

SEQ ID NO: 169689 - DNA, 25 bp, Homo sapien
gtcagaggtcaaggatcaccatgcc

SEQ ID NO: 169690 - DNA, 25 bp, Homo sapien
taagaaccgccagccgtgctgctga

SEQ ID NO: 169691 - DNA, 25 bp, Homo sapien
agcggcagacccatcacccatgacg

SEQ ID NO: 169692 - DNA, 25 bp, Homo sapien
agacccatcacccatgacgcctgct

SEQ ID NO: 169693 - DNA, 25 bp, Homo sapien
cagttcataggaacgccctgcagag

SEQ ID NO: 169694 - DNA, 25 bp, Homo sapien
gctttccagggagcaccgtccaaag

SEQ ID NO: 169695 - DNA, 25 bp, Homo sapien
tgggaagagcccagacaagcctggc

SEQ ID NO: 169696 - DNA, 25 bp, Homo sapien
ttgggaagagcccagacaagcctgg

SEQ ID NO: 169697 - DNA, 25 bp, Homo sapien
gggaagagcccagacaagcctggct

SEQ ID NO: 169698 - DNA, 25 bp, Homo sapien
ggaagagcccagacaagcctggctg

SEQ ID NO: 169699 - DNA, 25 bp, Homo sapien
gaagaccacccggttgaagatcatc

SEQ ID NO: 169700 - DNA, 25 bp, Homo sapien
ggcgtgaagaccacccggttgaaga

SEQ ID NO: 169701 - DNA, 25 bp, Homo sapien
cggaccgagggctgtgccgccaggg

SEQ ID NO: 169702 - DNA, 25 bp, Homo sapien
agaccacccggttgaagatcatctg

SEQ ID NO: 169703 - DNA, 25 bp, Homo sapien
ccggtccggccttatagcagactga

SEQ ID NO: 169704 - DNA, 25 bp, Homo sapien
gcccccggtccggccttatagcaga

SEQ ID NO: 169705 - DNA, 25 bp, Homo sapien
ccccggtccggccttatagcagact

SEQ ID NO: 169706 - DNA, 25 bp, Homo sapien
cggtccggccttatagcagactgac

SEQ ID NO: 169707 - DNA, 25 bp, Homo sapien
ccaccctatggcggcccggcggctc

SEQ ID NO: 169708 - DNA, 25 bp, Homo sapien
ccagtcctgggaggcgtgcctcctc

SEQ ID NO: 169709 - DNA, 25 bp, Homo sapien
accctatggcggcccggcggctcct

SEQ ID NO: 169710 - DNA, 25 bp, Homo sapien
cccaccctatggcggcccggcggct

SEQ ID NO: 169711 - DNA, 25 bp, Homo sapien
acagctcccgatgccgcagctggtg

SEQ ID NO: 169712 - DNA, 25 bp, Homo sapien
gtgctttagtttctcgggcaggtcc

SEQ ID NO: 169713 - DNA, 25 bp, Homo sapien
gcaggtccaccatttccgggttctc

SEQ ID NO: 169714 - DNA, 25 bp, Homo sapien
ccgggagaggaacagctcccgatgc

SEQ ID NO: 169715 - DNA, 25 bp, Homo sapien
gacgggcaggctggaaaggcgaggg

SEQ ID NO: 169716 - DNA, 25 bp, Homo sapien
aggctggaaaggcgagggcagcccg

SEQ ID NO: 169717 - DNA, 25 bp, Homo sapien
acgggcaggctggaaaggcgagggc

SEQ ID NO: 169718 - DNA, 25 bp, Homo sapien
gggcaggctggaaaggcgagggcag

SEQ ID NO: 169719 - DNA, 25 bp, Homo sapien
tgagcagggtgacgctgcacttgcc

SEQ ID NO: 169720 - DNA, 25 bp, Homo sapien
tgagcgactcggtctcgttgagcag

SEQ ID NO: 169721 - DNA, 25 bp, Homo sapien
cgttgagcagggtgacgctgcactt

SEQ ID NO: 169722 - DNA, 25 bp, Homo sapien
ggtaggacttgagcgactcggtctc

SEQ ID NO: 169723 - DNA, 25 bp, Homo sapien
tgtgggtcgtagactagagaataga

SEQ ID NO: 169724 - DNA, 25 bp, Homo sapien
tgcctggtaccggtttcctactcga

SEQ ID NO: 169725 - DNA, 25 bp, Homo sapien
cttcttttaacaagtcggtgatgtc

SEQ ID NO: 169726 - DNA, 25 bp, Homo sapien
cctactcgaatctctcctttatctg

SEQ ID NO: 169727 - DNA, 25 bp, Homo sapien
cacttgagttcaggggtttgagacc

SEQ ID NO: 169728 - DNA, 25 bp, Homo sapien
gtttgggaggtcgaagcaggtagat

SEQ ID NO: 169729 - DNA, 25 bp, Homo sapien
gcagtttgggaggtcgaagcaggta

SEQ ID NO: 169730 - DNA, 25 bp, Homo sapien
ttgagttcaggggtttgagaccaac

SEQ ID NO: 169731 - DNA, 25 bp, Homo sapien
tgcctccgtgtatgcgcactgctgg

SEQ ID NO: 169732 - DNA, 25 bp, Homo sapien
ggtcatgatggtcgcactccctttg

SEQ ID NO: 169733 - DNA, 25 bp, Homo sapien
ggccatgcggcctctaggaaacaat

SEQ ID NO: 169734 - DNA, 25 bp, Homo sapien
tgaaggtacagatgcgccagctgag

SEQ ID NO: 169735 - DNA, 25 bp, Homo sapien
acagggaggaagtgtggcctttctg

SEQ ID NO: 169736 - DNA, 25 bp, Homo sapien
ggaagtgtggcctttctgagacggg

SEQ ID NO: 169737 - DNA, 25 bp, Homo sapien
cagggaggaagtgtggcctttctga

SEQ ID NO: 169738 - DNA, 25 bp, Homo sapien
agggaggaagtgtggcctttctgag

SEQ ID NO: 169739 - DNA, 25 bp, Homo sapien
ccaacctggactggtctcggccatc

SEQ ID NO: 169740 - DNA, 25 bp, Homo sapien
aacctggactggtctcggccatcct

SEQ ID NO: 169741 - DNA, 25 bp, Homo sapien
cgatctgcttgtctgtgagtgggtt

SEQ ID NO: 169742 - DNA, 25 bp, Homo sapien
tgagtgggttgtgcgcctcccacac

SEQ ID NO: 169743 - DNA, 25 bp, Homo sapien
tgaccacagtgtcggccaagcaggg

SEQ ID NO: 169744 - DNA, 25 bp, Homo sapien
gtgtcggccaagcagggactcccca

SEQ ID NO: 169745 - DNA, 25 bp, Homo sapien
aggagatgcgctgaccacagtgtcg

SEQ ID NO: 169746 - DNA, 25 bp, Homo sapien
tgcgctgaccacagtgtcggccaag

SEQ ID NO: 169747 - DNA, 25 bp, Homo sapien
gcagtccagggcccgtgcgaaggtg

SEQ ID NO: 169748 - DNA, 25 bp, Homo sapien
cagggcccgtgcgaaggtgcccaca

SEQ ID NO: 169749 - DNA, 25 bp, Homo sapien
ggcccgtgcgaaggtgcccacagag

SEQ ID NO: 169750 - DNA, 25 bp, Homo sapien
agtccagggcccgtgcgaaggtgcc

SEQ ID NO: 169751 - DNA, 25 bp, Homo sapien
gcttcctcgaaaaggttggcctctg

SEQ ID NO: 169752 - DNA, 25 bp, Homo sapien
gaatgtccgtgaaatccttcccata

SEQ ID NO: 169753 - DNA, 25 bp, Homo sapien
cttggagatgtcgtagatgttcttg

SEQ ID NO: 169754 - DNA, 25 bp, Homo sapien
tagatgttcttgtggagagtatcca

SEQ ID NO: 169755 - DNA, 25 bp, Homo sapien
ctggagatgggcatggccagccact

SEQ ID NO: 169756 - DNA, 25 bp, Homo sapien
ggagatgggcatggccagccactcc

SEQ ID NO: 169757 - DNA, 25 bp, Homo sapien
ccccatcgccacccacggtactcac

SEQ ID NO: 169758 - DNA, 25 bp, Homo sapien
ctcccccatcgccacccacggtact

SEQ ID NO: 169759 - DNA, 25 bp, Homo sapien
atgctggtcagcgacttccacggga

SEQ ID NO: 169760 - DNA, 25 bp, Homo sapien
ttccacatgtagtagtactcaatga

SEQ ID NO: 169761 - DNA, 25 bp, Homo sapien
gcacgtatctgtcggtggtcttcca

SEQ ID NO: 169762 - DNA, 25 bp, Homo sapien
ctgctgcacgtatctgtcggtggtc

SEQ ID NO: 169763 - DNA, 25 bp, Homo sapien
agagcaccacggagaggacagccgg

SEQ ID NO: 169764 - DNA, 25 bp, Homo sapien
caccacggagaggacagccgggcca

SEQ ID NO: 169765 - DNA, 25 bp, Homo sapien
aggagagcaccacggagaggacagc

SEQ ID NO: 169766 - DNA, 25 bp, Homo sapien
aggatggggcgcaggacggggaggc

SEQ ID NO: 169767 - DNA, 25 bp, Homo sapien
acttgctttaacttgctctcagctt

SEQ ID NO: 169768 - DNA, 25 bp, Homo sapien
tagttgggaatataaacttgcttta

SEQ ID NO: 169769 - DNA, 25 bp, Homo sapien
ggaatataaacttgctttaacttgc

SEQ ID NO: 169770 - DNA, 25 bp, Homo sapien
cagcttcagctgctttcaagcgttt

SEQ ID NO: 169771 - DNA, 25 bp, Homo sapien
tcggcctcggcagggatcttccttt

SEQ ID NO: 169772 - DNA, 25 bp, Homo sapien
aaggagagacgagaggagttgcagg

SEQ ID NO: 169773 - DNA, 25 bp, Homo sapien
tgaccaccccttgtccagaaccacg

SEQ ID NO: 169774 - DNA, 25 bp, Homo sapien
aggagcacaaacctcgagggcccat

SEQ ID NO: 169775 - DNA, 25 bp, Homo sapien
gtgccgttcaccacaccggccttga

SEQ ID NO: 169776 - DNA, 25 bp, Homo sapien
ttgttgacgctgatttggttcggat

SEQ ID NO: 169777 - DNA, 25 bp, Homo sapien
gatttggttcggatttggcttgtta

SEQ ID NO: 169778 - DNA, 25 bp, Homo sapien
tcaccacaccggccttgacgttgtt

SEQ ID NO: 169779 - DNA, 25 bp, Homo sapien
aacagctctcgcaggcccggccagc

SEQ ID NO: 169780 - DNA, 25 bp, Homo sapien
taacagctctcgcaggcccggccag

SEQ ID NO: 169781 - DNA, 25 bp, Homo sapien
tgtaacagctctcgcaggcccggcc

SEQ ID NO: 169782 - DNA, 25 bp, Homo sapien
gtaacagctctcgcaggcccggcca

SEQ ID NO: 169783 - DNA, 25 bp, Homo sapien
gaataccactggtaagactgtgtgg

SEQ ID NO: 169784 - DNA, 25 bp, Homo sapien
gaccccaagaataccactggtaaga

SEQ ID NO: 169785 - DNA, 25 bp, Homo sapien
caagaataccactggtaagactgtg

SEQ ID NO: 169786 - DNA, 25 bp, Homo sapien
ctgcatgttagggggaccccaagaa

SEQ ID NO: 169787 - DNA, 25 bp, Homo sapien
tatttcttccaatatgtccaacaag

SEQ ID NO: 169788 - DNA, 25 bp, Homo sapien
tgtccaacaagatgcgcagagacga

SEQ ID NO: 169789 - DNA, 25 bp, Homo sapien
gcctctctccatctaaccgggttgg

SEQ ID NO: 169790 - DNA, 25 bp, Homo sapien
catctaaccgggttggcattttcaa

SEQ ID NO: 169791 - DNA, 25 bp, Homo sapien
ccgcgtggccgacaggctcatggca

SEQ ID NO: 169792 - DNA, 25 bp, Homo sapien
aaccgccccaacacagcgccatgac

SEQ ID NO: 169793 - DNA, 25 bp, Homo sapien
acagcgccatgaccgggggccgagg

SEQ ID NO: 169794 - DNA, 25 bp, Homo sapien
cgaggacccgcgtggccgacaggct

SEQ ID NO: 169795 - DNA, 25 bp, Homo sapien
ggcaaacttggggctcccgctgctc

SEQ ID NO: 169796 - DNA, 25 bp, Homo sapien
ttggggctcccgctgctccgggctg

SEQ ID NO: 169797 - DNA, 25 bp, Homo sapien
ggctcccgctgctccgggctgggag

SEQ ID NO: 169798 - DNA, 25 bp, Homo sapien
gggctcccgctgctccgggctggga

SEQ ID NO: 169799 - DNA, 25 bp, Homo sapien
gggcgatccgcgtcagcttcgtcgt

SEQ ID NO: 169800 - DNA, 25 bp, Homo sapien
tgccacgggcgcaggatctcacggc

SEQ ID NO: 169801 - DNA, 25 bp, Homo sapien
actcggccttgatggccgcgctgtt

SEQ ID NO: 169802 - DNA, 25 bp, Homo sapien
atctcacggcacaggcgccgggcga

SEQ ID NO: 169803 - DNA, 25 bp, Homo sapien
cccaggggagcacgggaccctgcct

SEQ ID NO: 169804 - DNA, 25 bp, Homo sapien
ctgcggggtaccacacggtgtgagg

SEQ ID NO: 169805 - DNA, 25 bp, Homo sapien
aggggagcacgggaccctgcctgcg

SEQ ID NO: 169806 - DNA, 25 bp, Homo sapien
gagcacgggaccctgcctgcgcctt

SEQ ID NO: 169807 - DNA, 25 bp, Homo sapien
caagataccgaagcacggcttccag

SEQ ID NO: 169808 - DNA, 25 bp, Homo sapien
gcggcttgcgtaccgcctgcttcag

SEQ ID NO: 169809 - DNA, 25 bp, Homo sapien
accgaagcacggcttccagcggctt

SEQ ID NO: 169810 - DNA, 25 bp, Homo sapien
agcggcttgcgtaccgcctgcttca

SEQ ID NO: 169811 - DNA, 25 bp, Homo sapien
ttgggagccccccagcacgcctggc

SEQ ID NO: 169812 - DNA, 25 bp, Homo sapien
cagtgcatgagcttgggtgagaagc

SEQ ID NO: 169813 - DNA, 25 bp, Homo sapien
tggcacggtgcagagtaccccaaaa

SEQ ID NO: 169814 - DNA, 25 bp, Homo sapien
agcaccagtgcatgagcttgggtga

SEQ ID NO: 169815 - DNA, 25 bp, Homo sapien
gcacacttggctcatgactctggaa

SEQ ID NO: 169816 - DNA, 25 bp, Homo sapien
acagtcaccctgtgtcgggagggca

SEQ ID NO: 169817 - DNA, 25 bp, Homo sapien
cactcgagcccagcaaatggaggag

SEQ ID NO: 169818 - DNA, 25 bp, Homo sapien
gggagcaatgccaaagccacttgaa

SEQ ID NO: 169819 - DNA, 25 bp, Homo sapien
ctcgtagctgcgcttgcccaggatg

SEQ ID NO: 169820 - DNA, 25 bp, Homo sapien
accttggcgggcgtcaggctgctga

SEQ ID NO: 169821 - DNA, 25 bp, Homo sapien
gccgttgttgatgacgggggccacc

SEQ ID NO: 169822 - DNA, 25 bp, Homo sapien
tgctgagcacgctggacacgctttt

SEQ ID NO: 169823 - DNA, 25 bp, Homo sapien
gcatcaagaggcgcttcttcatgtt

SEQ ID NO: 169824 - DNA, 25 bp, Homo sapien
catcaagaggcgcttcttcatgttg

SEQ ID NO: 169825 - DNA, 25 bp, Homo sapien
ggcatcaagaggcgcttcttcatgt

SEQ ID NO: 169826 - DNA, 25 bp, Homo sapien
atcaagaggcgcttcttcatgttgc

SEQ ID NO: 169827 - DNA, 25 bp, Homo sapien
taggaacagacaagtaaagccagcc

SEQ ID NO: 169828 - DNA, 25 bp, Homo sapien
aaaaagctcgaagatgcctgctgac

SEQ ID NO: 169829 - DNA, 25 bp, Homo sapien
ggcacccatgtgtacaagctcagtt

SEQ ID NO: 169830 - DNA, 25 bp, Homo sapien
gggacgccctgccattaggaacaga

SEQ ID NO: 169831 - DNA, 25 bp, Homo sapien
gggaagaaacacatgctttaggtta

SEQ ID NO: 169832 - DNA, 25 bp, Homo sapien
tttaggttagtgagccacacgcagc

SEQ ID NO: 169833 - DNA, 25 bp, Homo sapien
gaaacacatgctttaggttagtgag

SEQ ID NO: 169834 - DNA, 25 bp, Homo sapien
cacatgctttaggttagtgagccac

SEQ ID NO: 169835 - DNA, 25 bp, Homo sapien
gcaggaacagccatacctcagggca

SEQ ID NO: 169836 - DNA, 25 bp, Homo sapien
tctctggccagcaagagacacattg

SEQ ID NO: 169837 - DNA, 25 bp, Homo sapien
tgaggcccatcccttaaggaacaga

SEQ ID NO: 169838 - DNA, 25 bp, Homo sapien
tactcaactcagtcaggtgccaggg

SEQ ID NO: 169839 - DNA, 25 bp, Homo sapien
tgcctggcctgtccgtggtttgcca

SEQ ID NO: 169840 - DNA, 25 bp, Homo sapien
gtgcctggcctgtccgtggtttgcc

SEQ ID NO: 169841 - DNA, 25 bp, Homo sapien
ctggcctgtccgtggtttgccagac

SEQ ID NO: 169842 - DNA, 25 bp, Homo sapien
cctggcctgtccgtggtttgccaga

SEQ ID NO: 169843 - DNA, 25 bp, Homo sapien
gtgagttacacggacccccagcctg

SEQ ID NO: 169844 - DNA, 25 bp, Homo sapien
tcccaacaccccagagagctcatgg

SEQ ID NO: 169845 - DNA, 25 bp, Homo sapien
ctggaagcttccacgtggcacctgg

SEQ ID NO: 169846 - DNA, 25 bp, Homo sapien
gtaccccatcatgggttgttcctct

SEQ ID NO: 169847 - DNA, 25 bp, Homo sapien
tcatccggggcgtcgatccagttca

SEQ ID NO: 169848 - DNA, 25 bp, Homo sapien
ccccggatcaggcgcactttggtgg

SEQ ID NO: 169849 - DNA, 25 bp, Homo sapien
taggacttcccgttgagcaggaggt

SEQ ID NO: 169850 - DNA, 25 bp, Homo sapien
gttcatccgccgccgcttgactggg

SEQ ID NO: 169851 - DNA, 25 bp, Homo sapien
gtctcctctgtggccatgtagaaca

SEQ ID NO: 169852 - DNA, 25 bp, Homo sapien
tctcctctgtggccatgtagaacac

SEQ ID NO: 169853 - DNA, 25 bp, Homo sapien
ggtggtgagggccgggacgctgtgc

SEQ ID NO: 169854 - DNA, 25 bp, Homo sapien
ggccgggacgctgtgcggagccctc

SEQ ID NO: 169855 - DNA, 25 bp, Homo sapien
acgctgtgcggagccctcccgcctg

SEQ ID NO: 169856 - DNA, 25 bp, Homo sapien
gtgagggccgggacgctgtgcggag

SEQ ID NO: 169857 - DNA, 25 bp, Homo sapien
ggcgcagggcgatgggcttgtaggg

SEQ ID NO: 169858 - DNA, 25 bp, Homo sapien
tagtcctcgatgacgatgggctcgt

SEQ ID NO: 169859 - DNA, 25 bp, Homo sapien
ccggcgggcagcacgcttggtttcc

SEQ ID NO: 169860 - DNA, 25 bp, Homo sapien
tttccgaggatgagagcagcttgcg

SEQ ID NO: 169861 - DNA, 25 bp, Homo sapien
taaaaacgacaactcctcggcattc

SEQ ID NO: 169862 - DNA, 25 bp, Homo sapien
ccagtgtccgccaaggagcgcgttt

SEQ ID NO: 169863 - DNA, 25 bp, Homo sapien
gcattctcggaataagttagccgcg

SEQ ID NO: 169864 - DNA, 25 bp, Homo sapien
gccaaggagcgcgtttctctgcagg

SEQ ID NO: 169865 - DNA, 25 bp, Homo sapien
cggccgcacgatcctaacattccag

SEQ ID NO: 169866 - DNA, 25 bp, Homo sapien
ttaaaatggcaccttcaacagaaca

SEQ ID NO: 169867 - DNA, 25 bp, Homo sapien
agacaagggccaaccccgccaggca

SEQ ID NO: 169868 - DNA, 25 bp, Homo sapien
aatggcaccttcaacagaacacaac

SEQ ID NO: 169869 - DNA, 25 bp, Homo sapien
ctggagggagaccacctgccccaag

SEQ ID NO: 169870 - DNA, 25 bp, Homo sapien
gcttgctctggaggacagggctggc

SEQ ID NO: 169871 - DNA, 25 bp, Homo sapien
ctgaacacagggctcttctggaggg

SEQ ID NO: 169872 - DNA, 25 bp, Homo sapien
tggaggacagggctggctgaacaca

SEQ ID NO: 169873 - DNA, 25 bp, Homo sapien
tgaggaggcatcagtcagtaccttt

SEQ ID NO: 169874 - DNA, 25 bp, Homo sapien
cctgttctgcccagcttgggagcct

SEQ ID NO: 169875 - DNA, 25 bp, Homo sapien
ctcctggctttcatggtggtcctgg

SEQ ID NO: 169876 - DNA, 25 bp, Homo sapien
caccaggcatgtttgtgagccaacc

SEQ ID NO: 169877 - DNA, 25 bp, Homo sapien
tcctccgggccgccgccgcccgcgc

SEQ ID NO: 169878 - DNA, 25 bp, Homo sapien
tccgggccgccgccgcccgcgccca

SEQ ID NO: 169879 - DNA, 25 bp, Homo sapien
tctcctccgggccgccgccgcccgc

SEQ ID NO: 169880 - DNA, 25 bp, Homo sapien
cgggccgccgccgcccgcgcccagc

SEQ ID NO: 169881 - DNA, 25 bp, Homo sapien
agtacacggtcttgtcgcacttggg

SEQ ID NO: 169882 - DNA, 25 bp, Homo sapien
aagtacacggtcttgtcgcacttgg

SEQ ID NO: 169883 - DNA, 25 bp, Homo sapien
cgaagtacacggtcttgtcgcactt

SEQ ID NO: 169884 - DNA, 25 bp, Homo sapien
gaagtacacggtcttgtcgcacttg

SEQ ID NO: 169885 - DNA, 25 bp, Homo sapien
tctgggacgggcaaaatacaacctc

SEQ ID NO: 169886 - DNA, 25 bp, Homo sapien
tcaatggccacacattacgggtccg

SEQ ID NO: 169887 - DNA, 25 bp, Homo sapien
cacagaatcgattgggtctaatggc

SEQ ID NO: 169888 - DNA, 25 bp, Homo sapien
cagccgggtctgaagcgcctttgtt

SEQ ID NO: 169889 - DNA, 25 bp, Homo sapien
gtgggcaggcgtgtcccagcagcag

SEQ ID NO: 169890 - DNA, 25 bp, Homo sapien
ctgcacggtgggcaggcgtgtccca

SEQ ID NO: 169891 - DNA, 25 bp, Homo sapien
gctatcggccgtggcagctgcagcc

SEQ ID NO: 169892 - DNA, 25 bp, Homo sapien
aaggaagtctcggtggctatcggcc

SEQ ID NO: 169893 - DNA, 25 bp, Homo sapien
agctgctgagggtccgggaccctct

SEQ ID NO: 169894 - DNA, 25 bp, Homo sapien
tgcctcgcactgacacgcccctgat

SEQ ID NO: 169895 - DNA, 25 bp, Homo sapien
tgtctgtggattcctcgtcctaaac

SEQ ID NO: 169896 - DNA, 25 bp, Homo sapien
ctgagtcaaaggtgcagccccagaa

SEQ ID NO: 169897 - DNA, 25 bp, Homo sapien
agcctgcccgcgctccaacacctgc

SEQ ID NO: 169898 - DNA, 25 bp, Homo sapien
tgcccgcgctccaacacctgcccgc

SEQ ID NO: 169899 - DNA, 25 bp, Homo sapien
ggcctgtgctcgagcctgcccgcgc

SEQ ID NO: 169900 - DNA, 25 bp, Homo sapien
gtgctcgagcctgcccgcgctccaa

SEQ ID NO: 169901 - DNA, 25 bp, Homo sapien
tcgcacttgaggcagaacttgtgcc

SEQ ID NO: 169902 - DNA, 25 bp, Homo sapien
tgcagcgctcgcacttgaggcagaa

SEQ ID NO: 169903 - DNA, 25 bp, Homo sapien
cgtcttgctgcagcgctcgcacttg

SEQ ID NO: 169904 - DNA, 25 bp, Homo sapien
gctcgcacttgaggcagaacttgtg

SEQ ID NO: 169905 - DNA, 25 bp, Homo sapien
ctgcctgagggtggcgggagtcgcg

SEQ ID NO: 169906 - DNA, 25 bp, Homo sapien
cctgagggtggcgggagtcgcgacc

SEQ ID NO: 169907 - DNA, 25 bp, Homo sapien
tgcctgagggtggcgggagtcgcga

SEQ ID NO: 169908 - DNA, 25 bp, Homo sapien
tgagggtggcgggagtcgcgacccc

SEQ ID NO: 169909 - DNA, 25 bp, Homo sapien
cttgtggcagaacggcttcccgtca

SEQ ID NO: 169910 - DNA, 25 bp, Homo sapien
ttgggtccgaacagggtggcgtagc

SEQ ID NO: 169911 - DNA, 25 bp, Homo sapien
aacagggtggcgtagcacggcttgt

SEQ ID NO: 169912 - DNA, 25 bp, Homo sapien
tagcacggcttgtggcagaacggct

SEQ ID NO: 169913 - DNA, 25 bp, Homo sapien
aggtcccagggcaggccgagggcag

SEQ ID NO: 169914 - DNA, 25 bp, Homo sapien
agcgccacgcccctcccagcaggtc

SEQ ID NO: 169915 - DNA, 25 bp, Homo sapien
caggccgagggcagccggagctcac

SEQ ID NO: 169916 - DNA, 25 bp, Homo sapien
agcaggtcccagggcaggccgaggg

SEQ ID NO: 169917 - DNA, 25 bp, Homo sapien
ggccggtgacctgcggcccctccgc

SEQ ID NO: 169918 - DNA, 25 bp, Homo sapien
ccgccaggggcttctcgtagatgta

SEQ ID NO: 169919 - DNA, 25 bp, Homo sapien
ttccgctcctctgctcgggccgcgg

SEQ ID NO: 169920 - DNA, 25 bp, Homo sapien
ttctcgtagatgtaggagcccgcgc

SEQ ID NO: 169921 - DNA, 25 bp, Homo sapien
cagcgcgggcacgtgttgggctccc

SEQ ID NO: 169922 - DNA, 25 bp, Homo sapien
accttcttgctgcagcgcgggcacg

SEQ ID NO: 169923 - DNA, 25 bp, Homo sapien
ccttcttgctgcagcgcgggcacgt

SEQ ID NO: 169924 - DNA, 25 bp, Homo sapien
cttgcccagagacgtcaccttctca

SEQ ID NO: 169925 - DNA, 25 bp, Homo sapien
caatccttgcccagagacgtcacct

SEQ ID NO: 169926 - DNA, 25 bp, Homo sapien
aatccttgcccagagacgtcacctt

SEQ ID NO: 169927 - DNA, 25 bp, Homo sapien
atccttgcccagagacgtcaccttc

SEQ ID NO: 169928 - DNA, 25 bp, Homo sapien
cgtgcccgccgggggtcagtgtctt

SEQ ID NO: 169929 - DNA, 25 bp, Homo sapien
ctccgcgtgcccgccgggggtcagt

SEQ ID NO: 169930 - DNA, 25 bp, Homo sapien
tcttcccgcagcgctcgcagcgcag

SEQ ID NO: 169931 - DNA, 25 bp, Homo sapien
gtcttcccgcagcgctcgcagcgca

SEQ ID NO: 169932 - DNA, 25 bp, Homo sapien
ctctaggcgcgcctctcaccctcat

SEQ ID NO: 169933 - DNA, 25 bp, Homo sapien
cccccgacccatcacctggaggctt

SEQ ID NO: 169934 - DNA, 25 bp, Homo sapien
ccaagccccgttgcactcccctcac

SEQ ID NO: 169935 - DNA, 25 bp, Homo sapien
gcaggccggctcgccgtgggggaga

SEQ ID NO: 169936 - DNA, 25 bp, Homo sapien
agaggattccatagcagggcttgtg

SEQ ID NO: 169937 - DNA, 25 bp, Homo sapien
gggcttgtggcagtagggctggccg

SEQ ID NO: 169938 - DNA, 25 bp, Homo sapien
aagaggattccatagcagggcttgt

SEQ ID NO: 169939 - DNA, 25 bp, Homo sapien
cttgtggcagtagggctggccgtcg

SEQ ID NO: 169940 - DNA, 25 bp, Homo sapien
cagggaagacatcgtggaccaccct

SEQ ID NO: 169941 - DNA, 25 bp, Homo sapien
ggcagggaagacatcgtggaccacc

SEQ ID NO: 169942 - DNA, 25 bp, Homo sapien
gggcagggaagacatcgtggaccac

SEQ ID NO: 169943 - DNA, 25 bp, Homo sapien
gggaagacatcgtggaccaccctgg

SEQ ID NO: 169944 - DNA, 25 bp, Homo sapien
ttcggggtcccggtcatagatgtag

SEQ ID NO: 169945 - DNA, 25 bp, Homo sapien
ggtcatagatgtagctgcccaccgc

SEQ ID NO: 169946 - DNA, 25 bp, Homo sapien
gggtcccggtcatagatgtagctgc

SEQ ID NO: 169947 - DNA, 25 bp, Homo sapien
tgtagctgcccaccgcaccggtgtt

SEQ ID NO: 169948 - DNA, 25 bp, Homo sapien
cccacatcatgagagccgctgtagc

SEQ ID NO: 169949 - DNA, 25 bp, Homo sapien
agcccacatcatgagagccgctgta

SEQ ID NO: 169950 - DNA, 25 bp, Homo sapien
gcccacatcatgagagccgctgtag

SEQ ID NO: 169951 - DNA, 25 bp, Homo sapien
ggcggctgagcactctcccagcaga

SEQ ID NO: 169952 - DNA, 25 bp, Homo sapien
ctccaatactcgccctgggcttgca

SEQ ID NO: 169953 - DNA, 25 bp, Homo sapien
gagactcggggatgggcatggtgct

SEQ ID NO: 169954 - DNA, 25 bp, Homo sapien
aggactgggcggctgagcactctcc

SEQ ID NO: 169955 - DNA, 25 bp, Homo sapien
ggccatcacccacgaagggagcata

SEQ ID NO: 169956 - DNA, 25 bp, Homo sapien
tcatgggacgcccagaggatgccag

SEQ ID NO: 169957 - DNA, 25 bp, Homo sapien
gagcgcttgcgaggcagtgtgggca

SEQ ID NO: 169958 - DNA, 25 bp, Homo sapien
ggagcataaataacactggcaggtg

SEQ ID NO: 169959 - DNA, 25 bp, Homo sapien
tcctcaaaccgtttattgacagcac

SEQ ID NO: 169960 - DNA, 25 bp, Homo sapien
atcctcaaaccgtttattgacagca

SEQ ID NO: 169961 - DNA, 25 bp, Homo sapien
aatcctcaaaccgtttattgacagc

SEQ ID NO: 169962 - DNA, 25 bp, Homo sapien
gaggagaccgcactgggtgcctggc

SEQ ID NO: 169963 - DNA, 25 bp, Homo sapien
gcagctgtggtacggctggaccccg

SEQ ID NO: 169964 - DNA, 25 bp, Homo sapien
tggccgtcccttccgcaacgtcagg

SEQ ID NO: 169965 - DNA, 25 bp, Homo sapien
ccaggccccgccaggacatggatgg

SEQ ID NO: 169966 - DNA, 25 bp, Homo sapien
agcggcacagctcggttcaacagag

SEQ ID NO: 169967 - DNA, 25 bp, Homo sapien
gggagcggcacagctcggttcaaca

SEQ ID NO: 169968 - DNA, 25 bp, Homo sapien
tgagcttagccccatggggcaccag

SEQ ID NO: 169969 - DNA, 25 bp, Homo sapien
acagctcggttcaacagagcgccgg

SEQ ID NO: 169970 - DNA, 25 bp, Homo sapien
ataagctggacccagggccgggagg

SEQ ID NO: 169971 - DNA, 25 bp, Homo sapien
ggagggaggtgtgccccaccaagtc

SEQ ID NO: 169972 - DNA, 25 bp, Homo sapien
agctggacccagggccgggagggag

SEQ ID NO: 169973 - DNA, 25 bp, Homo sapien
gccgggagggaggtgtgccccacca

SEQ ID NO: 169974 - DNA, 25 bp, Homo sapien
caggctgcctctatgcccagaacat

SEQ ID NO: 169975 - DNA, 25 bp, Homo sapien
ggctgcctctatgcccagaacattc

SEQ ID NO: 169976 - DNA, 25 bp, Homo sapien
aggacagagtggtcggggcagggac

SEQ ID NO: 169977 - DNA, 25 bp, Homo sapien
ggcagggactcggagctccgcagct

SEQ ID NO: 169978 - DNA, 25 bp, Homo sapien
gagtgtggggcatcgtgggacaaac

SEQ ID NO: 169979 - DNA, 25 bp, Homo sapien
tccactgagtgtggggcatcgtggg

SEQ ID NO: 169980 - DNA, 25 bp, Homo sapien
ctgagtgtggggcatcgtgggacaa

SEQ ID NO: 169981 - DNA, 25 bp, Homo sapien
cactgagtgtggggcatcgtgggac

SEQ ID NO: 169982 - DNA, 25 bp, Homo sapien
ttcggccggcaaaagagagttcagc

SEQ ID NO: 169983 - DNA, 25 bp, Homo sapien
cgctgctctgggaggtccatcggac

SEQ ID NO: 169984 - DNA, 25 bp, Homo sapien
gctgtagcttgaggaccgatcggct

SEQ ID NO: 169985 - DNA, 25 bp, Homo sapien
ttatctctgcgggtagcgcccaggg

SEQ ID NO: 169986 - DNA, 25 bp, Homo sapien
ggactggaccaaacatcactaaaat

SEQ ID NO: 169987 - DNA, 25 bp, Homo sapien
agcgctgtgatgtctcccgggtcca

SEQ ID NO: 169988 - DNA, 25 bp, Homo sapien
ttccatcccacgcagggttacgagg

SEQ ID NO: 169989 - DNA, 25 bp, Homo sapien
tctttaggcgagttcaagccgcgcc

SEQ ID NO: 169990 - DNA, 25 bp, Homo sapien
ggcctggtccgcgcctttcagggac

SEQ ID NO: 169991 - DNA, 25 bp, Homo sapien
aggacccgggcctgactgaggacgg

SEQ ID NO: 169992 - DNA, 25 bp, Homo sapien
gggacctcgaatctaggcccagggc

SEQ ID NO: 169993 - DNA, 25 bp, Homo sapien
gcccagggcccaagaaagatcatct

SEQ ID NO: 169994 - DNA, 25 bp, Homo sapien
acggctccgggtccggtgcaggcgg

SEQ ID NO: 169995 - DNA, 25 bp, Homo sapien
gacggctccgggtccggtgcaggcg

SEQ ID NO: 169996 - DNA, 25 bp, Homo sapien
tccgggtccggtgcaggcggcagcg

SEQ ID NO: 169997 - DNA, 25 bp, Homo sapien
gctccgggtccggtgcaggcggcag

SEQ ID NO: 169998 - DNA, 25 bp, Homo sapien
agtacacctccttgttgcacttggg

SEQ ID NO: 169999 - DNA, 25 bp, Homo sapien
tacacctccttgttgcacttgggac

SEQ ID NO: 170000 - DNA, 25 bp, Homo sapien
cgaagtacacctccttgttgcactt

SEQ ID NO: 170001 - DNA, 25 bp, Homo sapien
gaagtacacctccttgttgcacttg

SEQ ID NO: 170002 - DNA, 25 bp, Homo sapien
acagcaagaccactagcaggcagag

SEQ ID NO: 170003 - DNA, 25 bp, Homo sapien
cagagaccgtaggacccagagacgg

SEQ ID NO: 170004 - DNA, 25 bp, Homo sapien
cctgagaggaaacggcagagaccgt

SEQ ID NO: 170005 - DNA, 25 bp, Homo sapien
tgcggccgggaatcttgctcctgaa

SEQ ID NO: 170006 - DNA, 25 bp, Homo sapien
aggcacagacaggccccggtgagac

SEQ ID NO: 170007 - DNA, 25 bp, Homo sapien
cagaggcacagacaggccccggtga

SEQ ID NO: 170008 - DNA, 25 bp, Homo sapien
ctgcagaggcacagacaggccccgg

SEQ ID NO: 170009 - DNA, 25 bp, Homo sapien
tgcagaggcacagacaggccccggt

SEQ ID NO: 170010 - DNA, 25 bp, Homo sapien
cagaggtcagcgtcttcccacattt

SEQ ID NO: 170011 - DNA, 25 bp, Homo sapien
ccacatttctcgcacttcaggcagg

SEQ ID NO: 170012 - DNA, 25 bp, Homo sapien
tcaggcagggccgatgccagtcctt

SEQ ID NO: 170013 - DNA, 25 bp, Homo sapien
atgccagtccttgcccagagaggtc

SEQ ID NO: 170014 - DNA, 25 bp, Homo sapien
agagaagggccgtgagggggtgcca

SEQ ID NO: 170015 - DNA, 25 bp, Homo sapien
gaagggccgtgagggggtgccatca

SEQ ID NO: 170016 - DNA, 25 bp, Homo sapien
tgcaaagagaagggccgtgaggggg

SEQ ID NO: 170017 - DNA, 25 bp, Homo sapien
caaagagaagggccgtgagggggtg

SEQ ID NO: 170018 - DNA, 25 bp, Homo sapien
ggttgcagtagggtttgccttcgtg

SEQ ID NO: 170019 - DNA, 25 bp, Homo sapien
ctttaggcccaaacatggctgcgta

SEQ ID NO: 170020 - DNA, 25 bp, Homo sapien
ggtggttgcagtagggtttgccttc

SEQ ID NO: 170021 - DNA, 25 bp, Homo sapien
gcccaaacatggctgcgtagcaggg

SEQ ID NO: 170022 - DNA, 25 bp, Homo sapien
aaggtggaaaaagtcaacaggctgg

SEQ ID NO: 170023 - DNA, 25 bp, Homo sapien
aaaaagtcaacaggctggggtggag

SEQ ID NO: 170024 - DNA, 25 bp, Homo sapien
ctgcagagaaggtggaaaaagtcaa

SEQ ID NO: 170025 - DNA, 25 bp, Homo sapien
tggggtggggatgacgggagcatac

SEQ ID NO: 170026 - DNA, 25 bp, Homo sapien
tgaaagtgtggctctcggctccgcc

SEQ ID NO: 170027 - DNA, 25 bp, Homo sapien
ttacttgaaagtgtggctctcggct

SEQ ID NO: 170028 - DNA, 25 bp, Homo sapien
acttgaaagtgtggctctcggctcc

SEQ ID NO: 170029 - DNA, 25 bp, Homo sapien
aagtgtggctctcggctccgccccg

SEQ ID NO: 170030 - DNA, 25 bp, Homo sapien
tttactgagagcattaggggcaaca

SEQ ID NO: 170031 - DNA, 25 bp, Homo sapien
tccaagtgttcaggtttactgagag

SEQ ID NO: 170032 - DNA, 25 bp, Homo sapien
ttccaagtgttcaggtttactgaga

SEQ ID NO: 170033 - DNA, 25 bp, Homo sapien
cattaggggcaacaagggagccctg

SEQ ID NO: 170034 - DNA, 25 bp, Homo sapien
gcacagggagccctcgcctatgaga

SEQ ID NO: 170035 - DNA, 25 bp, Homo sapien
gagcaggcgccggtggcagagcctg

SEQ ID NO: 170036 - DNA, 25 bp, Homo sapien
agccctcgcctatgagaccctggaa

SEQ ID NO: 170037 - DNA, 25 bp, Homo sapien
tcgcctatgagaccctggaacggcc

SEQ ID NO: 170038 - DNA, 25 bp, Homo sapien
gcagcctcatcaggcccttgcagaa

SEQ ID NO: 170039 - DNA, 25 bp, Homo sapien
gctctgcggccttgttcagcgctct

SEQ ID NO: 170040 - DNA, 25 bp, Homo sapien
gccgagctacagggcggcgggagcc

SEQ ID NO: 170041 - DNA, 25 bp, Homo sapien
cgccacagaacttggcaggaggcgt

SEQ ID NO: 170042 - DNA, 25 bp, Homo sapien
aggtggggaaccgcggcgccacaga

SEQ ID NO: 170043 - DNA, 25 bp, Homo sapien
ccgcccacgcgggtttcttgaagct

SEQ ID NO: 170044 - DNA, 25 bp, Homo sapien
cctcctcctcggagcgcctactgca

SEQ ID NO: 170045 - DNA, 25 bp, Homo sapien
ctcctcctcggagcgcctactgcac

SEQ ID NO: 170046 - DNA, 25 bp, Homo sapien
ctcctcttccaggcggccctcccgg

SEQ ID NO: 170047 - DNA, 25 bp, Homo sapien
tcctcttccaggcggccctcccggc

SEQ ID NO: 170048 - DNA, 25 bp, Homo sapien
aagccggcgcatggaagcagctgct

SEQ ID NO: 170049 - DNA, 25 bp, Homo sapien
ggcgcctccgggcattcgtgaagac

SEQ ID NO: 170050 - DNA, 25 bp, Homo sapien
ggaaggtcgggctggcttctggcca

SEQ ID NO: 170051 - DNA, 25 bp, Homo sapien
aagaccccgggcagcgtgtcaccgg

SEQ ID NO: 170052 - DNA, 25 bp, Homo sapien
cttcgtgtccaagcccaatgaacgg

SEQ ID NO: 170053 - DNA, 25 bp, Homo sapien
tgtagtctattctgtctcgtgcgga

SEQ ID NO: 170054 - DNA, 25 bp, Homo sapien
gcatccaatcactgcgtcggcaggg

SEQ ID NO: 170055 - DNA, 25 bp, Homo sapien
caatgaacggttcccctggagtttg

SEQ ID NO: 170056 - DNA, 25 bp, Homo sapien
tcaccgcacgggccgggtttagtgc

SEQ ID NO: 170057 - DNA, 25 bp, Homo sapien
gggcctgcgtccaatcaccgcacgg

SEQ ID NO: 170058 - DNA, 25 bp, Homo sapien
gcggctgggacctgcgcccagttac

SEQ ID NO: 170059 - DNA, 25 bp, Homo sapien
gccgggtttagtgcggcggctggga

SEQ ID NO: 170060 - DNA, 25 bp, Homo sapien
cctccggacggtcgaacttggcgcg

SEQ ID NO: 170061 - DNA, 25 bp, Homo sapien
agcgaccgactcaacgcggcgatgg

SEQ ID NO: 170062 - DNA, 25 bp, Homo sapien
acttggcgcggcggaagatctcggg

SEQ ID NO: 170063 - DNA, 25 bp, Homo sapien
ggtcccgagggcagcgaccgactca

SEQ ID NO: 170064 - DNA, 25 bp, Homo sapien
gcccgcctgccctccgcgagagcgt

SEQ ID NO: 170065 - DNA, 25 bp, Homo sapien
cggcccaactccctgcgagggcccg

SEQ ID NO: 170066 - DNA, 25 bp, Homo sapien
ggcggtcagcggagccggcccaact

SEQ ID NO: 170067 - DNA, 25 bp, Homo sapien
aataaaaagcgggcggtcagcggag

SEQ ID NO: 170068 - DNA, 25 bp, Homo sapien
tggcgagagcacacggaagaggagc

SEQ ID NO: 170069 - DNA, 25 bp, Homo sapien
gcagggagtggcgagagcacacgga

SEQ ID NO: 170070 - DNA, 25 bp, Homo sapien
ggagtggcgagagcacacggaagag

SEQ ID NO: 170071 - DNA, 25 bp, Homo sapien
gcccgcagggagtggcgagagcaca

SEQ ID NO: 170072 - DNA, 25 bp, Homo sapien
ctgggagcatagtgctgacttcacc

SEQ ID NO: 170073 - DNA, 25 bp, Homo sapien
gtgctgacttcaccaagcgggcttg

SEQ ID NO: 170074 - DNA, 25 bp, Homo sapien
gctgacttcaccaagcgggcttgga

SEQ ID NO: 170075 - DNA, 25 bp, Homo sapien
tgacttcaccaagcgggcttggacc

SEQ ID NO: 170076 - DNA, 25 bp, Homo sapien
tgcgagccatcctcaggtagttgtg

SEQ ID NO: 170077 - DNA, 25 bp, Homo sapien
tgccctgcgagccatcctcaggtag

SEQ ID NO: 170078 - DNA, 25 bp, Homo sapien
atcctcaggtagttgtgccagtgcc

SEQ ID NO: 170079 - DNA, 25 bp, Homo sapien
gagccatcctcaggtagttgtgcca

SEQ ID NO: 170080 - DNA, 25 bp, Homo sapien
atctcgtcacccagaggcactcggg

SEQ ID NO: 170081 - DNA, 25 bp, Homo sapien
ctggcacacagtcatctcgtcaccc

SEQ ID NO: 170082 - DNA, 25 bp, Homo sapien
gtcatctcgtcacccagaggcactc

SEQ ID NO: 170083 - DNA, 25 bp, Homo sapien
acacagtcatctcgtcacccagagg

SEQ ID NO: 170084 - DNA, 25 bp, Homo sapien
cagggagcctccgtgctttcagctg

SEQ ID NO: 170085 - DNA, 25 bp, Homo sapien
gatggagacggtagtggaggcacag

SEQ ID NO: 170086 - DNA, 25 bp, Homo sapien
tgggcagctgggtaacccttcatgg

SEQ ID NO: 170087 - DNA, 25 bp, Homo sapien
aaaaacaacgggtgctccctgcaca

SEQ ID NO: 170088 - DNA, 25 bp, Homo sapien
tctgcttccatgtggggtgcaggtg

SEQ ID NO: 170089 - DNA, 25 bp, Homo sapien
tgcacatggcggacatccacaggac

SEQ ID NO: 170090 - DNA, 25 bp, Homo sapien
tggacaccagctggcgccaccggaa

SEQ ID NO: 170091 - DNA, 25 bp, Homo sapien
gccactgcacatggcggacatccac

SEQ ID NO: 170092 - DNA, 25 bp, Homo sapien
cactgcacatggcggacatccacag

SEQ ID NO: 170093 - DNA, 25 bp, Homo sapien
ctggcggcctgcagcacgggacaca

SEQ ID NO: 170094 - DNA, 25 bp, Homo sapien
ggacgggctgcagggactggcagct

SEQ ID NO: 170095 - DNA, 25 bp, Homo sapien
agtggaagccctgtgccagctctac

SEQ ID NO: 170096 - DNA, 25 bp, Homo sapien
gacacagcccctgagtggaagccct

SEQ ID NO: 170097 - DNA, 25 bp, Homo sapien
taaggctctggtcgctgtggcagcc

SEQ ID NO: 170098 - DNA, 25 bp, Homo sapien
tgtggcagccgcgtgtgtacaggtg

SEQ ID NO: 170099 - DNA, 25 bp, Homo sapien
tgacagacagatggctaaggctctg

SEQ ID NO: 170100 - DNA, 25 bp, Homo sapien
agatggctaaggctctggtcgctgt

SEQ ID NO: 170101 - DNA, 25 bp, Homo sapien
acaggcccttgctacgagcaggaag

SEQ ID NO: 170102 - DNA, 25 bp, Homo sapien
cctctacaaggcaggtagggacaag

SEQ ID NO: 170103 - DNA, 25 bp, Homo sapien
gaacgggactgcaagtctccagggc

SEQ ID NO: 170104 - DNA, 25 bp, Homo sapien
caagtgagacctgcttgagatgcca

SEQ ID NO: 170105 - DNA, 25 bp, Homo sapien
gacccatcccaggagtgcagaagga

SEQ ID NO: 170106 - DNA, 25 bp, Homo sapien
gagtgcagaaggagtgcaggcactt

SEQ ID NO: 170107 - DNA, 25 bp, Homo sapien
agccacagatcattccagaaggttc

SEQ ID NO: 170108 - DNA, 25 bp, Homo sapien
cacataccagccacagatcattcca

SEQ ID NO: 170109 - DNA, 25 bp, Homo sapien
tccaacaaggtcagggacaggtcca

SEQ ID NO: 170110 - DNA, 25 bp, Homo sapien
gcaatcaccacagttcccaagaagg

SEQ ID NO: 170111 - DNA, 25 bp, Homo sapien
cagacagtcggatggacagctggac

SEQ ID NO: 170112 - DNA, 25 bp, Homo sapien
gagtctgcctagtgacccaggtggc

SEQ ID NO: 170113 - DNA, 25 bp, Homo sapien
atccaccgccagaagaccagctcag

SEQ ID NO: 170114 - DNA, 25 bp, Homo sapien
tggttctcacgctccagagtccgca

SEQ ID NO: 170115 - DNA, 25 bp, Homo sapien
tcagagcgccgccacgccaggacag

SEQ ID NO: 170116 - DNA, 25 bp, Homo sapien
caggcgctggttctcacgctccaga

SEQ ID NO: 170117 - DNA, 25 bp, Homo sapien
ggagagggatgcgcgggcttcctca

SEQ ID NO: 170118 - DNA, 25 bp, Homo sapien
gagagggatgcgcgggcttcctcac

SEQ ID NO: 170119 - DNA, 25 bp, Homo sapien
gagacccaagtgagacagcgtgcac

SEQ ID NO: 170120 - DNA, 25 bp, Homo sapien
gaaaacaggaagatcccgaatgccc

SEQ ID NO: 170121 - DNA, 25 bp, Homo sapien
ggatgccaccatctcagcaactgtg

SEQ ID NO: 170122 - DNA, 25 bp, Homo sapien
tagaaagagcctacactaggtctgt

SEQ ID NO: 170123 - DNA, 25 bp, Homo sapien
tcccgcactaccaggtccaactcgc

SEQ ID NO: 170124 - DNA, 25 bp, Homo sapien
gcactaccaggtccaactcgccacc

SEQ ID NO: 170125 - DNA, 25 bp, Homo sapien
ccgcactaccaggtccaactcgcca

SEQ ID NO: 170126 - DNA, 25 bp, Homo sapien
tccaactcgccacccccgcgctcgg

SEQ ID NO: 170127 - DNA, 25 bp, Homo sapien
ggccgggccaccgtctcgctcccag

SEQ ID NO: 170128 - DNA, 25 bp, Homo sapien
ccactctggcccccgtccacagcct

SEQ ID NO: 170129 - DNA, 25 bp, Homo sapien
gggccgggccaccgtctcgctccca

SEQ ID NO: 170130 - DNA, 25 bp, Homo sapien
tccactctggcccccgtccacagcc

SEQ ID NO: 170131 - DNA, 25 bp, Homo sapien
tcagcgtcctgatcaccacagctgc

SEQ ID NO: 170132 - DNA, 25 bp, Homo sapien
agttcctgccgacactgtccctgta

SEQ ID NO: 170133 - DNA, 25 bp, Homo sapien
tagtcgacgtagcaccgcctccagg

SEQ ID NO: 170134 - DNA, 25 bp, Homo sapien
tcctctcgtctcaccagccggtgtg

SEQ ID NO: 170135 - DNA, 25 bp, Homo sapien
ccagatgagaccagggcgggctccc

SEQ ID NO: 170136 - DNA, 25 bp, Homo sapien
tgacgtgggctctgcatctgcatcg

SEQ ID NO: 170137 - DNA, 25 bp, Homo sapien
caatttatttccgagtcccctccag

SEQ ID NO: 170138 - DNA, 25 bp, Homo sapien
agcctgtcacgacctcctcaaggga

SEQ ID NO: 170139 - DNA, 25 bp, Homo sapien
ccacaggcctgggatccggccagag

SEQ ID NO: 170140 - DNA, 25 bp, Homo sapien
cagggaaacccgacagggtggcagg

SEQ ID NO: 170141 - DNA, 25 bp, Homo sapien
agatggctctttgtcagggatgagc

SEQ ID NO: 170142 - DNA, 25 bp, Homo sapien
tgtccacccctgggaccaaggaggc

SEQ ID NO: 170143 - DNA, 25 bp, Homo sapien
cccacagcgggagcccaaatgaagg

SEQ ID NO: 170144 - DNA, 25 bp, Homo sapien
ggccagggagcatttgcacaaatcc

SEQ ID NO: 170145 - DNA, 25 bp, Homo sapien
agctgcatgagagggtcagagaggt

SEQ ID NO: 170146 - DNA, 25 bp, Homo sapien
ccagctgcatgagagggtcagagag

SEQ ID NO: 170147 - DNA, 25 bp, Homo sapien
gcccagctgcatgagagggtcagag

SEQ ID NO: 170148 - DNA, 25 bp, Homo sapien
gcactttcctctatggtgtttgctc

SEQ ID NO: 170149 - DNA, 25 bp, Homo sapien
caagattgtgagcaggtcagagccg

SEQ ID NO: 170150 - DNA, 25 bp, Homo sapien
gcaaccaagacagcggccaatcctg

SEQ ID NO: 170151 - DNA, 25 bp, Homo sapien
agagccgggctaccaagcagcagtg

SEQ ID NO: 170152 - DNA, 25 bp, Homo sapien
aacttgaccgcacccccacttgcca

SEQ ID NO: 170153 - DNA, 25 bp, Homo sapien
cacttgccagccatcccctctgccc

SEQ ID NO: 170154 - DNA, 25 bp, Homo sapien
gtgcttcctaccactgtgcaggccc

SEQ ID NO: 170155 - DNA, 25 bp, Homo sapien
tgcctgtgcttcctaccactgtgca

SEQ ID NO: 170156 - DNA, 25 bp, Homo sapien
tgctggctttacttcccgggatggg

SEQ ID NO: 170157 - DNA, 25 bp, Homo sapien
ctaggaggacgttcacagcaaggtc

SEQ ID NO: 170158 - DNA, 25 bp, Homo sapien
taataggacttcgtggctaaacggc

SEQ ID NO: 170159 - DNA, 25 bp, Homo sapien
aaaaagtaggcatctcgccagtgcc

SEQ ID NO: 170160 - DNA, 25 bp, Homo sapien
ggctgtggacgaacggaagacctaa

SEQ ID NO: 170161 - DNA, 25 bp, Homo sapien
ggagaaaaactggtttcgacatgag

SEQ ID NO: 170162 - DNA, 25 bp, Homo sapien
tcgacatgagagcacctgcggaggt

SEQ ID NO: 170163 - DNA, 25 bp, Homo sapien
tgtggacgaacggaagacctaagtg

SEQ ID NO: 170164 - DNA, 25 bp, Homo sapien
cccgcagatgctgcgccgctcccgg

SEQ ID NO: 170165 - DNA, 25 bp, Homo sapien
gggcatggcgcgacacggcccggcg

SEQ ID NO: 170166 - DNA, 25 bp, Homo sapien
tcagccagcgggcatggcgcgacac

SEQ ID NO: 170167 - DNA, 25 bp, Homo sapien
gcgacacggcccggcgagctcgaaa

SEQ ID NO: 170168 - DNA, 25 bp, Homo sapien
gctcagccagcgggcatggcgcgac

SEQ ID NO: 170169 - DNA, 25 bp, Homo sapien
gcccccacgcctggcgggacgaggc

SEQ ID NO: 170170 - DNA, 25 bp, Homo sapien
gatcttgcgcgggccctggttctgc

SEQ ID NO: 170171 - DNA, 25 bp, Homo sapien
tcaccagcgtggtcaggcacacgtg

SEQ ID NO: 170172 - DNA, 25 bp, Homo sapien
tggttctgctccaccaggtacgcgt

SEQ ID NO: 170173 - DNA, 25 bp, Homo sapien
agcacgatgatgcacacgccgatct

SEQ ID NO: 170174 - DNA, 25 bp, Homo sapien
gccgcgccgccttgtagttctggaa

SEQ ID NO: 170175 - DNA, 25 bp, Homo sapien
gatgaagtagagcttgatctccagc

SEQ ID NO: 170176 - DNA, 25 bp, Homo sapien
accacaggatcatggcgtagccgcg

SEQ ID NO: 170177 - DNA, 25 bp, Homo sapien
ccagcacgaagatgtaaaggaacca

SEQ ID NO: 170178 - DNA, 25 bp, Homo sapien
caggtcctcgcgcttgcggaaggtg

SEQ ID NO: 170179 - DNA, 25 bp, Homo sapien
tcctcgcgcttgcggaaggtgcgca

SEQ ID NO: 170180 - DNA, 25 bp, Homo sapien
cgcgcaggtcctcgcgcttgcggaa

SEQ ID NO: 170181 - DNA, 25 bp, Homo sapien
ccgcgcaggtcctcgcgcttgcgga

SEQ ID NO: 170182 - DNA, 25 bp, Homo sapien
gcaggtccagcaggtccagcgccac

SEQ ID NO: 170183 - DNA, 25 bp, Homo sapien
tccagcaggtccagcaggtccagcg

SEQ ID NO: 170184 - DNA, 25 bp, Homo sapien
agcaggtccagcaggtccagcgcca

SEQ ID NO: 170185 - DNA, 25 bp, Homo sapien
ctgcatgtccagcaggtccagcagg

SEQ ID NO: 170186 - DNA, 25 bp, Homo sapien
ttttgccgacgaagatggccgagac

SEQ ID NO: 170187 - DNA, 25 bp, Homo sapien
gctgtcccggaacagcgccatgttg

SEQ ID NO: 170188 - DNA, 25 bp, Homo sapien
tgagcaccgggtacagcatcatctt

SEQ ID NO: 170189 - DNA, 25 bp, Homo sapien
accacattgacggtggcgaggctga

SEQ ID NO: 170190 - DNA, 25 bp, Homo sapien
gctccagtgatagcgcaggcggcgg

SEQ ID NO: 170191 - DNA, 25 bp, Homo sapien
cagctccagtgatagcgcaggcggc

SEQ ID NO: 170192 - DNA, 25 bp, Homo sapien
tgcagctccagtgatagcgcaggcg

SEQ ID NO: 170193 - DNA, 25 bp, Homo sapien
cagtgatagcgcaggcggcgggaag

SEQ ID NO: 170194 - DNA, 25 bp, Homo sapien
gggtcacgcgtgggcgaggacatgt

SEQ ID NO: 170195 - DNA, 25 bp, Homo sapien
tccagggggtcacgcgtgggcgagg

SEQ ID NO: 170196 - DNA, 25 bp, Homo sapien
ggcgaggacatgtgggggcgcccag

SEQ ID NO: 170197 - DNA, 25 bp, Homo sapien
tcacgcgtgggcgaggacatgtggg

SEQ ID NO: 170198 - DNA, 25 bp, Homo sapien
actgtaaacacgagtctttaaaatg

SEQ ID NO: 170199 - DNA, 25 bp, Homo sapien
aggcccccaccgaaggagcagatct

SEQ ID NO: 170200 - DNA, 25 bp, Homo sapien
ccgcggtccgagagattcctgagat

SEQ ID NO: 170201 - DNA, 25 bp, Homo sapien
gcactcgaggcacctgtccctaggg

SEQ ID NO: 170202 - DNA, 25 bp, Homo sapien
agcatccggcacttggacgccacca

SEQ ID NO: 170203 - DNA, 25 bp, Homo sapien
gcatccggcacttggacgccaccat

SEQ ID NO: 170204 - DNA, 25 bp, Homo sapien
cagcatccggcacttggacgccacc

SEQ ID NO: 170205 - DNA, 25 bp, Homo sapien
tcttcgagccccagggccttcactg

SEQ ID NO: 170206 - DNA, 25 bp, Homo sapien
tgggctttcagctttcacaggccaa

SEQ ID NO: 170207 - DNA, 25 bp, Homo sapien
ctgccccaagagtagctaaactagg

SEQ ID NO: 170208 - DNA, 25 bp, Homo sapien
gggagtagctaaaccagcctctgac

SEQ ID NO: 170209 - DNA, 25 bp, Homo sapien
ctcaggaaactcacgaagggcaggc

SEQ ID NO: 170210 - DNA, 25 bp, Homo sapien
tcatagcgggtagagccaggatccc

SEQ ID NO: 170211 - DNA, 25 bp, Homo sapien
tgcgcctcgtcgtggaaaccaggtg

SEQ ID NO: 170212 - DNA, 25 bp, Homo sapien
ggcgatgggccattgaaccaagtca

SEQ ID NO: 170213 - DNA, 25 bp, Homo sapien
cttttgcagaatgtgaacctgggcc

SEQ ID NO: 170214 - DNA, 25 bp, Homo sapien
gggcatccatgataccacgggctca

SEQ ID NO: 170215 - DNA, 25 bp, Homo sapien
cctgccagcggaagtgtacacattg

SEQ ID NO: 170216 - DNA, 25 bp, Homo sapien
catgctgagaaacagggccctttgt

SEQ ID NO: 170217 - DNA, 25 bp, Homo sapien
tgtccctgctgcccgtccctactcc

SEQ ID NO: 170218 - DNA, 25 bp, Homo sapien
ccacgtgaggctccacaggggtcac

SEQ ID NO: 170219 - DNA, 25 bp, Homo sapien
gctgcccgtccctactccacgccat

SEQ ID NO: 170220 - DNA, 25 bp, Homo sapien
ctcgccacgtgaggctccacagggg

SEQ ID NO: 170221 - DNA, 25 bp, Homo sapien
tcgggcctggcattggaacggtgtc

SEQ ID NO: 170222 - DNA, 25 bp, Homo sapien
ggcagcccctgtcggtgtggctggc

SEQ ID NO: 170223 - DNA, 25 bp, Homo sapien
ttggaacggtgtctggcagcttgtt

SEQ ID NO: 170224 - DNA, 25 bp, Homo sapien
gcagcttgttggctatgccgggaat

SEQ ID NO: 170225 - DNA, 25 bp, Homo sapien
ctacagccgctccccacaccaggtg

SEQ ID NO: 170226 - DNA, 25 bp, Homo sapien
cccacaccaggtggccaggtgggag

SEQ ID NO: 170227 - DNA, 25 bp, Homo sapien
ccccacaccaggtggccaggtggga

SEQ ID NO: 170228 - DNA, 25 bp, Homo sapien
acaccaggtggccaggtgggagttc

SEQ ID NO: 170229 - DNA, 25 bp, Homo sapien
ttcagccgggcgagtgctgtgggcc

SEQ ID NO: 170230 - DNA, 25 bp, Homo sapien
cttcagccgggcgagtgctgtgggc

SEQ ID NO: 170231 - DNA, 25 bp, Homo sapien
ccagagggtctcatactcctgctgc

SEQ ID NO: 170232 - DNA, 25 bp, Homo sapien
gcccagagggtctcatactcctgct

SEQ ID NO: 170233 - DNA, 25 bp, Homo sapien
ttctttgcccagagggtctcatact

SEQ ID NO: 170234 - DNA, 25 bp, Homo sapien
tctttaattctttgcccagagggtc

SEQ ID NO: 170235 - DNA, 25 bp, Homo sapien
cacaggagttcaacgctgtggtgag

SEQ ID NO: 170236 - DNA, 25 bp, Homo sapien
agcacaggagttcaacgctgtggtg

SEQ ID NO: 170237 - DNA, 25 bp, Homo sapien
gcacaggagttcaacgctgtggtga

SEQ ID NO: 170238 - DNA, 25 bp, Homo sapien
tgggggtctcgctggtttcagaaat

SEQ ID NO: 170239 - DNA, 25 bp, Homo sapien
gctacagacctttaccatgagtgtc

SEQ ID NO: 170240 - DNA, 25 bp, Homo sapien
caccgcgtctagagttgtttgttct

SEQ ID NO: 170241 - DNA, 25 bp, Homo sapien
agtgttagagcttttaaggcaccgc

SEQ ID NO: 170242 - DNA, 25 bp, Homo sapien
acttctgccggcagcatccgatgct

SEQ ID NO: 170243 - DNA, 25 bp, Homo sapien
cccacgggatgctgcatgaggcgca

SEQ ID NO: 170244 - DNA, 25 bp, Homo sapien
ggcctgcgggtcttcactatggtcg

SEQ ID NO: 170245 - DNA, 25 bp, Homo sapien
tatggtcgcgaatggacccacggga

SEQ ID NO: 170246 - DNA, 25 bp, Homo sapien
ggccccaccacagccagaccacagg

SEQ ID NO: 170247 - DNA, 25 bp, Homo sapien
cacagccagaccacaggccagacat

SEQ ID NO: 170248 - DNA, 25 bp, Homo sapien
cccaccacagccagaccacaggcca

SEQ ID NO: 170249 - DNA, 25 bp, Homo sapien
ctggccccaccacagccagaccaca

SEQ ID NO: 170250 - DNA, 25 bp, Homo sapien
ctacttcccggagccggtgatggtg

SEQ ID NO: 170251 - DNA, 25 bp, Homo sapien
acttcccggagccggtgatggtgac

SEQ ID NO: 170252 - DNA, 25 bp, Homo sapien
tacttcccggagccggtgatggtga

SEQ ID NO: 170253 - DNA, 25 bp, Homo sapien
ccacacagagcccatccgtcttccc

SEQ ID NO: 170254 - DNA, 25 bp, Homo sapien
cccttgacccgctgctgcaaaaaca

SEQ ID NO: 170255 - DNA, 25 bp, Homo sapien
atccgtcttccccttgacccgctgc

SEQ ID NO: 170256 - DNA, 25 bp, Homo sapien
ttccccttgacccgctgctgcaaaa

SEQ ID NO: 170257 - DNA, 25 bp, Homo sapien
gaagcaaccaggtcacaccttagaa

SEQ ID NO: 170258 - DNA, 25 bp, Homo sapien
taagtcatcactcttaaggtcaaac

SEQ ID NO: 170259 - DNA, 25 bp, Homo sapien
tttcacagtccatatgtctatcagc

SEQ ID NO: 170260 - DNA, 25 bp, Homo sapien
tcttaggatttaacaagcgtgacct

SEQ ID NO: 170261 - DNA, 25 bp, Homo sapien
ttggataaatctctcctgaatcagg

SEQ ID NO: 170262 - DNA, 25 bp, Homo sapien
gcgaggatgcttggcacgtaccccg

SEQ ID NO: 170263 - DNA, 25 bp, Homo sapien
ggcacgtaccccgtgtacatacttc

SEQ ID NO: 170264 - DNA, 25 bp, Homo sapien
gatgcttggcacgtaccccgtgtac

SEQ ID NO: 170265 - DNA, 25 bp, Homo sapien
tcgcgcgaggatgcttggcacgtac

SEQ ID NO: 170266 - DNA, 25 bp, Homo sapien
tccttgtggagagcacatttagtgg

SEQ ID NO: 170267 - DNA, 25 bp, Homo sapien
ggcttttggtctgcccagtccctct

SEQ ID NO: 170268 - DNA, 25 bp, Homo sapien
ccacgcttgatgtttcctgttccat

SEQ ID NO: 170269 - DNA, 25 bp, Homo sapien
tctggatgcttcctgtgcgaaacct

SEQ ID NO: 170270 - DNA, 25 bp, Homo sapien
cggagaacaactacaagaccacacc

SEQ ID NO: 170271 - DNA, 25 bp, Homo sapien
gagaacaactacaagaccacacctc

SEQ ID NO: 170272 - DNA, 25 bp, Homo sapien
gaacaactacaagaccacacctccc

SEQ ID NO: 170273 - DNA, 25 bp, Homo sapien
gccggagaacaactacaagaccaca

SEQ ID NO: 170274 - DNA, 25 bp, Homo sapien
actcagcttcagtgtgttcatccac

SEQ ID NO: 170275 - DNA, 25 bp, Homo sapien
cttcagtgtgttcatccacctgtcc

SEQ ID NO: 170276 - DNA, 25 bp, Homo sapien
gtgtgttcatccacctgtcccacgt

SEQ ID NO: 170277 - DNA, 25 bp, Homo sapien
tgttcatccacctgtcccacgtccc

SEQ ID NO: 170278 - DNA, 25 bp, Homo sapien
tcaaagtgcccattctggacgcttc

SEQ ID NO: 170279 - DNA, 25 bp, Homo sapien
tggacgcttcccgttccatgctgga

SEQ ID NO: 170280 - DNA, 25 bp, Homo sapien
tggacgcttcctgttccacgctgga

SEQ ID NO: 170281 - DNA, 25 bp, Homo sapien
gatgcttcccgttccatgctggacg

SEQ ID NO: 170282 - DNA, 25 bp, Homo sapien
gagatcatcaaccacggctccctcg

SEQ ID NO: 170283 - DNA, 25 bp, Homo sapien
cagacacagagctggaggcggcggc

SEQ ID NO: 170284 - DNA, 25 bp, Homo sapien
gatcatcaaccacggctccctcgct

SEQ ID NO: 170285 - DNA, 25 bp, Homo sapien
ccacaaactaggtgggcagagaggc

SEQ ID NO: 170286 - DNA, 25 bp, Homo sapien
agggctcgccgctggagggtgggct

SEQ ID NO: 170287 - DNA, 25 bp, Homo sapien
agagcccggaccctgctgtgccgtg

SEQ ID NO: 170288 - DNA, 25 bp, Homo sapien
tttaactctcaggacacgctgctgc

SEQ ID NO: 170289 - DNA, 25 bp, Homo sapien
gttggattcgtttgtgtggcatcga

SEQ ID NO: 170290 - DNA, 25 bp, Homo sapien
agagccacagggagggccttccaga

SEQ ID NO: 170291 - DNA, 25 bp, Homo sapien
gcctccagggaaagctgggtcgagg

SEQ ID NO: 170292 - DNA, 25 bp, Homo sapien
gacagggcctccagggaaagctggg

SEQ ID NO: 170293 - DNA, 25 bp, Homo sapien
agggaaagctgggtcgaggctggga

SEQ ID NO: 170294 - DNA, 25 bp, Homo sapien
agccacacgcattgcccgagcgacc

SEQ ID NO: 170295 - DNA, 25 bp, Homo sapien
gtacttcgtgatgggagccgccttc

SEQ ID NO: 170296 - DNA, 25 bp, Homo sapien
tccctggcccctgtcgctacatgga

SEQ ID NO: 170297 - DNA, 25 bp, Homo sapien
ttttaagtcttgtacttcgtgatgg

SEQ ID NO: 170298 - DNA, 25 bp, Homo sapien
agggtctgcagaaccactacacgca

SEQ ID NO: 170299 - DNA, 25 bp, Homo sapien
gctccgtgatgcatgagggtctgca

SEQ ID NO: 170300 - DNA, 25 bp, Homo sapien
gaggatgcttggcacgtaccccgtc

SEQ ID NO: 170301 - DNA, 25 bp, Homo sapien
cctgtccccggggtaaatgagtgcg

SEQ ID NO: 170302 - DNA, 25 bp, Homo sapien
aattagtatgcgctcgaattgagta

SEQ ID NO: 170303 - DNA, 25 bp, Homo sapien
taggacttgacactaggtgcaatgc

SEQ ID NO: 170304 - DNA, 25 bp, Homo sapien
ggtgtgacatccgtttgccataacg

SEQ ID NO: 170305 - DNA, 25 bp, Homo sapien
gtatgcgctcgaattgagtaatata

SEQ ID NO: 170306 - DNA, 25 bp, Homo sapien
tgtgaccagcatactgcgcgtggca

SEQ ID NO: 170307 - DNA, 25 bp, Homo sapien
ccctgaacgagctggtgacgctgac

SEQ ID NO: 170308 - DNA, 25 bp, Homo sapien
acacagaagaccatcgaccgcttgg

SEQ ID NO: 170309 - DNA, 25 bp, Homo sapien
gaagtacctgacttgggcatcccgg

SEQ ID NO: 170310 - DNA, 25 bp, Homo sapien
tgctacagcgtgtccagtgtcctgc

SEQ ID NO: 170311 - DNA, 25 bp, Homo sapien
cctcaagtgggaagagcgctgttca

SEQ ID NO: 170312 - DNA, 25 bp, Homo sapien
gggaagaccttcacttgcactgctg

SEQ ID NO: 170313 - DNA, 25 bp, Homo sapien
ggttcagaagcgaacctcacgtgca

SEQ ID NO: 170314 - DNA, 25 bp, Homo sapien
gcactacacgaatcccagccaggat

SEQ ID NO: 170315 - DNA, 25 bp, Homo sapien
acacagtgcctagccggcaagtccg

SEQ ID NO: 170316 - DNA, 25 bp, Homo sapien
gatgggaacgtggtcatcgcctgcc

SEQ ID NO: 170317 - DNA, 25 bp, Homo sapien
gcaagtccgtgacatgccacgtgaa

SEQ ID NO: 170318 - DNA, 25 bp, Homo sapien
ggccccaccacagccagaccacagg

SEQ ID NO: 170319 - DNA, 25 bp, Homo sapien
cacagccagaccacaggccagacat

SEQ ID NO: 170320 - DNA, 25 bp, Homo sapien
ctggccccaccacagccagaccaca

SEQ ID NO: 170321 - DNA, 25 bp, Homo sapien
cccaccacagccagaccacaggcca

SEQ ID NO: 170322 - DNA, 25 bp, Homo sapien
gaccgtccagcgagcggtgtctgta

SEQ ID NO: 170323 - DNA, 25 bp, Homo sapien
tcatgcctgaggacatctcggtgca

SEQ ID NO: 170324 - DNA, 25 bp, Homo sapien
gatgagttcatctgccgtgcagtcc

SEQ ID NO: 170325 - DNA, 25 bp, Homo sapien
gtgcagtggctgcacaacgaggtgc

SEQ ID NO: 170326 - DNA, 25 bp, Homo sapien
tgacctcaggagttggagaccagcc

SEQ ID NO: 170327 - DNA, 25 bp, Homo sapien
tttggaaggccaacaaggaaggatc

SEQ ID NO: 170328 - DNA, 25 bp, Homo sapien
ctttggaaggccaacaaggaaggat

SEQ ID NO: 170329 - DNA, 25 bp, Homo sapien
ggaaggccaacaaggaaggatcact

SEQ ID NO: 170330 - DNA, 25 bp, Homo sapien
tattcaggagagctggtccaaccca

SEQ ID NO: 170331 - DNA, 25 bp, Homo sapien
gaaacccgcatttctgacctcaaag

SEQ ID NO: 170332 - DNA, 25 bp, Homo sapien
caatggtcaagatcgcaccctcagt

SEQ ID NO: 170333 - DNA, 25 bp, Homo sapien
ttcaacagatactcaccaggtggcc

SEQ ID NO: 170334 - DNA, 25 bp, Homo sapien
agaacagcgtgaacagggtgatgat

SEQ ID NO: 170335 - DNA, 25 bp, Homo sapien
aaggaatctgcatcataaataactc

SEQ ID NO: 170336 - DNA, 25 bp, Homo sapien
cactatctccatacggggagtgcgg

SEQ ID NO: 170337 - DNA, 25 bp, Homo sapien
catcataaataactcccagggaagg

SEQ ID NO: 170338 - DNA, 25 bp, Homo sapien
ggagaacaactacaagaccacgcct

SEQ ID NO: 170339 - DNA, 25 bp, Homo sapien
gggaacgtcttctcatgctccgtga

SEQ ID NO: 170340 - DNA, 25 bp, Homo sapien
tgctccgtgatgcatgaggctctgc

SEQ ID NO: 170341 - DNA, 25 bp, Homo sapien
gatgcttggcacgtaccccgtgtac

SEQ ID NO: 170342 - DNA, 25 bp, Homo sapien
cccatcccgggatgagctgaccaag

SEQ ID NO: 170343 - DNA, 25 bp, Homo sapien
ctgaccaagaaccaggtcagcctga

SEQ ID NO: 170344 - DNA, 25 bp, Homo sapien
gggcagccccgagaaccacaggtgt

SEQ ID NO: 170345 - DNA, 25 bp, Homo sapien
caggtcagcctgacctgcctggtca

SEQ ID NO: 170346 - DNA, 25 bp, Homo sapien
gactggctgaatggcaaggagtaca

SEQ ID NO: 170347 - DNA, 25 bp, Homo sapien
acgtaccgtgtggtcagcgtcctca

SEQ ID NO: 170348 - DNA, 25 bp, Homo sapien
tacaagtgcaaggtctccaacaaag

SEQ ID NO: 170349 - DNA, 25 bp, Homo sapien
gagcagtacaacagcacgtaccgtg

SEQ ID NO: 170350 - DNA, 25 bp, Homo sapien
gcccatcggtcttccccctggcacc

SEQ ID NO: 170351 - DNA, 25 bp, Homo sapien
caagggcccatcggtcttccccctg

SEQ ID NO: 170352 - DNA, 25 bp, Homo sapien
tccaccaagggcccatcggtcttcc

SEQ ID NO: 170353 - DNA, 25 bp, Homo sapien
ctccaccaagggcccatcggtcttc

SEQ ID NO: 170354 - DNA, 25 bp, Homo sapien
ttttttgtttgactctggatgcttc

SEQ ID NO: 170355 - DNA, 25 bp, Homo sapien
atgttttttgtttgactctggatgc

SEQ ID NO: 170356 - DNA, 25 bp, Homo sapien
ttttgtttgactctggatgcttcca

SEQ ID NO: 170357 - DNA, 25 bp, Homo sapien
tttgtttgactctggatgcttccag

SEQ ID NO: 170358 - DNA, 25 bp, Homo sapien
cagaagaaagagtccggcatgacct

SEQ ID NO: 170359 - DNA, 25 bp, Homo sapien
catgtagcaaggacggattttcaac

SEQ ID NO: 170360 - DNA, 25 bp, Homo sapien
gaaaagttgcccagcgctggtcagc

SEQ ID NO: 170361 - DNA, 25 bp, Homo sapien
tccgtgccggccactgttgaggtca

SEQ ID NO: 170362 - DNA, 25 bp, Homo sapien
acaaccgcttcacgcagaagagcct

SEQ ID NO: 170363 - DNA, 25 bp, Homo sapien
tgaggctctgcacaaccgcttcacg

SEQ ID NO: 170364 - DNA, 25 bp, Homo sapien
tgatgcatgaggctctgcacaaccg

SEQ ID NO: 170365 - DNA, 25 bp, Homo sapien
tctgcacaaccgcttcacgcagaag

SEQ ID NO: 170366 - DNA, 25 bp, Homo sapien
ccgggaggagatgaccaagaaccag

SEQ ID NO: 170367 - DNA, 25 bp, Homo sapien
cccccatcccgggaggagatgacca

SEQ ID NO: 170368 - DNA, 25 bp, Homo sapien
aggagatgaccaagaaccaggtcag

SEQ ID NO: 170369 - DNA, 25 bp, Homo sapien
ccccatcccgggaggagatgaccaa

SEQ ID NO: 170370 - DNA, 25 bp, Homo sapien
gtcaagttacaaaggtccacagatg

SEQ ID NO: 170371 - DNA, 25 bp, Homo sapien
gagaggaatttcaccccagaatgaa

SEQ ID NO: 170372 - DNA, 25 bp, Homo sapien
cacacttgatgcaggtgatatgtcg

SEQ ID NO: 170373 - DNA, 25 bp, Homo sapien
cctactaggttttgggcttgcttag

SEQ ID NO: 170374 - DNA, 25 bp, Homo sapien
gcacccaccaaggctccggatgtgt

SEQ ID NO: 170375 - DNA, 25 bp, Homo sapien
ccaccaaggctccggatgtgttccc

SEQ ID NO: 170376 - DNA, 25 bp, Homo sapien
acccaccaaggctccggatgtgttc

SEQ ID NO: 170377 - DNA, 25 bp, Homo sapien
cacccaccaaggctccggatgtgtt

SEQ ID NO: 170378 - DNA, 25 bp, Homo sapien
cttgcaggccacgaggtgggctcta

SEQ ID NO: 170379 - DNA, 25 bp, Homo sapien
acaggcttccttctcgaccggcagg

SEQ ID NO: 170380 - DNA, 25 bp, Homo sapien
tgtatacgcttgttgccctgaaata

SEQ ID NO: 170381 - DNA, 25 bp, Homo sapien
tgttggcacgtgtttctcttccccg

SEQ ID NO: 170382 - DNA, 25 bp, Homo sapien
acgaacacgtggtgtgcaaagtcca

SEQ ID NO: 170383 - DNA, 25 bp, Homo sapien
ggaaatacaagaacaactctgacat

SEQ ID NO: 170384 - DNA, 25 bp, Homo sapien
gccttccaaggacgtcatgcagggc

SEQ ID NO: 170385 - DNA, 25 bp, Homo sapien
aattccccgtcggatacgagcagcg

SEQ ID NO: 170386 - DNA, 25 bp, Homo sapien
gtctggggcaaagggaccacggtca

SEQ ID NO: 170387 - DNA, 25 bp, Homo sapien
tggacgtctggggcaaagggaccac

SEQ ID NO: 170388 - DNA, 25 bp, Homo sapien
tctggggcaaagggaccacggtcac

SEQ ID NO: 170389 - DNA, 25 bp, Homo sapien
atggacgtctggggcaaagggacca

SEQ ID NO: 170390 - DNA, 25 bp, Homo sapien
gactcagcttgccagggtctcaggg

SEQ ID NO: 170391 - DNA, 25 bp, Homo sapien
cctctctgagtccacttagggagac

SEQ ID NO: 170392 - DNA, 25 bp, Homo sapien
aagtccggccacagatgtcggcagc

SEQ ID NO: 170393 - DNA, 25 bp, Homo sapien
ttcgaatgggaacccagcctgtcct

SEQ ID NO: 170394 - DNA, 25 bp, Homo sapien
ctggggtcctggcattgttgtcaca

SEQ ID NO: 170395 - DNA, 25 bp, Homo sapien
ggtcctggcattgttgtcacaatgt

SEQ ID NO: 170396 - DNA, 25 bp, Homo sapien
ccagggacgtagcggggcgccagtt

SEQ ID NO: 170397 - DNA, 25 bp, Homo sapien
gcctctggggtccaatgcccaacaa

SEQ ID NO: 170398 - DNA, 25 bp, Homo sapien
gccagggaaccctggtcaccgtctc

SEQ ID NO: 170399 - DNA, 25 bp, Homo sapien
cttttgatatctggggccaagggac

SEQ ID NO: 170400 - DNA, 25 bp, Homo sapien
ttgatatctggggccaagggacaat

SEQ ID NO: 170401 - DNA, 25 bp, Homo sapien
gcttttgatatctggggccaaggga

SEQ ID NO: 170402 - DNA, 25 bp, Homo sapien
atatctggggccaagggacaatggt

SEQ ID NO: 170403 - DNA, 25 bp, Homo sapien
gtacttcgatctctggggccgtggc

SEQ ID NO: 170404 - DNA, 25 bp, Homo sapien
tggtacttcgatctctggggccgtg

SEQ ID NO: 170405 - DNA, 25 bp, Homo sapien
tcgatctctggggccgtggcaccct

SEQ ID NO: 170406 - DNA, 25 bp, Homo sapien
acttcgatctctggggccgtggcac

SEQ ID NO: 170407 - DNA, 25 bp, Homo sapien
actggggccagggcaccctggtcac

SEQ ID NO: 170408 - DNA, 25 bp, Homo sapien
agcactggggccagggcaccctggt

SEQ ID NO: 170409 - DNA, 25 bp, Homo sapien
tgaatacttccagcactggggccag

SEQ ID NO: 170410 - DNA, 25 bp, Homo sapien
cagcactggggccagggcaccctgg

SEQ ID NO: 170411 - DNA, 25 bp, Homo sapien
tgaggacctcttctgagagggcagc

SEQ ID NO: 170412 - DNA, 25 bp, Homo sapien
aataaagagagttgccagcggacgc

SEQ ID NO: 170413 - DNA, 25 bp, Homo sapien
gcacatgcaatgaccagcacagcta

SEQ ID NO: 170414 - DNA, 25 bp, Homo sapien
caaggacctcttctgagagggcaga

SEQ ID NO: 170415 - DNA, 25 bp, Homo sapien
gacattgggcagaggtcacatggaa

SEQ ID NO: 170416 - DNA, 25 bp, Homo sapien
agtgaatacatgacggggtgtgagg

SEQ ID NO: 170417 - DNA, 25 bp, Homo sapien
aggtcacatggaaggaagtgaatac

SEQ ID NO: 170418 - DNA, 25 bp, Homo sapien
gatgccaaaaacagttgacattggg

SEQ ID NO: 170419 - DNA, 25 bp, Homo sapien
ggtcaccgtcatgcatagccaagct

SEQ ID NO: 170420 - DNA, 25 bp, Homo sapien
caggctgtgcatcctttcaccagca

SEQ ID NO: 170421 - DNA, 25 bp, Homo sapien
caacgtcgagctaatttaacacgca

SEQ ID NO: 170422 - DNA, 25 bp, Homo sapien
tatacatcgtggaacagcaacgtcg

SEQ ID NO: 170423 - DNA, 25 bp, Homo sapien
actatgatagtagtggttattacta

SEQ ID NO: 170424 - DNA, 25 bp, Homo sapien
ctatgatagtagtggttattactac

SEQ ID NO: 170425 - DNA, 25 bp, Homo sapien
tactatgatagtagtggttattact

SEQ ID NO: 170426 - DNA, 25 bp, Homo sapien
ttactatgatagtagtggttattac

SEQ ID NO: 170427 - DNA, 25 bp, Homo sapien
ccgagatccctgcagcactagacac

SEQ ID NO: 170428 - DNA, 25 bp, Homo sapien
gccgagatccctgcagcactagaca

SEQ ID NO: 170429 - DNA, 25 bp, Homo sapien
cgagatccctgcagcactagacaca

SEQ ID NO: 170430 - DNA, 25 bp, Homo sapien
ctgcagaagctcatccagggttggg

SEQ ID NO: 170431 - DNA, 25 bp, Homo sapien
gaacgaatacattacagtaccttga

SEQ ID NO: 170432 - DNA, 25 bp, Homo sapien
ctgagacacacagagtcggcaagtc

SEQ ID NO: 170433 - DNA, 25 bp, Homo sapien
aatgaactgtcttcttaagggataa

SEQ ID NO: 170434 - DNA, 25 bp, Homo sapien
gatgatcacataaacacagttgtgg

SEQ ID NO: 170435 - DNA, 25 bp, Homo sapien
tattacgatattttgactggttatt

SEQ ID NO: 170436 - DNA, 25 bp, Homo sapien
gtattacgatattttgactggttat

SEQ ID NO: 170437 - DNA, 25 bp, Homo sapien
tacgatattttgactggttattata

SEQ ID NO: 170438 - DNA, 25 bp, Homo sapien
attacgatattttgactggttatta

SEQ ID NO: 170439 - DNA, 25 bp, Homo sapien
gggtctcatgcccagatccccccag

SEQ ID NO: 170440 - DNA, 25 bp, Homo sapien
tcctgggagaaggggtctcatgccc

SEQ ID NO: 170441 - DNA, 25 bp, Homo sapien
acaggtagaggcagtggccccaggg

SEQ ID NO: 170442 - DNA, 25 bp, Homo sapien
ccagcagcgctggtcacaggtagag

SEQ ID NO: 170443 - DNA, 25 bp, Homo sapien
ggagacaagcaactcagccacactc

SEQ ID NO: 170444 - DNA, 25 bp, Homo sapien
ccaaggacggcacagttggtacatt

SEQ ID NO: 170445 - DNA, 25 bp, Homo sapien
tacattccggagacaagcaactcag

SEQ ID NO: 170446 - DNA, 25 bp, Homo sapien
gcacagttggtacattccggagaca

SEQ ID NO: 170447 - DNA, 25 bp, Homo sapien
caagcccacattctggagcagagca

SEQ ID NO: 170448 - DNA, 25 bp, Homo sapien
ccatggggtatggacttagggtctc

SEQ ID NO: 170449 - DNA, 25 bp, Homo sapien
gaccacttacacacgggccagggag

SEQ ID NO: 170450 - DNA, 25 bp, Homo sapien
aggccctatgcaggagggtcagagc

SEQ ID NO: 170451 - DNA, 25 bp, Homo sapien
ggaaggatggggcctgtgtctccag

SEQ ID NO: 170452 - DNA, 25 bp, Homo sapien
aggatggggcctgtgtctccaggct

SEQ ID NO: 170453 - DNA, 25 bp, Homo sapien
tgggaaggatggggcctgtgtctcc

SEQ ID NO: 170454 - DNA, 25 bp, Homo sapien
aaggatggggcctgtgtctccaggc

SEQ ID NO: 170455 - DNA, 25 bp, Homo sapien
gagccgctccctgaagtgtccccat

SEQ ID NO: 170456 - DNA, 25 bp, Homo sapien
ccaggaaggtctttctcgggacctg

SEQ ID NO: 170457 - DNA, 25 bp, Homo sapien
gaaggtctttctcgggacctgagag

SEQ ID NO: 170458 - DNA, 25 bp, Homo sapien
tctttctcgggacctgagagccgct

SEQ ID NO: 170459 - DNA, 25 bp, Homo sapien
tccgttcccgatgtccgtgtgtctc

SEQ ID NO: 170460 - DNA, 25 bp, Homo sapien
ctgaaaaggctgcaactgcacatcc

SEQ ID NO: 170461 - DNA, 25 bp, Homo sapien
ccaactcttgacctcccgttctcag

SEQ ID NO: 170462 - DNA, 25 bp, Homo sapien
atccttcctccgtccgttcccgatg

SEQ ID NO: 170463 - DNA, 25 bp, Homo sapien
ggccccccagtgctctattgtcagg

SEQ ID NO: 170464 - DNA, 25 bp, Homo sapien
tgctctattgtcagggctccctcca

SEQ ID NO: 170465 - DNA, 25 bp, Homo sapien
cttcaggtcacacccctaggctgac

SEQ ID NO: 170466 - DNA, 25 bp, Homo sapien
ccagtgctctattgtcagggctccc

SEQ ID NO: 170467 - DNA, 25 bp, Homo sapien
ggtcctcgtcccacatcctcagagc

SEQ ID NO: 170468 - DNA, 25 bp, Homo sapien
gggggtcctcgtcccacatcctcag

SEQ ID NO: 170469 - DNA, 25 bp, Homo sapien
agacagtgggggtcctcgtcccaca

SEQ ID NO: 170470 - DNA, 25 bp, Homo sapien
agagacagtgggggtcctcgtccca

SEQ ID NO: 170471 - DNA, 25 bp, Homo sapien
ccctggccagtctgtgcaaagaagt

SEQ ID NO: 170472 - DNA, 25 bp, Homo sapien
ggccagtctgtgcaaagaagtcacc

SEQ ID NO: 170473 - DNA, 25 bp, Homo sapien
gggacccctggccagtctgtgcaaa

SEQ ID NO: 170474 - DNA, 25 bp, Homo sapien
ccagtctgtgcaaagaagtcaccac

SEQ ID NO: 170475 - DNA, 25 bp, Homo sapien
gaggccatctgatggtctgggccaa

SEQ ID NO: 170476 - DNA, 25 bp, Homo sapien
gaagaggggtaggtgaggaggccat

SEQ ID NO: 170477 - DNA, 25 bp, Homo sapien
atggtctgggccaagacagtcacag

SEQ ID NO: 170478 - DNA, 25 bp, Homo sapien
catctgatggtctgggccaagacag

SEQ ID NO: 170479 - DNA, 25 bp, Homo sapien
cccaatgtccgtgcatatcctgtga

SEQ ID NO: 170480 - DNA, 25 bp, Homo sapien
ttcccaatgtccgtgcatatcctgt

SEQ ID NO: 170481 - DNA, 25 bp, Homo sapien
ccatcccttcccaatgtccgtgcat

SEQ ID NO: 170482 - DNA, 25 bp, Homo sapien
atcccttcccaatgtccgtgcatat

SEQ ID NO: 170483 - DNA, 25 bp, Homo sapien
caatcccacccatgaggtggggacc

SEQ ID NO: 170484 - DNA, 25 bp, Homo sapien
gaggtggggaccttatgacctaatc

SEQ ID NO: 170485 - DNA, 25 bp, Homo sapien
ctaatcactcttcatactgttacaa

SEQ ID NO: 170486 - DNA, 25 bp, Homo sapien
gccgaactcacccttttataacagc

SEQ ID NO: 170487 - DNA, 25 bp, Homo sapien
gaaagtccaaagcaagtccaggagc

SEQ ID NO: 170488 - DNA, 25 bp, Homo sapien
aagtccaaagcaagtccaggagcat

SEQ ID NO: 170489 - DNA, 25 bp, Homo sapien
aaagtccaaagcaagtccaggagca

SEQ ID NO: 170490 - DNA, 25 bp, Homo sapien
agtccaaagcaagtccaggagcatc

SEQ ID NO: 170491 - DNA, 25 bp, Homo sapien
gtgagatgactggtgtaaatacaaa

SEQ ID NO: 170492 - DNA, 25 bp, Homo sapien
gacagcattcatggggtgacctcat

SEQ ID NO: 170493 - DNA, 25 bp, Homo sapien
tgacctcatttggtaaaagggtgca

SEQ ID NO: 170494 - DNA, 25 bp, Homo sapien
gggtgcaaagctcaacacgcattgt

SEQ ID NO: 170495 - DNA, 25 bp, Homo sapien
cagccaggaactttacagcagcatc

SEQ ID NO: 170496 - DNA, 25 bp, Homo sapien
aaaggtgcccgtgctttatcaagcc

SEQ ID NO: 170497 - DNA, 25 bp, Homo sapien
tccttgtgaaatgggtgtcaccaca

SEQ ID NO: 170498 - DNA, 25 bp, Homo sapien
acttggaaactgaggagtggtcgcc

SEQ ID NO: 170499 - DNA, 25 bp, Homo sapien
cggccacagcatgagataagcccat

SEQ ID NO: 170500 - DNA, 25 bp, Homo sapien
aggtagaaggatacagcctgaaaac

SEQ ID NO: 170501 - DNA, 25 bp, Homo sapien
caggaggtagaaggatacagcctga

SEQ ID NO: 170502 - DNA, 25 bp, Homo sapien
accacaagctcaccggccagtgcag

SEQ ID NO: 170503 - DNA, 25 bp, Homo sapien
gactcttgccagtgaagcggtggac

SEQ ID NO: 170504 - DNA, 25 bp, Homo sapien
tgactccgacgaggcaagcatagag

SEQ ID NO: 170505 - DNA, 25 bp, Homo sapien
ctaaaggagaggatcccaggactgc

SEQ ID NO: 170506 - DNA, 25 bp, Homo sapien
cagccatggcgcattcctagaggga

SEQ ID NO: 170507 - DNA, 25 bp, Homo sapien
gcagtttattttacccggaggcaga

SEQ ID NO: 170508 - DNA, 25 bp, Homo sapien
taataatccccgagatggcagccaa

SEQ ID NO: 170509 - DNA, 25 bp, Homo sapien
tcaaatttggtgttacaagggcacg

SEQ ID NO: 170510 - DNA, 25 bp, Homo sapien
tgttttcagcatcatcggagccctt

SEQ ID NO: 170511 - DNA, 25 bp, Homo sapien
gagttctatcttaggaaaatcaagg

SEQ ID NO: 170512 - DNA, 25 bp, Homo sapien
acagtgtggccgagcagatggctat

SEQ ID NO: 170513 - DNA, 25 bp, Homo sapien
agatggctatgtgctagagggcaaa

SEQ ID NO: 170514 - DNA, 25 bp, Homo sapien
gttggagttctatcttaggaaaatc

SEQ ID NO: 170515 - DNA, 25 bp, Homo sapien
tgaccagggacacgtccatcagcac

SEQ ID NO: 170516 - DNA, 25 bp, Homo sapien
acagtggtggcacaaactatgcaca

SEQ ID NO: 170517 - DNA, 25 bp, Homo sapien
gatggatcaaccctaacagtggtgg

SEQ ID NO: 170518 - DNA, 25 bp, Homo sapien
agggacacgtccatcagcacagcct

SEQ ID NO: 170519 - DNA, 25 bp, Homo sapien
tcaccggctactatatgcactgggt

SEQ ID NO: 170520 - DNA, 25 bp, Homo sapien
accttcaccggctactatatgcact

SEQ ID NO: 170521 - DNA, 25 bp, Homo sapien
cggctactatatgcactgggtgcga

SEQ ID NO: 170522 - DNA, 25 bp, Homo sapien
tacaccttcaccggctactatatgc

SEQ ID NO: 170523 - DNA, 25 bp, Homo sapien
tggaggatcctcttcttggtggcag

SEQ ID NO: 170524 - DNA, 25 bp, Homo sapien
aggatcctcttcttggtggcagcag

SEQ ID NO: 170525 - DNA, 25 bp, Homo sapien
gaggatcctcttcttggtggcagca

SEQ ID NO: 170526 - DNA, 25 bp, Homo sapien
cctggaggatcctcttcttggtggc

SEQ ID NO: 170527 - DNA, 25 bp, Homo sapien
ccaggcccccggacaaaggcttgag

SEQ ID NO: 170528 - DNA, 25 bp, Homo sapien
tatgctatgcattgggtgcgccagg

SEQ ID NO: 170529 - DNA, 25 bp, Homo sapien
agagtcaccattaccagggacacat

SEQ ID NO: 170530 - DNA, 25 bp, Homo sapien
tggagcaacgctggcaatggtaaca

SEQ ID NO: 170531 - DNA, 25 bp, Homo sapien
cagtctggggctgaggtgaagaagc

SEQ ID NO: 170532 - DNA, 25 bp, Homo sapien
gggctgaggtgaagaagcctggggc

SEQ ID NO: 170533 - DNA, 25 bp, Homo sapien
aggtgaagaagcctggggcctcagt

SEQ ID NO: 170534 - DNA, 25 bp, Homo sapien
gctgaggtgaagaagcctggggcct

SEQ ID NO: 170535 - DNA, 25 bp, Homo sapien
acacggccgtgtattactgtgcgag

SEQ ID NO: 170536 - DNA, 25 bp, Homo sapien
ccgcggacacggccgtgtattactg

SEQ ID NO: 170537 - DNA, 25 bp, Homo sapien
cgccgcggacacggccgtgtattac

SEQ ID NO: 170538 - DNA, 25 bp, Homo sapien
ggacacggccgtgtattactgtgcg

SEQ ID NO: 170539 - DNA, 25 bp, Homo sapien
caccatgtcagtagacacgtccaag

SEQ ID NO: 170540 - DNA, 25 bp, Homo sapien
tcagtagacacgtccaagaaccagt

SEQ ID NO: 170541 - DNA, 25 bp, Homo sapien
aaccagttctccctgaagctgagct

SEQ ID NO: 170542 - DNA, 25 bp, Homo sapien
tccctcaagagtcgagtcaccatgt

SEQ ID NO: 170543 - DNA, 25 bp, Homo sapien
gtttgtccgacagagtatttatttg

SEQ ID NO: 170544 - DNA, 25 bp, Homo sapien
tctatggcaagattaatatgctggg

SEQ ID NO: 170545 - DNA, 25 bp, Homo sapien
gaaactctgctaaaacgtctatggc

SEQ ID NO: 170546 - DNA, 25 bp, Homo sapien
tatatcatatggctgctcatctaga

SEQ ID NO: 170547 - DNA, 25 bp, Homo sapien
ccagatttacaattctgtactgaca

SEQ ID NO: 170548 - DNA, 25 bp, Homo sapien
ttcctgtcgcggtctggggctgcct

SEQ ID NO: 170549 - DNA, 25 bp, Homo sapien
agggctggcttcctgtcgcggtctg

SEQ ID NO: 170550 - DNA, 25 bp, Homo sapien
gcctcgtcgtcaaatttccccagga

SEQ ID NO: 170551 - DNA, 25 bp, Homo sapien
acataaagcaagatggaagtgagaa

SEQ ID NO: 170552 - DNA, 25 bp, Homo sapien
gaagtgagaaatactatgtggactc

SEQ ID NO: 170553 - DNA, 25 bp, Homo sapien
cctttagtagctattggatgagctg

SEQ ID NO: 170554 - DNA, 25 bp, Homo sapien
ttcacctttagtagctattggatga

SEQ ID NO: 170555 - DNA, 25 bp, Homo sapien
gttggaccagctgactgagaaagtg

SEQ ID NO: 170556 - DNA, 25 bp, Homo sapien
ctgagaaagtgttgtaagagctgca

SEQ ID NO: 170557 - DNA, 25 bp, Homo sapien
gtgttgtaagagctgcagtgtctac

SEQ ID NO: 170558 - DNA, 25 bp, Homo sapien
ctgtggtgcccacactgttggacca

SEQ ID NO: 170559 - DNA, 25 bp, Homo sapien
acacggccgtgtattactgtgcgag

SEQ ID NO: 170560 - DNA, 25 bp, Homo sapien
cacggccgtgtattactgtgcgaga

SEQ ID NO: 170561 - DNA, 25 bp, Homo sapien
cggccgtgtattactgtgcgagagg

SEQ ID NO: 170562 - DNA, 25 bp, Homo sapien
gacacggccgtgtattactgtgcga

SEQ ID NO: 170563 - DNA, 25 bp, Homo sapien
tacaccttcaccagttatgatatca

SEQ ID NO: 170564 - DNA, 25 bp, Homo sapien
gaaccctaacagtggtaacacaggc

SEQ ID NO: 170565 - DNA, 25 bp, Homo sapien
gatatcaactgggtgcgacaggcca

SEQ ID NO: 170566 - DNA, 25 bp, Homo sapien
gatggatgaaccctaacagtggtaa

SEQ ID NO: 170567 - DNA, 25 bp, Homo sapien
attagttggaatagtggtagcatag

SEQ ID NO: 170568 - DNA, 25 bp, Homo sapien
ataggctatgcggactctgtgaagg

SEQ ID NO: 170569 - DNA, 25 bp, Homo sapien
tttgatgattatgccatgcactggg

SEQ ID NO: 170570 - DNA, 25 bp, Homo sapien
catgagtggatttgtgtggcagttt

SEQ ID NO: 170571 - DNA, 25 bp, Homo sapien
agactctgtgaagggccgattcacc

SEQ ID NO: 170572 - DNA, 25 bp, Homo sapien
agtaccatatactacgcagactctg

SEQ ID NO: 170573 - DNA, 25 bp, Homo sapien
gcctgagagccgaggacacggccgt

SEQ ID NO: 170574 - DNA, 25 bp, Homo sapien
tgtgaagggccgattcaccatctcc

SEQ ID NO: 170575 - DNA, 25 bp, Homo sapien
tgggtttcatacattagtagtagtg

SEQ ID NO: 170576 - DNA, 25 bp, Homo sapien
tgtgaacacactcttagtatccagc

SEQ ID NO: 170577 - DNA, 25 bp, Homo sapien
gccatgtttcctgtcaaccacacag

SEQ ID NO: 170578 - DNA, 25 bp, Homo sapien
aatgcttctagatattatgtgtgac

SEQ ID NO: 170579 - DNA, 25 bp, Homo sapien
aactttgacttcacttgggacttgt

SEQ ID NO: 170580 - DNA, 25 bp, Homo sapien
gacaagctctaataagtgaagtaac

SEQ ID NO: 170581 - DNA, 25 bp, Homo sapien
ggctgattttacatcaggtatagga

SEQ ID NO: 170582 - DNA, 25 bp, Homo sapien
tagtgttaaatcaggagtctcaatg

SEQ ID NO: 170583 - DNA, 25 bp, Homo sapien
caggtataggaatatatcctaggtg

SEQ ID NO: 170584 - DNA, 25 bp, Homo sapien
gagagatttttcatacagcatttat

SEQ ID NO: 170585 - DNA, 25 bp, Homo sapien
aatctccttttgtgcatgtagcatt

SEQ ID NO: 170586 - DNA, 25 bp, Homo sapien
atcagtgctgtaagtattttggaac

SEQ ID NO: 170587 - DNA, 25 bp, Homo sapien
gaacttcctctgaaggtatctttgt

SEQ ID NO: 170588 - DNA, 25 bp, Homo sapien
cttacaatggtaacacaaactatgc

SEQ ID NO: 170589 - DNA, 25 bp, Homo sapien
gtcaccatgaccacagacacatcca

SEQ ID NO: 170590 - DNA, 25 bp, Homo sapien
gatcagcgcttacaatggtaacaca

SEQ ID NO: 170591 - DNA, 25 bp, Homo sapien
ggatgggatggatcagcgcttacaa

SEQ ID NO: 170592 - DNA, 25 bp, Homo sapien
ggagagcggatcgaccactgtgtca

SEQ ID NO: 170593 - DNA, 25 bp, Homo sapien
agtgaccgccttccagaggagagcg

SEQ ID NO: 170594 - DNA, 25 bp, Homo sapien
ccctaaaagtcaacatctgagtcct

SEQ ID NO: 170595 - DNA, 25 bp, Homo sapien
tgaggaaagaattttcaggtccgca

SEQ ID NO: 170596 - DNA, 25 bp, Homo sapien
agacgtaaccacctacatgattctg

SEQ ID NO: 170597 - DNA, 25 bp, Homo sapien
gaaacccgggagtcatctgaacatg

SEQ ID NO: 170598 - DNA, 25 bp, Homo sapien
tgaagcttcacgaacacattgatga

SEQ ID NO: 170599 - DNA, 25 bp, Homo sapien
tgcaagatttatagtagacgtaacc

SEQ ID NO: 170600 - DNA, 25 bp, Homo sapien
tggtagcacaggttatgcagactct

SEQ ID NO: 170601 - DNA, 25 bp, Homo sapien
gtagcacaggttatgcagactctgt

SEQ ID NO: 170602 - DNA, 25 bp, Homo sapien
tggtggtagcacaggttatgcagac

SEQ ID NO: 170603 - DNA, 25 bp, Homo sapien
gtggtagcacaggttatgcagactc

SEQ ID NO: 170604 - DNA, 25 bp, Homo sapien
ttcagtagctatagcatgaactggg

SEQ ID NO: 170605 - DNA, 25 bp, Homo sapien
agcatgaactgggtccgccaggctc

SEQ ID NO: 170606 - DNA, 25 bp, Homo sapien
gattcaccttcagtagctatagcat

SEQ ID NO: 170607 - DNA, 25 bp, Homo sapien
catctccagagacaacgccaagaac

SEQ ID NO: 170608 - DNA, 25 bp, Homo sapien
gaggcctggtcaagcctggggggtc

SEQ ID NO: 170609 - DNA, 25 bp, Homo sapien
ctggggggtccctgagactctcctg

SEQ ID NO: 170610 - DNA, 25 bp, Homo sapien
ctgggggaggcctggtcaagcctgg

SEQ ID NO: 170611 - DNA, 25 bp, Homo sapien
ggtccctgagactctcctgtgcagc

SEQ ID NO: 170612 - DNA, 25 bp, Homo sapien
ctggggggtccctgagactctcctg

SEQ ID NO: 170613 - DNA, 25 bp, Homo sapien
gggtccctgagactctcctgtgcag

SEQ ID NO: 170614 - DNA, 25 bp, Homo sapien
ggtccctgagactctcctgtgcagc

SEQ ID NO: 170615 - DNA, 25 bp, Homo sapien
gggggtccctgagactctcctgtgc

SEQ ID NO: 170616 - DNA, 25 bp, Homo sapien
gacctgaatagaaagtgcatctaac

SEQ ID NO: 170617 - DNA, 25 bp, Homo sapien
caataccaaatgttgacgaggaagt

SEQ ID NO: 170618 - DNA, 25 bp, Homo sapien
gaattggcacatagacaactacagt

SEQ ID NO: 170619 - DNA, 25 bp, Homo sapien
aatcctagtaacctaatagaatggg

SEQ ID NO: 170620 - DNA, 25 bp, Homo sapien
cagctatgccatgagctgggtccgc

SEQ ID NO: 170621 - DNA, 25 bp, Homo sapien
tggtagtggtggtagcacatactac

SEQ ID NO: 170622 - DNA, 25 bp, Homo sapien
gcacatactacgcagactccgtgaa

SEQ ID NO: 170623 - DNA, 25 bp, Homo sapien
gagtgggtctcagctattagtggta

SEQ ID NO: 170624 - DNA, 25 bp, Homo sapien
gggggtccctgagactctcctgtgc

SEQ ID NO: 170625 - DNA, 25 bp, Homo sapien
ctggggggtccctgagactctcctg

SEQ ID NO: 170626 - DNA, 25 bp, Homo sapien
gggtccctgagactctcctgtgcag

SEQ ID NO: 170627 - DNA, 25 bp, Homo sapien
ggtccctgagactctcctgtgcagc

SEQ ID NO: 170628 - DNA, 25 bp, Homo sapien
gctgttggagtctgggggaggcttg

SEQ ID NO: 170629 - DNA, 25 bp, Homo sapien
gagtctgggggaggcttggtacagc

SEQ ID NO: 170630 - DNA, 25 bp, Homo sapien
ttggagtctgggggaggcttggtac

SEQ ID NO: 170631 - DNA, 25 bp, Homo sapien
ctgttggagtctgggggaggcttgg

SEQ ID NO: 170632 - DNA, 25 bp, Homo sapien
atacaccctcactgaattatccatg

SEQ ID NO: 170633 - DNA, 25 bp, Homo sapien
cgaggacacatctacagacacagcc

SEQ ID NO: 170634 - DNA, 25 bp, Homo sapien
gatgggaggttttgatcctgaagat

SEQ ID NO: 170635 - DNA, 25 bp, Homo sapien
tcctgcaaggtttccggatacaccc

SEQ ID NO: 170636 - DNA, 25 bp, Homo sapien
cgacagcagagccaacacggtgttt

SEQ ID NO: 170637 - DNA, 25 bp, Homo sapien
ggagccctcgagtaatcatcctgag

SEQ ID NO: 170638 - DNA, 25 bp, Homo sapien
tactccggcatccagtgtcaacggg

SEQ ID NO: 170639 - DNA, 25 bp, Homo sapien
tgtggacagcgccaaggtgaccata

SEQ ID NO: 170640 - DNA, 25 bp, Homo sapien
gcttcgaggtttcttctcaggactt

SEQ ID NO: 170641 - DNA, 25 bp, Homo sapien
cgcctggcggaatggagcggcgcca

SEQ ID NO: 170642 - DNA, 25 bp, Homo sapien
ctcaggactttgtatgtattacatg

SEQ ID NO: 170643 - DNA, 25 bp, Homo sapien
tctgagatggaatgttgacgtctcc

SEQ ID NO: 170644 - DNA, 25 bp, Homo sapien
tgttataccagagaagcacaaaaca

SEQ ID NO: 170645 - DNA, 25 bp, Homo sapien
ctgttataccagagaagcacaaaac

SEQ ID NO: 170646 - DNA, 25 bp, Homo sapien
ctagatggggtgaagcaggcaaccc

SEQ ID NO: 170647 - DNA, 25 bp, Homo sapien
gtgattagattgtcctgagaaacaa

SEQ ID NO: 170648 - DNA, 25 bp, Homo sapien
aagcagctcctagatggggtgaagc

SEQ ID NO: 170649 - DNA, 25 bp, Homo sapien
gcaggcaacccgtgtgtgtccacag

SEQ ID NO: 170650 - DNA, 25 bp, Homo sapien
aaatcataacatagctttattcact

SEQ ID NO: 170651 - DNA, 25 bp, Homo sapien
aatacatacaaccaaaatttctcaa

SEQ ID NO: 170652 - DNA, 25 bp, Homo sapien
aatcataacatagctttattcacta

SEQ ID NO: 170653 - DNA, 25 bp, Homo sapien
tattcactataaatacatacaacca

SEQ ID NO: 170654 - DNA, 25 bp, Homo sapien
cagagataacgccaagaacacactt

SEQ ID NO: 170655 - DNA, 25 bp, Homo sapien
ggaccgattcaatacctccagagat

SEQ ID NO: 170656 - DNA, 25 bp, Homo sapien
gtagcacatacctcatagactccgg

SEQ ID NO: 170657 - DNA, 25 bp, Homo sapien
atcagcaccgaacacagaggactca

SEQ ID NO: 170658 - DNA, 25 bp, Homo sapien
ggcatatcttcatatcagcagccta

SEQ ID NO: 170659 - DNA, 25 bp, Homo sapien
tatcagctgggtatgacaggcccat

SEQ ID NO: 170660 - DNA, 25 bp, Homo sapien
tggacacctccgtcagcatggcata

SEQ ID NO: 170661 - DNA, 25 bp, Homo sapien
caacactgggaacctaacgtatgcc

SEQ ID NO: 170662 - DNA, 25 bp, Homo sapien
tcagtagacacgtccaagaaccagt

SEQ ID NO: 170663 - DNA, 25 bp, Homo sapien
tattatagtgggagcacctactaca

SEQ ID NO: 170664 - DNA, 25 bp, Homo sapien
aagaaccagttctccctgaagctga

SEQ ID NO: 170665 - DNA, 25 bp, Homo sapien
tcaagagtcgagtcaccatgtcagt

SEQ ID NO: 170666 - DNA, 25 bp, Homo sapien
aggacatggctgtgtatggctgtac

SEQ ID NO: 170667 - DNA, 25 bp, Homo sapien
gacatggctgtgtatggctgtacat

SEQ ID NO: 170668 - DNA, 25 bp, Homo sapien
tgtgaggtggagctgatagagccca

SEQ ID NO: 170669 - DNA, 25 bp, Homo sapien
cagtgtgaggtggagctgatagagc

SEQ ID NO: 170670 - DNA, 25 bp, Homo sapien
taaatactatgcagactccgtgaag

SEQ ID NO: 170671 - DNA, 25 bp, Homo sapien
gagacaattccaagaacacgctgta

SEQ ID NO: 170672 - DNA, 25 bp, Homo sapien
atactatgcagactccgtgaagggc

SEQ ID NO: 170673 - DNA, 25 bp, Homo sapien
gctatggcatgcactgggtccgcca

SEQ ID NO: 170674 - DNA, 25 bp, Homo sapien
agctgggttttcctcgttgctcttt

SEQ ID NO: 170675 - DNA, 25 bp, Homo sapien
ggctgagctgggttttcctcgttgc

SEQ ID NO: 170676 - DNA, 25 bp, Homo sapien
gctgagctgggttttcctcgttgct

SEQ ID NO: 170677 - DNA, 25 bp, Homo sapien
tgagctgggttttcctcgttgctct

SEQ ID NO: 170678 - DNA, 25 bp, Homo sapien
aagaaccagttctccctgaagctga

SEQ ID NO: 170679 - DNA, 25 bp, Homo sapien
acaacccgtccctcaagagtcgagt

SEQ ID NO: 170680 - DNA, 25 bp, Homo sapien
accagttctccctgaagctgagctc

SEQ ID NO: 170681 - DNA, 25 bp, Homo sapien
ctactacaacccgtccctcaagagt

SEQ ID NO: 170682 - DNA, 25 bp, Homo sapien
atcagcagtggtggttactactgga

SEQ ID NO: 170683 - DNA, 25 bp, Homo sapien
ggagtcgggcccaggactggtgaag

SEQ ID NO: 170684 - DNA, 25 bp, Homo sapien
gagtcgggcccaggactggtgaagc

SEQ ID NO: 170685 - DNA, 25 bp, Homo sapien
tgcaggagtcgggcccaggactggt

SEQ ID NO: 170686 - DNA, 25 bp, Homo sapien
caggagtcgggcccaggactggtga

SEQ ID NO: 170687 - DNA, 25 bp, Homo sapien
cttcagtagcttctgaatgagccga

SEQ ID NO: 170688 - DNA, 25 bp, Homo sapien
cactcagagagctgaggacgtggcc

SEQ ID NO: 170689 - DNA, 25 bp, Homo sapien
ggtgtgagtccagacacaacatttc

SEQ ID NO: 170690 - DNA, 25 bp, Homo sapien
cgtgtatggctatacataaggtccc

SEQ ID NO: 170691 - DNA, 25 bp, Homo sapien
ctgcaaatgaacagcctgagagccg

SEQ ID NO: 170692 - DNA, 25 bp, Homo sapien
gagccgaggacacggctgtgtatta

SEQ ID NO: 170693 - DNA, 25 bp, Homo sapien
gcctgagagccgaggacacggctgt

SEQ ID NO: 170694 - DNA, 25 bp, Homo sapien
aatgaacagcctgagagccgaggac

SEQ ID NO: 170695 - DNA, 25 bp, Homo sapien
gctatggcatgcactgggtccgcca

SEQ ID NO: 170696 - DNA, 25 bp, Homo sapien
taaatactatgcagactccgtgaag

SEQ ID NO: 170697 - DNA, 25 bp, Homo sapien
gagacaattccaagaacacgctgta

SEQ ID NO: 170698 - DNA, 25 bp, Homo sapien
atactatgcagactccgtgaagggc

SEQ ID NO: 170699 - DNA, 25 bp, Homo sapien
aaccagttctccctgaagctgagct

SEQ ID NO: 170700 - DNA, 25 bp, Homo sapien
tcaagagtcgagtcaccatatcagt

SEQ ID NO: 170701 - DNA, 25 bp, Homo sapien
acaacccgtccctcaagagtcgagt

SEQ ID NO: 170702 - DNA, 25 bp, Homo sapien
tatcagtagacacgtccaagaacca

SEQ ID NO: 170703 - DNA, 25 bp, Homo sapien
gggtccttcagtggttactactgga

SEQ ID NO: 170704 - DNA, 25 bp, Homo sapien
tgcgctgtctatggtgggtccttca

SEQ ID NO: 170705 - DNA, 25 bp, Homo sapien
cctcacctgcgctgtctatggtggg

SEQ ID NO: 170706 - DNA, 25 bp, Homo sapien
ctatggtgggtccttcagtggttac

SEQ ID NO: 170707 - DNA, 25 bp, Homo sapien
aattgggtatgatagacccctggac

SEQ ID NO: 170708 - DNA, 25 bp, Homo sapien
tctatggtatgaattgggtatgata

SEQ ID NO: 170709 - DNA, 25 bp, Homo sapien
tgaattgggtatgatagacccctgg

SEQ ID NO: 170710 - DNA, 25 bp, Homo sapien
ggtatgaattgggtatgatagaccc

SEQ ID NO: 170711 - DNA, 25 bp, Homo sapien
ctgaggtgaagaagcctggggcctc

SEQ ID NO: 170712 - DNA, 25 bp, Homo sapien
aggtgaagaagcctggggcctcagt

SEQ ID NO: 170713 - DNA, 25 bp, Homo sapien
tgaagaagcctggggcctcagtgaa

SEQ ID NO: 170714 - DNA, 25 bp, Homo sapien
gtgaagaagcctggggcctcagtga

SEQ ID NO: 170715 - DNA, 25 bp, Homo sapien
ccgcgcgcggcctattagttgattt

SEQ ID NO: 170716 - DNA, 25 bp, Homo sapien
tacatcatggtcaggtgggctttac

SEQ ID NO: 170717 - DNA, 25 bp, Homo sapien
tgcaaggctcgttcaatatccacag

SEQ ID NO: 170718 - DNA, 25 bp, Homo sapien
tgaacatagacctgaaagtcctcaa

SEQ ID NO: 170719 - DNA, 25 bp, Homo sapien
caagaagtgggatcaccagattata

SEQ ID NO: 170720 - DNA, 25 bp, Homo sapien
tatcaagtaaccaatcctaccacag

SEQ ID NO: 170721 - DNA, 25 bp, Homo sapien
agtgtgagttgatattgcattgtgc

SEQ ID NO: 170722 - DNA, 25 bp, Homo sapien
taatagccatattaactagtgtgag

SEQ ID NO: 170723 - DNA, 25 bp, Homo sapien
gctggtggagtctgggggaggcttg

SEQ ID NO: 170724 - DNA, 25 bp, Homo sapien
tgtccagtgtgaggtgcagctggtg

SEQ ID NO: 170725 - DNA, 25 bp, Homo sapien
gagtctgggggaggcttggtacagc

SEQ ID NO: 170726 - DNA, 25 bp, Homo sapien
gcaggtgtccagtgtgaggtgcagc

SEQ ID NO: 170727 - DNA, 25 bp, Homo sapien
agatagagagatacttaccatggtg

SEQ ID NO: 170728 - DNA, 25 bp, Homo sapien
tagttgtctgggaaccctgcgctaa

SEQ ID NO: 170729 - DNA, 25 bp, Homo sapien
cccttgatgcttgcacaatgatgaa

SEQ ID NO: 170730 - DNA, 25 bp, Homo sapien
cattgaatacaatccctgtgccttc

SEQ ID NO: 170731 - DNA, 25 bp, Homo sapien
gcactgtctctggtggctccatcag

SEQ ID NO: 170732 - DNA, 25 bp, Homo sapien
aagaaccagttctccctgaagctga

SEQ ID NO: 170733 - DNA, 25 bp, Homo sapien
aacccgtccctcaagagtcgagtca

SEQ ID NO: 170734 - DNA, 25 bp, Homo sapien
tattatagtgggagcacctactaca

SEQ ID NO: 170735 - DNA, 25 bp, Homo sapien
cagcctgcacaaccaagcaagtctt

SEQ ID NO: 170736 - DNA, 25 bp, Homo sapien
cctgcacaaccaagcaagtcttcat

SEQ ID NO: 170737 - DNA, 25 bp, Homo sapien
gcctgcacaaccaagcaagtcttca

SEQ ID NO: 170738 - DNA, 25 bp, Homo sapien
agcctgcacaaccaagcaagtcttc

SEQ ID NO: 170739 - DNA, 25 bp, Homo sapien
ctcaagattatcgtatatgactatt

SEQ ID NO: 170740 - DNA, 25 bp, Homo sapien
gattatcgtatatgactattttagc

SEQ ID NO: 170741 - DNA, 25 bp, Homo sapien
aatgtaatatctcaagattatcgta

SEQ ID NO: 170742 - DNA, 25 bp, Homo sapien
taatatctcaagattatcgtatatg

SEQ ID NO: 170743 - DNA, 25 bp, Homo sapien
tccagattgaccccaacaccaaaaa

SEQ ID NO: 170744 - DNA, 25 bp, Homo sapien
ccagattgaccccaacaccaaaaag

SEQ ID NO: 170745 - DNA, 25 bp, Homo sapien
tgcttattacagattattcccctta

SEQ ID NO: 170746 - DNA, 25 bp, Homo sapien
gagacccttcttgtgcttcgacctt

SEQ ID NO: 170747 - DNA, 25 bp, Homo sapien
gaatgatttttcgagagcccctgcc

SEQ ID NO: 170748 - DNA, 25 bp, Homo sapien
gtgccgcgccggtagcagacgccaa

SEQ ID NO: 170749 - DNA, 25 bp, Homo sapien
ttttttaatccgtcctaggtcatga

SEQ ID NO: 170750 - DNA, 25 bp, Homo sapien
tcaaaggcttcaggaagtaagctcc

SEQ ID NO: 170751 - DNA, 25 bp, Homo sapien
gaagcaggcaaatctttcatgtgca

SEQ ID NO: 170752 - DNA, 25 bp, Homo sapien
caggacctggagcatctctctttgg

SEQ ID NO: 170753 - DNA, 25 bp, Homo sapien
gagtcgtggtacagcctggggggtc

SEQ ID NO: 170754 - DNA, 25 bp, Homo sapien
ggggtccctgagactctcctgtgca

SEQ ID NO: 170755 - DNA, 25 bp, Homo sapien
ctggggggtccctgagactctcctg

SEQ ID NO: 170756 - DNA, 25 bp, Homo sapien
ggtccctgagactctcctgtgcagc

SEQ ID NO: 170757 - DNA, 25 bp, Homo sapien
gacacagcgccgttgggtgggcggg

SEQ ID NO: 170758 - DNA, 25 bp, Homo sapien
aggaagtccccgctgagctaccggg

SEQ ID NO: 170759 - DNA, 25 bp, Homo sapien
aggcccaaccctgtaccacataaag

SEQ ID NO: 170760 - DNA, 25 bp, Homo sapien
ctcggaaacctgaaggcagcggcgg

SEQ ID NO: 170761 - DNA, 25 bp, Homo sapien
tcaattttagaagaatcatatgcaa

SEQ ID NO: 170762 - DNA, 25 bp, Homo sapien
taagagctttctaactgatcccata

SEQ ID NO: 170763 - DNA, 25 bp, Homo sapien
tatgcaaacagcctctcgtggtggt

SEQ ID NO: 170764 - DNA, 25 bp, Homo sapien
tcgtggtggttgaaagcccacagcc

SEQ ID NO: 170765 - DNA, 25 bp, Homo sapien
tgggagtggaactcacacagagcaa

SEQ ID NO: 170766 - DNA, 25 bp, Homo sapien
gaatagtcccaagtctaggcagaga

SEQ ID NO: 170767 - DNA, 25 bp, Homo sapien
gatttgaaattgatgcccaggcctc

SEQ ID NO: 170768 - DNA, 25 bp, Homo sapien
taaaatgtccagctctgtccctcac

SEQ ID NO: 170769 - DNA, 25 bp, Homo sapien
caagggtgacacacacgatgatcca

SEQ ID NO: 170770 - DNA, 25 bp, Homo sapien
gcagttttcggtaacaggctatcca

SEQ ID NO: 170771 - DNA, 25 bp, Homo sapien
ccaacagttactgctggagctgaat

SEQ ID NO: 170772 - DNA, 25 bp, Homo sapien
gaaacaattttgactatacctgagc

SEQ ID NO: 170773 - DNA, 25 bp, Homo sapien
tattagctattatgactggtctgag

SEQ ID NO: 170774 - DNA, 25 bp, Homo sapien
catggtcatgtccacatgtgctcaa

SEQ ID NO: 170775 - DNA, 25 bp, Homo sapien
tgtttacgactatgacctccagctg

SEQ ID NO: 170776 - DNA, 25 bp, Homo sapien
gcagttcacagtgcctattgtttcc

SEQ ID NO: 170777 - DNA, 25 bp, Homo sapien
tttcccacgaaggtatagcccatcc

SEQ ID NO: 170778 - DNA, 25 bp, Homo sapien
cagctcattagatggtgcccaggga

SEQ ID NO: 170779 - DNA, 25 bp, Homo sapien
ggttaagcatcctgtgtcgccgaca

SEQ ID NO: 170780 - DNA, 25 bp, Homo sapien
gattgtattggcaacttccctcgag

SEQ ID NO: 170781 - DNA, 25 bp, Homo sapien
ccgctggcttaagtccaagagtgaa

SEQ ID NO: 170782 - DNA, 25 bp, Homo sapien
actcaacaagtctagtctctccaat

SEQ ID NO: 170783 - DNA, 25 bp, Homo sapien
gccttcggtctgtcgccaaaggaca

SEQ ID NO: 170784 - DNA, 25 bp, Homo sapien
gtcaggaagacgacggtgcagcctt

SEQ ID NO: 170785 - DNA, 25 bp, Homo sapien
gcacaacaggttcttcgagtgggtt

SEQ ID NO: 170786 - DNA, 25 bp, Homo sapien
tatcttgaagcacaacaggttcttc

SEQ ID NO: 170787 - DNA, 25 bp, Homo sapien
ctaaactatcttgaagcacaacagg

SEQ ID NO: 170788 - DNA, 25 bp, Homo sapien
tgaagcacaacaggttcttcgagtg

SEQ ID NO: 170789 - DNA, 25 bp, Homo sapien
cctcttccggcggtcccttggcata

SEQ ID NO: 170790 - DNA, 25 bp, Homo sapien
tcctcttccggcggtcccttggcat

SEQ ID NO: 170791 - DNA, 25 bp, Homo sapien
ttcctcttccggcggtcccttggca

SEQ ID NO: 170792 - DNA, 25 bp, Homo sapien
ctcttccggcggtcccttggcatac

SEQ ID NO: 170793 - DNA, 25 bp, Homo sapien
cactgggttcgccgggctccaggga

SEQ ID NO: 170794 - DNA, 25 bp, Homo sapien
tccggagtgggtatcagctattggt

SEQ ID NO: 170795 - DNA, 25 bp, Homo sapien
gagtgggtatcagctattggtactg

SEQ ID NO: 170796 - DNA, 25 bp, Homo sapien
gaagggtccggagtgggtatcagct

SEQ ID NO: 170797 - DNA, 25 bp, Homo sapien
ggtgaggtgctcaggtacatactcc

SEQ ID NO: 170798 - DNA, 25 bp, Homo sapien
caacgctcagctgttggtgaggtgc

SEQ ID NO: 170799 - DNA, 25 bp, Homo sapien
taaacacagtttgcacactcaagag

SEQ ID NO: 170800 - DNA, 25 bp, Homo sapien
cctgagaatttcacacggcaacatg

SEQ ID NO: 170801 - DNA, 25 bp, Homo sapien
gaagtcagcacttgtattcccatga

SEQ ID NO: 170802 - DNA, 25 bp, Homo sapien
gaagaggccacatcctaggtcacag

SEQ ID NO: 170803 - DNA, 25 bp, Homo sapien
ggttccatgacgcacggcatctaga

SEQ ID NO: 170804 - DNA, 25 bp, Homo sapien
cgtactcataggtggatctctgccc

SEQ ID NO: 170805 - DNA, 25 bp, Homo sapien
acaaacctccctgcaggggtccgca

SEQ ID NO: 170806 - DNA, 25 bp, Homo sapien
acacaaacctccctgcaggggtccg

SEQ ID NO: 170807 - DNA, 25 bp, Homo sapien
aaacctccctgcaggggtccgcagg

SEQ ID NO: 170808 - DNA, 25 bp, Homo sapien
aacctccctgcaggggtccgcagga

SEQ ID NO: 170809 - DNA, 25 bp, Homo sapien
tatagcatgaactgggtccgccagg

SEQ ID NO: 170810 - DNA, 25 bp, Homo sapien
agtaccatatactacgcagactctg

SEQ ID NO: 170811 - DNA, 25 bp, Homo sapien
tgtgaagggccgattcaccatctcc

SEQ ID NO: 170812 - DNA, 25 bp, Homo sapien
gattcaccttcagtagctatagcat

SEQ ID NO: 170813 - DNA, 25 bp, Homo sapien
ctgaaaaccgaggacacagccgtgt

SEQ ID NO: 170814 - DNA, 25 bp, Homo sapien
tgattccaaaagcatcgcctatctg

SEQ ID NO: 170815 - DNA, 25 bp, Homo sapien
tgattatgctatgagctggttccgc

SEQ ID NO: 170816 - DNA, 25 bp, Homo sapien
atggtgggacaacagaatacgccgc

SEQ ID NO: 170817 - DNA, 25 bp, Homo sapien
gctttaccagctactggatcggctg

SEQ ID NO: 170818 - DNA, 25 bp, Homo sapien
gaagatctcctgtaagggttctgga

SEQ ID NO: 170819 - DNA, 25 bp, Homo sapien
aaggcctcggacaccgccatgtatt

SEQ ID NO: 170820 - DNA, 25 bp, Homo sapien
gcctacctgcagtggagcagcctga

SEQ ID NO: 170821 - DNA, 25 bp, Homo sapien
tgagttgaatgtaagtgaatatgag

SEQ ID NO: 170822 - DNA, 25 bp, Homo sapien
gtggccgacataaagtgtgacggaa

SEQ ID NO: 170823 - DNA, 25 bp, Homo sapien
agtgagaaatactatgtagactctg

SEQ ID NO: 170824 - DNA, 25 bp, Homo sapien
agtgaatatgagtgagagaaacagt

SEQ ID NO: 170825 - DNA, 25 bp, Homo sapien
tgaagccttcggagaccctgtccct

SEQ ID NO: 170826 - DNA, 25 bp, Homo sapien
gtgaagccttcggagaccctgtccc

SEQ ID NO: 170827 - DNA, 25 bp, Homo sapien
ggtgaagccttcggagaccctgtcc

SEQ ID NO: 170828 - DNA, 25 bp, Homo sapien
ctctggtggctccatcagtagttac

SEQ ID NO: 170829 - DNA, 25 bp, Homo sapien
tctctggtggctccatcagtagtta

SEQ ID NO: 170830 - DNA, 25 bp, Homo sapien
actgtctctggtggctccatcagta

SEQ ID NO: 170831 - DNA, 25 bp, Homo sapien
ggctgagctgggttttccttgttgc

SEQ ID NO: 170832 - DNA, 25 bp, Homo sapien
gagctgggttttccttgttgctatt

SEQ ID NO: 170833 - DNA, 25 bp, Homo sapien
ggacatgaccatgcatggctgtaca

SEQ ID NO: 170834 - DNA, 25 bp, Homo sapien
gaggacatgaccatgcatggctgta

SEQ ID NO: 170835 - DNA, 25 bp, Homo sapien
gacatgaccatgcatggctgtacat

SEQ ID NO: 170836 - DNA, 25 bp, Homo sapien
cgtatctccaaacgaacagtctgag

SEQ ID NO: 170837 - DNA, 25 bp, Homo sapien
gctgatagagtccatagagggcctg

SEQ ID NO: 170838 - DNA, 25 bp, Homo sapien
agctgatagagtccatagagggcct

SEQ ID NO: 170839 - DNA, 25 bp, Homo sapien
gagctgatagagtccatagagggcc

SEQ ID NO: 170840 - DNA, 25 bp, Homo sapien
ggagctgatagagtccatagagggc

SEQ ID NO: 170841 - DNA, 25 bp, Homo sapien
ctggggggtccctgagactctcctg

SEQ ID NO: 170842 - DNA, 25 bp, Homo sapien
tggagtctgggggaggcttggtaca

SEQ ID NO: 170843 - DNA, 25 bp, Homo sapien
ggggtccctgagactctcctgtgca

SEQ ID NO: 170844 - DNA, 25 bp, Homo sapien
ggtccctgagactctcctgtgcagc

SEQ ID NO: 170845 - DNA, 25 bp, Homo sapien
ggctgagctgggttttccttgttgc

SEQ ID NO: 170846 - DNA, 25 bp, Homo sapien
agctgggttttccttgttgctattt

SEQ ID NO: 170847 - DNA, 25 bp, Homo sapien
gagctgggttttccttgttgctatt

SEQ ID NO: 170848 - DNA, 25 bp, Homo sapien
aaagttgttgacttatggctctttc

SEQ ID NO: 170849 - DNA, 25 bp, Homo sapien
tcaagagtggtgacgccagtatggc

SEQ ID NO: 170850 - DNA, 25 bp, Homo sapien
tcctcaagagtggtgacgccagtat

SEQ ID NO: 170851 - DNA, 25 bp, Homo sapien
caagagtggtgacgccagtatggct

SEQ ID NO: 170852 - DNA, 25 bp, Homo sapien
agtggtgacgccagtatggcttctg

SEQ ID NO: 170853 - DNA, 25 bp, Homo sapien
ggtacagcaaactacgcacagaagt

SEQ ID NO: 170854 - DNA, 25 bp, Homo sapien
gattaccgcggacaaatccacgagc

SEQ ID NO: 170855 - DNA, 25 bp, Homo sapien
tggatgggagggatcatccctatct

SEQ ID NO: 170856 - DNA, 25 bp, Homo sapien
agggcagagtcacgattaccgcgga

SEQ ID NO: 170857 - DNA, 25 bp, Homo sapien
tgcgggagcatcgaagaagatcctg

SEQ ID NO: 170858 - DNA, 25 bp, Homo sapien
accagaaggttgcatgtccggtgcg

SEQ ID NO: 170859 - DNA, 25 bp, Homo sapien
cattattcttgaagggaggaggaac

SEQ ID NO: 170860 - DNA, 25 bp, Homo sapien
cctgtctgtagaagcaggagcgtca

SEQ ID NO: 170861 - DNA, 25 bp, Homo sapien
caaccaggcatgaaggaatacacca

SEQ ID NO: 170862 - DNA, 25 bp, Homo sapien
aagaaaacgttaaccatagacacag

SEQ ID NO: 170863 - DNA, 25 bp, Homo sapien
catgaaggaatacaccacaaaatat

SEQ ID NO: 170864 - DNA, 25 bp, Homo sapien
gaaaacgttaaccatagacacagaa

SEQ ID NO: 170865 - DNA, 25 bp, Homo sapien
acagcatatgctgcgtcggtgaaag

SEQ ID NO: 170866 - DNA, 25 bp, Homo sapien
agtgggttggccgtattagaagcaa

SEQ ID NO: 170867 - DNA, 25 bp, Homo sapien
gctatgcactgggtccgccaggctt

SEQ ID NO: 170868 - DNA, 25 bp, Homo sapien
tagaagcaaagctaacagttacgcg

SEQ ID NO: 170869 - DNA, 25 bp, Homo sapien
tgagatcccagacaggccaagaagt

SEQ ID NO: 170870 - DNA, 25 bp, Homo sapien
aaaggagccctctgatgaacgcatg

SEQ ID NO: 170871 - DNA, 25 bp, Homo sapien
tatgggaaccctggaaagttgtaca

SEQ ID NO: 170872 - DNA, 25 bp, Homo sapien
tgtggagatcacagactagacagtg

SEQ ID NO: 170873 - DNA, 25 bp, Homo sapien
tgaacagtctgagagccgaggacac

SEQ ID NO: 170874 - DNA, 25 bp, Homo sapien
aatgaacagtctgagagccgaggac

SEQ ID NO: 170875 - DNA, 25 bp, Homo sapien
aacagtctgagagccgaggacacgg

SEQ ID NO: 170876 - DNA, 25 bp, Homo sapien
caaatgaacagtctgagagccgagg

SEQ ID NO: 170877 - DNA, 25 bp, Homo sapien
ggctggtgtgggtctcacgtattaa

SEQ ID NO: 170878 - DNA, 25 bp, Homo sapien
tgatgggagtagcacaagctacgcg

SEQ ID NO: 170879 - DNA, 25 bp, Homo sapien
acaagctacgcggactccgtgaagg

SEQ ID NO: 170880 - DNA, 25 bp, Homo sapien
cgtattaatagtgatgggagtagca

SEQ ID NO: 170881 - DNA, 25 bp, Homo sapien
tttgccatttcttccttggaatcca

SEQ ID NO: 170882 - DNA, 25 bp, Homo sapien
cctgggggtggtgaggacaccaggg

SEQ ID NO: 170883 - DNA, 25 bp, Homo sapien
gaaccacctgggggtggtgaggaca

SEQ ID NO: 170884 - DNA, 25 bp, Homo sapien
tcagaaccacctgggggtggtgagg

SEQ ID NO: 170885 - DNA, 25 bp, Homo sapien
ccacctgggggtggtgaggacacca

SEQ ID NO: 170886 - DNA, 25 bp, Homo sapien
ggagaatgtttgtgcaatctatcta

SEQ ID NO: 170887 - DNA, 25 bp, Homo sapien
tgggcgaaacatatgaacacttgct

SEQ ID NO: 170888 - DNA, 25 bp, Homo sapien
gaaacatatgaacacttgcttctca

SEQ ID NO: 170889 - DNA, 25 bp, Homo sapien
aagtgggcgaaacatatgaacactt

SEQ ID NO: 170890 - DNA, 25 bp, Homo sapien
gtcacaggtttgattggatttcccc

SEQ ID NO: 170891 - DNA, 25 bp, Homo sapien
agtaatcatggttctgagggtgacc

SEQ ID NO: 170892 - DNA, 25 bp, Homo sapien
ccatgtggagaagaggcttgaacaa

SEQ ID NO: 170893 - DNA, 25 bp, Homo sapien
tacagacctagttgaccatgtggag

SEQ ID NO: 170894 - DNA, 25 bp, Homo sapien
gccagcacagcatacctgcagatca

SEQ ID NO: 170895 - DNA, 25 bp, Homo sapien
gagtggatgggatggttcaacacct

SEQ ID NO: 170896 - DNA, 25 bp, Homo sapien
ggttacagtttcaccacctatggta

SEQ ID NO: 170897 - DNA, 25 bp, Homo sapien
acctatggtatgaattgggtgccac

SEQ ID NO: 170898 - DNA, 25 bp, Homo sapien
tcttcttggtggcagcagcaacagg

SEQ ID NO: 170899 - DNA, 25 bp, Homo sapien
cttcttggtggcagcagcaacaggt

SEQ ID NO: 170900 - DNA, 25 bp, Homo sapien
tggagcatcctcttcttggtggcag

SEQ ID NO: 170901 - DNA, 25 bp, Homo sapien
tcctcttcttggtggcagcagcaac

SEQ ID NO: 170902 - DNA, 25 bp, Homo sapien
gcatgttggcaaataaagactacag

SEQ ID NO: 170903 - DNA, 25 bp, Homo sapien
gctgggtttagcttcatattgctgg

SEQ ID NO: 170904 - DNA, 25 bp, Homo sapien
gagagaccgactctgttcaggagga

SEQ ID NO: 170905 - DNA, 25 bp, Homo sapien
cagctacactgctagggaatcaggg

SEQ ID NO: 170906 - DNA, 25 bp, Homo sapien
tctgtacaagttgtggctaaaaggg

SEQ ID NO: 170907 - DNA, 25 bp, Homo sapien
agtgggtttaaagtctctgtacaag

SEQ ID NO: 170908 - DNA, 25 bp, Homo sapien
acttgtgggcaggatgctccctcct

SEQ ID NO: 170909 - DNA, 25 bp, Homo sapien
gggcaccaaaagtagccacttgtgg

SEQ ID NO: 170910 - DNA, 25 bp, Homo sapien
ctctaccccaaacagctcagttccc

SEQ ID NO: 170911 - DNA, 25 bp, Homo sapien
taccccaaacagctcagttccccag

SEQ ID NO: 170912 - DNA, 25 bp, Homo sapien
tctctaccccaaacagctcagttcc

SEQ ID NO: 170913 - DNA, 25 bp, Homo sapien
tctaccccaaacagctcagttcccc

SEQ ID NO: 170914 - DNA, 25 bp, Homo sapien
gccaaagcgcccgcggagcagagca

SEQ ID NO: 170915 - DNA, 25 bp, Homo sapien
ccaaagcgcccgcggagcagagcag

SEQ ID NO: 170916 - DNA, 25 bp, Homo sapien
ggccaaagcgcccgcggagcagagc

SEQ ID NO: 170917 - DNA, 25 bp, Homo sapien
cggccaaagcgcccgcggagcagag

SEQ ID NO: 170918 - DNA, 25 bp, Homo sapien
cctgagtgccttgcctggctgtaag

SEQ ID NO: 170919 - DNA, 25 bp, Homo sapien
tgcccatccaacaagtgcaacaaga

SEQ ID NO: 170920 - DNA, 25 bp, Homo sapien
taggagagtgcctttgtccatcgag

SEQ ID NO: 170921 - DNA, 25 bp, Homo sapien
taagatggtacaagcagtccaaagt

SEQ ID NO: 170922 - DNA, 25 bp, Homo sapien
actttatctggtgcagcaaggcgga

SEQ ID NO: 170923 - DNA, 25 bp, Homo sapien
tggccctgagcgaaaaagcaatcta

SEQ ID NO: 170924 - DNA, 25 bp, Homo sapien
ccatggtggactagaatctctaaac

SEQ ID NO: 170925 - DNA, 25 bp, Homo sapien
gaaatgagggctagtccccaaagag

SEQ ID NO: 170926 - DNA, 25 bp, Homo sapien
cagacaccagacacacccgcacaca

SEQ ID NO: 170927 - DNA, 25 bp, Homo sapien
acacccatacccacctacacccaga

SEQ ID NO: 170928 - DNA, 25 bp, Homo sapien
ccagacaccagacacacccgcacac

SEQ ID NO: 170929 - DNA, 25 bp, Homo sapien
tgctgactagtgaactgagtaaccg

SEQ ID NO: 170930 - DNA, 25 bp, Homo sapien
cacgttgctgactagtgaactgagt

SEQ ID NO: 170931 - DNA, 25 bp, Homo sapien
gactagtgaactgagtaaccgccat

SEQ ID NO: 170932 - DNA, 25 bp, Homo sapien
gcacacgttgctgactagtgaactg

SEQ ID NO: 170933 - DNA, 25 bp, Homo sapien
taagtctgctaggtccatttagatt

SEQ ID NO: 170934 - DNA, 25 bp, Homo sapien
taataagtctgctaggtccatttag

SEQ ID NO: 170935 - DNA, 25 bp, Homo sapien
catccttaaacataccacaataata

SEQ ID NO: 170936 - DNA, 25 bp, Homo sapien
cacaataataagtctgctaggtcca

SEQ ID NO: 170937 - DNA, 25 bp, Homo sapien
taggtgcaagaattgggtggatctc

SEQ ID NO: 170938 - DNA, 25 bp, Homo sapien
aaaggctcatgccatgttgctccca

SEQ ID NO: 170939 - DNA, 25 bp, Homo sapien
caagaattgggtggatctctgatca

SEQ ID NO: 170940 - DNA, 25 bp, Homo sapien
tgggaaaggctcatgccatgttgct

SEQ ID NO: 170941 - DNA, 25 bp, Homo sapien
ctcctagcaaatctatgtaacgcat

SEQ ID NO: 170942 - DNA, 25 bp, Homo sapien
aatctcctagcaaatctatgtaacg

SEQ ID NO: 170943 - DNA, 25 bp, Homo sapien
gacaatctcctagcaaatctatgta

SEQ ID NO: 170944 - DNA, 25 bp, Homo sapien
tgacaatctcctagcaaatctatgt

SEQ ID NO: 170945 - DNA, 25 bp, Homo sapien
agtcccattgaaaccggcagccatg

SEQ ID NO: 170946 - DNA, 25 bp, Homo sapien
cagttgagcttcctccatgcagtgg

SEQ ID NO: 170947 - DNA, 25 bp, Homo sapien
aattcaatcagttctttgtgactcc

SEQ ID NO: 170948 - DNA, 25 bp, Homo sapien
ccatctgttataggagttattgaaa

SEQ ID NO: 170949 - DNA, 25 bp, Homo sapien
gcctatgtggaaactaagtattccc

SEQ ID NO: 170950 - DNA, 25 bp, Homo sapien
ttgaagtcaaagaagggcttgttcc

SEQ ID NO: 170951 - DNA, 25 bp, Homo sapien
ctgctgacggcacgggctctgcatc

SEQ ID NO: 170952 - DNA, 25 bp, Homo sapien
cagtctctttcacgattctaagccc

SEQ ID NO: 170953 - DNA, 25 bp, Homo sapien
aacttcatcgatgtgcttcaggtta

SEQ ID NO: 170954 - DNA, 25 bp, Homo sapien
acttcatcgatgtgcttcaggttac

SEQ ID NO: 170955 - DNA, 25 bp, Homo sapien
gtctcgatctggatcccaaaggaca

SEQ ID NO: 170956 - DNA, 25 bp, Homo sapien
cagtctcgatctggatcccaaagga

SEQ ID NO: 170957 - DNA, 25 bp, Homo sapien
ctcgatctggatcccaaaggacatg

SEQ ID NO: 170958 - DNA, 25 bp, Homo sapien
tcagtctcgatctggatcccaaagg

SEQ ID NO: 170959 - DNA, 25 bp, Homo sapien
gctttcaggactgaaaagagcttct

SEQ ID NO: 170960 - DNA, 25 bp, Homo sapien
tttcaggactgaaaagagcttctgc

SEQ ID NO: 170961 - DNA, 25 bp, Homo sapien
gggctttcaggactgaaaagagctt

SEQ ID NO: 170962 - DNA, 25 bp, Homo sapien
ttcaggactgaaaagagcttctgct

SEQ ID NO: 170963 - DNA, 25 bp, Homo sapien
gatggcattccagtactgggttgtg

SEQ ID NO: 170964 - DNA, 25 bp, Homo sapien
tggctgatggcattccagtactggg

SEQ ID NO: 170965 - DNA, 25 bp, Homo sapien
tggcattccagtactgggttgtgaa

SEQ ID NO: 170966 - DNA, 25 bp, Homo sapien
gctgatggcattccagtactgggtt

SEQ ID NO: 170967 - DNA, 25 bp, Homo sapien
tcatggaggaataatctaatatgcc

SEQ ID NO: 170968 - DNA, 25 bp, Homo sapien
tgatctgatcatggaggaataatct

SEQ ID NO: 170969 - DNA, 25 bp, Homo sapien
gatcatggaggaataatctaatatg

SEQ ID NO: 170970 - DNA, 25 bp, Homo sapien
tctgatcatggaggaataatctaat

SEQ ID NO: 170971 - DNA, 25 bp, Homo sapien
aagagtggggtcaccatagcataga

SEQ ID NO: 170972 - DNA, 25 bp, Homo sapien
tcaccatagcatagaacaaagtttc

SEQ ID NO: 170973 - DNA, 25 bp, Homo sapien
tagaatgtccgagtcctgggctcac

SEQ ID NO: 170974 - DNA, 25 bp, Homo sapien
gtagaatgtccgagtcctgggctca

SEQ ID NO: 170975 - DNA, 25 bp, Homo sapien
ctttcaggacaagagtataggatcc

SEQ ID NO: 170976 - DNA, 25 bp, Homo sapien
taatgagcttagagtgtagcaaaac

SEQ ID NO: 170977 - DNA, 25 bp, Homo sapien
aacccagcacagtatgaccagtttg

SEQ ID NO: 170978 - DNA, 25 bp, Homo sapien
ttgggaactgtagaagagacatacc

SEQ ID NO: 170979 - DNA, 25 bp, Homo sapien
gaagaggaagatctgaattgtccac

SEQ ID NO: 170980 - DNA, 25 bp, Homo sapien
tatcagtcaggactcttttataaaa

SEQ ID NO: 170981 - DNA, 25 bp, Homo sapien
tcagtcaggactcttttataaaatg

SEQ ID NO: 170982 - DNA, 25 bp, Homo sapien
atcagtcaggactcttttataaaat

SEQ ID NO: 170983 - DNA, 25 bp, Homo sapien
ccttctctgtgatctggtccaacaa

SEQ ID NO: 170984 - DNA, 25 bp, Homo sapien
tccttctctgtgatctggtccaaca

SEQ ID NO: 170985 - DNA, 25 bp, Homo sapien
tgtgatctggtccaacaattattgc

SEQ ID NO: 170986 - DNA, 25 bp, Homo sapien
gatctggtccaacaattattgccat

SEQ ID NO: 170987 - DNA, 25 bp, Homo sapien
ttttcctcagagaatctttcatctc

SEQ ID NO: 170988 - DNA, 25 bp, Homo sapien
tttgctcctgagactatatattaga

SEQ ID NO: 170989 - DNA, 25 bp, Homo sapien
aacatcttttccagtcctgaagatt

SEQ ID NO: 170990 - DNA, 25 bp, Homo sapien
tatattagaggattacagagtggtg

SEQ ID NO: 170991 - DNA, 25 bp, Homo sapien
taggtgatgattatgtctgcagaac

SEQ ID NO: 170992 - DNA, 25 bp, Homo sapien
ctaggtgatgattatgtctgcagaa

SEQ ID NO: 170993 - DNA, 25 bp, Homo sapien
aggtgatgattatgtctgcagaaca

SEQ ID NO: 170994 - DNA, 25 bp, Homo sapien
atggtacaggatcacaaacaaaatg

SEQ ID NO: 170995 - DNA, 25 bp, Homo sapien
agtgcatacttgcttattcataatg

SEQ ID NO: 170996 - DNA, 25 bp, Homo sapien
atacttgcttattcataatgcatgg

SEQ ID NO: 170997 - DNA, 25 bp, Homo sapien
gccagtgcatacttgcttattcata

SEQ ID NO: 170998 - DNA, 25 bp, Homo sapien
gcatacttgcttattcataatgcat

SEQ ID NO: 170999 - DNA, 25 bp, Homo sapien
agctgcatttctgggcttgagggaa

SEQ ID NO: 171000 - DNA, 25 bp, Homo sapien
tagctaacaaaattaatcgtttcca

SEQ ID NO: 171001 - DNA, 25 bp, Homo sapien
gagaccaaagtagaggagctgcatt

SEQ ID NO: 171002 - DNA, 25 bp, Homo sapien
ggaaagcccatgaggataaagtagc

SEQ ID NO: 171003 - DNA, 25 bp, Homo sapien
cagaggtaattgaaacatgaaatgg

SEQ ID NO: 171004 - DNA, 25 bp, Homo sapien
tatgttgtgactggggttagttttg

SEQ ID NO: 171005 - DNA, 25 bp, Homo sapien
tttgaatgtggctttccaagccctg

SEQ ID NO: 171006 - DNA, 25 bp, Homo sapien
gcaagggaaattatgttgtgactgg

SEQ ID NO: 171007 - DNA, 25 bp, Homo sapien
gaaattatgttgtgactggggttag

SEQ ID NO: 171008 - DNA, 25 bp, Homo sapien
tgaaggcaccaagactgtcacagta

SEQ ID NO: 171009 - DNA, 25 bp, Homo sapien
cacagtaattggtaggtggaaagtt

SEQ ID NO: 171010 - DNA, 25 bp, Homo sapien
tccccatagttcctgaaggcaccaa

SEQ ID NO: 171011 - DNA, 25 bp, Homo sapien
gatggataccaacatgtagaggata

SEQ ID NO: 171012 - DNA, 25 bp, Homo sapien
ggaaaacactgtttttgtgcgtgtg

SEQ ID NO: 171013 - DNA, 25 bp, Homo sapien
gaaaacactgtttttgtgcgtgtgt

SEQ ID NO: 171014 - DNA, 25 bp, Homo sapien
tatggctgcttagtttcctcatgga

SEQ ID NO: 171015 - DNA, 25 bp, Homo sapien
tattcctaacggtatagatcactgg

SEQ ID NO: 171016 - DNA, 25 bp, Homo sapien
agaaaagggtcacaacagtaaagtg

SEQ ID NO: 171017 - DNA, 25 bp, Homo sapien
tttggaggatccaccagaggaacgc

SEQ ID NO: 171018 - DNA, 25 bp, Homo sapien
ccaagaggatgaagcacaccaggca

SEQ ID NO: 171019 - DNA, 25 bp, Homo sapien
tgaagcacaccaggcaatcatgcca

SEQ ID NO: 171020 - DNA, 25 bp, Homo sapien
ggatgaagcacaccaggcaatcatg

SEQ ID NO: 171021 - DNA, 25 bp, Homo sapien
gaggatgaagcacaccaggcaatca

SEQ ID NO: 171022 - DNA, 25 bp, Homo sapien
tggttgagatcatgaacacccccag

SEQ ID NO: 171023 - DNA, 25 bp, Homo sapien
agatcatgaacacccccagaatata

SEQ ID NO: 171024 - DNA, 25 bp, Homo sapien
acccccagaatatatgtgtcaacac

SEQ ID NO: 171025 - DNA, 25 bp, Homo sapien
cccccagaatatatgtgtcaacaca

SEQ ID NO: 171026 - DNA, 25 bp, Homo sapien
tgtagaggcttacagatagccacgt

SEQ ID NO: 171027 - DNA, 25 bp, Homo sapien
tgaggccagggacatgtcaatgaag

SEQ ID NO: 171028 - DNA, 25 bp, Homo sapien
ggagagattgcccagcagaaagtac

SEQ ID NO: 171029 - DNA, 25 bp, Homo sapien
taactgactcagagcatggaagatg

SEQ ID NO: 171030 - DNA, 25 bp, Homo sapien
ttcggttaccgcagactgattgctc

SEQ ID NO: 171031 - DNA, 25 bp, Homo sapien
ggacagaccccgtagtatgaattcg

SEQ ID NO: 171032 - DNA, 25 bp, Homo sapien
ggctctgatgcaatggtgaccacaa

SEQ ID NO: 171033 - DNA, 25 bp, Homo sapien
gaaaatctggagttctaaagaactg

SEQ ID NO: 171034 - DNA, 25 bp, Homo sapien
ttctggaaggactctagcatttcca

SEQ ID NO: 171035 - DNA, 25 bp, Homo sapien
tctggaaggactctagcatttccag

SEQ ID NO: 171036 - DNA, 25 bp, Homo sapien
ctggaaggactctagcatttccagt

SEQ ID NO: 171037 - DNA, 25 bp, Homo sapien
tggaaggactctagcatttccagtt

SEQ ID NO: 171038 - DNA, 25 bp, Homo sapien
ttaagaaactcactcaaaactgctc

SEQ ID NO: 171039 - DNA, 25 bp, Homo sapien
aagaaactcactcaaaactgctcaa

SEQ ID NO: 171040 - DNA, 25 bp, Homo sapien
aaactcactcaaaactgctcaacta

SEQ ID NO: 171041 - DNA, 25 bp, Homo sapien
gaaactcactcaaaactgctcaact

SEQ ID NO: 171042 - DNA, 25 bp, Homo sapien
ttttgccaacttcagggaatagcca

SEQ ID NO: 171043 - DNA, 25 bp, Homo sapien
caatgagaacctaattctctggtgg

SEQ ID NO: 171044 - DNA, 25 bp, Homo sapien
cagggaatagccaaactacaattta

SEQ ID NO: 171045 - DNA, 25 bp, Homo sapien
gcctaaaacttctatgtggatgaat

SEQ ID NO: 171046 - DNA, 25 bp, Homo sapien
tgtattagccaaggtcaccgaagaa

SEQ ID NO: 171047 - DNA, 25 bp, Homo sapien
tcacaggagaatgacaaaattcccc

SEQ ID NO: 171048 - DNA, 25 bp, Homo sapien
caatgggtcaagaagtgtattagcc

SEQ ID NO: 171049 - DNA, 25 bp, Homo sapien
tgttgagcaagaagcggatccatta

SEQ ID NO: 171050 - DNA, 25 bp, Homo sapien
gagaacctactgaaaggccgcacat

SEQ ID NO: 171051 - DNA, 25 bp, Homo sapien
acagcgtcactaccatgatatgtgc

SEQ ID NO: 171052 - DNA, 25 bp, Homo sapien
cgctgtctgatagcgaggaggatca

SEQ ID NO: 171053 - DNA, 25 bp, Homo sapien
agagtgctttggatgtgctaccggc

SEQ ID NO: 171054 - DNA, 25 bp, Homo sapien
gccagcaccagcctgatgcaagtct

SEQ ID NO: 171055 - DNA, 25 bp, Homo sapien
acttgactgatggagtgcacaaatc

SEQ ID NO: 171056 - DNA, 25 bp, Homo sapien
cagcctgatgcaagtctgccaactc

SEQ ID NO: 171057 - DNA, 25 bp, Homo sapien
tgcacaaatccaacgacccatgaag

SEQ ID NO: 171058 - DNA, 25 bp, Homo sapien
ctccaaaggagatgagtttttgatc

SEQ ID NO: 171059 - DNA, 25 bp, Homo sapien
gagatgagtttttgatcactaagga

SEQ ID NO: 171060 - DNA, 25 bp, Homo sapien
tgagtttttgatcactaaggaaatc

SEQ ID NO: 171061 - DNA, 25 bp, Homo sapien
aaggagatgagtttttgatcactaa

SEQ ID NO: 171062 - DNA, 25 bp, Homo sapien
caggcagggatcagaaattacagtg

SEQ ID NO: 171063 - DNA, 25 bp, Homo sapien
tctgacaccaaggaatagttctgtg

SEQ ID NO: 171064 - DNA, 25 bp, Homo sapien
gagaaggttacccagcataatggcc

SEQ ID NO: 171065 - DNA, 25 bp, Homo sapien
tcgtgaagtgcagagtccatgcaac

SEQ ID NO: 171066 - DNA, 25 bp, Homo sapien
gtagcacgttcactttccctggaaa

SEQ ID NO: 171067 - DNA, 25 bp, Homo sapien
ttgaacatgttgggccagcagaagt

SEQ ID NO: 171068 - DNA, 25 bp, Homo sapien
cttcttactggaaagtagcacgttc

SEQ ID NO: 171069 - DNA, 25 bp, Homo sapien
caaaggctctaactaaggtgtatgt

SEQ ID NO: 171070 - DNA, 25 bp, Homo sapien
ctactgtcagtcacaacagtaggag

SEQ ID NO: 171071 - DNA, 25 bp, Homo sapien
agcatggactccctactgtcagtca

SEQ ID NO: 171072 - DNA, 25 bp, Homo sapien
gactccctactgtcagtcacaacag

SEQ ID NO: 171073 - DNA, 25 bp, Homo sapien
tactgtcagtcacaacagtaggagc

SEQ ID NO: 171074 - DNA, 25 bp, Homo sapien
ctgttagaaatgttgacaatacctc

SEQ ID NO: 171075 - DNA, 25 bp, Homo sapien
gttagaaatgttgacaatacctcca

SEQ ID NO: 171076 - DNA, 25 bp, Homo sapien
tgacaatacctccaccaaaattaat

SEQ ID NO: 171077 - DNA, 25 bp, Homo sapien
caccaaaattaataaatttgtccat

SEQ ID NO: 171078 - DNA, 25 bp, Homo sapien
ctcccatacccagttgccttaaatt

SEQ ID NO: 171079 - DNA, 25 bp, Homo sapien
ttgctttagccttcaagtcagttac

SEQ ID NO: 171080 - DNA, 25 bp, Homo sapien
tcaagtcagttacaggcctagttgc

SEQ ID NO: 171081 - DNA, 25 bp, Homo sapien
tgctgaagttgaaagacagtagaca

SEQ ID NO: 171082 - DNA, 25 bp, Homo sapien
tgcagagtctttttttaatggctgc

SEQ ID NO: 171083 - DNA, 25 bp, Homo sapien
cagagtctttttttaatggctgctt

SEQ ID NO: 171084 - DNA, 25 bp, Homo sapien
gcagagtctttttttaatggctgct

SEQ ID NO: 171085 - DNA, 25 bp, Homo sapien
atgcagagtctttttttaatggctg

SEQ ID NO: 171086 - DNA, 25 bp, Homo sapien
ttatctaccgagtatctgctgaagg

SEQ ID NO: 171087 - DNA, 25 bp, Homo sapien
tatctaccgagtatctgctgaaggg

SEQ ID NO: 171088 - DNA, 25 bp, Homo sapien
gagcccactgtcagcaatgaccagg

SEQ ID NO: 171089 - DNA, 25 bp, Homo sapien
tagcagcacggtacctaactgagaa

SEQ ID NO: 171090 - DNA, 25 bp, Homo sapien
tagataaagacacacggagcaaaga

SEQ ID NO: 171091 - DNA, 25 bp, Homo sapien
ccttagaggatcgactagcagcacg

SEQ ID NO: 171092 - DNA, 25 bp, Homo sapien
ttgactagatgagtgcacaaatcca

SEQ ID NO: 171093 - DNA, 25 bp, Homo sapien
cagtagcccagtgagcacccgtggg

SEQ ID NO: 171094 - DNA, 25 bp, Homo sapien
aaatccaactgcataggaggataac

SEQ ID NO: 171095 - DNA, 25 bp, Homo sapien
tgcataggaggataacagtagccca

SEQ ID NO: 171096 - DNA, 25 bp, Homo sapien
gggtttgcatatggcaacatacctg

SEQ ID NO: 171097 - DNA, 25 bp, Homo sapien
tatggcaacatacctgtctattgcc

SEQ ID NO: 171098 - DNA, 25 bp, Homo sapien
ttgcatatggcaacatacctgtcta

SEQ ID NO: 171099 - DNA, 25 bp, Homo sapien
atggaggggtttgcatatggcaaca

SEQ ID NO: 171100 - DNA, 25 bp, Homo sapien
gccaggatcatatcaatgcaggaga

SEQ ID NO: 171101 - DNA, 25 bp, Homo sapien
gatggtcttacgttctcggaggaaa

SEQ ID NO: 171102 - DNA, 25 bp, Homo sapien
cacagtcaccaagatgagcaggttt

SEQ ID NO: 171103 - DNA, 25 bp, Homo sapien
cccaggaggtgcataaagaacatct

SEQ ID NO: 171104 - DNA, 25 bp, Homo sapien
actacagaagtgactcctagtatgt

SEQ ID NO: 171105 - DNA, 25 bp, Homo sapien
agcaactacagaagtgactcctagt

SEQ ID NO: 171106 - DNA, 25 bp, Homo sapien
caactacagaagtgactcctagtat

SEQ ID NO: 171107 - DNA, 25 bp, Homo sapien
gcaactacagaagtgactcctagta

SEQ ID NO: 171108 - DNA, 25 bp, Homo sapien
gggttccggtacctctctgctacag

SEQ ID NO: 171109 - DNA, 25 bp, Homo sapien
tgaaccactgggatagatgagcttg

SEQ ID NO: 171110 - DNA, 25 bp, Homo sapien
caccagggtgggtttgcttgcctct

SEQ ID NO: 171111 - DNA, 25 bp, Homo sapien
tctgtcccacagcaaactctaaagg

SEQ ID NO: 171112 - DNA, 25 bp, Homo sapien
aggcttgccagcctttgaccaacaa

SEQ ID NO: 171113 - DNA, 25 bp, Homo sapien
tgccagcctttgaccaacaacagat

SEQ ID NO: 171114 - DNA, 25 bp, Homo sapien
ttgaccaacaacagatcctgaaggg

SEQ ID NO: 171115 - DNA, 25 bp, Homo sapien
gcctttgaccaacaacagatcctga

SEQ ID NO: 171116 - DNA, 25 bp, Homo sapien
cctgcactgagacttatgatctgga

SEQ ID NO: 171117 - DNA, 25 bp, Homo sapien
ggtaattgctaaaagtggacagttg

SEQ ID NO: 171118 - DNA, 25 bp, Homo sapien
taactgtgcagcatcgatcctctga

SEQ ID NO: 171119 - DNA, 25 bp, Homo sapien
gatctggagttgctggtaattgcta

SEQ ID NO: 171120 - DNA, 25 bp, Homo sapien
catagtcttgggcatattattcacc

SEQ ID NO: 171121 - DNA, 25 bp, Homo sapien
tgtaattactatagccaaaccactg

SEQ ID NO: 171122 - DNA, 25 bp, Homo sapien
gccactgtcaagcttaaacaagaac

SEQ ID NO: 171123 - DNA, 25 bp, Homo sapien
caaaccactgattgcttacaggact

SEQ ID NO: 171124 - DNA, 25 bp, Homo sapien
gcccttcggcaaccactctgtagat

SEQ ID NO: 171125 - DNA, 25 bp, Homo sapien
tgtggtcccaatgtggtagacagca

SEQ ID NO: 171126 - DNA, 25 bp, Homo sapien
taagaaccactctcctactgggcaa

SEQ ID NO: 171127 - DNA, 25 bp, Homo sapien
tacaggtagtcattgttgccaacag

SEQ ID NO: 171128 - DNA, 25 bp, Homo sapien
catacttccgtcacaaggtccccag

SEQ ID NO: 171129 - DNA, 25 bp, Homo sapien
atacttccgtcacaaggtccccagc

SEQ ID NO: 171130 - DNA, 25 bp, Homo sapien
caaggtccccagctatttcaaaagc

SEQ ID NO: 171131 - DNA, 25 bp, Homo sapien
ccatacttccgtcacaaggtcccca

SEQ ID NO: 171132 - DNA, 25 bp, Homo sapien
agtagcccttatcctgcacttgcct

SEQ ID NO: 171133 - DNA, 25 bp, Homo sapien
cattgtacaagtagcccttatcctg

SEQ ID NO: 171134 - DNA, 25 bp, Homo sapien
tatccattccattgtacaagtagcc

SEQ ID NO: 171135 - DNA, 25 bp, Homo sapien
gtggcttgggggctttatccattcc

SEQ ID NO: 171136 - DNA, 25 bp, Homo sapien
tatttctcatgtttggacctgctat

SEQ ID NO: 171137 - DNA, 25 bp, Homo sapien
catcctctgtcgtataagggagcac

SEQ ID NO: 171138 - DNA, 25 bp, Homo sapien
gagcaaggctatttccacatgcacc

SEQ ID NO: 171139 - DNA, 25 bp, Homo sapien
tcaagctggcctgcaccaatacctt

SEQ ID NO: 171140 - DNA, 25 bp, Homo sapien
taaagcctacataactcagtggtct

SEQ ID NO: 171141 - DNA, 25 bp, Homo sapien
aaagcctacataactcagtggtctc

SEQ ID NO: 171142 - DNA, 25 bp, Homo sapien
ctggaagcccctgtactatcaaagc

SEQ ID NO: 171143 - DNA, 25 bp, Homo sapien
gtttaaagcaacaccttctggaagc

SEQ ID NO: 171144 - DNA, 25 bp, Homo sapien
taaagcaacaccttctggaagcccc

SEQ ID NO: 171145 - DNA, 25 bp, Homo sapien
aattctcagggtgtttaaagcaaca

SEQ ID NO: 171146 - DNA, 25 bp, Homo sapien
cacttgtcccaatctggaaaattat

SEQ ID NO: 171147 - DNA, 25 bp, Homo sapien
tcccaatctggaaaattatcttatc

SEQ ID NO: 171148 - DNA, 25 bp, Homo sapien
tgtcccaatctggaaaattatctta

SEQ ID NO: 171149 - DNA, 25 bp, Homo sapien
ccaatctggaaaattatcttatcct

SEQ ID NO: 171150 - DNA, 25 bp, Homo sapien
caacattacagacgtggcagccccc

SEQ ID NO: 171151 - DNA, 25 bp, Homo sapien
tgcccaacattacagacgtggcagc

SEQ ID NO: 171152 - DNA, 25 bp, Homo sapien
gcccaacattacagacgtggcagcc

SEQ ID NO: 171153 - DNA, 25 bp, Homo sapien
cccaacattacagacgtggcagccc

SEQ ID NO: 171154 - DNA, 25 bp, Homo sapien
accctcatgggcaatggttccatca

SEQ ID NO: 171155 - DNA, 25 bp, Homo sapien
tcctgaccctcatgggcaatggttc

SEQ ID NO: 171156 - DNA, 25 bp, Homo sapien
cctgaccctcatgggcaatggttcc

SEQ ID NO: 171157 - DNA, 25 bp, Homo sapien
tgaccctcatgggcaatggttccat

SEQ ID NO: 171158 - DNA, 25 bp, Homo sapien
gactagctccaccttaagttctcta

SEQ ID NO: 171159 - DNA, 25 bp, Homo sapien
gagttgactagctccaccttaagtt

SEQ ID NO: 171160 - DNA, 25 bp, Homo sapien
cagagcccctctactagagttgact

SEQ ID NO: 171161 - DNA, 25 bp, Homo sapien
tctactagagttgactagctccacc

SEQ ID NO: 171162 - DNA, 25 bp, Homo sapien
caagatcatctcgttctctggctgc

SEQ ID NO: 171163 - DNA, 25 bp, Homo sapien
catgaaaatcttcaacagccccagc

SEQ ID NO: 171164 - DNA, 25 bp, Homo sapien
ccttcttggagatatgttatgtcac

SEQ ID NO: 171165 - DNA, 25 bp, Homo sapien
tgttgtttacctcctgaccctcatg

SEQ ID NO: 171166 - DNA, 25 bp, Homo sapien
cctgtgatagagcttgtcttttctg

SEQ ID NO: 171167 - DNA, 25 bp, Homo sapien
aaaggccctgtgatagagcttgtct

SEQ ID NO: 171168 - DNA, 25 bp, Homo sapien
aaaaaaggccctgtgatagagcttg

SEQ ID NO: 171169 - DNA, 25 bp, Homo sapien
tgatagagcttgtcttttctgtctt

SEQ ID NO: 171170 - DNA, 25 bp, Homo sapien
tcttgattatttgcccagttgtgta

SEQ ID NO: 171171 - DNA, 25 bp, Homo sapien
cagatcttgattatttgcccagttg

SEQ ID NO: 171172 - DNA, 25 bp, Homo sapien
gattatttgcccagttgtgtaacat

SEQ ID NO: 171173 - DNA, 25 bp, Homo sapien
cctttcagatcttgattatttgccc

SEQ ID NO: 171174 - DNA, 25 bp, Homo sapien
aattctggtctgtgtatgctgggta

SEQ ID NO: 171175 - DNA, 25 bp, Homo sapien
tcgatgattatctttgggcccttcc

SEQ ID NO: 171176 - DNA, 25 bp, Homo sapien
tcttgggatcttacactctggtcat

SEQ ID NO: 171177 - DNA, 25 bp, Homo sapien
tccctctggtgctggtcgaactaaa

SEQ ID NO: 171178 - DNA, 25 bp, Homo sapien
aaagaagcagctcggtcttgtgcat

SEQ ID NO: 171179 - DNA, 25 bp, Homo sapien
ttctctgttccaagcataagtggct

SEQ ID NO: 171180 - DNA, 25 bp, Homo sapien
agagaggtttcttgctcggaaagga

SEQ ID NO: 171181 - DNA, 25 bp, Homo sapien
ggagaatgtatagaggacccatagt

SEQ ID NO: 171182 - DNA, 25 bp, Homo sapien
tgatcattttctgtgtgatgtagac

SEQ ID NO: 171183 - DNA, 25 bp, Homo sapien
gtgtgatgtagacccactgatggca

SEQ ID NO: 171184 - DNA, 25 bp, Homo sapien
tttctgtgtgatgtagacccactga

SEQ ID NO: 171185 - DNA, 25 bp, Homo sapien
tgatgtagacccactgatggcattg

SEQ ID NO: 171186 - DNA, 25 bp, Homo sapien
catcgccatccttttgtacaagcaa

SEQ ID NO: 171187 - DNA, 25 bp, Homo sapien
catgtatctgatcatattttgacga

SEQ ID NO: 171188 - DNA, 25 bp, Homo sapien
tgacgagcttctagtttcagaaatg

SEQ ID NO: 171189 - DNA, 25 bp, Homo sapien
tgtacaagcaaaactcttcatgtat

SEQ ID NO: 171190 - DNA, 25 bp, Homo sapien
gagattcaaatcttcgttcccaaga

SEQ ID NO: 171191 - DNA, 25 bp, Homo sapien
cgttcccaagaatacctgatccttc

SEQ ID NO: 171192 - DNA, 25 bp, Homo sapien
aatcttcgttcccaagaatacctga

SEQ ID NO: 171193 - DNA, 25 bp, Homo sapien
tcaaatcttcgttcccaagaatacc

SEQ ID NO: 171194 - DNA, 25 bp, Homo sapien
cttattggattccttggatacccaa

SEQ ID NO: 171195 - DNA, 25 bp, Homo sapien
ctgccatcatgactgtaaggttctg

SEQ ID NO: 171196 - DNA, 25 bp, Homo sapien
tggtcctaatatcattgatcacttc

SEQ ID NO: 171197 - DNA, 25 bp, Homo sapien
tctacatctcccaactccccttctg

SEQ ID NO: 171198 - DNA, 25 bp, Homo sapien
tggagagacatgacatctaaatgaa

SEQ ID NO: 171199 - DNA, 25 bp, Homo sapien
ctaccatgtacattgcaaagaaaac

SEQ ID NO: 171200 - DNA, 25 bp, Homo sapien
taccacactggttatgttctaacag

SEQ ID NO: 171201 - DNA, 25 bp, Homo sapien
tactaaaaggctagattaacacagt

SEQ ID NO: 171202 - DNA, 25 bp, Homo sapien
gtatttactacaaccaccaactcaa

SEQ ID NO: 171203 - DNA, 25 bp, Homo sapien
gtataactagaaatccaaagaagtg

SEQ ID NO: 171204 - DNA, 25 bp, Homo sapien
tcaccctggatctatttctatattt

SEQ ID NO: 171205 - DNA, 25 bp, Homo sapien
caccctggatctatttctatattta

SEQ ID NO: 171206 - DNA, 25 bp, Homo sapien
ttctggtgtaacctcctctacagcc

SEQ ID NO: 171207 - DNA, 25 bp, Homo sapien
tgagattctggtgtaacctcctcta

SEQ ID NO: 171208 - DNA, 25 bp, Homo sapien
tagaagacaccacagtatcgtagga

SEQ ID NO: 171209 - DNA, 25 bp, Homo sapien
aaacctactgcattgcttgtccaag

SEQ ID NO: 171210 - DNA, 25 bp, Homo sapien
ccaaccggaccttaactgtggcctg

SEQ ID NO: 171211 - DNA, 25 bp, Homo sapien
tgacactacactagaattaggcaca

SEQ ID NO: 171212 - DNA, 25 bp, Homo sapien
agcctggttaacatagtaagacctc

SEQ ID NO: 171213 - DNA, 25 bp, Homo sapien
ctggttaacatagtaagacctcatc

SEQ ID NO: 171214 - DNA, 25 bp, Homo sapien
acaggtgtgagccactgcacccggc

SEQ ID NO: 171215 - DNA, 25 bp, Homo sapien
cctcatctctactaataattttttt

SEQ ID NO: 171216 - DNA, 25 bp, Homo sapien
accacgagtttatgggtgcagtgag

SEQ ID NO: 171217 - DNA, 25 bp, Homo sapien
gattgcttaagaccacgagtttatg

SEQ ID NO: 171218 - DNA, 25 bp, Homo sapien
agaggttacacaaatatgcttgggt

SEQ ID NO: 171219 - DNA, 25 bp, Homo sapien
aaaagaggttacacaaatatgcttg

SEQ ID NO: 171220 - DNA, 25 bp, Homo sapien
tccatggagtaaggagtcaacctga

SEQ ID NO: 171221 - DNA, 25 bp, Homo sapien
taatattggccaaagctgcacaact

SEQ ID NO: 171222 - DNA, 25 bp, Homo sapien
cacaactaggtttactttcctctgg

SEQ ID NO: 171223 - DNA, 25 bp, Homo sapien
gctcatgaattataggaagtgtacc

SEQ ID NO: 171224 - DNA, 25 bp, Homo sapien
gaagtgtaccactctgggatgggac

SEQ ID NO: 171225 - DNA, 25 bp, Homo sapien
tgcatcagccaaagttccaatacta

SEQ ID NO: 171226 - DNA, 25 bp, Homo sapien
gctgtacagcaccatctcctatggg

SEQ ID NO: 171227 - DNA, 25 bp, Homo sapien
aacctgccaggagctgagagtgtgc

SEQ ID NO: 171228 - DNA, 25 bp, Homo sapien
gagagtgtgctgagaaaaccaacca

SEQ ID NO: 171229 - DNA, 25 bp, Homo sapien
tgcctgctctatgcaaacctgccag

SEQ ID NO: 171230 - DNA, 25 bp, Homo sapien
tcttgaccaagtaaggtttgtacca

SEQ ID NO: 171231 - DNA, 25 bp, Homo sapien
taagagcaattgtatataaagccac

SEQ ID NO: 171232 - DNA, 25 bp, Homo sapien
tactcttattcactgcattgacagg

SEQ ID NO: 171233 - DNA, 25 bp, Homo sapien
cctaatgctagttgacgggttggtg

SEQ ID NO: 171234 - DNA, 25 bp, Homo sapien
taacatatgaaattcggtggataca

SEQ ID NO: 171235 - DNA, 25 bp, Homo sapien
ggaccatagcaaatgcgaattaatc

SEQ ID NO: 171236 - DNA, 25 bp, Homo sapien
aaaggtatgaacctgctctctcacg

SEQ ID NO: 171237 - DNA, 25 bp, Homo sapien
catagcttgttagttctgctaagaa

SEQ ID NO: 171238 - DNA, 25 bp, Homo sapien
caaaatccaatctcataaccacatc

SEQ ID NO: 171239 - DNA, 25 bp, Homo sapien
ataaccacatctctgatgttccctg

SEQ ID NO: 171240 - DNA, 25 bp, Homo sapien
aaatccaatctcataaccacatctc

SEQ ID NO: 171241 - DNA, 25 bp, Homo sapien
tcaaaatccaatctcataaccacat

SEQ ID NO: 171242 - DNA, 25 bp, Homo sapien
tggctagctgccaacgtgcctccat

SEQ ID NO: 171243 - DNA, 25 bp, Homo sapien
ggctggctagctgccaacgtgcctc

SEQ ID NO: 171244 - DNA, 25 bp, Homo sapien
ctggctggctagctgccaacgtgcc

SEQ ID NO: 171245 - DNA, 25 bp, Homo sapien
ctggctagctgccaacgtgcctcca

SEQ ID NO: 171246 - DNA, 25 bp, Homo sapien
cgaataggcattttaccgagagaaa

SEQ ID NO: 171247 - DNA, 25 bp, Homo sapien
ttgacatccaatacagcagtgtgca

SEQ ID NO: 171248 - DNA, 25 bp, Homo sapien
tctttaataaaaggtgctgggctat

SEQ ID NO: 171249 - DNA, 25 bp, Homo sapien
tagacaaacgattagtacagggaat

SEQ ID NO: 171250 - DNA, 25 bp, Homo sapien
tattcaaggcactgatcaaaaactg

SEQ ID NO: 171251 - DNA, 25 bp, Homo sapien
tggtgcagtccatgaagagtgttct

SEQ ID NO: 171252 - DNA, 25 bp, Homo sapien
aactgaacaggactggaccaagaac

SEQ ID NO: 171253 - DNA, 25 bp, Homo sapien
catggagaggtatgcaagggcttcc

SEQ ID NO: 171254 - DNA, 25 bp, Homo sapien
gatacgaagtgtaatacaggcaggg

SEQ ID NO: 171255 - DNA, 25 bp, Homo sapien
tcccatggcaagatcccaagacttc

SEQ ID NO: 171256 - DNA, 25 bp, Homo sapien
gaagagacaggagagatatgccaga

SEQ ID NO: 171257 - DNA, 25 bp, Homo sapien
tatgtggccctgtagagagctggaa

SEQ ID NO: 171258 - DNA, 25 bp, Homo sapien
tcaccactagcaggaggggcgtctc

SEQ ID NO: 171259 - DNA, 25 bp, Homo sapien
tgtggtcgcgatgccactgtggcaa

SEQ ID NO: 171260 - DNA, 25 bp, Homo sapien
cgcgatgccactgtggcaacagcct

SEQ ID NO: 171261 - DNA, 25 bp, Homo sapien
caggaggggcgtctccactcgaaca

SEQ ID NO: 171262 - DNA, 25 bp, Homo sapien
tcctttgtgctgaattcggtgaagc

SEQ ID NO: 171263 - DNA, 25 bp, Homo sapien
tgaagccgcaggttgggctcaggaa

SEQ ID NO: 171264 - DNA, 25 bp, Homo sapien
gctgaattcggtgaagccgcaggtt

SEQ ID NO: 171265 - DNA, 25 bp, Homo sapien
ttgtgctgaattcggtgaagccgca

SEQ ID NO: 171266 - DNA, 25 bp, Homo sapien
gtacaccatcactgcatagcaaggt

SEQ ID NO: 171267 - DNA, 25 bp, Homo sapien
cactgcatagcaaggtccatctgaa

SEQ ID NO: 171268 - DNA, 25 bp, Homo sapien
tccccagctctgcactatattgtac

SEQ ID NO: 171269 - DNA, 25 bp, Homo sapien
tgcactatattgtacaccatcactg

SEQ ID NO: 171270 - DNA, 25 bp, Homo sapien
tgcccacgggatagtcacagaagga

SEQ ID NO: 171271 - DNA, 25 bp, Homo sapien
gaaaccagagaatcagggagaccta

SEQ ID NO: 171272 - DNA, 25 bp, Homo sapien
ggatccagtgcctagaaagacaatg

SEQ ID NO: 171273 - DNA, 25 bp, Homo sapien
gatgaatccagtcaaagcctcagaa

SEQ ID NO: 171274 - DNA, 25 bp, Homo sapien
tccagggtcactttctgcccagagg

SEQ ID NO: 171275 - DNA, 25 bp, Homo sapien
caccccaggctgaagcgtactcagt

SEQ ID NO: 171276 - DNA, 25 bp, Homo sapien
tgatagtgcccatcactgcaagggc

SEQ ID NO: 171277 - DNA, 25 bp, Homo sapien
ttcccaggatgacggcaccgctgtt

SEQ ID NO: 171278 - DNA, 25 bp, Homo sapien
gcagctttttggtcttcacctttcc

SEQ ID NO: 171279 - DNA, 25 bp, Homo sapien
ctgcagctttttggtcttcaccttt

SEQ ID NO: 171280 - DNA, 25 bp, Homo sapien
tgcagctttttggtcttcacctttc

SEQ ID NO: 171281 - DNA, 25 bp, Homo sapien
ctctcaaggaggctggttaatctat

SEQ ID NO: 171282 - DNA, 25 bp, Homo sapien
aaggaggctggttaatctatccagg

SEQ ID NO: 171283 - DNA, 25 bp, Homo sapien
tcaaggaggctggttaatctatcca

SEQ ID NO: 171284 - DNA, 25 bp, Homo sapien
gaggctggttaatctatccaggaat

SEQ ID NO: 171285 - DNA, 25 bp, Homo sapien
tcaggattgctagaagcttttctgt

SEQ ID NO: 171286 - DNA, 25 bp, Homo sapien
aggtcaggattgctagaagcttttc

SEQ ID NO: 171287 - DNA, 25 bp, Homo sapien
gaaggtcaggattgctagaagcttt

SEQ ID NO: 171288 - DNA, 25 bp, Homo sapien
ggtcaggattgctagaagcttttct

SEQ ID NO: 171289 - DNA, 25 bp, Homo sapien
ggagatcttagggttctggccagta

SEQ ID NO: 171290 - DNA, 25 bp, Homo sapien
gagatcttagggttctggccagtag

SEQ ID NO: 171291 - DNA, 25 bp, Homo sapien
catctgaacagccaacttagcctgt

SEQ ID NO: 171292 - DNA, 25 bp, Homo sapien
gacatggtgagaatgttcatcttca

SEQ ID NO: 171293 - DNA, 25 bp, Homo sapien
tcggacactgtccatgacatggtga

SEQ ID NO: 171294 - DNA, 25 bp, Homo sapien
catcttcagtgtcagtccgcagctg

SEQ ID NO: 171295 - DNA, 25 bp, Homo sapien
tttgcaaggagactttgttcctgca

SEQ ID NO: 171296 - DNA, 25 bp, Homo sapien
aagcaccattgacaggttttgcaag

SEQ ID NO: 171297 - DNA, 25 bp, Homo sapien
tgacaggttttgcaaggagactttg

SEQ ID NO: 171298 - DNA, 25 bp, Homo sapien
attgacaggttttgcaaggagactt

SEQ ID NO: 171299 - DNA, 25 bp, Homo sapien
ggtattcatgtcctagggaaactca

SEQ ID NO: 171300 - DNA, 25 bp, Homo sapien
ccctcctgattctgtcctagttcaa

SEQ ID NO: 171301 - DNA, 25 bp, Homo sapien
catccacagggatcagcttagctgc

SEQ ID NO: 171302 - DNA, 25 bp, Homo sapien
tagctgctagcttttcttcacttcc

SEQ ID NO: 171303 - DNA, 25 bp, Homo sapien
gctcctgagaagcaggtgtgggcag

SEQ ID NO: 171304 - DNA, 25 bp, Homo sapien
tgtgggcagctgcaacatccccttt

SEQ ID NO: 171305 - DNA, 25 bp, Homo sapien
gggtgagggctcctgagaagcaggt

SEQ ID NO: 171306 - DNA, 25 bp, Homo sapien
tgggcagctgcaacatccccttttt

SEQ ID NO: 171307 - DNA, 25 bp, Homo sapien
tggttccaggcttccaccagctcgg

SEQ ID NO: 171308 - DNA, 25 bp, Homo sapien
ggttccaggcttccaccagctcggg

SEQ ID NO: 171309 - DNA, 25 bp, Homo sapien
gctggttccaggcttccaccagctc

SEQ ID NO: 171310 - DNA, 25 bp, Homo sapien
ccagctggttccaggcttccaccag

SEQ ID NO: 171311 - DNA, 25 bp, Homo sapien
agaagctcctcagccttagggctat

SEQ ID NO: 171312 - DNA, 25 bp, Homo sapien
tatagtcaggagtcacatttagtgc

SEQ ID NO: 171313 - DNA, 25 bp, Homo sapien
tcctcagccttagggctatagtcag

SEQ ID NO: 171314 - DNA, 25 bp, Homo sapien
ccagttagcattagaacttgtgcct

SEQ ID NO: 171315 - DNA, 25 bp, Homo sapien
tagcagtctcgaaatgagtagagct

SEQ ID NO: 171316 - DNA, 25 bp, Homo sapien
tcaacactatgtgtctcgaaatagc

SEQ ID NO: 171317 - DNA, 25 bp, Homo sapien
tccatctgctgtagggttttctcca

SEQ ID NO: 171318 - DNA, 25 bp, Homo sapien
atgagtagagctgatccacgagttc

SEQ ID NO: 171319 - DNA, 25 bp, Homo sapien
gcaatttctgcaagatcggcttgac

SEQ ID NO: 171320 - DNA, 25 bp, Homo sapien
atttctgcaagatcggcttgacttc

SEQ ID NO: 171321 - DNA, 25 bp, Homo sapien
caatttctgcaagatcggcttgact

SEQ ID NO: 171322 - DNA, 25 bp, Homo sapien
aatttctgcaagatcggcttgactt

SEQ ID NO: 171323 - DNA, 25 bp, Homo sapien
cacccccaactttataaccacagag

SEQ ID NO: 171324 - DNA, 25 bp, Homo sapien
tacagatacagagactaagtccaag

SEQ ID NO: 171325 - DNA, 25 bp, Homo sapien
tagaaaaggctgtaaggataactta

SEQ ID NO: 171326 - DNA, 25 bp, Homo sapien
caatgggatttgacatttagggtaa

SEQ ID NO: 171327 - DNA, 25 bp, Homo sapien
tccaagaaagttcaaactaagtaga

SEQ ID NO: 171328 - DNA, 25 bp, Homo sapien
cagagcaccgactgtaaatgccaaa

SEQ ID NO: 171329 - DNA, 25 bp, Homo sapien
tacagtcttcctttggtatctttgg

SEQ ID NO: 171330 - DNA, 25 bp, Homo sapien
taaacccaaggcaatagttgacaaa

SEQ ID NO: 171331 - DNA, 25 bp, Homo sapien
gcagaagtgcattcctaaataagta

SEQ ID NO: 171332 - DNA, 25 bp, Homo sapien
taacacaggtacttaaggcataaac

SEQ ID NO: 171333 - DNA, 25 bp, Homo sapien
ccagaattcaaagcaacatgtagca

SEQ ID NO: 171334 - DNA, 25 bp, Homo sapien
tcacataaacatactggcaaataca

SEQ ID NO: 171335 - DNA, 25 bp, Homo sapien
gtgaccttctcacactagggatgaa

SEQ ID NO: 171336 - DNA, 25 bp, Homo sapien
ctcagcctgccgagggcctgcgatt

SEQ ID NO: 171337 - DNA, 25 bp, Homo sapien
ccctctgatgccgagccgaaactgg

SEQ ID NO: 171338 - DNA, 25 bp, Homo sapien
cctgccgagggcctgcgattgcagg

SEQ ID NO: 171339 - DNA, 25 bp, Homo sapien
ctctgatgccgagccgaaactggac

SEQ ID NO: 171340 - DNA, 25 bp, Homo sapien
tcttagatcactaaagcctcagact

SEQ ID NO: 171341 - DNA, 25 bp, Homo sapien
atgatcttagatcactaaagcctca

SEQ ID NO: 171342 - DNA, 25 bp, Homo sapien
ttagatcactaaagcctcagactcc

SEQ ID NO: 171343 - DNA, 25 bp, Homo sapien
gatcttagatcactaaagcctcaga

SEQ ID NO: 171344 - DNA, 25 bp, Homo sapien
ttactttgaaggccctgctagaaac

SEQ ID NO: 171345 - DNA, 25 bp, Homo sapien
tctttttactttgaaggccctgcta

SEQ ID NO: 171346 - DNA, 25 bp, Homo sapien
ctttttactttgaaggccctgctag

SEQ ID NO: 171347 - DNA, 25 bp, Homo sapien
ttttactttgaaggccctgctagaa

SEQ ID NO: 171348 - DNA, 25 bp, Homo sapien
gctgtgggagaacccgcaaaaaatg

SEQ ID NO: 171349 - DNA, 25 bp, Homo sapien
tccatcgccccgatttcgaacaggt

SEQ ID NO: 171350 - DNA, 25 bp, Homo sapien
gccccgatttcgaacaggtgtatta

SEQ ID NO: 171351 - DNA, 25 bp, Homo sapien
tcgaacaggtgtattatccaaagga

SEQ ID NO: 171352 - DNA, 25 bp, Homo sapien
catggttagcaatagtgatgtttcg

SEQ ID NO: 171353 - DNA, 25 bp, Homo sapien
gatactgacgattgcgctccataag

SEQ ID NO: 171354 - DNA, 25 bp, Homo sapien
gacgattgcgctccataagtttctc

SEQ ID NO: 171355 - DNA, 25 bp, Homo sapien
cttggagcttttgatactgacgatt

SEQ ID NO: 171356 - DNA, 25 bp, Homo sapien
gaagcaatcaggatacacaatgagg

SEQ ID NO: 171357 - DNA, 25 bp, Homo sapien
aaagaaagatgcttatatagggatg

SEQ ID NO: 171358 - DNA, 25 bp, Homo sapien
catttagaacccagtttaagaagca

SEQ ID NO: 171359 - DNA, 25 bp, Homo sapien
gaaagatgcttatatagggatgtta

SEQ ID NO: 171360 - DNA, 25 bp, Homo sapien
cctgtgactagaatactacagaaaa

SEQ ID NO: 171361 - DNA, 25 bp, Homo sapien
gacctgtgactagaatactacagaa

SEQ ID NO: 171362 - DNA, 25 bp, Homo sapien
ggacctgtgactagaatactacaga

SEQ ID NO: 171363 - DNA, 25 bp, Homo sapien
acctgtgactagaatactacagaaa

SEQ ID NO: 171364 - DNA, 25 bp, Homo sapien
ctctggccaatagccagcaaaaaat

SEQ ID NO: 171365 - DNA, 25 bp, Homo sapien
gagacaagtaactaagaacagcctc

SEQ ID NO: 171366 - DNA, 25 bp, Homo sapien
gaaggcccaagagacaagtaactaa

SEQ ID NO: 171367 - DNA, 25 bp, Homo sapien
tcttactaggagacacactcccttg

SEQ ID NO: 171368 - DNA, 25 bp, Homo sapien
ataatccgtgaaagagaaaattgat

SEQ ID NO: 171369 - DNA, 25 bp, Homo sapien
caaaggtataatccgtgaaagagaa

SEQ ID NO: 171370 - DNA, 25 bp, Homo sapien
aatacaccaaaggtataatccgtga

SEQ ID NO: 171371 - DNA, 25 bp, Homo sapien
agagaaaattgataagcaggacttc

SEQ ID NO: 171372 - DNA, 25 bp, Homo sapien
tacattcaaggacatgcttaaagtc

SEQ ID NO: 171373 - DNA, 25 bp, Homo sapien
gacatgcttaaagtcatccacaggg

SEQ ID NO: 171374 - DNA, 25 bp, Homo sapien
caaacatccttaagaagtataagtg

SEQ ID NO: 171375 - DNA, 25 bp, Homo sapien
tccttaagaagtataagtgtatatg

SEQ ID NO: 171376 - DNA, 25 bp, Homo sapien
ggctgaggcgggagaatggcttgaa

SEQ ID NO: 171377 - DNA, 25 bp, Homo sapien
caagtgaagcacaggctactcagga

SEQ ID NO: 171378 - DNA, 25 bp, Homo sapien
ggcttgaacccaggagttagagact

SEQ ID NO: 171379 - DNA, 25 bp, Homo sapien
ttgaacccaggagttagagactagc

SEQ ID NO: 171380 - DNA, 25 bp, Homo sapien
cgctcgggagctaatgtccaacacg

SEQ ID NO: 171381 - DNA, 25 bp, Homo sapien
tgatatgtccagaaggccagcgctc

SEQ ID NO: 171382 - DNA, 25 bp, Homo sapien
gacactttcgataattacaaagcag

SEQ ID NO: 171383 - DNA, 25 bp, Homo sapien
ccagagagtttgatgcgacactttc

SEQ ID NO: 171384 - DNA, 25 bp, Homo sapien
aataggatagtgaggtctccagaag

SEQ ID NO: 171385 - DNA, 25 bp, Homo sapien
tccaggattctctgcgagcgagtgc

SEQ ID NO: 171386 - DNA, 25 bp, Homo sapien
gttgccccgaagcatcctgggacct

SEQ ID NO: 171387 - DNA, 25 bp, Homo sapien
gctccacaagcgaagattccaggat

SEQ ID NO: 171388 - DNA, 25 bp, Homo sapien
gcgagtgcttcagggaactacgcca

SEQ ID NO: 171389 - DNA, 25 bp, Homo sapien
tgtaattggacagctggcacctcca

SEQ ID NO: 171390 - DNA, 25 bp, Homo sapien
cctccatgttgaggtagtccaccat

SEQ ID NO: 171391 - DNA, 25 bp, Homo sapien
taaattaagcgatagtgggccgggc

SEQ ID NO: 171392 - DNA, 25 bp, Homo sapien
tatccaccttggaatagacatcttt

SEQ ID NO: 171393 - DNA, 25 bp, Homo sapien
ccagccacggcaacaagagcgaccc

SEQ ID NO: 171394 - DNA, 25 bp, Homo sapien
ccacggcaacaagagcgaccctccg

SEQ ID NO: 171395 - DNA, 25 bp, Homo sapien
cacggcaacaagagcgaccctccgt

SEQ ID NO: 171396 - DNA, 25 bp, Homo sapien
agccacggcaacaagagcgaccctc

SEQ ID NO: 171397 - DNA, 25 bp, Homo sapien
tgagggtcagaactttgaggtgacc

SEQ ID NO: 171398 - DNA, 25 bp, Homo sapien
tttaattaattgatagtattgaggg

SEQ ID NO: 171399 - DNA, 25 bp, Homo sapien
ctacctgcgtgctctcctggaactg

SEQ ID NO: 171400 - DNA, 25 bp, Homo sapien
cctggaactgctagcagtgtttaaa

SEQ ID NO: 171401 - DNA, 25 bp, Homo sapien
ttaacagtaatatgacatgcaaaca

SEQ ID NO: 171402 - DNA, 25 bp, Homo sapien
ctttcattactcgtaagagtgagca

SEQ ID NO: 171403 - DNA, 25 bp, Homo sapien
tatgacatgcaaacataagtttgaa

SEQ ID NO: 171404 - DNA, 25 bp, Homo sapien
gaattttagtgtacacaaatttatc

SEQ ID NO: 171405 - DNA, 25 bp, Homo sapien
cctgaatggtatgtgcaatttaact

SEQ ID NO: 171406 - DNA, 25 bp, Homo sapien
taccccttgcatgttaaatatacca

SEQ ID NO: 171407 - DNA, 25 bp, Homo sapien
gaaatgagtttttaaccatacctga

SEQ ID NO: 171408 - DNA, 25 bp, Homo sapien
gatgtaaacacagcatataggacag

SEQ ID NO: 171409 - DNA, 25 bp, Homo sapien
tcagaaggcactaacggacagccag

SEQ ID NO: 171410 - DNA, 25 bp, Homo sapien
tgcctaaggcttcaagcagtgagag

SEQ ID NO: 171411 - DNA, 25 bp, Homo sapien
tgccctgagtgaagataagccattt

SEQ ID NO: 171412 - DNA, 25 bp, Homo sapien
tttgactccgcaaaaatcagaaggc

SEQ ID NO: 171413 - DNA, 25 bp, Homo sapien
cataaaagaaaaacgcagtactcat

SEQ ID NO: 171414 - DNA, 25 bp, Homo sapien
tggaacagcgaaactcagatctggt

SEQ ID NO: 171415 - DNA, 25 bp, Homo sapien
aactcagatctggtttcagtctctt

SEQ ID NO: 171416 - DNA, 25 bp, Homo sapien
cagcgaaactcagatctggtttcag

SEQ ID NO: 171417 - DNA, 25 bp, Homo sapien
tccagactggaacagcgaaactcag

SEQ ID NO: 171418 - DNA, 25 bp, Homo sapien
gttgaaccacaggatctatcaatta

SEQ ID NO: 171419 - DNA, 25 bp, Homo sapien
agttgaaccacaggatctatcaatt

SEQ ID NO: 171420 - DNA, 25 bp, Homo sapien
ctctggcatcacatgaatccagctt

SEQ ID NO: 171421 - DNA, 25 bp, Homo sapien
catgaatccagcttctatctagaaa

SEQ ID NO: 171422 - DNA, 25 bp, Homo sapien
tatcttgatcaaaattcaagtacca

SEQ ID NO: 171423 - DNA, 25 bp, Homo sapien
tcttgatcaaaattcaagtaccagg

SEQ ID NO: 171424 - DNA, 25 bp, Homo sapien
cttgatcaaaattcaagtaccaggc

SEQ ID NO: 171425 - DNA, 25 bp, Homo sapien
atcttgatcaaaattcaagtaccag

SEQ ID NO: 171426 - DNA, 25 bp, Homo sapien
tttctgttgagaatatccaaatcca

SEQ ID NO: 171427 - DNA, 25 bp, Homo sapien
cagggggtctacagatgggccagtt

SEQ ID NO: 171428 - DNA, 25 bp, Homo sapien
gggggtctacagatgggccagttct

SEQ ID NO: 171429 - DNA, 25 bp, Homo sapien
ttcagggggtctacagatgggccag

SEQ ID NO: 171430 - DNA, 25 bp, Homo sapien
ggagaaagacaaggtacgctgcagc

SEQ ID NO: 171431 - DNA, 25 bp, Homo sapien
tagaggcttgccctgaactaaggtc

SEQ ID NO: 171432 - DNA, 25 bp, Homo sapien
ccgaaatgatctgagcgaaggccag

SEQ ID NO: 171433 - DNA, 25 bp, Homo sapien
ttttaaggacacaatcaccacagtg

SEQ ID NO: 171434 - DNA, 25 bp, Homo sapien
gacttgaaataaaggcctgccacct

SEQ ID NO: 171435 - DNA, 25 bp, Homo sapien
gagacggaaggcaaacccagtactg

SEQ ID NO: 171436 - DNA, 25 bp, Homo sapien
tttcccgccaagcaaaatgaagccg

SEQ ID NO: 171437 - DNA, 25 bp, Homo sapien
gaagccggcgttttccaagaacaca

SEQ ID NO: 171438 - DNA, 25 bp, Homo sapien
ggaaagaaagtggagagacaggaag

SEQ ID NO: 171439 - DNA, 25 bp, Homo sapien
gagagggaaagaaagtggagagaca

SEQ ID NO: 171440 - DNA, 25 bp, Homo sapien
gggaaagaaagtggagagacaggaa

SEQ ID NO: 171441 - DNA, 25 bp, Homo sapien
gagggaaagaaagtggagagacagg

SEQ ID NO: 171442 - DNA, 25 bp, Homo sapien
aattgggttatgaggtcccctgcgg

SEQ ID NO: 171443 - DNA, 25 bp, Homo sapien
gaattgggttatgaggtcccctgcg

SEQ ID NO: 171444 - DNA, 25 bp, Homo sapien
attgggttatgaggtcccctgcggg

SEQ ID NO: 171445 - DNA, 25 bp, Homo sapien
cggagccccgttctctgggaactca

SEQ ID NO: 171446 - DNA, 25 bp, Homo sapien
tggccgtgagtctgttccaagctcc

SEQ ID NO: 171447 - DNA, 25 bp, Homo sapien
tccaagctccggcaaaggaggcatc

SEQ ID NO: 171448 - DNA, 25 bp, Homo sapien
ccccgaagctcagggagagccctgt

SEQ ID NO: 171449 - DNA, 25 bp, Homo sapien
cacgtttatggtgatttcccagaac

SEQ ID NO: 171450 - DNA, 25 bp, Homo sapien
gcgctgggtgttcccgcctagtgac

SEQ ID NO: 171451 - DNA, 25 bp, Homo sapien
cccagaacacatagcgacatgcaaa

SEQ ID NO: 171452 - DNA, 25 bp, Homo sapien
tgcaaatattgcagggcgccactcc

SEQ ID NO: 171453 - DNA, 25 bp, Homo sapien
tgggcccgcgattccttggagcggg

SEQ ID NO: 171454 - DNA, 25 bp, Homo sapien
gcccgcgattccttggagcgggttg

SEQ ID NO: 171455 - DNA, 25 bp, Homo sapien
ccgcgattccttggagcgggttgat

SEQ ID NO: 171456 - DNA, 25 bp, Homo sapien
gcgattccttggagcgggttgatga

SEQ ID NO: 171457 - DNA, 25 bp, Homo sapien
cgttcgaattccatggcggcgcggc

SEQ ID NO: 171458 - DNA, 25 bp, Homo sapien
tcagcgttcgaattccatggcggcg

SEQ ID NO: 171459 - DNA, 25 bp, Homo sapien
agcgttcgaattccatggcggcgcg

SEQ ID NO: 171460 - DNA, 25 bp, Homo sapien
gtcagcgttcgaattccatggcggc

SEQ ID NO: 171461 - DNA, 25 bp, Homo sapien
ggcagggcgagaggttcggagctca

SEQ ID NO: 171462 - DNA, 25 bp, Homo sapien
gcgagaggttcggagctcaatatcg

SEQ ID NO: 171463 - DNA, 25 bp, Homo sapien
ggagctcaatatcgcgggacggcat

SEQ ID NO: 171464 - DNA, 25 bp, Homo sapien
ttcggagctcaatatcgcgggacgg

SEQ ID NO: 171465 - DNA, 25 bp, Homo sapien
aacctttatcccatacggcctcatg

SEQ ID NO: 171466 - DNA, 25 bp, Homo sapien
gagcacttaactaacctttatccca

SEQ ID NO: 171467 - DNA, 25 bp, Homo sapien
cctcatgtatgaggtgggtatttgg

SEQ ID NO: 171468 - DNA, 25 bp, Homo sapien
tctaaattaggcacagacccttgag

SEQ ID NO: 171469 - DNA, 25 bp, Homo sapien
ccatgcgcagcctaactcagaatct

SEQ ID NO: 171470 - DNA, 25 bp, Homo sapien
tgtcagggctgaacctatactaatg

SEQ ID NO: 171471 - DNA, 25 bp, Homo sapien
catttatagtaaggttacacccagg

SEQ ID NO: 171472 - DNA, 25 bp, Homo sapien
tagagcctcatttaggatgtcaggg

SEQ ID NO: 171473 - DNA, 25 bp, Homo sapien
gccaaggaaatctttcagaagaagt

SEQ ID NO: 171474 - DNA, 25 bp, Homo sapien
tcaggcaatctcaacaaggccaagg

SEQ ID NO: 171475 - DNA, 25 bp, Homo sapien
aaaatataccctcctcttcttagat

SEQ ID NO: 171476 - DNA, 25 bp, Homo sapien
aaatataccctcctcttcttagatg

SEQ ID NO: 171477 - DNA, 25 bp, Homo sapien
tcaatgactaggatgatgccatgcc

SEQ ID NO: 171478 - DNA, 25 bp, Homo sapien
cagaagcatggcctatcagcggatg

SEQ ID NO: 171479 - DNA, 25 bp, Homo sapien
catccagcctttgggagacactgaa

SEQ ID NO: 171480 - DNA, 25 bp, Homo sapien
gagcttcctcctgcaattggcccaa

SEQ ID NO: 171481 - DNA, 25 bp, Homo sapien
tgtgaatttcaatttgagagagagt

SEQ ID NO: 171482 - DNA, 25 bp, Homo sapien
gagagtaagacactttcgtgatctc

SEQ ID NO: 171483 - DNA, 25 bp, Homo sapien
tgtgccacctctcaattagttttaa

SEQ ID NO: 171484 - DNA, 25 bp, Homo sapien
tatgattgtgccacctctcaattag

SEQ ID NO: 171485 - DNA, 25 bp, Homo sapien
caagaatggcatcctagggtcctag

SEQ ID NO: 171486 - DNA, 25 bp, Homo sapien
tagggcccgcgagtgatgcaagaat

SEQ ID NO: 171487 - DNA, 25 bp, Homo sapien
tttcccgatgaactgaaaggtcttc

SEQ ID NO: 171488 - DNA, 25 bp, Homo sapien
caggcaggcctacacttgagatttt

SEQ ID NO: 171489 - DNA, 25 bp, Homo sapien
tgcacgtctcccacggcaagctgca

SEQ ID NO: 171490 - DNA, 25 bp, Homo sapien
actgacccttcgcatcggaacaggc

SEQ ID NO: 171491 - DNA, 25 bp, Homo sapien
cagggtggagttagcgcccagccaa

SEQ ID NO: 171492 - DNA, 25 bp, Homo sapien
tcattcccaattcagaaagtacaca

SEQ ID NO: 171493 - DNA, 25 bp, Homo sapien
caactcaggtagcacatggagggct

SEQ ID NO: 171494 - DNA, 25 bp, Homo sapien
agcaactcaggtagcacatggaggg

SEQ ID NO: 171495 - DNA, 25 bp, Homo sapien
actcaggtagcacatggagggctgt

SEQ ID NO: 171496 - DNA, 25 bp, Homo sapien
gggctgtgacagagcccgagtgaat

SEQ ID NO: 171497 - DNA, 25 bp, Homo sapien
tacgctgccgtgtctttagatgtgg

SEQ ID NO: 171498 - DNA, 25 bp, Homo sapien
ggctcactatccatgctggcatcac

SEQ ID NO: 171499 - DNA, 25 bp, Homo sapien
acatgttacctgtggtccattctcc

SEQ ID NO: 171500 - DNA, 25 bp, Homo sapien
caggttccataggatcccatcagag

SEQ ID NO: 171501 - DNA, 25 bp, Homo sapien
ttatatcaaagttcagcctctcttc

SEQ ID NO: 171502 - DNA, 25 bp, Homo sapien
ttcaaactctcctgattccttttgc

SEQ ID NO: 171503 - DNA, 25 bp, Homo sapien
tcaggtttggcttgagttatcgata

SEQ ID NO: 171504 - DNA, 25 bp, Homo sapien
tagggtcctactaggattctctaag

SEQ ID NO: 171505 - DNA, 25 bp, Homo sapien
ggacaatatcataggattttctgta

SEQ ID NO: 171506 - DNA, 25 bp, Homo sapien
gtgggtggacaatatcataggattt

SEQ ID NO: 171507 - DNA, 25 bp, Homo sapien
atgccatactccttgtgggtggaca

SEQ ID NO: 171508 - DNA, 25 bp, Homo sapien
tgccatactccttgtgggtggacaa

SEQ ID NO: 171509 - DNA, 25 bp, Homo sapien
cagatttcagatggagcatcccctg

SEQ ID NO: 171510 - DNA, 25 bp, Homo sapien
tccagacttgtcagcacccctaagt

SEQ ID NO: 171511 - DNA, 25 bp, Homo sapien
gtgaccatcaggagcccaatccaga

SEQ ID NO: 171512 - DNA, 25 bp, Homo sapien
tcagatggagcatcccctggcttca

SEQ ID NO: 171513 - DNA, 25 bp, Homo sapien
ctgtagaattcggttcaggtgaaga

SEQ ID NO: 171514 - DNA, 25 bp, Homo sapien
aaagcaaaatgtatcaccttccctg

SEQ ID NO: 171515 - DNA, 25 bp, Homo sapien
cattagtattcatcggtgccatccc

SEQ ID NO: 171516 - DNA, 25 bp, Homo sapien
caggctcctcaatcccacatgaatt

SEQ ID NO: 171517 - DNA, 25 bp, Homo sapien
tccaactcaccagtaaggcctgtgg

SEQ ID NO: 171518 - DNA, 25 bp, Homo sapien
gtgccgaacccttccgcagtttcac

SEQ ID NO: 171519 - DNA, 25 bp, Homo sapien
ggtgccgaacccttccgcagtttca

SEQ ID NO: 171520 - DNA, 25 bp, Homo sapien
ctcatcagcactgaggacaaaaaag

SEQ ID NO: 171521 - DNA, 25 bp, Homo sapien
caaaaaaggtgtgtgccgaggacca

SEQ ID NO: 171522 - DNA, 25 bp, Homo sapien
gatcagagcaccaatgtggcctgga

SEQ ID NO: 171523 - DNA, 25 bp, Homo sapien
ttgccactcgctgattttctcatca

SEQ ID NO: 171524 - DNA, 25 bp, Homo sapien
tgccacaagattagttccccagctt

SEQ ID NO: 171525 - DNA, 25 bp, Homo sapien
gcttgatttccagatactgccatgg

SEQ ID NO: 171526 - DNA, 25 bp, Homo sapien
agccttagcttcctgccacaagatt

SEQ ID NO: 171527 - DNA, 25 bp, Homo sapien
ttcctgccacaagattagttcccca

SEQ ID NO: 171528 - DNA, 25 bp, Homo sapien
gcagcacggactgggccgctgtgtc

SEQ ID NO: 171529 - DNA, 25 bp, Homo sapien
gaacctgccagagccgtacagaacc

SEQ ID NO: 171530 - DNA, 25 bp, Homo sapien
gaaccatcctcagaggcggtcagca

SEQ ID NO: 171531 - DNA, 25 bp, Homo sapien
cggtcagcatgaggcctgaggtttc

SEQ ID NO: 171532 - DNA, 25 bp, Homo sapien
tgtggccccatctagcccgacggtt

SEQ ID NO: 171533 - DNA, 25 bp, Homo sapien
ccgacggttaccaccagaagctctg

SEQ ID NO: 171534 - DNA, 25 bp, Homo sapien
gccataaccgtgtggccccatctag

SEQ ID NO: 171535 - DNA, 25 bp, Homo sapien
aagagtggatgccataaccgtgtgg

SEQ ID NO: 171536 - DNA, 25 bp, Homo sapien
cgccttgatggtcccacactttcaa

SEQ ID NO: 171537 - DNA, 25 bp, Homo sapien
ctggtcagctccacgccttgatggt

SEQ ID NO: 171538 - DNA, 25 bp, Homo sapien
tttcaaggtcccatcccggctcaca

SEQ ID NO: 171539 - DNA, 25 bp, Homo sapien
tgcacagtggctaatgggtcctgag

SEQ ID NO: 171540 - DNA, 25 bp, Homo sapien
atgttgcctaatctctaggtatctc

SEQ ID NO: 171541 - DNA, 25 bp, Homo sapien
tcctatgttgcctaatctctaggta

SEQ ID NO: 171542 - DNA, 25 bp, Homo sapien
ctatgttgcctaatctctaggtatc

SEQ ID NO: 171543 - DNA, 25 bp, Homo sapien
cctatgttgcctaatctctaggtat

SEQ ID NO: 171544 - DNA, 25 bp, Homo sapien
gccacagcgctcacagcactctgat

SEQ ID NO: 171545 - DNA, 25 bp, Homo sapien
tgaccaagccgctgtcctgactctg

SEQ ID NO: 171546 - DNA, 25 bp, Homo sapien
ggaactgaccaagccgctgtcctga

SEQ ID NO: 171547 - DNA, 25 bp, Homo sapien
acccaggaactgaccaagccgctgt

SEQ ID NO: 171548 - DNA, 25 bp, Homo sapien
acccagtcacggtgacaggcaggga

SEQ ID NO: 171549 - DNA, 25 bp, Homo sapien
tttgggtgtcctcacgtcccagcag

SEQ ID NO: 171550 - DNA, 25 bp, Homo sapien
ttttgggtgtcctcacgtcccagca

SEQ ID NO: 171551 - DNA, 25 bp, Homo sapien
gtgacccagtcacggtgacaggcag

SEQ ID NO: 171552 - DNA, 25 bp, Homo sapien
ccatcagtgctgaaactacagcagc

SEQ ID NO: 171553 - DNA, 25 bp, Homo sapien
tgcctccatcagtgctgaaactaca

SEQ ID NO: 171554 - DNA, 25 bp, Homo sapien
cagtgctgaaactacagcagctcac

SEQ ID NO: 171555 - DNA, 25 bp, Homo sapien
catcagtgctgaaactacagcagct

SEQ ID NO: 171556 - DNA, 25 bp, Homo sapien
gggaaagtcttctgccttgtgtggc

SEQ ID NO: 171557 - DNA, 25 bp, Homo sapien
tctgccttgtgtggccgcgtcagca

SEQ ID NO: 171558 - DNA, 25 bp, Homo sapien
tgtggccgcgtcagcagctgccttg

SEQ ID NO: 171559 - DNA, 25 bp, Homo sapien
ctcatgtccccgcagctcagtgcca

SEQ ID NO: 171560 - DNA, 25 bp, Homo sapien
gaagtggccagtcctagcacaggct

SEQ ID NO: 171561 - DNA, 25 bp, Homo sapien
ggaagtggccagtcctagcacaggc

SEQ ID NO: 171562 - DNA, 25 bp, Homo sapien
tgggaagtggccagtcctagcacag

SEQ ID NO: 171563 - DNA, 25 bp, Homo sapien
aagtggccagtcctagcacaggctt

SEQ ID NO: 171564 - DNA, 25 bp, Homo sapien
ggaatctggacaggagccagaggga

SEQ ID NO: 171565 - DNA, 25 bp, Homo sapien
tggaatctggacaggagccagaggg

SEQ ID NO: 171566 - DNA, 25 bp, Homo sapien
ctggaatctggacaggagccagagg

SEQ ID NO: 171567 - DNA, 25 bp, Homo sapien
catcttctgcaccactcaccaatac

SEQ ID NO: 171568 - DNA, 25 bp, Homo sapien
ccagccctgcaaggacccatcttct

SEQ ID NO: 171569 - DNA, 25 bp, Homo sapien
gacccatcttctgcaccactcacca

SEQ ID NO: 171570 - DNA, 25 bp, Homo sapien
cccatcttctgcaccactcaccaat

SEQ ID NO: 171571 - DNA, 25 bp, Homo sapien
cttagccaggccagggcggacactg

SEQ ID NO: 171572 - DNA, 25 bp, Homo sapien
agggcggacactgccacatccagtg

SEQ ID NO: 171573 - DNA, 25 bp, Homo sapien
gcttagccaggccagggcggacact

SEQ ID NO: 171574 - DNA, 25 bp, Homo sapien
caggccagggcggacactgccacat

SEQ ID NO: 171575 - DNA, 25 bp, Homo sapien
atgccatccgctcgatatccaacag

SEQ ID NO: 171576 - DNA, 25 bp, Homo sapien
tatccaacagccacccgatcaccat

SEQ ID NO: 171577 - DNA, 25 bp, Homo sapien
agagattttgtagatcctaatgcca

SEQ ID NO: 171578 - DNA, 25 bp, Homo sapien
gatcctaatgccatccgctcgatat

SEQ ID NO: 171579 - DNA, 25 bp, Homo sapien
ccaggtgcccacggggccgacccag

SEQ ID NO: 171580 - DNA, 25 bp, Homo sapien
gtgcccacggggccgacccagagac

SEQ ID NO: 171581 - DNA, 25 bp, Homo sapien
ccagagaccctgaccacacctgaac

SEQ ID NO: 171582 - DNA, 25 bp, Homo sapien
cccagagaccctgaccacacctgaa

SEQ ID NO: 171583 - DNA, 25 bp, Homo sapien
ctctccagccgtcagtaactggcaa

SEQ ID NO: 171584 - DNA, 25 bp, Homo sapien
attgaaggccaaggtacggatagag

SEQ ID NO: 171585 - DNA, 25 bp, Homo sapien
tacggatagaggctccgggtgcccc

SEQ ID NO: 171586 - DNA, 25 bp, Homo sapien
acccgcatgcaggaaaagcgcagca

SEQ ID NO: 171587 - DNA, 25 bp, Homo sapien
gaaggcaacacagttcagggacttg

SEQ ID NO: 171588 - DNA, 25 bp, Homo sapien
aaggcaacacagttcagggacttgg

SEQ ID NO: 171589 - DNA, 25 bp, Homo sapien
ctagcagccggcagtctgggctcag

SEQ ID NO: 171590 - DNA, 25 bp, Homo sapien
ccaagcacacggtggctagcagccg

SEQ ID NO: 171591 - DNA, 25 bp, Homo sapien
tgatttggtactggtgagccttagt

SEQ ID NO: 171592 - DNA, 25 bp, Homo sapien
agccagtgatttggtactggtgagc

SEQ ID NO: 171593 - DNA, 25 bp, Homo sapien
tatcatcggagaggaacaaacaagc

SEQ ID NO: 171594 - DNA, 25 bp, Homo sapien
cccgtcgaaggcagtaagaaagagt

SEQ ID NO: 171595 - DNA, 25 bp, Homo sapien
agccactcaccacagacttctcctc

SEQ ID NO: 171596 - DNA, 25 bp, Homo sapien
gaaagagtgtatcatcggagaggaa

SEQ ID NO: 171597 - DNA, 25 bp, Homo sapien
tctcaggtccaacaggtaaactgtc

SEQ ID NO: 171598 - DNA, 25 bp, Homo sapien
agttctcaggtccaacaggtaaact

SEQ ID NO: 171599 - DNA, 25 bp, Homo sapien
caggtaaactgtcccattggcagtg

SEQ ID NO: 171600 - DNA, 25 bp, Homo sapien
acaggtaaactgtcccattggcagt

SEQ ID NO: 171601 - DNA, 25 bp, Homo sapien
tgctgatttttcatggtccggggtt

SEQ ID NO: 171602 - DNA, 25 bp, Homo sapien
ggtttattaagccatcgtagtgtgt

SEQ ID NO: 171603 - DNA, 25 bp, Homo sapien
taagccatcgtagtgtgtgttggag

SEQ ID NO: 171604 - DNA, 25 bp, Homo sapien
tcatggtccggggtttattaagcca

SEQ ID NO: 171605 - DNA, 25 bp, Homo sapien
aaggtgcgaaacactgcaacgtcag

SEQ ID NO: 171606 - DNA, 25 bp, Homo sapien
ctgcctcaggaaggtgcgaaacact

SEQ ID NO: 171607 - DNA, 25 bp, Homo sapien
ggctgaggattgaagcctgctgcct

SEQ ID NO: 171608 - DNA, 25 bp, Homo sapien
catctccgggagagcagcgaggctt

SEQ ID NO: 171609 - DNA, 25 bp, Homo sapien
tgttcctctttggggactgaagaag

SEQ ID NO: 171610 - DNA, 25 bp, Homo sapien
ttgttcctctttggggactgaagaa

SEQ ID NO: 171611 - DNA, 25 bp, Homo sapien
tttgttcctctttggggactgaaga

SEQ ID NO: 171612 - DNA, 25 bp, Homo sapien
aagagccgagagaccagacccaatt

SEQ ID NO: 171613 - DNA, 25 bp, Homo sapien
agaagtccacggttcccgctctgga

SEQ ID NO: 171614 - DNA, 25 bp, Homo sapien
agacccaattccaagtgtgcagcca

SEQ ID NO: 171615 - DNA, 25 bp, Homo sapien
gtgtgcagccaccacatggaggttg

SEQ ID NO: 171616 - DNA, 25 bp, Homo sapien
ggaaaggtgtctatggggtctagga

SEQ ID NO: 171617 - DNA, 25 bp, Homo sapien
aaggtgtctatggggtctaggaact

SEQ ID NO: 171618 - DNA, 25 bp, Homo sapien
ttgggaaaggtgtctatggggtcta

SEQ ID NO: 171619 - DNA, 25 bp, Homo sapien
gaaaggtgtctatggggtctaggaa

SEQ ID NO: 171620 - DNA, 25 bp, Homo sapien
acttcggaaggtgcctgaggcatca

SEQ ID NO: 171621 - DNA, 25 bp, Homo sapien
gcaacttcggaaggtgcctgaggca

SEQ ID NO: 171622 - DNA, 25 bp, Homo sapien
ttcggaaggtgcctgaggcatcagc

SEQ ID NO: 171623 - DNA, 25 bp, Homo sapien
ggagggcaacttcggaaggtgcctg

SEQ ID NO: 171624 - DNA, 25 bp, Homo sapien
cctgcatcattcccaagggcagtag

SEQ ID NO: 171625 - DNA, 25 bp, Homo sapien
agccctgcatcattcccaagggcag

SEQ ID NO: 171626 - DNA, 25 bp, Homo sapien
ccctgcatcattcccaagggcagta

SEQ ID NO: 171627 - DNA, 25 bp, Homo sapien
gccctgcatcattcccaagggcagt

SEQ ID NO: 171628 - DNA, 25 bp, Homo sapien
tgcaatgaggatgtgtgccgtgtcc

SEQ ID NO: 171629 - DNA, 25 bp, Homo sapien
atgtgtgccgtgtcctctagccctg

SEQ ID NO: 171630 - DNA, 25 bp, Homo sapien
ccatcagggaggcacagccgggcac

SEQ ID NO: 171631 - DNA, 25 bp, Homo sapien
tcttcccatagcaacgtttagctgc

SEQ ID NO: 171632 - DNA, 25 bp, Homo sapien
ctcagcactccgtgcagctggtcca

SEQ ID NO: 171633 - DNA, 25 bp, Homo sapien
agactctggacgaggcaggcaaacg

SEQ ID NO: 171634 - DNA, 25 bp, Homo sapien
ccagctcttagtccccttcggtagt

SEQ ID NO: 171635 - DNA, 25 bp, Homo sapien
tagtccccttcggtagtgtccgcca

SEQ ID NO: 171636 - DNA, 25 bp, Homo sapien
ctgaaaactcaagctctctgaggcc

SEQ ID NO: 171637 - DNA, 25 bp, Homo sapien
gaaaactcaagctctctgaggccct

SEQ ID NO: 171638 - DNA, 25 bp, Homo sapien
aactcaagctctctgaggccctcat

SEQ ID NO: 171639 - DNA, 25 bp, Homo sapien
aaactcaagctctctgaggccctca

SEQ ID NO: 171640 - DNA, 25 bp, Homo sapien
ccacacccagtctctccttgaactg

SEQ ID NO: 171641 - DNA, 25 bp, Homo sapien
acacccagtctctccttgaactgcc

SEQ ID NO: 171642 - DNA, 25 bp, Homo sapien
acccagtctctccttgaactgcctg

SEQ ID NO: 171643 - DNA, 25 bp, Homo sapien
caccacacccagtctctccttgaac

SEQ ID NO: 171644 - DNA, 25 bp, Homo sapien
caggcagggtccggagtctctcaga

SEQ ID NO: 171645 - DNA, 25 bp, Homo sapien
ggaaggacatcaggcccgtgctcct

SEQ ID NO: 171646 - DNA, 25 bp, Homo sapien
ggcagggtccggagtctctcagaca

SEQ ID NO: 171647 - DNA, 25 bp, Homo sapien
cagtcaaggcctggggaaggacatc

SEQ ID NO: 171648 - DNA, 25 bp, Homo sapien
agcgtgaagagcctcaggtgatcgg

SEQ ID NO: 171649 - DNA, 25 bp, Homo sapien
gagcctcaggtgatcggtgaccaag

SEQ ID NO: 171650 - DNA, 25 bp, Homo sapien
caagcgcaggtagagcggccggcct

SEQ ID NO: 171651 - DNA, 25 bp, Homo sapien
tcaggtgatcggtgaccaagcgcag

SEQ ID NO: 171652 - DNA, 25 bp, Homo sapien
aagactcaggactcagggtggggtc

SEQ ID NO: 171653 - DNA, 25 bp, Homo sapien
gagaggccctggaaaggccattcac

SEQ ID NO: 171654 - DNA, 25 bp, Homo sapien
cgagaggccctggaaaggccattca

SEQ ID NO: 171655 - DNA, 25 bp, Homo sapien
ccgagaggccctggaaaggccattc

SEQ ID NO: 171656 - DNA, 25 bp, Homo sapien
cccgagaggccctggaaaggccatt

SEQ ID NO: 171657 - DNA, 25 bp, Homo sapien
ggtgacatgatcaggaatcacaatt

SEQ ID NO: 171658 - DNA, 25 bp, Homo sapien
gacatgatcaggaatcacaattttc

SEQ ID NO: 171659 - DNA, 25 bp, Homo sapien
gtgacatgatcaggaatcacaattt

SEQ ID NO: 171660 - DNA, 25 bp, Homo sapien
acatgatcaggaatcacaattttct

SEQ ID NO: 171661 - DNA, 25 bp, Homo sapien
tcccctaggcctgcatcactagaca

SEQ ID NO: 171662 - DNA, 25 bp, Homo sapien
actagacacactcagcaccaggtgt

SEQ ID NO: 171663 - DNA, 25 bp, Homo sapien
ccagccgggcccgagcagaggcctc

SEQ ID NO: 171664 - DNA, 25 bp, Homo sapien
agccgcttcccgtacagggccagct

SEQ ID NO: 171665 - DNA, 25 bp, Homo sapien
actaacctatcagccccatcgatga

SEQ ID NO: 171666 - DNA, 25 bp, Homo sapien
ccatcgatgatcaggacctgggtct

SEQ ID NO: 171667 - DNA, 25 bp, Homo sapien
gatccagtctgaaatcagctgccca

SEQ ID NO: 171668 - DNA, 25 bp, Homo sapien
tgcccattctggtccactaacctat

SEQ ID NO: 171669 - DNA, 25 bp, Homo sapien
gaagactaatgatgccaccttggcc

SEQ ID NO: 171670 - DNA, 25 bp, Homo sapien
cctgcagggctgacacaagagatgc

SEQ ID NO: 171671 - DNA, 25 bp, Homo sapien
gagggcacctggctcttttagttgg

SEQ ID NO: 171672 - DNA, 25 bp, Homo sapien
agttggccacgcagataggtacaga

SEQ ID NO: 171673 - DNA, 25 bp, Homo sapien
tcctgcccaggcccctgagactctg

SEQ ID NO: 171674 - DNA, 25 bp, Homo sapien
tgcccaggcccctgagactctgtac

SEQ ID NO: 171675 - DNA, 25 bp, Homo sapien
tccttagcccacacagccttccctc

SEQ ID NO: 171676 - DNA, 25 bp, Homo sapien
ctccttagcccacacagccttccct

SEQ ID NO: 171677 - DNA, 25 bp, Homo sapien
gtcatcgtctgggatggacactggc

SEQ ID NO: 171678 - DNA, 25 bp, Homo sapien
aggctcagccttccgtggggcagca

SEQ ID NO: 171679 - DNA, 25 bp, Homo sapien
cagccgttgcactgtgtcctgaaga

SEQ ID NO: 171680 - DNA, 25 bp, Homo sapien
ggcctggaccaagtcatcgtctggg

SEQ ID NO: 171681 - DNA, 25 bp, Homo sapien
agcccgccaacatagggccggccag

SEQ ID NO: 171682 - DNA, 25 bp, Homo sapien
tcatattccatacatcctgcagaac

SEQ ID NO: 171683 - DNA, 25 bp, Homo sapien
gcagaaccaactgcccaaactcctc

SEQ ID NO: 171684 - DNA, 25 bp, Homo sapien
gagcttctggatcatattccataca

SEQ ID NO: 171685 - DNA, 25 bp, Homo sapien
tgcggcaggtgatccctttctgtct

SEQ ID NO: 171686 - DNA, 25 bp, Homo sapien
gagatccgacgtgcggcctcttcag

SEQ ID NO: 171687 - DNA, 25 bp, Homo sapien
ttcagttctgagatccgacgtgcgg

SEQ ID NO: 171688 - DNA, 25 bp, Homo sapien
gtctgcttaggtagctcttcagttc

SEQ ID NO: 171689 - DNA, 25 bp, Homo sapien
tgcagacgttggttccggttcagga

SEQ ID NO: 171690 - DNA, 25 bp, Homo sapien
atcccggaagtagatgagagcttgg

SEQ ID NO: 171691 - DNA, 25 bp, Homo sapien
aggaagctggaatcccggaagtaga

SEQ ID NO: 171692 - DNA, 25 bp, Homo sapien
cagagcgccctgaagggtactgctg

SEQ ID NO: 171693 - DNA, 25 bp, Homo sapien
aaacagctgtgcgttctccacctcc

SEQ ID NO: 171694 - DNA, 25 bp, Homo sapien
aatgtatccataacgggagcccaga

SEQ ID NO: 171695 - DNA, 25 bp, Homo sapien
ctccccaaggcacacttccagttgt

SEQ ID NO: 171696 - DNA, 25 bp, Homo sapien
cagtggaagtgtggatggtcaggaa

SEQ ID NO: 171697 - DNA, 25 bp, Homo sapien
tgatgatagggacgtgtgggagtca

SEQ ID NO: 171698 - DNA, 25 bp, Homo sapien
catgatgatagggacgtgtgggagt

SEQ ID NO: 171699 - DNA, 25 bp, Homo sapien
ctgtaggcatgatgatagggacgtg

SEQ ID NO: 171700 - DNA, 25 bp, Homo sapien
taggcatgatgatagggacgtgtgg

SEQ ID NO: 171701 - DNA, 25 bp, Homo sapien
agtgacgccccagcggaggtcgatt

SEQ ID NO: 171702 - DNA, 25 bp, Homo sapien
ggtcgattccgtgaaggctgatacg

SEQ ID NO: 171703 - DNA, 25 bp, Homo sapien
aatgaaaagccggatgctgcgccat

SEQ ID NO: 171704 - DNA, 25 bp, Homo sapien
tgcatgtctcggaaagtggatgaaa

SEQ ID NO: 171705 - DNA, 25 bp, Homo sapien
gccctggccatacggccatgatgtc

SEQ ID NO: 171706 - DNA, 25 bp, Homo sapien
gggcttgctcacaatctgacaactc

SEQ ID NO: 171707 - DNA, 25 bp, Homo sapien
ggaagggcttgctcacaatctgaca

SEQ ID NO: 171708 - DNA, 25 bp, Homo sapien
cggccatgatgtctgccgtcatctt

SEQ ID NO: 171709 - DNA, 25 bp, Homo sapien
tcttccagtggccggagagactgga

SEQ ID NO: 171710 - DNA, 25 bp, Homo sapien
gggtggtggaatcttgaatattttg

SEQ ID NO: 171711 - DNA, 25 bp, Homo sapien
ggtggtggaatcttgaatattttgt

SEQ ID NO: 171712 - DNA, 25 bp, Homo sapien
tccagtggccggagagactggaccc

SEQ ID NO: 171713 - DNA, 25 bp, Homo sapien
tcgcatcagtacagcctgagagtgt

SEQ ID NO: 171714 - DNA, 25 bp, Homo sapien
tgagagtgtcacatcattgggattc

SEQ ID NO: 171715 - DNA, 25 bp, Homo sapien
ttcagtatcgcatcagtacagcctg

SEQ ID NO: 171716 - DNA, 25 bp, Homo sapien
tcacatcattgggattcaaatctgt

SEQ ID NO: 171717 - DNA, 25 bp, Homo sapien
tccatcatccatgctttggccaagg

SEQ ID NO: 171718 - DNA, 25 bp, Homo sapien
gaggcacttggaattcacacgctgc

SEQ ID NO: 171719 - DNA, 25 bp, Homo sapien
cacacgctgccagtaaagctgtttg

SEQ ID NO: 171720 - DNA, 25 bp, Homo sapien
gaggataccaacaaagaggcacttg

SEQ ID NO: 171721 - DNA, 25 bp, Homo sapien
ttcccaaaagtattcagggaccatc

SEQ ID NO: 171722 - DNA, 25 bp, Homo sapien
tattcagggaccatccatcattttc

SEQ ID NO: 171723 - DNA, 25 bp, Homo sapien
gaaccctttggccagccagagacag

SEQ ID NO: 171724 - DNA, 25 bp, Homo sapien
caaaagtattcagggaccatccatc

SEQ ID NO: 171725 - DNA, 25 bp, Homo sapien
ctgctccgccctcgtgatcatcatc

SEQ ID NO: 171726 - DNA, 25 bp, Homo sapien
catcatcccaatcaacagcagtgca

SEQ ID NO: 171727 - DNA, 25 bp, Homo sapien
tgccttaagcactgcagtcttcaga

SEQ ID NO: 171728 - DNA, 25 bp, Homo sapien
caacagcagtgcatagttcagcggg

SEQ ID NO: 171729 - DNA, 25 bp, Homo sapien
cctgtcggtacctgttcagcatctc

SEQ ID NO: 171730 - DNA, 25 bp, Homo sapien
atagaccaagacagtgcggcctggc

SEQ ID NO: 171731 - DNA, 25 bp, Homo sapien
gggcctgtcggtacctgttcagcat

SEQ ID NO: 171732 - DNA, 25 bp, Homo sapien
tagcatctgtcagatagaccaagac

SEQ ID NO: 171733 - DNA, 25 bp, Homo sapien
caacacaggtatcctcattgccatc

SEQ ID NO: 171734 - DNA, 25 bp, Homo sapien
acacaggtatcctcattgccatccg

SEQ ID NO: 171735 - DNA, 25 bp, Homo sapien
caggtatcctcattgccatccgaag

SEQ ID NO: 171736 - DNA, 25 bp, Homo sapien
cacaggtatcctcattgccatccga

SEQ ID NO: 171737 - DNA, 25 bp, Homo sapien
cgcctcatcagtgttatattcgaag

SEQ ID NO: 171738 - DNA, 25 bp, Homo sapien
ctgctgacggcttaggtggcaaaga

SEQ ID NO: 171739 - DNA, 25 bp, Homo sapien
taggtggcaaagaaacctccgcctg

SEQ ID NO: 171740 - DNA, 25 bp, Homo sapien
ttttcatttctagttagtatccgcc

SEQ ID NO: 171741 - DNA, 25 bp, Homo sapien
gaaactgccgactgtggatcaccga

SEQ ID NO: 171742 - DNA, 25 bp, Homo sapien
ctgagttgagcctcgagggcatcaa

SEQ ID NO: 171743 - DNA, 25 bp, Homo sapien
ctgaatggaaactgccgactgtgga

SEQ ID NO: 171744 - DNA, 25 bp, Homo sapien
gcatcatgggcgttaagaaatctga

SEQ ID NO: 171745 - DNA, 25 bp, Homo sapien
tcatggtggcgggaactgattccaa

SEQ ID NO: 171746 - DNA, 25 bp, Homo sapien
cgaagcatggccatgaagggaagct

SEQ ID NO: 171747 - DNA, 25 bp, Homo sapien
caggttgcacaggttccgaagcatg

SEQ ID NO: 171748 - DNA, 25 bp, Homo sapien
gctggagtctctggagaatgagctc

SEQ ID NO: 171749 - DNA, 25 bp, Homo sapien
tctgattcacaaactgtatggaaca

SEQ ID NO: 171750 - DNA, 25 bp, Homo sapien
attctgattcacaaactgtatggaa

SEQ ID NO: 171751 - DNA, 25 bp, Homo sapien
tgcctggcctccagtcataattctg

SEQ ID NO: 171752 - DNA, 25 bp, Homo sapien
cctggcctccagtcataattctgat

SEQ ID NO: 171753 - DNA, 25 bp, Homo sapien
aaagaaacactagccaccacgggat

SEQ ID NO: 171754 - DNA, 25 bp, Homo sapien
tattctggtgtatcctaaaaattgt

SEQ ID NO: 171755 - DNA, 25 bp, Homo sapien
tctgtggtcttcaaaaagggttctg

SEQ ID NO: 171756 - DNA, 25 bp, Homo sapien
ggattagactatgggcatttgcctc

SEQ ID NO: 171757 - DNA, 25 bp, Homo sapien
tataaatcaaatacaacaaccaggc

SEQ ID NO: 171758 - DNA, 25 bp, Homo sapien
tgtacatcacctaactacatctggt

SEQ ID NO: 171759 - DNA, 25 bp, Homo sapien
ccactgtttactttggtgtagtcaa

SEQ ID NO: 171760 - DNA, 25 bp, Homo sapien
tgatgccaacattactcaaagcagg

SEQ ID NO: 171761 - DNA, 25 bp, Homo sapien
tcccagctctgctagaatcccaagg

SEQ ID NO: 171762 - DNA, 25 bp, Homo sapien
tcccaaggcccaggaaggcgacttc

SEQ ID NO: 171763 - DNA, 25 bp, Homo sapien
agttcctcccagaccgacgctttgt

SEQ ID NO: 171764 - DNA, 25 bp, Homo sapien
caggtctctggcctagacagcttca

SEQ ID NO: 171765 - DNA, 25 bp, Homo sapien
tggatgtgcagtcgctgaaccagct

SEQ ID NO: 171766 - DNA, 25 bp, Homo sapien
gcaggcttgtggatgtgcagtcgct

SEQ ID NO: 171767 - DNA, 25 bp, Homo sapien
cagtcgctgaaccagcttcttcagg

SEQ ID NO: 171768 - DNA, 25 bp, Homo sapien
gcttgaacgtgctgggcaggcttgt

SEQ ID NO: 171769 - DNA, 25 bp, Homo sapien
acactgtatcaccggccttctcaaa

SEQ ID NO: 171770 - DNA, 25 bp, Homo sapien
ctgacactgtatcaccggccttctc

SEQ ID NO: 171771 - DNA, 25 bp, Homo sapien
gacactgtatcaccggccttctcaa

SEQ ID NO: 171772 - DNA, 25 bp, Homo sapien
tgacactgtatcaccggccttctca

SEQ ID NO: 171773 - DNA, 25 bp, Homo sapien
tctgagaaaccctatgtaccttgga

SEQ ID NO: 171774 - DNA, 25 bp, Homo sapien
tgagaaaccctatgtaccttggaaa

SEQ ID NO: 171775 - DNA, 25 bp, Homo sapien
tctctgagaaaccctatgtaccttg

SEQ ID NO: 171776 - DNA, 25 bp, Homo sapien
ctgagaaaccctatgtaccttggaa

SEQ ID NO: 171777 - DNA, 25 bp, Homo sapien
ccagcatcagcatgctcccttgtcc

SEQ ID NO: 171778 - DNA, 25 bp, Homo sapien
cgtgggtcgagggctggggcagtga

SEQ ID NO: 171779 - DNA, 25 bp, Homo sapien
gtgggtcgagggctggggcagtgac

SEQ ID NO: 171780 - DNA, 25 bp, Homo sapien
cctggtgtgggactccccagcatca

SEQ ID NO: 171781 - DNA, 25 bp, Homo sapien
tggtactcgtcaaactgggcaaatt

SEQ ID NO: 171782 - DNA, 25 bp, Homo sapien
tgggcaaatttgtccgtcatggcag

SEQ ID NO: 171783 - DNA, 25 bp, Homo sapien
tctcttggcccggtgcttccgaggg

SEQ ID NO: 171784 - DNA, 25 bp, Homo sapien
ggcaccagcttattcttatctccct

SEQ ID NO: 171785 - DNA, 25 bp, Homo sapien
acacgccggcaagaaagcagcaatg

SEQ ID NO: 171786 - DNA, 25 bp, Homo sapien
gaaggcagctggacaatggcacaga

SEQ ID NO: 171787 - DNA, 25 bp, Homo sapien
caagatgttattggccacattccgg

SEQ ID NO: 171788 - DNA, 25 bp, Homo sapien
gcacagaaatatcgtcgcaggtggg

SEQ ID NO: 171789 - DNA, 25 bp, Homo sapien
catcccctccttcacacctcaatac

SEQ ID NO: 171790 - DNA, 25 bp, Homo sapien
ggcaagttcacgacagatttcaaaa

SEQ ID NO: 171791 - DNA, 25 bp, Homo sapien
ggtcagatgtattgttcatgtttac

SEQ ID NO: 171792 - DNA, 25 bp, Homo sapien
acttctgagaccagagtagagcaca

SEQ ID NO: 171793 - DNA, 25 bp, Homo sapien
caggagggcaagttcacgacagatt

SEQ ID NO: 171794 - DNA, 25 bp, Homo sapien
cagagtctccagaggtgagcttcac

SEQ ID NO: 171795 - DNA, 25 bp, Homo sapien
acatggtcagtaggctctggatgag

SEQ ID NO: 171796 - DNA, 25 bp, Homo sapien
aggtgagcttcacggccagatcctc

SEQ ID NO: 171797 - DNA, 25 bp, Homo sapien
tggatgagattcagagtctccagag

SEQ ID NO: 171798 - DNA, 25 bp, Homo sapien
tcaggtcagaaagtgtggccaggca

SEQ ID NO: 171799 - DNA, 25 bp, Homo sapien
tagagaaatgctgagccctccaact

SEQ ID NO: 171800 - DNA, 25 bp, Homo sapien
ttcacacggtacaaatcagcttgcg

SEQ ID NO: 171801 - DNA, 25 bp, Homo sapien
ctctttagactagagagggtggcca

SEQ ID NO: 171802 - DNA, 25 bp, Homo sapien
aagtcagggagcatagccaggcacc

SEQ ID NO: 171803 - DNA, 25 bp, Homo sapien
tcagggagcatagccaggcaccggt

SEQ ID NO: 171804 - DNA, 25 bp, Homo sapien
ctgtaagtcagggagcatagccagg

SEQ ID NO: 171805 - DNA, 25 bp, Homo sapien
agggagcatagccaggcaccggttc

SEQ ID NO: 171806 - DNA, 25 bp, Homo sapien
atgggcagacacatgcccatggagt

SEQ ID NO: 171807 - DNA, 25 bp, Homo sapien
gcagacacatgcccatggagttttt

SEQ ID NO: 171808 - DNA, 25 bp, Homo sapien
agacacatgcccatggagtttttcc

SEQ ID NO: 171809 - DNA, 25 bp, Homo sapien
gggcagacacatgcccatggagttt

SEQ ID NO: 171810 - DNA, 25 bp, Homo sapien
caatccagggccaaaaaggacaaca

SEQ ID NO: 171811 - DNA, 25 bp, Homo sapien
gacgtcagtgtgacaaacacgtaaa

SEQ ID NO: 171812 - DNA, 25 bp, Homo sapien
cgtaaaaaatgatggcttctgtgcc

SEQ ID NO: 171813 - DNA, 25 bp, Homo sapien
aatacactttgctcatgtcgttgcc

SEQ ID NO: 171814 - DNA, 25 bp, Homo sapien
gatgattcttacgtggtctctcttc

SEQ ID NO: 171815 - DNA, 25 bp, Homo sapien
gctgagtctcgggtggttcctaacc

SEQ ID NO: 171816 - DNA, 25 bp, Homo sapien
tcaagtggctgtatggtagtctagc

SEQ ID NO: 171817 - DNA, 25 bp, Homo sapien
cctttcgatgggcacacagggcaag

SEQ ID NO: 171818 - DNA, 25 bp, Homo sapien
gactggggctggaaaccctgggtgc

SEQ ID NO: 171819 - DNA, 25 bp, Homo sapien
gggctggaaaccctgggtgcctgac

SEQ ID NO: 171820 - DNA, 25 bp, Homo sapien
cttagactggggctggaaaccctgg

SEQ ID NO: 171821 - DNA, 25 bp, Homo sapien
ctggggctggaaaccctgggtgcct

SEQ ID NO: 171822 - DNA, 25 bp, Homo sapien
gggcgtccgattcccgcagcaggaa

SEQ ID NO: 171823 - DNA, 25 bp, Homo sapien
aaacttcgctctggattctgccggt

SEQ ID NO: 171824 - DNA, 25 bp, Homo sapien
agcagaaacttcgctctggattctg

SEQ ID NO: 171825 - DNA, 25 bp, Homo sapien
tcgctctggattctgccggtgggaa

SEQ ID NO: 171826 - DNA, 25 bp, Homo sapien
agccgagggccgggcaagacgacat

SEQ ID NO: 171827 - DNA, 25 bp, Homo sapien
tgagaagagacggtgcgggcggaga

SEQ ID NO: 171828 - DNA, 25 bp, Homo sapien
acggtgcgggcggagactctcgggc

SEQ ID NO: 171829 - DNA, 25 bp, Homo sapien
ggcagcgagccgagggccgggcaag

SEQ ID NO: 171830 - DNA, 25 bp, Homo sapien
cacaatagcaaagacttggaaccaa

SEQ ID NO: 171831 - DNA, 25 bp, Homo sapien
actctggagaatgttgtggggtggg

SEQ ID NO: 171832 - DNA, 25 bp, Homo sapien
aacatcacactctggagaatgttgt

SEQ ID NO: 171833 - DNA, 25 bp, Homo sapien
cacatatgtttattgcatcactatt

SEQ ID NO: 171834 - DNA, 25 bp, Homo sapien
tcatagagggcgggaatacacaatc

SEQ ID NO: 171835 - DNA, 25 bp, Homo sapien
catagagggcgggaatacacaatca

SEQ ID NO: 171836 - DNA, 25 bp, Homo sapien
gaagagagtaggtggcaagagcagc

SEQ ID NO: 171837 - DNA, 25 bp, Homo sapien
ctccagagaagagagtaggtggcaa

SEQ ID NO: 171838 - DNA, 25 bp, Homo sapien
cagagaagagagtaggtggcaagag

SEQ ID NO: 171839 - DNA, 25 bp, Homo sapien
gagaagagagtaggtggcaagagca

SEQ ID NO: 171840 - DNA, 25 bp, Homo sapien
aggccaggacagtaggcatggataa

SEQ ID NO: 171841 - DNA, 25 bp, Homo sapien
gccaggtgagtccagctatcagtcc

SEQ ID NO: 171842 - DNA, 25 bp, Homo sapien
gttcataggcctcaaagcttagcag

SEQ ID NO: 171843 - DNA, 25 bp, Homo sapien
gcataagtacggtgactgtagcccc

SEQ ID NO: 171844 - DNA, 25 bp, Homo sapien
acatacaacctcccacccaatgcag

SEQ ID NO: 171845 - DNA, 25 bp, Homo sapien
catacaacctcccacccaatgcagc

SEQ ID NO: 171846 - DNA, 25 bp, Homo sapien
tacaacctcccacccaatgcagcca

SEQ ID NO: 171847 - DNA, 25 bp, Homo sapien
caacctcccacccaatgcagccatg

SEQ ID NO: 171848 - DNA, 25 bp, Homo sapien
ccaggtattggccagtcccaccaca

SEQ ID NO: 171849 - DNA, 25 bp, Homo sapien
tttggggtcatagtgcatcagtgag

SEQ ID NO: 171850 - DNA, 25 bp, Homo sapien
caggtattggccagtcccaccacag

SEQ ID NO: 171851 - DNA, 25 bp, Homo sapien
ctggcttctcaagtttggggtcata

SEQ ID NO: 171852 - DNA, 25 bp, Homo sapien
tggccctccaaaatcgcagctgcgt

SEQ ID NO: 171853 - DNA, 25 bp, Homo sapien
cagctgcgtgggcaaaacatggtgc

SEQ ID NO: 171854 - DNA, 25 bp, Homo sapien
tccaaaatcgcagctgcgtgggcaa

SEQ ID NO: 171855 - DNA, 25 bp, Homo sapien
tcgcagctgcgtgggcaaaacatgg

SEQ ID NO: 171856 - DNA, 25 bp, Homo sapien
gctcagggttgtaggtctccacaga

SEQ ID NO: 171857 - DNA, 25 bp, Homo sapien
accaaggagaaaaggcttcgagcct

SEQ ID NO: 171858 - DNA, 25 bp, Homo sapien
catcattgtgtcttccacccagggc

SEQ ID NO: 171859 - DNA, 25 bp, Homo sapien
agcctgggacaaaggagccatctcc

SEQ ID NO: 171860 - DNA, 25 bp, Homo sapien
ctggacacagtaggacaagagattg

SEQ ID NO: 171861 - DNA, 25 bp, Homo sapien
cgtggttggctaggccagcaatttc

SEQ ID NO: 171862 - DNA, 25 bp, Homo sapien
gggcatccgtggttggctaggccag

SEQ ID NO: 171863 - DNA, 25 bp, Homo sapien
tggacacagtaggacaagagattgg

SEQ ID NO: 171864 - DNA, 25 bp, Homo sapien
cacaccctgcccactcctagaagct

SEQ ID NO: 171865 - DNA, 25 bp, Homo sapien
caccctgcccactcctagaagctta

SEQ ID NO: 171866 - DNA, 25 bp, Homo sapien
ccctgcccactcctagaagcttata

SEQ ID NO: 171867 - DNA, 25 bp, Homo sapien
cttagggcctgccacaccctgccca

SEQ ID NO: 171868 - DNA, 25 bp, Homo sapien
caaaagagacgaggagtcgcaggtc

SEQ ID NO: 171869 - DNA, 25 bp, Homo sapien
tagtgacgggctttgctccagagcc

SEQ ID NO: 171870 - DNA, 25 bp, Homo sapien
ggagatcgtccgcagagatacctct

SEQ ID NO: 171871 - DNA, 25 bp, Homo sapien
catcagctggtgcaacagatctggg

SEQ ID NO: 171872 - DNA, 25 bp, Homo sapien
tggattgtacccttagctctagcca

SEQ ID NO: 171873 - DNA, 25 bp, Homo sapien
gcttgagtcaatccactttctgctt

SEQ ID NO: 171874 - DNA, 25 bp, Homo sapien
gttctactgccatggattgtaccct

SEQ ID NO: 171875 - DNA, 25 bp, Homo sapien
tttctgcttgagtcaatccactttc

SEQ ID NO: 171876 - DNA, 25 bp, Homo sapien
tccgttagcatatgcacctgcagta

SEQ ID NO: 171877 - DNA, 25 bp, Homo sapien
cattccgttagcatatgcacctgca

SEQ ID NO: 171878 - DNA, 25 bp, Homo sapien
cgttagcatatgcacctgcagtaat

SEQ ID NO: 171879 - DNA, 25 bp, Homo sapien
ttccgttagcatatgcacctgcagt

SEQ ID NO: 171880 - DNA, 25 bp, Homo sapien
acccgacgccctctcggtagaggag

SEQ ID NO: 171881 - DNA, 25 bp, Homo sapien
aggagctcgattccgcgcaggttct

SEQ ID NO: 171882 - DNA, 25 bp, Homo sapien
agcttcaagtcacacccgacgccct

SEQ ID NO: 171883 - DNA, 25 bp, Homo sapien
tcggtagaggagctcgattccgcgc

SEQ ID NO: 171884 - DNA, 25 bp, Homo sapien
ccctggggacacctcgaggctgaag

SEQ ID NO: 171885 - DNA, 25 bp, Homo sapien
ccagcagcctgtctcggaagaggct

SEQ ID NO: 171886 - DNA, 25 bp, Homo sapien
ggcttctttacatcttccctggcat

SEQ ID NO: 171887 - DNA, 25 bp, Homo sapien
cagcctgtctcggaagaggctgctg

SEQ ID NO: 171888 - DNA, 25 bp, Homo sapien
tcttcgtccagcaacagtctctgct

SEQ ID NO: 171889 - DNA, 25 bp, Homo sapien
tggctcggatgctcctcgctgcgca

SEQ ID NO: 171890 - DNA, 25 bp, Homo sapien
tcggcgaaaaactggctcggatgct

SEQ ID NO: 171891 - DNA, 25 bp, Homo sapien
ctgggcctcggcgaaaaactggctc

SEQ ID NO: 171892 - DNA, 25 bp, Homo sapien
tcctcttcttcctctagggacaagg

SEQ ID NO: 171893 - DNA, 25 bp, Homo sapien
ctcttcctcttcttcctctagggac

SEQ ID NO: 171894 - DNA, 25 bp, Homo sapien
ttcctcttcttcctctagggacaag

SEQ ID NO: 171895 - DNA, 25 bp, Homo sapien
cttcctcttcttcctctagggacaa

SEQ ID NO: 171896 - DNA, 25 bp, Homo sapien
tctggacgggatgagagacactctc

SEQ ID NO: 171897 - DNA, 25 bp, Homo sapien
gcgtgcacaaggagtccaaggcagt

SEQ ID NO: 171898 - DNA, 25 bp, Homo sapien
cagtccctctggacgggatgagaga

SEQ ID NO: 171899 - DNA, 25 bp, Homo sapien
aaggcaatctgggatcctcgtcggg

SEQ ID NO: 171900 - DNA, 25 bp, Homo sapien
ggcaagacagcctggcgtcagagct

SEQ ID NO: 171901 - DNA, 25 bp, Homo sapien
gcaagacagcctggcgtcagagctg

SEQ ID NO: 171902 - DNA, 25 bp, Homo sapien
tgccgaggtttgctggatagctgca

SEQ ID NO: 171903 - DNA, 25 bp, Homo sapien
gctcatgccgaggtttgctggatag

SEQ ID NO: 171904 - DNA, 25 bp, Homo sapien
tttgtgccgcagttttgagtgtcat

SEQ ID NO: 171905 - DNA, 25 bp, Homo sapien
caggcgagaactctttgctccaggg

SEQ ID NO: 171906 - DNA, 25 bp, Homo sapien
gattggcgctcatggttccctaagt

SEQ ID NO: 171907 - DNA, 25 bp, Homo sapien
acttcagctgggtcataggagtcat

SEQ ID NO: 171908 - DNA, 25 bp, Homo sapien
ggccaaaatcggcaaggccccagtg

SEQ ID NO: 171909 - DNA, 25 bp, Homo sapien
ggttgtctggttagtgtgggcaggt

SEQ ID NO: 171910 - DNA, 25 bp, Homo sapien
gtgtgggcaggtgttcaggtaagct

SEQ ID NO: 171911 - DNA, 25 bp, Homo sapien
tctggttagtgtgggcaggtgttca

SEQ ID NO: 171912 - DNA, 25 bp, Homo sapien
gttagtgtgggcaggtgttcaggta

SEQ ID NO: 171913 - DNA, 25 bp, Homo sapien
caagttagaccaatctccaggctgt

SEQ ID NO: 171914 - DNA, 25 bp, Homo sapien
cacgggacccgatgctataataata

SEQ ID NO: 171915 - DNA, 25 bp, Homo sapien
cacaatggcatccttactcaggagg

SEQ ID NO: 171916 - DNA, 25 bp, Homo sapien
cattcttggttccacagcagcaagc

SEQ ID NO: 171917 - DNA, 25 bp, Homo sapien
gctgagtcatcctggggttccataa

SEQ ID NO: 171918 - DNA, 25 bp, Homo sapien
ttggagtctatagctttgctaggac

SEQ ID NO: 171919 - DNA, 25 bp, Homo sapien
catcaggatagagattgaggcacgg

SEQ ID NO: 171920 - DNA, 25 bp, Homo sapien
tgctaggactcccatgacatcagga

SEQ ID NO: 171921 - DNA, 25 bp, Homo sapien
aacatggtggagagcgagcccttaa

SEQ ID NO: 171922 - DNA, 25 bp, Homo sapien
tgtctatgtcccaataatctaccct

SEQ ID NO: 171923 - DNA, 25 bp, Homo sapien
ggagagcgagcccttaacatccttc

SEQ ID NO: 171924 - DNA, 25 bp, Homo sapien
cctcaccaagaggtgaatcactcac

SEQ ID NO: 171925 - DNA, 25 bp, Homo sapien
tatcatcgctccattgtcaatacag

SEQ ID NO: 171926 - DNA, 25 bp, Homo sapien
tgtaaccccagaatcactgagtggg

SEQ ID NO: 171927 - DNA, 25 bp, Homo sapien
gtcctgtgtccagcccgaaacatct

SEQ ID NO: 171928 - DNA, 25 bp, Homo sapien
cagcctgggctatcatcgctccatt

SEQ ID NO: 171929 - DNA, 25 bp, Homo sapien
cgggctccacgttcctggcacattg

SEQ ID NO: 171930 - DNA, 25 bp, Homo sapien
ctctcatctgtagcaaaaagccggg

SEQ ID NO: 171931 - DNA, 25 bp, Homo sapien
gcacattgttgccatcatctcctgt

SEQ ID NO: 171932 - DNA, 25 bp, Homo sapien
catcatctcctgtagcctcacatta

SEQ ID NO: 171933 - DNA, 25 bp, Homo sapien
gcaaggattgggaagcctactccaa

SEQ ID NO: 171934 - DNA, 25 bp, Homo sapien
cgcttaatgatttagagtaccagga

SEQ ID NO: 171935 - DNA, 25 bp, Homo sapien
taccaggaggaagacgcatagtgtt

SEQ ID NO: 171936 - DNA, 25 bp, Homo sapien
ttcatggtccagcagaacacgtcat

SEQ ID NO: 171937 - DNA, 25 bp, Homo sapien
ggagccacaatgtgccatggctcgc

SEQ ID NO: 171938 - DNA, 25 bp, Homo sapien
acaatgtgccatggctcgctctgtg

SEQ ID NO: 171939 - DNA, 25 bp, Homo sapien
tctctaccagcattgcaaacacagt

SEQ ID NO: 171940 - DNA, 25 bp, Homo sapien
atggctcgctctgtgatctctacca

SEQ ID NO: 171941 - DNA, 25 bp, Homo sapien
gagaaaatattagaggggcatccca

SEQ ID NO: 171942 - DNA, 25 bp, Homo sapien
gattagttctgctctacaatataaa

SEQ ID NO: 171943 - DNA, 25 bp, Homo sapien
gaggggcatcccagattagttctgc

SEQ ID NO: 171944 - DNA, 25 bp, Homo sapien
ggcatcccagattagttctgctcta

SEQ ID NO: 171945 - DNA, 25 bp, Homo sapien
tgtggccagcatccgatgggctaca

SEQ ID NO: 171946 - DNA, 25 bp, Homo sapien
acacagatcctcaggagtacactcg

SEQ ID NO: 171947 - DNA, 25 bp, Homo sapien
tggccagcatccgatgggctacatc

SEQ ID NO: 171948 - DNA, 25 bp, Homo sapien
caggagtacactcgcctgtggccag

SEQ ID NO: 171949 - DNA, 25 bp, Homo sapien
cattcggagggtcatcatgtttcac

SEQ ID NO: 171950 - DNA, 25 bp, Homo sapien
gggattacacgagagcaaaaattaa

SEQ ID NO: 171951 - DNA, 25 bp, Homo sapien
caaaaattaatgcattcggagggtc

SEQ ID NO: 171952 - DNA, 25 bp, Homo sapien
caaatcatggttttgggattacacg

SEQ ID NO: 171953 - DNA, 25 bp, Homo sapien
ctctcaccccttacttatcctgctt

SEQ ID NO: 171954 - DNA, 25 bp, Homo sapien
tctctcaccccttacttatcctgct

SEQ ID NO: 171955 - DNA, 25 bp, Homo sapien
tctcaccccttacttatcctgctta

SEQ ID NO: 171956 - DNA, 25 bp, Homo sapien
cttctaaatgaatttacccagcaca

SEQ ID NO: 171957 - DNA, 25 bp, Homo sapien
gatattcaatgaataccttctaaat

SEQ ID NO: 171958 - DNA, 25 bp, Homo sapien
tccatgctgcatctctactatctag

SEQ ID NO: 171959 - DNA, 25 bp, Homo sapien
ccagcacatgatatggaccagtact

SEQ ID NO: 171960 - DNA, 25 bp, Homo sapien
tgaaagtgcccgtctcatcacctct

SEQ ID NO: 171961 - DNA, 25 bp, Homo sapien
taaaaagcatgaaagtgcccgtctc

SEQ ID NO: 171962 - DNA, 25 bp, Homo sapien
gaaatataatcgtaagtaaaacaga

SEQ ID NO: 171963 - DNA, 25 bp, Homo sapien
cgtaagtaaaacagatatgcttcat

SEQ ID NO: 171964 - DNA, 25 bp, Homo sapien
ggatccctgagaatgagacgtccat

SEQ ID NO: 171965 - DNA, 25 bp, Homo sapien
tgagacgtccatcccctttacagtg

SEQ ID NO: 171966 - DNA, 25 bp, Homo sapien
cctttacagtgtatggcagctcaac

SEQ ID NO: 171967 - DNA, 25 bp, Homo sapien
tatggcagctcaactagcttcttgc

SEQ ID NO: 171968 - DNA, 25 bp, Homo sapien
ctatgtgggaataagcgtacgaggc

SEQ ID NO: 171969 - DNA, 25 bp, Homo sapien
gaataagcgtacgaggcactaagcc

SEQ ID NO: 171970 - DNA, 25 bp, Homo sapien
tacgaggcactaagcctacagtcag

SEQ ID NO: 171971 - DNA, 25 bp, Homo sapien
agcctacagtcagctggcttctcac

SEQ ID NO: 171972 - DNA, 25 bp, Homo sapien
ctgcttccaccttatgtccccttac

SEQ ID NO: 171973 - DNA, 25 bp, Homo sapien
tatatggggaaatccctgaagcccc

SEQ ID NO: 171974 - DNA, 25 bp, Homo sapien
atatggggaaatccctgaagcccca

SEQ ID NO: 171975 - DNA, 25 bp, Homo sapien
tatggggaaatccctgaagccccag

SEQ ID NO: 171976 - DNA, 25 bp, Homo sapien
tatcctggacttgggtcgttagaaa

SEQ ID NO: 171977 - DNA, 25 bp, Homo sapien
caatgttgtatcctggacttgggtc

SEQ ID NO: 171978 - DNA, 25 bp, Homo sapien
tgttgtatcctggacttgggtcgtt

SEQ ID NO: 171979 - DNA, 25 bp, Homo sapien
gttcaatgttgtatcctggacttgg

SEQ ID NO: 171980 - DNA, 25 bp, Homo sapien
caggaagcataagaagctcatttac

SEQ ID NO: 171981 - DNA, 25 bp, Homo sapien
aggaagcataagaagctcatttact

SEQ ID NO: 171982 - DNA, 25 bp, Homo sapien
ggaagcataagaagctcatttacta

SEQ ID NO: 171983 - DNA, 25 bp, Homo sapien
aacgatccagacaattacccactgc

SEQ ID NO: 171984 - DNA, 25 bp, Homo sapien
aacgatgttccgagtatgcaatcac

SEQ ID NO: 171985 - DNA, 25 bp, Homo sapien
tcagcactcgagcaaaacgatccag

SEQ ID NO: 171986 - DNA, 25 bp, Homo sapien
gcaatatcgatggtttccccaaaga

SEQ ID NO: 171987 - DNA, 25 bp, Homo sapien
tgtgaaccaccgtatgcagctgggc

SEQ ID NO: 171988 - DNA, 25 bp, Homo sapien
tatggagtcagactaatggcccagc

SEQ ID NO: 171989 - DNA, 25 bp, Homo sapien
gaggatcaacatgaccaccagggct

SEQ ID NO: 171990 - DNA, 25 bp, Homo sapien
tctgcagacttataacaccgagggc

SEQ ID NO: 171991 - DNA, 25 bp, Homo sapien
aaataataaatcaggtagtgtcctt

SEQ ID NO: 171992 - DNA, 25 bp, Homo sapien
aataataaatcaggtagtgtccttt

SEQ ID NO: 171993 - DNA, 25 bp, Homo sapien
aatcaggtagtgtcctttagttgtt

SEQ ID NO: 171994 - DNA, 25 bp, Homo sapien
gataagccatctaatgttctgatca

SEQ ID NO: 171995 - DNA, 25 bp, Homo sapien
gacattcccatgactcagatagaac

SEQ ID NO: 171996 - DNA, 25 bp, Homo sapien
tgagttgccatacccagcaactgtt

SEQ ID NO: 171997 - DNA, 25 bp, Homo sapien
gatggagtgggtagagccctctaaa

SEQ ID NO: 171998 - DNA, 25 bp, Homo sapien
caatggcttattccacagttgggcc

SEQ ID NO: 171999 - DNA, 25 bp, Homo sapien
cagtacgggccacaacagccacaga

SEQ ID NO: 172000 - DNA, 25 bp, Homo sapien
ctcaatgtggcctatacagtggttc

SEQ ID NO: 172001 - DNA, 25 bp, Homo sapien
ggttcacacccaccaatggcttatt

SEQ ID NO: 172002 - DNA, 25 bp, Homo sapien
gatagaaatggaagttataatccta

SEQ ID NO: 172003 - DNA, 25 bp, Homo sapien
ggcagaggtaaggtgttggctattt

SEQ ID NO: 172004 - DNA, 25 bp, Homo sapien
tgatggtggcagaggtaaggtgttg

SEQ ID NO: 172005 - DNA, 25 bp, Homo sapien
gaagttataatcctagagattggaa

SEQ ID NO: 172006 - DNA, 25 bp, Homo sapien
gtatattcctccatcgttgaccact

SEQ ID NO: 172007 - DNA, 25 bp, Homo sapien
catcgttgaccactctcccagccat

SEQ ID NO: 172008 - DNA, 25 bp, Homo sapien
aggtatattcctccatcgttgacca

SEQ ID NO: 172009 - DNA, 25 bp, Homo sapien
atattcctccatcgttgaccactct

SEQ ID NO: 172010 - DNA, 25 bp, Homo sapien
ccagactctgttagtgcctcctgca

SEQ ID NO: 172011 - DNA, 25 bp, Homo sapien
tcctgggaggttaatccagactctg

SEQ ID NO: 172012 - DNA, 25 bp, Homo sapien
ccttggtgtatgcaatgcagtcgat

SEQ ID NO: 172013 - DNA, 25 bp, Homo sapien
tctaggataacagctcggtgatgcc

SEQ ID NO: 172014 - DNA, 25 bp, Homo sapien
acataggtcagagatcacagggatt

SEQ ID NO: 172015 - DNA, 25 bp, Homo sapien
taggtcagagatcacagggattttc

SEQ ID NO: 172016 - DNA, 25 bp, Homo sapien
cataggtcagagatcacagggattt

SEQ ID NO: 172017 - DNA, 25 bp, Homo sapien
ataggtcagagatcacagggatttt

SEQ ID NO: 172018 - DNA, 25 bp, Homo sapien
gaagtgcgcggaaaactcttaagtc

SEQ ID NO: 172019 - DNA, 25 bp, Homo sapien
gagactcggatcgaaagctgcacct

SEQ ID NO: 172020 - DNA, 25 bp, Homo sapien
tggaatctatactcctgctaagcgt

SEQ ID NO: 172021 - DNA, 25 bp, Homo sapien
catcagatccacgtccaagtgcctg

SEQ ID NO: 172022 - DNA, 25 bp, Homo sapien
tcttattggcgctgccttcaaaacc

SEQ ID NO: 172023 - DNA, 25 bp, Homo sapien
taagtccgccgcgggttcgccagca

SEQ ID NO: 172024 - DNA, 25 bp, Homo sapien
ccaggaggcgtgacgtaagtccgcc

SEQ ID NO: 172025 - DNA, 25 bp, Homo sapien
cacgccaatcttattggcgctgcct

SEQ ID NO: 172026 - DNA, 25 bp, Homo sapien
gctgggagaaaacgccgacaggact

SEQ ID NO: 172027 - DNA, 25 bp, Homo sapien
gtggaggtcctcactagtccgcgct

SEQ ID NO: 172028 - DNA, 25 bp, Homo sapien
agggacctgtcttcctaactgccag

SEQ ID NO: 172029 - DNA, 25 bp, Homo sapien
tctggcacaacgataaacagcccga

SEQ ID NO: 172030 - DNA, 25 bp, Homo sapien
tgacagcaagatccgttccaaggcc

SEQ ID NO: 172031 - DNA, 25 bp, Homo sapien
agaaattgaccttcgcaaccccaag

SEQ ID NO: 172032 - DNA, 25 bp, Homo sapien
gctgtgtggagacctcaatgtggca

SEQ ID NO: 172033 - DNA, 25 bp, Homo sapien
tgaatgctcgatccaagaatgttgg

SEQ ID NO: 172034 - DNA, 25 bp, Homo sapien
tatttacaagcacaggataagtccc

SEQ ID NO: 172035 - DNA, 25 bp, Homo sapien
caggaataggggaacatatcccaca

SEQ ID NO: 172036 - DNA, 25 bp, Homo sapien
ccaacctctggtgaagtgcaatagc

SEQ ID NO: 172037 - DNA, 25 bp, Homo sapien
ccaaagactgagcaaccctacccag

SEQ ID NO: 172038 - DNA, 25 bp, Homo sapien
tgtgtaagggacaggaatggctctc

SEQ ID NO: 172039 - DNA, 25 bp, Homo sapien
caccctgccctggaatgtgtaaggg

SEQ ID NO: 172040 - DNA, 25 bp, Homo sapien
ctagacacagcaacccttggaggaa

SEQ ID NO: 172041 - DNA, 25 bp, Homo sapien
acaaggctggaaccgtcttcagggc

SEQ ID NO: 172042 - DNA, 25 bp, Homo sapien
aggagaagttctggacagggtggct

SEQ ID NO: 172043 - DNA, 25 bp, Homo sapien
tcaggagaagttctggacagggtgg

SEQ ID NO: 172044 - DNA, 25 bp, Homo sapien
gagaagttctggacagggtggctga

SEQ ID NO: 172045 - DNA, 25 bp, Homo sapien
agaagttctggacagggtggctgac

SEQ ID NO: 172046 - DNA, 25 bp, Homo sapien
catatcgccgtgcatgcttccatgt

SEQ ID NO: 172047 - DNA, 25 bp, Homo sapien
cccaggctgcatagatgcctccata

SEQ ID NO: 172048 - DNA, 25 bp, Homo sapien
ttcatacaggcccaataaagagccc

SEQ ID NO: 172049 - DNA, 25 bp, Homo sapien
tacaggcccaataaagagcccggcc

SEQ ID NO: 172050 - DNA, 25 bp, Homo sapien
tgtcctatcctcatcctacagagaa

SEQ ID NO: 172051 - DNA, 25 bp, Homo sapien
tcccttaggcgtaacatactcatcc

SEQ ID NO: 172052 - DNA, 25 bp, Homo sapien
tatctgacaactgagccaggtttga

SEQ ID NO: 172053 - DNA, 25 bp, Homo sapien
taataactcacgcttcagtccttgt

SEQ ID NO: 172054 - DNA, 25 bp, Homo sapien
ggccagtggcagtgactgccaaaag

SEQ ID NO: 172055 - DNA, 25 bp, Homo sapien
tacgtgggtatctgcgcccaataga

SEQ ID NO: 172056 - DNA, 25 bp, Homo sapien
gaagcagcagatacatctcttacgt

SEQ ID NO: 172057 - DNA, 25 bp, Homo sapien
gcagtgactgccaaaagcaagccaa

SEQ ID NO: 172058 - DNA, 25 bp, Homo sapien
tttactccatacatcaattaccagc

SEQ ID NO: 172059 - DNA, 25 bp, Homo sapien
catcaattaccagctcaatccctaa

SEQ ID NO: 172060 - DNA, 25 bp, Homo sapien
ggaggcaaatagaaatggatgcttt

SEQ ID NO: 172061 - DNA, 25 bp, Homo sapien
gggaggcaaatagaaatggatgctt

SEQ ID NO: 172062 - DNA, 25 bp, Homo sapien
ctgcagtgaggacaacgtgccaaag

SEQ ID NO: 172063 - DNA, 25 bp, Homo sapien
caacgtgccaaagtgcggtctgtga

SEQ ID NO: 172064 - DNA, 25 bp, Homo sapien
gccaaagtgcggtctgtgaactctg

SEQ ID NO: 172065 - DNA, 25 bp, Homo sapien
tgaggacaacgtgccaaagtgcggt

SEQ ID NO: 172066 - DNA, 25 bp, Homo sapien
ggtctccctcaatgagaaccttggg

SEQ ID NO: 172067 - DNA, 25 bp, Homo sapien
tatactcgaaatgactcttagtctc

SEQ ID NO: 172068 - DNA, 25 bp, Homo sapien
gggtcattaccattactctaagaaa

SEQ ID NO: 172069 - DNA, 25 bp, Homo sapien
ttcccataggacagacctttcaggg

SEQ ID NO: 172070 - DNA, 25 bp, Homo sapien
ttctggactcagaggtccgggatgc

SEQ ID NO: 172071 - DNA, 25 bp, Homo sapien
tcagaggtccgggatgcacaggccc

SEQ ID NO: 172072 - DNA, 25 bp, Homo sapien
ttgcaatgtccacagataaccctga

SEQ ID NO: 172073 - DNA, 25 bp, Homo sapien
gataaccctgacacccatgggttgg

SEQ ID NO: 172074 - DNA, 25 bp, Homo sapien
tctctgtacttaagatactctgtcc

SEQ ID NO: 172075 - DNA, 25 bp, Homo sapien
actgtataccctcaagaatccttga

SEQ ID NO: 172076 - DNA, 25 bp, Homo sapien
caaggctctctattctccgaaacga

SEQ ID NO: 172077 - DNA, 25 bp, Homo sapien
gaaagacagctataacattcctgag

SEQ ID NO: 172078 - DNA, 25 bp, Homo sapien
tgcagataaggagacagttacaggg

SEQ ID NO: 172079 - DNA, 25 bp, Homo sapien
gcatgcaatccgttgggatgtcact

SEQ ID NO: 172080 - DNA, 25 bp, Homo sapien
tacaggggcatcgaacatatttttt

SEQ ID NO: 172081 - DNA, 25 bp, Homo sapien
cagtagggccgagggcatgcaatcc

SEQ ID NO: 172082 - DNA, 25 bp, Homo sapien
taatagggtcatcagcaagcaaacc

SEQ ID NO: 172083 - DNA, 25 bp, Homo sapien
gacacctggaactgaaacctgggta

SEQ ID NO: 172084 - DNA, 25 bp, Homo sapien
ccaagacatcagaaagaggatccag

SEQ ID NO: 172085 - DNA, 25 bp, Homo sapien
tcaaaagcacttggctaatagccgg

SEQ ID NO: 172086 - DNA, 25 bp, Homo sapien
ggtggcttcattgcagacaccacat

SEQ ID NO: 172087 - DNA, 25 bp, Homo sapien
cactgtccgggctagttaagggtga

SEQ ID NO: 172088 - DNA, 25 bp, Homo sapien
acatttgactacatgctgatgcatc

SEQ ID NO: 172089 - DNA, 25 bp, Homo sapien
ccttccacgttgatgagagattggc

SEQ ID NO: 172090 - DNA, 25 bp, Homo sapien
gcaaatagaagggctgggatcactt

SEQ ID NO: 172091 - DNA, 25 bp, Homo sapien
aaatagaagggctgggatcacttac

SEQ ID NO: 172092 - DNA, 25 bp, Homo sapien
ctggagaggaagcaaatagaagggc

SEQ ID NO: 172093 - DNA, 25 bp, Homo sapien
gaagcaaatagaagggctgggatca

SEQ ID NO: 172094 - DNA, 25 bp, Homo sapien
aagctcggagggcttctcataattg

SEQ ID NO: 172095 - DNA, 25 bp, Homo sapien
cctaggctgtggtcgcgattacgga

SEQ ID NO: 172096 - DNA, 25 bp, Homo sapien
tggcacttctatcaggttgctcaga

SEQ ID NO: 172097 - DNA, 25 bp, Homo sapien
ttcaaccctctgaccaagctcggag

SEQ ID NO: 172098 - DNA, 25 bp, Homo sapien
tacggtggtgcggagggggtcaggc

SEQ ID NO: 172099 - DNA, 25 bp, Homo sapien
cggctccgtacggtggtgcggaggg

SEQ ID NO: 172100 - DNA, 25 bp, Homo sapien
cgtacggtggtgcggagggggtcag

SEQ ID NO: 172101 - DNA, 25 bp, Homo sapien
agcagcggggaacgctctccatctg

SEQ ID NO: 172102 - DNA, 25 bp, Homo sapien
gctcaggtcggcgatccggctccct

SEQ ID NO: 172103 - DNA, 25 bp, Homo sapien
caggtcggcgatccggctcccttcg

SEQ ID NO: 172104 - DNA, 25 bp, Homo sapien
tcccgctcaggtcggcgatccggct

SEQ ID NO: 172105 - DNA, 25 bp, Homo sapien
gccgcctcccgctcaggtcggcgat

SEQ ID NO: 172106 - DNA, 25 bp, Homo sapien
aatcaaaattacatgggcttcagaa

SEQ ID NO: 172107 - DNA, 25 bp, Homo sapien
atcaaaattacatgggcttcagaat

SEQ ID NO: 172108 - DNA, 25 bp, Homo sapien
tcaaaattacatgggcttcagaatc

SEQ ID NO: 172109 - DNA, 25 bp, Homo sapien
tgacgtctgtgctttagtgtaacca

SEQ ID NO: 172110 - DNA, 25 bp, Homo sapien
ccatatgtacacatttggttcccac

SEQ ID NO: 172111 - DNA, 25 bp, Homo sapien
tatactgcgtggtggtgacgtctgt

SEQ ID NO: 172112 - DNA, 25 bp, Homo sapien
tcactctgtaggtccatatgtacac

SEQ ID NO: 172113 - DNA, 25 bp, Homo sapien
ttggccccttgctggagtcatgtgc

SEQ ID NO: 172114 - DNA, 25 bp, Homo sapien
gaccttggcgctacaaaataaagct

SEQ ID NO: 172115 - DNA, 25 bp, Homo sapien
ccaggatttgactcgggccttagaa

SEQ ID NO: 172116 - DNA, 25 bp, Homo sapien
aagccagttgacctgccttggagtc

SEQ ID NO: 172117 - DNA, 25 bp, Homo sapien
actgttgtataaagcttgtacaaaa

SEQ ID NO: 172118 - DNA, 25 bp, Homo sapien
ccgtctctcaggctaaagtgatcct

SEQ ID NO: 172119 - DNA, 25 bp, Homo sapien
tggccttgccctacaatcttaagat

SEQ ID NO: 172120 - DNA, 25 bp, Homo sapien
tacaagtcacacgtgggagctcaaa

SEQ ID NO: 172121 - DNA, 25 bp, Homo sapien
tcaatgatggtatgtgctacaggaa

SEQ ID NO: 172122 - DNA, 25 bp, Homo sapien
tagcgtatgctaagtgtcaatgatg

SEQ ID NO: 172123 - DNA, 25 bp, Homo sapien
gctttttcgactgaactgaggaaga

SEQ ID NO: 172124 - DNA, 25 bp, Homo sapien
caggaattgagagaagaggaccatc

SEQ ID NO: 172125 - DNA, 25 bp, Homo sapien
gccattacatacagatgaatccagg

SEQ ID NO: 172126 - DNA, 25 bp, Homo sapien
gaggacatggcagaagccattacat

SEQ ID NO: 172127 - DNA, 25 bp, Homo sapien
cacacatactaggtgggagattcac

SEQ ID NO: 172128 - DNA, 25 bp, Homo sapien
gcagtgggctttatgattgcggaac

SEQ ID NO: 172129 - DNA, 25 bp, Homo sapien
aacaaactgaaatgcttaaagtgaa

SEQ ID NO: 172130 - DNA, 25 bp, Homo sapien
tacaactggtaacatggcagactat

SEQ ID NO: 172131 - DNA, 25 bp, Homo sapien
ctccagacttgggaatacaactggt

SEQ ID NO: 172132 - DNA, 25 bp, Homo sapien
cagagcctcagtgctagattcttgc

SEQ ID NO: 172133 - DNA, 25 bp, Homo sapien
ttcttgcttagagaccccaaaggct

SEQ ID NO: 172134 - DNA, 25 bp, Homo sapien
tcaggtatcctcagcagtgtacaag

SEQ ID NO: 172135 - DNA, 25 bp, Homo sapien
ggaaggcaacaactcactagaagca

SEQ ID NO: 172136 - DNA, 25 bp, Homo sapien
tcctttctgagggaaccatgcttgc

SEQ ID NO: 172137 - DNA, 25 bp, Homo sapien
ccattctggtgctggaagctggact

SEQ ID NO: 172138 - DNA, 25 bp, Homo sapien
tactcagccaaaaaggaccggttga

SEQ ID NO: 172139 - DNA, 25 bp, Homo sapien
gtggcagagcagagtacccaaagta

SEQ ID NO: 172140 - DNA, 25 bp, Homo sapien
agcagagtacccaaagtacaagtgg

SEQ ID NO: 172141 - DNA, 25 bp, Homo sapien
taatagcaacatatgggatttcctg

SEQ ID NO: 172142 - DNA, 25 bp, Homo sapien
gaaggaatctcataaatgctggtct

SEQ ID NO: 172143 - DNA, 25 bp, Homo sapien
tcctggagggaacctctcctttgag

SEQ ID NO: 172144 - DNA, 25 bp, Homo sapien
caaagaaacgggatgctctcctgga

SEQ ID NO: 172145 - DNA, 25 bp, Homo sapien
tggtctttcatgagcccctcaagat

SEQ ID NO: 172146 - DNA, 25 bp, Homo sapien
cagggttactgagcacaagaagcgg

SEQ ID NO: 172147 - DNA, 25 bp, Homo sapien
ttaacccggccaaacatgtcaaagc

SEQ ID NO: 172148 - DNA, 25 bp, Homo sapien
gaagctagaattctccgcactgcca

SEQ ID NO: 172149 - DNA, 25 bp, Homo sapien
ggtaaatcaggtagagaagctctct

SEQ ID NO: 172150 - DNA, 25 bp, Homo sapien
tgttctgctttcaaaatctcctcac

SEQ ID NO: 172151 - DNA, 25 bp, Homo sapien
tggttgcaggagtttgtattatttc

SEQ ID NO: 172152 - DNA, 25 bp, Homo sapien
tctgttctgctttcaaaatctcctc

SEQ ID NO: 172153 - DNA, 25 bp, Homo sapien
aaatggttgcaggagtttgtattat

SEQ ID NO: 172154 - DNA, 25 bp, Homo sapien
ggtgggagtggagacgggcatttgg

SEQ ID NO: 172155 - DNA, 25 bp, Homo sapien
gcaagcctacagagactgatgtctc

SEQ ID NO: 172156 - DNA, 25 bp, Homo sapien
caagcctacagagactgatgtctcc

SEQ ID NO: 172157 - DNA, 25 bp, Homo sapien
gaggcaggtaacctctccaagataa

SEQ ID NO: 172158 - DNA, 25 bp, Homo sapien
cagcggaggctgaactggacttcca

SEQ ID NO: 172159 - DNA, 25 bp, Homo sapien
tccaagataaccctgcacagcggag

SEQ ID NO: 172160 - DNA, 25 bp, Homo sapien
cagatgcagtcatgtcacctatgaa

SEQ ID NO: 172161 - DNA, 25 bp, Homo sapien
gagttcttttcatgtccaacccttg

SEQ ID NO: 172162 - DNA, 25 bp, Homo sapien
tgtccaacccttggtcatcttccat

SEQ ID NO: 172163 - DNA, 25 bp, Homo sapien
ccttagagttcttttcatgtccaac

SEQ ID NO: 172164 - DNA, 25 bp, Homo sapien
tcttttcatgtccaacccttggtca

SEQ ID NO: 172165 - DNA, 25 bp, Homo sapien
gcattccaggttcaataaggacacg

SEQ ID NO: 172166 - DNA, 25 bp, Homo sapien
gggcgatatgacaaagacaccatcc

SEQ ID NO: 172167 - DNA, 25 bp, Homo sapien
caagtgataaggacgtagcccttcc

SEQ ID NO: 172168 - DNA, 25 bp, Homo sapien
gaagtaatgttctgccacccaacgg

SEQ ID NO: 172169 - DNA, 25 bp, Homo sapien
gaattctgcaccaaatatgataaag

SEQ ID NO: 172170 - DNA, 25 bp, Homo sapien
gattatttaaacaacgcctacactg

SEQ ID NO: 172171 - DNA, 25 bp, Homo sapien
tgtttggccaaacccacattgatta

SEQ ID NO: 172172 - DNA, 25 bp, Homo sapien
ctacactgacaagggaaagccagct

SEQ ID NO: 172173 - DNA, 25 bp, Homo sapien
agtgtgagcacataccctttgaaga

SEQ ID NO: 172174 - DNA, 25 bp, Homo sapien
tatggccacacatcgatgaagaaga

SEQ ID NO: 172175 - DNA, 25 bp, Homo sapien
taagcagaatgttgaaccacgaacg

SEQ ID NO: 172176 - DNA, 25 bp, Homo sapien
tcaaggttgaagaccagtcctgcct

SEQ ID NO: 172177 - DNA, 25 bp, Homo sapien
ccagttagaataaataatcaggagt

SEQ ID NO: 172178 - DNA, 25 bp, Homo sapien
gttcactatagtgctaaagagtaga

SEQ ID NO: 172179 - DNA, 25 bp, Homo sapien
ccctagtcctaaagctctgtgggat

SEQ ID NO: 172180 - DNA, 25 bp, Homo sapien
tagtaagaccctagtcctaaagctc

SEQ ID NO: 172181 - DNA, 25 bp, Homo sapien
ttacaacttagagccacaaactaac

SEQ ID NO: 172182 - DNA, 25 bp, Homo sapien
tgaggtaacactatggtattggcac

SEQ ID NO: 172183 - DNA, 25 bp, Homo sapien
tatcttctctaatgaggtaacacta

SEQ ID NO: 172184 - DNA, 25 bp, Homo sapien
ctgtcagcactgtcaatatcttctc

SEQ ID NO: 172185 - DNA, 25 bp, Homo sapien
cagcactgtcaatatcttctctaat

SEQ ID NO: 172186 - DNA, 25 bp, Homo sapien
gattctgtacaaacttgcagctggg

SEQ ID NO: 172187 - DNA, 25 bp, Homo sapien
cacagcagcttatgccaggattctg

SEQ ID NO: 172188 - DNA, 25 bp, Homo sapien
gcaacactctttgtcattacccgaa

SEQ ID NO: 172189 - DNA, 25 bp, Homo sapien
tattgctccacttgcacgatccgtt

SEQ ID NO: 172190 - DNA, 25 bp, Homo sapien
tgtagaggaagattccactttgttg

SEQ ID NO: 172191 - DNA, 25 bp, Homo sapien
agctaaaagtgaaatcgtgtttgtt

SEQ ID NO: 172192 - DNA, 25 bp, Homo sapien
cactttgttgcagagctaaaagtga

SEQ ID NO: 172193 - DNA, 25 bp, Homo sapien
ttccttcggcaagttgatcctgtag

SEQ ID NO: 172194 - DNA, 25 bp, Homo sapien
cagtttctattcagatgctgagggc

SEQ ID NO: 172195 - DNA, 25 bp, Homo sapien
tttctattcagatgctgagggctct

SEQ ID NO: 172196 - DNA, 25 bp, Homo sapien
gttcagtttctattcagatgctgag

SEQ ID NO: 172197 - DNA, 25 bp, Homo sapien
ctgttcagtttctattcagatgctg

SEQ ID NO: 172198 - DNA, 25 bp, Homo sapien
aggttgcaaactgtccttcacttac

SEQ ID NO: 172199 - DNA, 25 bp, Homo sapien
aaggttgcaaactgtccttcactta

SEQ ID NO: 172200 - DNA, 25 bp, Homo sapien
gagctaacaactagcgtaagtgcac

SEQ ID NO: 172201 - DNA, 25 bp, Homo sapien
tgatcaatcgcatggaacttgatgg

SEQ ID NO: 172202 - DNA, 25 bp, Homo sapien
cctcctaaatctgatcaatcgcatg

SEQ ID NO: 172203 - DNA, 25 bp, Homo sapien
acttgatggttacaaaagacagagc

SEQ ID NO: 172204 - DNA, 25 bp, Homo sapien
cttgaactaagtccaaatgagcaat

SEQ ID NO: 172205 - DNA, 25 bp, Homo sapien
gaagtctctcaactgaaaagatcag

SEQ ID NO: 172206 - DNA, 25 bp, Homo sapien
tgagcaatgaacagctgaagtctct

SEQ ID NO: 172207 - DNA, 25 bp, Homo sapien
agatcaggacagagagtgctctcca

SEQ ID NO: 172208 - DNA, 25 bp, Homo sapien
gctctaggtcactgtatgagtctct

SEQ ID NO: 172209 - DNA, 25 bp, Homo sapien
tatgagtctctagctctcacataca

SEQ ID NO: 172210 - DNA, 25 bp, Homo sapien
taggtcactgtatgagtctctagct

SEQ ID NO: 172211 - DNA, 25 bp, Homo sapien
cactgtatgagtctctagctctcac

SEQ ID NO: 172212 - DNA, 25 bp, Homo sapien
aaacaatcccaacccagcaatacag

SEQ ID NO: 172213 - DNA, 25 bp, Homo sapien
acaatcccaacccagcaatacagga

SEQ ID NO: 172214 - DNA, 25 bp, Homo sapien
aacaatcccaacccagcaatacagg

SEQ ID NO: 172215 - DNA, 25 bp, Homo sapien
aaggcattgccccatgtccacggtc

SEQ ID NO: 172216 - DNA, 25 bp, Homo sapien
caatgccattgagagaagagatctc

SEQ ID NO: 172217 - DNA, 25 bp, Homo sapien
ctcagactcgggagctgatcttgag

SEQ ID NO: 172218 - DNA, 25 bp, Homo sapien
agagatctcagactcgggagctgat

SEQ ID NO: 172219 - DNA, 25 bp, Homo sapien
tagccaaggaaactatctggcctca

SEQ ID NO: 172220 - DNA, 25 bp, Homo sapien
gccaaggaaactatctggcctcaag

SEQ ID NO: 172221 - DNA, 25 bp, Homo sapien
aggaaactatctggcctcaagtcat

SEQ ID NO: 172222 - DNA, 25 bp, Homo sapien
caaggaaactatctggcctcaagtc

SEQ ID NO: 172223 - DNA, 25 bp, Homo sapien
gtaccttgcaggaacgggaacgtca

SEQ ID NO: 172224 - DNA, 25 bp, Homo sapien
tatcttgtgccttcaatgagctgac

SEQ ID NO: 172225 - DNA, 25 bp, Homo sapien
gaacgtcattctgagggtagtccac

SEQ ID NO: 172226 - DNA, 25 bp, Homo sapien
tcgaggcctctcatggatgaagaca

SEQ ID NO: 172227 - DNA, 25 bp, Homo sapien
ggtaacatagccttttgatcatgaa

SEQ ID NO: 172228 - DNA, 25 bp, Homo sapien
cttgctgttccctgacaataactga

SEQ ID NO: 172229 - DNA, 25 bp, Homo sapien
taactgatagagagcctgttgttga

SEQ ID NO: 172230 - DNA, 25 bp, Homo sapien
tgaatttgacaaaatcgcttgtgtc

SEQ ID NO: 172231 - DNA, 25 bp, Homo sapien
agcaggacagtcgggtaaggcaggt

SEQ ID NO: 172232 - DNA, 25 bp, Homo sapien
ggacagtcgggtaaggcaggtcctg

SEQ ID NO: 172233 - DNA, 25 bp, Homo sapien
caggacagtcgggtaaggcaggtcc

SEQ ID NO: 172234 - DNA, 25 bp, Homo sapien
acagtcgggtaaggcaggtcctgaa

SEQ ID NO: 172235 - DNA, 25 bp, Homo sapien
ctgttcctgatcgtgggcaggacat

SEQ ID NO: 172236 - DNA, 25 bp, Homo sapien
aagctgttcctgatcgtgggcagga

SEQ ID NO: 172237 - DNA, 25 bp, Homo sapien
tggagtagatagactggggcctgtg

SEQ ID NO: 172238 - DNA, 25 bp, Homo sapien
acaagctgttcctgatcgtgggcag

SEQ ID NO: 172239 - DNA, 25 bp, Homo sapien
gggacctctcgcaccctaagcgaga

SEQ ID NO: 172240 - DNA, 25 bp, Homo sapien
ggatttgaacccgggacctctcgca

SEQ ID NO: 172241 - DNA, 25 bp, Homo sapien
ctcgcaccctaagcgagaatcatac

SEQ ID NO: 172242 - DNA, 25 bp, Homo sapien
tgaacccgggacctctcgcacccta

SEQ ID NO: 172243 - DNA, 25 bp, Homo sapien
aaggcggcgccttgtgactgcagat

SEQ ID NO: 172244 - DNA, 25 bp, Homo sapien
tccggtggtcggaaggcatctcgtc

SEQ ID NO: 172245 - DNA, 25 bp, Homo sapien
gcatctcgtccttaacaggtaccga

SEQ ID NO: 172246 - DNA, 25 bp, Homo sapien
gttttcacttccgagtgagccgaag

SEQ ID NO: 172247 - DNA, 25 bp, Homo sapien
gggacctctcgcaccctaagcgaga

SEQ ID NO: 172248 - DNA, 25 bp, Homo sapien
ggatttgaacccgggacctctcgca

SEQ ID NO: 172249 - DNA, 25 bp, Homo sapien
tgaacccgggacctctcgcacccta

SEQ ID NO: 172250 - DNA, 25 bp, Homo sapien
ctcgcaccctaagcgagaatcatac

SEQ ID NO: 172251 - DNA, 25 bp, Homo sapien
gtcacgttgctgccgcgttgtccga

SEQ ID NO: 172252 - DNA, 25 bp, Homo sapien
ccccgcttacctcctgatgtggaaa

SEQ ID NO: 172253 - DNA, 25 bp, Homo sapien
aagaggcgccgaagacatgcagatg

SEQ ID NO: 172254 - DNA, 25 bp, Homo sapien
tgtgccaagcggcagtcacgttgct

SEQ ID NO: 172255 - DNA, 25 bp, Homo sapien
caggccccagcgagaattgaactcg

SEQ ID NO: 172256 - DNA, 25 bp, Homo sapien
gagaattgaactcgcgacccctggt

SEQ ID NO: 172257 - DNA, 25 bp, Homo sapien
agcgagaattgaactcgcgacccct

SEQ ID NO: 172258 - DNA, 25 bp, Homo sapien
gtttacaagaccagcgctctaaccc

SEQ ID NO: 172259 - DNA, 25 bp, Homo sapien
tattagacttagcatcagcaaacct

SEQ ID NO: 172260 - DNA, 25 bp, Homo sapien
tccacaattcactcgagttggcgtg

SEQ ID NO: 172261 - DNA, 25 bp, Homo sapien
gctttgcggagagggttctcactcc

SEQ ID NO: 172262 - DNA, 25 bp, Homo sapien
cgtgtctgacgctacgaaactccaa

SEQ ID NO: 172263 - DNA, 25 bp, Homo sapien
gactcaccttcttatatgggctttg

SEQ ID NO: 172264 - DNA, 25 bp, Homo sapien
ttttcttcaatccttaaggactcac

SEQ ID NO: 172265 - DNA, 25 bp, Homo sapien
cccataggtctgaatcagggtggcg

SEQ ID NO: 172266 - DNA, 25 bp, Homo sapien
tcatgtggcagcacccataggtctg

SEQ ID NO: 172267 - DNA, 25 bp, Homo sapien
ttgctgtgaatgacacaactcccac

SEQ ID NO: 172268 - DNA, 25 bp, Homo sapien
cttgctgtgaatgacacaactccca

SEQ ID NO: 172269 - DNA, 25 bp, Homo sapien
cccataggcgtcaaagatactagct

SEQ ID NO: 172270 - DNA, 25 bp, Homo sapien
ggtgcagtctctactacgttttgaa

SEQ ID NO: 172271 - DNA, 25 bp, Homo sapien
tcacgaacaacttgggaagcccata

SEQ ID NO: 172272 - DNA, 25 bp, Homo sapien
cctttgggtaggcatagggcataat

SEQ ID NO: 172273 - DNA, 25 bp, Homo sapien
gacctcatgattcgccctcctcagc

SEQ ID NO: 172274 - DNA, 25 bp, Homo sapien
tcctcagcctcccaaagcgctggga

SEQ ID NO: 172275 - DNA, 25 bp, Homo sapien
cctcatgattcgccctcctcagcct

SEQ ID NO: 172276 - DNA, 25 bp, Homo sapien
acctcatgattcgccctcctcagcc

SEQ ID NO: 172277 - DNA, 25 bp, Homo sapien
tagtttaagcataaggtggtcagga

SEQ ID NO: 172278 - DNA, 25 bp, Homo sapien
tcattacctagtttaagcataaggt

SEQ ID NO: 172279 - DNA, 25 bp, Homo sapien
aggtggtcaggaagtttttgcagaa

SEQ ID NO: 172280 - DNA, 25 bp, Homo sapien
taagcataaggtggtcaggaagttt

SEQ ID NO: 172281 - DNA, 25 bp, Homo sapien
caagaccagtgctctaacccctgag

SEQ ID NO: 172282 - DNA, 25 bp, Homo sapien
tgctctaacccctgagctatggagc

SEQ ID NO: 172283 - DNA, 25 bp, Homo sapien
gaggccccagcgagatttgaactcg

SEQ ID NO: 172284 - DNA, 25 bp, Homo sapien
cagcgagatttgaactcgcgacccc

SEQ ID NO: 172285 - DNA, 25 bp, Homo sapien
gaacccgcacgttgactttcctgga

SEQ ID NO: 172286 - DNA, 25 bp, Homo sapien
tgtgcattgaccgacacagctcggc

SEQ ID NO: 172287 - DNA, 25 bp, Homo sapien
tttctaccttcggaacgctgcgtct

SEQ ID NO: 172288 - DNA, 25 bp, Homo sapien
caggccgcctgagatggttctagtc

SEQ ID NO: 172289 - DNA, 25 bp, Homo sapien
gctccgcagcgcagtgttgcactct

SEQ ID NO: 172290 - DNA, 25 bp, Homo sapien
tgttgtagtgagactgcctttccga

SEQ ID NO: 172291 - DNA, 25 bp, Homo sapien
caagcgctgttgcatcgttcgaatg

SEQ ID NO: 172292 - DNA, 25 bp, Homo sapien
gcctttccgacagttgcaagcgctg

SEQ ID NO: 172293 - DNA, 25 bp, Homo sapien
aagattccctaaaacgcctgccact

SEQ ID NO: 172294 - DNA, 25 bp, Homo sapien
gattccctaaaacgcctgccactac

SEQ ID NO: 172295 - DNA, 25 bp, Homo sapien
agattccctaaaacgcctgccacta

SEQ ID NO: 172296 - DNA, 25 bp, Homo sapien
cagtgggccactgtcgcagaagaag

SEQ ID NO: 172297 - DNA, 25 bp, Homo sapien
aatgaggccgtaggacacagcagtg

SEQ ID NO: 172298 - DNA, 25 bp, Homo sapien
ttagtgtccacagaaccactctgcg

SEQ ID NO: 172299 - DNA, 25 bp, Homo sapien
gaagatacaatgacgagggaggcca

SEQ ID NO: 172300 - DNA, 25 bp, Homo sapien
tgtagtcgagtatcagcccttacca

SEQ ID NO: 172301 - DNA, 25 bp, Homo sapien
gacagccaacagtaagaactcggag

SEQ ID NO: 172302 - DNA, 25 bp, Homo sapien
tcggaggccccgagaaagaagtaga

SEQ ID NO: 172303 - DNA, 25 bp, Homo sapien
gaaatagtgtgttgccttgagagga

SEQ ID NO: 172304 - DNA, 25 bp, Homo sapien
tgttggatcactactgtggttccca

SEQ ID NO: 172305 - DNA, 25 bp, Homo sapien
ctctgttggatcactactgtggttc

SEQ ID NO: 172306 - DNA, 25 bp, Homo sapien
tctgttggatcactactgtggttcc

SEQ ID NO: 172307 - DNA, 25 bp, Homo sapien
tggatcactactgtggttcccatca

SEQ ID NO: 172308 - DNA, 25 bp, Homo sapien
gcaggtcctctgcttacagtcctga

SEQ ID NO: 172309 - DNA, 25 bp, Homo sapien
gagcaggtcctctgcttacagtcct

SEQ ID NO: 172310 - DNA, 25 bp, Homo sapien
atgatcctggtaagagcaggtcctc

SEQ ID NO: 172311 - DNA, 25 bp, Homo sapien
catgatcctggtaagagcaggtcct

SEQ ID NO: 172312 - DNA, 25 bp, Homo sapien
cctttgttcaagaaagggtgattgg

SEQ ID NO: 172313 - DNA, 25 bp, Homo sapien
gaaagggtgattgggaatatttctg

SEQ ID NO: 172314 - DNA, 25 bp, Homo sapien
tctgcatttgtctgtcaactacatc

SEQ ID NO: 172315 - DNA, 25 bp, Homo sapien
ctgtcaactacatcaaaccaggtca

SEQ ID NO: 172316 - DNA, 25 bp, Homo sapien
caaatgtttctacaggctacagtcc

SEQ ID NO: 172317 - DNA, 25 bp, Homo sapien
gtttctacaggctacagtcctccgc

SEQ ID NO: 172318 - DNA, 25 bp, Homo sapien
cacaaatgtttctacaggctacagt

SEQ ID NO: 172319 - DNA, 25 bp, Homo sapien
aatgtttctacaggctacagtcctc

SEQ ID NO: 172320 - DNA, 25 bp, Homo sapien
gcaagactccttgcaactctagtcg

SEQ ID NO: 172321 - DNA, 25 bp, Homo sapien
gatctttcagcaaatgcaagactcc

SEQ ID NO: 172322 - DNA, 25 bp, Homo sapien
taagttggttggaactcgccttaga

SEQ ID NO: 172323 - DNA, 25 bp, Homo sapien
tctagtcgtccaataagctttaagt

SEQ ID NO: 172324 - DNA, 25 bp, Homo sapien
cttttgcggcggaacaaaatcctct

SEQ ID NO: 172325 - DNA, 25 bp, Homo sapien
cgcgctccttttgcggcggaacaaa

SEQ ID NO: 172326 - DNA, 25 bp, Homo sapien
tgcggcggaacaaaatcctctggct

SEQ ID NO: 172327 - DNA, 25 bp, Homo sapien
tttgcggcggaacaaaatcctctgg

SEQ ID NO: 172328 - DNA, 25 bp, Homo sapien
aaagccatagaatcatcctgggcac

SEQ ID NO: 172329 - DNA, 25 bp, Homo sapien
cactggcgatgccacagcttggcct

SEQ ID NO: 172330 - DNA, 25 bp, Homo sapien
tgggcactggcgatgccacagcttg

SEQ ID NO: 172331 - DNA, 25 bp, Homo sapien
atcctgggcactggcgatgccacag

SEQ ID NO: 172332 - DNA, 25 bp, Homo sapien
gggccacgttcccatgggccatttg

SEQ ID NO: 172333 - DNA, 25 bp, Homo sapien
ggccacgttcccatgggccatttgg

SEQ ID NO: 172334 - DNA, 25 bp, Homo sapien
gccacgttcccatgggccatttggc

SEQ ID NO: 172335 - DNA, 25 bp, Homo sapien
cttttctagcaggggccaaactccg

SEQ ID NO: 172336 - DNA, 25 bp, Homo sapien
tcttttctagcaggggccaaactcc

SEQ ID NO: 172337 - DNA, 25 bp, Homo sapien
ttgaactgaatattaggtcctttct

SEQ ID NO: 172338 - DNA, 25 bp, Homo sapien
tgaactgaatattaggtcctttctt

SEQ ID NO: 172339 - DNA, 25 bp, Homo sapien
taagcttgacgttctccagggaact

SEQ ID NO: 172340 - DNA, 25 bp, Homo sapien
tcaagtaagcttgacgttctccagg

SEQ ID NO: 172341 - DNA, 25 bp, Homo sapien
tgacgttctccagggaacttgacct

SEQ ID NO: 172342 - DNA, 25 bp, Homo sapien
ttgacgttctccagggaacttgacc

SEQ ID NO: 172343 - DNA, 25 bp, Homo sapien
aaggtgagcacagcggttttgtcac

SEQ ID NO: 172344 - DNA, 25 bp, Homo sapien
aaaggtgagcacagcggttttgtca

SEQ ID NO: 172345 - DNA, 25 bp, Homo sapien
tcaaaggtgagcacagcggttttgt

SEQ ID NO: 172346 - DNA, 25 bp, Homo sapien
ggagatgctcaagctcgagagcagt

SEQ ID NO: 172347 - DNA, 25 bp, Homo sapien
taaggatgtccgcaaatgtctatac

SEQ ID NO: 172348 - DNA, 25 bp, Homo sapien
ctaaggatgtccgcaaatgtctata

SEQ ID NO: 172349 - DNA, 25 bp, Homo sapien
aaggatgtccgcaaatgtctataca

SEQ ID NO: 172350 - DNA, 25 bp, Homo sapien
tggaagagaaccctgcgccgcttga

SEQ ID NO: 172351 - DNA, 25 bp, Homo sapien
ggtgtctctcgggctctgatagcca

SEQ ID NO: 172352 - DNA, 25 bp, Homo sapien
cggagcaaatcctctgggcgaggat

SEQ ID NO: 172353 - DNA, 25 bp, Homo sapien
tcctctccctgagcatccacctttc

SEQ ID NO: 172354 - DNA, 25 bp, Homo sapien
gtcagcgagggcacagggattggcg

SEQ ID NO: 172355 - DNA, 25 bp, Homo sapien
cagggattggcgaggtggttgggtg

SEQ ID NO: 172356 - DNA, 25 bp, Homo sapien
agcgagggcacagggattggcgagg

SEQ ID NO: 172357 - DNA, 25 bp, Homo sapien
gggcacagggattggcgaggtggtt

SEQ ID NO: 172358 - DNA, 25 bp, Homo sapien
gaagtgaggtgaggaaatctctccc

SEQ ID NO: 172359 - DNA, 25 bp, Homo sapien
cttctgcaaacaggctgagaattcc

SEQ ID NO: 172360 - DNA, 25 bp, Homo sapien
ggaaatctctcccaggcttgcagag

SEQ ID NO: 172361 - DNA, 25 bp, Homo sapien
attgaggtgcactgggaagtgaggt

SEQ ID NO: 172362 - DNA, 25 bp, Homo sapien
aggcaccctctctgcagcagaacac

SEQ ID NO: 172363 - DNA, 25 bp, Homo sapien
cactccgagaccactgaggcaccct

SEQ ID NO: 172364 - DNA, 25 bp, Homo sapien
gaggcaccctctctgcagcagaaca

SEQ ID NO: 172365 - DNA, 25 bp, Homo sapien
tccgagaccactgaggcaccctctc

SEQ ID NO: 172366 - DNA, 25 bp, Homo sapien
accaaacccatttgttggctcacct

SEQ ID NO: 172367 - DNA, 25 bp, Homo sapien
cttcacttgtgccagccaccaaacc

SEQ ID NO: 172368 - DNA, 25 bp, Homo sapien
ccaagggctctggtgactccacgcc

SEQ ID NO: 172369 - DNA, 25 bp, Homo sapien
gggctctggtgactccacgccccat

SEQ ID NO: 172370 - DNA, 25 bp, Homo sapien
gtcattggagctggggtctctctgt

SEQ ID NO: 172371 - DNA, 25 bp, Homo sapien
tggtctttgcctttggtgtcattgg

SEQ ID NO: 172372 - DNA, 25 bp, Homo sapien
ctttggtccctctttgttagctggt

SEQ ID NO: 172373 - DNA, 25 bp, Homo sapien
tgtgcctccagagccatagaagcat

SEQ ID NO: 172374 - DNA, 25 bp, Homo sapien
aacgtttccgcagtctacagtcctc

SEQ ID NO: 172375 - DNA, 25 bp, Homo sapien
gtttccgcagtctacagtcctccgc

SEQ ID NO: 172376 - DNA, 25 bp, Homo sapien
cgtttccgcagtctacagtcctccg

SEQ ID NO: 172377 - DNA, 25 bp, Homo sapien
acgtttccgcagtctacagtcctcc

SEQ ID NO: 172378 - DNA, 25 bp, Homo sapien
gcccctttccggacagagcaaatcc

SEQ ID NO: 172379 - DNA, 25 bp, Homo sapien
ggaagagaactctgcgccggtctcc

SEQ ID NO: 172380 - DNA, 25 bp, Homo sapien
actgcgcccctttccggacagagca

SEQ ID NO: 172381 - DNA, 25 bp, Homo sapien
ctctggggcgccgatagccacgatc

SEQ ID NO: 172382 - DNA, 25 bp, Homo sapien
ctctttctgcttgtgaagatgacag

SEQ ID NO: 172383 - DNA, 25 bp, Homo sapien
ctttctgcttgtgaagatgacagcc

SEQ ID NO: 172384 - DNA, 25 bp, Homo sapien
ttcctctccctctgcatcgctcttt

SEQ ID NO: 172385 - DNA, 25 bp, Homo sapien
cctctgcatcgctctttctgcttgt

SEQ ID NO: 172386 - DNA, 25 bp, Homo sapien
cataaaagcttcgatccagtcctct

SEQ ID NO: 172387 - DNA, 25 bp, Homo sapien
ctgctgctttctaaagtaggggccc

SEQ ID NO: 172388 - DNA, 25 bp, Homo sapien
aaggccagcataaaagcttcgatcc

SEQ ID NO: 172389 - DNA, 25 bp, Homo sapien
cctctgctactgaccaagaatcctt

SEQ ID NO: 172390 - DNA, 25 bp, Homo sapien
tgatgaccaaacaccactcaatggc

SEQ ID NO: 172391 - DNA, 25 bp, Homo sapien
aagtcatggtcagggatcacccaca

SEQ ID NO: 172392 - DNA, 25 bp, Homo sapien
tggtaccgccacatcttatcaagga

SEQ ID NO: 172393 - DNA, 25 bp, Homo sapien
gcaatgtcattcgaggctgggatct

SEQ ID NO: 172394 - DNA, 25 bp, Homo sapien
gccacccaagcttcaattctgctcc

SEQ ID NO: 172395 - DNA, 25 bp, Homo sapien
agctgccacccaagcttcaattctg

SEQ ID NO: 172396 - DNA, 25 bp, Homo sapien
ggcagctgccacccaagcttcaatt

SEQ ID NO: 172397 - DNA, 25 bp, Homo sapien
ctgccacccaagcttcaattctgct

SEQ ID NO: 172398 - DNA, 25 bp, Homo sapien
ttttgcagactttgaactgagtgga

SEQ ID NO: 172399 - DNA, 25 bp, Homo sapien
ccttcacaaccagtaagacacttgg

SEQ ID NO: 172400 - DNA, 25 bp, Homo sapien
acttggtataggtgtttttgcagac

SEQ ID NO: 172401 - DNA, 25 bp, Homo sapien
tgcagactttgaactgagtggaagg

SEQ ID NO: 172402 - DNA, 25 bp, Homo sapien
aaggatgtccgcaaatgtctgtaca

SEQ ID NO: 172403 - DNA, 25 bp, Homo sapien
ctaaggatgtccgcaaatgtctgta

SEQ ID NO: 172404 - DNA, 25 bp, Homo sapien
taaggatgtccgcaaatgtctgtac

SEQ ID NO: 172405 - DNA, 25 bp, Homo sapien
ggatgtccgcaaatgtctgtacaat

SEQ ID NO: 172406 - DNA, 25 bp, Homo sapien
tccaggacgggaggctctcgcctgt

SEQ ID NO: 172407 - DNA, 25 bp, Homo sapien
agtgtggtttcctcgcgtcccagag

SEQ ID NO: 172408 - DNA, 25 bp, Homo sapien
gtggagcaaatcctccgagtgtggt

SEQ ID NO: 172409 - DNA, 25 bp, Homo sapien
gtcccagagcgctgatagccacaat

SEQ ID NO: 172410 - DNA, 25 bp, Homo sapien
tggtgaatccacagcttggctcctt

SEQ ID NO: 172411 - DNA, 25 bp, Homo sapien
tccagattgagacccacaatgaagc

SEQ ID NO: 172412 - DNA, 25 bp, Homo sapien
ggttgcatctgtacaccaagtgtct

SEQ ID NO: 172413 - DNA, 25 bp, Homo sapien
gccatacaatcgtctcagagcactg

SEQ ID NO: 172414 - DNA, 25 bp, Homo sapien
cttgggatgagaccaagggacactc

SEQ ID NO: 172415 - DNA, 25 bp, Homo sapien
cagatatgaagctccactggttggt

SEQ ID NO: 172416 - DNA, 25 bp, Homo sapien
gcatctccacagatatgaagctcca

SEQ ID NO: 172417 - DNA, 25 bp, Homo sapien
tctccacagatatgaagctccactg

SEQ ID NO: 172418 - DNA, 25 bp, Homo sapien
tgaagctccactggttggtgaaagc

SEQ ID NO: 172419 - DNA, 25 bp, Homo sapien
ggtatcatggttgtcctcgacccta

SEQ ID NO: 172420 - DNA, 25 bp, Homo sapien
tcctgaatgcttgatggtctcctgg

SEQ ID NO: 172421 - DNA, 25 bp, Homo sapien
agggtgagttcacggatggtatcat

SEQ ID NO: 172422 - DNA, 25 bp, Homo sapien
ggttgtcctcgaccctacactgttg

SEQ ID NO: 172423 - DNA, 25 bp, Homo sapien
tggtcaggagagcttggtcacagat

SEQ ID NO: 172424 - DNA, 25 bp, Homo sapien
gattggctgggtcacaaagcagaag

SEQ ID NO: 172425 - DNA, 25 bp, Homo sapien
actgaagtgtactggcaacagcaca

SEQ ID NO: 172426 - DNA, 25 bp, Homo sapien
tccagctgtgttgccagattcccca

SEQ ID NO: 172427 - DNA, 25 bp, Homo sapien
tgtccacagatgtgtacagtcctcc

SEQ ID NO: 172428 - DNA, 25 bp, Homo sapien
tccctcaagcaggaattgaaccagc

SEQ ID NO: 172429 - DNA, 25 bp, Homo sapien
acctaaggatgtccacagatgtgta

SEQ ID NO: 172430 - DNA, 25 bp, Homo sapien
tgtgtacagtcctccactctatcag

SEQ ID NO: 172431 - DNA, 25 bp, Homo sapien
tgcagcagtgggatttaaacccacg

SEQ ID NO: 172432 - DNA, 25 bp, Homo sapien
cagcagtgggatttaaacccacgtc

SEQ ID NO: 172433 - DNA, 25 bp, Homo sapien
ttgcagcagtgggatttaaacccac

SEQ ID NO: 172434 - DNA, 25 bp, Homo sapien
cttgcagcagtgggatttaaaccca

SEQ ID NO: 172435 - DNA, 25 bp, Homo sapien
ctttttgcagctttatgtttgagca

SEQ ID NO: 172436 - DNA, 25 bp, Homo sapien
ttttgcagctttatgtttgagcatc

SEQ ID NO: 172437 - DNA, 25 bp, Homo sapien
tttttgcagctttatgtttgagcat

SEQ ID NO: 172438 - DNA, 25 bp, Homo sapien
tttgcagctttatgtttgagcatct

SEQ ID NO: 172439 - DNA, 25 bp, Homo sapien
gatgaactatcgtttggcagagagg

SEQ ID NO: 172440 - DNA, 25 bp, Homo sapien
cattggaaagcttccaggccggcga

SEQ ID NO: 172441 - DNA, 25 bp, Homo sapien
taatcaggttataagcaggcaagag

SEQ ID NO: 172442 - DNA, 25 bp, Homo sapien
ttagtaacaggacatgaggcactct

SEQ ID NO: 172443 - DNA, 25 bp, Homo sapien
tggaacccatctcccgttgaaggga

SEQ ID NO: 172444 - DNA, 25 bp, Homo sapien
atctcccgttgaagggaaactgcca

SEQ ID NO: 172445 - DNA, 25 bp, Homo sapien
cacttgcaagctacatggaggttcc

SEQ ID NO: 172446 - DNA, 25 bp, Homo sapien
cacagggccgggatgacagatactg

SEQ ID NO: 172447 - DNA, 25 bp, Homo sapien
tattcatggcaacaagcgcagcatc

SEQ ID NO: 172448 - DNA, 25 bp, Homo sapien
gatcagtcaattttccgtcgtccgt

SEQ ID NO: 172449 - DNA, 25 bp, Homo sapien
cgtggctccccaatactcaggttat

SEQ ID NO: 172450 - DNA, 25 bp, Homo sapien
tcaggttatagaacattgtccaggt

SEQ ID NO: 172451 - DNA, 25 bp, Homo sapien
tggtctcagtattccctatggtggc

SEQ ID NO: 172452 - DNA, 25 bp, Homo sapien
ttgtccaggtaccacctaggagagc

SEQ ID NO: 172453 - DNA, 25 bp, Homo sapien
cagggaaatcgctgtttcataggaa

SEQ ID NO: 172454 - DNA, 25 bp, Homo sapien
cttggagcattatcatcgcatagtt

SEQ ID NO: 172455 - DNA, 25 bp, Homo sapien
ctggtgttcagggaaatcgctgttt

SEQ ID NO: 172456 - DNA, 25 bp, Homo sapien
tatcatcgcatagtttgctctggtg

SEQ ID NO: 172457 - DNA, 25 bp, Homo sapien
tcttgttctatcacaaccacaagct

SEQ ID NO: 172458 - DNA, 25 bp, Homo sapien
tttatcctgcgtgaatcaattgaag

SEQ ID NO: 172459 - DNA, 25 bp, Homo sapien
ggcaggtcattttatcctgcgtgaa

SEQ ID NO: 172460 - DNA, 25 bp, Homo sapien
ggtcattttatcctgcgtgaatcaa

SEQ ID NO: 172461 - DNA, 25 bp, Homo sapien
tactctgtccacacaaacctggcag

SEQ ID NO: 172462 - DNA, 25 bp, Homo sapien
ttttatactctgtccacacaaacct

SEQ ID NO: 172463 - DNA, 25 bp, Homo sapien
tatactctgtccacacaaacctggc

SEQ ID NO: 172464 - DNA, 25 bp, Homo sapien
tggcagccacgcagtcagtccctgc

SEQ ID NO: 172465 - DNA, 25 bp, Homo sapien
ctaggcacctctaagatactgatgg

SEQ ID NO: 172466 - DNA, 25 bp, Homo sapien
gccaggatggcatgtaccagcgatt

SEQ ID NO: 172467 - DNA, 25 bp, Homo sapien
ggtccagccctcctatggccaggat

SEQ ID NO: 172468 - DNA, 25 bp, Homo sapien
agcgattcctgcggcaacacgtgca

SEQ ID NO: 172469 - DNA, 25 bp, Homo sapien
agaggtttaattgcagggctgctga

SEQ ID NO: 172470 - DNA, 25 bp, Homo sapien
catgtaatggtaataggtcttttgc

SEQ ID NO: 172471 - DNA, 25 bp, Homo sapien
gatgtgcacagcatgtcaatatgcc

SEQ ID NO: 172472 - DNA, 25 bp, Homo sapien
agttcatcagttgggctctttaaag

SEQ ID NO: 172473 - DNA, 25 bp, Homo sapien
ccaggttgattgtctgctgtgtcag

SEQ ID NO: 172474 - DNA, 25 bp, Homo sapien
ggctcacaagtccaaccaggttgat

SEQ ID NO: 172475 - DNA, 25 bp, Homo sapien
tatgcgtggtttgactccagccagc

SEQ ID NO: 172476 - DNA, 25 bp, Homo sapien
gggcgatttttaccgaaatgtgatg

SEQ ID NO: 172477 - DNA, 25 bp, Homo sapien
gtagacggtaggctttgctgcttcg

SEQ ID NO: 172478 - DNA, 25 bp, Homo sapien
gtgtgattgcattcatggtaatagg

SEQ ID NO: 172479 - DNA, 25 bp, Homo sapien
actgcactaaccagtgagtgtaagc

SEQ ID NO: 172480 - DNA, 25 bp, Homo sapien
agataaaaggtgtagacggtaggct

SEQ ID NO: 172481 - DNA, 25 bp, Homo sapien
gcacctggctcaatgttgtacaact

SEQ ID NO: 172482 - DNA, 25 bp, Homo sapien
ggctcaatgttgtacaactttatct

SEQ ID NO: 172483 - DNA, 25 bp, Homo sapien
cctggctcaatgttgtacaacttta

SEQ ID NO: 172484 - DNA, 25 bp, Homo sapien
ccgcacctggctcaatgttgtacaa

SEQ ID NO: 172485 - DNA, 25 bp, Homo sapien
gcagggagctcaagtctctcaggga

SEQ ID NO: 172486 - DNA, 25 bp, Homo sapien
cagggagctcaagtctctcagggag

SEQ ID NO: 172487 - DNA, 25 bp, Homo sapien
agggagctcaagtctctcagggagc

SEQ ID NO: 172488 - DNA, 25 bp, Homo sapien
agcagggagctcaagtctctcaggg

SEQ ID NO: 172489 - DNA, 25 bp, Homo sapien
cctgatgtaactataacttgctgta

SEQ ID NO: 172490 - DNA, 25 bp, Homo sapien
cagtgtggacaacgtgtgcgtgggc

SEQ ID NO: 172491 - DNA, 25 bp, Homo sapien
gtgtcctgaccctgatgtaactata

SEQ ID NO: 172492 - DNA, 25 bp, Homo sapien
gaacagtgtggacaacgtgtgcgtg

SEQ ID NO: 172493 - DNA, 25 bp, Homo sapien
tccagagtctcgtcatccaactcct

SEQ ID NO: 172494 - DNA, 25 bp, Homo sapien
ctggttgtatctgaactggatttga

SEQ ID NO: 172495 - DNA, 25 bp, Homo sapien
atctgaactggatttgattcaacac

SEQ ID NO: 172496 - DNA, 25 bp, Homo sapien
tcactccatctgctgatcgtcatcc

SEQ ID NO: 172497 - DNA, 25 bp, Homo sapien
gaggagcaccagggcatcttcgtac

SEQ ID NO: 172498 - DNA, 25 bp, Homo sapien
gggaggagcaccagggcatcttcgt

SEQ ID NO: 172499 - DNA, 25 bp, Homo sapien
tggggaggagcaccagggcatcttc

SEQ ID NO: 172500 - DNA, 25 bp, Homo sapien
ctgtggggaggagcaccagggcatc

SEQ ID NO: 172501 - DNA, 25 bp, Homo sapien
tatttgtcagatagtccaaaaagag

SEQ ID NO: 172502 - DNA, 25 bp, Homo sapien
ccaaaaagagtgtccagtatccaaa

SEQ ID NO: 172503 - DNA, 25 bp, Homo sapien
gagtgtccagtatccaaacaagaga

SEQ ID NO: 172504 - DNA, 25 bp, Homo sapien
gatagtccaaaaagagtgtccagta

SEQ ID NO: 172505 - DNA, 25 bp, Homo sapien
tcatgagtaggctgatgaaatgtgt

SEQ ID NO: 172506 - DNA, 25 bp, Homo sapien
atgagtaggctgatgaaatgtgtac

SEQ ID NO: 172507 - DNA, 25 bp, Homo sapien
cttcatgagtaggctgatgaaatgt

SEQ ID NO: 172508 - DNA, 25 bp, Homo sapien
catgagtaggctgatgaaatgtgta

SEQ ID NO: 172509 - DNA, 25 bp, Homo sapien
ggagtaagactcgattcttcttagg

SEQ ID NO: 172510 - DNA, 25 bp, Homo sapien
gaactgggagtaagactcgattctt

SEQ ID NO: 172511 - DNA, 25 bp, Homo sapien
aagactcgattcttcttaggtgaac

SEQ ID NO: 172512 - DNA, 25 bp, Homo sapien
tcgattcttcttaggtgaacactca

SEQ ID NO: 172513 - DNA, 25 bp, Homo sapien
cactgtgtgggcattgttatccttg

SEQ ID NO: 172514 - DNA, 25 bp, Homo sapien
tctcatcgagctcttctagcctgct

SEQ ID NO: 172515 - DNA, 25 bp, Homo sapien
tcgagctcttctagcctgctcttca

SEQ ID NO: 172516 - DNA, 25 bp, Homo sapien
actgtgtgggcattgttatccttgg

SEQ ID NO: 172517 - DNA, 25 bp, Homo sapien
aggaggtagaaagtctgctggaaca

SEQ ID NO: 172518 - DNA, 25 bp, Homo sapien
gaggtagaaagtctgctggaacata

SEQ ID NO: 172519 - DNA, 25 bp, Homo sapien
caggaggtagaaagtctgctggaac

SEQ ID NO: 172520 - DNA, 25 bp, Homo sapien
gcaggaggtagaaagtctgctggaa

SEQ ID NO: 172521 - DNA, 25 bp, Homo sapien
tggaaatgagttcactgatgcaggg

SEQ ID NO: 172522 - DNA, 25 bp, Homo sapien
cagggcatggccaggacccccggcc

SEQ ID NO: 172523 - DNA, 25 bp, Homo sapien
cttggaaatgagttcactgatgcag

SEQ ID NO: 172524 - DNA, 25 bp, Homo sapien
gaaatgagttcactgatgcagggca

SEQ ID NO: 172525 - DNA, 25 bp, Homo sapien
ctggctgctgccgttaactgacgcc

SEQ ID NO: 172526 - DNA, 25 bp, Homo sapien
gctgccgttaactgacgccatcttt

SEQ ID NO: 172527 - DNA, 25 bp, Homo sapien
ggctgctgccgttaactgacgccat

SEQ ID NO: 172528 - DNA, 25 bp, Homo sapien
gctgctgccgttaactgacgccatc

SEQ ID NO: 172529 - DNA, 25 bp, Homo sapien
ggcacggatgtcacagccaaatcac

SEQ ID NO: 172530 - DNA, 25 bp, Homo sapien
ctggcacggatgtcacagccaaatc

SEQ ID NO: 172531 - DNA, 25 bp, Homo sapien
tggcacggatgtcacagccaaatca

SEQ ID NO: 172532 - DNA, 25 bp, Homo sapien
atacaactgaagagatgggctaggc

SEQ ID NO: 172533 - DNA, 25 bp, Homo sapien
tgatgccggcagacagaggaataca

SEQ ID NO: 172534 - DNA, 25 bp, Homo sapien
ggaatacaactgaagagatgggcta

SEQ ID NO: 172535 - DNA, 25 bp, Homo sapien
gcaaagtggaaggtggtggtaagga

SEQ ID NO: 172536 - DNA, 25 bp, Homo sapien
aaggcaagggaacagatatactcac

SEQ ID NO: 172537 - DNA, 25 bp, Homo sapien
ggcaagggaacagatatactcactc

SEQ ID NO: 172538 - DNA, 25 bp, Homo sapien
tccaaggcaagggaacagatatact

SEQ ID NO: 172539 - DNA, 25 bp, Homo sapien
caagggaacagatatactcactcac

SEQ ID NO: 172540 - DNA, 25 bp, Homo sapien
tggctgaactaggactctgccacag

SEQ ID NO: 172541 - DNA, 25 bp, Homo sapien
gattcaacagtttggctgaactagg

SEQ ID NO: 172542 - DNA, 25 bp, Homo sapien
tctgccacaggttactcagtaagtc

SEQ ID NO: 172543 - DNA, 25 bp, Homo sapien
gatgggaattggctgattcaacagt

SEQ ID NO: 172544 - DNA, 25 bp, Homo sapien
ccagacagtccccaagatagcggtc

SEQ ID NO: 172545 - DNA, 25 bp, Homo sapien
agtccccaagatagcggtcagcagc

SEQ ID NO: 172546 - DNA, 25 bp, Homo sapien
gacagtccccaagatagcggtcagc

SEQ ID NO: 172547 - DNA, 25 bp, Homo sapien
aagatagcggtcagcagcccaagca

SEQ ID NO: 172548 - DNA, 25 bp, Homo sapien
gccagctcctctgaagttgtcttca

SEQ ID NO: 172549 - DNA, 25 bp, Homo sapien
ctgaggtcctcgtggggacaagcca

SEQ ID NO: 172550 - DNA, 25 bp, Homo sapien
agtggcagcttctgcaactcctcct

SEQ ID NO: 172551 - DNA, 25 bp, Homo sapien
cacactgaggtcctcgtggggacaa

SEQ ID NO: 172552 - DNA, 25 bp, Homo sapien
gatcggcccaaggggggttgtcaca

SEQ ID NO: 172553 - DNA, 25 bp, Homo sapien
caaggggggttgtcacaggggattg

SEQ ID NO: 172554 - DNA, 25 bp, Homo sapien
gggttgtcacaggggattggttcaa

SEQ ID NO: 172555 - DNA, 25 bp, Homo sapien
atcggcccaaggggggttgtcacag

SEQ ID NO: 172556 - DNA, 25 bp, Homo sapien
tcctgacgtccaatatcaacaataa

SEQ ID NO: 172557 - DNA, 25 bp, Homo sapien
atcctgacgtccaatatcaacaata

SEQ ID NO: 172558 - DNA, 25 bp, Homo sapien
ctgacgtccaatatcaacaataact

SEQ ID NO: 172559 - DNA, 25 bp, Homo sapien
cctgacgtccaatatcaacaataac

SEQ ID NO: 172560 - DNA, 25 bp, Homo sapien
taaggtaaggttttatggtgagcca

SEQ ID NO: 172561 - DNA, 25 bp, Homo sapien
ttcctagtgctggagagaaagtaca

SEQ ID NO: 172562 - DNA, 25 bp, Homo sapien
agaatctccaggctcctatttgctg

SEQ ID NO: 172563 - DNA, 25 bp, Homo sapien
ctccaggctcctatttgctgggcaa

SEQ ID NO: 172564 - DNA, 25 bp, Homo sapien
tgttaaactgtacatcattacatag

SEQ ID NO: 172565 - DNA, 25 bp, Homo sapien
tgagaggggcttcttcagatgccat

SEQ ID NO: 172566 - DNA, 25 bp, Homo sapien
tttccaatgctctgagaggggcttc

SEQ ID NO: 172567 - DNA, 25 bp, Homo sapien
cgtgaaaaagttctgtcatcagcct

SEQ ID NO: 172568 - DNA, 25 bp, Homo sapien
tgtcatcagcctttccaatgctctg

SEQ ID NO: 172569 - DNA, 25 bp, Homo sapien
ttcttgggctttggacacatcctac

SEQ ID NO: 172570 - DNA, 25 bp, Homo sapien
gatcctctaaaaagggcagggctgc

SEQ ID NO: 172571 - DNA, 25 bp, Homo sapien
tggtcccggcagactagggaagtcc

SEQ ID NO: 172572 - DNA, 25 bp, Homo sapien
cctactcgcccagttcaggtcatgg

SEQ ID NO: 172573 - DNA, 25 bp, Homo sapien
gattgaatccgaaaaggacatttga

SEQ ID NO: 172574 - DNA, 25 bp, Homo sapien
agtgtcctgattgaatccgaaaagg

SEQ ID NO: 172575 - DNA, 25 bp, Homo sapien
ccaagacttgtacatagtgtcctga

SEQ ID NO: 172576 - DNA, 25 bp, Homo sapien
tacatagtgtcctgattgaatccga

SEQ ID NO: 172577 - DNA, 25 bp, Homo sapien
gagaattcgagtgcctaggatgcca

SEQ ID NO: 172578 - DNA, 25 bp, Homo sapien
ttcaggaaagtatccccagtgccgc

SEQ ID NO: 172579 - DNA, 25 bp, Homo sapien
tgactgcagactcacttcaggaaag

SEQ ID NO: 172580 - DNA, 25 bp, Homo sapien
cagtgccgctatagtgctgctgccc

SEQ ID NO: 172581 - DNA, 25 bp, Homo sapien
caatgccagaaacagtacctagaca

SEQ ID NO: 172582 - DNA, 25 bp, Homo sapien
tctccaaagtgaatcagatttacag

SEQ ID NO: 172583 - DNA, 25 bp, Homo sapien
tacctagacagaaccgcttcagaaa

SEQ ID NO: 172584 - DNA, 25 bp, Homo sapien
taattactccattcaccgttctcca

SEQ ID NO: 172585 - DNA, 25 bp, Homo sapien
cactcttcacccccaaaatcacgca

SEQ ID NO: 172586 - DNA, 25 bp, Homo sapien
ccactcttcacccccaaaatcacgc

SEQ ID NO: 172587 - DNA, 25 bp, Homo sapien
ccacctcacaacccactcttcaccc

SEQ ID NO: 172588 - DNA, 25 bp, Homo sapien
ctcacaacccactcttcacccccaa

SEQ ID NO: 172589 - DNA, 25 bp, Homo sapien
tgtgttgaataggagccctaactgt

SEQ ID NO: 172590 - DNA, 25 bp, Homo sapien
tacttctttcacagcagggaaggaa

SEQ ID NO: 172591 - DNA, 25 bp, Homo sapien
taggagccctaactgtagttacttc

SEQ ID NO: 172592 - DNA, 25 bp, Homo sapien
aggtggggtatctcgctgctctgac

SEQ ID NO: 172593 - DNA, 25 bp, Homo sapien
tacctggagccgtttgtcaggcggc

SEQ ID NO: 172594 - DNA, 25 bp, Homo sapien
aatgatgtgtctctccttcgggctg

SEQ ID NO: 172595 - DNA, 25 bp, Homo sapien
aactgtctgagtccatatgctgccg

SEQ ID NO: 172596 - DNA, 25 bp, Homo sapien
tcaaagtggactggcacatatgggc

SEQ ID NO: 172597 - DNA, 25 bp, Homo sapien
tggcccgggattccttgcccaggga

SEQ ID NO: 172598 - DNA, 25 bp, Homo sapien
cttggcccgggattccttgcccagg

SEQ ID NO: 172599 - DNA, 25 bp, Homo sapien
tcttggcccgggattccttgcccag

SEQ ID NO: 172600 - DNA, 25 bp, Homo sapien
ttcttggcccgggattccttgccca

SEQ ID NO: 172601 - DNA, 25 bp, Homo sapien
aaggagccggacaagagacttctcc

SEQ ID NO: 172602 - DNA, 25 bp, Homo sapien
gcaccagcagtatcaggacaagcag

SEQ ID NO: 172603 - DNA, 25 bp, Homo sapien
agaaggagccggacaagagacttct

SEQ ID NO: 172604 - DNA, 25 bp, Homo sapien
accagcagtatcaggacaagcagaa

SEQ ID NO: 172605 - DNA, 25 bp, Homo sapien
ggtggcctcactttcccagaaaagc

SEQ ID NO: 172606 - DNA, 25 bp, Homo sapien
aagacgtccatcctacttcctgagg

SEQ ID NO: 172607 - DNA, 25 bp, Homo sapien
gagaaggaaaagagccctcttagaa

SEQ ID NO: 172608 - DNA, 25 bp, Homo sapien
tatggcttgcctggtttacactttc

SEQ ID NO: 172609 - DNA, 25 bp, Homo sapien
tacactttctgtttcaggtcagcca

SEQ ID NO: 172610 - DNA, 25 bp, Homo sapien
tttattcccactctccaaagcgagg

SEQ ID NO: 172611 - DNA, 25 bp, Homo sapien
gagcgttttattcccactctccaaa

SEQ ID NO: 172612 - DNA, 25 bp, Homo sapien
ttccacgagcgttttattcccactc

SEQ ID NO: 172613 - DNA, 25 bp, Homo sapien
ttcccactctccaaagcgaggtctt

SEQ ID NO: 172614 - DNA, 25 bp, Homo sapien
tactggagtttctttgatccaaaat

SEQ ID NO: 172615 - DNA, 25 bp, Homo sapien
tcctgtcagttcctatctttgaata

SEQ ID NO: 172616 - DNA, 25 bp, Homo sapien
ctggagtttctttgatccaaaatac

SEQ ID NO: 172617 - DNA, 25 bp, Homo sapien
cctatctttgaatactggagtttct

SEQ ID NO: 172618 - DNA, 25 bp, Homo sapien
aattgtatccccgacatccagggcc

SEQ ID NO: 172619 - DNA, 25 bp, Homo sapien
gcataagggaactcaggccagtgcc

SEQ ID NO: 172620 - DNA, 25 bp, Homo sapien
ttccagagagaaacgctggcctccc

SEQ ID NO: 172621 - DNA, 25 bp, Homo sapien
tccagtcccatggatgctctgcagc

SEQ ID NO: 172622 - DNA, 25 bp, Homo sapien
tgaggaaggagtggtgaatcaccca

SEQ ID NO: 172623 - DNA, 25 bp, Homo sapien
agtccttgttacttcttcgtgggcg

SEQ ID NO: 172624 - DNA, 25 bp, Homo sapien
gagaaagccactacagcactggtgc

SEQ ID NO: 172625 - DNA, 25 bp, Homo sapien
caaacctggcacactaggaacaaag

SEQ ID NO: 172626 - DNA, 25 bp, Homo sapien
tcttcattacttcgggtctctttga

SEQ ID NO: 172627 - DNA, 25 bp, Homo sapien
aaggcttcgccagcatcggcacaca

SEQ ID NO: 172628 - DNA, 25 bp, Homo sapien
gctgcctgatctggccatgtgaacc

SEQ ID NO: 172629 - DNA, 25 bp, Homo sapien
ctcttgtaaggacgaaggcttcgcc

SEQ ID NO: 172630 - DNA, 25 bp, Homo sapien
tttacccctatagatcagccaacgg

SEQ ID NO: 172631 - DNA, 25 bp, Homo sapien
gaagaccttgacagtgctgcacaga

SEQ ID NO: 172632 - DNA, 25 bp, Homo sapien
cagtatcggtggtgtcctctaggga

SEQ ID NO: 172633 - DNA, 25 bp, Homo sapien
tgccgttgtcaggaggaacctagcc

SEQ ID NO: 172634 - DNA, 25 bp, Homo sapien
ccacattactggatctagagaaaga

SEQ ID NO: 172635 - DNA, 25 bp, Homo sapien
gctacttcacggaaagttaagcctg

SEQ ID NO: 172636 - DNA, 25 bp, Homo sapien
gaccttggttctggaggctacttca

SEQ ID NO: 172637 - DNA, 25 bp, Homo sapien
caggaagagggtccacatctgtgtc

SEQ ID NO: 172638 - DNA, 25 bp, Homo sapien
tggagccacgtttcctgtgaagaaa

SEQ ID NO: 172639 - DNA, 25 bp, Homo sapien
tccttgcttcaggtaccagatcaca

SEQ ID NO: 172640 - DNA, 25 bp, Homo sapien
gaaagatggagtggaccttccttgc

SEQ ID NO: 172641 - DNA, 25 bp, Homo sapien
gtcttcccataacctcagagtagca

SEQ ID NO: 172642 - DNA, 25 bp, Homo sapien
tcctcggttaagtgacacacacggg

SEQ ID NO: 172643 - DNA, 25 bp, Homo sapien
gagacgttcttccactacagtagct

SEQ ID NO: 172644 - DNA, 25 bp, Homo sapien
tgcaggagcttcagtacagcagttc

SEQ ID NO: 172645 - DNA, 25 bp, Homo sapien
cccaggattcctcggttaagtgaca

SEQ ID NO: 172646 - DNA, 25 bp, Homo sapien
taggccactgtagtaatctgctcag

SEQ ID NO: 172647 - DNA, 25 bp, Homo sapien
gggctccgtcccacaagactatcag

SEQ ID NO: 172648 - DNA, 25 bp, Homo sapien
gaactgattccagctgcgtatccta

SEQ ID NO: 172649 - DNA, 25 bp, Homo sapien
cacttccggccaccaaatacgggag

SEQ ID NO: 172650 - DNA, 25 bp, Homo sapien
atatcaaagtagatcatgtgtacta

SEQ ID NO: 172651 - DNA, 25 bp, Homo sapien
tcaaagtagatcatgtgtactagtt

SEQ ID NO: 172652 - DNA, 25 bp, Homo sapien
tatcaaagtagatcatgtgtactag

SEQ ID NO: 172653 - DNA, 25 bp, Homo sapien
atcaaagtagatcatgtgtactagt

SEQ ID NO: 172654 - DNA, 25 bp, Homo sapien
taaaatctgtggtcattctgccggc

SEQ ID NO: 172655 - DNA, 25 bp, Homo sapien
tgtccttgggtatccgttgctcagc

SEQ ID NO: 172656 - DNA, 25 bp, Homo sapien
gatgattgcgcaagtggaccatgtg

SEQ ID NO: 172657 - DNA, 25 bp, Homo sapien
gcatatagttttcatccagagtcca

SEQ ID NO: 172658 - DNA, 25 bp, Homo sapien
aattctcataggagccacagcgcgg

SEQ ID NO: 172659 - DNA, 25 bp, Homo sapien
cagcgcggagactgtgtaagtcaac

SEQ ID NO: 172660 - DNA, 25 bp, Homo sapien
caagggatgctttatttaaatagtt

SEQ ID NO: 172661 - DNA, 25 bp, Homo sapien
acaatccccagagttgggacaggag

SEQ ID NO: 172662 - DNA, 25 bp, Homo sapien
caccaatgcaatgcgggtaattaac

SEQ ID NO: 172663 - DNA, 25 bp, Homo sapien
tgtggtaacccaactataacctgcc

SEQ ID NO: 172664 - DNA, 25 bp, Homo sapien
taacaattatcaacggcgatggaaa

SEQ ID NO: 172665 - DNA, 25 bp, Homo sapien
catcagtaggaaccagctccaatgc

SEQ ID NO: 172666 - DNA, 25 bp, Homo sapien
taatcacttgctcagctctgctagc

SEQ ID NO: 172667 - DNA, 25 bp, Homo sapien
cactacgttggcatgactgatgaaa

SEQ ID NO: 172668 - DNA, 25 bp, Homo sapien
gatgaaattattcgccactgctgat

SEQ ID NO: 172669 - DNA, 25 bp, Homo sapien
caggtgccactcgtctcattaatgt

SEQ ID NO: 172670 - DNA, 25 bp, Homo sapien
tctccttcctctaatcttgtagaaa

SEQ ID NO: 172671 - DNA, 25 bp, Homo sapien
ggaaagggttttctgcagagcagat

SEQ ID NO: 172672 - DNA, 25 bp, Homo sapien
tagaaatggaatccccgttgcctct

SEQ ID NO: 172673 - DNA, 25 bp, Homo sapien
tcagaggttgatactcctagtagaa

SEQ ID NO: 172674 - DNA, 25 bp, Homo sapien
ccacattactggatctagagaaaga

SEQ ID NO: 172675 - DNA, 25 bp, Homo sapien
gctacttcacggaaagttaagcctg

SEQ ID NO: 172676 - DNA, 25 bp, Homo sapien
gaccttggttctggaggctacttca

SEQ ID NO: 172677 - DNA, 25 bp, Homo sapien
caggaagagggtccacatctgtgtc

SEQ ID NO: 172678 - DNA, 25 bp, Homo sapien
aatctgcagtttgctaaaggcaaac

SEQ ID NO: 172679 - DNA, 25 bp, Homo sapien
tgcagtttgctaaaggcaaacgcat

SEQ ID NO: 172680 - DNA, 25 bp, Homo sapien
aaggcaaacgcataggcaagattca

SEQ ID NO: 172681 - DNA, 25 bp, Homo sapien
tcaaatctgcagtttgctaaaggca

SEQ ID NO: 172682 - DNA, 25 bp, Homo sapien
gagcgtccacactggagtcatattt

SEQ ID NO: 172683 - DNA, 25 bp, Homo sapien
gaggtgagaagaaagagcgtccaca

SEQ ID NO: 172684 - DNA, 25 bp, Homo sapien
gcagtggattgaggagacttttcca

SEQ ID NO: 172685 - DNA, 25 bp, Homo sapien
tggaggacaggagtctgggcagtgg

SEQ ID NO: 172686 - DNA, 25 bp, Homo sapien
gccaaggacgctcagccattggagt

SEQ ID NO: 172687 - DNA, 25 bp, Homo sapien
acattgcggtcatcgcggatcgccg

SEQ ID NO: 172688 - DNA, 25 bp, Homo sapien
tgaggattccggaaaggaagcatcg

SEQ ID NO: 172689 - DNA, 25 bp, Homo sapien
tggtgccgctctgccgccaaggacg

SEQ ID NO: 172690 - DNA, 25 bp, Homo sapien
gaggaactcactctgtcacatcctt

SEQ ID NO: 172691 - DNA, 25 bp, Homo sapien
ccttcttcctctgacgcacccaaca

SEQ ID NO: 172692 - DNA, 25 bp, Homo sapien
ctgaggaactcactctgtcacatcc

SEQ ID NO: 172693 - DNA, 25 bp, Homo sapien
ggaactcactctgtcacatccttct

SEQ ID NO: 172694 - DNA, 25 bp, Homo sapien
cttcctttatacataagtcctcagg

SEQ ID NO: 172695 - DNA, 25 bp, Homo sapien
ctggggctgtgactggagccctttt

SEQ ID NO: 172696 - DNA, 25 bp, Homo sapien
tctggttctgaagccaccataccct

SEQ ID NO: 172697 - DNA, 25 bp, Homo sapien
tagcacctgttccacctgccaggaa

SEQ ID NO: 172698 - DNA, 25 bp, Homo sapien
cacggttcgtagctgcatgttcaga

SEQ ID NO: 172699 - DNA, 25 bp, Homo sapien
ttcacggttcgtagctgcatgttca

SEQ ID NO: 172700 - DNA, 25 bp, Homo sapien
gcttcacggttcgtagctgcatgtt

SEQ ID NO: 172701 - DNA, 25 bp, Homo sapien
cagcttcacggttcgtagctgcatg

SEQ ID NO: 172702 - DNA, 25 bp, Homo sapien
gcctgactcctcttggagaactgca

SEQ ID NO: 172703 - DNA, 25 bp, Homo sapien
ctccaactgcaatgggtgcttcttg

SEQ ID NO: 172704 - DNA, 25 bp, Homo sapien
ggtgcttcttgcctgactcctcttg

SEQ ID NO: 172705 - DNA, 25 bp, Homo sapien
caactgcaatgggtgcttcttgcct

SEQ ID NO: 172706 - DNA, 25 bp, Homo sapien
tggaagaaaaaaggggcaatactgc

SEQ ID NO: 172707 - DNA, 25 bp, Homo sapien
aaaaggggcaatactgcagcaaaat

SEQ ID NO: 172708 - DNA, 25 bp, Homo sapien
aaaaaaggggcaatactgcagcaaa

SEQ ID NO: 172709 - DNA, 25 bp, Homo sapien
agaaaaaaggggcaatactgcagca

SEQ ID NO: 172710 - DNA, 25 bp, Homo sapien
atctctgcatctgcaacacttatac

SEQ ID NO: 172711 - DNA, 25 bp, Homo sapien
gcatctgcaacacttatacaacaca

SEQ ID NO: 172712 - DNA, 25 bp, Homo sapien
tgcaacacttatacaacacaaaagc

SEQ ID NO: 172713 - DNA, 25 bp, Homo sapien
tctgcatctgcaacacttatacaac

SEQ ID NO: 172714 - DNA, 25 bp, Homo sapien
tggccccagggcctacatgggccgg

SEQ ID NO: 172715 - DNA, 25 bp, Homo sapien
agttgcccgcattctgtggccccag

SEQ ID NO: 172716 - DNA, 25 bp, Homo sapien
ttgaacagcagttgcccgcattctg

SEQ ID NO: 172717 - DNA, 25 bp, Homo sapien
ggtccttgaacagcagttgcccgca

SEQ ID NO: 172718 - DNA, 25 bp, Homo sapien
cccgagatgaggagccctgagagag

SEQ ID NO: 172719 - DNA, 25 bp, Homo sapien
gctggcaggctgcagtcggtgaggt

SEQ ID NO: 172720 - DNA, 25 bp, Homo sapien
gagagagctggcaggctgcagtcgg

SEQ ID NO: 172721 - DNA, 25 bp, Homo sapien
agagctggcaggctgcagtcggtga

SEQ ID NO: 172722 - DNA, 25 bp, Homo sapien
gaagaagtcgaataaggtagagaac

SEQ ID NO: 172723 - DNA, 25 bp, Homo sapien
agaaggaaagtccaattagggcgct

SEQ ID NO: 172724 - DNA, 25 bp, Homo sapien
gaagtcgaataaggtagagaaccac

SEQ ID NO: 172725 - DNA, 25 bp, Homo sapien
gggaagaagtcgaataaggtagaga

SEQ ID NO: 172726 - DNA, 25 bp, Homo sapien
tcaagtggatgtgctgggagaacat

SEQ ID NO: 172727 - DNA, 25 bp, Homo sapien
gtcaagtggatgtgctgggagaaca

SEQ ID NO: 172728 - DNA, 25 bp, Homo sapien
ggtcaagtggatgtgctgggagaac

SEQ ID NO: 172729 - DNA, 25 bp, Homo sapien
aggtcaagtggatgtgctgggagaa

SEQ ID NO: 172730 - DNA, 25 bp, Homo sapien
cccgaaagtagatatcgccttgcat

SEQ ID NO: 172731 - DNA, 25 bp, Homo sapien
gagactgaggtagcagttgtccact

SEQ ID NO: 172732 - DNA, 25 bp, Homo sapien
gtccactgtcaggtcccgaaagtag

SEQ ID NO: 172733 - DNA, 25 bp, Homo sapien
tgagctcaagtgttcggagactgag

SEQ ID NO: 172734 - DNA, 25 bp, Homo sapien
acaggagggtccccgtcagaaccat

SEQ ID NO: 172735 - DNA, 25 bp, Homo sapien
tactgaaaggtgagtgcaagagcac

SEQ ID NO: 172736 - DNA, 25 bp, Homo sapien
gggccagagcctacgtgaatatatg

SEQ ID NO: 172737 - DNA, 25 bp, Homo sapien
tagaggtttctgctggactgaggat

SEQ ID NO: 172738 - DNA, 25 bp, Homo sapien
tatggcttgagctttgcagcccagc

SEQ ID NO: 172739 - DNA, 25 bp, Homo sapien
gagaagtcacctttggaccctcgac

SEQ ID NO: 172740 - DNA, 25 bp, Homo sapien
caccacacggatctgaacttaggcg

SEQ ID NO: 172741 - DNA, 25 bp, Homo sapien
tatgaaaatagacccttggcccagc

SEQ ID NO: 172742 - DNA, 25 bp, Homo sapien
tccccttcagctgggtaggtacctg

SEQ ID NO: 172743 - DNA, 25 bp, Homo sapien
gcgtttcctccatctacggctcagg

SEQ ID NO: 172744 - DNA, 25 bp, Homo sapien
ttttcttctatcgtgcctgccaggg

SEQ ID NO: 172745 - DNA, 25 bp, Homo sapien
tgtgcttactccgtctgcgtttcct

SEQ ID NO: 172746 - DNA, 25 bp, Homo sapien
tacagtgaactttgattgtaacact

SEQ ID NO: 172747 - DNA, 25 bp, Homo sapien
gctctttctggtgccgatgaatttc

SEQ ID NO: 172748 - DNA, 25 bp, Homo sapien
tgtcccatgctcatgttgatggttt

SEQ ID NO: 172749 - DNA, 25 bp, Homo sapien
gccaacatgttagctctttctggtg

SEQ ID NO: 172750 - DNA, 25 bp, Homo sapien
aaacgcgaacagacacccttgatgt

SEQ ID NO: 172751 - DNA, 25 bp, Homo sapien
ggcttagatcaaacgtcctgagtga

SEQ ID NO: 172752 - DNA, 25 bp, Homo sapien
gcattgcaacctataagacttggga

SEQ ID NO: 172753 - DNA, 25 bp, Homo sapien
aaagcgggtggttcaagtatcagca

SEQ ID NO: 172754 - DNA, 25 bp, Homo sapien
aggtggccccaaatctctgaaagcg

SEQ ID NO: 172755 - DNA, 25 bp, Homo sapien
gcagatatgcagaaaagacttgcct

SEQ ID NO: 172756 - DNA, 25 bp, Homo sapien
tttccgagaagctagttggtcccca

SEQ ID NO: 172757 - DNA, 25 bp, Homo sapien
cagctattgccagtaaagattgatg

SEQ ID NO: 172758 - DNA, 25 bp, Homo sapien
tagcgagctccataaccctgtttgt

SEQ ID NO: 172759 - DNA, 25 bp, Homo sapien
ccagggtagccctttccaccctatg

SEQ ID NO: 172760 - DNA, 25 bp, Homo sapien
gggagggcaccctccacacatacta

SEQ ID NO: 172761 - DNA, 25 bp, Homo sapien
tccacacatactacagtgtggtcag

SEQ ID NO: 172762 - DNA, 25 bp, Homo sapien
acatactacagtgtggtcagagccc

SEQ ID NO: 172763 - DNA, 25 bp, Homo sapien
agttagtgcagccaaacggccccag

SEQ ID NO: 172764 - DNA, 25 bp, Homo sapien
gatgcacactgagctaccaaagtta

SEQ ID NO: 172765 - DNA, 25 bp, Homo sapien
cactgagctaccaaagttagtgcag

SEQ ID NO: 172766 - DNA, 25 bp, Homo sapien
cagtcccactctagatgcacactga

SEQ ID NO: 172767 - DNA, 25 bp, Homo sapien
gggttaatgagaagccacctcagct

SEQ ID NO: 172768 - DNA, 25 bp, Homo sapien
tatagacacctagatcaggacagag

SEQ ID NO: 172769 - DNA, 25 bp, Homo sapien
ggtccatacccttcagagtcctaaa

SEQ ID NO: 172770 - DNA, 25 bp, Homo sapien
agctttggtgaatggagccccagcc

SEQ ID NO: 172771 - DNA, 25 bp, Homo sapien
tgggtcccactctagggcaacaagg

SEQ ID NO: 172772 - DNA, 25 bp, Homo sapien
cagcacctcccaggttagctctggg

SEQ ID NO: 172773 - DNA, 25 bp, Homo sapien
ttcccttgcttacggtggcccaatg

SEQ ID NO: 172774 - DNA, 25 bp, Homo sapien
aaggtcaaggttagggtagcaatca

SEQ ID NO: 172775 - DNA, 25 bp, Homo sapien
agagcgggaccggttgccatcaacg

SEQ ID NO: 172776 - DNA, 25 bp, Homo sapien
tctgggacagggtgcgagagcggga

SEQ ID NO: 172777 - DNA, 25 bp, Homo sapien
gaaagagttccagactcgctgctct

SEQ ID NO: 172778 - DNA, 25 bp, Homo sapien
catcaacggatgctgcactggtcag

SEQ ID NO: 172779 - DNA, 25 bp, Homo sapien
cagcaagctcttgtcccgatactca

SEQ ID NO: 172780 - DNA, 25 bp, Homo sapien
gcagcaagctcttgtcccgatactc

SEQ ID NO: 172781 - DNA, 25 bp, Homo sapien
tgcagcaagctcttgtcccgatact

SEQ ID NO: 172782 - DNA, 25 bp, Homo sapien
agcaagctcttgtcccgatactcac

SEQ ID NO: 172783 - DNA, 25 bp, Homo sapien
tgaaggcctcggtcagcttgcctgg

SEQ ID NO: 172784 - DNA, 25 bp, Homo sapien
ttgaaggcctcggtcagcttgcctg

SEQ ID NO: 172785 - DNA, 25 bp, Homo sapien
cttgaaggcctcggtcagcttgcct

SEQ ID NO: 172786 - DNA, 25 bp, Homo sapien
gtgccaccggtatcctatgtccctt

SEQ ID NO: 172787 - DNA, 25 bp, Homo sapien
cgagggagacggtgagatgaggtta

SEQ ID NO: 172788 - DNA, 25 bp, Homo sapien
gaagtaagaagaggcgagggagacg

SEQ ID NO: 172789 - DNA, 25 bp, Homo sapien
ttccccatcccatggacggcagcgg

SEQ ID NO: 172790 - DNA, 25 bp, Homo sapien
tcagctggggctgacctccggagtc

SEQ ID NO: 172791 - DNA, 25 bp, Homo sapien
agctggggctgacctccggagtcag

SEQ ID NO: 172792 - DNA, 25 bp, Homo sapien
tggggctgacctccggagtcagcca

SEQ ID NO: 172793 - DNA, 25 bp, Homo sapien
ctggggctgacctccggagtcagcc

SEQ ID NO: 172794 - DNA, 25 bp, Homo sapien
acataaatgagccatgcagagaggt

SEQ ID NO: 172795 - DNA, 25 bp, Homo sapien
tcttccctagcttcttcactctagc

SEQ ID NO: 172796 - DNA, 25 bp, Homo sapien
gaggcttagcagctgcatgtagaga

SEQ ID NO: 172797 - DNA, 25 bp, Homo sapien
atttgctcccatgccgggccctgga

SEQ ID NO: 172798 - DNA, 25 bp, Homo sapien
ctgtggacgggggcccaggaacagg

SEQ ID NO: 172799 - DNA, 25 bp, Homo sapien
tggggtccagttttgagttacattc

SEQ ID NO: 172800 - DNA, 25 bp, Homo sapien
ggtccagttttgagttacattccac

SEQ ID NO: 172801 - DNA, 25 bp, Homo sapien
gggtccagttttgagttacattcca

SEQ ID NO: 172802 - DNA, 25 bp, Homo sapien
aatgaggtcacgcccactgtggcgc

SEQ ID NO: 172803 - DNA, 25 bp, Homo sapien
atgaatgaggtcacgcccactgtgg

SEQ ID NO: 172804 - DNA, 25 bp, Homo sapien
cactgtggcgcctcccccgtaaggg

SEQ ID NO: 172805 - DNA, 25 bp, Homo sapien
tgaggtcacgcccactgtggcgcct

SEQ ID NO: 172806 - DNA, 25 bp, Homo sapien
caaattcttagtgccccaaagttga

SEQ ID NO: 172807 - DNA, 25 bp, Homo sapien
gaatcaaattcttagtgccccaaag

SEQ ID NO: 172808 - DNA, 25 bp, Homo sapien
caggaatcaaattcttagtgcccca

SEQ ID NO: 172809 - DNA, 25 bp, Homo sapien
tcttagtgccccaaagttgatctcc

SEQ ID NO: 172810 - DNA, 25 bp, Homo sapien
gcaagatactcttctgaccaccact

SEQ ID NO: 172811 - DNA, 25 bp, Homo sapien
aagatactcttctgaccaccacttt

SEQ ID NO: 172812 - DNA, 25 bp, Homo sapien
ggcaagatactcttctgaccaccac

SEQ ID NO: 172813 - DNA, 25 bp, Homo sapien
ttggcaagatactcttctgaccacc

SEQ ID NO: 172814 - DNA, 25 bp, Homo sapien
ctgcatcttcatgaggtgcttggtc

SEQ ID NO: 172815 - DNA, 25 bp, Homo sapien
ggtgatatcacctccacgctcaaag

SEQ ID NO: 172816 - DNA, 25 bp, Homo sapien
atcacctccacgctcaaagttcagg

SEQ ID NO: 172817 - DNA, 25 bp, Homo sapien
ctgagggtgatatcacctccacgct

SEQ ID NO: 172818 - DNA, 25 bp, Homo sapien
acgctcaaagttcaggtctcggcgg

SEQ ID NO: 172819 - DNA, 25 bp, Homo sapien
ccagtacaattcaatgttatccagg

SEQ ID NO: 172820 - DNA, 25 bp, Homo sapien
tccaggttgggtgcatgtgtaatga

SEQ ID NO: 172821 - DNA, 25 bp, Homo sapien
gttgtagctgttccagtacaattca

SEQ ID NO: 172822 - DNA, 25 bp, Homo sapien
tctgtacttttgtatcaactcagaa

SEQ ID NO: 172823 - DNA, 25 bp, Homo sapien
gatcatctccggaatggaagaggtg

SEQ ID NO: 172824 - DNA, 25 bp, Homo sapien
ccaaggatcatctccggaatggaag

SEQ ID NO: 172825 - DNA, 25 bp, Homo sapien
ggatcatctccggaatggaagaggt

SEQ ID NO: 172826 - DNA, 25 bp, Homo sapien
aaggatcatctccggaatggaagag

SEQ ID NO: 172827 - DNA, 25 bp, Homo sapien
taccagagcctaactggatccatac

SEQ ID NO: 172828 - DNA, 25 bp, Homo sapien
tgagaaagttcagggtattggccag

SEQ ID NO: 172829 - DNA, 25 bp, Homo sapien
tataagagactcaggcaaagtgaca

SEQ ID NO: 172830 - DNA, 25 bp, Homo sapien
gagtccatccagttaggctatctac

SEQ ID NO: 172831 - DNA, 25 bp, Homo sapien
gggatccccaaccgtaggtctcagc

SEQ ID NO: 172832 - DNA, 25 bp, Homo sapien
atccccaaccgtaggtctcagcaca

SEQ ID NO: 172833 - DNA, 25 bp, Homo sapien
ccccaaccgtaggtctcagcacaca

SEQ ID NO: 172834 - DNA, 25 bp, Homo sapien
ggatccccaaccgtaggtctcagca

SEQ ID NO: 172835 - DNA, 25 bp, Homo sapien
tggcattgggatcaatgttgatgag

SEQ ID NO: 172836 - DNA, 25 bp, Homo sapien
gcattgggatcaatgttgatgagga

SEQ ID NO: 172837 - DNA, 25 bp, Homo sapien
ccttggcattgggatcaatgttgat

SEQ ID NO: 172838 - DNA, 25 bp, Homo sapien
acccttggcattgggatcaatgttg

SEQ ID NO: 172839 - DNA, 25 bp, Homo sapien
cttcaacagtgtccgggtggttaag

SEQ ID NO: 172840 - DNA, 25 bp, Homo sapien
ggaaatgagaaacagggcatggcct

SEQ ID NO: 172841 - DNA, 25 bp, Homo sapien
tccccgctaagctcgacccactcct

SEQ ID NO: 172842 - DNA, 25 bp, Homo sapien
agaaacagggcatggccttatcccc

SEQ ID NO: 172843 - DNA, 25 bp, Homo sapien
tggccttatcccctccccgctaagc

SEQ ID NO: 172844 - DNA, 25 bp, Homo sapien
agcatatctcgccaggatgtaggct

SEQ ID NO: 172845 - DNA, 25 bp, Homo sapien
caccaactccaattattgtagagaa

SEQ ID NO: 172846 - DNA, 25 bp, Homo sapien
acaccaactccaattattgtagaga

SEQ ID NO: 172847 - DNA, 25 bp, Homo sapien
tctcgccaggatgtaggctccagct

SEQ ID NO: 172848 - DNA, 25 bp, Homo sapien
agggaaagaaatatacgcctcatgg

SEQ ID NO: 172849 - DNA, 25 bp, Homo sapien
aaatatacgcctcatgggatctgct

SEQ ID NO: 172850 - DNA, 25 bp, Homo sapien
atgggatctgctgtccaaaacctgc

SEQ ID NO: 172851 - DNA, 25 bp, Homo sapien
tcatgggatctgctgtccaaaacct

SEQ ID NO: 172852 - DNA, 25 bp, Homo sapien
gccaaaggttggcacgggtagtcag

SEQ ID NO: 172853 - DNA, 25 bp, Homo sapien
cacgggtagtcagggtagatacctg

SEQ ID NO: 172854 - DNA, 25 bp, Homo sapien
caaaggttggcacgggtagtcaggg

SEQ ID NO: 172855 - DNA, 25 bp, Homo sapien
ggttggcacgggtagtcagggtaga

SEQ ID NO: 172856 - DNA, 25 bp, Homo sapien
taagggtctccttgtgctggaaaga

SEQ ID NO: 172857 - DNA, 25 bp, Homo sapien
ttagggctattctgttgactctggc

SEQ ID NO: 172858 - DNA, 25 bp, Homo sapien
tgaaactggctcaggaaccacggtg

SEQ ID NO: 172859 - DNA, 25 bp, Homo sapien
tctcaataatcaaggcgggagcatg

SEQ ID NO: 172860 - DNA, 25 bp, Homo sapien
tttaggtactgcaggacgcaaggga

SEQ ID NO: 172861 - DNA, 25 bp, Homo sapien
caggacgcaagggatcatgtctgca

SEQ ID NO: 172862 - DNA, 25 bp, Homo sapien
tactgcaggacgcaagggatcatgt

SEQ ID NO: 172863 - DNA, 25 bp, Homo sapien
aagggatcatgtctgcaagctggtc

SEQ ID NO: 172864 - DNA, 25 bp, Homo sapien
gaagcagtaacgacctaactcttac

SEQ ID NO: 172865 - DNA, 25 bp, Homo sapien
cagtcgaacctttcccgcacctgtc

SEQ ID NO: 172866 - DNA, 25 bp, Homo sapien
ggtgaagcagtaacgacctaactct

SEQ ID NO: 172867 - DNA, 25 bp, Homo sapien
tcattctctcccagaataaccactg

SEQ ID NO: 172868 - DNA, 25 bp, Homo sapien
gggcatccacatgaacccgcacaaa

SEQ ID NO: 172869 - DNA, 25 bp, Homo sapien
tgcatgtcctcgaactgaaacagtg

SEQ ID NO: 172870 - DNA, 25 bp, Homo sapien
gcatgtcctcgaactgaaacagtgg

SEQ ID NO: 172871 - DNA, 25 bp, Homo sapien
catgaacccgcacaaagttctgaat

SEQ ID NO: 172872 - DNA, 25 bp, Homo sapien
taaagagaacccacatcacctcaac

SEQ ID NO: 172873 - DNA, 25 bp, Homo sapien
tagaatcagacagggactcgtgtcc

SEQ ID NO: 172874 - DNA, 25 bp, Homo sapien
agggactcgtgtcccccagtcagaa

SEQ ID NO: 172875 - DNA, 25 bp, Homo sapien
tcacctcaacaatagaatcagacag

SEQ ID NO: 172876 - DNA, 25 bp, Homo sapien
tcttcccagacaggagtgggagatg

SEQ ID NO: 172877 - DNA, 25 bp, Homo sapien
gcctcttcccagacaggagtgggag

SEQ ID NO: 172878 - DNA, 25 bp, Homo sapien
gacaggagtgggagatgaatgaagg

SEQ ID NO: 172879 - DNA, 25 bp, Homo sapien
tcccagacaggagtgggagatgaat

SEQ ID NO: 172880 - DNA, 25 bp, Homo sapien
gttgagtcccacatcgtggtaggta

SEQ ID NO: 172881 - DNA, 25 bp, Homo sapien
cacatcgtggtaggtaaggatcgct

SEQ ID NO: 172882 - DNA, 25 bp, Homo sapien
tgacagagccgtatggtgtctccac

SEQ ID NO: 172883 - DNA, 25 bp, Homo sapien
tttgggggtgccatagacagtgaaa

SEQ ID NO: 172884 - DNA, 25 bp, Homo sapien
acatgataccggaagatgagtttga

SEQ ID NO: 172885 - DNA, 25 bp, Homo sapien
aaaacaggatcagcaagaattgagg

SEQ ID NO: 172886 - DNA, 25 bp, Homo sapien
cagcaagaattgaggaaaacatgat

SEQ ID NO: 172887 - DNA, 25 bp, Homo sapien
aggaaaacatgataccggaagatga

SEQ ID NO: 172888 - DNA, 25 bp, Homo sapien
ggtccaggaggattcgggcagctaa

SEQ ID NO: 172889 - DNA, 25 bp, Homo sapien
gtccaggaggattcgggcagctaac

SEQ ID NO: 172890 - DNA, 25 bp, Homo sapien
tggaatttgggcatgggagtcaaac

SEQ ID NO: 172891 - DNA, 25 bp, Homo sapien
ggatgcttagaggtctggaatttgg

SEQ ID NO: 172892 - DNA, 25 bp, Homo sapien
catgggagtcaaacggtctctaata

SEQ ID NO: 172893 - DNA, 25 bp, Homo sapien
agaataagatcagtacgcttgggaa

SEQ ID NO: 172894 - DNA, 25 bp, Homo sapien
tcctctgtgatctgcacctcctgca

SEQ ID NO: 172895 - DNA, 25 bp, Homo sapien
gtctgtcctggcaacagtggcttct

SEQ ID NO: 172896 - DNA, 25 bp, Homo sapien
tctgtcctggcaacagtggcttctc

SEQ ID NO: 172897 - DNA, 25 bp, Homo sapien
gcttctcctctgtgatctgcacctc

SEQ ID NO: 172898 - DNA, 25 bp, Homo sapien
gaagtgtagctcagatttctcgggc

SEQ ID NO: 172899 - DNA, 25 bp, Homo sapien
tgagtattctaaaggacagggtacc

SEQ ID NO: 172900 - DNA, 25 bp, Homo sapien
aattaaagccccaaagtcggcagct

SEQ ID NO: 172901 - DNA, 25 bp, Homo sapien
ccaaaagacgggactgtgagagttc

SEQ ID NO: 172902 - DNA, 25 bp, Homo sapien
gattaggggtcagggttctcactcc

SEQ ID NO: 172903 - DNA, 25 bp, Homo sapien
gatgcagtgggattaggggtcaggg

SEQ ID NO: 172904 - DNA, 25 bp, Homo sapien
gggtcagggttctcactccttctga

SEQ ID NO: 172905 - DNA, 25 bp, Homo sapien
tcagggttctcactccttctgactc

SEQ ID NO: 172906 - DNA, 25 bp, Homo sapien
agaacacgtcctctctaggctcgag

SEQ ID NO: 172907 - DNA, 25 bp, Homo sapien
aggctcgagccggaatcaatatagg

SEQ ID NO: 172908 - DNA, 25 bp, Homo sapien
tataggctacaagggcatcagttca

SEQ ID NO: 172909 - DNA, 25 bp, Homo sapien
tcagtctccgtgtaggtcccacgag

SEQ ID NO: 172910 - DNA, 25 bp, Homo sapien
caggggacgcggatcaatcacaccg

SEQ ID NO: 172911 - DNA, 25 bp, Homo sapien
agcgcccgctccgtgctggcccttt

SEQ ID NO: 172912 - DNA, 25 bp, Homo sapien
ccaaacacgccctgcagctcttgga

SEQ ID NO: 172913 - DNA, 25 bp, Homo sapien
tttgtgcgcagcaaccgagcgcccg

SEQ ID NO: 172914 - DNA, 25 bp, Homo sapien
cgccgcggccgcttccaccttcact

SEQ ID NO: 172915 - DNA, 25 bp, Homo sapien
ccgcggccgcttccaccttcacttg

SEQ ID NO: 172916 - DNA, 25 bp, Homo sapien
cgcggccgcttccaccttcacttgc

SEQ ID NO: 172917 - DNA, 25 bp, Homo sapien
tgccgccgcggccgcttccaccttc

SEQ ID NO: 172918 - DNA, 25 bp, Homo sapien
ccgccccggctcgggcttcccgcag

SEQ ID NO: 172919 - DNA, 25 bp, Homo sapien
gccccggctcgggcttcccgcagac

SEQ ID NO: 172920 - DNA, 25 bp, Homo sapien
cgccccggctcgggcttcccgcaga

SEQ ID NO: 172921 - DNA, 25 bp, Homo sapien
agccctgagagggatccctcggctg

SEQ ID NO: 172922 - DNA, 25 bp, Homo sapien
cctccccgcattggggcggtgtggg

SEQ ID NO: 172923 - DNA, 25 bp, Homo sapien
tgagagggatccctcggctgccctc

SEQ ID NO: 172924 - DNA, 25 bp, Homo sapien
agagggatccctcggctgccctcag

SEQ ID NO: 172925 - DNA, 25 bp, Homo sapien
gggatactgacaccccacgagttcg

SEQ ID NO: 172926 - DNA, 25 bp, Homo sapien
tcgagggcgcaggagttccgactcc

SEQ ID NO: 172927 - DNA, 25 bp, Homo sapien
ctggatctgcaattgcactctggct

SEQ ID NO: 172928 - DNA, 25 bp, Homo sapien
cacagagaactagattaagaaagga

SEQ ID NO: 172929 - DNA, 25 bp, Homo sapien
ctgctccgggagaagttggacaaca

SEQ ID NO: 172930 - DNA, 25 bp, Homo sapien
ctgctctccggctgctccgggagaa

SEQ ID NO: 172931 - DNA, 25 bp, Homo sapien
tctcctctctttgctgcgtcccgac

SEQ ID NO: 172932 - DNA, 25 bp, Homo sapien
tctttgctgcgtcccgacgcctgct

SEQ ID NO: 172933 - DNA, 25 bp, Homo sapien
gggtcaatgcctcaaggggcgcggg

SEQ ID NO: 172934 - DNA, 25 bp, Homo sapien
tggggagaggatggccaacagggac

SEQ ID NO: 172935 - DNA, 25 bp, Homo sapien
ctataaatagagggcgatcgcgggc

SEQ ID NO: 172936 - DNA, 25 bp, Homo sapien
ccaacagggactctggggtcaatgc

SEQ ID NO: 172937 - DNA, 25 bp, Homo sapien
tggaataagggtcacagccaaaggt

SEQ ID NO: 172938 - DNA, 25 bp, Homo sapien
tgcgcaagacaggagagatctcatc

SEQ ID NO: 172939 - DNA, 25 bp, Homo sapien
cactctcctggacaaggaaaagcct

SEQ ID NO: 172940 - DNA, 25 bp, Homo sapien
tggatgccagtttaacactctcctg

SEQ ID NO: 172941 - DNA, 25 bp, Homo sapien
gagggagagcctcgagtgagaactt

SEQ ID NO: 172942 - DNA, 25 bp, Homo sapien
agagggagagcctcgagtgagaact

SEQ ID NO: 172943 - DNA, 25 bp, Homo sapien
tctaaattcgtctctgggtcaggat

SEQ ID NO: 172944 - DNA, 25 bp, Homo sapien
cagcatctaaattcgtctctgggtc

SEQ ID NO: 172945 - DNA, 25 bp, Homo sapien
catctaaattcgtctctgggtcagg

SEQ ID NO: 172946 - DNA, 25 bp, Homo sapien
gcatctaaattcgtctctgggtcag

SEQ ID NO: 172947 - DNA, 25 bp, Homo sapien
ggagatgggaaatttccactgacat

SEQ ID NO: 172948 - DNA, 25 bp, Homo sapien
tgataaggggcctacgcaggggcgc

SEQ ID NO: 172949 - DNA, 25 bp, Homo sapien
ggggcctacgcaggggcgcagggca

SEQ ID NO: 172950 - DNA, 25 bp, Homo sapien
gatgggaaatttccactgacatcca

SEQ ID NO: 172951 - DNA, 25 bp, Homo sapien
ctggttctcccctaagatatggttc

SEQ ID NO: 172952 - DNA, 25 bp, Homo sapien
tggttctcccctaagatatggttct

SEQ ID NO: 172953 - DNA, 25 bp, Homo sapien
ggctggttctcccctaagatatggt

SEQ ID NO: 172954 - DNA, 25 bp, Homo sapien
gctggttctcccctaagatatggtt

SEQ ID NO: 172955 - DNA, 25 bp, Homo sapien
tggccttttaaagccagtgggattc

SEQ ID NO: 172956 - DNA, 25 bp, Homo sapien
tttaatgtttctattgcgactggcc

SEQ ID NO: 172957 - DNA, 25 bp, Homo sapien
tgggcccaacactggaagctattta

SEQ ID NO: 172958 - DNA, 25 bp, Homo sapien
catctgttatactccaaggcttgct

SEQ ID NO: 172959 - DNA, 25 bp, Homo sapien
gagacagtcctaggctccatggtaa

SEQ ID NO: 172960 - DNA, 25 bp, Homo sapien
tcagggaggttcctatagctagcca

SEQ ID NO: 172961 - DNA, 25 bp, Homo sapien
tatgttcgattagagccgggcctgc

SEQ ID NO: 172962 - DNA, 25 bp, Homo sapien
gcatggtgatcaaagccctggacat

SEQ ID NO: 172963 - DNA, 25 bp, Homo sapien
ttaaattcccgaatagagaccagcg

SEQ ID NO: 172964 - DNA, 25 bp, Homo sapien
aaattcccgaatagagaccagcgat

SEQ ID NO: 172965 - DNA, 25 bp, Homo sapien
taaattcccgaatagagaccagcga

SEQ ID NO: 172966 - DNA, 25 bp, Homo sapien
attcccgaatagagaccagcgatac

SEQ ID NO: 172967 - DNA, 25 bp, Homo sapien
gatcagcttcatacttgcgggagca

SEQ ID NO: 172968 - DNA, 25 bp, Homo sapien
tcagaccattacaatagccccggaa

SEQ ID NO: 172969 - DNA, 25 bp, Homo sapien
aaccctgggatagtcaatgcttaag

SEQ ID NO: 172970 - DNA, 25 bp, Homo sapien
tgcctcgcatataggacatcagacc

SEQ ID NO: 172971 - DNA, 25 bp, Homo sapien
gtccatgaccagagttggccccaga

SEQ ID NO: 172972 - DNA, 25 bp, Homo sapien
atgaccagagttggccccagaacaa

SEQ ID NO: 172973 - DNA, 25 bp, Homo sapien
tccatgaccagagttggccccagaa

SEQ ID NO: 172974 - DNA, 25 bp, Homo sapien
tgcatcttgatgtccatgaccagag

SEQ ID NO: 172975 - DNA, 25 bp, Homo sapien
ctggaggaaaaggagccgggtcaca

SEQ ID NO: 172976 - DNA, 25 bp, Homo sapien
gccgggtcacagctggtgccattcc

SEQ ID NO: 172977 - DNA, 25 bp, Homo sapien
gtcacagctggtgccattcctcctg

SEQ ID NO: 172978 - DNA, 25 bp, Homo sapien
aaaaggagccgggtcacagctggtg

SEQ ID NO: 172979 - DNA, 25 bp, Homo sapien
gggcctgaagtggctgtctgccaca

SEQ ID NO: 172980 - DNA, 25 bp, Homo sapien
ggcctgaagtggctgtctgccacat

SEQ ID NO: 172981 - DNA, 25 bp, Homo sapien
gagctgaagatagctgggtagggac

SEQ ID NO: 172982 - DNA, 25 bp, Homo sapien
tagctgggtagggacgtgtattctt

SEQ ID NO: 172983 - DNA, 25 bp, Homo sapien
ccaaggccaagacagtcaagagatg

SEQ ID NO: 172984 - DNA, 25 bp, Homo sapien
gggtagggacgtgtattcttcttgc

SEQ ID NO: 172985 - DNA, 25 bp, Homo sapien
tcagagtttgagcactactggaaat

SEQ ID NO: 172986 - DNA, 25 bp, Homo sapien
ctgtcagagtttgagcactactgga

SEQ ID NO: 172987 - DNA, 25 bp, Homo sapien
ctgcatgctgactctgaagcctcaa

SEQ ID NO: 172988 - DNA, 25 bp, Homo sapien
tttgaaagcataacctgaacatgaa

SEQ ID NO: 172989 - DNA, 25 bp, Homo sapien
attaggataacagaacttggatctg

SEQ ID NO: 172990 - DNA, 25 bp, Homo sapien
gatctgcttttgcttggaagggaac

SEQ ID NO: 172991 - DNA, 25 bp, Homo sapien
taacagaacttggatctgcttttgc

SEQ ID NO: 172992 - DNA, 25 bp, Homo sapien
ctgcttttgcttggaagggaactct

SEQ ID NO: 172993 - DNA, 25 bp, Homo sapien
tatccagaggctgtgtggaactccg

SEQ ID NO: 172994 - DNA, 25 bp, Homo sapien
tggaactccggaaggcagagaggct

SEQ ID NO: 172995 - DNA, 25 bp, Homo sapien
agggtaggcaccaatccaggcccgg

SEQ ID NO: 172996 - DNA, 25 bp, Homo sapien
ctgaagggtaggcaccaatccaggc

SEQ ID NO: 172997 - DNA, 25 bp, Homo sapien
tcttttccctttggactgaagcagc

SEQ ID NO: 172998 - DNA, 25 bp, Homo sapien
ttccctttggactgaagcagcaggg

SEQ ID NO: 172999 - DNA, 25 bp, Homo sapien
ctcttttccctttggactgaagcag

SEQ ID NO: 173000 - DNA, 25 bp, Homo sapien
ttttccctttggactgaagcagcag

SEQ ID NO: 173001 - DNA, 25 bp, Homo sapien
gaatgtgacgattcaagcttcctca

SEQ ID NO: 173002 - DNA, 25 bp, Homo sapien
ccgggccagctcttaaggagttcag

SEQ ID NO: 173003 - DNA, 25 bp, Homo sapien
caggtacaggcatccttaggtgtcc

SEQ ID NO: 173004 - DNA, 25 bp, Homo sapien
tgtaagtggagaggcatgaacctga

SEQ ID NO: 173005 - DNA, 25 bp, Homo sapien
gttcctgtacacttggacagagtcc

SEQ ID NO: 173006 - DNA, 25 bp, Homo sapien
agaacaagtcttacgtagtggcctg

SEQ ID NO: 173007 - DNA, 25 bp, Homo sapien
gaaaaaggactctcagcaattccac

SEQ ID NO: 173008 - DNA, 25 bp, Homo sapien
tccagactggcttgctctttggctg

SEQ ID NO: 173009 - DNA, 25 bp, Homo sapien
tcacttgtggtgcacagaaaagcaa

SEQ ID NO: 173010 - DNA, 25 bp, Homo sapien
caataagtggatgagttggtcacaa

SEQ ID NO: 173011 - DNA, 25 bp, Homo sapien
gaactcttgtggtcagtatactaca

SEQ ID NO: 173012 - DNA, 25 bp, Homo sapien
cacaacagccaaacgactgagtgta

SEQ ID NO: 173013 - DNA, 25 bp, Homo sapien
tggctgcagggtcactagtggctta

SEQ ID NO: 173014 - DNA, 25 bp, Homo sapien
gaaaaggaatcatgatgcaaatgga

SEQ ID NO: 173015 - DNA, 25 bp, Homo sapien
ggagagataggcagaaaaggaatca

SEQ ID NO: 173016 - DNA, 25 bp, Homo sapien
tcaccacagggctatggtaaaagat

SEQ ID NO: 173017 - DNA, 25 bp, Homo sapien
tctctagggatctgtagcctggtcc

SEQ ID NO: 173018 - DNA, 25 bp, Homo sapien
tctctcctgggaaagatctatgcaa

SEQ ID NO: 173019 - DNA, 25 bp, Homo sapien
ggtcctatctctacaggagcctgag

SEQ ID NO: 173020 - DNA, 25 bp, Homo sapien
caaggagccatgattgggtgatctc

SEQ ID NO: 173021 - DNA, 25 bp, Homo sapien
gcccaagatgcagagtagaaattag

SEQ ID NO: 173022 - DNA, 25 bp, Homo sapien
gccaggatgcaacatattggagaga

SEQ ID NO: 173023 - DNA, 25 bp, Homo sapien
gaagagccagatatctgaggaggaa

SEQ ID NO: 173024 - DNA, 25 bp, Homo sapien
gaaactgctcgcttggatttaagaa

SEQ ID NO: 173025 - DNA, 25 bp, Homo sapien
tcactaagctaatcgcccctgaggg

SEQ ID NO: 173026 - DNA, 25 bp, Homo sapien
caaaaatagcgacgtctacagggcc

SEQ ID NO: 173027 - DNA, 25 bp, Homo sapien
gacacgactctgcaatagggatgac

SEQ ID NO: 173028 - DNA, 25 bp, Homo sapien
taaggcactgtgactcccttgggct

SEQ ID NO: 173029 - DNA, 25 bp, Homo sapien
tccccttcctgcgaaggactgggag

SEQ ID NO: 173030 - DNA, 25 bp, Homo sapien
gggtctctcctgatggtactcgggc

SEQ ID NO: 173031 - DNA, 25 bp, Homo sapien
tcctgatggtactcgggcatagggc

SEQ ID NO: 173032 - DNA, 25 bp, Homo sapien
cacttgaaggtgcaaggccatgagc

SEQ ID NO: 173033 - DNA, 25 bp, Homo sapien
ccaggtcgcaggctgcggagacggc

SEQ ID NO: 173034 - DNA, 25 bp, Homo sapien
caggtccaggggttcggcctcaccg

SEQ ID NO: 173035 - DNA, 25 bp, Homo sapien
gcctcgcccgttgcgcagggtcctc

SEQ ID NO: 173036 - DNA, 25 bp, Homo sapien
tcctcccagggctggcgggcttccg

SEQ ID NO: 173037 - DNA, 25 bp, Homo sapien
ctgggtgcccgcgtagtcgcagtgc

SEQ ID NO: 173038 - DNA, 25 bp, Homo sapien
cggactgggtgcccgcgtagtcgca

SEQ ID NO: 173039 - DNA, 25 bp, Homo sapien
cgcgtagtcgcagtgcggacacttg

SEQ ID NO: 173040 - DNA, 25 bp, Homo sapien
tgcccgcgtagtcgcagtgcggaca

SEQ ID NO: 173041 - DNA, 25 bp, Homo sapien
atgtgctgagcggaaagattttccg

SEQ ID NO: 173042 - DNA, 25 bp, Homo sapien
gcactcgcagatgcactttgaggtg

SEQ ID NO: 173043 - DNA, 25 bp, Homo sapien
tttgaggtgatgtgctgagcggaaa

SEQ ID NO: 173044 - DNA, 25 bp, Homo sapien
aaaggacaatccttgccggtggcgc

SEQ ID NO: 173045 - DNA, 25 bp, Homo sapien
catcccatagggctgcttcccctcg

SEQ ID NO: 173046 - DNA, 25 bp, Homo sapien
ccatagggctgcttcccctcggggt

SEQ ID NO: 173047 - DNA, 25 bp, Homo sapien
agggctgcttcccctcggggtccag

SEQ ID NO: 173048 - DNA, 25 bp, Homo sapien
ccatcccatagggctgcttcccctc

SEQ ID NO: 173049 - DNA, 25 bp, Homo sapien
cctgcgtggcggtcgatcttgcctg

SEQ ID NO: 173050 - DNA, 25 bp, Homo sapien
gggctcagcaccctcgccgttgggc

SEQ ID NO: 173051 - DNA, 25 bp, Homo sapien
caggctcaggtagcccaagaggctc

SEQ ID NO: 173052 - DNA, 25 bp, Homo sapien
agaggcagagtgccccggtccctca

SEQ ID NO: 173053 - DNA, 25 bp, Homo sapien
cacgcatgatcgaaggaggccttgt

SEQ ID NO: 173054 - DNA, 25 bp, Homo sapien
agcgctgggcccaacggctcatagg

SEQ ID NO: 173055 - DNA, 25 bp, Homo sapien
ctcataggccagcaggccgaggtca

SEQ ID NO: 173056 - DNA, 25 bp, Homo sapien
gaggccttgtgcttacgcatgtggc

SEQ ID NO: 173057 - DNA, 25 bp, Homo sapien
tggccgcacacttggcagcggaact

SEQ ID NO: 173058 - DNA, 25 bp, Homo sapien
aggcggaggcgcagcggaggtggcc

SEQ ID NO: 173059 - DNA, 25 bp, Homo sapien
aagactgtgtaaagctctggccgca

SEQ ID NO: 173060 - DNA, 25 bp, Homo sapien
gttgcctcacgttcgggctccggct

SEQ ID NO: 173061 - DNA, 25 bp, Homo sapien
gctggagccgaaactgcacaggccg

SEQ ID NO: 173062 - DNA, 25 bp, Homo sapien
tggctggagccgaaactgcacaggc

SEQ ID NO: 173063 - DNA, 25 bp, Homo sapien
tggagccgaaactgcacaggccgca

SEQ ID NO: 173064 - DNA, 25 bp, Homo sapien
cctggctggagccgaaactgcacag

SEQ ID NO: 173065 - DNA, 25 bp, Homo sapien
tgcgaaacttgcctttgcagtaggg

SEQ ID NO: 173066 - DNA, 25 bp, Homo sapien
gcctcgcgtagtagcgcgcgctctt

SEQ ID NO: 173067 - DNA, 25 bp, Homo sapien
caaagcaaggatagagttgaagcgg

SEQ ID NO: 173068 - DNA, 25 bp, Homo sapien
ttccaactccagcaacaggcgtgca

SEQ ID NO: 173069 - DNA, 25 bp, Homo sapien
cgacggcgctaagtggccgctcggg

SEQ ID NO: 173070 - DNA, 25 bp, Homo sapien
tggcccgttggagtatcgctgcaga

SEQ ID NO: 173071 - DNA, 25 bp, Homo sapien
aaagccggcggcgacggcgctaagt

SEQ ID NO: 173072 - DNA, 25 bp, Homo sapien
tgcagatccagctcgccgtcgaaag

SEQ ID NO: 173073 - DNA, 25 bp, Homo sapien
ctgcgtagagcaaagggtgaaggta

SEQ ID NO: 173074 - DNA, 25 bp, Homo sapien
gcgtagagcaaagggtgaaggtaga

SEQ ID NO: 173075 - DNA, 25 bp, Homo sapien
tgcgtagagcaaagggtgaaggtag

SEQ ID NO: 173076 - DNA, 25 bp, Homo sapien
cgtagagcaaagggtgaaggtagag

SEQ ID NO: 173077 - DNA, 25 bp, Homo sapien
ctgctaatgaaggcaacaggtgctg

SEQ ID NO: 173078 - DNA, 25 bp, Homo sapien
gctgctaatgaaggcaacaggtgct

SEQ ID NO: 173079 - DNA, 25 bp, Homo sapien
tgctaatgaaggcaacaggtgctgt

SEQ ID NO: 173080 - DNA, 25 bp, Homo sapien
agggctgttccgaggcaggctttcc

SEQ ID NO: 173081 - DNA, 25 bp, Homo sapien
gggagaggctccctcacacaagagg

SEQ ID NO: 173082 - DNA, 25 bp, Homo sapien
caagaggaggattacactggctctg

SEQ ID NO: 173083 - DNA, 25 bp, Homo sapien
gagcctgcagtatgatggggcatct

SEQ ID NO: 173084 - DNA, 25 bp, Homo sapien
ctgagcaggaaagggttaaaattct

SEQ ID NO: 173085 - DNA, 25 bp, Homo sapien
caggctaaaattccctaggcctggg

SEQ ID NO: 173086 - DNA, 25 bp, Homo sapien
tctccaggctaaaattccctaggcc

SEQ ID NO: 173087 - DNA, 25 bp, Homo sapien
aattctccaggctaaaattccctag

SEQ ID NO: 173088 - DNA, 25 bp, Homo sapien
tagcatgaggacttagaagaaaccc

SEQ ID NO: 173089 - DNA, 25 bp, Homo sapien
caagattcatggaaacagacctggg

SEQ ID NO: 173090 - DNA, 25 bp, Homo sapien
ctgatcctaagctgcagaggagttt

SEQ ID NO: 173091 - DNA, 25 bp, Homo sapien
tggaaacagacctgggaggatgacc

SEQ ID NO: 173092 - DNA, 25 bp, Homo sapien
gggccacctcagtaccatagataga

SEQ ID NO: 173093 - DNA, 25 bp, Homo sapien
tacctgttacatgtggaatctgggc

SEQ ID NO: 173094 - DNA, 25 bp, Homo sapien
gaactgtgccaggagtcaacctgcc

SEQ ID NO: 173095 - DNA, 25 bp, Homo sapien
cctttcctgggactaagagcctagc

SEQ ID NO: 173096 - DNA, 25 bp, Homo sapien
taaaactgtctgtaggatagcaagc

SEQ ID NO: 173097 - DNA, 25 bp, Homo sapien
gattcccggaacatcctggtgtaca

SEQ ID NO: 173098 - DNA, 25 bp, Homo sapien
taaggagcatcctgacagttacagt

SEQ ID NO: 173099 - DNA, 25 bp, Homo sapien
ctgagaagattctagggcccctaaa

SEQ ID NO: 173100 - DNA, 25 bp, Homo sapien
tggaaccgaggtcatgcatatattg

SEQ ID NO: 173101 - DNA, 25 bp, Homo sapien
cacagagttttctatagtcaggcct

SEQ ID NO: 173102 - DNA, 25 bp, Homo sapien
taaacaccatcctcgagacttggcc

SEQ ID NO: 173103 - DNA, 25 bp, Homo sapien
gatactatgaactgccttggaaccg

SEQ ID NO: 173104 - DNA, 25 bp, Homo sapien
ggaatcttatcccagaggcatgtcc

SEQ ID NO: 173105 - DNA, 25 bp, Homo sapien
taagtggagctgaccctagaaaagt

SEQ ID NO: 173106 - DNA, 25 bp, Homo sapien
gccatggacttcaaaggtacagcag

SEQ ID NO: 173107 - DNA, 25 bp, Homo sapien
tctcctgagttagggacatggaacc

SEQ ID NO: 173108 - DNA, 25 bp, Homo sapien
cccgcattgtgtgcggcgggaggcg

SEQ ID NO: 173109 - DNA, 25 bp, Homo sapien
gcgggcgtcagcgttacgtggggcc

SEQ ID NO: 173110 - DNA, 25 bp, Homo sapien
ctggcccgcattgtgtgcggcggga

SEQ ID NO: 173111 - DNA, 25 bp, Homo sapien
aggcggcccggccattagcatgcgg

SEQ ID NO: 173112 - DNA, 25 bp, Homo sapien
ggagttggctctgccgctctttctg

SEQ ID NO: 173113 - DNA, 25 bp, Homo sapien
gagttggctctgccgctctttctgc

SEQ ID NO: 173114 - DNA, 25 bp, Homo sapien
ttatagagatagttaatgtcggccg

SEQ ID NO: 173115 - DNA, 25 bp, Homo sapien
tgtcggccgtataagaaacattatt

SEQ ID NO: 173116 - DNA, 25 bp, Homo sapien
tcttcggtcctttccgttcttgata

SEQ ID NO: 173117 - DNA, 25 bp, Homo sapien
tcttgataaacaattcctgcgcctt

SEQ ID NO: 173118 - DNA, 25 bp, Homo sapien
tgattgtcacatggccacagcgctg

SEQ ID NO: 173119 - DNA, 25 bp, Homo sapien
tgagagggaagaaaacgcagcactg

SEQ ID NO: 173120 - DNA, 25 bp, Homo sapien
ggttggaatgactcccctaggctgg

SEQ ID NO: 173121 - DNA, 25 bp, Homo sapien
caggtgcgggccatgatgatattca

SEQ ID NO: 173122 - DNA, 25 bp, Homo sapien
gaaagcacgaatagctagctgccaa

SEQ ID NO: 173123 - DNA, 25 bp, Homo sapien
gaagaggtcctagaatgaaactgat

SEQ ID NO: 173124 - DNA, 25 bp, Homo sapien
gcctatcctggtcagtggcacttaa

SEQ ID NO: 173125 - DNA, 25 bp, Homo sapien
tattggcaggactatgggaaacagg

SEQ ID NO: 173126 - DNA, 25 bp, Homo sapien
gctgggatccttcgagtccaatagg

SEQ ID NO: 173127 - DNA, 25 bp, Homo sapien
tttggagaatggtcccacggtggcc

SEQ ID NO: 173128 - DNA, 25 bp, Homo sapien
gggaagatacacctggacgagaata

SEQ ID NO: 173129 - DNA, 25 bp, Homo sapien
tccaataggaagtccgggagtgcct

SEQ ID NO: 173130 - DNA, 25 bp, Homo sapien
tccaattcaggagtgccccagttcc

SEQ ID NO: 173131 - DNA, 25 bp, Homo sapien
tgaccggctaggaaataaagagcct

SEQ ID NO: 173132 - DNA, 25 bp, Homo sapien
tcctttctactgtagcggagactac

SEQ ID NO: 173133 - DNA, 25 bp, Homo sapien
ttctctccgcggtaggggcgctgtt

SEQ ID NO: 173134 - DNA, 25 bp, Homo sapien
gcgtccgctgcagctcttttctgtt

SEQ ID NO: 173135 - DNA, 25 bp, Homo sapien
cttgacattgcagtggcgtccgctg

SEQ ID NO: 173136 - DNA, 25 bp, Homo sapien
aattcacatagtgcccgggatggct

SEQ ID NO: 173137 - DNA, 25 bp, Homo sapien
gggatggctgttcgcctcacactca

SEQ ID NO: 173138 - DNA, 25 bp, Homo sapien
tgcctattgccacagtcccgggctg

SEQ ID NO: 173139 - DNA, 25 bp, Homo sapien
gccgctttcctgtgcattatcctct

SEQ ID NO: 173140 - DNA, 25 bp, Homo sapien
tccagtgctgctaatgccgctttcc

SEQ ID NO: 173141 - DNA, 25 bp, Homo sapien
agctgcaagcaaagactattggaga

SEQ ID NO: 173142 - DNA, 25 bp, Homo sapien
tcaggttttgtgtccagggctgtgt

SEQ ID NO: 173143 - DNA, 25 bp, Homo sapien
caggttttgtgtccagggctgtgtc

SEQ ID NO: 173144 - DNA, 25 bp, Homo sapien
ctcaggttttgtgtccagggctgtg

SEQ ID NO: 173145 - DNA, 25 bp, Homo sapien
ggttgaggtctcacaaagtgccttt

SEQ ID NO: 173146 - DNA, 25 bp, Homo sapien
tcgtggcctcttggctgcccaggtt

SEQ ID NO: 173147 - DNA, 25 bp, Homo sapien
cttggctgcccaggttgaggtctca

SEQ ID NO: 173148 - DNA, 25 bp, Homo sapien
gttgaggtctcacaaagtgcctttc

SEQ ID NO: 173149 - DNA, 25 bp, Homo sapien
tctccatggtgtggggcgctcccca

SEQ ID NO: 173150 - DNA, 25 bp, Homo sapien
gggaaagactctcctctccatggtg

SEQ ID NO: 173151 - DNA, 25 bp, Homo sapien
ttggggaaagactctcctctccatg

SEQ ID NO: 173152 - DNA, 25 bp, Homo sapien
cttagttggggaaagactctcctct

SEQ ID NO: 173153 - DNA, 25 bp, Homo sapien
tcagaatcttgaaatagcacgtttc

SEQ ID NO: 173154 - DNA, 25 bp, Homo sapien
cagaatcttgaaatagcacgtttcc

SEQ ID NO: 173155 - DNA, 25 bp, Homo sapien
tctgcgcgtccttcattaattaggt

SEQ ID NO: 173156 - DNA, 25 bp, Homo sapien
agtatttcttcttctgcgcgtcctt

SEQ ID NO: 173157 - DNA, 25 bp, Homo sapien
cattaattaggtttaggcattcaga

SEQ ID NO: 173158 - DNA, 25 bp, Homo sapien
aatattttacaagatttttggcatc

SEQ ID NO: 173159 - DNA, 25 bp, Homo sapien
tttcagtaaataatttttgttcatc

SEQ ID NO: 173160 - DNA, 25 bp, Homo sapien
aataatttttgttcatcttctgcca

SEQ ID NO: 173161 - DNA, 25 bp, Homo sapien
gtaaataatttttgttcatcttctg

SEQ ID NO: 173162 - DNA, 25 bp, Homo sapien
cagtaaataatttttgttcatcttc

SEQ ID NO: 173163 - DNA, 25 bp, Homo sapien
ttgctcacaggccctgctaatattc

SEQ ID NO: 173164 - DNA, 25 bp, Homo sapien
tgctcacaggccctgctaatattct

SEQ ID NO: 173165 - DNA, 25 bp, Homo sapien
gctcacaggccctgctaatattctc

SEQ ID NO: 173166 - DNA, 25 bp, Homo sapien
ggtactggagcagcgctgtatgtcc

SEQ ID NO: 173167 - DNA, 25 bp, Homo sapien
aaatccggaggtactggagcagcgc

SEQ ID NO: 173168 - DNA, 25 bp, Homo sapien
cccttcgtatttatgaaatccggag

SEQ ID NO: 173169 - DNA, 25 bp, Homo sapien
gagcagcgctgtatgtccagcatct

SEQ ID NO: 173170 - DNA, 25 bp, Homo sapien
gacctatgtgactccagagagcaga

SEQ ID NO: 173171 - DNA, 25 bp, Homo sapien
gagaaagagtggtatggtccctaga

SEQ ID NO: 173172 - DNA, 25 bp, Homo sapien
tccagcccagagatgttgagatctt

SEQ ID NO: 173173 - DNA, 25 bp, Homo sapien
tagttgatcctgaagcaaaagaacc

SEQ ID NO: 173174 - DNA, 25 bp, Homo sapien
aaaggcaacaactgttccaaagcaa

SEQ ID NO: 173175 - DNA, 25 bp, Homo sapien
ttactgtgaagccaaaggcaacaac

SEQ ID NO: 173176 - DNA, 25 bp, Homo sapien
aggcaacaactgttccaaagcaaac

SEQ ID NO: 173177 - DNA, 25 bp, Homo sapien
actgtgaagccaaaggcaacaactg

SEQ ID NO: 173178 - DNA, 25 bp, Homo sapien
cttagcagtcgcaggtgtgttctga

SEQ ID NO: 173179 - DNA, 25 bp, Homo sapien
gccagcaacctgagttcacttgcca

SEQ ID NO: 173180 - DNA, 25 bp, Homo sapien
ttgccatcttagcagtcgcaggtgt

SEQ ID NO: 173181 - DNA, 25 bp, Homo sapien
gagttcacttgccatcttagcagtc

SEQ ID NO: 173182 - DNA, 25 bp, Homo sapien
cacaacttatagaaagctgatttac

SEQ ID NO: 173183 - DNA, 25 bp, Homo sapien
tatagaaagctgatttactgccacc

SEQ ID NO: 173184 - DNA, 25 bp, Homo sapien
aagctgatttactgccaccagtgca

SEQ ID NO: 173185 - DNA, 25 bp, Homo sapien
tgccaccagtgcaataattacaacc

SEQ ID NO: 173186 - DNA, 25 bp, Homo sapien
ctgtggcaggtagatgcagaagcac

SEQ ID NO: 173187 - DNA, 25 bp, Homo sapien
tctgtggcaggtagatgcagaagca

SEQ ID NO: 173188 - DNA, 25 bp, Homo sapien
cttagtctctaggacaccatcattt

SEQ ID NO: 173189 - DNA, 25 bp, Homo sapien
ctctaggacaccatcatttcttctg

SEQ ID NO: 173190 - DNA, 25 bp, Homo sapien
tggaaaatgccttaaacctgccctg

SEQ ID NO: 173191 - DNA, 25 bp, Homo sapien
tggccaagaagttcaccagggtctg

SEQ ID NO: 173192 - DNA, 25 bp, Homo sapien
tgtaggagcccacaatcagcgaggc

SEQ ID NO: 173193 - DNA, 25 bp, Homo sapien
tgacgacatgagcaccgcagaattt

SEQ ID NO: 173194 - DNA, 25 bp, Homo sapien
aggaacaccacgaagagcagcctct

SEQ ID NO: 173195 - DNA, 25 bp, Homo sapien
gcccaggaacaccacgaagagcagc

SEQ ID NO: 173196 - DNA, 25 bp, Homo sapien
tgaggcccaagagctcaaactccat

SEQ ID NO: 173197 - DNA, 25 bp, Homo sapien
agctgggggtcagtggtgaggccca

SEQ ID NO: 173198 - DNA, 25 bp, Homo sapien
ggctctgactgggtttaattctgcc

SEQ ID NO: 173199 - DNA, 25 bp, Homo sapien
taaggacagccttctgaagatgagt

SEQ ID NO: 173200 - DNA, 25 bp, Homo sapien
gactgggtttaattctgcctaagga

SEQ ID NO: 173201 - DNA, 25 bp, Homo sapien
gggtttaattctgcctaaggacagc

SEQ ID NO: 173202 - DNA, 25 bp, Homo sapien
aggaagtggcacacttttcaagtgc

SEQ ID NO: 173203 - DNA, 25 bp, Homo sapien
tgagaaatcatagaggcaagaagga

SEQ ID NO: 173204 - DNA, 25 bp, Homo sapien
aagtgctgagagaatagtcaaccca

SEQ ID NO: 173205 - DNA, 25 bp, Homo sapien
tcaaataccaactcgaagcagaggg

SEQ ID NO: 173206 - DNA, 25 bp, Homo sapien
tttgtcctcccaggcttaattgatc

SEQ ID NO: 173207 - DNA, 25 bp, Homo sapien
gctttgtcctcccaggcttaattga

SEQ ID NO: 173208 - DNA, 25 bp, Homo sapien
ctttgtcctcccaggcttaattgat

SEQ ID NO: 173209 - DNA, 25 bp, Homo sapien
ttcagtaaggttgcgggatacaaga

SEQ ID NO: 173210 - DNA, 25 bp, Homo sapien
tctgcaacccaaactcaaaggagac

SEQ ID NO: 173211 - DNA, 25 bp, Homo sapien
aaactcaaaggagactttcacctca

SEQ ID NO: 173212 - DNA, 25 bp, Homo sapien
ggttcagtaaggttgcgggatacaa

SEQ ID NO: 173213 - DNA, 25 bp, Homo sapien
gctgtttacaacctagtcaatattt

SEQ ID NO: 173214 - DNA, 25 bp, Homo sapien
gcgggcaagatgaacctgtggggct

SEQ ID NO: 173215 - DNA, 25 bp, Homo sapien
ggagagcgagcatcctggcaaacac

SEQ ID NO: 173216 - DNA, 25 bp, Homo sapien
acctgtggggctgtttacaacctag

SEQ ID NO: 173217 - DNA, 25 bp, Homo sapien
ttcaagagcatcatactgtggaggg

SEQ ID NO: 173218 - DNA, 25 bp, Homo sapien
cctttgtggcaacggaacaattctg

SEQ ID NO: 173219 - DNA, 25 bp, Homo sapien
tcctacaatagatgagtgagcagtc

SEQ ID NO: 173220 - DNA, 25 bp, Homo sapien
aaatagcaggtaggtaacatgaggc

SEQ ID NO: 173221 - DNA, 25 bp, Homo sapien
gtatgaatgaacgaactacaacatg

SEQ ID NO: 173222 - DNA, 25 bp, Homo sapien
tacagatgagttgtatagacatact

SEQ ID NO: 173223 - DNA, 25 bp, Homo sapien
gcaacaatacagatgagttgtatag

SEQ ID NO: 173224 - DNA, 25 bp, Homo sapien
tatagacatactgttgagtcaaaga

SEQ ID NO: 173225 - DNA, 25 bp, Homo sapien
tacaagtcagaagagtggctaggat

SEQ ID NO: 173226 - DNA, 25 bp, Homo sapien
tacacatgcgtgttctcaaaagaca

SEQ ID NO: 173227 - DNA, 25 bp, Homo sapien
caggagccagcggataaatatttca

SEQ ID NO: 173228 - DNA, 25 bp, Homo sapien
caatcaataccaagtgccagcaagg

SEQ ID NO: 173229 - DNA, 25 bp, Homo sapien
tccctgggcatgaagcaactgattg

SEQ ID NO: 173230 - DNA, 25 bp, Homo sapien
tccgattcaggagtatgcacgttct

SEQ ID NO: 173231 - DNA, 25 bp, Homo sapien
cactaaggctgtctccagaggtgct

SEQ ID NO: 173232 - DNA, 25 bp, Homo sapien
caattaaacgctggcctaacaggct

SEQ ID NO: 173233 - DNA, 25 bp, Homo sapien
caatatcgtcccattgaagacgccc

SEQ ID NO: 173234 - DNA, 25 bp, Homo sapien
ttaagcctgcaatatcgtcccattg

SEQ ID NO: 173235 - DNA, 25 bp, Homo sapien
gtcccattgaagacgccctcactag

SEQ ID NO: 173236 - DNA, 25 bp, Homo sapien
gccctcactagggaaatcttcaata

SEQ ID NO: 173237 - DNA, 25 bp, Homo sapien
cacaatttgggccaaaaattggaat

SEQ ID NO: 173238 - DNA, 25 bp, Homo sapien
acaacgaagagtcccaaccccagag

SEQ ID NO: 173239 - DNA, 25 bp, Homo sapien
caaaaattggaattatggcaactta

SEQ ID NO: 173240 - DNA, 25 bp, Homo sapien
caaccccagagatttagtaggcctg

SEQ ID NO: 173241 - DNA, 25 bp, Homo sapien
tctactcacaaagggcgttaactcc

SEQ ID NO: 173242 - DNA, 25 bp, Homo sapien
gttaactccaatgaagaagccctgc

SEQ ID NO: 173243 - DNA, 25 bp, Homo sapien
cagagcttcagagccatgtttctcc

SEQ ID NO: 173244 - DNA, 25 bp, Homo sapien
tggaaagcttttgtctggtcaggta

SEQ ID NO: 173245 - DNA, 25 bp, Homo sapien
tgtgaacaccacaatctgcagatgt

SEQ ID NO: 173246 - DNA, 25 bp, Homo sapien
gaacaaattagtccacaatcaagtg

SEQ ID NO: 173247 - DNA, 25 bp, Homo sapien
tactgaacaaattagtccacaatca

SEQ ID NO: 173248 - DNA, 25 bp, Homo sapien
atcaagtgtctacttttcccttcac

SEQ ID NO: 173249 - DNA, 25 bp, Homo sapien
ccacaatcaagtgtctacttttccc

SEQ ID NO: 173250 - DNA, 25 bp, Homo sapien
tttagctgtgaacaccacaatctgc

SEQ ID NO: 173251 - DNA, 25 bp, Homo sapien
acatctgcagattgtggtgttcaca

SEQ ID NO: 173252 - DNA, 25 bp, Homo sapien
cacttgattgtggactaatttgttc

SEQ ID NO: 173253 - DNA, 25 bp, Homo sapien
gggaaaagtagacacttgattgtgg

SEQ ID NO: 173254 - DNA, 25 bp, Homo sapien
aacatctgcagattgtggtgttcac

SEQ ID NO: 173255 - DNA, 25 bp, Homo sapien
gtgaagggaaaagtagacacttgat

SEQ ID NO: 173256 - DNA, 25 bp, Homo sapien
gcagattgtggtgttcacagctaaa

SEQ ID NO: 173257 - DNA, 25 bp, Homo sapien
gaagaggctgaagtatgaactaccc

SEQ ID NO: 173258 - DNA, 25 bp, Homo sapien
taccagtgttggtgatacctcatcc

SEQ ID NO: 173259 - DNA, 25 bp, Homo sapien
tgtttcatagcatgcggcactggcc

SEQ ID NO: 173260 - DNA, 25 bp, Homo sapien
tcccaggtgattgagaacatagaga

SEQ ID NO: 173261 - DNA, 25 bp, Homo sapien
tggcgacagctgcataatggaaccc

SEQ ID NO: 173262 - DNA, 25 bp, Homo sapien
gatattccatagactgccttcccag

SEQ ID NO: 173263 - DNA, 25 bp, Homo sapien
tgaaaaaaggccagtgccgcatgct

SEQ ID NO: 173264 - DNA, 25 bp, Homo sapien
tccaagggtagttcatacttcagcc

SEQ ID NO: 173265 - DNA, 25 bp, Homo sapien
tatatcatgtatatgggctccaagg

SEQ ID NO: 173266 - DNA, 25 bp, Homo sapien
ggatgaggtatcaccaacactggta

SEQ ID NO: 173267 - DNA, 25 bp, Homo sapien
gggttccattatgcagctgtcgcca

SEQ ID NO: 173268 - DNA, 25 bp, Homo sapien
tctatgttctcaatcacctgggaag

SEQ ID NO: 173269 - DNA, 25 bp, Homo sapien
ggcatgtcaaatgcatcctctagaa

SEQ ID NO: 173270 - DNA, 25 bp, Homo sapien
tggcatgtcaaatgcatcctctaga

SEQ ID NO: 173271 - DNA, 25 bp, Homo sapien
gcatgtcaaatgcatcctctagaaa

SEQ ID NO: 173272 - DNA, 25 bp, Homo sapien
atgtcaaatgcatcctctagaaaaa

SEQ ID NO: 173273 - DNA, 25 bp, Homo sapien
catgtcaaatgcatcctctagaaaa

SEQ ID NO: 173274 - DNA, 25 bp, Homo sapien
tctagaggatgcatttgacatgcca

SEQ ID NO: 173275 - DNA, 25 bp, Homo sapien
tttctagaggatgcatttgacatgc

SEQ ID NO: 173276 - DNA, 25 bp, Homo sapien
ttctagaggatgcatttgacatgcc

SEQ ID NO: 173277 - DNA, 25 bp, Homo sapien
ttttctagaggatgcatttgacatg

SEQ ID NO: 173278 - DNA, 25 bp, Homo sapien
tttttctagaggatgcatttgacat

SEQ ID NO: 173279 - DNA, 25 bp, Homo sapien
cttccctaactgcaaaggcaatctc

SEQ ID NO: 173280 - DNA, 25 bp, Homo sapien
gagattgcctttgcagttagggaag

SEQ ID NO: 173281 - DNA, 25 bp, Homo sapien
gatacctctttatgacttaacaata

SEQ ID NO: 173282 - DNA, 25 bp, Homo sapien
tacctctttatgacttaacaataaa

SEQ ID NO: 173283 - DNA, 25 bp, Homo sapien
ttgatacctctttatgacttaacaa

SEQ ID NO: 173284 - DNA, 25 bp, Homo sapien
atacctctttatgacttaacaataa

SEQ ID NO: 173285 - DNA, 25 bp, Homo sapien
ctctttatgacttaacaataaaaag

SEQ ID NO: 173286 - DNA, 25 bp, Homo sapien
tgatacctctttatgacttaacaat

SEQ ID NO: 173287 - DNA, 25 bp, Homo sapien
tattgttaagtcataaagaggtatc

SEQ ID NO: 173288 - DNA, 25 bp, Homo sapien
tttattgttaagtcataaagaggta

SEQ ID NO: 173289 - DNA, 25 bp, Homo sapien
attgttaagtcataaagaggtatca

SEQ ID NO: 173290 - DNA, 25 bp, Homo sapien
ttattgttaagtcataaagaggtat

SEQ ID NO: 173291 - DNA, 25 bp, Homo sapien
ttgttaagtcataaagaggtatcaa

SEQ ID NO: 173292 - DNA, 25 bp, Homo sapien
ctttttattgttaagtcataaagag

SEQ ID NO: 173293 - DNA, 25 bp, Homo sapien
tatttctttacctaggcgcttgtct

SEQ ID NO: 173294 - DNA, 25 bp, Homo sapien
tcacttcctttgacgctcctagtag

SEQ ID NO: 173295 - DNA, 25 bp, Homo sapien
tcccattatttctttacctaggcgc

SEQ ID NO: 173296 - DNA, 25 bp, Homo sapien
ttttcacttcctttgacgctcctag

SEQ ID NO: 173297 - DNA, 25 bp, Homo sapien
cctttgacgctcctagtagttttgt

SEQ ID NO: 173298 - DNA, 25 bp, Homo sapien
cattaattcatattgccccgcgcct

SEQ ID NO: 173299 - DNA, 25 bp, Homo sapien
ctactaggagcgtcaaaggaagtga

SEQ ID NO: 173300 - DNA, 25 bp, Homo sapien
aacaaaactactaggagcgtcaaag

SEQ ID NO: 173301 - DNA, 25 bp, Homo sapien
aaactactaggagcgtcaaaggaag

SEQ ID NO: 173302 - DNA, 25 bp, Homo sapien
gcgcctaggtaaagaaataatggga

SEQ ID NO: 173303 - DNA, 25 bp, Homo sapien
tttgatcttagacaagcgcctaggt

SEQ ID NO: 173304 - DNA, 25 bp, Homo sapien
ctaggagcgtcaaaggaagtgaaaa

SEQ ID NO: 173305 - DNA, 25 bp, Homo sapien
ggatgacagagacagcgccaatggc

SEQ ID NO: 173306 - DNA, 25 bp, Homo sapien
gaggatgacagagacagcgccaatg

SEQ ID NO: 173307 - DNA, 25 bp, Homo sapien
gttgatcaaggatgatgaaaaagag

SEQ ID NO: 173308 - DNA, 25 bp, Homo sapien
ggagttgatcaaggatgatgaaaaa

SEQ ID NO: 173309 - DNA, 25 bp, Homo sapien
ctggagttgatcaaggatgatgaaa

SEQ ID NO: 173310 - DNA, 25 bp, Homo sapien
aggatgacagagacagcgccaatgg

SEQ ID NO: 173311 - DNA, 25 bp, Homo sapien
gccattggcgctgtctctgtcatcc

SEQ ID NO: 173312 - DNA, 25 bp, Homo sapien
ccattggcgctgtctctgtcatcct

SEQ ID NO: 173313 - DNA, 25 bp, Homo sapien
tctttttcatcatccttgatcaact

SEQ ID NO: 173314 - DNA, 25 bp, Homo sapien
tttttcatcatccttgatcaactcc

SEQ ID NO: 173315 - DNA, 25 bp, Homo sapien
cattggcgctgtctctgtcatcctc

SEQ ID NO: 173316 - DNA, 25 bp, Homo sapien
tttcatcatccttgatcaactccag

SEQ ID NO: 173317 - DNA, 25 bp, Homo sapien
tcagggacacatggagtgcctctaa

SEQ ID NO: 173318 - DNA, 25 bp, Homo sapien
gggacacatggagtgcctctaactc

SEQ ID NO: 173319 - DNA, 25 bp, Homo sapien
tggagtgcctctaactccatcctgt

SEQ ID NO: 173320 - DNA, 25 bp, Homo sapien
gagtgcctctaactccatcctgttt

SEQ ID NO: 173321 - DNA, 25 bp, Homo sapien
cagggacacatggagtgcctctaac

SEQ ID NO: 173322 - DNA, 25 bp, Homo sapien
gacacatggagtgcctctaactcca

SEQ ID NO: 173323 - DNA, 25 bp, Homo sapien
aacaggatggagttagaggcactcc

SEQ ID NO: 173324 - DNA, 25 bp, Homo sapien
ttagaggcactccatgtgtccctga

SEQ ID NO: 173325 - DNA, 25 bp, Homo sapien
aaacaggatggagttagaggcactc

SEQ ID NO: 173326 - DNA, 25 bp, Homo sapien
gttagaggcactccatgtgtccctg

SEQ ID NO: 173327 - DNA, 25 bp, Homo sapien
gagttagaggcactccatgtgtccc

SEQ ID NO: 173328 - DNA, 25 bp, Homo sapien
tggagttagaggcactccatgtgtc

SEQ ID NO: 173329 - DNA, 25 bp, Homo sapien
gaaagatgagactaatgtgaagatg

SEQ ID NO: 173330 - DNA, 25 bp, Homo sapien
gggacctactggatgatgatgataa

SEQ ID NO: 173331 - DNA, 25 bp, Homo sapien
gcagcagctccgtgaagaaagatga

SEQ ID NO: 173332 - DNA, 25 bp, Homo sapien
gatgaagaatgataagtcagaagag

SEQ ID NO: 173333 - DNA, 25 bp, Homo sapien
ataatgaagatcggggggatgacca

SEQ ID NO: 173334 - DNA, 25 bp, Homo sapien
gcagagcagcagctccgtgaagaaa

SEQ ID NO: 173335 - DNA, 25 bp, Homo sapien
tcttctgacttatcattcttcatct

SEQ ID NO: 173336 - DNA, 25 bp, Homo sapien
tttcttcacggagctgctgctctgc

SEQ ID NO: 173337 - DNA, 25 bp, Homo sapien
tcatctttcttcacggagctgctgc

SEQ ID NO: 173338 - DNA, 25 bp, Homo sapien
catcttcacattagtctcatctttc

SEQ ID NO: 173339 - DNA, 25 bp, Homo sapien
gtcatccccccgatcttcattatca

SEQ ID NO: 173340 - DNA, 25 bp, Homo sapien
ttatcatcatcatccagtaggtccc

SEQ ID NO: 173341 - DNA, 25 bp, Homo sapien
tgaaaaggaacagagcaaacaagca

SEQ ID NO: 173342 - DNA, 25 bp, Homo sapien
gccattaagaaggagctgacccaga

SEQ ID NO: 173343 - DNA, 25 bp, Homo sapien
aggagctgacccagataaaacaaaa

SEQ ID NO: 173344 - DNA, 25 bp, Homo sapien
cattaagaaggagctgacccagata

SEQ ID NO: 173345 - DNA, 25 bp, Homo sapien
caaaaagtggattctctcctggaaa

SEQ ID NO: 173346 - DNA, 25 bp, Homo sapien
gattctctcctggaaaacctggaaa

SEQ ID NO: 173347 - DNA, 25 bp, Homo sapien
ttttgttttatctgggtcagctcct

SEQ ID NO: 173348 - DNA, 25 bp, Homo sapien
tttccaggagagaatccactttttg

SEQ ID NO: 173349 - DNA, 25 bp, Homo sapien
tttccaggttttccaggagagaatc

SEQ ID NO: 173350 - DNA, 25 bp, Homo sapien
tatctgggtcagctccttcttaatg

SEQ ID NO: 173351 - DNA, 25 bp, Homo sapien
gcttgtttgctctgttccttttcaa

SEQ ID NO: 173352 - DNA, 25 bp, Homo sapien
tctgggtcagctccttcttaatggc

SEQ ID NO: 173353 - DNA, 25 bp, Homo sapien
gcgacagccctgatctaaaagacat

SEQ ID NO: 173354 - DNA, 25 bp, Homo sapien
gagctcctgatgtagtctggtggca

SEQ ID NO: 173355 - DNA, 25 bp, Homo sapien
cagaacgtgctttataatagaacca

SEQ ID NO: 173356 - DNA, 25 bp, Homo sapien
taccgagaaatctgtactggctctg

SEQ ID NO: 173357 - DNA, 25 bp, Homo sapien
ctccctgggtatctcctgtgagctc

SEQ ID NO: 173358 - DNA, 25 bp, Homo sapien
tctggtggcagtgtatttgctaact

SEQ ID NO: 173359 - DNA, 25 bp, Homo sapien
tgccaccagactacatcaggagctc

SEQ ID NO: 173360 - DNA, 25 bp, Homo sapien
caaatgtaccgaagatatgagttag

SEQ ID NO: 173361 - DNA, 25 bp, Homo sapien
gagctcacaggagatacccagggag

SEQ ID NO: 173362 - DNA, 25 bp, Homo sapien
tatgagttagcaaatacactgccac

SEQ ID NO: 173363 - DNA, 25 bp, Homo sapien
atgtcttttagatcagggctgtcgc

SEQ ID NO: 173364 - DNA, 25 bp, Homo sapien
cagatttctcggtaataaaggccct

SEQ ID NO: 173365 - DNA, 25 bp, Homo sapien
gactttgtgtattcaaaataatgga

SEQ ID NO: 173366 - DNA, 25 bp, Homo sapien
gccacatgactttgtgtattcaaaa

SEQ ID NO: 173367 - DNA, 25 bp, Homo sapien
ggaagctaatgcagttacaatattt

SEQ ID NO: 173368 - DNA, 25 bp, Homo sapien
tttgtgattttggtatctcttgtgt

SEQ ID NO: 173369 - DNA, 25 bp, Homo sapien
agatagggaagctaatgcagttaca

SEQ ID NO: 173370 - DNA, 25 bp, Homo sapien
tagggaagctaatgcagttacaata

SEQ ID NO: 173371 - DNA, 25 bp, Homo sapien
tattgtaactgcattagcttcccta

SEQ ID NO: 173372 - DNA, 25 bp, Homo sapien
tgtaactgcattagcttccctatct

SEQ ID NO: 173373 - DNA, 25 bp, Homo sapien
tccattattttgaatacacaaagtc

SEQ ID NO: 173374 - DNA, 25 bp, Homo sapien
aacacaagagataccaaaatcacaa

SEQ ID NO: 173375 - DNA, 25 bp, Homo sapien
ttttgaatacacaaagtcatgtggc

SEQ ID NO: 173376 - DNA, 25 bp, Homo sapien
aaatattgtaactgcattagcttcc

SEQ ID NO: 173377 - DNA, 25 bp, Homo sapien
ggacagcggggatcttccaagtctg

SEQ ID NO: 173378 - DNA, 25 bp, Homo sapien
ttcaattctaagagtggacagcggg

SEQ ID NO: 173379 - DNA, 25 bp, Homo sapien
taagagtggacagcggggatcttcc

SEQ ID NO: 173380 - DNA, 25 bp, Homo sapien
gtggacagcggggatcttccaagtc

SEQ ID NO: 173381 - DNA, 25 bp, Homo sapien
gcttcaattctaagagtggacagcg

SEQ ID NO: 173382 - DNA, 25 bp, Homo sapien
gtggcttcaattctaagagtggaca

SEQ ID NO: 173383 - DNA, 25 bp, Homo sapien
gacttggaagatccccgctgtccac

SEQ ID NO: 173384 - DNA, 25 bp, Homo sapien
ttccagacttggaagatccccgctg

SEQ ID NO: 173385 - DNA, 25 bp, Homo sapien
ggaagatccccgctgtccactctta

SEQ ID NO: 173386 - DNA, 25 bp, Homo sapien
tgtccactcttagaattgaagccac

SEQ ID NO: 173387 - DNA, 25 bp, Homo sapien
cagacttggaagatccccgctgtcc

SEQ ID NO: 173388 - DNA, 25 bp, Homo sapien
agacttggaagatccccgctgtcca

SEQ ID NO: 173389 - DNA, 25 bp, Homo sapien
gcgtgtatcaggaaacacttcacga

SEQ ID NO: 173390 - DNA, 25 bp, Homo sapien
tgtagtgccctcgaaacgtcagcgt

SEQ ID NO: 173391 - DNA, 25 bp, Homo sapien
acgtcagcgtgtatcaggaaacact

SEQ ID NO: 173392 - DNA, 25 bp, Homo sapien
gtcagcgtgtatcaggaaacacttc

SEQ ID NO: 173393 - DNA, 25 bp, Homo sapien
caggaaacacttcacgaaggggcaa

SEQ ID NO: 173394 - DNA, 25 bp, Homo sapien
cgtcagcgtgtatcaggaaacactt

SEQ ID NO: 173395 - DNA, 25 bp, Homo sapien
cgtgaagtgtttcctgatacacgct

SEQ ID NO: 173396 - DNA, 25 bp, Homo sapien
acgctgacgtttcgagggcactaca

SEQ ID NO: 173397 - DNA, 25 bp, Homo sapien
aagtgtttcctgatacacgctgacg

SEQ ID NO: 173398 - DNA, 25 bp, Homo sapien
gaagtgtttcctgatacacgctgac

SEQ ID NO: 173399 - DNA, 25 bp, Homo sapien
tcgtgaagtgtttcctgatacacgc

SEQ ID NO: 173400 - DNA, 25 bp, Homo sapien
tgccccttcgtgaagtgtttcctga

SEQ ID NO: 173401 - DNA, 25 bp, Homo sapien
agttacccagcacgtgtacctcctc

SEQ ID NO: 173402 - DNA, 25 bp, Homo sapien
ttacccagcacgtgtacctcctcct

SEQ ID NO: 173403 - DNA, 25 bp, Homo sapien
gatgtacagttacccagcacgtgta

SEQ ID NO: 173404 - DNA, 25 bp, Homo sapien
tgtacagttacccagcacgtgtacc

SEQ ID NO: 173405 - DNA, 25 bp, Homo sapien
gtacagttacccagcacgtgtacct

SEQ ID NO: 173406 - DNA, 25 bp, Homo sapien
tacagttacccagcacgtgtacctc

SEQ ID NO: 173407 - DNA, 25 bp, Homo sapien
gaggaggaggaggtacacgtgctgg

SEQ ID NO: 173408 - DNA, 25 bp, Homo sapien
gaggaggtacacgtgctgggtaact

SEQ ID NO: 173409 - DNA, 25 bp, Homo sapien
gaggaggaggtacacgtgctgggta

SEQ ID NO: 173410 - DNA, 25 bp, Homo sapien
tacacgtgctgggtaactgtacatc

SEQ ID NO: 173411 - DNA, 25 bp, Homo sapien
ggtacacgtgctgggtaactgtaca

SEQ ID NO: 173412 - DNA, 25 bp, Homo sapien
gaggtacacgtgctgggtaactgta

SEQ ID NO: 173413 - DNA, 25 bp, Homo sapien
gaaacagcaattagttgagcaacca

SEQ ID NO: 173414 - DNA, 25 bp, Homo sapien
gaagaccttttcatacgttgccata

SEQ ID NO: 173415 - DNA, 25 bp, Homo sapien
taagtgtaccaagccactgctttgg

SEQ ID NO: 173416 - DNA, 25 bp, Homo sapien
gagtgctaagtgtgtactggccagt

SEQ ID NO: 173417 - DNA, 25 bp, Homo sapien
gagtacctgggcctttgcattaagt

SEQ ID NO: 173418 - DNA, 25 bp, Homo sapien
tctgccctgttggaattaagcgtaa

SEQ ID NO: 173419 - DNA, 25 bp, Homo sapien
tatatggttggctggcctttggcac

SEQ ID NO: 173420 - DNA, 25 bp, Homo sapien
tacgcttaattccaacagggcagag

SEQ ID NO: 173421 - DNA, 25 bp, Homo sapien
tatggcaacgtatgaaaaggtcttc

SEQ ID NO: 173422 - DNA, 25 bp, Homo sapien
taacttaatgcaaaggcccaggtac

SEQ ID NO: 173423 - DNA, 25 bp, Homo sapien
tatatggcattagcgaaatctctga

SEQ ID NO: 173424 - DNA, 25 bp, Homo sapien
caaagcagtggcttggtacacttac

SEQ ID NO: 173425 - DNA, 25 bp, Homo sapien
tgatgccattggctcagtataggag

SEQ ID NO: 173426 - DNA, 25 bp, Homo sapien
tccagtggtgagcaaatgagcatac

SEQ ID NO: 173427 - DNA, 25 bp, Homo sapien
tggacaaggctaacccaacaatgtg

SEQ ID NO: 173428 - DNA, 25 bp, Homo sapien
tatccgggtaaactgatgctagact

SEQ ID NO: 173429 - DNA, 25 bp, Homo sapien
tggtgttccccaacccatatcagtg

SEQ ID NO: 173430 - DNA, 25 bp, Homo sapien
catatcagtgatctttggacaaggc

SEQ ID NO: 173431 - DNA, 25 bp, Homo sapien
tatgctcatttgctcaccactggag

SEQ ID NO: 173432 - DNA, 25 bp, Homo sapien
catttgattgaaaatggctccacga

SEQ ID NO: 173433 - DNA, 25 bp, Homo sapien
gccttgtccaaagatcactgatatg

SEQ ID NO: 173434 - DNA, 25 bp, Homo sapien
cacattgttgggttagccttgtcca

SEQ ID NO: 173435 - DNA, 25 bp, Homo sapien
tagtctagcatcagtttacccggat

SEQ ID NO: 173436 - DNA, 25 bp, Homo sapien
tacccggatactatcaactgcaagc

SEQ ID NO: 173437 - DNA, 25 bp, Homo sapien
tatgaatatatgtcaaaagagtaga

SEQ ID NO: 173438 - DNA, 25 bp, Homo sapien
gaagcatgaagtatcttggaaactg

SEQ ID NO: 173439 - DNA, 25 bp, Homo sapien
tagcggtgtcattggtgacctttga

SEQ ID NO: 173440 - DNA, 25 bp, Homo sapien
aagaatgtggcggtaaggaagaaat

SEQ ID NO: 173441 - DNA, 25 bp, Homo sapien
catgtcactaatagttgaagtagta

SEQ ID NO: 173442 - DNA, 25 bp, Homo sapien
acgtctttttgaattagcggtgtca

SEQ ID NO: 173443 - DNA, 25 bp, Homo sapien
atttcttccttaccgccacattctt

SEQ ID NO: 173444 - DNA, 25 bp, Homo sapien
catactacttcaactattagtgaca

SEQ ID NO: 173445 - DNA, 25 bp, Homo sapien
actcttttgacatatattcatacag

SEQ ID NO: 173446 - DNA, 25 bp, Homo sapien
tcaaaggtcaccaatgacaccgcta

SEQ ID NO: 173447 - DNA, 25 bp, Homo sapien
tgacaccgctaattcaaaaagacgt

SEQ ID NO: 173448 - DNA, 25 bp, Homo sapien
tacagtttccaagatacttcatgct

SEQ ID NO: 173449 - DNA, 25 bp, Homo sapien
gtcacaagacacacattgtacgatt

SEQ ID NO: 173450 - DNA, 25 bp, Homo sapien
caagacacacattgtacgattccat

SEQ ID NO: 173451 - DNA, 25 bp, Homo sapien
cacaagacacacattgtacgattcc

SEQ ID NO: 173452 - DNA, 25 bp, Homo sapien
taggcccggccatagcagcattttt

SEQ ID NO: 173453 - DNA, 25 bp, Homo sapien
aaaatattctaagcagacaaagcca

SEQ ID NO: 173454 - DNA, 25 bp, Homo sapien
actaggcccggccatagcagcattt

SEQ ID NO: 173455 - DNA, 25 bp, Homo sapien
ggaatcgtacaatgtgtgtcttgtg

SEQ ID NO: 173456 - DNA, 25 bp, Homo sapien
aaaaatgctgctatggccgggccta

SEQ ID NO: 173457 - DNA, 25 bp, Homo sapien
aaatgctgctatggccgggcctagt

SEQ ID NO: 173458 - DNA, 25 bp, Homo sapien
tggctttgtctgcttagaatatttt

SEQ ID NO: 173459 - DNA, 25 bp, Homo sapien
aatcgtacaatgtgtgtcttgtgac

SEQ ID NO: 173460 - DNA, 25 bp, Homo sapien
atggaatcgtacaatgtgtgtcttg

SEQ ID NO: 173461 - DNA, 25 bp, Homo sapien
gactatgactttcaacgggactatt

SEQ ID NO: 173462 - DNA, 25 bp, Homo sapien
tatgactttcaacgggactattatg

SEQ ID NO: 173463 - DNA, 25 bp, Homo sapien
cttggactatgactttcaacgggac

SEQ ID NO: 173464 - DNA, 25 bp, Homo sapien
ctcctcttttgacttggactatgac

SEQ ID NO: 173465 - DNA, 25 bp, Homo sapien
gactttcaacgggactattatgata

SEQ ID NO: 173466 - DNA, 25 bp, Homo sapien
actttcaacgggactattatgatag

SEQ ID NO: 173467 - DNA, 25 bp, Homo sapien
ctatcataatagtcccgttgaaagt

SEQ ID NO: 173468 - DNA, 25 bp, Homo sapien
tatcataatagtcccgttgaaagtc

SEQ ID NO: 173469 - DNA, 25 bp, Homo sapien
aatagtcccgttgaaagtcatagtc

SEQ ID NO: 173470 - DNA, 25 bp, Homo sapien
cataatagtcccgttgaaagtcata

SEQ ID NO: 173471 - DNA, 25 bp, Homo sapien
gtcccgttgaaagtcatagtccaag

SEQ ID NO: 173472 - DNA, 25 bp, Homo sapien
gtcatagtccaagtcaaaagaggag

SEQ ID NO: 173473 - DNA, 25 bp, Homo sapien
gatcgttgagcttctaagacactag

SEQ ID NO: 173474 - DNA, 25 bp, Homo sapien
taacctgaatttccaatttgaccgc

SEQ ID NO: 173475 - DNA, 25 bp, Homo sapien
aatttgaccgctacatttccagtgg

SEQ ID NO: 173476 - DNA, 25 bp, Homo sapien
gaaatacttatacaggatcgttgag

SEQ ID NO: 173477 - DNA, 25 bp, Homo sapien
cctgacattgtgaattagtagaaac

SEQ ID NO: 173478 - DNA, 25 bp, Homo sapien
gatcattcagtgctaatcttgttga

SEQ ID NO: 173479 - DNA, 25 bp, Homo sapien
caagattagcactgaatgatcccca

SEQ ID NO: 173480 - DNA, 25 bp, Homo sapien
gtagcggtcaaattggaaattcagg

SEQ ID NO: 173481 - DNA, 25 bp, Homo sapien
aagatttccacatacgacatagcta

SEQ ID NO: 173482 - DNA, 25 bp, Homo sapien
ccttagaccactggaaatgtagcgg

SEQ ID NO: 173483 - DNA, 25 bp, Homo sapien
actaattcacaatgtcaggtgaggg

SEQ ID NO: 173484 - DNA, 25 bp, Homo sapien
tgtcttagaagctcaacgatcctgt

SEQ ID NO: 173485 - DNA, 25 bp, Homo sapien
tcagtaacagaacacccttctccgt

SEQ ID NO: 173486 - DNA, 25 bp, Homo sapien
acccttctccgtcccctctactcag

SEQ ID NO: 173487 - DNA, 25 bp, Homo sapien
cacccttctccgtcccctctactca

SEQ ID NO: 173488 - DNA, 25 bp, Homo sapien
cagaacacccttctccgtcccctct

SEQ ID NO: 173489 - DNA, 25 bp, Homo sapien
gtcagtaacagaacacccttctccg

SEQ ID NO: 173490 - DNA, 25 bp, Homo sapien
cagtaacagaacacccttctccgtc

SEQ ID NO: 173491 - DNA, 25 bp, Homo sapien
agaggggacggagaagggtgttctg

SEQ ID NO: 173492 - DNA, 25 bp, Homo sapien
acggagaagggtgttctgttactga

SEQ ID NO: 173493 - DNA, 25 bp, Homo sapien
tgagtagaggggacggagaagggtg

SEQ ID NO: 173494 - DNA, 25 bp, Homo sapien
ctgagtagaggggacggagaagggt

SEQ ID NO: 173495 - DNA, 25 bp, Homo sapien
gacggagaagggtgttctgttactg

SEQ ID NO: 173496 - DNA, 25 bp, Homo sapien
cggagaagggtgttctgttactgac

SEQ ID NO: 173497 - DNA, 25 bp, Homo sapien
caggtgtgaaacgatctgcagcgga

SEQ ID NO: 173498 - DNA, 25 bp, Homo sapien
aaacgatctgcagcggagatgtacg

SEQ ID NO: 173499 - DNA, 25 bp, Homo sapien
gaaacgatctgcagcggagatgtac

SEQ ID NO: 173500 - DNA, 25 bp, Homo sapien
aaagtgaaccgaggaaaagcaggtg

SEQ ID NO: 173501 - DNA, 25 bp, Homo sapien
aacgatctgcagcggagatgtacgg

SEQ ID NO: 173502 - DNA, 25 bp, Homo sapien
ggctgcagagccaaaagtgaaccga

SEQ ID NO: 173503 - DNA, 25 bp, Homo sapien
gtacatctccgctgcagatcgtttc

SEQ ID NO: 173504 - DNA, 25 bp, Homo sapien
tcggttcacttttggctctgcagcc

SEQ ID NO: 173505 - DNA, 25 bp, Homo sapien
cgtacatctccgctgcagatcgttt

SEQ ID NO: 173506 - DNA, 25 bp, Homo sapien
cacctgcttttcctcggttcacttt

SEQ ID NO: 173507 - DNA, 25 bp, Homo sapien
ccgtacatctccgctgcagatcgtt

SEQ ID NO: 173508 - DNA, 25 bp, Homo sapien
tccgctgcagatcgtttcacacctg

SEQ ID NO: 173509 - DNA, 25 bp, Homo sapien
gggctttgccttcgttcagtatgtt

SEQ ID NO: 173510 - DNA, 25 bp, Homo sapien
aggatggcagaatgattgctggcca

SEQ ID NO: 173511 - DNA, 25 bp, Homo sapien
tgtgggctgctctgttcataagggc

SEQ ID NO: 173512 - DNA, 25 bp, Homo sapien
ccttcgttcagtatgttaatgagag

SEQ ID NO: 173513 - DNA, 25 bp, Homo sapien
ttaatgagagaaatgcccgggctgc

SEQ ID NO: 173514 - DNA, 25 bp, Homo sapien
tttgccttcgttcagtatgttaatg

SEQ ID NO: 173515 - DNA, 25 bp, Homo sapien
tctctcattaacatactgaacgaag

SEQ ID NO: 173516 - DNA, 25 bp, Homo sapien
tggccagcaatcattctgccatcct

SEQ ID NO: 173517 - DNA, 25 bp, Homo sapien
cattaacatactgaacgaaggcaaa

SEQ ID NO: 173518 - DNA, 25 bp, Homo sapien
gcagcccgggcatttctctcattaa

SEQ ID NO: 173519 - DNA, 25 bp, Homo sapien
aacatactgaacgaaggcaaagccc

SEQ ID NO: 173520 - DNA, 25 bp, Homo sapien
agcccttatgaacagagcagcccac

SEQ ID NO: 173521 - DNA, 25 bp, Homo sapien
ctcgctccatgaactcccgtgtatt

SEQ ID NO: 173522 - DNA, 25 bp, Homo sapien
tgaactcccgtgtattcattgggaa

SEQ ID NO: 173523 - DNA, 25 bp, Homo sapien
acgttaccaacaagacagatcctcg

SEQ ID NO: 173524 - DNA, 25 bp, Homo sapien
aacaagacagatcctcgctccatga

SEQ ID NO: 173525 - DNA, 25 bp, Homo sapien
cgctccatgaactcccgtgtattca

SEQ ID NO: 173526 - DNA, 25 bp, Homo sapien
cgtgtattcattgggaatctcaaca

SEQ ID NO: 173527 - DNA, 25 bp, Homo sapien
tgaatacacgggagttcatggagcg

SEQ ID NO: 173528 - DNA, 25 bp, Homo sapien
tgttgagattcccaatgaatacacg

SEQ ID NO: 173529 - DNA, 25 bp, Homo sapien
cgaggatctgtcttgttggtaacgt

SEQ ID NO: 173530 - DNA, 25 bp, Homo sapien
catggagcgaggatctgtcttgttg

SEQ ID NO: 173531 - DNA, 25 bp, Homo sapien
aatacacgggagttcatggagcgag

SEQ ID NO: 173532 - DNA, 25 bp, Homo sapien
ttcccaatgaatacacgggagttca

SEQ ID NO: 173533 - DNA, 25 bp, Homo sapien
tcggctttgtgagaaaccttaccat

SEQ ID NO: 173534 - DNA, 25 bp, Homo sapien
cggctttgtgagaaaccttaccatc

SEQ ID NO: 173535 - DNA, 25 bp, Homo sapien
ggctttgtgagaaaccttaccatca

SEQ ID NO: 173536 - DNA, 25 bp, Homo sapien
gctttgtgagaaaccttaccatcaa

SEQ ID NO: 173537 - DNA, 25 bp, Homo sapien
ttcggctttgtgagaaaccttacca

SEQ ID NO: 173538 - DNA, 25 bp, Homo sapien
gtgagaaaccttaccatcaaacacg

SEQ ID NO: 173539 - DNA, 25 bp, Homo sapien
tggtaaggtttctcacaaagccgaa

SEQ ID NO: 173540 - DNA, 25 bp, Homo sapien
atggtaaggtttctcacaaagccga

SEQ ID NO: 173541 - DNA, 25 bp, Homo sapien
gatggtaaggtttctcacaaagccg

SEQ ID NO: 173542 - DNA, 25 bp, Homo sapien
cgtgtttgatggtaaggtttctcac

SEQ ID NO: 173543 - DNA, 25 bp, Homo sapien
tgatggtaaggtttctcacaaagcc

SEQ ID NO: 173544 - DNA, 25 bp, Homo sapien
ttgatggtaaggtttctcacaaagc

SEQ ID NO: 173545 - DNA, 25 bp, Homo sapien
aatgaattgattctatttattgcct

SEQ ID NO: 173546 - DNA, 25 bp, Homo sapien
tccagtgtaaatgaattgattctat

SEQ ID NO: 173547 - DNA, 25 bp, Homo sapien
gtgtttccagtgtaaatgaattgat

SEQ ID NO: 173548 - DNA, 25 bp, Homo sapien
gtttccagtgtaaatgaattgattc

SEQ ID NO: 173549 - DNA, 25 bp, Homo sapien
gattctatttattgccttttgaaga

SEQ ID NO: 173550 - DNA, 25 bp, Homo sapien
tctatttattgccttttgaagaaaa

SEQ ID NO: 173551 - DNA, 25 bp, Homo sapien
gaatcaattcatttacactggaaac

SEQ ID NO: 173552 - DNA, 25 bp, Homo sapien
tagaatcaattcatttacactggaa

SEQ ID NO: 173553 - DNA, 25 bp, Homo sapien
atcaattcatttacactggaaacac

SEQ ID NO: 173554 - DNA, 25 bp, Homo sapien
tcaaaaggcaataaatagaatcaat

SEQ ID NO: 173555 - DNA, 25 bp, Homo sapien
ttttcttcaaaaggcaataaataga

SEQ ID NO: 173556 - DNA, 25 bp, Homo sapien
aatagaatcaattcatttacactgg

SEQ ID NO: 173557 - DNA, 25 bp, Homo sapien
gggtatgaattccttgcatcttgat

SEQ ID NO: 173558 - DNA, 25 bp, Homo sapien
ttgagagaattaaggcctgatacac

SEQ ID NO: 173559 - DNA, 25 bp, Homo sapien
taaactcataacaaccattgctagc

SEQ ID NO: 173560 - DNA, 25 bp, Homo sapien
ggtcagtattctgtgttggcttacg

SEQ ID NO: 173561 - DNA, 25 bp, Homo sapien
ttgtagcaaatttaataaccagacc

SEQ ID NO: 173562 - DNA, 25 bp, Homo sapien
gggtacccctttcaatcacatctgt

SEQ ID NO: 173563 - DNA, 25 bp, Homo sapien
cctcacccctggtaatttcttctca

SEQ ID NO: 173564 - DNA, 25 bp, Homo sapien
ctgtgttggcttacggagcccctca

SEQ ID NO: 173565 - DNA, 25 bp, Homo sapien
tttcttctcattaaacctatggaga

SEQ ID NO: 173566 - DNA, 25 bp, Homo sapien
tgtgttggcttacggagcccctcac

SEQ ID NO: 173567 - DNA, 25 bp, Homo sapien
tctattgataaacctatttgtgaaa

SEQ ID NO: 173568 - DNA, 25 bp, Homo sapien
ctcattaaacctatggagattatat

SEQ ID NO: 173569 - DNA, 25 bp, Homo sapien
tgagaagaaattaccaggggtgagg

SEQ ID NO: 173570 - DNA, 25 bp, Homo sapien
tgaggggctccgtaagccaacacag

SEQ ID NO: 173571 - DNA, 25 bp, Homo sapien
taatctccataggtttaatgagaag

SEQ ID NO: 173572 - DNA, 25 bp, Homo sapien
tctccataggtttaatgagaagaaa

SEQ ID NO: 173573 - DNA, 25 bp, Homo sapien
atataatctccataggtttaatgag

SEQ ID NO: 173574 - DNA, 25 bp, Homo sapien
tttcacaaataggtttatcaataga

SEQ ID NO: 173575 - DNA, 25 bp, Homo sapien
cgtaagccaacacagaatactgacc

SEQ ID NO: 173576 - DNA, 25 bp, Homo sapien
cataccccacggcatttttcatgtg

SEQ ID NO: 173577 - DNA, 25 bp, Homo sapien
taattctctcaaagatccacaaagg

SEQ ID NO: 173578 - DNA, 25 bp, Homo sapien
gatgcaaggaattcataccccacgg

SEQ ID NO: 173579 - DNA, 25 bp, Homo sapien
tgtgtatcaggccttaattctctca

SEQ ID NO: 173580 - DNA, 25 bp, Homo sapien
catagctagtactaatcaagatgca

SEQ ID NO: 173581 - DNA, 25 bp, Homo sapien
gaggacacgttactaagagtggaat

SEQ ID NO: 173582 - DNA, 25 bp, Homo sapien
gtgagtacgtctgtctttactgttg

SEQ ID NO: 173583 - DNA, 25 bp, Homo sapien
ggaattaatccgtattgtgagtacg

SEQ ID NO: 173584 - DNA, 25 bp, Homo sapien
tccgtattgtgagtacgtctgtctt

SEQ ID NO: 173585 - DNA, 25 bp, Homo sapien
taatccgtattgtgagtacgtctgt

SEQ ID NO: 173586 - DNA, 25 bp, Homo sapien
gagtggaattaatccgtattgtgag

SEQ ID NO: 173587 - DNA, 25 bp, Homo sapien
caatacggattaattccactcttag

SEQ ID NO: 173588 - DNA, 25 bp, Homo sapien
gtactcacaatacggattaattcca

SEQ ID NO: 173589 - DNA, 25 bp, Homo sapien
caacagtaaagacagacgtactcac

SEQ ID NO: 173590 - DNA, 25 bp, Homo sapien
taaagacagacgtactcacaatacg

SEQ ID NO: 173591 - DNA, 25 bp, Homo sapien
attccactcttagtaacgtgtcctc

SEQ ID NO: 173592 - DNA, 25 bp, Homo sapien
gacagacgtactcacaatacggatt

SEQ ID NO: 173593 - DNA, 25 bp, Homo sapien
tgctccattgcactccatccttggc

SEQ ID NO: 173594 - DNA, 25 bp, Homo sapien
ttgctccattgcactccatccttgg

SEQ ID NO: 173595 - DNA, 25 bp, Homo sapien
ctccattgcactccatccttggcaa

SEQ ID NO: 173596 - DNA, 25 bp, Homo sapien
ttgcactccatccttggcaacgagt

SEQ ID NO: 173597 - DNA, 25 bp, Homo sapien
gctccattgcactccatccttggca

SEQ ID NO: 173598 - DNA, 25 bp, Homo sapien
attgctccattgcactccatccttg

SEQ ID NO: 173599 - DNA, 25 bp, Homo sapien
tgccaaggatggagtgcaatggagc

SEQ ID NO: 173600 - DNA, 25 bp, Homo sapien
caaggatggagtgcaatggagcaat

SEQ ID NO: 173601 - DNA, 25 bp, Homo sapien
gccaaggatggagtgcaatggagca

SEQ ID NO: 173602 - DNA, 25 bp, Homo sapien
ttgccaaggatggagtgcaatggag

SEQ ID NO: 173603 - DNA, 25 bp, Homo sapien
actcgttgccaaggatggagtgcaa

SEQ ID NO: 173604 - DNA, 25 bp, Homo sapien
ccaaggatggagtgcaatggagcaa

SEQ ID NO: 173605 - DNA, 25 bp, Homo sapien
gagtgcgagtagaggcaaatttcta

SEQ ID NO: 173606 - DNA, 25 bp, Homo sapien
aaaacaggtcttttgtgatcctttg

SEQ ID NO: 173607 - DNA, 25 bp, Homo sapien
gcttcaggatagagcatatgataaa

SEQ ID NO: 173608 - DNA, 25 bp, Homo sapien
tataatatacaaacgcatttgtcca

SEQ ID NO: 173609 - DNA, 25 bp, Homo sapien
cttgtatcgcttttattgcttcagg

SEQ ID NO: 173610 - DNA, 25 bp, Homo sapien
tgagtgctaaccactatttttccgc

SEQ ID NO: 173611 - DNA, 25 bp, Homo sapien
gcggaaaaatagtggttagcactca

SEQ ID NO: 173612 - DNA, 25 bp, Homo sapien
caagtcaaaaccaggaatactaagt

SEQ ID NO: 173613 - DNA, 25 bp, Homo sapien
tagaaatttgcctctactcgcactc

SEQ ID NO: 173614 - DNA, 25 bp, Homo sapien
taatcaaaggatcacaaaagacctg

SEQ ID NO: 173615 - DNA, 25 bp, Homo sapien
cctgaagcaataaaagcgatacaag

SEQ ID NO: 173616 - DNA, 25 bp, Homo sapien
tatcatatgctctatcctgaagcaa

SEQ ID NO: 173617 - DNA, 25 bp, Homo sapien
taagtgagaaaggataccttaaatg

SEQ ID NO: 173618 - DNA, 25 bp, Homo sapien
acatcgagatgttttaagaccttaa

SEQ ID NO: 173619 - DNA, 25 bp, Homo sapien
aaagctccaccattggtaagtgaga

SEQ ID NO: 173620 - DNA, 25 bp, Homo sapien
gttgcattacatcactcatacattg

SEQ ID NO: 173621 - DNA, 25 bp, Homo sapien
ttagcatcttttgagggacctcggg

SEQ ID NO: 173622 - DNA, 25 bp, Homo sapien
gactttggcaattcaaaagctccac

SEQ ID NO: 173623 - DNA, 25 bp, Homo sapien
gaactcacaatctaatgatatacga

SEQ ID NO: 173624 - DNA, 25 bp, Homo sapien
tttgaattgccaaagtcagagaact

SEQ ID NO: 173625 - DNA, 25 bp, Homo sapien
ttaaggtcttaaaacatctcgatgt

SEQ ID NO: 173626 - DNA, 25 bp, Homo sapien
ccaatggtggagcttttgaattgcc

SEQ ID NO: 173627 - DNA, 25 bp, Homo sapien
caatgtatgagtgatgtaatgcaac

SEQ ID NO: 173628 - DNA, 25 bp, Homo sapien
cccgaggtccctcaaaagatgctaa

SEQ ID NO: 173629 - DNA, 25 bp, Homo sapien
tgtgttaaagggaaattggcagact

SEQ ID NO: 173630 - DNA, 25 bp, Homo sapien
tattttcatagatggctaggatggg

SEQ ID NO: 173631 - DNA, 25 bp, Homo sapien
tatgtgttgacagtgccaaagtaaa

SEQ ID NO: 173632 - DNA, 25 bp, Homo sapien
gattataatggagcaggccaggtgt

SEQ ID NO: 173633 - DNA, 25 bp, Homo sapien
gaaaaatatagagccgtgtgctgca

SEQ ID NO: 173634 - DNA, 25 bp, Homo sapien
tggtcaaaccccgtagtcaggcgtg

SEQ ID NO: 173635 - DNA, 25 bp, Homo sapien
ccatcctagccatctatgaaaataa

SEQ ID NO: 173636 - DNA, 25 bp, Homo sapien
ttagcctaagcctataggtgttcag

SEQ ID NO: 173637 - DNA, 25 bp, Homo sapien
tactttggcactgtcaacacataca

SEQ ID NO: 173638 - DNA, 25 bp, Homo sapien
acacctggcctgctccattataatc

SEQ ID NO: 173639 - DNA, 25 bp, Homo sapien
tgccaatttccctttaacacagtac

SEQ ID NO: 173640 - DNA, 25 bp, Homo sapien
gcagcacacggctctatatttttct

SEQ ID NO: 173641 - DNA, 25 bp, Homo sapien
tggcttgaatttgtgatgatacggg

SEQ ID NO: 173642 - DNA, 25 bp, Homo sapien
taattttggtggagataaggtcttg

SEQ ID NO: 173643 - DNA, 25 bp, Homo sapien
gacctcattttaaggttcggtcata

SEQ ID NO: 173644 - DNA, 25 bp, Homo sapien
cttcattcctatcctgtgagacaaa

SEQ ID NO: 173645 - DNA, 25 bp, Homo sapien
aaggttcggtcatagtggacatggc

SEQ ID NO: 173646 - DNA, 25 bp, Homo sapien
ttgcttacgttgttggccagtctgg

SEQ ID NO: 173647 - DNA, 25 bp, Homo sapien
aatgcctggtttcaagtatctcccc

SEQ ID NO: 173648 - DNA, 25 bp, Homo sapien
tttgtctcacaggataggaatgaag

SEQ ID NO: 173649 - DNA, 25 bp, Homo sapien
cagactggccaacaacgtaagcaag

SEQ ID NO: 173650 - DNA, 25 bp, Homo sapien
cgtatcatcacaaattcaagccatg

SEQ ID NO: 173651 - DNA, 25 bp, Homo sapien
cactatgaccgaaccttaaaatgag

SEQ ID NO: 173652 - DNA, 25 bp, Homo sapien
gccatgtccactatgaccgaacctt

SEQ ID NO: 173653 - DNA, 25 bp, Homo sapien
ttcatgcctcaaaccagtctcttgt

SEQ ID NO: 173654 - DNA, 25 bp, Homo sapien
aaaactgtgctcctgatgttcatgc

SEQ ID NO: 173655 - DNA, 25 bp, Homo sapien
tcttgggccaaagattttggctagc

SEQ ID NO: 173656 - DNA, 25 bp, Homo sapien
ctcttgtgtactgttgcctttttca

SEQ ID NO: 173657 - DNA, 25 bp, Homo sapien
tgatgttcatgcctcaaaccagtct

SEQ ID NO: 173658 - DNA, 25 bp, Homo sapien
agattttggctagccatccttgact

SEQ ID NO: 173659 - DNA, 25 bp, Homo sapien
gcatgaacatcaggagcacagtttt

SEQ ID NO: 173660 - DNA, 25 bp, Homo sapien
ggatggctagccaaaatctttggcc

SEQ ID NO: 173661 - DNA, 25 bp, Homo sapien
aaagtcaaggatggctagccaaaat

SEQ ID NO: 173662 - DNA, 25 bp, Homo sapien
caagagactggtttgaggcatgaac

SEQ ID NO: 173663 - DNA, 25 bp, Homo sapien
ctagccaaaatctttggcccaagag

SEQ ID NO: 173664 - DNA, 25 bp, Homo sapien
tgaaaaaggcaacagtacacaagag

SEQ ID NO: 173665 - DNA, 25 bp, Homo sapien
tggtttctagcttctgggataggga

SEQ ID NO: 173666 - DNA, 25 bp, Homo sapien
cagattatagtttgagggtgggaaa

SEQ ID NO: 173667 - DNA, 25 bp, Homo sapien
cagtatggaaatggtgtagaggaaa

SEQ ID NO: 173668 - DNA, 25 bp, Homo sapien
tggatgtgataaggtggacaagaac

SEQ ID NO: 173669 - DNA, 25 bp, Homo sapien
tccaagaaagaataacgacctggct

SEQ ID NO: 173670 - DNA, 25 bp, Homo sapien
cgacctggcttggacaaaggtaatg

SEQ ID NO: 173671 - DNA, 25 bp, Homo sapien
ctatcccagaagctagaaaccagca

SEQ ID NO: 173672 - DNA, 25 bp, Homo sapien
aagccaggtcgttattctttcttgg

SEQ ID NO: 173673 - DNA, 25 bp, Homo sapien
ccttatcacatccatcctgagatgc

SEQ ID NO: 173674 - DNA, 25 bp, Homo sapien
caaaatgagacctgtctccaccaaa

SEQ ID NO: 173675 - DNA, 25 bp, Homo sapien
catactgttattagaaagacattcc

SEQ ID NO: 173676 - DNA, 25 bp, Homo sapien
cattacctttgtccaagccaggtcg

SEQ ID NO: 173677 - DNA, 25 bp, Homo sapien
tgctctgataggtttcaagctggga

SEQ ID NO: 173678 - DNA, 25 bp, Homo sapien
ccatactcggatgaaaagtgaaatc

SEQ ID NO: 173679 - DNA, 25 bp, Homo sapien
gaaatctagttaaagtgaacaccag

SEQ ID NO: 173680 - DNA, 25 bp, Homo sapien
tacagtggtgactcaagacccagct

SEQ ID NO: 173681 - DNA, 25 bp, Homo sapien
tacggaagctgttcactataggttc

SEQ ID NO: 173682 - DNA, 25 bp, Homo sapien
aaggctgaccccttttacagtggtg

SEQ ID NO: 173683 - DNA, 25 bp, Homo sapien
gcttgaaacctatcagagcaactct

SEQ ID NO: 173684 - DNA, 25 bp, Homo sapien
gaacagcttccgtacactgacagca

SEQ ID NO: 173685 - DNA, 25 bp, Homo sapien
gatttcacttttcatccgagtatgg

SEQ ID NO: 173686 - DNA, 25 bp, Homo sapien
tcaaactgaacctatagtgaacagc

SEQ ID NO: 173687 - DNA, 25 bp, Homo sapien
aaattattccaggttaggtgcagtg

SEQ ID NO: 173688 - DNA, 25 bp, Homo sapien
gctgggtcttgagtcaccactgtaa

SEQ ID NO: 173689 - DNA, 25 bp, Homo sapien
ggtgtgaggtccacttggattcatt

SEQ ID NO: 173690 - DNA, 25 bp, Homo sapien
taagaggtgtgaggtccacttggat

SEQ ID NO: 173691 - DNA, 25 bp, Homo sapien
aggtgtgaggtccacttggattcat

SEQ ID NO: 173692 - DNA, 25 bp, Homo sapien
tgtgaggtccacttggattcattac

SEQ ID NO: 173693 - DNA, 25 bp, Homo sapien
gaggtgtgaggtccacttggattca

SEQ ID NO: 173694 - DNA, 25 bp, Homo sapien
agaggtgtgaggtccacttggattc

SEQ ID NO: 173695 - DNA, 25 bp, Homo sapien
aatgaatccaagtggacctcacacc

SEQ ID NO: 173696 - DNA, 25 bp, Homo sapien
gaatccaagtggacctcacacctct

SEQ ID NO: 173697 - DNA, 25 bp, Homo sapien
gtaatgaatccaagtggacctcaca

SEQ ID NO: 173698 - DNA, 25 bp, Homo sapien
taatgaatccaagtggacctcacac

SEQ ID NO: 173699 - DNA, 25 bp, Homo sapien
tgaatccaagtggacctcacacctc

SEQ ID NO: 173700 - DNA, 25 bp, Homo sapien
atgaatccaagtggacctcacacct

SEQ ID NO: 173701 - DNA, 25 bp, Homo sapien
gccttcggaacagatgcacaccctt

SEQ ID NO: 173702 - DNA, 25 bp, Homo sapien
ggccttcggaacagatgcacaccct

SEQ ID NO: 173703 - DNA, 25 bp, Homo sapien
gggccttcggaacagatgcacaccc

SEQ ID NO: 173704 - DNA, 25 bp, Homo sapien
agggtgtgcatctgttccgaaggcc

SEQ ID NO: 173705 - DNA, 25 bp, Homo sapien
aagggtgtgcatctgttccgaaggc

SEQ ID NO: 173706 - DNA, 25 bp, Homo sapien
gggtgtgcatctgttccgaaggccc

SEQ ID NO: 173707 - DNA, 25 bp, Homo sapien
ggtgtgcatctgttccgaaggcccc

SEQ ID NO: 173708 - DNA, 25 bp, Homo sapien
aacatggatgcccagcctggagcag

SEQ ID NO: 173709 - DNA, 25 bp, Homo sapien
ggatgcccagcctggagcagcagca

SEQ ID NO: 173710 - DNA, 25 bp, Homo sapien
catggatgcccagcctggagcagca

SEQ ID NO: 173711 - DNA, 25 bp, Homo sapien
gccttcggaacagatgcacaccctt

SEQ ID NO: 173712 - DNA, 25 bp, Homo sapien
agatgcacacccttcctgggtgatg

SEQ ID NO: 173713 - DNA, 25 bp, Homo sapien
cagcagccaggatgacctggagcca

SEQ ID NO: 173714 - DNA, 25 bp, Homo sapien
ctgctccaggctgggcatccatgtt

SEQ ID NO: 173715 - DNA, 25 bp, Homo sapien
tgctgctgctccaggctgggcatcc

SEQ ID NO: 173716 - DNA, 25 bp, Homo sapien
tggctccaggtcatcctggctgctg

SEQ ID NO: 173717 - DNA, 25 bp, Homo sapien
tgctgctccaggctgggcatccatg

SEQ ID NO: 173718 - DNA, 25 bp, Homo sapien
catcacccaggaagggtgtgcatct

SEQ ID NO: 173719 - DNA, 25 bp, Homo sapien
ggtgtgcatctgttccgaaggcccc

SEQ ID NO: 173720 - DNA, 25 bp, Homo sapien
gaaatcccatcctgcttttcctgta

SEQ ID NO: 173721 - DNA, 25 bp, Homo sapien
tgtttcccttgaaatcccatcctgc

SEQ ID NO: 173722 - DNA, 25 bp, Homo sapien
tacactacccctcacaaaccacaag

SEQ ID NO: 173723 - DNA, 25 bp, Homo sapien
tttcctgtacactacccctcacaaa

SEQ ID NO: 173724 - DNA, 25 bp, Homo sapien
gtttcccttgaaatcccatcctgct

SEQ ID NO: 173725 - DNA, 25 bp, Homo sapien
aaatcccatcctgcttttcctgtac

SEQ ID NO: 173726 - DNA, 25 bp, Homo sapien
acaggaaaagcaggatgggatttca

SEQ ID NO: 173727 - DNA, 25 bp, Homo sapien
agcaggatgggatttcaagggaaac

SEQ ID NO: 173728 - DNA, 25 bp, Homo sapien
tacaggaaaagcaggatgggatttc

SEQ ID NO: 173729 - DNA, 25 bp, Homo sapien
caggatgggatttcaagggaaacag

SEQ ID NO: 173730 - DNA, 25 bp, Homo sapien
gtacaggaaaagcaggatgggattt

SEQ ID NO: 173731 - DNA, 25 bp, Homo sapien
gcaggatgggatttcaagggaaaca

SEQ ID NO: 173732 - DNA, 25 bp, Homo sapien
gagcatctctggacgtctgtatttt

SEQ ID NO: 173733 - DNA, 25 bp, Homo sapien
gattaaaatcgagtttttctgaatg

SEQ ID NO: 173734 - DNA, 25 bp, Homo sapien
tttactggctgttaagtctatgacc

SEQ ID NO: 173735 - DNA, 25 bp, Homo sapien
taaaatgtgtgtggtactacttaac

SEQ ID NO: 173736 - DNA, 25 bp, Homo sapien
ttttcctgactttccgctgatttcc

SEQ ID NO: 173737 - DNA, 25 bp, Homo sapien
gactttggagttttgcatcttggga

SEQ ID NO: 173738 - DNA, 25 bp, Homo sapien
gttaagtagtaccacacacatttta

SEQ ID NO: 173739 - DNA, 25 bp, Homo sapien
tcccaagatgcaaaactccaaagtc

SEQ ID NO: 173740 - DNA, 25 bp, Homo sapien
taaaaatacagacgtccagagatgc

SEQ ID NO: 173741 - DNA, 25 bp, Homo sapien
aaaaggaaatcagcggaaagtcagg

SEQ ID NO: 173742 - DNA, 25 bp, Homo sapien
ggtcatagacttaacagccagtaaa

SEQ ID NO: 173743 - DNA, 25 bp, Homo sapien
catcatcaccatcataagtattaat

SEQ ID NO: 173744 - DNA, 25 bp, Homo sapien
tgcacctcccgtttttctaatctgg

SEQ ID NO: 173745 - DNA, 25 bp, Homo sapien
cttgacatttttgcacctcccgttt

SEQ ID NO: 173746 - DNA, 25 bp, Homo sapien
aggagccttttagcctctcataaac

SEQ ID NO: 173747 - DNA, 25 bp, Homo sapien
gggctttgcttgtctgctactgaaa

SEQ ID NO: 173748 - DNA, 25 bp, Homo sapien
tagcctctcataaactgacctctct

SEQ ID NO: 173749 - DNA, 25 bp, Homo sapien
ctctacttcctcgtgtatttttaag

SEQ ID NO: 173750 - DNA, 25 bp, Homo sapien
gtttatgagaggctaaaaggctcct

SEQ ID NO: 173751 - DNA, 25 bp, Homo sapien
tttcagtagcagacaagcaaagccc

SEQ ID NO: 173752 - DNA, 25 bp, Homo sapien
ccagattagaaaaacgggaggtgca

SEQ ID NO: 173753 - DNA, 25 bp, Homo sapien
aaacgggaggtgcaaaaatgtcaag

SEQ ID NO: 173754 - DNA, 25 bp, Homo sapien
tagagaggtcagtttatgagaggct

SEQ ID NO: 173755 - DNA, 25 bp, Homo sapien
taaaaatacacgaggaagtagagag

SEQ ID NO: 173756 - DNA, 25 bp, Homo sapien
cactacagcaaatgtacaggtgttt

SEQ ID NO: 173757 - DNA, 25 bp, Homo sapien
ttttaaacataatgatgcaacttgg

SEQ ID NO: 173758 - DNA, 25 bp, Homo sapien
gcaacttggtgtgcactacagcaaa

SEQ ID NO: 173759 - DNA, 25 bp, Homo sapien
aacttggtgtgcactacagcaaatg

SEQ ID NO: 173760 - DNA, 25 bp, Homo sapien
tacagcaaatgtacaggtgtttttt

SEQ ID NO: 173761 - DNA, 25 bp, Homo sapien
gatgcaacttggtgtgcactacagc

SEQ ID NO: 173762 - DNA, 25 bp, Homo sapien
aaacacctgtacatttgctgtagtg

SEQ ID NO: 173763 - DNA, 25 bp, Homo sapien
catttgctgtagtgcacaccaagtt

SEQ ID NO: 173764 - DNA, 25 bp, Homo sapien
tttgctgtagtgcacaccaagttgc

SEQ ID NO: 173765 - DNA, 25 bp, Homo sapien
ccaagttgcatcattatgtttaaaa

SEQ ID NO: 173766 - DNA, 25 bp, Homo sapien
aaaaaacacctgtacatttgctgta

SEQ ID NO: 173767 - DNA, 25 bp, Homo sapien
gctgtagtgcacaccaagttgcatc

SEQ ID NO: 173768 - DNA, 25 bp, Homo sapien
gaagggatccaaacctcaggcaggt

SEQ ID NO: 173769 - DNA, 25 bp, Homo sapien
tgctatgatctctaccacaagggtt

SEQ ID NO: 173770 - DNA, 25 bp, Homo sapien
tagtatagatcttcatggtaggcca

SEQ ID NO: 173771 - DNA, 25 bp, Homo sapien
tggaggctatcccatcccagtggaa

SEQ ID NO: 173772 - DNA, 25 bp, Homo sapien
tagggcacaacatttctgaggaact

SEQ ID NO: 173773 - DNA, 25 bp, Homo sapien
gaccctcaagggcatattgacatga

SEQ ID NO: 173774 - DNA, 25 bp, Homo sapien
tagcagtctgaggagcgaggatcac

SEQ ID NO: 173775 - DNA, 25 bp, Homo sapien
tagaagtgcaaactctcagggccca

SEQ ID NO: 173776 - DNA, 25 bp, Homo sapien
ttccactgggatgggatagcctcca

SEQ ID NO: 173777 - DNA, 25 bp, Homo sapien
tagactgaaggtgaatggcctacca

SEQ ID NO: 173778 - DNA, 25 bp, Homo sapien
aacccttgtggtagagatcatagca

SEQ ID NO: 173779 - DNA, 25 bp, Homo sapien
tacaggtgccacaagacataagctt

SEQ ID NO: 173780 - DNA, 25 bp, Homo sapien
tgggcaaaaattcacagctacgtta

SEQ ID NO: 173781 - DNA, 25 bp, Homo sapien
tctttgccaagaacctgatgacgga

SEQ ID NO: 173782 - DNA, 25 bp, Homo sapien
tcccgtccgcctaaatgtgggcaaa

SEQ ID NO: 173783 - DNA, 25 bp, Homo sapien
cacattgacttatctgggacatcgc

SEQ ID NO: 173784 - DNA, 25 bp, Homo sapien
gactttcgggatattctggcgttaa

SEQ ID NO: 173785 - DNA, 25 bp, Homo sapien
tagtaaggaatttgaccacgaggtc

SEQ ID NO: 173786 - DNA, 25 bp, Homo sapien
tttatcattgtgctgaactgttaga

SEQ ID NO: 173787 - DNA, 25 bp, Homo sapien
actaaagtttatcattgtgctgaac

SEQ ID NO: 173788 - DNA, 25 bp, Homo sapien
acatcgcgacccctttcttaaggct

SEQ ID NO: 173789 - DNA, 25 bp, Homo sapien
aactaaagtttatcattgtgctgaa

SEQ ID NO: 173790 - DNA, 25 bp, Homo sapien
catcgcgacccctttcttaaggctt

SEQ ID NO: 173791 - DNA, 25 bp, Homo sapien
aaactaaagtttatcattgtgctga

SEQ ID NO: 173792 - DNA, 25 bp, Homo sapien
aagccttaagaaaggggtcgcgatg

SEQ ID NO: 173793 - DNA, 25 bp, Homo sapien
tctaacagttcagcacaatgataaa

SEQ ID NO: 173794 - DNA, 25 bp, Homo sapien
agccttaagaaaggggtcgcgatgt

SEQ ID NO: 173795 - DNA, 25 bp, Homo sapien
tcagcacaatgataaactttagttt

SEQ ID NO: 173796 - DNA, 25 bp, Homo sapien
ttcagcacaatgataaactttagtt

SEQ ID NO: 173797 - DNA, 25 bp, Homo sapien
gttcagcacaatgataaactttagt

SEQ ID NO: 173798 - DNA, 25 bp, Homo sapien
tccgtcatcaggttcttggcaaaga

SEQ ID NO: 173799 - DNA, 25 bp, Homo sapien
taacgtagctgtgaatttttgccca

SEQ ID NO: 173800 - DNA, 25 bp, Homo sapien
taaaaaccactcgactgacctcgtg

SEQ ID NO: 173801 - DNA, 25 bp, Homo sapien
taacgccagaatatcccgaaagtca

SEQ ID NO: 173802 - DNA, 25 bp, Homo sapien
aaaaagcgatgtcccagataagtca

SEQ ID NO: 173803 - DNA, 25 bp, Homo sapien
tttgcccacatttaggcggacggga

SEQ ID NO: 173804 - DNA, 25 bp, Homo sapien
tacaaaacacttgaaatatataagt

SEQ ID NO: 173805 - DNA, 25 bp, Homo sapien
tatataagttagtggaactttgctt

SEQ ID NO: 173806 - DNA, 25 bp, Homo sapien
aatatataagttagtggaactttgc

SEQ ID NO: 173807 - DNA, 25 bp, Homo sapien
tataagttagtggaactttgcttga

SEQ ID NO: 173808 - DNA, 25 bp, Homo sapien
ataagttagtggaactttgcttgag

SEQ ID NO: 173809 - DNA, 25 bp, Homo sapien
gttacaaaacacttgaaatatataa

SEQ ID NO: 173810 - DNA, 25 bp, Homo sapien
ctcaagcaaagttccactaacttat

SEQ ID NO: 173811 - DNA, 25 bp, Homo sapien
aagcaaagttccactaacttatata

SEQ ID NO: 173812 - DNA, 25 bp, Homo sapien
caagcaaagttccactaacttatat

SEQ ID NO: 173813 - DNA, 25 bp, Homo sapien
gcaaagttccactaacttatatatt

SEQ ID NO: 173814 - DNA, 25 bp, Homo sapien
ttatatatttcaagtgttttgtaac

SEQ ID NO: 173815 - DNA, 25 bp, Homo sapien
tcaagcaaagttccactaacttata

SEQ ID NO: 173816 - DNA, 25 bp, Homo sapien
tgccgcgtggcctacgagaaaggtt

SEQ ID NO: 173817 - DNA, 25 bp, Homo sapien
ttaccaagtagatgtatcgcgagcc

SEQ ID NO: 173818 - DNA, 25 bp, Homo sapien
ttaaatcctggatcgtgccgcgtgg

SEQ ID NO: 173819 - DNA, 25 bp, Homo sapien
tgtatcgcgagcctttaaatcctgg

SEQ ID NO: 173820 - DNA, 25 bp, Homo sapien
tctctatgagcaaatgatggagctc

SEQ ID NO: 173821 - DNA, 25 bp, Homo sapien
aatgatggagctcgaagtagttatt

SEQ ID NO: 173822 - DNA, 25 bp, Homo sapien
agctccatcatttgctcatagagag

SEQ ID NO: 173823 - DNA, 25 bp, Homo sapien
aacctttctcgtaggccacgcggca

SEQ ID NO: 173824 - DNA, 25 bp, Homo sapien
aaataactacttcgagctccatcat

SEQ ID NO: 173825 - DNA, 25 bp, Homo sapien
ccaggatttaaaggctcgcgataca

SEQ ID NO: 173826 - DNA, 25 bp, Homo sapien
ggctcgcgatacatctacttggtaa

SEQ ID NO: 173827 - DNA, 25 bp, Homo sapien
ccacgcggcacgatccaggatttaa

SEQ ID NO: 173828 - DNA, 25 bp, Homo sapien
cgaggactacgggatcatgaaaatg

SEQ ID NO: 173829 - DNA, 25 bp, Homo sapien
tctaggccacgatcgccagggaaaa

SEQ ID NO: 173830 - DNA, 25 bp, Homo sapien
cattttctacgaccgcgaggactac

SEQ ID NO: 173831 - DNA, 25 bp, Homo sapien
ttaacctggtgtcctctaggccacg

SEQ ID NO: 173832 - DNA, 25 bp, Homo sapien
tatagtcgaagttaacgtagcgccg

SEQ ID NO: 173833 - DNA, 25 bp, Homo sapien
cagcctctgtataggtttaacctgg

SEQ ID NO: 173834 - DNA, 25 bp, Homo sapien
gatcgtggcctagaggacaccaggt

SEQ ID NO: 173835 - DNA, 25 bp, Homo sapien
gaaagcagccgttaacacaggaaga

SEQ ID NO: 173836 - DNA, 25 bp, Homo sapien
cacaggaagagcgaaaaaaggacat

SEQ ID NO: 173837 - DNA, 25 bp, Homo sapien
aaaaggacattttccctggcgatcg

SEQ ID NO: 173838 - DNA, 25 bp, Homo sapien
tagtcctcgcggtcgtagaaaatga

SEQ ID NO: 173839 - DNA, 25 bp, Homo sapien
taatagaaggcatcggcgctacgtt

SEQ ID NO: 173840 - DNA, 25 bp, Homo sapien
ctgtctaattaggagcgggagcgaa

SEQ ID NO: 173841 - DNA, 25 bp, Homo sapien
gcacagccaataggaagattctcag

SEQ ID NO: 173842 - DNA, 25 bp, Homo sapien
aactagtttctctcacgcatgtgga

SEQ ID NO: 173843 - DNA, 25 bp, Homo sapien
gggtcgtcccgtgcaatagccaata

SEQ ID NO: 173844 - DNA, 25 bp, Homo sapien
gatacaaaggcgagtttccacccag

SEQ ID NO: 173845 - DNA, 25 bp, Homo sapien
gaaattcgcctgcttagtctaaccc

SEQ ID NO: 173846 - DNA, 25 bp, Homo sapien
tcctaattagacagttcaaccgctc

SEQ ID NO: 173847 - DNA, 25 bp, Homo sapien
ggaaactcgcctttgtatcgcgcac

SEQ ID NO: 173848 - DNA, 25 bp, Homo sapien
gactaagcaggcgaatttccacatg

SEQ ID NO: 173849 - DNA, 25 bp, Homo sapien
tccacatgcgtgagagaaactagtt

SEQ ID NO: 173850 - DNA, 25 bp, Homo sapien
ttattggctattgcacgggacgacc

SEQ ID NO: 173851 - DNA, 25 bp, Homo sapien
tgagaatcttcctattggctgtgcg

SEQ ID NO: 173852 - DNA, 25 bp, Homo sapien
taaagtttacagtggtaagtgatcc

SEQ ID NO: 173853 - DNA, 25 bp, Homo sapien
tcaactgtggcagatcctggagtca

SEQ ID NO: 173854 - DNA, 25 bp, Homo sapien
gcattaagagtatcaacagtgctga

SEQ ID NO: 173855 - DNA, 25 bp, Homo sapien
tagagcaagagctagacagtgagtc

SEQ ID NO: 173856 - DNA, 25 bp, Homo sapien
aagtcttatccattctacttgtgaa

SEQ ID NO: 173857 - DNA, 25 bp, Homo sapien
cacattcactggtcattaagtctta

SEQ ID NO: 173858 - DNA, 25 bp, Homo sapien
gactatgctctccttactacaattt

SEQ ID NO: 173859 - DNA, 25 bp, Homo sapien
tacttgtgaattgactatgctctcc

SEQ ID NO: 173860 - DNA, 25 bp, Homo sapien
gcagatgcctcgttatgtccccaaa

SEQ ID NO: 173861 - DNA, 25 bp, Homo sapien
gaggaatactcctcagaccctaagg

SEQ ID NO: 173862 - DNA, 25 bp, Homo sapien
taaaacgggaataacagcagtctct

SEQ ID NO: 173863 - DNA, 25 bp, Homo sapien
ccaacagttgttagccctgaagatc

SEQ ID NO: 173864 - DNA, 25 bp, Homo sapien
cactagaagcggtacatgaggcaca

SEQ ID NO: 173865 - DNA, 25 bp, Homo sapien
catgatacgggtaattaagggtcac

SEQ ID NO: 173866 - DNA, 25 bp, Homo sapien
tattctaggcccaaggcatgacttg

SEQ ID NO: 173867 - DNA, 25 bp, Homo sapien
cattgtatggagaaaataaccgagc

SEQ ID NO: 173868 - DNA, 25 bp, Homo sapien
atatttattaacagcgggagcctcc

SEQ ID NO: 173869 - DNA, 25 bp, Homo sapien
tgtcttcaagaacacctcctccctt

SEQ ID NO: 173870 - DNA, 25 bp, Homo sapien
gaatggggccattggcacgtgtcct

SEQ ID NO: 173871 - DNA, 25 bp, Homo sapien
gtgggcctggaattccccgagtaga

SEQ ID NO: 173872 - DNA, 25 bp, Homo sapien
cttcttcctcgtaacgactttctcg

SEQ ID NO: 173873 - DNA, 25 bp, Homo sapien
gagctgtgtctggaaccacggttag

SEQ ID NO: 173874 - DNA, 25 bp, Homo sapien
tcttcttcctcgtaacgactttctc

SEQ ID NO: 173875 - DNA, 25 bp, Homo sapien
tagaagaggcattattagttagcaa

SEQ ID NO: 173876 - DNA, 25 bp, Homo sapien
gcttggaacacagcagttaatattt

SEQ ID NO: 173877 - DNA, 25 bp, Homo sapien
gaatcagacccaagttttaatattg

SEQ ID NO: 173878 - DNA, 25 bp, Homo sapien
actacctattcccaatgcttggaac

SEQ ID NO: 173879 - DNA, 25 bp, Homo sapien
ctacccaatgactccttagaatagt

SEQ ID NO: 173880 - DNA, 25 bp, Homo sapien
ttttcgggcttcttcctccagttca

SEQ ID NO: 173881 - DNA, 25 bp, Homo sapien
tcactacccaatgactccttagaat

SEQ ID NO: 173882 - DNA, 25 bp, Homo sapien
ttcttcactacccaatgactcctta

SEQ ID NO: 173883 - DNA, 25 bp, Homo sapien
cttctgaaggattaaaagtctcatc

SEQ ID NO: 173884 - DNA, 25 bp, Homo sapien
ttctgaaggattaaaagtctcatct

SEQ ID NO: 173885 - DNA, 25 bp, Homo sapien
tctgaaggattaaaagtctcatctt

SEQ ID NO: 173886 - DNA, 25 bp, Homo sapien
gtcttcatgattttagtccagttga

SEQ ID NO: 173887 - DNA, 25 bp, Homo sapien
tcttcatgattttagtccagttgag

SEQ ID NO: 173888 - DNA, 25 bp, Homo sapien
atggtcttcatgattttagtccagt

SEQ ID NO: 173889 - DNA, 25 bp, Homo sapien
ggtcttcatgattttagtccagttg

SEQ ID NO: 173890 - DNA, 25 bp, Homo sapien
ggagcagatattctttgcactatgc

SEQ ID NO: 173891 - DNA, 25 bp, Homo sapien
gggagcagatattctttgcactatg

SEQ ID NO: 173892 - DNA, 25 bp, Homo sapien
ggatcagctctacctcatccaatgt

SEQ ID NO: 173893 - DNA, 25 bp, Homo sapien
cccgctcaaagtggatcagctctac

SEQ ID NO: 173894 - DNA, 25 bp, Homo sapien
tggacccgctcaaagtggatcagct

SEQ ID NO: 173895 - DNA, 25 bp, Homo sapien
aaactggacccgctcaaagtggatc

SEQ ID NO: 173896 - DNA, 25 bp, Homo sapien
cattatgcctgccctaaagagactt

SEQ ID NO: 173897 - DNA, 25 bp, Homo sapien
gagccattatgcctgccctaaagag

SEQ ID NO: 173898 - DNA, 25 bp, Homo sapien
tgacaataattaggataaaaaacac

SEQ ID NO: 173899 - DNA, 25 bp, Homo sapien
atgacaataattaggataaaaaaca

SEQ ID NO: 173900 - DNA, 25 bp, Homo sapien
agcgcactactagtgggctgaagga

SEQ ID NO: 173901 - DNA, 25 bp, Homo sapien
catttaccagcgcactactagtggg

SEQ ID NO: 173902 - DNA, 25 bp, Homo sapien
tagcatttaccagcgcactactagt

SEQ ID NO: 173903 - DNA, 25 bp, Homo sapien
taccagcgcactactagtgggctga

SEQ ID NO: 173904 - DNA, 25 bp, Homo sapien
gagactcatccagaggaagcctctt

SEQ ID NO: 173905 - DNA, 25 bp, Homo sapien
agagagactgctcctaccacaacag

SEQ ID NO: 173906 - DNA, 25 bp, Homo sapien
gaagcctcttaagagttagccactc

SEQ ID NO: 173907 - DNA, 25 bp, Homo sapien
tttaagactgagctcatcacgagag

SEQ ID NO: 173908 - DNA, 25 bp, Homo sapien
gtttgtgcctcatttctcgttccat

SEQ ID NO: 173909 - DNA, 25 bp, Homo sapien
ttcagtttgtgcctcatttctcgtt

SEQ ID NO: 173910 - DNA, 25 bp, Homo sapien
cagtttgtgcctcatttctcgttcc

SEQ ID NO: 173911 - DNA, 25 bp, Homo sapien
agtttgtgcctcatttctcgttcca

SEQ ID NO: 173912 - DNA, 25 bp, Homo sapien
gcatatgctgatgtttccccaagtc

SEQ ID NO: 173913 - DNA, 25 bp, Homo sapien
tagaggtcatctcggtcatgcatat

SEQ ID NO: 173914 - DNA, 25 bp, Homo sapien
caagtccgtggttatctctcccact

SEQ ID NO: 173915 - DNA, 25 bp, Homo sapien
gtcatctcggtcatgcatatgctga

SEQ ID NO: 173916 - DNA, 25 bp, Homo sapien
gacaataatcatttctccatcacag

SEQ ID NO: 173917 - DNA, 25 bp, Homo sapien
tgaaagtgcaagacaataatcattt

SEQ ID NO: 173918 - DNA, 25 bp, Homo sapien
cagggctggaacaaagcatgcttaa

SEQ ID NO: 173919 - DNA, 25 bp, Homo sapien
cctcgaacagatgtgaagcggaagc

SEQ ID NO: 173920 - DNA, 25 bp, Homo sapien
tttgggcaatatttgggcgaatgta

SEQ ID NO: 173921 - DNA, 25 bp, Homo sapien
tgggcaatatttgggcgaatgtata

SEQ ID NO: 173922 - DNA, 25 bp, Homo sapien
atttgggcgaatgtatagatctttc

SEQ ID NO: 173923 - DNA, 25 bp, Homo sapien
caatatttgggcgaatgtatagatc

SEQ ID NO: 173924 - DNA, 25 bp, Homo sapien
tctcgagttttataacgtttctgta

SEQ ID NO: 173925 - DNA, 25 bp, Homo sapien
gccttaatatttgatgctcggtatg

SEQ ID NO: 173926 - DNA, 25 bp, Homo sapien
tggtactgtctgttctccgggtgcc

SEQ ID NO: 173927 - DNA, 25 bp, Homo sapien
cttcagcttctcgagttttataacg

SEQ ID NO: 173928 - DNA, 25 bp, Homo sapien
tctggtataacatccccaaattatc

SEQ ID NO: 173929 - DNA, 25 bp, Homo sapien
tgaagattctactgcaatatatgtt

SEQ ID NO: 173930 - DNA, 25 bp, Homo sapien
gaagattctaaattgggatccatcc

SEQ ID NO: 173931 - DNA, 25 bp, Homo sapien
tcatagaatccaatgtggcaccagt

SEQ ID NO: 173932 - DNA, 25 bp, Homo sapien
cgcttcagggttaggaaagatgttg

SEQ ID NO: 173933 - DNA, 25 bp, Homo sapien
ctccttccacggacatacttatatt

SEQ ID NO: 173934 - DNA, 25 bp, Homo sapien
ttcagggttaggaaagatgttgcct

SEQ ID NO: 173935 - DNA, 25 bp, Homo sapien
ttgacaaaagtcgcttcagggttag

SEQ ID NO: 173936 - DNA, 25 bp, Homo sapien
tggttccttaggcatcagagatggg

SEQ ID NO: 173937 - DNA, 25 bp, Homo sapien
gatgggtttttataggacacattag

SEQ ID NO: 173938 - DNA, 25 bp, Homo sapien
tataggacacattagacttgcgagc

SEQ ID NO: 173939 - DNA, 25 bp, Homo sapien
gttccttaggcatcagagatgggtt

SEQ ID NO: 173940 - DNA, 25 bp, Homo sapien
gctcttcgcttctcttctgcagtca

SEQ ID NO: 173941 - DNA, 25 bp, Homo sapien
agttgagccgctagttctttctgat

SEQ ID NO: 173942 - DNA, 25 bp, Homo sapien
tttgcttcttcattgagttgagccg

SEQ ID NO: 173943 - DNA, 25 bp, Homo sapien
tttgttcagtcaatcgcctctttgc

SEQ ID NO: 173944 - DNA, 25 bp, Homo sapien
gtaatgctgcccgagaacctcttcc

SEQ ID NO: 173945 - DNA, 25 bp, Homo sapien
ttcccaaaaggtcctctgcctcatc

SEQ ID NO: 173946 - DNA, 25 bp, Homo sapien
tgtaagtaatgctgcccgagaacct

SEQ ID NO: 173947 - DNA, 25 bp, Homo sapien
tcccaaaaggtcctctgcctcatct

SEQ ID NO: 173948 - DNA, 25 bp, Homo sapien
cttcacagaagtgagaacagtagct

SEQ ID NO: 173949 - DNA, 25 bp, Homo sapien
acagaagtgagaacagtagctgggc

SEQ ID NO: 173950 - DNA, 25 bp, Homo sapien
aagtgagaacagtagctgggccatc

SEQ ID NO: 173951 - DNA, 25 bp, Homo sapien
tttaggaaaatccccacattcttca

SEQ ID NO: 173952 - DNA, 25 bp, Homo sapien
caagcactgtgtcaccaatgaacag

SEQ ID NO: 173953 - DNA, 25 bp, Homo sapien
cacaagcactgtgtcaccaatgaac

SEQ ID NO: 173954 - DNA, 25 bp, Homo sapien
tccacaagcactgtgtcaccaatga

SEQ ID NO: 173955 - DNA, 25 bp, Homo sapien
catccacaagcactgtgtcaccaat

SEQ ID NO: 173956 - DNA, 25 bp, Homo sapien
ttttgctattgattactagggagcc

SEQ ID NO: 173957 - DNA, 25 bp, Homo sapien
tactagggagccttcacggaattca

SEQ ID NO: 173958 - DNA, 25 bp, Homo sapien
tattgattactagggagccttcacg

SEQ ID NO: 173959 - DNA, 25 bp, Homo sapien
tagggagccttcacggaattcaatt

SEQ ID NO: 173960 - DNA, 25 bp, Homo sapien
gcgttatacacgtcacatatcttca

SEQ ID NO: 173961 - DNA, 25 bp, Homo sapien
gttatacacgtcacatatcttcaca

SEQ ID NO: 173962 - DNA, 25 bp, Homo sapien
catgacagcgttatacacgtcacat

SEQ ID NO: 173963 - DNA, 25 bp, Homo sapien
gacagcgttatacacgtcacatatc

SEQ ID NO: 173964 - DNA, 25 bp, Homo sapien
taggacttcttaagaccgacttaga

SEQ ID NO: 173965 - DNA, 25 bp, Homo sapien
tggaagctcagtatccttcgtatcg

SEQ ID NO: 173966 - DNA, 25 bp, Homo sapien
ggtgggcctgttccatttatcacta

SEQ ID NO: 173967 - DNA, 25 bp, Homo sapien
gagggctgtggccttaatttttcag

SEQ ID NO: 173968 - DNA, 25 bp, Homo sapien
tggcacaagtgatagccccaaagtg

SEQ ID NO: 173969 - DNA, 25 bp, Homo sapien
cgaacaaggttggagcagtaagact

SEQ ID NO: 173970 - DNA, 25 bp, Homo sapien
cagtaagacttgaagcgaataccca

SEQ ID NO: 173971 - DNA, 25 bp, Homo sapien
gagaaggatcaaccatcaaagtgcg

SEQ ID NO: 173972 - DNA, 25 bp, Homo sapien
gaacttgagattatagttgccacca

SEQ ID NO: 173973 - DNA, 25 bp, Homo sapien
tagttgccaccactctgaatgatag

SEQ ID NO: 173974 - DNA, 25 bp, Homo sapien
aacacatttccacagtagaagggtc

SEQ ID NO: 173975 - DNA, 25 bp, Homo sapien
tgataggagggtaacacatttccac

SEQ ID NO: 173976 - DNA, 25 bp, Homo sapien
taccaccaacttaagtgtcagtctt

SEQ ID NO: 173977 - DNA, 25 bp, Homo sapien
aaagggagatgatgtaattaccacc

SEQ ID NO: 173978 - DNA, 25 bp, Homo sapien
gctgaagaacacaccaacagatttg

SEQ ID NO: 173979 - DNA, 25 bp, Homo sapien
gcatggtagacttattactgcttca

SEQ ID NO: 173980 - DNA, 25 bp, Homo sapien
cccatcctcctttacagcgatggta

SEQ ID NO: 173981 - DNA, 25 bp, Homo sapien
tcctcctttacagcgatggtatatg

SEQ ID NO: 173982 - DNA, 25 bp, Homo sapien
ctcctttacagcgatggtatatgcc

SEQ ID NO: 173983 - DNA, 25 bp, Homo sapien
cctttacagcgatggtatatgccac

SEQ ID NO: 173984 - DNA, 25 bp, Homo sapien
ttgaggcagtcattccagctcttca

SEQ ID NO: 173985 - DNA, 25 bp, Homo sapien
agctcttcatgaactctccagggaa

SEQ ID NO: 173986 - DNA, 25 bp, Homo sapien
gctcttcatgaactctccagggaat

SEQ ID NO: 173987 - DNA, 25 bp, Homo sapien
tcttcatgaactctccagggaattt

SEQ ID NO: 173988 - DNA, 25 bp, Homo sapien
tgtcaaagctactcttattactttc

SEQ ID NO: 173989 - DNA, 25 bp, Homo sapien
gtcaaagctactcttattactttca

SEQ ID NO: 173990 - DNA, 25 bp, Homo sapien
caaagctactcttattactttcatt

SEQ ID NO: 173991 - DNA, 25 bp, Homo sapien
tttgtcaaagctactcttattactt

SEQ ID NO: 173992 - DNA, 25 bp, Homo sapien
cttccacatttatgacacattcttt

SEQ ID NO: 173993 - DNA, 25 bp, Homo sapien
tttctcgtattagcagtgtgatggc

SEQ ID NO: 173994 - DNA, 25 bp, Homo sapien
tctcgtattagcagtgtgatggcag

SEQ ID NO: 173995 - DNA, 25 bp, Homo sapien
cttttctcgtattagcagtgtgatg

SEQ ID NO: 173996 - DNA, 25 bp, Homo sapien
ctcgtattagcagtgtgatggcagg

SEQ ID NO: 173997 - DNA, 25 bp, Homo sapien
ttaactccaaggtaatcaggctggg

SEQ ID NO: 173998 - DNA, 25 bp, Homo sapien
tctgtaccacgtgcaagagggctat

SEQ ID NO: 173999 - DNA, 25 bp, Homo sapien
attaagcaagatcggccaagagtcg

SEQ ID NO: 174000 - DNA, 25 bp, Homo sapien
gacagagtgatacagaaccctgcgt

SEQ ID NO: 174001 - DNA, 25 bp, Homo sapien
atacaacaatggcatcaacgttggc

SEQ ID NO: 174002 - DNA, 25 bp, Homo sapien
ctgatacaacaatggcatcaacgtt

SEQ ID NO: 174003 - DNA, 25 bp, Homo sapien
tgatacaacaatggcatcaacgttg

SEQ ID NO: 174004 - DNA, 25 bp, Homo sapien
cactgatacaacaatggcatcaacg

SEQ ID NO: 174005 - DNA, 25 bp, Homo sapien
ctgtatgcctcttggagaaatgcct

SEQ ID NO: 174006 - DNA, 25 bp, Homo sapien
tctgatagctaatgacgctgagcat

SEQ ID NO: 174007 - DNA, 25 bp, Homo sapien
tgaagtggtacaatttatctatttt

SEQ ID NO: 174008 - DNA, 25 bp, Homo sapien
tgacgctgagcatcatttcatatgt

SEQ ID NO: 174009 - DNA, 25 bp, Homo sapien
cagaggctcttggatataggggacc

SEQ ID NO: 174010 - DNA, 25 bp, Homo sapien
tgcaaagtcccgaggttcaacaggc

SEQ ID NO: 174011 - DNA, 25 bp, Homo sapien
ggacccaatattgcaaagtcccgag

SEQ ID NO: 174012 - DNA, 25 bp, Homo sapien
cgaggttcaacaggcctaaagagta

SEQ ID NO: 174013 - DNA, 25 bp, Homo sapien
tatttttgcagtctggttgtagcta

SEQ ID NO: 174014 - DNA, 25 bp, Homo sapien
tgtagctaaatacccatataatcag

SEQ ID NO: 174015 - DNA, 25 bp, Homo sapien
cagcagaacaactatcttcctttga

SEQ ID NO: 174016 - DNA, 25 bp, Homo sapien
gccaggcactgtagttgttaatagg

SEQ ID NO: 174017 - DNA, 25 bp, Homo sapien
tcttaatagaacaacccagaacaag

SEQ ID NO: 174018 - DNA, 25 bp, Homo sapien
caatcctgacagttggtgtatgctc

SEQ ID NO: 174019 - DNA, 25 bp, Homo sapien
tccactcaagagaagcactgacact

SEQ ID NO: 174020 - DNA, 25 bp, Homo sapien
aaagagccagaaagctccactcaag

SEQ ID NO: 174021 - DNA, 25 bp, Homo sapien
ggatctagactcaaacctccaggag

SEQ ID NO: 174022 - DNA, 25 bp, Homo sapien
gataagcgactagatttaacccaga

SEQ ID NO: 174023 - DNA, 25 bp, Homo sapien
tatttggactgctggaactaccagg

SEQ ID NO: 174024 - DNA, 25 bp, Homo sapien
gacacgatttacttagatacagggc

SEQ ID NO: 174025 - DNA, 25 bp, Homo sapien
tgaaagataatttacaatgctgaaa

SEQ ID NO: 174026 - DNA, 25 bp, Homo sapien
ggttttagtagatgaccagtttgaa

SEQ ID NO: 174027 - DNA, 25 bp, Homo sapien
agtagatgaccagtttgaaagataa

SEQ ID NO: 174028 - DNA, 25 bp, Homo sapien
ttagtagatgaccagtttgaaagat

SEQ ID NO: 174029 - DNA, 25 bp, Homo sapien
taagctagccaactcagactgcatc

SEQ ID NO: 174030 - DNA, 25 bp, Homo sapien
taactgtggacgtttttagagcagc

SEQ ID NO: 174031 - DNA, 25 bp, Homo sapien
cctagaacatgaggcggttgcgcgt

SEQ ID NO: 174032 - DNA, 25 bp, Homo sapien
ttaatgaacacgtgccccggatacg

SEQ ID NO: 174033 - DNA, 25 bp, Homo sapien
ggcagcaagacgtgaccacggagta

SEQ ID NO: 174034 - DNA, 25 bp, Homo sapien
cgataaacgctaaaagcccgattga

SEQ ID NO: 174035 - DNA, 25 bp, Homo sapien
gacggttataatcctggcgggacca

SEQ ID NO: 174036 - DNA, 25 bp, Homo sapien
catctctcctttacgaagacggtta

SEQ ID NO: 174037 - DNA, 25 bp, Homo sapien
tgcgagaggtgctgctatgcatgac

SEQ ID NO: 174038 - DNA, 25 bp, Homo sapien
ctagggcgggaagagactgcgagag

SEQ ID NO: 174039 - DNA, 25 bp, Homo sapien
ggcgggaagagactgcgagaggtgc

SEQ ID NO: 174040 - DNA, 25 bp, Homo sapien
ctgcgagaggtgctgctatgcatga

SEQ ID NO: 174041 - DNA, 25 bp, Homo sapien
gatggccgcaggacagggtgaatgc

SEQ ID NO: 174042 - DNA, 25 bp, Homo sapien
gttcgtggccgcctccggtgaatga

SEQ ID NO: 174043 - DNA, 25 bp, Homo sapien
aatgattcgggagcaacgaaaaggg

SEQ ID NO: 174044 - DNA, 25 bp, Homo sapien
tgaatgcgggggattccctgttaag

SEQ ID NO: 174045 - DNA, 25 bp, Homo sapien
cgccgataataagcgtctttgtcca

SEQ ID NO: 174046 - DNA, 25 bp, Homo sapien
tcttcactcgccgataataagcgtc

SEQ ID NO: 174047 - DNA, 25 bp, Homo sapien
gtacagtctcttcactcgccgataa

SEQ ID NO: 174048 - DNA, 25 bp, Homo sapien
ccgccaattgctgtacagtctcttc

SEQ ID NO: 174049 - DNA, 25 bp, Homo sapien
gggttccgagaatcacgcgaggtcc

SEQ ID NO: 174050 - DNA, 25 bp, Homo sapien
ctcgggttccgagaatcacgcgagg

SEQ ID NO: 174051 - DNA, 25 bp, Homo sapien
gagaatcacgcgaggtcccggctca

SEQ ID NO: 174052 - DNA, 25 bp, Homo sapien
ttccgagaatcacgcgaggtcccgg

SEQ ID NO: 174053 - DNA, 25 bp, Homo sapien
gatgcaaagagtcgattttcgcggg

SEQ ID NO: 174054 - DNA, 25 bp, Homo sapien
gcactctcccaatgacccggaagta

SEQ ID NO: 174055 - DNA, 25 bp, Homo sapien
tatcgacctcaaagatgccctttcc

SEQ ID NO: 174056 - DNA, 25 bp, Homo sapien
actgccgcacgcgaatcgacgtcgt

SEQ ID NO: 174057 - DNA, 25 bp, Homo sapien
gattaacttaaatttattaatgcca

SEQ ID NO: 174058 - DNA, 25 bp, Homo sapien
ccaatcctctcataattgggagcaa

SEQ ID NO: 174059 - DNA, 25 bp, Homo sapien
gctgtatccacagttcggccaggaa

SEQ ID NO: 174060 - DNA, 25 bp, Homo sapien
tgccagaggctagggccagcgctac

SEQ ID NO: 174061 - DNA, 25 bp, Homo sapien
tacatagtctgtggttaatggaggt

SEQ ID NO: 174062 - DNA, 25 bp, Homo sapien
acgtttccatagtccaagggccaga

SEQ ID NO: 174063 - DNA, 25 bp, Homo sapien
ctcccacgtttccatagtccaaggg

SEQ ID NO: 174064 - DNA, 25 bp, Homo sapien
ctgcccctcccacgtttccatagtc

SEQ ID NO: 174065 - DNA, 25 bp, Homo sapien
ccacgtttccatagtccaagggcca

SEQ ID NO: 174066 - DNA, 25 bp, Homo sapien
ctggagtctgagttagctggcatca

SEQ ID NO: 174067 - DNA, 25 bp, Homo sapien
taggatcatcaatgagtgagaagtc

SEQ ID NO: 174068 - DNA, 25 bp, Homo sapien
gaagtccctttctgagctatcatag

SEQ ID NO: 174069 - DNA, 25 bp, Homo sapien
ggagtctgagttagctggcatcata

SEQ ID NO: 174070 - DNA, 25 bp, Homo sapien
catcctcctcaggttgcagtggtgg

SEQ ID NO: 174071 - DNA, 25 bp, Homo sapien
tggcaaccgcaaggtagtaccagag

SEQ ID NO: 174072 - DNA, 25 bp, Homo sapien
gaggcggtagtcactggtgaagagg

SEQ ID NO: 174073 - DNA, 25 bp, Homo sapien
caaggtagtaccagaggcggtagtc

SEQ ID NO: 174074 - DNA, 25 bp, Homo sapien
ggtggtggtgatgaagcatggtgct

SEQ ID NO: 174075 - DNA, 25 bp, Homo sapien
actactgctgtgttggaacgtgtta

SEQ ID NO: 174076 - DNA, 25 bp, Homo sapien
gacacagactgtaggccactactgc

SEQ ID NO: 174077 - DNA, 25 bp, Homo sapien
tggaacgtgttatgcagagatagag

SEQ ID NO: 174078 - DNA, 25 bp, Homo sapien
gcagagatagagacccagtgcttcc

SEQ ID NO: 174079 - DNA, 25 bp, Homo sapien
tgaacaccgtttcagtgtgatgacc

SEQ ID NO: 174080 - DNA, 25 bp, Homo sapien
aaggtctggtcgcatcctacgggcc

SEQ ID NO: 174081 - DNA, 25 bp, Homo sapien
tgcaataggccctggcaaaacccgg

SEQ ID NO: 174082 - DNA, 25 bp, Homo sapien
ctgctctctggtgcaataggccctg

SEQ ID NO: 174083 - DNA, 25 bp, Homo sapien
gaggcaaaacaagcacagcgatact

SEQ ID NO: 174084 - DNA, 25 bp, Homo sapien
aacagagtcctagcttacaatgctt

SEQ ID NO: 174085 - DNA, 25 bp, Homo sapien
gctggacttagctggttgaaacatt

SEQ ID NO: 174086 - DNA, 25 bp, Homo sapien
tcaatgattttgtaccgaaactcat

SEQ ID NO: 174087 - DNA, 25 bp, Homo sapien
tctgttttctgcgatcctccatata

SEQ ID NO: 174088 - DNA, 25 bp, Homo sapien
tttcccatttctagagttagctgtc

SEQ ID NO: 174089 - DNA, 25 bp, Homo sapien
cacttctgttttctgcgatcctcca

SEQ ID NO: 174090 - DNA, 25 bp, Homo sapien
tactggttccattcccaaacagttc

SEQ ID NO: 174091 - DNA, 25 bp, Homo sapien
tagataaaggattcatcctagtgga

SEQ ID NO: 174092 - DNA, 25 bp, Homo sapien
tattttgggcatcacaacaattgtg

SEQ ID NO: 174093 - DNA, 25 bp, Homo sapien
gcagatacagaaacgatgatacagt

SEQ ID NO: 174094 - DNA, 25 bp, Homo sapien
tctcatgcagcttaaataccaaagg

SEQ ID NO: 174095 - DNA, 25 bp, Homo sapien
ttgatgacagggatccgggtctcca

SEQ ID NO: 174096 - DNA, 25 bp, Homo sapien
cacatcaaggtgattaggctcttcc

SEQ ID NO: 174097 - DNA, 25 bp, Homo sapien
aaactctggatgaccctgtaaccac

SEQ ID NO: 174098 - DNA, 25 bp, Homo sapien
acatctccagttcagcccggcgagg

SEQ ID NO: 174099 - DNA, 25 bp, Homo sapien
agaatccacccccatgagcacatac

SEQ ID NO: 174100 - DNA, 25 bp, Homo sapien
tccacccccatgagcacatactctt

SEQ ID NO: 174101 - DNA, 25 bp, Homo sapien
ccagaatccacccccatgagcacat

SEQ ID NO: 174102 - DNA, 25 bp, Homo sapien
aatccacccccatgagcacatactc

SEQ ID NO: 174103 - DNA, 25 bp, Homo sapien
agggccaatggtagtcatgaaatga

SEQ ID NO: 174104 - DNA, 25 bp, Homo sapien
gagcagggccaatggtagtcatgaa

SEQ ID NO: 174105 - DNA, 25 bp, Homo sapien
ggagcagggccaatggtagtcatga

SEQ ID NO: 174106 - DNA, 25 bp, Homo sapien
gcagggccaatggtagtcatgaaat

SEQ ID NO: 174107 - DNA, 25 bp, Homo sapien
taatcgtcaggttaaagactttctc

SEQ ID NO: 174108 - DNA, 25 bp, Homo sapien
gacaatctaatcgtcaggttaaaga

SEQ ID NO: 174109 - DNA, 25 bp, Homo sapien
taaaaagacaatctaatcgtcaggt

SEQ ID NO: 174110 - DNA, 25 bp, Homo sapien
ggttaaagactttctctaccactca

SEQ ID NO: 174111 - DNA, 25 bp, Homo sapien
tcttatgaaacagtggatgtccatc

SEQ ID NO: 174112 - DNA, 25 bp, Homo sapien
cccattactccattcgccatcaact

SEQ ID NO: 174113 - DNA, 25 bp, Homo sapien
tactccattcgccatcaacttgtgc

SEQ ID NO: 174114 - DNA, 25 bp, Homo sapien
ttatgaaacagtggatgtccatctc

SEQ ID NO: 174115 - DNA, 25 bp, Homo sapien
cccacttcccaatgcccaaatgctg

SEQ ID NO: 174116 - DNA, 25 bp, Homo sapien
ttccccacttcccaatgcccaaatg

SEQ ID NO: 174117 - DNA, 25 bp, Homo sapien
cttccccacttcccaatgcccaaat

SEQ ID NO: 174118 - DNA, 25 bp, Homo sapien
ccccacttcccaatgcccaaatgct

SEQ ID NO: 174119 - DNA, 25 bp, Homo sapien
tttcctggctcctacggctagaagg

SEQ ID NO: 174120 - DNA, 25 bp, Homo sapien
catgcctcggcgaagtttggtgaac

SEQ ID NO: 174121 - DNA, 25 bp, Homo sapien
cagacgaggtcaatacggtttatca

SEQ ID NO: 174122 - DNA, 25 bp, Homo sapien
ttccctgagagtacagcctggcaga

SEQ ID NO: 174123 - DNA, 25 bp, Homo sapien
tgggaatccatcttgggacatagtg

SEQ ID NO: 174124 - DNA, 25 bp, Homo sapien
aatccatcttgggacatagtgaggg

SEQ ID NO: 174125 - DNA, 25 bp, Homo sapien
gctcaggggtcatttgttctccatc

SEQ ID NO: 174126 - DNA, 25 bp, Homo sapien
catagtgagggacaggagactctct

SEQ ID NO: 174127 - DNA, 25 bp, Homo sapien
caaatctctctcaagaggatgcatt

SEQ ID NO: 174128 - DNA, 25 bp, Homo sapien
ttatatgggctttgaataaaggccc

SEQ ID NO: 174129 - DNA, 25 bp, Homo sapien
ggtaagagagcccatagaatgtgtg

SEQ ID NO: 174130 - DNA, 25 bp, Homo sapien
catatggtaatggtattatatgggc

SEQ ID NO: 174131 - DNA, 25 bp, Homo sapien
tgactggtggaacactccgggaaac

SEQ ID NO: 174132 - DNA, 25 bp, Homo sapien
tactcgcatctcatagtcttgtggg

SEQ ID NO: 174133 - DNA, 25 bp, Homo sapien
catataattcatacgggcagccaga

SEQ ID NO: 174134 - DNA, 25 bp, Homo sapien
acttgttcccgtaagcgccgaagca

SEQ ID NO: 174135 - DNA, 25 bp, Homo sapien
tgcaagagacaggagtagaagaaat

SEQ ID NO: 174136 - DNA, 25 bp, Homo sapien
gggtcatattccacaccaaacgtag

SEQ ID NO: 174137 - DNA, 25 bp, Homo sapien
tgcggaagcgatcccaatggaactg

SEQ ID NO: 174138 - DNA, 25 bp, Homo sapien
aaggcggcatacttggcggcacatg

SEQ ID NO: 174139 - DNA, 25 bp, Homo sapien
aatcagtttgttcacgccttgtcca

SEQ ID NO: 174140 - DNA, 25 bp, Homo sapien
cagaagaacacaagaaaactggtta

SEQ ID NO: 174141 - DNA, 25 bp, Homo sapien
aataatcagaagaacacatcagaag

SEQ ID NO: 174142 - DNA, 25 bp, Homo sapien
gaaaagtagggcaacaataatcaga

SEQ ID NO: 174143 - DNA, 25 bp, Homo sapien
ggaaaagtagggcaacaataatcag

SEQ ID NO: 174144 - DNA, 25 bp, Homo sapien
gctgatacgctgttactagacgccg

SEQ ID NO: 174145 - DNA, 25 bp, Homo sapien
ttgttctctcttgtagctgcgctga

SEQ ID NO: 174146 - DNA, 25 bp, Homo sapien
gaaggctgcttcacaacgccgcctt

SEQ ID NO: 174147 - DNA, 25 bp, Homo sapien
tctcccgccgtgcaatttctttcag

SEQ ID NO: 174148 - DNA, 25 bp, Homo sapien
ctgttagggcagagcccggaggcca

SEQ ID NO: 174149 - DNA, 25 bp, Homo sapien
gcagagcccggaggccagaataaat

SEQ ID NO: 174150 - DNA, 25 bp, Homo sapien
agggcagagcccggaggccagaata

SEQ ID NO: 174151 - DNA, 25 bp, Homo sapien
tgttagggcagagcccggaggccag

SEQ ID NO: 174152 - DNA, 25 bp, Homo sapien
ggtagtagaggcaatactagtattt

SEQ ID NO: 174153 - DNA, 25 bp, Homo sapien
accccacacagaattatactagttg

SEQ ID NO: 174154 - DNA, 25 bp, Homo sapien
tatactagttgacctagaagtttac

SEQ ID NO: 174155 - DNA, 25 bp, Homo sapien
aataggaagtatagcaagggtagta

SEQ ID NO: 174156 - DNA, 25 bp, Homo sapien
catccatcatcatcaagggatcacc

SEQ ID NO: 174157 - DNA, 25 bp, Homo sapien
tgagatctcctcatccatcatcatc

SEQ ID NO: 174158 - DNA, 25 bp, Homo sapien
ctcatccatcatcatcaagggatca

SEQ ID NO: 174159 - DNA, 25 bp, Homo sapien
tcaatcactgagatctcctcatcca

SEQ ID NO: 174160 - DNA, 25 bp, Homo sapien
tggcaccaagggatcaagaaaaact

SEQ ID NO: 174161 - DNA, 25 bp, Homo sapien
gtcagttcctattaacgactcaaag

SEQ ID NO: 174162 - DNA, 25 bp, Homo sapien
gatccacccaataggatggagcggg

SEQ ID NO: 174163 - DNA, 25 bp, Homo sapien
gggaagttggcactctgaaatcact

SEQ ID NO: 174164 - DNA, 25 bp, Homo sapien
gagtggtttatattcaggatcttca

SEQ ID NO: 174165 - DNA, 25 bp, Homo sapien
ttcacaatctttatcaaagtcaacc

SEQ ID NO: 174166 - DNA, 25 bp, Homo sapien
ggaccttggagtggtttatattcag

SEQ ID NO: 174167 - DNA, 25 bp, Homo sapien
catcttggtcctttgggggaccttg

SEQ ID NO: 174168 - DNA, 25 bp, Homo sapien
cagggcaacactgccctacctggtg

SEQ ID NO: 174169 - DNA, 25 bp, Homo sapien
ttgttaaactcactggcacccaaac

SEQ ID NO: 174170 - DNA, 25 bp, Homo sapien
tacctggtggctcagtattagcatg

SEQ ID NO: 174171 - DNA, 25 bp, Homo sapien
cagtattagcatggcaactcatcat

SEQ ID NO: 174172 - DNA, 25 bp, Homo sapien
cactcgatgttctgctgcaattgct

SEQ ID NO: 174173 - DNA, 25 bp, Homo sapien
tggtcggccagccttttctaggaaa

SEQ ID NO: 174174 - DNA, 25 bp, Homo sapien
ctgggtctgccctcatggtattata

SEQ ID NO: 174175 - DNA, 25 bp, Homo sapien
tctactatgtcagagaagttatcca

SEQ ID NO: 174176 - DNA, 25 bp, Homo sapien
tgtgaacaaacagttggaggatggc

SEQ ID NO: 174177 - DNA, 25 bp, Homo sapien
aacagttggaggatggccgtactct

SEQ ID NO: 174178 - DNA, 25 bp, Homo sapien
tatttgtgaacaaacagttggagga

SEQ ID NO: 174179 - DNA, 25 bp, Homo sapien
ggccgtactctttcagactgtaaca

SEQ ID NO: 174180 - DNA, 25 bp, Homo sapien
ggaacctccagttgatccactactg

SEQ ID NO: 174181 - DNA, 25 bp, Homo sapien
tgtttaaagactccaatgagcagcg

SEQ ID NO: 174182 - DNA, 25 bp, Homo sapien
cactgtcccaccaagttgttggaac

SEQ ID NO: 174183 - DNA, 25 bp, Homo sapien
gagcagcgacttgtcagcctcactg

SEQ ID NO: 174184 - DNA, 25 bp, Homo sapien
tcctgcctcaggtagtatagcattc

SEQ ID NO: 174185 - DNA, 25 bp, Homo sapien
ggtagtatagcattcgtacccgcaa

SEQ ID NO: 174186 - DNA, 25 bp, Homo sapien
tatagcattcgtacccgcaacagta

SEQ ID NO: 174187 - DNA, 25 bp, Homo sapien
gcctcaggtagtatagcattcgtac

SEQ ID NO: 174188 - DNA, 25 bp, Homo sapien
tcatcttggaacaaagtgtcagggt

SEQ ID NO: 174189 - DNA, 25 bp, Homo sapien
cactgatgtttcaagtgcttcttat

SEQ ID NO: 174190 - DNA, 25 bp, Homo sapien
tatttccggatccaatctgccttat

SEQ ID NO: 174191 - DNA, 25 bp, Homo sapien
tctgccttatggatatcaaaagtgc

SEQ ID NO: 174192 - DNA, 25 bp, Homo sapien
gaagacagtacacgagaatggcccg

SEQ ID NO: 174193 - DNA, 25 bp, Homo sapien
taatattttcatccccacggtagtg

SEQ ID NO: 174194 - DNA, 25 bp, Homo sapien
gaatggcccgacaaatggtctccac

SEQ ID NO: 174195 - DNA, 25 bp, Homo sapien
tttcagctgggctaatcaagtccca

SEQ ID NO: 174196 - DNA, 25 bp, Homo sapien
tcagagtgctaaagtggcgcgtttg

SEQ ID NO: 174197 - DNA, 25 bp, Homo sapien
tcagtgcgcccataggcatgatgac

SEQ ID NO: 174198 - DNA, 25 bp, Homo sapien
tttccacccgaaagcagtcagtgcg

SEQ ID NO: 174199 - DNA, 25 bp, Homo sapien
cgtactctaggtgtgtcaattacca

SEQ ID NO: 174200 - DNA, 25 bp, Homo sapien
tttgccaaaagttggggtcatccaa

SEQ ID NO: 174201 - DNA, 25 bp, Homo sapien
ctgtcctgttttcagaagcaacaaa

SEQ ID NO: 174202 - DNA, 25 bp, Homo sapien
tcctgttttcagaagcaacaaagct

SEQ ID NO: 174203 - DNA, 25 bp, Homo sapien
tgttttcagaagcaacaaagcttgc

SEQ ID NO: 174204 - DNA, 25 bp, Homo sapien
ctgttttcagaagcaacaaagcttg

SEQ ID NO: 174205 - DNA, 25 bp, Homo sapien
ttccttcagattcaatggtgatggt

SEQ ID NO: 174206 - DNA, 25 bp, Homo sapien
ggtgatggttgtagttcgtcttaac

SEQ ID NO: 174207 - DNA, 25 bp, Homo sapien
ctccatgatggctgcatatgctcct

SEQ ID NO: 174208 - DNA, 25 bp, Homo sapien
ttgtagttcgtcttaacaagatctg

SEQ ID NO: 174209 - DNA, 25 bp, Homo sapien
tgccatcccgaccactcatggattg

SEQ ID NO: 174210 - DNA, 25 bp, Homo sapien
gctctgcccaattcgatgacatcgt

SEQ ID NO: 174211 - DNA, 25 bp, Homo sapien
caaccccaacttgaggctggcctta

SEQ ID NO: 174212 - DNA, 25 bp, Homo sapien
tcatggattgaagcacagccttatc

SEQ ID NO: 174213 - DNA, 25 bp, Homo sapien
cagcagctgtaagattaataccaag

SEQ ID NO: 174214 - DNA, 25 bp, Homo sapien
gcagcctgtcgaaggttgcctctaa

SEQ ID NO: 174215 - DNA, 25 bp, Homo sapien
ctgagtcaggcttgctgaagcggtc

SEQ ID NO: 174216 - DNA, 25 bp, Homo sapien
gcccgggtacacagtaagaagacaa

SEQ ID NO: 174217 - DNA, 25 bp, Homo sapien
tatgggaatcgcagaaaaaaaatgt

SEQ ID NO: 174218 - DNA, 25 bp, Homo sapien
caataccagtactcccatatcaaag

SEQ ID NO: 174219 - DNA, 25 bp, Homo sapien
aaaaaatgtaagtggctaagcagaa

SEQ ID NO: 174220 - DNA, 25 bp, Homo sapien
gaagtggagaccaaaacagcaggct

SEQ ID NO: 174221 - DNA, 25 bp, Homo sapien
gaagcaacttgtcaataagaaccag

SEQ ID NO: 174222 - DNA, 25 bp, Homo sapien
caagcttcacggaattctgttagga

SEQ ID NO: 174223 - DNA, 25 bp, Homo sapien
taagaaccagtttgccggctgaacg

SEQ ID NO: 174224 - DNA, 25 bp, Homo sapien
tcagaactttatggccaccagcttt

SEQ ID NO: 174225 - DNA, 25 bp, Homo sapien
attgtgttaagtagattaggcatgt

SEQ ID NO: 174226 - DNA, 25 bp, Homo sapien
gtggttgcagcacttgcgcaactcc

SEQ ID NO: 174227 - DNA, 25 bp, Homo sapien
cagcacttgcgcaactccatcattg

SEQ ID NO: 174228 - DNA, 25 bp, Homo sapien
agtagattaggcatgttggtatgac

SEQ ID NO: 174229 - DNA, 25 bp, Homo sapien
tctccaaaatagcccgatagtattt

SEQ ID NO: 174230 - DNA, 25 bp, Homo sapien
ctggatattagtcagctctacttca

SEQ ID NO: 174231 - DNA, 25 bp, Homo sapien
gcccgatagtatttcttctggatat

SEQ ID NO: 174232 - DNA, 25 bp, Homo sapien
ggatattagtcagctctacttcaat

SEQ ID NO: 174233 - DNA, 25 bp, Homo sapien
tctttgtcctgagttagtacctcat

SEQ ID NO: 174234 - DNA, 25 bp, Homo sapien
tttgtcctgagttagtacctcatca

SEQ ID NO: 174235 - DNA, 25 bp, Homo sapien
gtacctcatcagatagatttcctac

SEQ ID NO: 174236 - DNA, 25 bp, Homo sapien
gtcctgagttagtacctcatcagat

SEQ ID NO: 174237 - DNA, 25 bp, Homo sapien
gaaattgtgacggttccaagaaatg

SEQ ID NO: 174238 - DNA, 25 bp, Homo sapien
ttcctgtgagtagcaccttgtgttc

SEQ ID NO: 174239 - DNA, 25 bp, Homo sapien
ttcctctgtcttgagatccccaaag

SEQ ID NO: 174240 - DNA, 25 bp, Homo sapien
tattttgcaatggtgttcctgtgag

SEQ ID NO: 174241 - DNA, 25 bp, Homo sapien
caggtccatgtgcttgagactatca

SEQ ID NO: 174242 - DNA, 25 bp, Homo sapien
tacggtttttcagtcgatgggcttc

SEQ ID NO: 174243 - DNA, 25 bp, Homo sapien
tctcaaaagtggtgatcagagcgtc

SEQ ID NO: 174244 - DNA, 25 bp, Homo sapien
cattcaatttcacgaagctcaggac

SEQ ID NO: 174245 - DNA, 25 bp, Homo sapien
catggattaagtggctaaaggaatt

SEQ ID NO: 174246 - DNA, 25 bp, Homo sapien
tgatgaaaatttccgtagactaaaa

SEQ ID NO: 174247 - DNA, 25 bp, Homo sapien
tcaccaccgcatggattaagtggct

SEQ ID NO: 174248 - DNA, 25 bp, Homo sapien
ggaaaagaaataagctcaccaccgc

SEQ ID NO: 174249 - DNA, 25 bp, Homo sapien
cttggccgactttctctaactcata

SEQ ID NO: 174250 - DNA, 25 bp, Homo sapien
tctctaactcatagtattcccaaga

SEQ ID NO: 174251 - DNA, 25 bp, Homo sapien
ggccgactttctctaactcatagta

SEQ ID NO: 174252 - DNA, 25 bp, Homo sapien
gactttctctaactcatagtattcc

SEQ ID NO: 174253 - DNA, 25 bp, Homo sapien
tgaccaagaagggaccatggatgcc

SEQ ID NO: 174254 - DNA, 25 bp, Homo sapien
gccagactgccatggtacacaatag

SEQ ID NO: 174255 - DNA, 25 bp, Homo sapien
caatggactgaatagttttgcccaa

SEQ ID NO: 174256 - DNA, 25 bp, Homo sapien
catgtattaaattctcgctcccagt

SEQ ID NO: 174257 - DNA, 25 bp, Homo sapien
cttccaactgatattcccgtagctg

SEQ ID NO: 174258 - DNA, 25 bp, Homo sapien
ttccaggcacttgcctgcggacgat

SEQ ID NO: 174259 - DNA, 25 bp, Homo sapien
catgtgatagctccaatttcttcca

SEQ ID NO: 174260 - DNA, 25 bp, Homo sapien
taaagagcagccaattaaccccttc

SEQ ID NO: 174261 - DNA, 25 bp, Homo sapien
ccatgtgctatcctcatagggcaga

SEQ ID NO: 174262 - DNA, 25 bp, Homo sapien
gactgaatccgtttaaattctcgaa

SEQ ID NO: 174263 - DNA, 25 bp, Homo sapien
gagcaccatttcaccaggtagtaaa

SEQ ID NO: 174264 - DNA, 25 bp, Homo sapien
tttgagttctgggtgccttgactga

SEQ ID NO: 174265 - DNA, 25 bp, Homo sapien
tataaagcaaggattagattgggcc

SEQ ID NO: 174266 - DNA, 25 bp, Homo sapien
caagaggttatcaccaaaaagaggt

SEQ ID NO: 174267 - DNA, 25 bp, Homo sapien
gccccaggaagctaggagctaacaa

SEQ ID NO: 174268 - DNA, 25 bp, Homo sapien
gaaagtgcctcaaggtagtcacaga

SEQ ID NO: 174269 - DNA, 25 bp, Homo sapien
gtagtctggattaaagggctcttca

SEQ ID NO: 174270 - DNA, 25 bp, Homo sapien
tccacctctacgtagtctggattaa

SEQ ID NO: 174271 - DNA, 25 bp, Homo sapien
cctctacgtagtctggattaaaggg

SEQ ID NO: 174272 - DNA, 25 bp, Homo sapien
tgagactcatccaatatcctatcca

SEQ ID NO: 174273 - DNA, 25 bp, Homo sapien
ctctagttgggagatagtagcccat

SEQ ID NO: 174274 - DNA, 25 bp, Homo sapien
ggaagaagtgtctcatctgagccat

SEQ ID NO: 174275 - DNA, 25 bp, Homo sapien
taatttttgatgtatcctcttatcc

SEQ ID NO: 174276 - DNA, 25 bp, Homo sapien
tatcctcttatccttctctagttgg

SEQ ID NO: 174277 - DNA, 25 bp, Homo sapien
tcttgtacttgacaaagaattcttc

SEQ ID NO: 174278 - DNA, 25 bp, Homo sapien
tgtacttgacaaagaattcttctgc

SEQ ID NO: 174279 - DNA, 25 bp, Homo sapien
tagttcttgtacttgacaaagaatt

SEQ ID NO: 174280 - DNA, 25 bp, Homo sapien
cttgacaaagaattcttctgcttca

SEQ ID NO: 174281 - DNA, 25 bp, Homo sapien
ctccttcttcacaatccgcatagaa

SEQ ID NO: 174282 - DNA, 25 bp, Homo sapien
gcatagaaagcactttgtctacaat

SEQ ID NO: 174283 - DNA, 25 bp, Homo sapien
cttcacaatccgcatagaaagcact

SEQ ID NO: 174284 - DNA, 25 bp, Homo sapien
tcttcacaatccgcatagaaagcac

SEQ ID NO: 174285 - DNA, 25 bp, Homo sapien
gaaggcaaagtctcgccatctggtt

SEQ ID NO: 174286 - DNA, 25 bp, Homo sapien
cttaacttggcggtttgagcgtctc

SEQ ID NO: 174287 - DNA, 25 bp, Homo sapien
cactggttcagggaggataggctca

SEQ ID NO: 174288 - DNA, 25 bp, Homo sapien
cacaaagaactgcatggaaggcaaa

SEQ ID NO: 174289 - DNA, 25 bp, Homo sapien
aagacactgaccagtgggaggccaa

SEQ ID NO: 174290 - DNA, 25 bp, Homo sapien
cgcctggccaagtatcactattttt

SEQ ID NO: 174291 - DNA, 25 bp, Homo sapien
ggccaggtccatccaccttatttag

SEQ ID NO: 174292 - DNA, 25 bp, Homo sapien
tatttaggcctacgcccagtttaga

SEQ ID NO: 174293 - DNA, 25 bp, Homo sapien
cttacccactacaggagtgatggtg

SEQ ID NO: 174294 - DNA, 25 bp, Homo sapien
tcagatgaggtattacgttttctct

SEQ ID NO: 174295 - DNA, 25 bp, Homo sapien
tctgaattatcagatgaggtattac

SEQ ID NO: 174296 - DNA, 25 bp, Homo sapien
tctcttcttacccactacaggagtg

SEQ ID NO: 174297 - DNA, 25 bp, Homo sapien
cttccagacagaagtttttagatct

SEQ ID NO: 174298 - DNA, 25 bp, Homo sapien
agtttttagatcttcagtcaatagg

SEQ ID NO: 174299 - DNA, 25 bp, Homo sapien
cagctactaaatatggtgtttgaaa

SEQ ID NO: 174300 - DNA, 25 bp, Homo sapien
tcttcagtcaataggacacacagct

SEQ ID NO: 174301 - DNA, 25 bp, Homo sapien
tcacttgagcttactcttgcacgtc

SEQ ID NO: 174302 - DNA, 25 bp, Homo sapien
actcttgcacgtcccatcacaatag

SEQ ID NO: 174303 - DNA, 25 bp, Homo sapien
gagcttactcttgcacgtcccatca

SEQ ID NO: 174304 - DNA, 25 bp, Homo sapien
aaggagcactcacttgagcttactc

SEQ ID NO: 174305 - DNA, 25 bp, Homo sapien
cttactcttgcacgtcccatcacag

SEQ ID NO: 174306 - DNA, 25 bp, Homo sapien
tactcttgcacgtcccatcacagta

SEQ ID NO: 174307 - DNA, 25 bp, Homo sapien
ttactcttgcacgtcccatcacagt

SEQ ID NO: 174308 - DNA, 25 bp, Homo sapien
actcttgcacgtcccatcacagtag

SEQ ID NO: 174309 - DNA, 25 bp, Homo sapien
gctgggcaactcgtcctcatttaag

SEQ ID NO: 174310 - DNA, 25 bp, Homo sapien
gcaatggcctctgctacaatccgat

SEQ ID NO: 174311 - DNA, 25 bp, Homo sapien
gactcgaggtatgttctgctcaccg

SEQ ID NO: 174312 - DNA, 25 bp, Homo sapien
cttgctggtgatgacaaagctgcca

SEQ ID NO: 174313 - DNA, 25 bp, Homo sapien
cccagaagaggccccttgggaagag

SEQ ID NO: 174314 - DNA, 25 bp, Homo sapien
gcccagaagaggccccttgggaaga

SEQ ID NO: 174315 - DNA, 25 bp, Homo sapien
tagactccctagcacaacatgccga

SEQ ID NO: 174316 - DNA, 25 bp, Homo sapien
tagttactaccttggcaggctgccc

SEQ ID NO: 174317 - DNA, 25 bp, Homo sapien
gaccagggtgatgcgtttcgattca

SEQ ID NO: 174318 - DNA, 25 bp, Homo sapien
gcacctgcagctggatagttactac

SEQ ID NO: 174319 - DNA, 25 bp, Homo sapien
gcacaacactactgctgatcagcaa

SEQ ID NO: 174320 - DNA, 25 bp, Homo sapien
acaggcacaacactactgctgatca

SEQ ID NO: 174321 - DNA, 25 bp, Homo sapien
caagggagtgctgccctgctccgtt

SEQ ID NO: 174322 - DNA, 25 bp, Homo sapien
gatcagcaagggagtgctgccctgc

SEQ ID NO: 174323 - DNA, 25 bp, Homo sapien
cagctgctttactggtcggctgggc

SEQ ID NO: 174324 - DNA, 25 bp, Homo sapien
ggcctgaatttgtgccacatgggca

SEQ ID NO: 174325 - DNA, 25 bp, Homo sapien
gctgggctggacaatgcgctgaaca

SEQ ID NO: 174326 - DNA, 25 bp, Homo sapien
gctggtgataccttgggcctgaatt

SEQ ID NO: 174327 - DNA, 25 bp, Homo sapien
tgaggtggctgccctccagcactac

SEQ ID NO: 174328 - DNA, 25 bp, Homo sapien
ctgaggtggctgccctccagcacta

SEQ ID NO: 174329 - DNA, 25 bp, Homo sapien
tcctggctcttggagacttgcaaaa

SEQ ID NO: 174330 - DNA, 25 bp, Homo sapien
gaaaggattcccttggctcaggatc

SEQ ID NO: 174331 - DNA, 25 bp, Homo sapien
tgtggcagagacacccatgaaagga

SEQ ID NO: 174332 - DNA, 25 bp, Homo sapien
aaaagtcctgatgttggcgtcgatg

SEQ ID NO: 174333 - DNA, 25 bp, Homo sapien
ggtcatcgaacagatccatgatggg

SEQ ID NO: 174334 - DNA, 25 bp, Homo sapien
tgtcatcagtcagagagtccaggcc

SEQ ID NO: 174335 - DNA, 25 bp, Homo sapien
tttgggtcatcgaacagatccatga

SEQ ID NO: 174336 - DNA, 25 bp, Homo sapien
aaataaatttgggtcatcgaacaga

SEQ ID NO: 174337 - DNA, 25 bp, Homo sapien
gaaagtaatggagggtacttctcca

SEQ ID NO: 174338 - DNA, 25 bp, Homo sapien
tgtacacaatgtaagaggactactc

SEQ ID NO: 174339 - DNA, 25 bp, Homo sapien
tactcttcaagtatagaggcaagaa

SEQ ID NO: 174340 - DNA, 25 bp, Homo sapien
gaaacaagtgcatgtcagattgtcc

SEQ ID NO: 174341 - DNA, 25 bp, Homo sapien
caagtgcatgtcagattgtcctgac

SEQ ID NO: 174342 - DNA, 25 bp, Homo sapien
ggagcaagatggctacgtcttcaga

SEQ ID NO: 174343 - DNA, 25 bp, Homo sapien
gcaagatggctacgtcttcagagga

SEQ ID NO: 174344 - DNA, 25 bp, Homo sapien
gagcaagatggctacgtcttcagag

SEQ ID NO: 174345 - DNA, 25 bp, Homo sapien
caagatggctacgtcttcagaggaa

SEQ ID NO: 174346 - DNA, 25 bp, Homo sapien
tatttgacaatacaggaaagtcttg

SEQ ID NO: 174347 - DNA, 25 bp, Homo sapien
ggctagcctattccaccagctcatt

SEQ ID NO: 174348 - DNA, 25 bp, Homo sapien
gaaatttgtcagaggcacagtcctg

SEQ ID NO: 174349 - DNA, 25 bp, Homo sapien
caatcaggaaagttatgaatgcttc

SEQ ID NO: 174350 - DNA, 25 bp, Homo sapien
ggttttcgccacgttagtcagactg

SEQ ID NO: 174351 - DNA, 25 bp, Homo sapien
aggttttcgccacgttagtcagact

SEQ ID NO: 174352 - DNA, 25 bp, Homo sapien
gttttcgccacgttagtcagactgg

SEQ ID NO: 174353 - DNA, 25 bp, Homo sapien
gtatcattacttctcagtcccatca

SEQ ID NO: 174354 - DNA, 25 bp, Homo sapien
tcaccctggctatatccacatacgg

SEQ ID NO: 174355 - DNA, 25 bp, Homo sapien
tgcttcttctagttcggtctatgcc

SEQ ID NO: 174356 - DNA, 25 bp, Homo sapien
tactactacttgtgggtcaccctgg

SEQ ID NO: 174357 - DNA, 25 bp, Homo sapien
taaactgtctgtcctatgataaagt

SEQ ID NO: 174358 - DNA, 25 bp, Homo sapien
gaaactactgcttccccttgagaca

SEQ ID NO: 174359 - DNA, 25 bp, Homo sapien
tatatgccagtatagcccttcactt

SEQ ID NO: 174360 - DNA, 25 bp, Homo sapien
tttggaaatctagagtcccaactct

SEQ ID NO: 174361 - DNA, 25 bp, Homo sapien
gggttggtgccagtaaggtccatac

SEQ ID NO: 174362 - DNA, 25 bp, Homo sapien
ccatacagcagaggcggaagatttc

SEQ ID NO: 174363 - DNA, 25 bp, Homo sapien
tgccagtaaggtccatacagcagag

SEQ ID NO: 174364 - DNA, 25 bp, Homo sapien
taaggtccatacagcagaggcggaa

SEQ ID NO: 174365 - DNA, 25 bp, Homo sapien
cggttcgcccctctccctgtctctc

SEQ ID NO: 174366 - DNA, 25 bp, Homo sapien
cagtggctgtggggggccggttcgc

SEQ ID NO: 174367 - DNA, 25 bp, Homo sapien
ctgcagtggctgtggggggccggtt

SEQ ID NO: 174368 - DNA, 25 bp, Homo sapien
gccggttcgcccctctccctgtctc

SEQ ID NO: 174369 - DNA, 25 bp, Homo sapien
gaccaagtcattttcccctgtacag

SEQ ID NO: 174370 - DNA, 25 bp, Homo sapien
gacttgtgcctaaaaactgacccca

SEQ ID NO: 174371 - DNA, 25 bp, Homo sapien
ggcacagctttaacaggctactgaa

SEQ ID NO: 174372 - DNA, 25 bp, Homo sapien
tgggctaaactgacttgcattggct

SEQ ID NO: 174373 - DNA, 25 bp, Homo sapien
gaaaggactccagtactaccgtgct

SEQ ID NO: 174374 - DNA, 25 bp, Homo sapien
tggtagttcacatgcccagatccag

SEQ ID NO: 174375 - DNA, 25 bp, Homo sapien
tgtgatctagagtaacatcccaggt

SEQ ID NO: 174376 - DNA, 25 bp, Homo sapien
tagtttccaactgactagactgtcc

SEQ ID NO: 174377 - DNA, 25 bp, Homo sapien
agatcaaggactggctcaaatccaa

SEQ ID NO: 174378 - DNA, 25 bp, Homo sapien
atcaaggactggctcaaatccaact

SEQ ID NO: 174379 - DNA, 25 bp, Homo sapien
gatcaaggactggctcaaatccaac

SEQ ID NO: 174380 - DNA, 25 bp, Homo sapien
ccagatgacttcagcatatgctaac

SEQ ID NO: 174381 - DNA, 25 bp, Homo sapien
gctgagaatccttgactgagtcgac

SEQ ID NO: 174382 - DNA, 25 bp, Homo sapien
gagatgaaacgatctgtagacgccg

SEQ ID NO: 174383 - DNA, 25 bp, Homo sapien
gatatgtaatgtgccccacaccaga

SEQ ID NO: 174384 - DNA, 25 bp, Homo sapien
ctggtacttcctttccaggcagcgt

SEQ ID NO: 174385 - DNA, 25 bp, Homo sapien
ctgtgcaagtcctggtacttccttt

SEQ ID NO: 174386 - DNA, 25 bp, Homo sapien
gtacttcctttccaggcagcgtttc

SEQ ID NO: 174387 - DNA, 25 bp, Homo sapien
gtgcaagtcctggtacttcctttcc

SEQ ID NO: 174388 - DNA, 25 bp, Homo sapien
tgccgtatgtggttacgggcaacaa

SEQ ID NO: 174389 - DNA, 25 bp, Homo sapien
tcagtcacgacgtgaaaccctggag

SEQ ID NO: 174390 - DNA, 25 bp, Homo sapien
gaaaccctggagtaatgccgtatgt

SEQ ID NO: 174391 - DNA, 25 bp, Homo sapien
tggttacgggcaacaaccaccacca

SEQ ID NO: 174392 - DNA, 25 bp, Homo sapien
cctgagaggagagtatctactaatg

SEQ ID NO: 174393 - DNA, 25 bp, Homo sapien
cagaatcgagtatagcatgaatccc

SEQ ID NO: 174394 - DNA, 25 bp, Homo sapien
cctgtggtgcactgtcaactattac

SEQ ID NO: 174395 - DNA, 25 bp, Homo sapien
gcaataccccaaatgtcttccaact

SEQ ID NO: 174396 - DNA, 25 bp, Homo sapien
tatagcaaccaacccagaaggctgc

SEQ ID NO: 174397 - DNA, 25 bp, Homo sapien
aaaaattcgtaagacctcagggctg

SEQ ID NO: 174398 - DNA, 25 bp, Homo sapien
caatgaaattccgaggcagaggatc

SEQ ID NO: 174399 - DNA, 25 bp, Homo sapien
taataagtggccacatgtccctgac

SEQ ID NO: 174400 - DNA, 25 bp, Homo sapien
cggtggctcacacctgtaatccagc

SEQ ID NO: 174401 - DNA, 25 bp, Homo sapien
ggctcacacctgtaatccagcactt

SEQ ID NO: 174402 - DNA, 25 bp, Homo sapien
cgaaattatttatttaggccaggca

SEQ ID NO: 174403 - DNA, 25 bp, Homo sapien
tcacacctgtaatccagcactttgg

SEQ ID NO: 174404 - DNA, 25 bp, Homo sapien
tttaactactgtgataatcaacttt

SEQ ID NO: 174405 - DNA, 25 bp, Homo sapien
gacaggtcagtaagggcccaaattc

SEQ ID NO: 174406 - DNA, 25 bp, Homo sapien
tttgtataggaggataagaagaacc

SEQ ID NO: 174407 - DNA, 25 bp, Homo sapien
tctcctggtctttaggtggaaaggc

SEQ ID NO: 174408 - DNA, 25 bp, Homo sapien
gcctattgatctgaagctattccag

SEQ ID NO: 174409 - DNA, 25 bp, Homo sapien
cagcagccagagttggaccctatgt

SEQ ID NO: 174410 - DNA, 25 bp, Homo sapien
tatgtcacgagagttccgctgggag

SEQ ID NO: 174411 - DNA, 25 bp, Homo sapien
cagagttggaccctatgtcacgaga

SEQ ID NO: 174412 - DNA, 25 bp, Homo sapien
gaccctatgtcacgagagttccgct

SEQ ID NO: 174413 - DNA, 25 bp, Homo sapien
tgttgaaattgactgttggggccca

SEQ ID NO: 174414 - DNA, 25 bp, Homo sapien
actgttggggcccaatcttgatgcc

SEQ ID NO: 174415 - DNA, 25 bp, Homo sapien
ggggcccaatcttgatgccatttgc

SEQ ID NO: 174416 - DNA, 25 bp, Homo sapien
gaaattgactgttggggcccaatct

SEQ ID NO: 174417 - DNA, 25 bp, Homo sapien
tttctttggctgtgttaatgaaggc

SEQ ID NO: 174418 - DNA, 25 bp, Homo sapien
tatttctttggctgtgttaatgaag

SEQ ID NO: 174419 - DNA, 25 bp, Homo sapien
taaaccctgctggatcttcctatat

SEQ ID NO: 174420 - DNA, 25 bp, Homo sapien
atcaaataaaccctgctggatcttc

SEQ ID NO: 174421 - DNA, 25 bp, Homo sapien
ttccatgaatataagtccatgctcc

SEQ ID NO: 174422 - DNA, 25 bp, Homo sapien
caacattgcaggctgttttggctga

SEQ ID NO: 174423 - DNA, 25 bp, Homo sapien
ctcttcaacattgcaggctgttttg

SEQ ID NO: 174424 - DNA, 25 bp, Homo sapien
tgttttggctgaagtttccatgaat

SEQ ID NO: 174425 - DNA, 25 bp, Homo sapien
cacatccctgcgggactctaggtca

SEQ ID NO: 174426 - DNA, 25 bp, Homo sapien
gctgcatagttgaagataatacctc

SEQ ID NO: 174427 - DNA, 25 bp, Homo sapien
ctttagttttgggacagctgctgca

SEQ ID NO: 174428 - DNA, 25 bp, Homo sapien
gcttatcaagggttaggcaagcccc

SEQ ID NO: 174429 - DNA, 25 bp, Homo sapien
gaattccgtcgtggtttcaactgcc

SEQ ID NO: 174430 - DNA, 25 bp, Homo sapien
tagtcaaaggatggcagcaacccaa

SEQ ID NO: 174431 - DNA, 25 bp, Homo sapien
cttgtatgaggtaccagtagtagtc

SEQ ID NO: 174432 - DNA, 25 bp, Homo sapien
gctgggacttgaacagatccatgtt

SEQ ID NO: 174433 - DNA, 25 bp, Homo sapien
ggtacaattacagcttcattgcagc

SEQ ID NO: 174434 - DNA, 25 bp, Homo sapien
cactaagaccactataaactgagaa

SEQ ID NO: 174435 - DNA, 25 bp, Homo sapien
gggatcaatgtgcatagagtaccta

SEQ ID NO: 174436 - DNA, 25 bp, Homo sapien
cctagatgactcctgttaactatta

SEQ ID NO: 174437 - DNA, 25 bp, Homo sapien
actattattcacatggatacaattt

SEQ ID NO: 174438 - DNA, 25 bp, Homo sapien
gcatgataaccatgttggaactaga

SEQ ID NO: 174439 - DNA, 25 bp, Homo sapien
tggaactagagtgctgccgggcatc

SEQ ID NO: 174440 - DNA, 25 bp, Homo sapien
gccgggcatcctctaaccatgaggt

SEQ ID NO: 174441 - DNA, 25 bp, Homo sapien
ttcccaatgagcatgataaccatgt

SEQ ID NO: 174442 - DNA, 25 bp, Homo sapien
agaatgtgggtcagagacacatttc

SEQ ID NO: 174443 - DNA, 25 bp, Homo sapien
gaaaaatttagaatgtgggtcagag

SEQ ID NO: 174444 - DNA, 25 bp, Homo sapien
gcagaaaaatttagaatgtgggtca

SEQ ID NO: 174445 - DNA, 25 bp, Homo sapien
aatttagaatgtgggtcagagacac

SEQ ID NO: 174446 - DNA, 25 bp, Homo sapien
taatgtcgtacaccagcagtgctcc

SEQ ID NO: 174447 - DNA, 25 bp, Homo sapien
cttgtaatgtcgtacaccagcagtg

SEQ ID NO: 174448 - DNA, 25 bp, Homo sapien
atgtcgtacaccagcagtgctccag

SEQ ID NO: 174449 - DNA, 25 bp, Homo sapien
tcgtacaccagcagtgctccagctg

SEQ ID NO: 174450 - DNA, 25 bp, Homo sapien
ctgtagtaggaacgggtgatagaac

SEQ ID NO: 174451 - DNA, 25 bp, Homo sapien
ggtgatagaacggaaggattcttgc

SEQ ID NO: 174452 - DNA, 25 bp, Homo sapien
tagaacggaaggattcttgcccagc

SEQ ID NO: 174453 - DNA, 25 bp, Homo sapien
acgggtgatagaacggaaggattct

SEQ ID NO: 174454 - DNA, 25 bp, Homo sapien
gaaaacatgcctgcccgagaagaaa

SEQ ID NO: 174455 - DNA, 25 bp, Homo sapien
tcactaaatacctgtggcaccccag

SEQ ID NO: 174456 - DNA, 25 bp, Homo sapien
ggcaccccagtcagcacgataaaga

SEQ ID NO: 174457 - DNA, 25 bp, Homo sapien
tagtgttccactgataatgcaagac

SEQ ID NO: 174458 - DNA, 25 bp, Homo sapien
ccttacatccctacataacaggagg

SEQ ID NO: 174459 - DNA, 25 bp, Homo sapien
catagtataataccagtaacagtgg

SEQ ID NO: 174460 - DNA, 25 bp, Homo sapien
tacaaatgggagaatcatgattaag

SEQ ID NO: 174461 - DNA, 25 bp, Homo sapien
aaatgtgctacgaactttaagagac

SEQ ID NO: 174462 - DNA, 25 bp, Homo sapien
atacttggatattggtcagagacta

SEQ ID NO: 174463 - DNA, 25 bp, Homo sapien
ggatattggtcagagactaaattat

SEQ ID NO: 174464 - DNA, 25 bp, Homo sapien
caccattagttccaccctcatcgcc

SEQ ID NO: 174465 - DNA, 25 bp, Homo sapien
tatccccaccattagttccaccctc

SEQ ID NO: 174466 - DNA, 25 bp, Homo sapien
cccagatttgcagtttgatttgttt

SEQ ID NO: 174467 - DNA, 25 bp, Homo sapien
tcccagatttgcagtttgatttgtt

SEQ ID NO: 174468 - DNA, 25 bp, Homo sapien
atcccagatttgcagtttgatttgt

SEQ ID NO: 174469 - DNA, 25 bp, Homo sapien
aatgttgaccatacgagctccaaac

SEQ ID NO: 174470 - DNA, 25 bp, Homo sapien
tgttgaccatacgagctccaaactc

SEQ ID NO: 174471 - DNA, 25 bp, Homo sapien
atgttgaccatacgagctccaaact

SEQ ID NO: 174472 - DNA, 25 bp, Homo sapien
caatgttgaccatacgagctccaaa

SEQ ID NO: 174473 - DNA, 25 bp, Homo sapien
taactttccactttagcaatttagc

SEQ ID NO: 174474 - DNA, 25 bp, Homo sapien
cacatatcaacgtttcattggtcac

SEQ ID NO: 174475 - DNA, 25 bp, Homo sapien
caatttagctagtcaggttttatca

SEQ ID NO: 174476 - DNA, 25 bp, Homo sapien
tttttacttcgaacactgaaggctg

SEQ ID NO: 174477 - DNA, 25 bp, Homo sapien
ctattgtgaggtcgtggacaggctg

SEQ ID NO: 174478 - DNA, 25 bp, Homo sapien
gacaggctggaaccgcttatctgta

SEQ ID NO: 174479 - DNA, 25 bp, Homo sapien
tgaggtcgtggacaggctggaaccg

SEQ ID NO: 174480 - DNA, 25 bp, Homo sapien
gtcgtggacaggctggaaccgctta

SEQ ID NO: 174481 - DNA, 25 bp, Homo sapien
aggaggagacatgacttccccacac

SEQ ID NO: 174482 - DNA, 25 bp, Homo sapien
gagaaagcacactcccggaatcacg

SEQ ID NO: 174483 - DNA, 25 bp, Homo sapien
aatcacgcagccctggaacaccttc

SEQ ID NO: 174484 - DNA, 25 bp, Homo sapien
ccggaatcacgcagccctggaacac

SEQ ID NO: 174485 - DNA, 25 bp, Homo sapien
agaaagcacactcccggaatcacgc

SEQ ID NO: 174486 - DNA, 25 bp, Homo sapien
tccgatgatgatatacttgaagaga

SEQ ID NO: 174487 - DNA, 25 bp, Homo sapien
gtctccgatgatgatatacttgaag

SEQ ID NO: 174488 - DNA, 25 bp, Homo sapien
gtgtctccgatgatgatatacttga

SEQ ID NO: 174489 - DNA, 25 bp, Homo sapien
ctgtgtctccgatgatgatatactt

SEQ ID NO: 174490 - DNA, 25 bp, Homo sapien
tccgcccgacttctatagccactta

SEQ ID NO: 174491 - DNA, 25 bp, Homo sapien
gacttctatagccacttacctccga

SEQ ID NO: 174492 - DNA, 25 bp, Homo sapien
cgggtccgcccgacttctatagcca

SEQ ID NO: 174493 - DNA, 25 bp, Homo sapien
acttacctccgacctctctagccac

SEQ ID NO: 174494 - DNA, 25 bp, Homo sapien
cactaccagctgagaactgtgtgtt

SEQ ID NO: 174495 - DNA, 25 bp, Homo sapien
cgaccagattttttaccataccaag

SEQ ID NO: 174496 - DNA, 25 bp, Homo sapien
tacttatatctcagacaacgaccag

SEQ ID NO: 174497 - DNA, 25 bp, Homo sapien
tcagagattgggcatttcacaggca

SEQ ID NO: 174498 - DNA, 25 bp, Homo sapien
cccaatgaggtaatactcccatttc

SEQ ID NO: 174499 - DNA, 25 bp, Homo sapien
catttagtttgaaccttcacagcaa

SEQ ID NO: 174500 - DNA, 25 bp, Homo sapien
tataatactgagagatgagttgcac

SEQ ID NO: 174501 - DNA, 25 bp, Homo sapien
ctgtgcctagcctataatgatcatt

SEQ ID NO: 174502 - DNA, 25 bp, Homo sapien
taaagaagaaagctattgtacaaat

SEQ ID NO: 174503 - DNA, 25 bp, Homo sapien
caggtttagcttacagagccatggc

SEQ ID NO: 174504 - DNA, 25 bp, Homo sapien
caaatatcactcttcaggtttagct

SEQ ID NO: 174505 - DNA, 25 bp, Homo sapien
gagccatggctatggattcttagct

SEQ ID NO: 174506 - DNA, 25 bp, Homo sapien
cacatctgggtctagtaggtggatc

SEQ ID NO: 174507 - DNA, 25 bp, Homo sapien
ttgcttgaaccgtgcaaccacatct

SEQ ID NO: 174508 - DNA, 25 bp, Homo sapien
ctgggtacctttgcttgaaccgtgc

SEQ ID NO: 174509 - DNA, 25 bp, Homo sapien
tctagtaggtggatcccatccagtt

SEQ ID NO: 174510 - DNA, 25 bp, Homo sapien
ctgaaacagtgtaaaaggaggggca

SEQ ID NO: 174511 - DNA, 25 bp, Homo sapien
tgaaacagtgtaaaaggaggggcaa

SEQ ID NO: 174512 - DNA, 25 bp, Homo sapien
cagtgtaaaaggaggggcaaaccag

SEQ ID NO: 174513 - DNA, 25 bp, Homo sapien
atagataacttcgtaaccaccaggg

SEQ ID NO: 174514 - DNA, 25 bp, Homo sapien
tcaatacatcacagaatggctgagg

SEQ ID NO: 174515 - DNA, 25 bp, Homo sapien
taactaatgcttagccaggcctgct

SEQ ID NO: 174516 - DNA, 25 bp, Homo sapien
cagggagtattctttggataagcaa

SEQ ID NO: 174517 - DNA, 25 bp, Homo sapien
ggagatagtctttcaatcatgccat

SEQ ID NO: 174518 - DNA, 25 bp, Homo sapien
catctggtttatgactggtggaacg

SEQ ID NO: 174519 - DNA, 25 bp, Homo sapien
caatcttgcgagtgccaggagatag

SEQ ID NO: 174520 - DNA, 25 bp, Homo sapien
tgtggtcgtccaaataactcaatct

SEQ ID NO: 174521 - DNA, 25 bp, Homo sapien
tttaagttacacaagattgcaattc

SEQ ID NO: 174522 - DNA, 25 bp, Homo sapien
cccaacatgaataactgataccaac

SEQ ID NO: 174523 - DNA, 25 bp, Homo sapien
tctgggatgagaatacacccaacat

SEQ ID NO: 174524 - DNA, 25 bp, Homo sapien
gcaattctagccctttctattatgt

SEQ ID NO: 174525 - DNA, 25 bp, Homo sapien
ctcagctacgatcacatcacaatcc

SEQ ID NO: 174526 - DNA, 25 bp, Homo sapien
tcagctacgatcacatcacaatcca

SEQ ID NO: 174527 - DNA, 25 bp, Homo sapien
cagattaccttatgaaaccacacct

SEQ ID NO: 174528 - DNA, 25 bp, Homo sapien
gctcaccacagataacagattacct

SEQ ID NO: 174529 - DNA, 25 bp, Homo sapien
cacctattgaattgggccccactgc

SEQ ID NO: 174530 - DNA, 25 bp, Homo sapien
ttttctcagtaagaaatcaaatgat

SEQ ID NO: 174531 - DNA, 25 bp, Homo sapien
tccgaatgatgcgttgcagttgatt

SEQ ID NO: 174532 - DNA, 25 bp, Homo sapien
tcaaccagtgacctgtacggcctgt

SEQ ID NO: 174533 - DNA, 25 bp, Homo sapien
gacctgtacggcctgtccgaatgat

SEQ ID NO: 174534 - DNA, 25 bp, Homo sapien
tccttcccatggttcaaccagtgac

SEQ ID NO: 174535 - DNA, 25 bp, Homo sapien
aataatttcatctacccgttcatac

SEQ ID NO: 174536 - DNA, 25 bp, Homo sapien
aagcaaggaatcacagaatagtctg

SEQ ID NO: 174537 - DNA, 25 bp, Homo sapien
gaatcacagaatagtctgggagaag

SEQ ID NO: 174538 - DNA, 25 bp, Homo sapien
actgtaacagtattaccctcaaaag

SEQ ID NO: 174539 - DNA, 25 bp, Homo sapien
acatgtatctcactgtaacagtatt

SEQ ID NO: 174540 - DNA, 25 bp, Homo sapien
ccccagagatttagacattctctcc

SEQ ID NO: 174541 - DNA, 25 bp, Homo sapien
cagagatttagacattctctcccca

SEQ ID NO: 174542 - DNA, 25 bp, Homo sapien
ccagagatttagacattctctcccc

SEQ ID NO: 174543 - DNA, 25 bp, Homo sapien
gagatttagacattctctccccaac

SEQ ID NO: 174544 - DNA, 25 bp, Homo sapien
gataaaactatgctcaacaacctta

SEQ ID NO: 174545 - DNA, 25 bp, Homo sapien
agtagacgctcagtgaacatttaca

SEQ ID NO: 174546 - DNA, 25 bp, Homo sapien
tgtaaacaggcattaggactcagta

SEQ ID NO: 174547 - DNA, 25 bp, Homo sapien
gcatggtggatctaagaacgaaaag

SEQ ID NO: 174548 - DNA, 25 bp, Homo sapien
tactgtatctgtccatacctacata

SEQ ID NO: 174549 - DNA, 25 bp, Homo sapien
tacctacataactgaattgcattac

SEQ ID NO: 174550 - DNA, 25 bp, Homo sapien
tattcactcttgtactgtatctgtc

SEQ ID NO: 174551 - DNA, 25 bp, Homo sapien
atctcccattcagtattcactcttg

SEQ ID NO: 174552 - DNA, 25 bp, Homo sapien
ggtgggtcagccatcacaactgcaa

SEQ ID NO: 174553 - DNA, 25 bp, Homo sapien
caagatactgacgtccaggtagcgg

SEQ ID NO: 174554 - DNA, 25 bp, Homo sapien
caggtagcggatatcacaacagatc

SEQ ID NO: 174555 - DNA, 25 bp, Homo sapien
tcagggtcccatagggcagttccat

SEQ ID NO: 174556 - DNA, 25 bp, Homo sapien
tttaactctgagattcatggcccga

SEQ ID NO: 174557 - DNA, 25 bp, Homo sapien
tctgagattcatggcccgagtccct

SEQ ID NO: 174558 - DNA, 25 bp, Homo sapien
gattcatggcccgagtccctctttt

SEQ ID NO: 174559 - DNA, 25 bp, Homo sapien
aactctgagattcatggcccgagtc

SEQ ID NO: 174560 - DNA, 25 bp, Homo sapien
cctccattcccaataagcaagacaa

SEQ ID NO: 174561 - DNA, 25 bp, Homo sapien
ggctgccctatcaaacataagtccg

SEQ ID NO: 174562 - DNA, 25 bp, Homo sapien
acaagattgctgaattatgctctgc

SEQ ID NO: 174563 - DNA, 25 bp, Homo sapien
tttcttaacgtgtatggctgcccta

SEQ ID NO: 174564 - DNA, 25 bp, Homo sapien
catacttgcaggtatccatgtggaa

SEQ ID NO: 174565 - DNA, 25 bp, Homo sapien
gaagagtcggtctgcactggaatca

SEQ ID NO: 174566 - DNA, 25 bp, Homo sapien
tcctggcttggcgtgtggtctttgc

SEQ ID NO: 174567 - DNA, 25 bp, Homo sapien
ggaatcacctccgacactctgtgta

SEQ ID NO: 174568 - DNA, 25 bp, Homo sapien
tggctcagagacagacatactttgc

SEQ ID NO: 174569 - DNA, 25 bp, Homo sapien
gacagaaccccaatgactggaagga

SEQ ID NO: 174570 - DNA, 25 bp, Homo sapien
tcagggtctggaggacttacacaaa

SEQ ID NO: 174571 - DNA, 25 bp, Homo sapien
gaggcaggtagcatggaaatccata

SEQ ID NO: 174572 - DNA, 25 bp, Homo sapien
cctccttggttccatagtcacagaa

SEQ ID NO: 174573 - DNA, 25 bp, Homo sapien
ctgaagtgcagcttgcgacagggtc

SEQ ID NO: 174574 - DNA, 25 bp, Homo sapien
cagggtcgatcagcatcactggctt

SEQ ID NO: 174575 - DNA, 25 bp, Homo sapien
tggctttcatgcactcctccttggt

SEQ ID NO: 174576 - DNA, 25 bp, Homo sapien
atttaatagctctaggatctcctga

SEQ ID NO: 174577 - DNA, 25 bp, Homo sapien
ttttcaacaatggattgttccttgg

SEQ ID NO: 174578 - DNA, 25 bp, Homo sapien
ctcgagagcgaaatttttcaacaat

SEQ ID NO: 174579 - DNA, 25 bp, Homo sapien
gtatttaatagctctaggatctcct

SEQ ID NO: 174580 - DNA, 25 bp, Homo sapien
gaaaattggagccttcagataagag

SEQ ID NO: 174581 - DNA, 25 bp, Homo sapien
agccttcaattgtagctgggaatat

SEQ ID NO: 174582 - DNA, 25 bp, Homo sapien
taagcattatgttaacatcccctcc

SEQ ID NO: 174583 - DNA, 25 bp, Homo sapien
aagaggcctggttcctaccgctaag

SEQ ID NO: 174584 - DNA, 25 bp, Homo sapien
cagataagaactcatgtcaggccaa

SEQ ID NO: 174585 - DNA, 25 bp, Homo sapien
gagttgggcagtagggaatcatccc

SEQ ID NO: 174586 - DNA, 25 bp, Homo sapien
cggacattaccagatcccctgggag

SEQ ID NO: 174587 - DNA, 25 bp, Homo sapien
gggtttgtcccactatgcactgtag

SEQ ID NO: 174588 - DNA, 25 bp, Homo sapien
tggactgttggttcagaaggctctc

SEQ ID NO: 174589 - DNA, 25 bp, Homo sapien
cttgctctgttgttccttagtggac

SEQ ID NO: 174590 - DNA, 25 bp, Homo sapien
ggctctctatctccagatcaacatc

SEQ ID NO: 174591 - DNA, 25 bp, Homo sapien
atctgaggcagcatgtttccttgat

SEQ ID NO: 174592 - DNA, 25 bp, Homo sapien
tgaagagttcagaccagagactaac

SEQ ID NO: 174593 - DNA, 25 bp, Homo sapien
tgcatcatcttgtaggagacctcgc

SEQ ID NO: 174594 - DNA, 25 bp, Homo sapien
gtagtcgagtcctgttctgcacgcc

SEQ ID NO: 174595 - DNA, 25 bp, Homo sapien
agagactaacgaactggcaaaggca

SEQ ID NO: 174596 - DNA, 25 bp, Homo sapien
caactcctgagctgcaaacttctgc

SEQ ID NO: 174597 - DNA, 25 bp, Homo sapien
aactcctgagctgcaaacttctgca

SEQ ID NO: 174598 - DNA, 25 bp, Homo sapien
tcaactcctgagctgcaaacttctg

SEQ ID NO: 174599 - DNA, 25 bp, Homo sapien
atcaactcctgagctgcaaacttct

SEQ ID NO: 174600 - DNA, 25 bp, Homo sapien
gggaggtatgggcaataagacactg

SEQ ID NO: 174601 - DNA, 25 bp, Homo sapien
gaccgtgaactgaaaataagtggta

SEQ ID NO: 174602 - DNA, 25 bp, Homo sapien
gaacgaggggaggtatgggcaataa

SEQ ID NO: 174603 - DNA, 25 bp, Homo sapien
gcaataagacactgaccgtgaactg

SEQ ID NO: 174604 - DNA, 25 bp, Homo sapien
taggcactgggctgtcactacggaa

SEQ ID NO: 174605 - DNA, 25 bp, Homo sapien
tggagatggcaagacagatggacac

SEQ ID NO: 174606 - DNA, 25 bp, Homo sapien
caatgttaaggccagatcagagagg

SEQ ID NO: 174607 - DNA, 25 bp, Homo sapien
cactacggaaggttggagacaatgc

SEQ ID NO: 174608 - DNA, 25 bp, Homo sapien
tactcaacaacctaggctgggatcc

SEQ ID NO: 174609 - DNA, 25 bp, Homo sapien
tattacttcacaagctgggttgcca

SEQ ID NO: 174610 - DNA, 25 bp, Homo sapien
tatttccattctggtaaggcactgg

SEQ ID NO: 174611 - DNA, 25 bp, Homo sapien
tcctaagaactgaactgaaattgct

SEQ ID NO: 174612 - DNA, 25 bp, Homo sapien
aggtccccttttgcaactgccattg

SEQ ID NO: 174613 - DNA, 25 bp, Homo sapien
tcacaaaggcgacgtcctcgcagtc

SEQ ID NO: 174614 - DNA, 25 bp, Homo sapien
cagcgtgaggaggaaccgcgaacta

SEQ ID NO: 174615 - DNA, 25 bp, Homo sapien
ctacttgcagaagggcgaacgtctg

SEQ ID NO: 174616 - DNA, 25 bp, Homo sapien
cgtccgtccggtaaaagtgagctgg

SEQ ID NO: 174617 - DNA, 25 bp, Homo sapien
cctggatagagctccacgtgtccga

SEQ ID NO: 174618 - DNA, 25 bp, Homo sapien
ggatagagctccacgtgtccgacat

SEQ ID NO: 174619 - DNA, 25 bp, Homo sapien
ggcctggatagagctccacgtgtcc

SEQ ID NO: 174620 - DNA, 25 bp, Homo sapien
ccaagtgccccgagtcctgcttccg

SEQ ID NO: 174621 - DNA, 25 bp, Homo sapien
gccctgacacctctcgaataaggcg

SEQ ID NO: 174622 - DNA, 25 bp, Homo sapien
cgaataaggcgcggcggactagcac

SEQ ID NO: 174623 - DNA, 25 bp, Homo sapien
tctcgaataaggcgcggcggactag

SEQ ID NO: 174624 - DNA, 25 bp, Homo sapien
cagccctgacacctctcgaataagg

SEQ ID NO: 174625 - DNA, 25 bp, Homo sapien
ctcgctccaggatatagccaattct

SEQ ID NO: 174626 - DNA, 25 bp, Homo sapien
gaaaagtcatttccggtgtcgcgct

SEQ ID NO: 174627 - DNA, 25 bp, Homo sapien
catttccggtgtcgcgctttcttgg

SEQ ID NO: 174628 - DNA, 25 bp, Homo sapien
aattctcacgcggacaccccgaagg

SEQ ID NO: 174629 - DNA, 25 bp, Homo sapien
ccatcgttcaagtcagtcaatagca

SEQ ID NO: 174630 - DNA, 25 bp, Homo sapien
tagtcacataggtaccagcaagccc

SEQ ID NO: 174631 - DNA, 25 bp, Homo sapien
cctgggagacctcttggcaagaaat

SEQ ID NO: 174632 - DNA, 25 bp, Homo sapien
tggagcatcttcagtaccggcacct

SEQ ID NO: 174633 - DNA, 25 bp, Homo sapien
ctacttcttgtctatgatgggcttc

SEQ ID NO: 174634 - DNA, 25 bp, Homo sapien
gcttccctggatcccattgttggag

SEQ ID NO: 174635 - DNA, 25 bp, Homo sapien
ggcttccctggatcccattgttgga

SEQ ID NO: 174636 - DNA, 25 bp, Homo sapien
cagttcctaggccaaacagcactgg

SEQ ID NO: 174637 - DNA, 25 bp, Homo sapien
aattccagggcttcatgggcaggcc

SEQ ID NO: 174638 - DNA, 25 bp, Homo sapien
gcttcatgggcaggccatttgacag

SEQ ID NO: 174639 - DNA, 25 bp, Homo sapien
cagccacagttcctaggccaaacag

SEQ ID NO: 174640 - DNA, 25 bp, Homo sapien
tagaaagataggggacccataccca

SEQ ID NO: 174641 - DNA, 25 bp, Homo sapien
tgagcagaaaggtcaccccagagga

SEQ ID NO: 174642 - DNA, 25 bp, Homo sapien
gctgccagccctttttggctaggct

SEQ ID NO: 174643 - DNA, 25 bp, Homo sapien
cctttttggctaggctgcaatgcca

SEQ ID NO: 174644 - DNA, 25 bp, Homo sapien
gctgcaatgccaaatgtaggtgctc

SEQ ID NO: 174645 - DNA, 25 bp, Homo sapien
tcagggctcataactctgggaggtc

SEQ ID NO: 174646 - DNA, 25 bp, Homo sapien
cacagtaatttccaagctcagggac

SEQ ID NO: 174647 - DNA, 25 bp, Homo sapien
gaaaagccactagggacataacatg

SEQ ID NO: 174648 - DNA, 25 bp, Homo sapien
gggccatccccttgtaagcacagta

SEQ ID NO: 174649 - DNA, 25 bp, Homo sapien
tcatgggatcgtggggtcatctttt

SEQ ID NO: 174650 - DNA, 25 bp, Homo sapien
aaagagcagcaatattctgagggcc

SEQ ID NO: 174651 - DNA, 25 bp, Homo sapien
atggaaggcgaacagccagggacta

SEQ ID NO: 174652 - DNA, 25 bp, Homo sapien
gagagccctgtggaggtgatggaag

SEQ ID NO: 174653 - DNA, 25 bp, Homo sapien
gggtagcccgctcaagaaagccctg

SEQ ID NO: 174654 - DNA, 25 bp, Homo sapien
tgccaggagcatatgcttcttgagg

SEQ ID NO: 174655 - DNA, 25 bp, Homo sapien
acacaagtgaagagcggcccctcct

SEQ ID NO: 174656 - DNA, 25 bp, Homo sapien
ccctgcctgcagaaaacacaagtga

SEQ ID NO: 174657 - DNA, 25 bp, Homo sapien
acacacttcgcaggcctttctgctg

SEQ ID NO: 174658 - DNA, 25 bp, Homo sapien
tgctgatgccggacttgagcttctc

SEQ ID NO: 174659 - DNA, 25 bp, Homo sapien
tctaccaaggtcacgctggtggctt

SEQ ID NO: 174660 - DNA, 25 bp, Homo sapien
caaagaagactgttgagtagttttc

SEQ ID NO: 174661 - DNA, 25 bp, Homo sapien
ctcagacaactcctcttccggtgat

SEQ ID NO: 174662 - DNA, 25 bp, Homo sapien
gactgtagattgctcggagccattc

SEQ ID NO: 174663 - DNA, 25 bp, Homo sapien
ctgccagggaatcttcatcagtcac

SEQ ID NO: 174664 - DNA, 25 bp, Homo sapien
acaactcctcttccggtgatggctg

SEQ ID NO: 174665 - DNA, 25 bp, Homo sapien
caggtgcatccggacatgctgctgc

SEQ ID NO: 174666 - DNA, 25 bp, Homo sapien
gcacgcagattacccctggtggaga

SEQ ID NO: 174667 - DNA, 25 bp, Homo sapien
ccttgtggcccacgaaatgtgcacg

SEQ ID NO: 174668 - DNA, 25 bp, Homo sapien
gaaatgtgcacgcagattacccctg

SEQ ID NO: 174669 - DNA, 25 bp, Homo sapien
tggccataatgaaggcgtagggccc

SEQ ID NO: 174670 - DNA, 25 bp, Homo sapien
aatgaaggcgtagggcccgaggaca

SEQ ID NO: 174671 - DNA, 25 bp, Homo sapien
cataatgaaggcgtagggcccgagg

SEQ ID NO: 174672 - DNA, 25 bp, Homo sapien
catgttggccataatgaaggcgtag

SEQ ID NO: 174673 - DNA, 25 bp, Homo sapien
gcttggtagtgaagtcaccaactta

SEQ ID NO: 174674 - DNA, 25 bp, Homo sapien
aagtggttggtaagcagtgcccagc

SEQ ID NO: 174675 - DNA, 25 bp, Homo sapien
ttgatgtctcagagggtgaggcccc

SEQ ID NO: 174676 - DNA, 25 bp, Homo sapien
cttgccggtcaatcttttctaccag

SEQ ID NO: 174677 - DNA, 25 bp, Homo sapien
cactttgaggttgccacgggtggta

SEQ ID NO: 174678 - DNA, 25 bp, Homo sapien
caaatactttggcacagaagcggca

SEQ ID NO: 174679 - DNA, 25 bp, Homo sapien
tcacgatgccggtggaaatgcactt

SEQ ID NO: 174680 - DNA, 25 bp, Homo sapien
cactgagtgctgttgtggaggccac

SEQ ID NO: 174681 - DNA, 25 bp, Homo sapien
tgaggcgaggcaatcagctgatctg

SEQ ID NO: 174682 - DNA, 25 bp, Homo sapien
cagtggcctcaaggcctcgggctgc

SEQ ID NO: 174683 - DNA, 25 bp, Homo sapien
tagtcccgtggtgcttgggaatgcc

SEQ ID NO: 174684 - DNA, 25 bp, Homo sapien
tcgggctgccccaagacactgtgct

SEQ ID NO: 174685 - DNA, 25 bp, Homo sapien
cttgggcgtttctgcccctgaagag

SEQ ID NO: 174686 - DNA, 25 bp, Homo sapien
aggcagtccctgtcccaggtagctc

SEQ ID NO: 174687 - DNA, 25 bp, Homo sapien
gaagaaggcctgcttgggcgtttct

SEQ ID NO: 174688 - DNA, 25 bp, Homo sapien
agtccctgtcccaggtagctctgag

SEQ ID NO: 174689 - DNA, 25 bp, Homo sapien
gtctggcctaaggagccaagcaaca

SEQ ID NO: 174690 - DNA, 25 bp, Homo sapien
cgtctggcctaaggagccaagcaac

SEQ ID NO: 174691 - DNA, 25 bp, Homo sapien
agtcatctgcatctgatggatctgc

SEQ ID NO: 174692 - DNA, 25 bp, Homo sapien
tcagggggatattcaagtggccact

SEQ ID NO: 174693 - DNA, 25 bp, Homo sapien
tgcctgcagatttgctcagtcatct

SEQ ID NO: 174694 - DNA, 25 bp, Homo sapien
gcagcacccgtagctcttccaagat

SEQ ID NO: 174695 - DNA, 25 bp, Homo sapien
attctggaggtaatggggttgctcc

SEQ ID NO: 174696 - DNA, 25 bp, Homo sapien
tctggaggtaatggggttgctccca

SEQ ID NO: 174697 - DNA, 25 bp, Homo sapien
tgcaggggtcgattctggaggtaat

SEQ ID NO: 174698 - DNA, 25 bp, Homo sapien
aggtaatggggttgctcccagcttg

SEQ ID NO: 174699 - DNA, 25 bp, Homo sapien
cagttgggtcagtgaattgtgcgca

SEQ ID NO: 174700 - DNA, 25 bp, Homo sapien
ggattattgtgaccctcaggccggg

SEQ ID NO: 174701 - DNA, 25 bp, Homo sapien
caattatcaccattacaggagggtc

SEQ ID NO: 174702 - DNA, 25 bp, Homo sapien
tgcgcagcacttggcacagacttgg

SEQ ID NO: 174703 - DNA, 25 bp, Homo sapien
cggctccccgcagggcaccccgaga

SEQ ID NO: 174704 - DNA, 25 bp, Homo sapien
agggcaccccgagacgagagctcct

SEQ ID NO: 174705 - DNA, 25 bp, Homo sapien
ccgagacgagagctcctctcggatt

SEQ ID NO: 174706 - DNA, 25 bp, Homo sapien
cgcagggcaccccgagacgagagct

SEQ ID NO: 174707 - DNA, 25 bp, Homo sapien
gcggcccagactgcggagatggaga

SEQ ID NO: 174708 - DNA, 25 bp, Homo sapien
acccagcggcccagactgcggagat

SEQ ID NO: 174709 - DNA, 25 bp, Homo sapien
tgggagacaatggatattgggattg

SEQ ID NO: 174710 - DNA, 25 bp, Homo sapien
gatattgggattgagggaggcgatg

SEQ ID NO: 174711 - DNA, 25 bp, Homo sapien
tcgcagtccgagattaactgttggg

SEQ ID NO: 174712 - DNA, 25 bp, Homo sapien
gtttccgctgctttcgccgagacat

SEQ ID NO: 174713 - DNA, 25 bp, Homo sapien
ttctcagacgcgctgggaccttcgc

SEQ ID NO: 174714 - DNA, 25 bp, Homo sapien
gggtttccgctgctttcgccgagac

SEQ ID NO: 174715 - DNA, 25 bp, Homo sapien
caacgctcacttggtcttaaccggg

SEQ ID NO: 174716 - DNA, 25 bp, Homo sapien
tatgcccctctgataatgtagctgc

SEQ ID NO: 174717 - DNA, 25 bp, Homo sapien
ccagcgcaaatcactgtgaagcaga

SEQ ID NO: 174718 - DNA, 25 bp, Homo sapien
ggtccgaagccaattgatgcctctc

SEQ ID NO: 174719 - DNA, 25 bp, Homo sapien
gagttcttgggcttctgagcattct

SEQ ID NO: 174720 - DNA, 25 bp, Homo sapien
tcaaacctcactcggagttcttggg

SEQ ID NO: 174721 - DNA, 25 bp, Homo sapien
tgagcattcttttcagggccagctt

SEQ ID NO: 174722 - DNA, 25 bp, Homo sapien
tctgagcattcttttcagggccagc

SEQ ID NO: 174723 - DNA, 25 bp, Homo sapien
tacacggtgaccacggttacatggg

SEQ ID NO: 174724 - DNA, 25 bp, Homo sapien
tcagcttagcagtcatgagcacagg

SEQ ID NO: 174725 - DNA, 25 bp, Homo sapien
caccaaatgggatgggtttgacacc

SEQ ID NO: 174726 - DNA, 25 bp, Homo sapien
tgaagttcatcatgaggcgagggac

SEQ ID NO: 174727 - DNA, 25 bp, Homo sapien
aagagtgtccttagcctgagtggat

SEQ ID NO: 174728 - DNA, 25 bp, Homo sapien
gagtggatacggaattcctgtcagg

SEQ ID NO: 174729 - DNA, 25 bp, Homo sapien
gattaaaataagcaggtttcccagc

SEQ ID NO: 174730 - DNA, 25 bp, Homo sapien
gataaacgcagtcaacagtgtgctg

SEQ ID NO: 174731 - DNA, 25 bp, Homo sapien
agagcagggaactggcaactctggt

SEQ ID NO: 174732 - DNA, 25 bp, Homo sapien
tcatcgtagacagatggtcctgctg

SEQ ID NO: 174733 - DNA, 25 bp, Homo sapien
gaagaagtaagtcatcgtagacaga

SEQ ID NO: 174734 - DNA, 25 bp, Homo sapien
actctggtgaagaagtaagtcatcg

SEQ ID NO: 174735 - DNA, 25 bp, Homo sapien
ctgacttgaagagggctgccatgta

SEQ ID NO: 174736 - DNA, 25 bp, Homo sapien
tgggactgacttgaagagggctgcc

SEQ ID NO: 174737 - DNA, 25 bp, Homo sapien
aagttggaaagtaggattgctctgg

SEQ ID NO: 174738 - DNA, 25 bp, Homo sapien
tggaaagtaggattgctctgggact

SEQ ID NO: 174739 - DNA, 25 bp, Homo sapien
tattgagtcatgtacgcagacatca

SEQ ID NO: 174740 - DNA, 25 bp, Homo sapien
gatggttggcaatcaatcgaactca

SEQ ID NO: 174741 - DNA, 25 bp, Homo sapien
caggtgaagccacgcaaatattggt

SEQ ID NO: 174742 - DNA, 25 bp, Homo sapien
tcgaactcattataccacgtgtggg

SEQ ID NO: 174743 - DNA, 25 bp, Homo sapien
catagaagtctgcattggtcctcca

SEQ ID NO: 174744 - DNA, 25 bp, Homo sapien
ttatagaactatccggctgggtgcg

SEQ ID NO: 174745 - DNA, 25 bp, Homo sapien
taattcctcacttaaggtcagcctg

SEQ ID NO: 174746 - DNA, 25 bp, Homo sapien
ggaatcccatgagtgtgccaagtct

SEQ ID NO: 174747 - DNA, 25 bp, Homo sapien
tgaacacagttgaacctccatagac

SEQ ID NO: 174748 - DNA, 25 bp, Homo sapien
cacagttgaacctccatagacaaca

SEQ ID NO: 174749 - DNA, 25 bp, Homo sapien
aacacagttgaacctccatagacaa

SEQ ID NO: 174750 - DNA, 25 bp, Homo sapien
ctgaacacagttgaacctccataga

SEQ ID NO: 174751 - DNA, 25 bp, Homo sapien
caggtcccaagaatctctcatgtcc

SEQ ID NO: 174752 - DNA, 25 bp, Homo sapien
gatggcattgattcttatacactgt

SEQ ID NO: 174753 - DNA, 25 bp, Homo sapien
gtttaaatccactgcgacccatctg

SEQ ID NO: 174754 - DNA, 25 bp, Homo sapien
tgtccaatatcggtggaaaattatt

SEQ ID NO: 174755 - DNA, 25 bp, Homo sapien
tgagctaacataactatagtgatcc

SEQ ID NO: 174756 - DNA, 25 bp, Homo sapien
tagtgatcctctactgccttagcag

SEQ ID NO: 174757 - DNA, 25 bp, Homo sapien
cataactatagtgatcctctactgc

SEQ ID NO: 174758 - DNA, 25 bp, Homo sapien
actaaatctgagctaacataactat

SEQ ID NO: 174759 - DNA, 25 bp, Homo sapien
gtctataacctaccagtcaacatgt

SEQ ID NO: 174760 - DNA, 25 bp, Homo sapien
tgttatagctcatcctgcaattgga

SEQ ID NO: 174761 - DNA, 25 bp, Homo sapien
tgtagctacagcaagaacaacctgc

SEQ ID NO: 174762 - DNA, 25 bp, Homo sapien
cacatacccttcaggcgcggaaatg

SEQ ID NO: 174763 - DNA, 25 bp, Homo sapien
taactagaccatgatggatgggctc

SEQ ID NO: 174764 - DNA, 25 bp, Homo sapien
gaaggacccaaacactatttcagga

SEQ ID NO: 174765 - DNA, 25 bp, Homo sapien
tttctggagtattcagcggaggtcc

SEQ ID NO: 174766 - DNA, 25 bp, Homo sapien
taaagacgtctaggtcatcagcatg

SEQ ID NO: 174767 - DNA, 25 bp, Homo sapien
ctgctatgtaggctgtcagctgtca

SEQ ID NO: 174768 - DNA, 25 bp, Homo sapien
acagtctgctatgtaggctgtcagc

SEQ ID NO: 174769 - DNA, 25 bp, Homo sapien
cacagtctgctatgtaggctgtcag

SEQ ID NO: 174770 - DNA, 25 bp, Homo sapien
gtctgctatgtaggctgtcagctgt

SEQ ID NO: 174771 - DNA, 25 bp, Homo sapien
ggggccagaaattggcagtgggaga

SEQ ID NO: 174772 - DNA, 25 bp, Homo sapien
gggccagaaattggcagtgggagat

SEQ ID NO: 174773 - DNA, 25 bp, Homo sapien
aatagcaagaaagcatcaggctcag

SEQ ID NO: 174774 - DNA, 25 bp, Homo sapien
gcactatccacaacccaggcaggca

SEQ ID NO: 174775 - DNA, 25 bp, Homo sapien
tcaggctcagtcagcactattcacc

SEQ ID NO: 174776 - DNA, 25 bp, Homo sapien
tcaccacccagcactatccacaacc

SEQ ID NO: 174777 - DNA, 25 bp, Homo sapien
tattgttccatacttgagtcttctg

SEQ ID NO: 174778 - DNA, 25 bp, Homo sapien
tttctggaaggagcgattgaccctg

SEQ ID NO: 174779 - DNA, 25 bp, Homo sapien
gattgaccctgctcttatattgttc

SEQ ID NO: 174780 - DNA, 25 bp, Homo sapien
tcttatattgttccatacttgagtc

SEQ ID NO: 174781 - DNA, 25 bp, Homo sapien
ccctgcttaggttctgagatcagac

SEQ ID NO: 174782 - DNA, 25 bp, Homo sapien
gtgttcagggtggtatggccgtaga

SEQ ID NO: 174783 - DNA, 25 bp, Homo sapien
cagacgagatcgggcgtgttcaggg

SEQ ID NO: 174784 - DNA, 25 bp, Homo sapien
cgaccctgcttaggttctgagatca

SEQ ID NO: 174785 - DNA, 25 bp, Homo sapien
cttcagggcagacttcacttcctgg

SEQ ID NO: 174786 - DNA, 25 bp, Homo sapien
tcctcttcagggcagacttcacttc

SEQ ID NO: 174787 - DNA, 25 bp, Homo sapien
cagtgtaaaacacagccgctgcccc

SEQ ID NO: 174788 - DNA, 25 bp, Homo sapien
ctgttatcctcttcagggcagactt

SEQ ID NO: 174789 - DNA, 25 bp, Homo sapien
ctgtgaccacgattaggtgggagcc

SEQ ID NO: 174790 - DNA, 25 bp, Homo sapien
aaaatacaggggacatagtagactg

SEQ ID NO: 174791 - DNA, 25 bp, Homo sapien
tagtagactgtgaccacgattaggt

SEQ ID NO: 174792 - DNA, 25 bp, Homo sapien
gggacatagtagactgtgaccacga

SEQ ID NO: 174793 - DNA, 25 bp, Homo sapien
aaggtcacaagctcattgacagttg

SEQ ID NO: 174794 - DNA, 25 bp, Homo sapien
ggtggcctggatagacccatgcatg

SEQ ID NO: 174795 - DNA, 25 bp, Homo sapien
aacatgaagcaactggcggccacta

SEQ ID NO: 174796 - DNA, 25 bp, Homo sapien
tgtgcataacctcccattcatgagc

SEQ ID NO: 174797 - DNA, 25 bp, Homo sapien
caaggtgtagaggaagcactgggtg

SEQ ID NO: 174798 - DNA, 25 bp, Homo sapien
gccacacagccaccaaacgggatag

SEQ ID NO: 174799 - DNA, 25 bp, Homo sapien
gcccaggaagtgaaagaaatacagt

SEQ ID NO: 174800 - DNA, 25 bp, Homo sapien
agccacacagccaccaaacgggata

SEQ ID NO: 174801 - DNA, 25 bp, Homo sapien
aagaaatacagttgagccacacagc

SEQ ID NO: 174802 - DNA, 25 bp, Homo sapien
ttaaaataattcaaggaacgatgac

SEQ ID NO: 174803 - DNA, 25 bp, Homo sapien
caggagtgaagtttaaaataattca

SEQ ID NO: 174804 - DNA, 25 bp, Homo sapien
cttgttggcaggagtgaagtttaaa

SEQ ID NO: 174805 - DNA, 25 bp, Homo sapien
tttaaaataattcaaggaacgatga

SEQ ID NO: 174806 - DNA, 25 bp, Homo sapien
agaagaatgtacatggggcgagcac

SEQ ID NO: 174807 - DNA, 25 bp, Homo sapien
gtccaggaatgagagcactcccaga

SEQ ID NO: 174808 - DNA, 25 bp, Homo sapien
gataatttcttttgggatgggtgga

SEQ ID NO: 174809 - DNA, 25 bp, Homo sapien
gtataagggcaaggctccttttcca

SEQ ID NO: 174810 - DNA, 25 bp, Homo sapien
agatggtgattttgatgtggtgtaa

SEQ ID NO: 174811 - DNA, 25 bp, Homo sapien
tgctcacagtaggtgagtataaggg

SEQ ID NO: 174812 - DNA, 25 bp, Homo sapien
catcctggttggcaggacagggact

SEQ ID NO: 174813 - DNA, 25 bp, Homo sapien
gatgcacacttggcgattggatcaa

SEQ ID NO: 174814 - DNA, 25 bp, Homo sapien
tgcatttaatcacctaaggctgaag

SEQ ID NO: 174815 - DNA, 25 bp, Homo sapien
cgatgcacacttggcgattggatca

SEQ ID NO: 174816 - DNA, 25 bp, Homo sapien
gggcttcgtcggtcttccatggctc

SEQ ID NO: 174817 - DNA, 25 bp, Homo sapien
ggcttcgtcggtcttccatggctcc

SEQ ID NO: 174818 - DNA, 25 bp, Homo sapien
gcttcgtcggtcttccatggctcca

SEQ ID NO: 174819 - DNA, 25 bp, Homo sapien
aatatctaaacatattcttcccaac

SEQ ID NO: 174820 - DNA, 25 bp, Homo sapien
gaccactcatctttcaaaatatcta

SEQ ID NO: 174821 - DNA, 25 bp, Homo sapien
gtgctggggaccactcatctttcaa

SEQ ID NO: 174822 - DNA, 25 bp, Homo sapien
tgcagtgctggggaccactcatctt

SEQ ID NO: 174823 - DNA, 25 bp, Homo sapien
gatgataaattttggtcatgaaacg

SEQ ID NO: 174824 - DNA, 25 bp, Homo sapien
aggatgataaattttggtcatgaaa

SEQ ID NO: 174825 - DNA, 25 bp, Homo sapien
attaggatgataaattttggtcatg

SEQ ID NO: 174826 - DNA, 25 bp, Homo sapien
gataaattttggtcatgaaacgtac

SEQ ID NO: 174827 - DNA, 25 bp, Homo sapien
tctcacgtgattctgcttggatgcc

SEQ ID NO: 174828 - DNA, 25 bp, Homo sapien
ccagcaaatgctggttgtccttgat

SEQ ID NO: 174829 - DNA, 25 bp, Homo sapien
cttgatgattctacggggcagccca

SEQ ID NO: 174830 - DNA, 25 bp, Homo sapien
cgtgattctgcttggatgccaggaa

SEQ ID NO: 174831 - DNA, 25 bp, Homo sapien
ttgtcagaacccgagttcgacctct

SEQ ID NO: 174832 - DNA, 25 bp, Homo sapien
ctggtcccgtctccggctccactcc

SEQ ID NO: 174833 - DNA, 25 bp, Homo sapien
cagaacccgagttcgacctctggtc

SEQ ID NO: 174834 - DNA, 25 bp, Homo sapien
acctctggtcccgtctccggctcca

SEQ ID NO: 174835 - DNA, 25 bp, Homo sapien
tgtggacttagagggtgaagagaag

SEQ ID NO: 174836 - DNA, 25 bp, Homo sapien
tttatccaacatattggagagtgtg

SEQ ID NO: 174837 - DNA, 25 bp, Homo sapien
gctgtggacttagagggtgaagaga

SEQ ID NO: 174838 - DNA, 25 bp, Homo sapien
gggctgtggacttagagggtgaaga

SEQ ID NO: 174839 - DNA, 25 bp, Homo sapien
catgcgatgaggtgggggtcaagtg

SEQ ID NO: 174840 - DNA, 25 bp, Homo sapien
aagagtgaggtcatgcgatgaggtg

SEQ ID NO: 174841 - DNA, 25 bp, Homo sapien
gtcaagtgtggaaggagttggtcag

SEQ ID NO: 174842 - DNA, 25 bp, Homo sapien
gggtcaagtgtggaaggagttggtc

SEQ ID NO: 174843 - DNA, 25 bp, Homo sapien
tctttaacccagcaacttctttcat

SEQ ID NO: 174844 - DNA, 25 bp, Homo sapien
ctagtagagtttctctttaacccag

SEQ ID NO: 174845 - DNA, 25 bp, Homo sapien
tagagtttctctttaacccagcaac

SEQ ID NO: 174846 - DNA, 25 bp, Homo sapien
tctctttaacccagcaacttctttc

SEQ ID NO: 174847 - DNA, 25 bp, Homo sapien
tggggatgagtccagcttcaatgtc

SEQ ID NO: 174848 - DNA, 25 bp, Homo sapien
tgaccttgttttcttgagtagttgg

SEQ ID NO: 174849 - DNA, 25 bp, Homo sapien
taaagctctgatttttgagcatctc

SEQ ID NO: 174850 - DNA, 25 bp, Homo sapien
cttcaatgtctcttgccttgagatc

SEQ ID NO: 174851 - DNA, 25 bp, Homo sapien
tcgggcaagatagaacatcccattg

SEQ ID NO: 174852 - DNA, 25 bp, Homo sapien
ttattttctagtcctgtggtatctg

SEQ ID NO: 174853 - DNA, 25 bp, Homo sapien
ctttggagctttttatatccctcag

SEQ ID NO: 174854 - DNA, 25 bp, Homo sapien
catcccattgtccagttattttcta

SEQ ID NO: 174855 - DNA, 25 bp, Homo sapien
caaaataagccgaggaacggtgact

SEQ ID NO: 174856 - DNA, 25 bp, Homo sapien
tggcatggactatgttggcatagga

SEQ ID NO: 174857 - DNA, 25 bp, Homo sapien
aataagccgaggaacggtgactgag

SEQ ID NO: 174858 - DNA, 25 bp, Homo sapien
catggactatgttggcataggagag

SEQ ID NO: 174859 - DNA, 25 bp, Homo sapien
tgcgaagatttgtttccaccagtcc

SEQ ID NO: 174860 - DNA, 25 bp, Homo sapien
gagttatccatgtaagaccaccaat

SEQ ID NO: 174861 - DNA, 25 bp, Homo sapien
taagaattccattaaccctgggtga

SEQ ID NO: 174862 - DNA, 25 bp, Homo sapien
caaaatctatggagaccagaggcca

SEQ ID NO: 174863 - DNA, 25 bp, Homo sapien
caacgtgattggagctgaaaggaag

SEQ ID NO: 174864 - DNA, 25 bp, Homo sapien
tcattgagggctttacaggccaaag

SEQ ID NO: 174865 - DNA, 25 bp, Homo sapien
tgaggaataccaaggaggacaacgt

SEQ ID NO: 174866 - DNA, 25 bp, Homo sapien
taaagatggcatctcgctgtgctgc

SEQ ID NO: 174867 - DNA, 25 bp, Homo sapien
aatttggagcaccacgtatcctaag

SEQ ID NO: 174868 - DNA, 25 bp, Homo sapien
ccacgtatcctaaggacgtagacat

SEQ ID NO: 174869 - DNA, 25 bp, Homo sapien
gagcaccacgtatcctaaggacgta

SEQ ID NO: 174870 - DNA, 25 bp, Homo sapien
gtatcctaaggacgtagacattttc

SEQ ID NO: 174871 - DNA, 25 bp, Homo sapien
tgaagatgcagtgtcccaggaacag

SEQ ID NO: 174872 - DNA, 25 bp, Homo sapien
aggatgactgcgtaggacaccacca

SEQ ID NO: 174873 - DNA, 25 bp, Homo sapien
acagatactgccttgtcctctggga

SEQ ID NO: 174874 - DNA, 25 bp, Homo sapien
gatgggcgggaatagatgaagatgc

SEQ ID NO: 174875 - DNA, 25 bp, Homo sapien
tcaatccactgttggagacaatgag

SEQ ID NO: 174876 - DNA, 25 bp, Homo sapien
caatccactgttggagacaatgagg

SEQ ID NO: 174877 - DNA, 25 bp, Homo sapien
aatccactgttggagacaatgagga

SEQ ID NO: 174878 - DNA, 25 bp, Homo sapien
atccactgttggagacaatgaggat

SEQ ID NO: 174879 - DNA, 25 bp, Homo sapien
ctcaaggacgtgggtgtgtcaatgc

SEQ ID NO: 174880 - DNA, 25 bp, Homo sapien
caatctcatcaggaccacagtaggg

SEQ ID NO: 174881 - DNA, 25 bp, Homo sapien
catggaaaacatagctatccgtgcc

SEQ ID NO: 174882 - DNA, 25 bp, Homo sapien
agtggatggtccctcctgtccagag

SEQ ID NO: 174883 - DNA, 25 bp, Homo sapien
ccatgacggtgaggaggaagatctc

SEQ ID NO: 174884 - DNA, 25 bp, Homo sapien
aggctctcatggtgttatcattgca

SEQ ID NO: 174885 - DNA, 25 bp, Homo sapien
aatggtctaaacaacaactgggcac

SEQ ID NO: 174886 - DNA, 25 bp, Homo sapien
ttgcactcttttaccaatcccactg

SEQ ID NO: 174887 - DNA, 25 bp, Homo sapien
acaatggtctaaacaacaactgggc

SEQ ID NO: 174888 - DNA, 25 bp, Homo sapien
caggtaggactgattgagaaaaggc

SEQ ID NO: 174889 - DNA, 25 bp, Homo sapien
tgattgagaaaaggcagaaattgaa

SEQ ID NO: 174890 - DNA, 25 bp, Homo sapien
taccaaagatacaggtaggactgat

SEQ ID NO: 174891 - DNA, 25 bp, Homo sapien
tctttgaaatgactaccaaagatac

SEQ ID NO: 174892 - DNA, 25 bp, Homo sapien
tttctagtttaaggtaaacagatga

SEQ ID NO: 174893 - DNA, 25 bp, Homo sapien
atttctagtttaaggtaaacagatg

SEQ ID NO: 174894 - DNA, 25 bp, Homo sapien
gctgcatatcataagttttgttatg

SEQ ID NO: 174895 - DNA, 25 bp, Homo sapien
tttagctgcatatcataagttttgt

SEQ ID NO: 174896 - DNA, 25 bp, Homo sapien
atttcctctggatagccttcatatt

SEQ ID NO: 174897 - DNA, 25 bp, Homo sapien
tttcctctggatagccttcatattc

SEQ ID NO: 174898 - DNA, 25 bp, Homo sapien
catcttttagtattcagaaagcttt

SEQ ID NO: 174899 - DNA, 25 bp, Homo sapien
tcttttagtattcagaaagcttttc

SEQ ID NO: 174900 - DNA, 25 bp, Homo sapien
taggggctaggattgtgttttactc

SEQ ID NO: 174901 - DNA, 25 bp, Homo sapien
cataggtactttgagccttgctaag

SEQ ID NO: 174902 - DNA, 25 bp, Homo sapien
ttactcccataggtactttgagcct

SEQ ID NO: 174903 - DNA, 25 bp, Homo sapien
ttgagccttgctaagaccacccagc

SEQ ID NO: 174904 - DNA, 25 bp, Homo sapien
tggggagacgaatggagtcattcct

SEQ ID NO: 174905 - DNA, 25 bp, Homo sapien
ggactgtgagttggagatttcctgt

SEQ ID NO: 174906 - DNA, 25 bp, Homo sapien
ttggggagacgaatggagtcattcc

SEQ ID NO: 174907 - DNA, 25 bp, Homo sapien
tttggggagacgaatggagtcattc

SEQ ID NO: 174908 - DNA, 25 bp, Homo sapien
tattattgcctgaattgccatttct

SEQ ID NO: 174909 - DNA, 25 bp, Homo sapien
ggttctgagttgaggacttctccgt

SEQ ID NO: 174910 - DNA, 25 bp, Homo sapien
ggacttctccgttattattgcctga

SEQ ID NO: 174911 - DNA, 25 bp, Homo sapien
accttctcatgttaggcatgggttc

SEQ ID NO: 174912 - DNA, 25 bp, Homo sapien
ccaaccccttccgtgagagaggcat

SEQ ID NO: 174913 - DNA, 25 bp, Homo sapien
atcacagccgcccaactgaaagact

SEQ ID NO: 174914 - DNA, 25 bp, Homo sapien
gaaagactcaggcacgtacttctgt

SEQ ID NO: 174915 - DNA, 25 bp, Homo sapien
ctgtgcagttgaggcacagttctcc

SEQ ID NO: 174916 - DNA, 25 bp, Homo sapien
gtgttttcacacttaagaggatggg

SEQ ID NO: 174917 - DNA, 25 bp, Homo sapien
tacactttatttgggtcagcattag

SEQ ID NO: 174918 - DNA, 25 bp, Homo sapien
cagcattagttcactttggttaggc

SEQ ID NO: 174919 - DNA, 25 bp, Homo sapien
tggtataacccaagacagtccagac

SEQ ID NO: 174920 - DNA, 25 bp, Homo sapien
agctcagtcactttcacgtctttga

SEQ ID NO: 174921 - DNA, 25 bp, Homo sapien
agcagtaggtttttcgtatcctcct

SEQ ID NO: 174922 - DNA, 25 bp, Homo sapien
tcttgaaggggttgacaaagacaaa

SEQ ID NO: 174923 - DNA, 25 bp, Homo sapien
gggttgacaaagacaaagtgtggcc

SEQ ID NO: 174924 - DNA, 25 bp, Homo sapien
accatttgctcaagaggaagactca

SEQ ID NO: 174925 - DNA, 25 bp, Homo sapien
ggtatgtccagtactccagacaacg

SEQ ID NO: 174926 - DNA, 25 bp, Homo sapien
tgaccttaacaaaggcgagacatct

SEQ ID NO: 174927 - DNA, 25 bp, Homo sapien
tctagagagagcatcaaaggcttca

SEQ ID NO: 174928 - DNA, 25 bp, Homo sapien
tggaagattaagagtcacgcttgac

SEQ ID NO: 174929 - DNA, 25 bp, Homo sapien
gacacttccaagaaaagcagttcct

SEQ ID NO: 174930 - DNA, 25 bp, Homo sapien
caaaattcaggtagaggccttgtcc

SEQ ID NO: 174931 - DNA, 25 bp, Homo sapien
ttgatcacggcttcccgggcagcag

SEQ ID NO: 174932 - DNA, 25 bp, Homo sapien
cgtgaattctgccaatattgaagca

SEQ ID NO: 174933 - DNA, 25 bp, Homo sapien
taactagtgagtctacatgacccca

SEQ ID NO: 174934 - DNA, 25 bp, Homo sapien
tcctgttttattgagcccaagggaa

SEQ ID NO: 174935 - DNA, 25 bp, Homo sapien
gggagtcctgcctcttaactagtga

SEQ ID NO: 174936 - DNA, 25 bp, Homo sapien
tagaccagccaaacaggatccttgc

SEQ ID NO: 174937 - DNA, 25 bp, Homo sapien
caagggatagtctggctagaccagc

SEQ ID NO: 174938 - DNA, 25 bp, Homo sapien
tacagcatagacaagtggagatttc

SEQ ID NO: 174939 - DNA, 25 bp, Homo sapien
cccagttggatatggagtgtaatca

SEQ ID NO: 174940 - DNA, 25 bp, Homo sapien
aagcaactcctgttaaggaagccca

SEQ ID NO: 174941 - DNA, 25 bp, Homo sapien
caaagttgcaatatcctggaagcaa

SEQ ID NO: 174942 - DNA, 25 bp, Homo sapien
gcaattgcaacaggcctcattctga

SEQ ID NO: 174943 - DNA, 25 bp, Homo sapien
tgtaacacagtatattgataggacc

SEQ ID NO: 174944 - DNA, 25 bp, Homo sapien
tacatgcagatgatgttttatctct

SEQ ID NO: 174945 - DNA, 25 bp, Homo sapien
tgtttaattgtagccaatcctttgc

SEQ ID NO: 174946 - DNA, 25 bp, Homo sapien
ttgtagccaatcctttgctagtggt

SEQ ID NO: 174947 - DNA, 25 bp, Homo sapien
ttgttttggcataagaatgacagga

SEQ ID NO: 174948 - DNA, 25 bp, Homo sapien
ttgggcccatttggctgcatattct

SEQ ID NO: 174949 - DNA, 25 bp, Homo sapien
ccaggagcagtaacttcctgtttgg

SEQ ID NO: 174950 - DNA, 25 bp, Homo sapien
agcatcttcttgattgggccaggag

SEQ ID NO: 174951 - DNA, 25 bp, Homo sapien
tgtttgggcccatttggctgcatat

SEQ ID NO: 174952 - DNA, 25 bp, Homo sapien
gtctggtagcaatggaacctctcat

SEQ ID NO: 174953 - DNA, 25 bp, Homo sapien
gatgtctggtagcaatggaacctct

SEQ ID NO: 174954 - DNA, 25 bp, Homo sapien
gcagatgtctggtagcaatggaacc

SEQ ID NO: 174955 - DNA, 25 bp, Homo sapien
tgagcagatgtctggtagcaatgga

SEQ ID NO: 174956 - DNA, 25 bp, Homo sapien
tcatccttccagaggacctagtgga

SEQ ID NO: 174957 - DNA, 25 bp, Homo sapien
tcattggtgagcatgacatgtagcc

SEQ ID NO: 174958 - DNA, 25 bp, Homo sapien
taagatttgtaccagatccactaga

SEQ ID NO: 174959 - DNA, 25 bp, Homo sapien
taggagcagcctaaattgaccacag

SEQ ID NO: 174960 - DNA, 25 bp, Homo sapien
catgggacctgtgagaaattgattc

SEQ ID NO: 174961 - DNA, 25 bp, Homo sapien
tatgaaaagcgttagcatgggacct

SEQ ID NO: 174962 - DNA, 25 bp, Homo sapien
gattcttacatctggcctccaaagg

SEQ ID NO: 174963 - DNA, 25 bp, Homo sapien
cagtagcctggtgtgagctcttgcc

SEQ ID NO: 174964 - DNA, 25 bp, Homo sapien
gcaatcacatcaacatcgctgggga

SEQ ID NO: 174965 - DNA, 25 bp, Homo sapien
tggcaatcacatcaacatcgctggg

SEQ ID NO: 174966 - DNA, 25 bp, Homo sapien
ggcaatcacatcaacatcgctgggg

SEQ ID NO: 174967 - DNA, 25 bp, Homo sapien
ttctgagctctgatggcaatcacat

SEQ ID NO: 174968 - DNA, 25 bp, Homo sapien
tacaagatgcatgaagctgctcaag

SEQ ID NO: 174969 - DNA, 25 bp, Homo sapien
aagaaaggtatctcctctggtgccc

SEQ ID NO: 174970 - DNA, 25 bp, Homo sapien
tcaagtcacttaagcaaggtgagcc

SEQ ID NO: 174971 - DNA, 25 bp, Homo sapien
gataaattaacgcatgacacaagcc

SEQ ID NO: 174972 - DNA, 25 bp, Homo sapien
ctggctggaggtcactcctgccact

SEQ ID NO: 174973 - DNA, 25 bp, Homo sapien
gaggtcactcctgccactgatcttc

SEQ ID NO: 174974 - DNA, 25 bp, Homo sapien
aaactggcccagagcaagcgggtcc

SEQ ID NO: 174975 - DNA, 25 bp, Homo sapien
actggcccagagcaagcgggtccac

SEQ ID NO: 174976 - DNA, 25 bp, Homo sapien
ctagaagtaccaggaaccttgtctc

SEQ ID NO: 174977 - DNA, 25 bp, Homo sapien
actagaagtaccaggaaccttgtct

SEQ ID NO: 174978 - DNA, 25 bp, Homo sapien
agaagtaccaggaaccttgtctcac

SEQ ID NO: 174979 - DNA, 25 bp, Homo sapien
tagaagtaccaggaaccttgtctca

SEQ ID NO: 174980 - DNA, 25 bp, Homo sapien
acctccagaggtaagggtatgaacg

SEQ ID NO: 174981 - DNA, 25 bp, Homo sapien
ctccagaggtaagggtatgaacgga

SEQ ID NO: 174982 - DNA, 25 bp, Homo sapien
cctcacctccagaggtaagggtatg

SEQ ID NO: 174983 - DNA, 25 bp, Homo sapien
tcacctccagaggtaagggtatgaa

SEQ ID NO: 174984 - DNA, 25 bp, Homo sapien
cctcctaataggctctcaatgatga

SEQ ID NO: 174985 - DNA, 25 bp, Homo sapien
gctcccaagactgggtcgatcacaa

SEQ ID NO: 174986 - DNA, 25 bp, Homo sapien
tgatgattgaatacaaaggctctaa

SEQ ID NO: 174987 - DNA, 25 bp, Homo sapien
gctctaattctctgttgcattggca

SEQ ID NO: 174988 - DNA, 25 bp, Homo sapien
tagttattcacttcgcaaagcttca

SEQ ID NO: 174989 - DNA, 25 bp, Homo sapien
actggggttatgagatagtgcagga

SEQ ID NO: 174990 - DNA, 25 bp, Homo sapien
gcaggaaagacatagttattcactt

SEQ ID NO: 174991 - DNA, 25 bp, Homo sapien
gacatagttattcacttcgcaaagc

SEQ ID NO: 174992 - DNA, 25 bp, Homo sapien
gctcaaatatctgtctggcatcctc

SEQ ID NO: 174993 - DNA, 25 bp, Homo sapien
ctgctcaaatatctgtctggcatcc

SEQ ID NO: 174994 - DNA, 25 bp, Homo sapien
aaatatctgtctggcatcctctctc

SEQ ID NO: 174995 - DNA, 25 bp, Homo sapien
tcaaatatctgtctggcatcctctc

SEQ ID NO: 174996 - DNA, 25 bp, Homo sapien
gattacaaggcgtgctcgtgtgcat

SEQ ID NO: 174997 - DNA, 25 bp, Homo sapien
caaggagacgtctatgaccctggtc

SEQ ID NO: 174998 - DNA, 25 bp, Homo sapien
ctggtaaagaggacccgagacggct

SEQ ID NO: 174999 - DNA, 25 bp, Homo sapien
tggcctctaggtaagtcacacactg

SEQ ID NO: 175000 - DNA, 25 bp, Homo sapien
caaggctaagggagcagacgttcct

SEQ ID NO: 175001 - DNA, 25 bp, Homo sapien
gcctgtctttagagctgcagcccta

SEQ ID NO: 175002 - DNA, 25 bp, Homo sapien
tggcagtttgcatatcagggtcagc

SEQ ID NO: 175003 - DNA, 25 bp, Homo sapien
tttgctcttgtgtgtagcggaccac

SEQ ID NO: 175004 - DNA, 25 bp, Homo sapien
tagcagccccggaaaagaacctgca

SEQ ID NO: 175005 - DNA, 25 bp, Homo sapien
tggtccccagatgactccactctag

SEQ ID NO: 175006 - DNA, 25 bp, Homo sapien
ttgagtctctccctagtcacgtgac

SEQ ID NO: 175007 - DNA, 25 bp, Homo sapien
tatacctgcaggttgatgtgcctcc

SEQ ID NO: 175008 - DNA, 25 bp, Homo sapien
cacctccagctcacctcccttgaga

SEQ ID NO: 175009 - DNA, 25 bp, Homo sapien
cttgcatcacctccagctcacctcc

SEQ ID NO: 175010 - DNA, 25 bp, Homo sapien
ctccagctcacctcccttgagacac

SEQ ID NO: 175011 - DNA, 25 bp, Homo sapien
cagctcacctcccttgagacactcc

SEQ ID NO: 175012 - DNA, 25 bp, Homo sapien
aaaagactacaagttcttcaaagat

SEQ ID NO: 175013 - DNA, 25 bp, Homo sapien
tgtaattatatttgtggactaagaa

SEQ ID NO: 175014 - DNA, 25 bp, Homo sapien
atgtaattatatttgtggactaaga

SEQ ID NO: 175015 - DNA, 25 bp, Homo sapien
aaagactacaagttcttcaaagata

SEQ ID NO: 175016 - DNA, 25 bp, Homo sapien
ggcaactatattgagtgcactccag

SEQ ID NO: 175017 - DNA, 25 bp, Homo sapien
aaggtttaattcagtcagacaccca

SEQ ID NO: 175018 - DNA, 25 bp, Homo sapien
catacagcttcacgtctgggtttaa

SEQ ID NO: 175019 - DNA, 25 bp, Homo sapien
aatagactaggatgcatatggcaac

SEQ ID NO: 175020 - DNA, 25 bp, Homo sapien
tgcaatgagttgatattgggccact

SEQ ID NO: 175021 - DNA, 25 bp, Homo sapien
aatgagttgatattgggccacttca

SEQ ID NO: 175022 - DNA, 25 bp, Homo sapien
tgaggctggaggagagtctgagcca

SEQ ID NO: 175023 - DNA, 25 bp, Homo sapien
gttgcaatgagttgatattgggcca

SEQ ID NO: 175024 - DNA, 25 bp, Homo sapien
tctcccagtgggaagtacaatgctg

SEQ ID NO: 175025 - DNA, 25 bp, Homo sapien
tgtctggtgaaggaattctacccca

SEQ ID NO: 175026 - DNA, 25 bp, Homo sapien
gacaataaaactgtgcactccactg

SEQ ID NO: 175027 - DNA, 25 bp, Homo sapien
tatatttgcaggaagtcagcctcat

SEQ ID NO: 175028 - DNA, 25 bp, Homo sapien
atctctctgggcctgggtttttgca

SEQ ID NO: 175029 - DNA, 25 bp, Homo sapien
ttcatctctctgggcctgggttttt

SEQ ID NO: 175030 - DNA, 25 bp, Homo sapien
ttagccaggtttcttcatctctctg

SEQ ID NO: 175031 - DNA, 25 bp, Homo sapien
tagccaggtttcttcatctctctgg

SEQ ID NO: 175032 - DNA, 25 bp, Homo sapien
tctggaagtcacaactttccaggag

SEQ ID NO: 175033 - DNA, 25 bp, Homo sapien
cacatagtcagtttgccccagagga

SEQ ID NO: 175034 - DNA, 25 bp, Homo sapien
gaggaaattttctctgccggagaca

SEQ ID NO: 175035 - DNA, 25 bp, Homo sapien
agggacttggcagctggaattctgg

SEQ ID NO: 175036 - DNA, 25 bp, Homo sapien
tgtttcacagaaaaccgtccttgag

SEQ ID NO: 175037 - DNA, 25 bp, Homo sapien
gaataatctggccttatccggtacc

SEQ ID NO: 175038 - DNA, 25 bp, Homo sapien
tagtaagtggcactgtcttcagtcc

SEQ ID NO: 175039 - DNA, 25 bp, Homo sapien
ccttactggagagatcaccaagtga

SEQ ID NO: 175040 - DNA, 25 bp, Homo sapien
ttactttgtcacacagcgtgcccct

SEQ ID NO: 175041 - DNA, 25 bp, Homo sapien
actttgtcacacagcgtgcccctgt

SEQ ID NO: 175042 - DNA, 25 bp, Homo sapien
ctgggttactttgtcacacagcgtg

SEQ ID NO: 175043 - DNA, 25 bp, Homo sapien
ggttactttgtcacacagcgtgccc

SEQ ID NO: 175044 - DNA, 25 bp, Homo sapien
cccagaagaactcaatgagcagagg

SEQ ID NO: 175045 - DNA, 25 bp, Homo sapien
caaaacagggttcctaagatctcag

SEQ ID NO: 175046 - DNA, 25 bp, Homo sapien
gcagaggatatacaacaaaacaggg

SEQ ID NO: 175047 - DNA, 25 bp, Homo sapien
tttcttcatatcagggcagaggata

SEQ ID NO: 175048 - DNA, 25 bp, Homo sapien
gactatctgacggttctaatgaaag

SEQ ID NO: 175049 - DNA, 25 bp, Homo sapien
ctgccggcaggggtccagtccacga

SEQ ID NO: 175050 - DNA, 25 bp, Homo sapien
ccttgccggtgcattggctgcccag

SEQ ID NO: 175051 - DNA, 25 bp, Homo sapien
tgagcatcttcagggcccctggatg

SEQ ID NO: 175052 - DNA, 25 bp, Homo sapien
gggtccagtccacgagacccagctc

SEQ ID NO: 175053 - DNA, 25 bp, Homo sapien
tggttgactatgtgtgactcatcag

SEQ ID NO: 175054 - DNA, 25 bp, Homo sapien
cttcattggggggtagcataatttc

SEQ ID NO: 175055 - DNA, 25 bp, Homo sapien
agagcctggcggtccaagcccatat

SEQ ID NO: 175056 - DNA, 25 bp, Homo sapien
atttcctggttgactatgtgtgact

SEQ ID NO: 175057 - DNA, 25 bp, Homo sapien
taagaggattagataccctggtggt

SEQ ID NO: 175058 - DNA, 25 bp, Homo sapien
tgatcctgatatcaaggtccagggc

SEQ ID NO: 175059 - DNA, 25 bp, Homo sapien
aaaacatcatagtccttggccacgg

SEQ ID NO: 175060 - DNA, 25 bp, Homo sapien
gaaagtaattaaagatctcctcacc

SEQ ID NO: 175061 - DNA, 25 bp, Homo sapien
taatagagaagtgcattagaagctc

SEQ ID NO: 175062 - DNA, 25 bp, Homo sapien
cagacctgaaagcttcttgtgattt

SEQ ID NO: 175063 - DNA, 25 bp, Homo sapien
tacacagtgttcttgaagtaataga

SEQ ID NO: 175064 - DNA, 25 bp, Homo sapien
tcttgaagtaatagagaagtgcatt

SEQ ID NO: 175065 - DNA, 25 bp, Homo sapien
cctataaacctgtagcttaatgaag

SEQ ID NO: 175066 - DNA, 25 bp, Homo sapien
gaagagttgagcaatcgtgactata

SEQ ID NO: 175067 - DNA, 25 bp, Homo sapien
tcgtgactatattgacccccaggac

SEQ ID NO: 175068 - DNA, 25 bp, Homo sapien
gctgcattctggacttattatcaaa

SEQ ID NO: 175069 - DNA, 25 bp, Homo sapien
tggaggtagcaactataaactgaca

SEQ ID NO: 175070 - DNA, 25 bp, Homo sapien
gcaactataaactgacatttggaaa

SEQ ID NO: 175071 - DNA, 25 bp, Homo sapien
agtggaggtagcaactataaactga

SEQ ID NO: 175072 - DNA, 25 bp, Homo sapien
ggtagcaactataaactgacatttg

SEQ ID NO: 175073 - DNA, 25 bp, Homo sapien
ctattttgggacagggacaagtttg

SEQ ID NO: 175074 - DNA, 25 bp, Homo sapien
tattttgggacagggacaagtttga

SEQ ID NO: 175075 - DNA, 25 bp, Homo sapien
gaggaagccaaggaaatctcatctt

SEQ ID NO: 175076 - DNA, 25 bp, Homo sapien
tgaactagttaacctcagaagagcc

SEQ ID NO: 175077 - DNA, 25 bp, Homo sapien
ttttccgctgcctctttagccaacg

SEQ ID NO: 175078 - DNA, 25 bp, Homo sapien
catgctgggaatagaccgccataat

SEQ ID NO: 175079 - DNA, 25 bp, Homo sapien
tcctgatacacattggcctggtcgg

SEQ ID NO: 175080 - DNA, 25 bp, Homo sapien
tgacattcacggcagaggcaaggct

SEQ ID NO: 175081 - DNA, 25 bp, Homo sapien
tcttgggctctaggtcccggagaat

SEQ ID NO: 175082 - DNA, 25 bp, Homo sapien
cttattgctgcttgtcactgcctga

SEQ ID NO: 175083 - DNA, 25 bp, Homo sapien
tgtgtctgggcgtgttgtatgtcct

SEQ ID NO: 175084 - DNA, 25 bp, Homo sapien
catttccatgacgtcatggttacca

SEQ ID NO: 175085 - DNA, 25 bp, Homo sapien
tgcaattaataaacaggtcagacat

SEQ ID NO: 175086 - DNA, 25 bp, Homo sapien
tcagacattgagtcagtagccacaa

SEQ ID NO: 175087 - DNA, 25 bp, Homo sapien
taccaagaggggcaagtagggcacc

SEQ ID NO: 175088 - DNA, 25 bp, Homo sapien
cttgcttagtacagggcagaccctc

SEQ ID NO: 175089 - DNA, 25 bp, Homo sapien
cagggcagaccctcgagacttatgc

SEQ ID NO: 175090 - DNA, 25 bp, Homo sapien
accctcgagacttatgctcaggcca

SEQ ID NO: 175091 - DNA, 25 bp, Homo sapien
attaagcgcttgcttagtacagggc

SEQ ID NO: 175092 - DNA, 25 bp, Homo sapien
tggggaggccgtatttgcccccaca

SEQ ID NO: 175093 - DNA, 25 bp, Homo sapien
ggccgtatttgcccccacacagagc

SEQ ID NO: 175094 - DNA, 25 bp, Homo sapien
gaggccgtatttgcccccacacaga

SEQ ID NO: 175095 - DNA, 25 bp, Homo sapien
gggaggccgtatttgcccccacaca

SEQ ID NO: 175096 - DNA, 25 bp, Homo sapien
ggacccggagaccaggaatctgcag

SEQ ID NO: 175097 - DNA, 25 bp, Homo sapien
cctaatggacgccttgatggacacg

SEQ ID NO: 175098 - DNA, 25 bp, Homo sapien
tgcttgtccattaggtgatggccct

SEQ ID NO: 175099 - DNA, 25 bp, Homo sapien
ttgatggacacgtccgggacccagg

SEQ ID NO: 175100 - DNA, 25 bp, Homo sapien
ggttgtcagcactgccttttgccat

SEQ ID NO: 175101 - DNA, 25 bp, Homo sapien
ggaagaagacaaaggactgccattt

SEQ ID NO: 175102 - DNA, 25 bp, Homo sapien
tcccagggttgtcagcactgccttt

SEQ ID NO: 175103 - DNA, 25 bp, Homo sapien
gaagacaaaggactgccatttccca

SEQ ID NO: 175104 - DNA, 25 bp, Homo sapien
tttgcacttactgctagctctgctt

SEQ ID NO: 175105 - DNA, 25 bp, Homo sapien
ggagatggcagcttattggacacat

SEQ ID NO: 175106 - DNA, 25 bp, Homo sapien
ttactgctagctctgctttttatgc

SEQ ID NO: 175107 - DNA, 25 bp, Homo sapien
aaagcccagagttcactgtgtgtca

SEQ ID NO: 175108 - DNA, 25 bp, Homo sapien
cagcttattggacacatggattttc

SEQ ID NO: 175109 - DNA, 25 bp, Homo sapien
gaatttcctggataagagttctgga

SEQ ID NO: 175110 - DNA, 25 bp, Homo sapien
gcataaaaagcagagctagcagtaa

SEQ ID NO: 175111 - DNA, 25 bp, Homo sapien
catgtgtccaataagctgccatctc

SEQ ID NO: 175112 - DNA, 25 bp, Homo sapien
aaagcagagctagcagtaagtgcaa

SEQ ID NO: 175113 - DNA, 25 bp, Homo sapien
gaaaatccatgtgtccaataagctg

SEQ ID NO: 175114 - DNA, 25 bp, Homo sapien
tccagaactcttatccaggaaattc

SEQ ID NO: 175115 - DNA, 25 bp, Homo sapien
tctgacacacagtgaactctgggct

SEQ ID NO: 175116 - DNA, 25 bp, Homo sapien
gggttccacctcacaagttacagat

SEQ ID NO: 175117 - DNA, 25 bp, Homo sapien
tacagatctcagttccatttggctc

SEQ ID NO: 175118 - DNA, 25 bp, Homo sapien
ggaggtcactttccaaccagagctg

SEQ ID NO: 175119 - DNA, 25 bp, Homo sapien
tcttgcggctaattaatggtagagc

SEQ ID NO: 175120 - DNA, 25 bp, Homo sapien
tcttttgagtcatggtacacgtagg

SEQ ID NO: 175121 - DNA, 25 bp, Homo sapien
tggccacttctgttgcggttactct

SEQ ID NO: 175122 - DNA, 25 bp, Homo sapien
tcctacgtgtaccatgactcaaaag

SEQ ID NO: 175123 - DNA, 25 bp, Homo sapien
gccaaatggaactgagatctgtaac

SEQ ID NO: 175124 - DNA, 25 bp, Homo sapien
aagagtaaccgcaacagaagtggcc

SEQ ID NO: 175125 - DNA, 25 bp, Homo sapien
atctgtaacttgtgaggtggaaccc

SEQ ID NO: 175126 - DNA, 25 bp, Homo sapien
cagctctggttggaaagtgacctcc

SEQ ID NO: 175127 - DNA, 25 bp, Homo sapien
caaaacgaactaggaactgtgagac

SEQ ID NO: 175128 - DNA, 25 bp, Homo sapien
gattagaacaaactgattaaatggc

SEQ ID NO: 175129 - DNA, 25 bp, Homo sapien
attagaacaaactgattaaatggca

SEQ ID NO: 175130 - DNA, 25 bp, Homo sapien
tgattagaacaaactgattaaatgg

SEQ ID NO: 175131 - DNA, 25 bp, Homo sapien
ttagaacaaactgattaaatggcac

SEQ ID NO: 175132 - DNA, 25 bp, Homo sapien
atgattagaacaaactgattaaatg

SEQ ID NO: 175133 - DNA, 25 bp, Homo sapien
catttaatcagtttgttctaatcat

SEQ ID NO: 175134 - DNA, 25 bp, Homo sapien
tgccatttaatcagtttgttctaat

SEQ ID NO: 175135 - DNA, 25 bp, Homo sapien
ccatttaatcagtttgttctaatca

SEQ ID NO: 175136 - DNA, 25 bp, Homo sapien
gccatttaatcagtttgttctaatc

SEQ ID NO: 175137 - DNA, 25 bp, Homo sapien
gtgccatttaatcagtttgttctaa

SEQ ID NO: 175138 - DNA, 25 bp, Homo sapien
tctgcccaggtgaaatagactgaag

SEQ ID NO: 175139 - DNA, 25 bp, Homo sapien
tagactgaagtcacgctaacttttc

SEQ ID NO: 175140 - DNA, 25 bp, Homo sapien
gcactgtcttctgcccaggtgaaat

SEQ ID NO: 175141 - DNA, 25 bp, Homo sapien
gattaaatggcactgtcttctgccc

SEQ ID NO: 175142 - DNA, 25 bp, Homo sapien
gattagaacaaactgattaaatggc

SEQ ID NO: 175143 - DNA, 25 bp, Homo sapien
ttagaacaaactgattaaatggcac

SEQ ID NO: 175144 - DNA, 25 bp, Homo sapien
tcagtctatttcacctgggcagaag

SEQ ID NO: 175145 - DNA, 25 bp, Homo sapien
ccatttaatcagtttgttctaatca

SEQ ID NO: 175146 - DNA, 25 bp, Homo sapien
cttcagtctatttcacctgggcaga

SEQ ID NO: 175147 - DNA, 25 bp, Homo sapien
ggcagaagacagtgccatttaatca

SEQ ID NO: 175148 - DNA, 25 bp, Homo sapien
atttcacctgggcagaagacagtgc

SEQ ID NO: 175149 - DNA, 25 bp, Homo sapien
gtgccatttaatcagtttgttctaa

SEQ ID NO: 175150 - DNA, 25 bp, Homo sapien
tagggagggtgatcctggaccagca

SEQ ID NO: 175151 - DNA, 25 bp, Homo sapien
tctgcaccgcccattatggtaacca

SEQ ID NO: 175152 - DNA, 25 bp, Homo sapien
aatgtggctaacagactgaagaact

SEQ ID NO: 175153 - DNA, 25 bp, Homo sapien
aaatgtggctaacagactgaagaac

SEQ ID NO: 175154 - DNA, 25 bp, Homo sapien
gtctgcaccgcccattatggtaacc

SEQ ID NO: 175155 - DNA, 25 bp, Homo sapien
gagggtgatcctggaccagcactgt

SEQ ID NO: 175156 - DNA, 25 bp, Homo sapien
tagtcacctgtgtctagtggctgtg

SEQ ID NO: 175157 - DNA, 25 bp, Homo sapien
cacagccactagacacaggtgacta

SEQ ID NO: 175158 - DNA, 25 bp, Homo sapien
tgctggtccaggatcaccctcccta

SEQ ID NO: 175159 - DNA, 25 bp, Homo sapien
tggttaccataatgggcggtgcaga

SEQ ID NO: 175160 - DNA, 25 bp, Homo sapien
gtgctggtccaggatcaccctccct

SEQ ID NO: 175161 - DNA, 25 bp, Homo sapien
agttcttcagtctgttagccacatt

SEQ ID NO: 175162 - DNA, 25 bp, Homo sapien
ggttaccataatgggcggtgcagac

SEQ ID NO: 175163 - DNA, 25 bp, Homo sapien
acagtgctggtccaggatcaccctc

SEQ ID NO: 175164 - DNA, 25 bp, Homo sapien
cctgttatgtttaggactctcagat

SEQ ID NO: 175165 - DNA, 25 bp, Homo sapien
ggaaaggatgaaggccggctatctc

SEQ ID NO: 175166 - DNA, 25 bp, Homo sapien
ggccggctatctcaaatgtttctgc

SEQ ID NO: 175167 - DNA, 25 bp, Homo sapien
tatatgtcatgttagagggttttca

SEQ ID NO: 175168 - DNA, 25 bp, Homo sapien
acatttggactctaaacctttatat

SEQ ID NO: 175169 - DNA, 25 bp, Homo sapien
gcatagttggccatacttaatatgg

SEQ ID NO: 175170 - DNA, 25 bp, Homo sapien
atataaaggtttagagtccaaatgt

SEQ ID NO: 175171 - DNA, 25 bp, Homo sapien
gagatagccggccttcatcctttcc

SEQ ID NO: 175172 - DNA, 25 bp, Homo sapien
taatgaaaaccctctaacatgacat

SEQ ID NO: 175173 - DNA, 25 bp, Homo sapien
cagaaacatttgagatagccggcct

SEQ ID NO: 175174 - DNA, 25 bp, Homo sapien
catattaagtatggccaactatgca

SEQ ID NO: 175175 - DNA, 25 bp, Homo sapien
gagagtcctaaacataacaggaagg

SEQ ID NO: 175176 - DNA, 25 bp, Homo sapien
ttctgttttctccttaatcgttgct

SEQ ID NO: 175177 - DNA, 25 bp, Homo sapien
catattttcagattcccattatcca

SEQ ID NO: 175178 - DNA, 25 bp, Homo sapien
tattttcagattcccattatccatt

SEQ ID NO: 175179 - DNA, 25 bp, Homo sapien
ctccttaatcgttgctttttattca

SEQ ID NO: 175180 - DNA, 25 bp, Homo sapien
cattatccatttataggaggcagaa

SEQ ID NO: 175181 - DNA, 25 bp, Homo sapien
tctgttttctccttaatcgttgctt

SEQ ID NO: 175182 - DNA, 25 bp, Homo sapien
ttaaatgattataacaagatgcaca

SEQ ID NO: 175183 - DNA, 25 bp, Homo sapien
aaatgattataacaagatgcacata

SEQ ID NO: 175184 - DNA, 25 bp, Homo sapien
taaatgattataacaagatgcacat

SEQ ID NO: 175185 - DNA, 25 bp, Homo sapien
gttaaatgattataacaagatgcac

SEQ ID NO: 175186 - DNA, 25 bp, Homo sapien
aatgattataacaagatgcacatat

SEQ ID NO: 175187 - DNA, 25 bp, Homo sapien
tgattataacaagatgcacatattt

SEQ ID NO: 175188 - DNA, 25 bp, Homo sapien
gtgcatcttgttataatcatttaac

SEQ ID NO: 175189 - DNA, 25 bp, Homo sapien
aaatatgtgcatcttgttataatca

SEQ ID NO: 175190 - DNA, 25 bp, Homo sapien
aatatgtgcatcttgttataatcat

SEQ ID NO: 175191 - DNA, 25 bp, Homo sapien
tatgtgcatcttgttataatcattt

SEQ ID NO: 175192 - DNA, 25 bp, Homo sapien
atgtgcatcttgttataatcattta

SEQ ID NO: 175193 - DNA, 25 bp, Homo sapien
tgtgcatcttgttataatcatttaa

SEQ ID NO: 175194 - DNA, 25 bp, Homo sapien
ggataatgggaatctgaaaatatga

SEQ ID NO: 175195 - DNA, 25 bp, Homo sapien
aagcaacgattaaggagaaaacaga

SEQ ID NO: 175196 - DNA, 25 bp, Homo sapien
ttctgcctcctataaatggataatg

SEQ ID NO: 175197 - DNA, 25 bp, Homo sapien
aatggataatgggaatctgaaaata

SEQ ID NO: 175198 - DNA, 25 bp, Homo sapien
tgaataaaaagcaacgattaaggag

SEQ ID NO: 175199 - DNA, 25 bp, Homo sapien
agcaacgattaaggagaaaacagaa

SEQ ID NO: 175200 - DNA, 25 bp, Homo sapien
tctaggctcagggagataccaaatc

SEQ ID NO: 175201 - DNA, 25 bp, Homo sapien
catattaacaacctaggaccacctg

SEQ ID NO: 175202 - DNA, 25 bp, Homo sapien
tagggcctcgctataggtttgaaca

SEQ ID NO: 175203 - DNA, 25 bp, Homo sapien
gaccttctcacgcttgcaaatatga

SEQ ID NO: 175204 - DNA, 25 bp, Homo sapien
tcaatatttataccagctcagaagg

SEQ ID NO: 175205 - DNA, 25 bp, Homo sapien
caaatatgagtaacccttgggcttc

SEQ ID NO: 175206 - DNA, 25 bp, Homo sapien
gatttggtatctccctgagcctaga

SEQ ID NO: 175207 - DNA, 25 bp, Homo sapien
tgttcaaacctatagcgaggcccta

SEQ ID NO: 175208 - DNA, 25 bp, Homo sapien
gaagcccaagggttactcatatttg

SEQ ID NO: 175209 - DNA, 25 bp, Homo sapien
tccagaaggctctatcaggaagccc

SEQ ID NO: 175210 - DNA, 25 bp, Homo sapien
tcatatttgcaagcgtgagaaggtc

SEQ ID NO: 175211 - DNA, 25 bp, Homo sapien
taagctctctgcagtagagtcctcc

SEQ ID NO: 175212 - DNA, 25 bp, Homo sapien
gatgacttttaatgctggaccattg

SEQ ID NO: 175213 - DNA, 25 bp, Homo sapien
tgatagcatccagtgtatgttgaat

SEQ ID NO: 175214 - DNA, 25 bp, Homo sapien
agcacttaaatttgatagcatccag

SEQ ID NO: 175215 - DNA, 25 bp, Homo sapien
aatgctggaccattgttttcatagc

SEQ ID NO: 175216 - DNA, 25 bp, Homo sapien
aatgaatgactgtgggcatttgcta

SEQ ID NO: 175217 - DNA, 25 bp, Homo sapien
taaatttgatagcatccagtgtatg

SEQ ID NO: 175218 - DNA, 25 bp, Homo sapien
ttttagcagtagagttctttctccc

SEQ ID NO: 175219 - DNA, 25 bp, Homo sapien
tttagcagtagagttctttctccct

SEQ ID NO: 175220 - DNA, 25 bp, Homo sapien
aatataagatgggatgctgcttggt

SEQ ID NO: 175221 - DNA, 25 bp, Homo sapien
cttttttagcagtagagttctttct

SEQ ID NO: 175222 - DNA, 25 bp, Homo sapien
tttttagcagtagagttctttctcc

SEQ ID NO: 175223 - DNA, 25 bp, Homo sapien
atataagatgggatgctgcttggtt

SEQ ID NO: 175224 - DNA, 25 bp, Homo sapien
agggagaaagaactctactgctaaa

SEQ ID NO: 175225 - DNA, 25 bp, Homo sapien
accaagcagcatcccatcttatatt

SEQ ID NO: 175226 - DNA, 25 bp, Homo sapien
agaaagaactctactgctaaaaaag

SEQ ID NO: 175227 - DNA, 25 bp, Homo sapien
ggagaaagaactctactgctaaaaa

SEQ ID NO: 175228 - DNA, 25 bp, Homo sapien
aaccaagcagcatcccatcttatat

SEQ ID NO: 175229 - DNA, 25 bp, Homo sapien
gggagaaagaactctactgctaaaa

SEQ ID NO: 175230 - DNA, 25 bp, Homo sapien
gctatgaaaacaatggtccagcatt

SEQ ID NO: 175231 - DNA, 25 bp, Homo sapien
gctatcaaatttaagtgctatgaaa

SEQ ID NO: 175232 - DNA, 25 bp, Homo sapien
tagcaaatgcccacagtcattcatt

SEQ ID NO: 175233 - DNA, 25 bp, Homo sapien
caatggtccagcattaaaagtcatc

SEQ ID NO: 175234 - DNA, 25 bp, Homo sapien
ctggatgctatcaaatttaagtgct

SEQ ID NO: 175235 - DNA, 25 bp, Homo sapien
tcaacatacactggatgctatcaaa

SEQ ID NO: 175236 - DNA, 25 bp, Homo sapien
tctcatttacttaattgaggagtag

SEQ ID NO: 175237 - DNA, 25 bp, Homo sapien
tcatttacttaattgaggagtagga

SEQ ID NO: 175238 - DNA, 25 bp, Homo sapien
attgaggagtaggagactaaaagaa

SEQ ID NO: 175239 - DNA, 25 bp, Homo sapien
ctcatttacttaattgaggagtagg

SEQ ID NO: 175240 - DNA, 25 bp, Homo sapien
tcctactcctcaattaagtaaatga

SEQ ID NO: 175241 - DNA, 25 bp, Homo sapien
ttcttttagtctcctactcctcaat

SEQ ID NO: 175242 - DNA, 25 bp, Homo sapien
ctactcctcaattaagtaaatgaga

SEQ ID NO: 175243 - DNA, 25 bp, Homo sapien
cctactcctcaattaagtaaatgag

SEQ ID NO: 175244 - DNA, 25 bp, Homo sapien
tctcatttacttaattgaggagtag

SEQ ID NO: 175245 - DNA, 25 bp, Homo sapien
ttgaggagtaggagactaaaagaat

SEQ ID NO: 175246 - DNA, 25 bp, Homo sapien
tcatttacttaattgaggagtagga

SEQ ID NO: 175247 - DNA, 25 bp, Homo sapien
acttaattgaggagtaggagactaa

SEQ ID NO: 175248 - DNA, 25 bp, Homo sapien
attgaggagtaggagactaaaagaa

SEQ ID NO: 175249 - DNA, 25 bp, Homo sapien
ctcatttacttaattgaggagtagg

SEQ ID NO: 175250 - DNA, 25 bp, Homo sapien
tcctactcctcaattaagtaaatga

SEQ ID NO: 175251 - DNA, 25 bp, Homo sapien
ttcttttagtctcctactcctcaat

SEQ ID NO: 175252 - DNA, 25 bp, Homo sapien
attcttttagtctcctactcctcaa

SEQ ID NO: 175253 - DNA, 25 bp, Homo sapien
ttagtctcctactcctcaattaagt

SEQ ID NO: 175254 - DNA, 25 bp, Homo sapien
cctactcctcaattaagtaaatgag

SEQ ID NO: 175255 - DNA, 25 bp, Homo sapien
cctcaattaagtaaatgagaatgag

SEQ ID NO: 175256 - DNA, 25 bp, Homo sapien
catcctgcaccttgttgtcatgaac

SEQ ID NO: 175257 - DNA, 25 bp, Homo sapien
ctccccagagcgagcctttgctgat

SEQ ID NO: 175258 - DNA, 25 bp, Homo sapien
tccccagagcgagcctttgctgatt

SEQ ID NO: 175259 - DNA, 25 bp, Homo sapien
tctccccagagcgagcctttgctga

SEQ ID NO: 175260 - DNA, 25 bp, Homo sapien
cccacagaacaaagcggatttccaa

SEQ ID NO: 175261 - DNA, 25 bp, Homo sapien
tcctgcaccttgttgtcatgaactt

SEQ ID NO: 175262 - DNA, 25 bp, Homo sapien
aatcagcaaaggctcgctctgggga

SEQ ID NO: 175263 - DNA, 25 bp, Homo sapien
ttggaaatccgctttgttctgtggg

SEQ ID NO: 175264 - DNA, 25 bp, Homo sapien
aagttcatgacaacaaggtgcagga

SEQ ID NO: 175265 - DNA, 25 bp, Homo sapien
agttcatgacaacaaggtgcaggat

SEQ ID NO: 175266 - DNA, 25 bp, Homo sapien
tcagcaaaggctcgctctggggaga

SEQ ID NO: 175267 - DNA, 25 bp, Homo sapien
gttcatgacaacaaggtgcaggatg

SEQ ID NO: 175268 - DNA, 25 bp, Homo sapien
tgaacccagcaggtggagattgcag

SEQ ID NO: 175269 - DNA, 25 bp, Homo sapien
tgcttgaacccagcaggtggagatt

SEQ ID NO: 175270 - DNA, 25 bp, Homo sapien
ttgaacccagcaggtggagattgca

SEQ ID NO: 175271 - DNA, 25 bp, Homo sapien
cattccagcctgggtgacggagcga

SEQ ID NO: 175272 - DNA, 25 bp, Homo sapien
gcattccagcctgggtgacggagcg

SEQ ID NO: 175273 - DNA, 25 bp, Homo sapien
gcttgaacccagcaggtggagattg

SEQ ID NO: 175274 - DNA, 25 bp, Homo sapien
tgcaatctccacctgctgggttcaa

SEQ ID NO: 175275 - DNA, 25 bp, Homo sapien
gcaatctccacctgctgggttcaag

SEQ ID NO: 175276 - DNA, 25 bp, Homo sapien
aatctccacctgctgggttcaagca

SEQ ID NO: 175277 - DNA, 25 bp, Homo sapien
tcgctccgtcacccaggctggaatg

SEQ ID NO: 175278 - DNA, 25 bp, Homo sapien
cgctccgtcacccaggctggaatgc

SEQ ID NO: 175279 - DNA, 25 bp, Homo sapien
caatctccacctgctgggttcaagc

SEQ ID NO: 175280 - DNA, 25 bp, Homo sapien
tcatttgattttgtatacgagggtt

SEQ ID NO: 175281 - DNA, 25 bp, Homo sapien
ccattgagtggttttgtcagtttgg

SEQ ID NO: 175282 - DNA, 25 bp, Homo sapien
ggttgagaagactgtttccccattg

SEQ ID NO: 175283 - DNA, 25 bp, Homo sapien
agactgtttccccattgagtggttt

SEQ ID NO: 175284 - DNA, 25 bp, Homo sapien
tcgttggttgagaagactgtttccc

SEQ ID NO: 175285 - DNA, 25 bp, Homo sapien
tcccagcatcgttggttgagaagac

SEQ ID NO: 175286 - DNA, 25 bp, Homo sapien
tatccctaaatagaaggtcacacta

SEQ ID NO: 175287 - DNA, 25 bp, Homo sapien
gtcacactaaaaataccatggagct

SEQ ID NO: 175288 - DNA, 25 bp, Homo sapien
cagatgtgttcacccgtgcctgtgg

SEQ ID NO: 175289 - DNA, 25 bp, Homo sapien
aataccatggagctaggcagatgtg

SEQ ID NO: 175290 - DNA, 25 bp, Homo sapien
ggaaaacctgaatcattatccctaa

SEQ ID NO: 175291 - DNA, 25 bp, Homo sapien
catggagctaggcagatgtgttcac

SEQ ID NO: 175292 - DNA, 25 bp, Homo sapien
ggtgaacacatctgcctagctccat

SEQ ID NO: 175293 - DNA, 25 bp, Homo sapien
gaacacatctgcctagctccatggt

SEQ ID NO: 175294 - DNA, 25 bp, Homo sapien
agctccatggtatttttagtgtgac

SEQ ID NO: 175295 - DNA, 25 bp, Homo sapien
tagggataatgattcaggttttcca

SEQ ID NO: 175296 - DNA, 25 bp, Homo sapien
ccacaggcacgggtgaacacatctg

SEQ ID NO: 175297 - DNA, 25 bp, Homo sapien
tagtgtgaccttctatttagggata

SEQ ID NO: 175298 - DNA, 25 bp, Homo sapien
agtcttctcaaccaacgatgctggg

SEQ ID NO: 175299 - DNA, 25 bp, Homo sapien
ccaaactgacaaaaccactcaatgg

SEQ ID NO: 175300 - DNA, 25 bp, Homo sapien
tcttctcaaccaacgatgctgggaa

SEQ ID NO: 175301 - DNA, 25 bp, Homo sapien
caatggggaaacagtcttctcaacc

SEQ ID NO: 175302 - DNA, 25 bp, Homo sapien
gggaaacagtcttctcaaccaacga

SEQ ID NO: 175303 - DNA, 25 bp, Homo sapien
aaaccctcgtatacaaaatcaaatg

SEQ ID NO: 175304 - DNA, 25 bp, Homo sapien
tgtacctgtctaaccactatccaga

SEQ ID NO: 175305 - DNA, 25 bp, Homo sapien
taattagaaacctttaaatcagcag

SEQ ID NO: 175306 - DNA, 25 bp, Homo sapien
taggtttcagtgtaactctgagaag

SEQ ID NO: 175307 - DNA, 25 bp, Homo sapien
ggaccctttgttgttgcctcaagtg

SEQ ID NO: 175308 - DNA, 25 bp, Homo sapien
atgcaggacattaccagcaccatag

SEQ ID NO: 175309 - DNA, 25 bp, Homo sapien
gcatccccatctaggtataattaga

SEQ ID NO: 175310 - DNA, 25 bp, Homo sapien
ggatgcacttgaggcaacaacaaag

SEQ ID NO: 175311 - DNA, 25 bp, Homo sapien
ttctcagagttacactgaaacctag

SEQ ID NO: 175312 - DNA, 25 bp, Homo sapien
tgtacaattaaatttcgcactctgt

SEQ ID NO: 175313 - DNA, 25 bp, Homo sapien
cttgaggcaacaacaaagggtccgg

SEQ ID NO: 175314 - DNA, 25 bp, Homo sapien
tctggatagtggttagacaggtaca

SEQ ID NO: 175315 - DNA, 25 bp, Homo sapien
ctatggtgctggtaatgtcctgcat

SEQ ID NO: 175316 - DNA, 25 bp, Homo sapien
acaggcataaagatacttcggaaga

SEQ ID NO: 175317 - DNA, 25 bp, Homo sapien
gaaaggatcaatggtgcttccatgg

SEQ ID NO: 175318 - DNA, 25 bp, Homo sapien
gatgctagcctgaagcgagtttagg

SEQ ID NO: 175319 - DNA, 25 bp, Homo sapien
taagggtctggatacctgaaaggat

SEQ ID NO: 175320 - DNA, 25 bp, Homo sapien
caatggtgactgttagaatcttcaa

SEQ ID NO: 175321 - DNA, 25 bp, Homo sapien
ggttctcaagaatgagcgtgctatc

SEQ ID NO: 175322 - DNA, 25 bp, Homo sapien
taaacaccatggaagcaccattgat

SEQ ID NO: 175323 - DNA, 25 bp, Homo sapien
gaagattctaacagtcaccattgac

SEQ ID NO: 175324 - DNA, 25 bp, Homo sapien
taattcatgagaactctccactgcc

SEQ ID NO: 175325 - DNA, 25 bp, Homo sapien
gatagcacgctcattcttgagaacc

SEQ ID NO: 175326 - DNA, 25 bp, Homo sapien
gatcctttcaggtatccagaccctt

SEQ ID NO: 175327 - DNA, 25 bp, Homo sapien
gaaaacctaaactcgcttcaggcta

SEQ ID NO: 175328 - DNA, 25 bp, Homo sapien
gtgatatccttatcagtaacacagg

SEQ ID NO: 175329 - DNA, 25 bp, Homo sapien
gaggtggcttaccagattctgtaag

SEQ ID NO: 175330 - DNA, 25 bp, Homo sapien
caggctctggaaagttgataattct

SEQ ID NO: 175331 - DNA, 25 bp, Homo sapien
aacacaggctctggaaagttgataa

SEQ ID NO: 175332 - DNA, 25 bp, Homo sapien
gatatccttatcagtaacacaggct

SEQ ID NO: 175333 - DNA, 25 bp, Homo sapien
ggtggcttaccagattctgtaagtg

SEQ ID NO: 175334 - DNA, 25 bp, Homo sapien
aattatcaactttccagagcctgtg

SEQ ID NO: 175335 - DNA, 25 bp, Homo sapien
agaattatcaactttccagagcctg

SEQ ID NO: 175336 - DNA, 25 bp, Homo sapien
cacttacagaatctggtaagccacc

SEQ ID NO: 175337 - DNA, 25 bp, Homo sapien
agcctgtgttactgataaggatatc

SEQ ID NO: 175338 - DNA, 25 bp, Homo sapien
cttacagaatctggtaagccacctc

SEQ ID NO: 175339 - DNA, 25 bp, Homo sapien
cctgtgttactgataaggatatcac

SEQ ID NO: 175340 - DNA, 25 bp, Homo sapien
tgtgtttataacatgtcaagattgt

SEQ ID NO: 175341 - DNA, 25 bp, Homo sapien
ggcgtctgtccttgtgtttataaca

SEQ ID NO: 175342 - DNA, 25 bp, Homo sapien
accaagcctggctaattgttttgta

SEQ ID NO: 175343 - DNA, 25 bp, Homo sapien
accatgcctggcgtctgtccttgtg

SEQ ID NO: 175344 - DNA, 25 bp, Homo sapien
tcttactgtctagaatgctctgccc

SEQ ID NO: 175345 - DNA, 25 bp, Homo sapien
tcaagattgttcttactgtctagaa

SEQ ID NO: 175346 - DNA, 25 bp, Homo sapien
acaatcttgacatgttataaacaca

SEQ ID NO: 175347 - DNA, 25 bp, Homo sapien
tctagacagtaagaacaatcttgac

SEQ ID NO: 175348 - DNA, 25 bp, Homo sapien
gggcagagcattctagacagtaaga

SEQ ID NO: 175349 - DNA, 25 bp, Homo sapien
tgttataaacacaaggacagacgcc

SEQ ID NO: 175350 - DNA, 25 bp, Homo sapien
cacaaggacagacgccaggcatggt

SEQ ID NO: 175351 - DNA, 25 bp, Homo sapien
tacaaaacaattagccaggcttggt

SEQ ID NO: 175352 - DNA, 25 bp, Homo sapien
tgatttctcttatctcctgcatctg

SEQ ID NO: 175353 - DNA, 25 bp, Homo sapien
gatttctcttatctcctgcatctgt

SEQ ID NO: 175354 - DNA, 25 bp, Homo sapien
cagatgcaggagataagagaaatca

SEQ ID NO: 175355 - DNA, 25 bp, Homo sapien
acagatgcaggagataagagaaatc

SEQ ID NO: 175356 - DNA, 25 bp, Homo sapien
gatttctcttatctcctgcatctgt

SEQ ID NO: 175357 - DNA, 25 bp, Homo sapien
ctctgtcttctccaaaatatagcct

SEQ ID NO: 175358 - DNA, 25 bp, Homo sapien
tcagcaagctctgtcttctccaaaa

SEQ ID NO: 175359 - DNA, 25 bp, Homo sapien
gggtcccttgatttctcttatctcc

SEQ ID NO: 175360 - DNA, 25 bp, Homo sapien
gcatctgtttcatcagcaagctctg

SEQ ID NO: 175361 - DNA, 25 bp, Homo sapien
cgccatgcccggccggttgtgtttt

SEQ ID NO: 175362 - DNA, 25 bp, Homo sapien
cagatgcaggagataagagaaatca

SEQ ID NO: 175363 - DNA, 25 bp, Homo sapien
agataagagaaatcaagggaccccg

SEQ ID NO: 175364 - DNA, 25 bp, Homo sapien
gcttgctgatgaaacagatgcagga

SEQ ID NO: 175365 - DNA, 25 bp, Homo sapien
cagagcttgctgatgaaacagatgc

SEQ ID NO: 175366 - DNA, 25 bp, Homo sapien
tattttggagaagacagagcttgct

SEQ ID NO: 175367 - DNA, 25 bp, Homo sapien
aggctatattttggagaagacagag

SEQ ID NO: 175368 - DNA, 25 bp, Homo sapien
catagtactctatatcagaccaccg

SEQ ID NO: 175369 - DNA, 25 bp, Homo sapien
tatatcagaccaccgccccttgaag

SEQ ID NO: 175370 - DNA, 25 bp, Homo sapien
gaccaccgccccttgaagttatgag

SEQ ID NO: 175371 - DNA, 25 bp, Homo sapien
tagtactctatatcagaccaccgcc

SEQ ID NO: 175372 - DNA, 25 bp, Homo sapien
caccgccccttgaagttatgagaag

SEQ ID NO: 175373 - DNA, 25 bp, Homo sapien
ccgccccttgaagttatgagaagag

SEQ ID NO: 175374 - DNA, 25 bp, Homo sapien
tcttctcataacttcaaggggcggt

SEQ ID NO: 175375 - DNA, 25 bp, Homo sapien
ggcggtggtctgatatagagtacta

SEQ ID NO: 175376 - DNA, 25 bp, Homo sapien
cggtggtctgatatagagtactatg

SEQ ID NO: 175377 - DNA, 25 bp, Homo sapien
tcataacttcaaggggcggtggtct

SEQ ID NO: 175378 - DNA, 25 bp, Homo sapien
tctgatatagagtactatgaaaaca

SEQ ID NO: 175379 - DNA, 25 bp, Homo sapien
cttcaaggggcggtggtctgatata

SEQ ID NO: 175380 - DNA, 25 bp, Homo sapien
tcgggcttcatctcttgtgtgggga

SEQ ID NO: 175381 - DNA, 25 bp, Homo sapien
ttttctctcgggcttcatctcttgt

SEQ ID NO: 175382 - DNA, 25 bp, Homo sapien
ctctcgggcttcatctcttgtgtgg

SEQ ID NO: 175383 - DNA, 25 bp, Homo sapien
tttctctcgggcttcatctcttgtg

SEQ ID NO: 175384 - DNA, 25 bp, Homo sapien
tctcgggcttcatctcttgtgtggg

SEQ ID NO: 175385 - DNA, 25 bp, Homo sapien
tctctcgggcttcatctcttgtgtg

SEQ ID NO: 175386 - DNA, 25 bp, Homo sapien
acaagagatgaagcccgagagaaaa

SEQ ID NO: 175387 - DNA, 25 bp, Homo sapien
ccacacaagagatgaagcccgagag

SEQ ID NO: 175388 - DNA, 25 bp, Homo sapien
cacacaagagatgaagcccgagaga

SEQ ID NO: 175389 - DNA, 25 bp, Homo sapien
tccccacacaagagatgaagcccga

SEQ ID NO: 175390 - DNA, 25 bp, Homo sapien
cccacacaagagatgaagcccgaga

SEQ ID NO: 175391 - DNA, 25 bp, Homo sapien
cacaagagatgaagcccgagagaaa

SEQ ID NO: 175392 - DNA, 25 bp, Homo sapien
tgtcatttcgcggttcttagaagag

SEQ ID NO: 175393 - DNA, 25 bp, Homo sapien
gctccactccgcagcgtctgaagtt

SEQ ID NO: 175394 - DNA, 25 bp, Homo sapien
tagaagagtacttgagctccactcc

SEQ ID NO: 175395 - DNA, 25 bp, Homo sapien
tgtcggcgtcggtagtgtctgtcat

SEQ ID NO: 175396 - DNA, 25 bp, Homo sapien
tctgaagttgctggacgcgtacctg

SEQ ID NO: 175397 - DNA, 25 bp, Homo sapien
gacgcgtacctgctgtatatactgc

SEQ ID NO: 175398 - DNA, 25 bp, Homo sapien
gagtggagctcaagtactcttctaa

SEQ ID NO: 175399 - DNA, 25 bp, Homo sapien
gcgccccggtcagcagtatatacag

SEQ ID NO: 175400 - DNA, 25 bp, Homo sapien
tatatacagcaggtacgcgtccagc

SEQ ID NO: 175401 - DNA, 25 bp, Homo sapien
aacttcagacgctgcggagtggagc

SEQ ID NO: 175402 - DNA, 25 bp, Homo sapien
cgcgaaatgacagacactaccgacg

SEQ ID NO: 175403 - DNA, 25 bp, Homo sapien
actcttctaagaaccgcgaaatgac

SEQ ID NO: 175404 - DNA, 25 bp, Homo sapien
tgtggtcgacgggtcctccaagagt

SEQ ID NO: 175405 - DNA, 25 bp, Homo sapien
cgcggactggagtaccttgcgtgca

SEQ ID NO: 175406 - DNA, 25 bp, Homo sapien
acatccggtgtggtcgacgggtcct

SEQ ID NO: 175407 - DNA, 25 bp, Homo sapien
caaacagcacatccggtgtggtcga

SEQ ID NO: 175408 - DNA, 25 bp, Homo sapien
ggtgcgcatgcgcaaacagcacatc

SEQ ID NO: 175409 - DNA, 25 bp, Homo sapien
catgcgcaaacagcacatccggtgt

SEQ ID NO: 175410 - DNA, 25 bp, Homo sapien
actcttggaggacccgtcgaccaca

SEQ ID NO: 175411 - DNA, 25 bp, Homo sapien
gatgtgctgtttgcgcatgcgcacc

SEQ ID NO: 175412 - DNA, 25 bp, Homo sapien
cacaccggatgtgctgtttgcgcat

SEQ ID NO: 175413 - DNA, 25 bp, Homo sapien
agtccgcgccccaaactcttggagg

SEQ ID NO: 175414 - DNA, 25 bp, Homo sapien
actgcacgcaaggtactccagtccg

SEQ ID NO: 175415 - DNA, 25 bp, Homo sapien
ccgtcgaccacaccggatgtgctgt

SEQ ID NO: 175416 - DNA, 25 bp, Homo sapien
tctcgtggagcaccagtatctgcgg

SEQ ID NO: 175417 - DNA, 25 bp, Homo sapien
taaccaggcttcatgactccagaat

SEQ ID NO: 175418 - DNA, 25 bp, Homo sapien
tctgcggtgcttcctaaaaatgcgg

SEQ ID NO: 175419 - DNA, 25 bp, Homo sapien
gttctcacaagatacaagccagagg

SEQ ID NO: 175420 - DNA, 25 bp, Homo sapien
tgattgaaaacacagcaagggcccc

SEQ ID NO: 175421 - DNA, 25 bp, Homo sapien
ccatgttgatgtgtgagatccccga

SEQ ID NO: 175422 - DNA, 25 bp, Homo sapien
ttaccggtacaagcaaattcagcag

SEQ ID NO: 175423 - DNA, 25 bp, Homo sapien
tccgcccggcaaagagaagatgtgg

SEQ ID NO: 175424 - DNA, 25 bp, Homo sapien
cagtcagattatccatccatggatc

SEQ ID NO: 175425 - DNA, 25 bp, Homo sapien
tgggttatgccttcagtcagattat

SEQ ID NO: 175426 - DNA, 25 bp, Homo sapien
tgtccctgcaggtgatgggttatgc

SEQ ID NO: 175427 - DNA, 25 bp, Homo sapien
cctgcaggtgatgggttatgccttc

SEQ ID NO: 175428 - DNA, 25 bp, Homo sapien
ttacagaatagacacatggtggaga

SEQ ID NO: 175429 - DNA, 25 bp, Homo sapien
tggtggtctttgttggaggataatc

SEQ ID NO: 175430 - DNA, 25 bp, Homo sapien
cttggtggtctttgttggaggataa

SEQ ID NO: 175431 - DNA, 25 bp, Homo sapien
tggtctttgttggaggataatctgc

SEQ ID NO: 175432 - DNA, 25 bp, Homo sapien
tcagagtatatataaaggggttgag

SEQ ID NO: 175433 - DNA, 25 bp, Homo sapien
cctcagagtatatataaaggggttg

SEQ ID NO: 175434 - DNA, 25 bp, Homo sapien
cacatccctgaggactccctgcact

SEQ ID NO: 175435 - DNA, 25 bp, Homo sapien
cacacatccctgaggactccctgca

SEQ ID NO: 175436 - DNA, 25 bp, Homo sapien
taggccacgaggactatgcagcaga

SEQ ID NO: 175437 - DNA, 25 bp, Homo sapien
gaaggaatgcgcactatggtcaaga

SEQ ID NO: 175438 - DNA, 25 bp, Homo sapien
catcagctcgatggcagtggtgtct

SEQ ID NO: 175439 - DNA, 25 bp, Homo sapien
caagagaatacaacggtcccaatgc

SEQ ID NO: 175440 - DNA, 25 bp, Homo sapien
gcagcagatggtggcataacggtca

SEQ ID NO: 175441 - DNA, 25 bp, Homo sapien
ggaggaactcaactgtgcccaagaa

SEQ ID NO: 175442 - DNA, 25 bp, Homo sapien
tccaggatagagaggttgcacaaga

SEQ ID NO: 175443 - DNA, 25 bp, Homo sapien
tagcactgggtgatacatccggcaa

SEQ ID NO: 175444 - DNA, 25 bp, Homo sapien
aaaccccagcagaacaaactcagtc

SEQ ID NO: 175445 - DNA, 25 bp, Homo sapien
aaaaccccagcagaacaaactcagt

SEQ ID NO: 175446 - DNA, 25 bp, Homo sapien
gaaaaccccagcagaacaaactcag

SEQ ID NO: 175447 - DNA, 25 bp, Homo sapien
ggaaaaccccagcagaacaaactca

SEQ ID NO: 175448 - DNA, 25 bp, Homo sapien
cgcacgccgccacgcctcactggtt

SEQ ID NO: 175449 - DNA, 25 bp, Homo sapien
tgagtgcctgcgattgcaggcgcac

SEQ ID NO: 175450 - DNA, 25 bp, Homo sapien
aggcgcacgccgccacgcctcactg

SEQ ID NO: 175451 - DNA, 25 bp, Homo sapien
ctgagtgcctgcgattgcaggcgca

SEQ ID NO: 175452 - DNA, 25 bp, Homo sapien
tgctgccacctaggatcttccacgg

SEQ ID NO: 175453 - DNA, 25 bp, Homo sapien
tagctgtgacctcttgtccgacgag

SEQ ID NO: 175454 - DNA, 25 bp, Homo sapien
cacggctcagtctgttcacctggga

SEQ ID NO: 175455 - DNA, 25 bp, Homo sapien
tatcttgaccaaaaagccacagtgc

SEQ ID NO: 175456 - DNA, 25 bp, Homo sapien
tctctacatgggaatttcggttgcc

SEQ ID NO: 175457 - DNA, 25 bp, Homo sapien
atatctggttggctacaaagtgtga

SEQ ID NO: 175458 - DNA, 25 bp, Homo sapien
taatcaactattctccccttggaca

SEQ ID NO: 175459 - DNA, 25 bp, Homo sapien
tacatgggaatttcggttgcccagg

SEQ ID NO: 175460 - DNA, 25 bp, Homo sapien
ccttcctcaccagctcgtggcagac

SEQ ID NO: 175461 - DNA, 25 bp, Homo sapien
ttcctcaccagctcgtggcagactc

SEQ ID NO: 175462 - DNA, 25 bp, Homo sapien
cagtgccttcctcaccagctcgtgg

SEQ ID NO: 175463 - DNA, 25 bp, Homo sapien
tgccttcctcaccagctcgtggcag

SEQ ID NO: 175464 - DNA, 25 bp, Homo sapien
cacggtgcacacggctcctgcccat

SEQ ID NO: 175465 - DNA, 25 bp, Homo sapien
gcacacggctcctgcccatagccat

SEQ ID NO: 175466 - DNA, 25 bp, Homo sapien
gtgcacacggctcctgcccatagcc

SEQ ID NO: 175467 - DNA, 25 bp, Homo sapien
cggtgcacacggctcctgcccatag

SEQ ID NO: 175468 - DNA, 25 bp, Homo sapien
gcacaagctgagtttgtcagaggca

SEQ ID NO: 175469 - DNA, 25 bp, Homo sapien
cattttcattgtctgggatgctcat

SEQ ID NO: 175470 - DNA, 25 bp, Homo sapien
caaccataaagaacagtcctgcaaa

SEQ ID NO: 175471 - DNA, 25 bp, Homo sapien
caaagttactgctgctaaattttgt

SEQ ID NO: 175472 - DNA, 25 bp, Homo sapien
cctgcccatggaatccaggatacat

SEQ ID NO: 175473 - DNA, 25 bp, Homo sapien
tttaatgaaagcttgtatattagat

SEQ ID NO: 175474 - DNA, 25 bp, Homo sapien
tctttttcatttcaagttttaatga

SEQ ID NO: 175475 - DNA, 25 bp, Homo sapien
aatgaaagcttgtatattagattat

SEQ ID NO: 175476 - DNA, 25 bp, Homo sapien
tttcatttcaagttttaatgaaagc

SEQ ID NO: 175477 - DNA, 25 bp, Homo sapien
attgtttcttccttgtatttgccct

SEQ ID NO: 175478 - DNA, 25 bp, Homo sapien
cattcctgcatcttctctattgttt

SEQ ID NO: 175479 - DNA, 25 bp, Homo sapien
tcattcctgcatcttctctattgtt

SEQ ID NO: 175480 - DNA, 25 bp, Homo sapien
tctattgtttcttccttgtatttgc

SEQ ID NO: 175481 - DNA, 25 bp, Homo sapien
tgcagtctttgtcccgttttagccc

SEQ ID NO: 175482 - DNA, 25 bp, Homo sapien
tccattcaaggacatttttgcagtc

SEQ ID NO: 175483 - DNA, 25 bp, Homo sapien
tcctttccattcaaggacatttttg

SEQ ID NO: 175484 - DNA, 25 bp, Homo sapien
ctacttggtgagattttcctttcca

SEQ ID NO: 175485 - DNA, 25 bp, Homo sapien
gggtgaatgcttacatggatagttg

SEQ ID NO: 175486 - DNA, 25 bp, Homo sapien
tgaatgcttacatggatagttgtgc

SEQ ID NO: 175487 - DNA, 25 bp, Homo sapien
aatgcttacatggatagttgtgcca

SEQ ID NO: 175488 - DNA, 25 bp, Homo sapien
ttacatggatagttgtgccattagc

SEQ ID NO: 175489 - DNA, 25 bp, Homo sapien
tcctgcaaatgtgggaaggttcact

SEQ ID NO: 175490 - DNA, 25 bp, Homo sapien
cagatgggcatggatcaaacgttgt

SEQ ID NO: 175491 - DNA, 25 bp, Homo sapien
agaggaagacattgtcttcctgcaa

SEQ ID NO: 175492 - DNA, 25 bp, Homo sapien
gcagttcttgctttggtcagaagtc

SEQ ID NO: 175493 - DNA, 25 bp, Homo sapien
gaggggttcctgggggctcagctgg

SEQ ID NO: 175494 - DNA, 25 bp, Homo sapien
aggaggggttcctgggggctcagct

SEQ ID NO: 175495 - DNA, 25 bp, Homo sapien
gcaggaggggttcctgggggctcag

SEQ ID NO: 175496 - DNA, 25 bp, Homo sapien
ctagatggctgtgagaggcaggagg

SEQ ID NO: 175497 - DNA, 25 bp, Homo sapien
cccaggcaggacctccctagtggta

SEQ ID NO: 175498 - DNA, 25 bp, Homo sapien
caggacctccctagtggtagcttcc

SEQ ID NO: 175499 - DNA, 25 bp, Homo sapien
caggcaggacctccctagtggtagc

SEQ ID NO: 175500 - DNA, 25 bp, Homo sapien
ggcaggacctccctagtggtagctt

SEQ ID NO: 175501 - DNA, 25 bp, Homo sapien
gtcagctggtagagtacttggtccc

SEQ ID NO: 175502 - DNA, 25 bp, Homo sapien
tgactccccattgggagtcacagcc

SEQ ID NO: 175503 - DNA, 25 bp, Homo sapien
tgcccttcctcggagagttagctgc

SEQ ID NO: 175504 - DNA, 25 bp, Homo sapien
catgaataagaggagtggttccatc

SEQ ID NO: 175505 - DNA, 25 bp, Homo sapien
tatagcaatctgctccagtatgtgg

SEQ ID NO: 175506 - DNA, 25 bp, Homo sapien
cagggattcagagatagcctccacc

SEQ ID NO: 175507 - DNA, 25 bp, Homo sapien
tactaatctgtagtcctaacgaggc

SEQ ID NO: 175508 - DNA, 25 bp, Homo sapien
caggctctagctagggacttgtcca

SEQ ID NO: 175509 - DNA, 25 bp, Homo sapien
acaacatgcgaccaaagtggttggg

SEQ ID NO: 175510 - DNA, 25 bp, Homo sapien
tgccaaggctaaagacgcacctgtg

SEQ ID NO: 175511 - DNA, 25 bp, Homo sapien
agatttaacaattctctgcccagca

SEQ ID NO: 175512 - DNA, 25 bp, Homo sapien
aggccctgacaacatgcgaccaaag

SEQ ID NO: 175513 - DNA, 25 bp, Homo sapien
tgcgcggctaatttgttttagttat

SEQ ID NO: 175514 - DNA, 25 bp, Homo sapien
acttctgagctcaagggactctccc

SEQ ID NO: 175515 - DNA, 25 bp, Homo sapien
gttgttccccaagccagagtgcagt

SEQ ID NO: 175516 - DNA, 25 bp, Homo sapien
accatgcgcggctaatttgttttag

SEQ ID NO: 175517 - DNA, 25 bp, Homo sapien
aagcatccaggtagcgggcttctga

SEQ ID NO: 175518 - DNA, 25 bp, Homo sapien
aaggttttatcctgcacttgaagca

SEQ ID NO: 175519 - DNA, 25 bp, Homo sapien
caggttgaaagtgttactatcagta

SEQ ID NO: 175520 - DNA, 25 bp, Homo sapien
cttaagatctgtgttggtcaatgct

SEQ ID NO: 175521 - DNA, 25 bp, Homo sapien
gagaaatcagtgtcacacaacagtc

SEQ ID NO: 175522 - DNA, 25 bp, Homo sapien
ggatcagccagtacaaatatgagag

SEQ ID NO: 175523 - DNA, 25 bp, Homo sapien
tgagagaaatcagtgtcacacaaca

SEQ ID NO: 175524 - DNA, 25 bp, Homo sapien
gatcagccagtacaaatatgagaga

SEQ ID NO: 175525 - DNA, 25 bp, Homo sapien
aaaaaagaatattaggccccatgag

SEQ ID NO: 175526 - DNA, 25 bp, Homo sapien
gattgcctgattaagcccaaacagc

SEQ ID NO: 175527 - DNA, 25 bp, Homo sapien
cacggagacgtgatattacaaacaa

SEQ ID NO: 175528 - DNA, 25 bp, Homo sapien
gccccatgagggataaatattgact

SEQ ID NO: 175529 - DNA, 25 bp, Homo sapien
tactctgcctgtgttctataaaggg

SEQ ID NO: 175530 - DNA, 25 bp, Homo sapien
cagtttgctgaatatgttaagctca

SEQ ID NO: 175531 - DNA, 25 bp, Homo sapien
cattattgatacctacccctcagaa

SEQ ID NO: 175532 - DNA, 25 bp, Homo sapien
tctgtttaccctacagtttgctgaa

SEQ ID NO: 175533 - DNA, 25 bp, Homo sapien
ccatgccggcccaacataactttta

SEQ ID NO: 175534 - DNA, 25 bp, Homo sapien
tcttaccatgttaccaaggttggtc

SEQ ID NO: 175535 - DNA, 25 bp, Homo sapien
gccaccatgccggcccaacataact

SEQ ID NO: 175536 - DNA, 25 bp, Homo sapien
cttaccatgttaccaaggttggtct

SEQ ID NO: 175537 - DNA, 25 bp, Homo sapien
gacaggcccaatcagactcaagaga

SEQ ID NO: 175538 - DNA, 25 bp, Homo sapien
caaaagttggtgttgactgctggct

SEQ ID NO: 175539 - DNA, 25 bp, Homo sapien
tgtaagatagtcaccctgccaagtg

SEQ ID NO: 175540 - DNA, 25 bp, Homo sapien
tcttaaggcatagtcccaaactggc

SEQ ID NO: 175541 - DNA, 25 bp, Homo sapien
gatgatagctaacccagctcttcaa

SEQ ID NO: 175542 - DNA, 25 bp, Homo sapien
gcttacgatgatagctaacccagct

SEQ ID NO: 175543 - DNA, 25 bp, Homo sapien
gtttacgccatcactaacgatgata

SEQ ID NO: 175544 - DNA, 25 bp, Homo sapien
aacgatgatagcttacgatgatagc

SEQ ID NO: 175545 - DNA, 25 bp, Homo sapien
ccagtcctaggaactgtggcacaca

SEQ ID NO: 175546 - DNA, 25 bp, Homo sapien
gcaaaccaaagtcaaagtatccctg

SEQ ID NO: 175547 - DNA, 25 bp, Homo sapien
agtatccctggcacgacacacttgg

SEQ ID NO: 175548 - DNA, 25 bp, Homo sapien
tgttctgtgcgcattctggcaggaa

SEQ ID NO: 175549 - DNA, 25 bp, Homo sapien
ggaacataaacttttattgtcatcc

SEQ ID NO: 175550 - DNA, 25 bp, Homo sapien
aggaacataaacttttattgtcatc

SEQ ID NO: 175551 - DNA, 25 bp, Homo sapien
gaacataaacttttattgtcatcca

SEQ ID NO: 175552 - DNA, 25 bp, Homo sapien
caggaaattggagcattgtgggccc

SEQ ID NO: 175553 - DNA, 25 bp, Homo sapien
tcaaaggttgaagctgcctaggcca

SEQ ID NO: 175554 - DNA, 25 bp, Homo sapien
aaagaggagtaggtaggcacaccca

SEQ ID NO: 175555 - DNA, 25 bp, Homo sapien
gacaggtgcctccaaagaagtgagc

SEQ ID NO: 175556 - DNA, 25 bp, Homo sapien
ttgggatcccgttgcttgggcatct

SEQ ID NO: 175557 - DNA, 25 bp, Homo sapien
tagatttgggatcccgttgcttggg

SEQ ID NO: 175558 - DNA, 25 bp, Homo sapien
ttagttagatttgggatcccgttgc

SEQ ID NO: 175559 - DNA, 25 bp, Homo sapien
atttgggatcccgttgcttgggcat

SEQ ID NO: 175560 - DNA, 25 bp, Homo sapien
cagcaactgacatacacaggacctg

SEQ ID NO: 175561 - DNA, 25 bp, Homo sapien
agcaactgacatacacaggacctgg

SEQ ID NO: 175562 - DNA, 25 bp, Homo sapien
ccaagctctgcaatagctgagcgga

SEQ ID NO: 175563 - DNA, 25 bp, Homo sapien
gcggacttaaggatgcacggcttac

SEQ ID NO: 175564 - DNA, 25 bp, Homo sapien
tggaggctggatttacagaaaaagg

SEQ ID NO: 175565 - DNA, 25 bp, Homo sapien
taagaaggggctaaggcaaagatgt

SEQ ID NO: 175566 - DNA, 25 bp, Homo sapien
cacgatccttcggaggtaaagcggt

SEQ ID NO: 175567 - DNA, 25 bp, Homo sapien
ggcagaagacaatcgggaagaaaac

SEQ ID NO: 175568 - DNA, 25 bp, Homo sapien
cgatgagggagttgatagtatcact

SEQ ID NO: 175569 - DNA, 25 bp, Homo sapien
taaagcggtcgcttatgttctggca

SEQ ID NO: 175570 - DNA, 25 bp, Homo sapien
acgaggtcgatcaggctccttccag

SEQ ID NO: 175571 - DNA, 25 bp, Homo sapien
aagatgtcttccacgcacaagtaga

SEQ ID NO: 175572 - DNA, 25 bp, Homo sapien
aatagaaagccccacaaagaaccag

SEQ ID NO: 175573 - DNA, 25 bp, Homo sapien
tccttccagcgcagataaagctgac

SEQ ID NO: 175574 - DNA, 25 bp, Homo sapien
ctaaagtttcccccgcaatctggct

SEQ ID NO: 175575 - DNA, 25 bp, Homo sapien
cagtctcatccttgagttcacttac

SEQ ID NO: 175576 - DNA, 25 bp, Homo sapien
aggaagctagaacagtcgcttctgc

SEQ ID NO: 175577 - DNA, 25 bp, Homo sapien
gaacagtcgcttctgctgttactaa

SEQ ID NO: 175578 - DNA, 25 bp, Homo sapien
catggatcatgcagatggcatcagg

SEQ ID NO: 175579 - DNA, 25 bp, Homo sapien
cagagaaggcactggtgtgaaccgc

SEQ ID NO: 175580 - DNA, 25 bp, Homo sapien
cactggtgtgaaccgctcaacatgg

SEQ ID NO: 175581 - DNA, 25 bp, Homo sapien
tgtgaaccgctcaacatggatcatg

SEQ ID NO: 175582 - DNA, 25 bp, Homo sapien
aatgcaactgacagtggaattatcc

SEQ ID NO: 175583 - DNA, 25 bp, Homo sapien
tgcaactgacagtggaattatccag

SEQ ID NO: 175584 - DNA, 25 bp, Homo sapien
gccaccaaaacaggataatgcaact

SEQ ID NO: 175585 - DNA, 25 bp, Homo sapien
aagcagccacaatggaggcattgag

SEQ ID NO: 175586 - DNA, 25 bp, Homo sapien
cagcaacagcatcactggccaagat

SEQ ID NO: 175587 - DNA, 25 bp, Homo sapien
catgtctagcacagtataataggcc

SEQ ID NO: 175588 - DNA, 25 bp, Homo sapien
cactggccaagatgtctctcatgtc

SEQ ID NO: 175589 - DNA, 25 bp, Homo sapien
gatggtgacaatgggcatggagatg

SEQ ID NO: 175590 - DNA, 25 bp, Homo sapien
ttcagtgacatagttgagggtgtcc

SEQ ID NO: 175591 - DNA, 25 bp, Homo sapien
tcagtgacatagttgagggtgtccc

SEQ ID NO: 175592 - DNA, 25 bp, Homo sapien
gtgacatagttgagggtgtcccagc

SEQ ID NO: 175593 - DNA, 25 bp, Homo sapien
cagtgacatagttgagggtgtccca

SEQ ID NO: 175594 - DNA, 25 bp, Homo sapien
agaacagagctgagtacagtgccag

SEQ ID NO: 175595 - DNA, 25 bp, Homo sapien
gagctgagtacagtgccagggcaat

SEQ ID NO: 175596 - DNA, 25 bp, Homo sapien
cagagctgagtacagtgccagggca

SEQ ID NO: 175597 - DNA, 25 bp, Homo sapien
gaacagagctgagtacagtgccagg

SEQ ID NO: 175598 - DNA, 25 bp, Homo sapien
ctgcaaatgatgaaccctcaaagga

SEQ ID NO: 175599 - DNA, 25 bp, Homo sapien
gatgaaccctcaaaggaattctcaa

SEQ ID NO: 175600 - DNA, 25 bp, Homo sapien
gaattctcaaaatgagtagaggctc

SEQ ID NO: 175601 - DNA, 25 bp, Homo sapien
aatgatgaaccctcaaaggaattct

SEQ ID NO: 175602 - DNA, 25 bp, Homo sapien
tgaaaatatcttgtaccagggttcc

SEQ ID NO: 175603 - DNA, 25 bp, Homo sapien
gccaatactttagcataggtgaaaa

SEQ ID NO: 175604 - DNA, 25 bp, Homo sapien
gatgaccgcgatcagtgccaatact

SEQ ID NO: 175605 - DNA, 25 bp, Homo sapien
aacaatgcctgcaacgatgaccgcg

SEQ ID NO: 175606 - DNA, 25 bp, Homo sapien
ttaatccctattgcttctctacttc

SEQ ID NO: 175607 - DNA, 25 bp, Homo sapien
attttaatccctattgcttctctac

SEQ ID NO: 175608 - DNA, 25 bp, Homo sapien
taatccctattgcttctctacttct

SEQ ID NO: 175609 - DNA, 25 bp, Homo sapien
ttatagggaagagccatggcacctg

SEQ ID NO: 175610 - DNA, 25 bp, Homo sapien
gtactgagcacagaaggctcagttt

SEQ ID NO: 175611 - DNA, 25 bp, Homo sapien
tggacacctatcctcttgctgagag

SEQ ID NO: 175612 - DNA, 25 bp, Homo sapien
aaaaatgtcctggtagtgtcctgaa

SEQ ID NO: 175613 - DNA, 25 bp, Homo sapien
cacctgtgaacagtgggccaaaaca

SEQ ID NO: 175614 - DNA, 25 bp, Homo sapien
caactaggtctcagtgtgggcaagt

SEQ ID NO: 175615 - DNA, 25 bp, Homo sapien
ctcccaccccacattccaaccatac

SEQ ID NO: 175616 - DNA, 25 bp, Homo sapien
caaaccaacgacctggaattctctg

SEQ ID NO: 175617 - DNA, 25 bp, Homo sapien
tctcccaccccacattccaaccata

SEQ ID NO: 175618 - DNA, 25 bp, Homo sapien
ccaaaccaacgacctggaattctct

SEQ ID NO: 175619 - DNA, 25 bp, Homo sapien
tccacacctttgcacatgcagtctc

SEQ ID NO: 175620 - DNA, 25 bp, Homo sapien
acctccacacctttgcacatgcagt

SEQ ID NO: 175621 - DNA, 25 bp, Homo sapien
cttgcacctccacacctttgcacat

SEQ ID NO: 175622 - DNA, 25 bp, Homo sapien
cacctccacacctttgcacatgcag

SEQ ID NO: 175623 - DNA, 25 bp, Homo sapien
cagatttcttaatggtggtgcccag

SEQ ID NO: 175624 - DNA, 25 bp, Homo sapien
cactgtatatgagcacacccttggg

SEQ ID NO: 175625 - DNA, 25 bp, Homo sapien
tggtgcccagttccgcataacaaag

SEQ ID NO: 175626 - DNA, 25 bp, Homo sapien
ggatataggcatagctggccccaga

SEQ ID NO: 175627 - DNA, 25 bp, Homo sapien
gggaggccacttcatactcagtgct

SEQ ID NO: 175628 - DNA, 25 bp, Homo sapien
ggccacttcatactcagtgctgtca

SEQ ID NO: 175629 - DNA, 25 bp, Homo sapien
ggctggccccatcacccaaagggga

SEQ ID NO: 175630 - DNA, 25 bp, Homo sapien
cttcatactcagtgctgtcaaccat

SEQ ID NO: 175631 - DNA, 25 bp, Homo sapien
ggagaggaaacccttcaccagcttc

SEQ ID NO: 175632 - DNA, 25 bp, Homo sapien
gagaggaaacccttcaccagcttcc

SEQ ID NO: 175633 - DNA, 25 bp, Homo sapien
ccgactcaccaaatagagaactaaa

SEQ ID NO: 175634 - DNA, 25 bp, Homo sapien
cagggatcacctgtgctgaggtaca

SEQ ID NO: 175635 - DNA, 25 bp, Homo sapien
aaataactataatggcttgaccccg

SEQ ID NO: 175636 - DNA, 25 bp, Homo sapien
ggaactgaccctaccagcagctaat

SEQ ID NO: 175637 - DNA, 25 bp, Homo sapien
tgaggtacaacattaggaactgacc

SEQ ID NO: 175638 - DNA, 25 bp, Homo sapien
ttggtcctggatataagcaggttct

SEQ ID NO: 175639 - DNA, 25 bp, Homo sapien
aggttctcacggcagtgtgagcagc

SEQ ID NO: 175640 - DNA, 25 bp, Homo sapien
cctggatataagcaggttctcacgg

SEQ ID NO: 175641 - DNA, 25 bp, Homo sapien
gcaggttctcacggcagtgtgagca

SEQ ID NO: 175642 - DNA, 25 bp, Homo sapien
gcagctaggagctcttggctcagca

SEQ ID NO: 175643 - DNA, 25 bp, Homo sapien
taagaaggtgctctctcaggaatct

SEQ ID NO: 175644 - DNA, 25 bp, Homo sapien
tgagtgcagtatctgtagccctggg

SEQ ID NO: 175645 - DNA, 25 bp, Homo sapien
gagtattaagcaaccatctgggtcc

SEQ ID NO: 175646 - DNA, 25 bp, Homo sapien
gaggaaggttgcacagtgtgacaca

SEQ ID NO: 175647 - DNA, 25 bp, Homo sapien
agggaggaaggttgcacagtgtgac

SEQ ID NO: 175648 - DNA, 25 bp, Homo sapien
aaggttgcacagtgtgacacaaagg

SEQ ID NO: 175649 - DNA, 25 bp, Homo sapien
ccaagcatttaagaaagggaggaag

SEQ ID NO: 175650 - DNA, 25 bp, Homo sapien
gttaggagaaccaagcgtatcgctc

SEQ ID NO: 175651 - DNA, 25 bp, Homo sapien
gaaccaagcgtatcgctcatgctgc

SEQ ID NO: 175652 - DNA, 25 bp, Homo sapien
ggaaggtgctagttaggagaaccaa

SEQ ID NO: 175653 - DNA, 25 bp, Homo sapien
aagcgtatcgctcatgctgcaacag

SEQ ID NO: 175654 - DNA, 25 bp, Homo sapien
ctgaagtcttagcagcagcgcggac

SEQ ID NO: 175655 - DNA, 25 bp, Homo sapien
ccccggagcgtctttcatctgaagt

SEQ ID NO: 175656 - DNA, 25 bp, Homo sapien
catctgaagtcttagcagcagcgcg

SEQ ID NO: 175657 - DNA, 25 bp, Homo sapien
cggagtccccggagcgtctttcatc

SEQ ID NO: 175658 - DNA, 25 bp, Homo sapien
gtagtccgaagtcatgatttgccca

SEQ ID NO: 175659 - DNA, 25 bp, Homo sapien
catttaacacctaatttagccagta

SEQ ID NO: 175660 - DNA, 25 bp, Homo sapien
ccagtactgatatagcagagatttg

SEQ ID NO: 175661 - DNA, 25 bp, Homo sapien
catcttgaagctcaatcatttaaca

SEQ ID NO: 175662 - DNA, 25 bp, Homo sapien
cggagccgtgattgaaaacccagat

SEQ ID NO: 175663 - DNA, 25 bp, Homo sapien
gatggcggagccgtgattgaaaacc

SEQ ID NO: 175664 - DNA, 25 bp, Homo sapien
tctccttccgtacgatgacccaaga

SEQ ID NO: 175665 - DNA, 25 bp, Homo sapien
tccttccgtacgatgacccaagatg

SEQ ID NO: 175666 - DNA, 25 bp, Homo sapien
aactacttgggttagatactgcatc

SEQ ID NO: 175667 - DNA, 25 bp, Homo sapien
caatgtaaagcatgtggcatacaca

SEQ ID NO: 175668 - DNA, 25 bp, Homo sapien
taagtaatagtattcagggccatgc

SEQ ID NO: 175669 - DNA, 25 bp, Homo sapien
tctaactgggacaaagcatggactt

SEQ ID NO: 175670 - DNA, 25 bp, Homo sapien
ccgacagcggtctaggaattcaagt

SEQ ID NO: 175671 - DNA, 25 bp, Homo sapien
ccagttcgccgactaagcagaagaa

SEQ ID NO: 175672 - DNA, 25 bp, Homo sapien
ggattcaggctaaaacaaccacgtc

SEQ ID NO: 175673 - DNA, 25 bp, Homo sapien
caagttcagtgcctaccgaagacaa

SEQ ID NO: 175674 - DNA, 25 bp, Homo sapien
ctaatcttgttgagggtagagaccc

SEQ ID NO: 175675 - DNA, 25 bp, Homo sapien
agggtcttcgttgctcagtcagtca

SEQ ID NO: 175676 - DNA, 25 bp, Homo sapien
tcacagttagaagagctgaaaccag

SEQ ID NO: 175677 - DNA, 25 bp, Homo sapien
cagtcagtcaagttcctcggagatc

SEQ ID NO: 175678 - DNA, 25 bp, Homo sapien
tgggggggcagaggcgtctgacccc

SEQ ID NO: 175679 - DNA, 25 bp, Homo sapien
gctgggtcggtgccctctaaggaca

SEQ ID NO: 175680 - DNA, 25 bp, Homo sapien
gcagaggcgtctgaccccaggaacc

SEQ ID NO: 175681 - DNA, 25 bp, Homo sapien
taaggacaattttgaccttgttcaa

SEQ ID NO: 175682 - DNA, 25 bp, Homo sapien
tgagaagggggaaaagaacagaaca

SEQ ID NO: 175683 - DNA, 25 bp, Homo sapien
gcaatcagttgagataacacactac

SEQ ID NO: 175684 - DNA, 25 bp, Homo sapien
ctgtgagcaatcagttgagataaca

SEQ ID NO: 175685 - DNA, 25 bp, Homo sapien
gtgagcaatcagttgagataacaca

SEQ ID NO: 175686 - DNA, 25 bp, Homo sapien
aagaatatagccagtgctcagctga

SEQ ID NO: 175687 - DNA, 25 bp, Homo sapien
tcagctgaaacttccgtgaccactt

SEQ ID NO: 175688 - DNA, 25 bp, Homo sapien
gatgatgattatgcccaacagcaca

SEQ ID NO: 175689 - DNA, 25 bp, Homo sapien
tttattcagcattccagaccatggg

SEQ ID NO: 175690 - DNA, 25 bp, Homo sapien
gacatctagcttgagtcctgcgcat

SEQ ID NO: 175691 - DNA, 25 bp, Homo sapien
tgcaaacggtcctcagctcagatag

SEQ ID NO: 175692 - DNA, 25 bp, Homo sapien
cattcattgcatgtcctgcctgaga

SEQ ID NO: 175693 - DNA, 25 bp, Homo sapien
tgcgcatctccaaaggacagaggcc

SEQ ID NO: 175694 - DNA, 25 bp, Homo sapien
agggcttcctgctctcctacagcca

SEQ ID NO: 175695 - DNA, 25 bp, Homo sapien
cagagcacccatgggccagggcttc

SEQ ID NO: 175696 - DNA, 25 bp, Homo sapien
ccagggcttcctgctctcctacagc

SEQ ID NO: 175697 - DNA, 25 bp, Homo sapien
ggcttcctgctctcctacagccaag

SEQ ID NO: 175698 - DNA, 25 bp, Homo sapien
tgcagtgcatgtgtatgacggccct

SEQ ID NO: 175699 - DNA, 25 bp, Homo sapien
gatgaagcaggttgcagctcagacc

SEQ ID NO: 175700 - DNA, 25 bp, Homo sapien
tggatatacacacctagcctcagtc

SEQ ID NO: 175701 - DNA, 25 bp, Homo sapien
tgtgtatctgctgtccagcgctgtg

SEQ ID NO: 175702 - DNA, 25 bp, Homo sapien
caaaagtggccttaagcaccggaat

SEQ ID NO: 175703 - DNA, 25 bp, Homo sapien
tgaggacgatgtgctactggtgcca

SEQ ID NO: 175704 - DNA, 25 bp, Homo sapien
taaagttaagtgtccctcaggcagg

SEQ ID NO: 175705 - DNA, 25 bp, Homo sapien
gcctcccgttgaccctatgtagctg

SEQ ID NO: 175706 - DNA, 25 bp, Homo sapien
gatagataccaatatccaaggtgct

SEQ ID NO: 175707 - DNA, 25 bp, Homo sapien
ccaaggtgcttggtcttagcggtgt

SEQ ID NO: 175708 - DNA, 25 bp, Homo sapien
cagcatgagatagggttcaggctgt

SEQ ID NO: 175709 - DNA, 25 bp, Homo sapien
ccacgttaaggctcttggtgggaag

SEQ ID NO: 175710 - DNA, 25 bp, Homo sapien
cctggatacgggcaagtgcacaacc

SEQ ID NO: 175711 - DNA, 25 bp, Homo sapien
taactgaggatcattcacagaaacc

SEQ ID NO: 175712 - DNA, 25 bp, Homo sapien
taaaatgttacacttgtcttcagca

SEQ ID NO: 175713 - DNA, 25 bp, Homo sapien
gcccgagcaatagggtgagaccctc

SEQ ID NO: 175714 - DNA, 25 bp, Homo sapien
acactgatgcacacggacctggaca

SEQ ID NO: 175715 - DNA, 25 bp, Homo sapien
acgcacactgatgcacacggacctg

SEQ ID NO: 175716 - DNA, 25 bp, Homo sapien
atgcacacggacctggacacagaca

SEQ ID NO: 175717 - DNA, 25 bp, Homo sapien
cacacggacctggacacagacatgg

SEQ ID NO: 175718 - DNA, 25 bp, Homo sapien
tatcctcgttggaaacaagagcgac

SEQ ID NO: 175719 - DNA, 25 bp, Homo sapien
ttctcagtcaccgaccgacggagtt

SEQ ID NO: 175720 - DNA, 25 bp, Homo sapien
cacaaacactctgggtagggagatt

SEQ ID NO: 175721 - DNA, 25 bp, Homo sapien
cactggagggtgtgtatcctgaaca

SEQ ID NO: 175722 - DNA, 25 bp, Homo sapien
tcggtgctctgagccgcggtcgcca

SEQ ID NO: 175723 - DNA, 25 bp, Homo sapien
tggccactgcggtcgccatggtcac

SEQ ID NO: 175724 - DNA, 25 bp, Homo sapien
ctctcggtgctctgagccgcggtcg

SEQ ID NO: 175725 - DNA, 25 bp, Homo sapien
ccatggccactgcggtcgccatggt

SEQ ID NO: 175726 - DNA, 25 bp, Homo sapien
gaaaagtgcttcgtagactccttga

SEQ ID NO: 175727 - DNA, 25 bp, Homo sapien
catctggtgcggcatgtgtccactt

SEQ ID NO: 175728 - DNA, 25 bp, Homo sapien
tgaacatgcctcacctttaagagag

SEQ ID NO: 175729 - DNA, 25 bp, Homo sapien
ttcagataatgagcagtggcaaccc

SEQ ID NO: 175730 - DNA, 25 bp, Homo sapien
tgggcagcccaccacatgaggaaaa

SEQ ID NO: 175731 - DNA, 25 bp, Homo sapien
gatggtgcagtcgtcaaaggacaca

SEQ ID NO: 175732 - DNA, 25 bp, Homo sapien
caatatgccaatcagtgtgccgggc

SEQ ID NO: 175733 - DNA, 25 bp, Homo sapien
tatggtctacaaagtccaacgtgcc

SEQ ID NO: 175734 - DNA, 25 bp, Homo sapien
cgtgactattgccttcacctggttg

SEQ ID NO: 175735 - DNA, 25 bp, Homo sapien
tcagaccggaattcctttcctgcat

SEQ ID NO: 175736 - DNA, 25 bp, Homo sapien
gatatgcagcttctcagaccggaat

SEQ ID NO: 175737 - DNA, 25 bp, Homo sapien
tttcctgcatccagctcgtgactat

SEQ ID NO: 175738 - DNA, 25 bp, Homo sapien
aaggccttgtcttccatggtggtgc

SEQ ID NO: 175739 - DNA, 25 bp, Homo sapien
gagtctacggagagctatgggtaca

SEQ ID NO: 175740 - DNA, 25 bp, Homo sapien
caggtaaggttaagatcaagggatc

SEQ ID NO: 175741 - DNA, 25 bp, Homo sapien
gagagatcaactccacctaggaaag

SEQ ID NO: 175742 - DNA, 25 bp, Homo sapien
tagctctggtacttaactcttcaag

SEQ ID NO: 175743 - DNA, 25 bp, Homo sapien
ttggatattggattgggatcgctac

SEQ ID NO: 175744 - DNA, 25 bp, Homo sapien
gctactacaaagagggtcaaaggca

SEQ ID NO: 175745 - DNA, 25 bp, Homo sapien
ggtacaaaggccaatagagttaaga

SEQ ID NO: 175746 - DNA, 25 bp, Homo sapien
tcacacatgcccaggtaagggatgg

SEQ ID NO: 175747 - DNA, 25 bp, Homo sapien
cacaggaagtggtagagtagcagcc

SEQ ID NO: 175748 - DNA, 25 bp, Homo sapien
taaattcctgaaagcccctaaatgc

SEQ ID NO: 175749 - DNA, 25 bp, Homo sapien
tggaagatactggaaaggcatactc

SEQ ID NO: 175750 - DNA, 25 bp, Homo sapien
tcttggtatcttaagggtggcccca

SEQ ID NO: 175751 - DNA, 25 bp, Homo sapien
ggatggcttggtccacaaaatggag

SEQ ID NO: 175752 - DNA, 25 bp, Homo sapien
tcagagacgatacacatggagaaac

SEQ ID NO: 175753 - DNA, 25 bp, Homo sapien
tttgctcagcagagtccatttccag

SEQ ID NO: 175754 - DNA, 25 bp, Homo sapien
gctagaatgagctagaccctgagac

SEQ ID NO: 175755 - DNA, 25 bp, Homo sapien
agaataatcaaaggctagaatgagc

SEQ ID NO: 175756 - DNA, 25 bp, Homo sapien
tcaaaggctagaatgagctagaccc

SEQ ID NO: 175757 - DNA, 25 bp, Homo sapien
taatcaaaggctagaatgagctaga

SEQ ID NO: 175758 - DNA, 25 bp, Homo sapien
ggaggcaaggttcagggctggactc

SEQ ID NO: 175759 - DNA, 25 bp, Homo sapien
gctggaaacactgggaggcaaggtt

SEQ ID NO: 175760 - DNA, 25 bp, Homo sapien
aacactgggaggcaaggttcagggc

SEQ ID NO: 175761 - DNA, 25 bp, Homo sapien
agagctggaaacactgggaggcaag

SEQ ID NO: 175762 - DNA, 25 bp, Homo sapien
ggcccccaagggaactgctccattc

SEQ ID NO: 175763 - DNA, 25 bp, Homo sapien
tccattcagttgcaaggcagcagcc

SEQ ID NO: 175764 - DNA, 25 bp, Homo sapien
ctgctccattcagttgcaaggcagc

SEQ ID NO: 175765 - DNA, 25 bp, Homo sapien
gctccattcagttgcaaggcagcag

SEQ ID NO: 175766 - DNA, 25 bp, Homo sapien
ctaaaattcaaccccataatcttca

SEQ ID NO: 175767 - DNA, 25 bp, Homo sapien
taaaattcaaccccataatcttcac

SEQ ID NO: 175768 - DNA, 25 bp, Homo sapien
ggtcgaccagcaagctcaaacccat

SEQ ID NO: 175769 - DNA, 25 bp, Homo sapien
agtcacatggccaaccctcataggt

SEQ ID NO: 175770 - DNA, 25 bp, Homo sapien
tgccatgagctgaaaacgtccacct

SEQ ID NO: 175771 - DNA, 25 bp, Homo sapien
ctcaaacccattcaactgttccagg

SEQ ID NO: 175772 - DNA, 25 bp, Homo sapien
gttgactaagtgacctgctgaccag

SEQ ID NO: 175773 - DNA, 25 bp, Homo sapien
caagctaagaacaaggctcctgggc

SEQ ID NO: 175774 - DNA, 25 bp, Homo sapien
cacactggtacaaagaggattccca

SEQ ID NO: 175775 - DNA, 25 bp, Homo sapien
tccaggcttaagagggaacacaccc

SEQ ID NO: 175776 - DNA, 25 bp, Homo sapien
tcaagcaatgcactcatctcaaggg

SEQ ID NO: 175777 - DNA, 25 bp, Homo sapien
caccagggtttatgggtcatttaga

SEQ ID NO: 175778 - DNA, 25 bp, Homo sapien
ggctagtccaagcttcaggcaccag

SEQ ID NO: 175779 - DNA, 25 bp, Homo sapien
taggagcaaagccaagatctcaagc

SEQ ID NO: 175780 - DNA, 25 bp, Homo sapien
aatcagacaagtggacaaacccaaa

SEQ ID NO: 175781 - DNA, 25 bp, Homo sapien
tcagacaagtggacaaacccaaagt

SEQ ID NO: 175782 - DNA, 25 bp, Homo sapien
atcagacaagtggacaaacccaaag

SEQ ID NO: 175783 - DNA, 25 bp, Homo sapien
cataacctttagagcggcctgtatc

SEQ ID NO: 175784 - DNA, 25 bp, Homo sapien
gagcggcctgtatctgagtccttca

SEQ ID NO: 175785 - DNA, 25 bp, Homo sapien
ccttcatcaggacaatattatcaat

SEQ ID NO: 175786 - DNA, 25 bp, Homo sapien
cgtgatgaaaccataacctttagag

SEQ ID NO: 175787 - DNA, 25 bp, Homo sapien
cccactatgacgtatgcagcaggtt

SEQ ID NO: 175788 - DNA, 25 bp, Homo sapien
ttatttgtccaccaagcacatgaac

SEQ ID NO: 175789 - DNA, 25 bp, Homo sapien
gcatagactcatatgcccactatga

SEQ ID NO: 175790 - DNA, 25 bp, Homo sapien
cctggcctattatttgatttgtgtc

SEQ ID NO: 175791 - DNA, 25 bp, Homo sapien
agatgccccggagcatgtcttcagt

SEQ ID NO: 175792 - DNA, 25 bp, Homo sapien
ccttttgcaggttgttggccatggc

SEQ ID NO: 175793 - DNA, 25 bp, Homo sapien
cagggaacccacatagaggcgcatt

SEQ ID NO: 175794 - DNA, 25 bp, Homo sapien
cagtgatattgaagtgcagggaacc

SEQ ID NO: 175795 - DNA, 25 bp, Homo sapien
gcaatgcccttagaacgacgtgagt

SEQ ID NO: 175796 - DNA, 25 bp, Homo sapien
gccagtggcacagactggatttcac

SEQ ID NO: 175797 - DNA, 25 bp, Homo sapien
gacgtgagttccgatctgagatgat

SEQ ID NO: 175798 - DNA, 25 bp, Homo sapien
cctgtacaatgataggcactcccag

SEQ ID NO: 175799 - DNA, 25 bp, Homo sapien
tccaggacgcaaaagaaatcctgag

SEQ ID NO: 175800 - DNA, 25 bp, Homo sapien
aatcctgagttaggcataaagggag

SEQ ID NO: 175801 - DNA, 25 bp, Homo sapien
ggagatacaagctaagctactcaga

SEQ ID NO: 175802 - DNA, 25 bp, Homo sapien
ctatccaggacgcaaaagaaatcct

SEQ ID NO: 175803 - DNA, 25 bp, Homo sapien
gaaaaagtcctccagatctcgaggc

SEQ ID NO: 175804 - DNA, 25 bp, Homo sapien
tcgaggccgaattcgggcagctaac

SEQ ID NO: 175805 - DNA, 25 bp, Homo sapien
tacagaaaactgtgcgggcatcacg

SEQ ID NO: 175806 - DNA, 25 bp, Homo sapien
gggcatcacgctcctcaggactcag

SEQ ID NO: 175807 - DNA, 25 bp, Homo sapien
cattgttctccagctaaccctcaag

SEQ ID NO: 175808 - DNA, 25 bp, Homo sapien
cacattcctgtaatttggctcaaat

SEQ ID NO: 175809 - DNA, 25 bp, Homo sapien
tgaaatgtgttgagaccagccctcc

SEQ ID NO: 175810 - DNA, 25 bp, Homo sapien
taaaacagtgttcattatcaaccca

SEQ ID NO: 175811 - DNA, 25 bp, Homo sapien
gaaatgaggactcttactgtgtcca

SEQ ID NO: 175812 - DNA, 25 bp, Homo sapien
tctgaaatgaggactcttactgtgt

SEQ ID NO: 175813 - DNA, 25 bp, Homo sapien
gactcttactgtgtccatacctata

SEQ ID NO: 175814 - DNA, 25 bp, Homo sapien
tgaggactcttactgtgtccatacc

SEQ ID NO: 175815 - DNA, 25 bp, Homo sapien
caagcagggttcatagtgcatttgt

SEQ ID NO: 175816 - DNA, 25 bp, Homo sapien
cattggtccaatgctgggtcttcca

SEQ ID NO: 175817 - DNA, 25 bp, Homo sapien
gttataataagcaccctcaagcagg

SEQ ID NO: 175818 - DNA, 25 bp, Homo sapien
gtatcctgccaatcacaatgtgtta

SEQ ID NO: 175819 - DNA, 25 bp, Homo sapien
tgcacacgatcctcacgacgatggt

SEQ ID NO: 175820 - DNA, 25 bp, Homo sapien
tggaggactcctgtaatgcacacga

SEQ ID NO: 175821 - DNA, 25 bp, Homo sapien
acgatcccagctacggctacggtga

SEQ ID NO: 175822 - DNA, 25 bp, Homo sapien
tatttctccgtctataccgatcccg

SEQ ID NO: 175823 - DNA, 25 bp, Homo sapien
ggatggcggctgtgggtggaatgaa

SEQ ID NO: 175824 - DNA, 25 bp, Homo sapien
aggattaaagatacgagccactgtg

SEQ ID NO: 175825 - DNA, 25 bp, Homo sapien
gcaggagtttagtgctgcaatctcg

SEQ ID NO: 175826 - DNA, 25 bp, Homo sapien
cccaggcaggagtttagtgctgcaa

SEQ ID NO: 175827 - DNA, 25 bp, Homo sapien
acaaacatgtactactacacctggg

SEQ ID NO: 175828 - DNA, 25 bp, Homo sapien
atccctgcttttattatggctccga

SEQ ID NO: 175829 - DNA, 25 bp, Homo sapien
ttttattatggctccgactcctctt

SEQ ID NO: 175830 - DNA, 25 bp, Homo sapien
tgcttttattatggctccgactcct

SEQ ID NO: 175831 - DNA, 25 bp, Homo sapien
cctgcttttattatggctccgactc

SEQ ID NO: 175832 - DNA, 25 bp, Homo sapien
tatattgatgctaggactaatccac

SEQ ID NO: 175833 - DNA, 25 bp, Homo sapien
taacagtcagcagtcttaacagaaa

SEQ ID NO: 175834 - DNA, 25 bp, Homo sapien
aggtggagccattactaacagtcag

SEQ ID NO: 175835 - DNA, 25 bp, Homo sapien
ttattctcatgacctaggtggagcc

SEQ ID NO: 175836 - DNA, 25 bp, Homo sapien
gctggtggtattgctaggataatcc

SEQ ID NO: 175837 - DNA, 25 bp, Homo sapien
actggtctcattgccactgttgctg

SEQ ID NO: 175838 - DNA, 25 bp, Homo sapien
gcttgtctccccgatggtgctgctt

SEQ ID NO: 175839 - DNA, 25 bp, Homo sapien
ggtgctgcttccactggtctcattg

SEQ ID NO: 175840 - DNA, 25 bp, Homo sapien
aaggccaaggtgggtggatcataag

SEQ ID NO: 175841 - DNA, 25 bp, Homo sapien
agaaactgggacgggcgcagtggct

SEQ ID NO: 175842 - DNA, 25 bp, Homo sapien
cacgcctgtaatcccattactttgg

SEQ ID NO: 175843 - DNA, 25 bp, Homo sapien
atggtggtgcttgcctataatccta

SEQ ID NO: 175844 - DNA, 25 bp, Homo sapien
gtcacttcgagttttgagcaaagca

SEQ ID NO: 175845 - DNA, 25 bp, Homo sapien
tatgtgcccactccggtttctgagg

SEQ ID NO: 175846 - DNA, 25 bp, Homo sapien
gaaattggtgctaggtctgaggtac

SEQ ID NO: 175847 - DNA, 25 bp, Homo sapien
cattaacccaattccaggagtgagg

SEQ ID NO: 175848 - DNA, 25 bp, Homo sapien
ttccagcatggcctcaatcactatg

SEQ ID NO: 175849 - DNA, 25 bp, Homo sapien
catggcctcaatcactatgtcaaag

SEQ ID NO: 175850 - DNA, 25 bp, Homo sapien
cactatgtcaaagtcatcagatgcc

SEQ ID NO: 175851 - DNA, 25 bp, Homo sapien
ctatgtcaaagtcatcagatgccat

SEQ ID NO: 175852 - DNA, 25 bp, Homo sapien
ggaaggctgtggcataagaactgct

SEQ ID NO: 175853 - DNA, 25 bp, Homo sapien
aaggctgtggcataagaactgcttg

SEQ ID NO: 175854 - DNA, 25 bp, Homo sapien
cttggaaggctgtggcataagaact

SEQ ID NO: 175855 - DNA, 25 bp, Homo sapien
ctgcttggaaggctgtggcataaga

SEQ ID NO: 175856 - DNA, 25 bp, Homo sapien
ttttgaaacttgcaatctcactggg

SEQ ID NO: 175857 - DNA, 25 bp, Homo sapien
tatccgtttaagcaaagccatatac

SEQ ID NO: 175858 - DNA, 25 bp, Homo sapien
caataaggtagcaaacactatgcat

SEQ ID NO: 175859 - DNA, 25 bp, Homo sapien
gctcattgttgagtgctaatgcggg

SEQ ID NO: 175860 - DNA, 25 bp, Homo sapien
ggtcaaggtccactcaatctcatcc

SEQ ID NO: 175861 - DNA, 25 bp, Homo sapien
caggttggtagttttcaaacgctct

SEQ ID NO: 175862 - DNA, 25 bp, Homo sapien
caatctcatccacatagagtatgtt

SEQ ID NO: 175863 - DNA, 25 bp, Homo sapien
ttcaaacgctctcttcatgtcccaa

SEQ ID NO: 175864 - DNA, 25 bp, Homo sapien
tgatgatgcgtgtcctctcaggccg

SEQ ID NO: 175865 - DNA, 25 bp, Homo sapien
gaccctaagtgtcacggctgcagag

SEQ ID NO: 175866 - DNA, 25 bp, Homo sapien
tatcggtgcaagatacagccacgag

SEQ ID NO: 175867 - DNA, 25 bp, Homo sapien
ctctaaaatcgtggcagtgggctac

SEQ ID NO: 175868 - DNA, 25 bp, Homo sapien
gcattggtgacgtctggtggggacc

SEQ ID NO: 175869 - DNA, 25 bp, Homo sapien
acgcattggtgacgtctggtgggga

SEQ ID NO: 175870 - DNA, 25 bp, Homo sapien
tcacgcattggtgacgtctggtggg

SEQ ID NO: 175871 - DNA, 25 bp, Homo sapien
attggtgacgtctggtggggaccgg

SEQ ID NO: 175872 - DNA, 25 bp, Homo sapien
gggagtggagctcggatagttccta

SEQ ID NO: 175873 - DNA, 25 bp, Homo sapien
gtggagctcggatagttcctagagt

SEQ ID NO: 175874 - DNA, 25 bp, Homo sapien
tccgttcctttgagtatgttgtggg

SEQ ID NO: 175875 - DNA, 25 bp, Homo sapien
tctctccgttcctttgagtatgttg

SEQ ID NO: 175876 - DNA, 25 bp, Homo sapien
ctcctcttcccgcaaaatggcggca

SEQ ID NO: 175877 - DNA, 25 bp, Homo sapien
ctcttcccgcaaaatggcggcagct

SEQ ID NO: 175878 - DNA, 25 bp, Homo sapien
ggcggcagctctgccgtcttccaga

SEQ ID NO: 175879 - DNA, 25 bp, Homo sapien
ccagaaccttccccaatctgcgcat

SEQ ID NO: 175880 - DNA, 25 bp, Homo sapien
tgagtgcgtagcttcaaatccagca

SEQ ID NO: 175881 - DNA, 25 bp, Homo sapien
cgttcaaaccccatgttctcaggga

SEQ ID NO: 175882 - DNA, 25 bp, Homo sapien
agttcttgaggctgagtgcgtagct

SEQ ID NO: 175883 - DNA, 25 bp, Homo sapien
tcttcatagattggtggcttgagcc

SEQ ID NO: 175884 - DNA, 25 bp, Homo sapien
ggaaagcagattgaaatgctcctct

SEQ ID NO: 175885 - DNA, 25 bp, Homo sapien
ctgcaattaattataatcccttgcc

SEQ ID NO: 175886 - DNA, 25 bp, Homo sapien
gcaggaaagcagattgaaatgctcc

SEQ ID NO: 175887 - DNA, 25 bp, Homo sapien
gcaattaattataatcccttgccca

SEQ ID NO: 175888 - DNA, 25 bp, Homo sapien
tctgtactacaggagcagaacctga

SEQ ID NO: 175889 - DNA, 25 bp, Homo sapien
gcttccaaggctctggacacttggc

SEQ ID NO: 175890 - DNA, 25 bp, Homo sapien
ctacaggagcagaacctgaagctgc

SEQ ID NO: 175891 - DNA, 25 bp, Homo sapien
ggctctggacacttggcacgcaggg

SEQ ID NO: 175892 - DNA, 25 bp, Homo sapien
ggttatgaatagcagaacagactgg

SEQ ID NO: 175893 - DNA, 25 bp, Homo sapien
ccaatggtatatgagcggcctgtgg

SEQ ID NO: 175894 - DNA, 25 bp, Homo sapien
tgtggggttatgaatagcagaacag

SEQ ID NO: 175895 - DNA, 25 bp, Homo sapien
aggccaatggtatatgagcggcctg

SEQ ID NO: 175896 - DNA, 25 bp, Homo sapien
tcgccagaaacgcacacagatggtt

SEQ ID NO: 175897 - DNA, 25 bp, Homo sapien
agatggtttggccttcacgtaccgt

SEQ ID NO: 175898 - DNA, 25 bp, Homo sapien
gaattgctgcatcgccagaaacgca

SEQ ID NO: 175899 - DNA, 25 bp, Homo sapien
tcttggaattgctgcatcgccagaa

SEQ ID NO: 175900 - DNA, 25 bp, Homo sapien
tgaagctatgaattatacatggcaa

SEQ ID NO: 175901 - DNA, 25 bp, Homo sapien
ggttcagggtgaagctatgaattat

SEQ ID NO: 175902 - DNA, 25 bp, Homo sapien
tcagggtgaagctatgaattataca

SEQ ID NO: 175903 - DNA, 25 bp, Homo sapien
gggtgaagctatgaattatacatgg

SEQ ID NO: 175904 - DNA, 25 bp, Homo sapien
agggaagaggatgggaaaccatgag

SEQ ID NO: 175905 - DNA, 25 bp, Homo sapien
gaagaggatgggaaaccatgagaac

SEQ ID NO: 175906 - DNA, 25 bp, Homo sapien
aatagggaagaggatgggaaaccat

SEQ ID NO: 175907 - DNA, 25 bp, Homo sapien
taatagggaagaggatgggaaacca

SEQ ID NO: 175908 - DNA, 25 bp, Homo sapien
gctgaagagggtctcttctctaatc

SEQ ID NO: 175909 - DNA, 25 bp, Homo sapien
gctgtgacttttgcctatgctgaag

SEQ ID NO: 175910 - DNA, 25 bp, Homo sapien
tctctaatcacacaaagatctccat

SEQ ID NO: 175911 - DNA, 25 bp, Homo sapien
cacaaagatctccattcattgagca

SEQ ID NO: 175912 - DNA, 25 bp, Homo sapien
cacatgtacatataagctgcccagg

SEQ ID NO: 175913 - DNA, 25 bp, Homo sapien
catgtacatataagctgcccaggaa

SEQ ID NO: 175914 - DNA, 25 bp, Homo sapien
gacacatgtacatataagctgccca

SEQ ID NO: 175915 - DNA, 25 bp, Homo sapien
atgtacatataagctgcccaggaag

SEQ ID NO: 175916 - DNA, 25 bp, Homo sapien
tagtactgtgttcacctccacagga

SEQ ID NO: 175917 - DNA, 25 bp, Homo sapien
cacagtctcaaagtagccggcaaag

SEQ ID NO: 175918 - DNA, 25 bp, Homo sapien
gcaatagcggttgttgtcaatcata

SEQ ID NO: 175919 - DNA, 25 bp, Homo sapien
cagagtgatgtcctgataaagcaca

SEQ ID NO: 175920 - DNA, 25 bp, Homo sapien
agagctggtggaagttgtgcagccg

SEQ ID NO: 175921 - DNA, 25 bp, Homo sapien
gagagctggtggaagttgtgcagcc

SEQ ID NO: 175922 - DNA, 25 bp, Homo sapien
gagctggtggaagttgtgcagccgt

SEQ ID NO: 175923 - DNA, 25 bp, Homo sapien
agagagctggtggaagttgtgcagc

SEQ ID NO: 175924 - DNA, 25 bp, Homo sapien
agagagtgttggggaagacacacaa

SEQ ID NO: 175925 - DNA, 25 bp, Homo sapien
agagtgttggggaagacacacaaga

SEQ ID NO: 175926 - DNA, 25 bp, Homo sapien
gagagagagtgttggggaagacaca

SEQ ID NO: 175927 - DNA, 25 bp, Homo sapien
agtgttggggaagacacacaagaga

SEQ ID NO: 175928 - DNA, 25 bp, Homo sapien
tacaggctcggacctcattgtacag

SEQ ID NO: 175929 - DNA, 25 bp, Homo sapien
cattgtacagcttggaggaagagat

SEQ ID NO: 175930 - DNA, 25 bp, Homo sapien
cagggtcacggtccttctccctaca

SEQ ID NO: 175931 - DNA, 25 bp, Homo sapien
tgggagccagaaaggaagtgtactc

SEQ ID NO: 175932 - DNA, 25 bp, Homo sapien
tccatccaggcactcaggcgacaat

SEQ ID NO: 175933 - DNA, 25 bp, Homo sapien
ggcgacaattcattgtcagcaaatg

SEQ ID NO: 175934 - DNA, 25 bp, Homo sapien
tcaggcgacaattcattgtcagcaa

SEQ ID NO: 175935 - DNA, 25 bp, Homo sapien
aggcactcaggcgacaattcattgt

SEQ ID NO: 175936 - DNA, 25 bp, Homo sapien
ccctcatgtctgatgagactacggt

SEQ ID NO: 175937 - DNA, 25 bp, Homo sapien
ggagccacccattccctcatgtctg

SEQ ID NO: 175938 - DNA, 25 bp, Homo sapien
actacggtcacttggcttccccatt

SEQ ID NO: 175939 - DNA, 25 bp, Homo sapien
tctgatgagactacggtcacttggc

SEQ ID NO: 175940 - DNA, 25 bp, Homo sapien
tcaccacggcatttgggtttttctc

SEQ ID NO: 175941 - DNA, 25 bp, Homo sapien
ttatccgccggtcggcctgcttggc

SEQ ID NO: 175942 - DNA, 25 bp, Homo sapien
tcctgctcccagcaccatcagtacc

SEQ ID NO: 175943 - DNA, 25 bp, Homo sapien
agctttatccgccggtcggcctgct

SEQ ID NO: 175944 - DNA, 25 bp, Homo sapien
ctttatccgccggtcggcctgcttg

SEQ ID NO: 175945 - DNA, 25 bp, Homo sapien
tggacattggtatccttctcctctt

SEQ ID NO: 175946 - DNA, 25 bp, Homo sapien
tctggtactcggtctagcagacatt

SEQ ID NO: 175947 - DNA, 25 bp, Homo sapien
tactcggtctagcagacatttatag

SEQ ID NO: 175948 - DNA, 25 bp, Homo sapien
ctcctcttctggtactcggtctagc

SEQ ID NO: 175949 - DNA, 25 bp, Homo sapien
acacttcatatgtctgagattccag

SEQ ID NO: 175950 - DNA, 25 bp, Homo sapien
atgaatgaggaaaaggacaaagtta

SEQ ID NO: 175951 - DNA, 25 bp, Homo sapien
ctgatgaatgaggaaaaggacaaag

SEQ ID NO: 175952 - DNA, 25 bp, Homo sapien
atgaggaaaaggacaaagttagcca

SEQ ID NO: 175953 - DNA, 25 bp, Homo sapien
tgaggaaaaggacaaagttagccag

SEQ ID NO: 175954 - DNA, 25 bp, Homo sapien
ggacggttctggcttaagtattcca

SEQ ID NO: 175955 - DNA, 25 bp, Homo sapien
ctgtgatgatgaactgcacctccaa

SEQ ID NO: 175956 - DNA, 25 bp, Homo sapien
gcagatagtcttcatagcccttggc

SEQ ID NO: 175957 - DNA, 25 bp, Homo sapien
tattccaggtattggaggtaggagc

SEQ ID NO: 175958 - DNA, 25 bp, Homo sapien
gatgggaggtcagccccaatttcaa

SEQ ID NO: 175959 - DNA, 25 bp, Homo sapien
ccagcgatcaatgacatgattagat

SEQ ID NO: 175960 - DNA, 25 bp, Homo sapien
gccggaagatgagcctctggtgcat

SEQ ID NO: 175961 - DNA, 25 bp, Homo sapien
tattggtcaggaaaatgctagtggg

SEQ ID NO: 175962 - DNA, 25 bp, Homo sapien
tccttgctcctttgcgcaaaatctg

SEQ ID NO: 175963 - DNA, 25 bp, Homo sapien
cctttgcgcaaaatctgtttacttc

SEQ ID NO: 175964 - DNA, 25 bp, Homo sapien
gggaagtagcaaaattgtatactat

SEQ ID NO: 175965 - DNA, 25 bp, Homo sapien
ctgccaggcaagaaacccttccttg

SEQ ID NO: 175966 - DNA, 25 bp, Homo sapien
agtcacacaaagtccggaagttgtg

SEQ ID NO: 175967 - DNA, 25 bp, Homo sapien
gtcacacaaagtccggaagttgtgc

SEQ ID NO: 175968 - DNA, 25 bp, Homo sapien
acacaaagtccggaagttgtgccac

SEQ ID NO: 175969 - DNA, 25 bp, Homo sapien
cacacaaagtccggaagttgtgcca

SEQ ID NO: 175970 - DNA, 25 bp, Homo sapien
ccttgcaccctggtacagcagcaaa

SEQ ID NO: 175971 - DNA, 25 bp, Homo sapien
cctatcccttgcaccctggtacagc

SEQ ID NO: 175972 - DNA, 25 bp, Homo sapien
gcaccctggtacagcagcaaaggga

SEQ ID NO: 175973 - DNA, 25 bp, Homo sapien
ggtacagcagcaaagggagacatac

SEQ ID NO: 175974 - DNA, 25 bp, Homo sapien
gccaccaagggtacccgcatccaga

SEQ ID NO: 175975 - DNA, 25 bp, Homo sapien
ccaccaagggtacccgcatccagaa

SEQ ID NO: 175976 - DNA, 25 bp, Homo sapien
gcacatgaacagtcacccttttaga

SEQ ID NO: 175977 - DNA, 25 bp, Homo sapien
catgaacagtcacccttttagaact

SEQ ID NO: 175978 - DNA, 25 bp, Homo sapien
gaacagtcacccttttagaactctc

SEQ ID NO: 175979 - DNA, 25 bp, Homo sapien
ctgcacatgaacagtcaccctttta

SEQ ID NO: 175980 - DNA, 25 bp, Homo sapien
tatcttcctgattaaggggcagcag

SEQ ID NO: 175981 - DNA, 25 bp, Homo sapien
caggttggtgttatcttcctgatta

SEQ ID NO: 175982 - DNA, 25 bp, Homo sapien
ggccaggttggtgttatcttcctga

SEQ ID NO: 175983 - DNA, 25 bp, Homo sapien
tcttcctgattaaggggcagcagga

SEQ ID NO: 175984 - DNA, 25 bp, Homo sapien
tgcaccaaaattcagctcctgtaac

SEQ ID NO: 175985 - DNA, 25 bp, Homo sapien
aatatgcaccaaaattcagctcctg

SEQ ID NO: 175986 - DNA, 25 bp, Homo sapien
tatgcaccaaaattcagctcctgta

SEQ ID NO: 175987 - DNA, 25 bp, Homo sapien
ctggaagacccaaatatgcaccaaa

SEQ ID NO: 175988 - DNA, 25 bp, Homo sapien
cgcctcggagttcctgcgaatcttc

SEQ ID NO: 175989 - DNA, 25 bp, Homo sapien
gcctcggagttcctgcgaatcttct

SEQ ID NO: 175990 - DNA, 25 bp, Homo sapien
ctcggagttcctgcgaatcttctcc

SEQ ID NO: 175991 - DNA, 25 bp, Homo sapien
cctcggagttcctgcgaatcttctc

SEQ ID NO: 175992 - DNA, 25 bp, Homo sapien
aagctttcccacaattagcgtattc

SEQ ID NO: 175993 - DNA, 25 bp, Homo sapien
ggacgaatccatggagaaagctttc

SEQ ID NO: 175994 - DNA, 25 bp, Homo sapien
ctggacgaatccatggagaaagctt

SEQ ID NO: 175995 - DNA, 25 bp, Homo sapien
gacgaatccatggagaaagctttcc

SEQ ID NO: 175996 - DNA, 25 bp, Homo sapien
ttcctgacagcagtaggtctgatcg

SEQ ID NO: 175997 - DNA, 25 bp, Homo sapien
cttgaaacgcggatggaagacaggc

SEQ ID NO: 175998 - DNA, 25 bp, Homo sapien
gaccgggccgattcttagcaggttc

SEQ ID NO: 175999 - DNA, 25 bp, Homo sapien
tagcaggttcctgaatgaactccct

SEQ ID NO: 176000 - DNA, 25 bp, Homo sapien
ttctccgggatgactagtctgccct

SEQ ID NO: 176001 - DNA, 25 bp, Homo sapien
tccgggatgactagtctgcccttct

SEQ ID NO: 176002 - DNA, 25 bp, Homo sapien
gatgactagtctgcccttctccgtc

SEQ ID NO: 176003 - DNA, 25 bp, Homo sapien
gcttctccgggatgactagtctgcc

SEQ ID NO: 176004 - DNA, 25 bp, Homo sapien
gcattccgctcgtggaggtccggcc

SEQ ID NO: 176005 - DNA, 25 bp, Homo sapien
cccgcattccgctcgtggaggtccg

SEQ ID NO: 176006 - DNA, 25 bp, Homo sapien
attccgctcgtggaggtccggccct

SEQ ID NO: 176007 - DNA, 25 bp, Homo sapien
cgcattccgctcgtggaggtccggc

SEQ ID NO: 176008 - DNA, 25 bp, Homo sapien
cgcaattcaggtccctcccgctgga

SEQ ID NO: 176009 - DNA, 25 bp, Homo sapien
tggccacagcccctagtgtgtcagc

SEQ ID NO: 176010 - DNA, 25 bp, Homo sapien
tgtcagctatttcggggacgcaatt

SEQ ID NO: 176011 - DNA, 25 bp, Homo sapien
cacagcccctagtgtgtcagctatt

SEQ ID NO: 176012 - DNA, 25 bp, Homo sapien
tagtagccaatcacaaagtcaaact

SEQ ID NO: 176013 - DNA, 25 bp, Homo sapien
ccgggattccttgatactagtagcc

SEQ ID NO: 176014 - DNA, 25 bp, Homo sapien
actagtgccccagaaggcgggacga

SEQ ID NO: 176015 - DNA, 25 bp, Homo sapien
tgtccacgccgggattccttgatac

SEQ ID NO: 176016 - DNA, 25 bp, Homo sapien
ccatctcacctcgccttactgcagc

SEQ ID NO: 176017 - DNA, 25 bp, Homo sapien
cccatctcacctcgccttactgcag

SEQ ID NO: 176018 - DNA, 25 bp, Homo sapien
ccccatctcacctcgccttactgca

SEQ ID NO: 176019 - DNA, 25 bp, Homo sapien
catctcacctcgccttactgcagcc

SEQ ID NO: 176020 - DNA, 25 bp, Homo sapien
tgatctacacaccaaatcactctgg

SEQ ID NO: 176021 - DNA, 25 bp, Homo sapien
gagggtgcatggttcaatcttttac

SEQ ID NO: 176022 - DNA, 25 bp, Homo sapien
aagcatgtgctctagttgtttttgt

SEQ ID NO: 176023 - DNA, 25 bp, Homo sapien
agcctctaactactaggctcagcct

SEQ ID NO: 176024 - DNA, 25 bp, Homo sapien
gaacacaagtggcttgtgtcctttc

SEQ ID NO: 176025 - DNA, 25 bp, Homo sapien
gactgcagtgtttcaagcgtaagca

SEQ ID NO: 176026 - DNA, 25 bp, Homo sapien
taggaggcagcagctatgcagaagc

SEQ ID NO: 176027 - DNA, 25 bp, Homo sapien
tcccttgtactgaaggcagccccag

SEQ ID NO: 176028 - DNA, 25 bp, Homo sapien
tggtcccactagcaggaagattagg

SEQ ID NO: 176029 - DNA, 25 bp, Homo sapien
ttgagtacggtgtactctttcacca

SEQ ID NO: 176030 - DNA, 25 bp, Homo sapien
gggcccaccgcttgttctctgttgc

SEQ ID NO: 176031 - DNA, 25 bp, Homo sapien
gttctctgttgcctgcttgagtacg

SEQ ID NO: 176032 - DNA, 25 bp, Homo sapien
tgctgaactcctggagggcccaccg

SEQ ID NO: 176033 - DNA, 25 bp, Homo sapien
tcctgactcaagcgagctgcccacc

SEQ ID NO: 176034 - DNA, 25 bp, Homo sapien
tggcaacatctttaaataaacgagt

SEQ ID NO: 176035 - DNA, 25 bp, Homo sapien
gcccagccaaaaatggcaacatctt

SEQ ID NO: 176036 - DNA, 25 bp, Homo sapien
aaatggcaacatctttaaataaacg

SEQ ID NO: 176037 - DNA, 25 bp, Homo sapien
gtaagtgtcggacaaaatctttagc

SEQ ID NO: 176038 - DNA, 25 bp, Homo sapien
aacagtgtaagtgtcggacaaaatc

SEQ ID NO: 176039 - DNA, 25 bp, Homo sapien
ctaatcagacgatgaacttccactt

SEQ ID NO: 176040 - DNA, 25 bp, Homo sapien
gaacttccactttctcaacagtgta

SEQ ID NO: 176041 - DNA, 25 bp, Homo sapien
gcttaaggatcatagcaccgcactt

SEQ ID NO: 176042 - DNA, 25 bp, Homo sapien
ctcagcttaaggatcatagcaccgc

SEQ ID NO: 176043 - DNA, 25 bp, Homo sapien
attgagtcttcagccggtgttcttg

SEQ ID NO: 176044 - DNA, 25 bp, Homo sapien
tagctcggattgagtcttcagccgg

SEQ ID NO: 176045 - DNA, 25 bp, Homo sapien
agcaaagtgaggcagcggagaagca

SEQ ID NO: 176046 - DNA, 25 bp, Homo sapien
gcagcaaagtgaggcagcggagaag

SEQ ID NO: 176047 - DNA, 25 bp, Homo sapien
gcaaagtgaggcagcggagaagcac

SEQ ID NO: 176048 - DNA, 25 bp, Homo sapien
ctgcagcaaagtgaggcagcggaga

SEQ ID NO: 176049 - DNA, 25 bp, Homo sapien
cataaataaagatagtagaaaggag

SEQ ID NO: 176050 - DNA, 25 bp, Homo sapien
gaagaagagggcataaataaagata

SEQ ID NO: 176051 - DNA, 25 bp, Homo sapien
tagaaaggagggtagatcaggaatc

SEQ ID NO: 176052 - DNA, 25 bp, Homo sapien
gagggtagatcaggaatctttgtct

SEQ ID NO: 176053 - DNA, 25 bp, Homo sapien
tcttcttctccagcagcaacatctg

SEQ ID NO: 176054 - DNA, 25 bp, Homo sapien
agcagcaacatctgctccttctgct

SEQ ID NO: 176055 - DNA, 25 bp, Homo sapien
ctgggagtaagcagcactcttcttc

SEQ ID NO: 176056 - DNA, 25 bp, Homo sapien
ttctgctggctcttggcatcctggc

SEQ ID NO: 176057 - DNA, 25 bp, Homo sapien
aggacctctgcgagtttccacacct

SEQ ID NO: 176058 - DNA, 25 bp, Homo sapien
ctttgctgccttcacggtttcactg

SEQ ID NO: 176059 - DNA, 25 bp, Homo sapien
gccttcacggtttcactgtcagcat

SEQ ID NO: 176060 - DNA, 25 bp, Homo sapien
tgcgagtttccacacctttgctgcc

SEQ ID NO: 176061 - DNA, 25 bp, Homo sapien
gtatctagacccacaaatcctgcct

SEQ ID NO: 176062 - DNA, 25 bp, Homo sapien
taaaaatggccccattctgggctga

SEQ ID NO: 176063 - DNA, 25 bp, Homo sapien
caggaaaaccctaatcgctacaatc

SEQ ID NO: 176064 - DNA, 25 bp, Homo sapien
tcctgccttatgacaggttttcttc

SEQ ID NO: 176065 - DNA, 25 bp, Homo sapien
ctgaattgggatcatagtagcagag

SEQ ID NO: 176066 - DNA, 25 bp, Homo sapien
agctgctcctctacttcttgctgta

SEQ ID NO: 176067 - DNA, 25 bp, Homo sapien
gctcctctacttcttgctgtagccg

SEQ ID NO: 176068 - DNA, 25 bp, Homo sapien
gcagagcagagtgaaacatttcttt

SEQ ID NO: 176069 - DNA, 25 bp, Homo sapien
tttggttccaatatctccccgccaa

SEQ ID NO: 176070 - DNA, 25 bp, Homo sapien
catttatttggttccaatatctccc

SEQ ID NO: 176071 - DNA, 25 bp, Homo sapien
tcatttatttggttccaatatctcc

SEQ ID NO: 176072 - DNA, 25 bp, Homo sapien
ttatttggttccaatatctccccgc

SEQ ID NO: 176073 - DNA, 25 bp, Homo sapien
tctcctggctaggacctaagagccg

SEQ ID NO: 176074 - DNA, 25 bp, Homo sapien
cagccgctgttcaagggtctcatga

SEQ ID NO: 176075 - DNA, 25 bp, Homo sapien
taagagccgcatcagttcagttaca

SEQ ID NO: 176076 - DNA, 25 bp, Homo sapien
tctgagagtggcatgagttccagaa

SEQ ID NO: 176077 - DNA, 25 bp, Homo sapien
tatcttcacatagtagtccacaagc

SEQ ID NO: 176078 - DNA, 25 bp, Homo sapien
tgaatgactctgtgtaaaatctcag

SEQ ID NO: 176079 - DNA, 25 bp, Homo sapien
aaaatctcagacctcaaccatgttg

SEQ ID NO: 176080 - DNA, 25 bp, Homo sapien
aaccatgttgtcttatgcagtcgaa

SEQ ID NO: 176081 - DNA, 25 bp, Homo sapien
tcaggagaagcttgctgaagtatgg

SEQ ID NO: 176082 - DNA, 25 bp, Homo sapien
gaagtatgggttctgtaacaggtcc

SEQ ID NO: 176083 - DNA, 25 bp, Homo sapien
ctctttactcaggttacaaggagga

SEQ ID NO: 176084 - DNA, 25 bp, Homo sapien
tttgctagggtgaggcttaagccac

SEQ ID NO: 176085 - DNA, 25 bp, Homo sapien
caggtgagcagaaatccccggatgc

SEQ ID NO: 176086 - DNA, 25 bp, Homo sapien
gtgagcagaaatccccggatgccat

SEQ ID NO: 176087 - DNA, 25 bp, Homo sapien
ccaggtgagcagaaatccccggatg

SEQ ID NO: 176088 - DNA, 25 bp, Homo sapien
aggtgagcagaaatccccggatgcc

SEQ ID NO: 176089 - DNA, 25 bp, Homo sapien
gatgaataaacagctggctgctcca

SEQ ID NO: 176090 - DNA, 25 bp, Homo sapien
tcaaggatgacttttacagagggcc

SEQ ID NO: 176091 - DNA, 25 bp, Homo sapien
acttgctccaagctgtccaaaagga

SEQ ID NO: 176092 - DNA, 25 bp, Homo sapien
ccacaagctggaaaggaacctcaag

SEQ ID NO: 176093 - DNA, 25 bp, Homo sapien
ggacttaatttgcagctcggccggc

SEQ ID NO: 176094 - DNA, 25 bp, Homo sapien
tgttttgccagaacatggagtgcgc

SEQ ID NO: 176095 - DNA, 25 bp, Homo sapien
ttacagggcgtgaacggcaatcagg

SEQ ID NO: 176096 - DNA, 25 bp, Homo sapien
ggtatcaaactccaaagggcaactg

SEQ ID NO: 176097 - DNA, 25 bp, Homo sapien
atcaaaatgcagaacgggctctccg

SEQ ID NO: 176098 - DNA, 25 bp, Homo sapien
agggcccgagatgaatcaaaatgca

SEQ ID NO: 176099 - DNA, 25 bp, Homo sapien
caaaatgcagaacgggctctccggc

SEQ ID NO: 176100 - DNA, 25 bp, Homo sapien
ggcccgagatgaatcaaaatgcaga

SEQ ID NO: 176101 - DNA, 25 bp, Homo sapien
agcgacgacggtctccggccactgg

SEQ ID NO: 176102 - DNA, 25 bp, Homo sapien
cactggccggaatgactctcccaga

SEQ ID NO: 176103 - DNA, 25 bp, Homo sapien
gtctgggcggccaaggattcccaag

SEQ ID NO: 176104 - DNA, 25 bp, Homo sapien
attcccaagagcgacgacggtctcc

SEQ ID NO: 176105 - DNA, 25 bp, Homo sapien
aagcgaggcccggaaagaccaagct

SEQ ID NO: 176106 - DNA, 25 bp, Homo sapien
aaagtgcactagaggccgcgacgaa

SEQ ID NO: 176107 - DNA, 25 bp, Homo sapien
tgaagctctcaaggcggtgccgaga

SEQ ID NO: 176108 - DNA, 25 bp, Homo sapien
agaccaagctgaaaggcccgggaag

SEQ ID NO: 176109 - DNA, 25 bp, Homo sapien
gcattcctcattcgcctgttttgtt

SEQ ID NO: 176110 - DNA, 25 bp, Homo sapien
ccatgccgggcaccatacagtgctt

SEQ ID NO: 176111 - DNA, 25 bp, Homo sapien
caagcaatctgcccggccaaatatc

SEQ ID NO: 176112 - DNA, 25 bp, Homo sapien
cacagactccctattagcgcgcatt

SEQ ID NO: 176113 - DNA, 25 bp, Homo sapien
tccttttttttgagatggagtctca

SEQ ID NO: 176114 - DNA, 25 bp, Homo sapien
tgtgcctggccatccttttcctttt

SEQ ID NO: 176115 - DNA, 25 bp, Homo sapien
ctgtgcctggccatccttttccttt

SEQ ID NO: 176116 - DNA, 25 bp, Homo sapien
actgtgcctggccatccttttcctt

SEQ ID NO: 176117 - DNA, 25 bp, Homo sapien
aggggatggatgtaaagttacacaa

SEQ ID NO: 176118 - DNA, 25 bp, Homo sapien
ccctgaggggatggatgtaaagtta

SEQ ID NO: 176119 - DNA, 25 bp, Homo sapien
tgaggggatggatgtaaagttacac

SEQ ID NO: 176120 - DNA, 25 bp, Homo sapien
cctgaggggatggatgtaaagttac

SEQ ID NO: 176121 - DNA, 25 bp, Homo sapien
tcaaaaggatttagcagattcaccc

SEQ ID NO: 176122 - DNA, 25 bp, Homo sapien
taagtcaactgaatatgcctcatgc

SEQ ID NO: 176123 - DNA, 25 bp, Homo sapien
ggctggcatagtcaccttagaatag

SEQ ID NO: 176124 - DNA, 25 bp, Homo sapien
cccctctggcgctcagttgtataaa

SEQ ID NO: 176125 - DNA, 25 bp, Homo sapien
taagagatctagctttaggtgaact

SEQ ID NO: 176126 - DNA, 25 bp, Homo sapien
tccaaagcatgacaaaaaagaatag

SEQ ID NO: 176127 - DNA, 25 bp, Homo sapien
ggacacctaaatggatataaacaca

SEQ ID NO: 176128 - DNA, 25 bp, Homo sapien
ggtaggaagcaatctcatcatttac

SEQ ID NO: 176129 - DNA, 25 bp, Homo sapien
ggctcagtgcacctaaacttgggaa

SEQ ID NO: 176130 - DNA, 25 bp, Homo sapien
tccagatataggtgcgggaccccat

SEQ ID NO: 176131 - DNA, 25 bp, Homo sapien
ttctcagacagataaggagctctcc

SEQ ID NO: 176132 - DNA, 25 bp, Homo sapien
gaaacagggaatacaggcagcaacc

SEQ ID NO: 176133 - DNA, 25 bp, Homo sapien
tgtgtgtgcctaagctcagactgca

SEQ ID NO: 176134 - DNA, 25 bp, Homo sapien
taatcatacactaggccagacacag

SEQ ID NO: 176135 - DNA, 25 bp, Homo sapien
gactgcacacatgggaaaaaggcca

SEQ ID NO: 176136 - DNA, 25 bp, Homo sapien
tatcatgatctttgggtctccggcc

SEQ ID NO: 176137 - DNA, 25 bp, Homo sapien
atgtggcaaccatggcagagcaagt

SEQ ID NO: 176138 - DNA, 25 bp, Homo sapien
gttgtcgggcattgagccgctgcat

SEQ ID NO: 176139 - DNA, 25 bp, Homo sapien
tcatcactcagctgcatccggcagt

SEQ ID NO: 176140 - DNA, 25 bp, Homo sapien
tgagccgctgcatgtggcaaccatg

SEQ ID NO: 176141 - DNA, 25 bp, Homo sapien
caaagtgataatcccggtccatgga

SEQ ID NO: 176142 - DNA, 25 bp, Homo sapien
cacagtggtagcactcaaagtgata

SEQ ID NO: 176143 - DNA, 25 bp, Homo sapien
tccatggatatcaccctcacgatgt

SEQ ID NO: 176144 - DNA, 25 bp, Homo sapien
aatcccggtccatggatatcaccct

SEQ ID NO: 176145 - DNA, 25 bp, Homo sapien
ggaggatgggttggccacaggctgc

SEQ ID NO: 176146 - DNA, 25 bp, Homo sapien
cagtatacttggttggagaagtcca

SEQ ID NO: 176147 - DNA, 25 bp, Homo sapien
tagtcggtgacacagtatacttggt

SEQ ID NO: 176148 - DNA, 25 bp, Homo sapien
gtggtagtcggtgacacagtatact

SEQ ID NO: 176149 - DNA, 25 bp, Homo sapien
cttggttggagaagtccactgtgaa

SEQ ID NO: 176150 - DNA, 25 bp, Homo sapien
gttgcaaacaatgcatcggaaacag

SEQ ID NO: 176151 - DNA, 25 bp, Homo sapien
ttgttgcaaacaatgcatcggaaac

SEQ ID NO: 176152 - DNA, 25 bp, Homo sapien
ttgcaaacaatgcatcggaaacagc

SEQ ID NO: 176153 - DNA, 25 bp, Homo sapien
cttgttgcaaacaatgcatcggaaa

SEQ ID NO: 176154 - DNA, 25 bp, Homo sapien
tcacagtgagacttctcagctgaaa

SEQ ID NO: 176155 - DNA, 25 bp, Homo sapien
ccatttagtccctgatcccgctcct

SEQ ID NO: 176156 - DNA, 25 bp, Homo sapien
gcctcacagtgagacttctcagctg

SEQ ID NO: 176157 - DNA, 25 bp, Homo sapien
agcctcacagtgagacttctcagct

SEQ ID NO: 176158 - DNA, 25 bp, Homo sapien
cacagacacagcatttctcagctgc

SEQ ID NO: 176159 - DNA, 25 bp, Homo sapien
acagacacagcatttctcagctgcc

SEQ ID NO: 176160 - DNA, 25 bp, Homo sapien
ttctccaaaatcaagtgaccacaga

SEQ ID NO: 176161 - DNA, 25 bp, Homo sapien
cagacacagcatttctcagctgcct

SEQ ID NO: 176162 - DNA, 25 bp, Homo sapien
ctgtagaaagccttgcaacgcaaag

SEQ ID NO: 176163 - DNA, 25 bp, Homo sapien
tacacagagccattgacactgtaga

SEQ ID NO: 176164 - DNA, 25 bp, Homo sapien
cagataatcttcctcacagtacaca

SEQ ID NO: 176165 - DNA, 25 bp, Homo sapien
gtagaaagccttgcaacgcaaagtt

SEQ ID NO: 176166 - DNA, 25 bp, Homo sapien
tctccagtgcataggaagccacctg

SEQ ID NO: 176167 - DNA, 25 bp, Homo sapien
gagagaaccacattgttaacaggcc

SEQ ID NO: 176168 - DNA, 25 bp, Homo sapien
caactacgtgctggaatacgtgagc

SEQ ID NO: 176169 - DNA, 25 bp, Homo sapien
cctgggagagtaaagccaactacgt

SEQ ID NO: 176170 - DNA, 25 bp, Homo sapien
ccatagatgcctttgttgcacttga

SEQ ID NO: 176171 - DNA, 25 bp, Homo sapien
aaagcactgggtgtggtagaggctg

SEQ ID NO: 176172 - DNA, 25 bp, Homo sapien
caggcattgctctgcccatagatgc

SEQ ID NO: 176173 - DNA, 25 bp, Homo sapien
ctggcaggcattgctctgcccatag

SEQ ID NO: 176174 - DNA, 25 bp, Homo sapien
gatgaacggtcaaagatgccagtcc

SEQ ID NO: 176175 - DNA, 25 bp, Homo sapien
caggctaggcccagaaatcgtctct

SEQ ID NO: 176176 - DNA, 25 bp, Homo sapien
aaagtcgaagatatggtccctggca

SEQ ID NO: 176177 - DNA, 25 bp, Homo sapien
gactacacaggcaaggtatgatctc

SEQ ID NO: 176178 - DNA, 25 bp, Homo sapien
tgagaatgcagggtgtgttccagga

SEQ ID NO: 176179 - DNA, 25 bp, Homo sapien
caccgtcaggcgaagcaaagctgtt

SEQ ID NO: 176180 - DNA, 25 bp, Homo sapien
aaaggagccgcgctgatttcgctca

SEQ ID NO: 176181 - DNA, 25 bp, Homo sapien
aagctgttagctcgtcctggtaccg

SEQ ID NO: 176182 - DNA, 25 bp, Homo sapien
cgtagccggtcacagagtgtcgtcc

SEQ ID NO: 176183 - DNA, 25 bp, Homo sapien
tctcgccccctccccgcctggcacc

SEQ ID NO: 176184 - DNA, 25 bp, Homo sapien
ctctcgccccctccccgcctggcac

SEQ ID NO: 176185 - DNA, 25 bp, Homo sapien
gcctctcgccccctccccgcctggc

SEQ ID NO: 176186 - DNA, 25 bp, Homo sapien
gccctcgggcctggggcctctcgcc

SEQ ID NO: 176187 - DNA, 25 bp, Homo sapien
ggccggttctctttccctgcagccg

SEQ ID NO: 176188 - DNA, 25 bp, Homo sapien
ctcggcggccggttctctttccctg

SEQ ID NO: 176189 - DNA, 25 bp, Homo sapien
ggttctctttccctgcagccggact

SEQ ID NO: 176190 - DNA, 25 bp, Homo sapien
cggcgtctcggcggccggttctctt

SEQ ID NO: 176191 - DNA, 25 bp, Homo sapien
aggggcttagcgggcggcctggatg

SEQ ID NO: 176192 - DNA, 25 bp, Homo sapien
ggggcttagcgggcggcctggatgc

SEQ ID NO: 176193 - DNA, 25 bp, Homo sapien
gggcttagcgggcggcctggatgcc

SEQ ID NO: 176194 - DNA, 25 bp, Homo sapien
tgcgccaggaatcccacagcatccc

SEQ ID NO: 176195 - DNA, 25 bp, Homo sapien
gggaggggctgcgtccccccgcgca

SEQ ID NO: 176196 - DNA, 25 bp, Homo sapien
gaggggctgcgtccccccgcgcatc

SEQ ID NO: 176197 - DNA, 25 bp, Homo sapien
ggctgcgtccccccgcgcatctggg

SEQ ID NO: 176198 - DNA, 25 bp, Homo sapien
cagggtctctggccgcggctgtcca

SEQ ID NO: 176199 - DNA, 25 bp, Homo sapien
acttttgtctgcctggccggatcta

SEQ ID NO: 176200 - DNA, 25 bp, Homo sapien
tgtccagtccgcaggtctatctgtt

SEQ ID NO: 176201 - DNA, 25 bp, Homo sapien
gctagccacagaccgaacttctctc

SEQ ID NO: 176202 - DNA, 25 bp, Homo sapien
cagtagaactggaccttgtctgtac

SEQ ID NO: 176203 - DNA, 25 bp, Homo sapien
actgcccttgggttgaagtctgtac

SEQ ID NO: 176204 - DNA, 25 bp, Homo sapien
gaggagcatactgaatcatttcgca

SEQ ID NO: 176205 - DNA, 25 bp, Homo sapien
tgcctgtaggcaaaacctgtcgttt

SEQ ID NO: 176206 - DNA, 25 bp, Homo sapien
ggtcatgttcggtttccactgcaga

SEQ ID NO: 176207 - DNA, 25 bp, Homo sapien
caccaggtggcggtattaacctgca

SEQ ID NO: 176208 - DNA, 25 bp, Homo sapien
ttggtcagaagactcaagctcatga

SEQ ID NO: 176209 - DNA, 25 bp, Homo sapien
agaacttgtgttcccttggtcagaa

SEQ ID NO: 176210 - DNA, 25 bp, Homo sapien
gacagggcatatgtcaagaaggcct

SEQ ID NO: 176211 - DNA, 25 bp, Homo sapien
gcatattctggcttactgttcacag

SEQ ID NO: 176212 - DNA, 25 bp, Homo sapien
gccccatggccacctatttctgaga

SEQ ID NO: 176213 - DNA, 25 bp, Homo sapien
tttgctttctcagactgcacagagc

SEQ ID NO: 176214 - DNA, 25 bp, Homo sapien
caagtcaggacagcaggttttgtgg

SEQ ID NO: 176215 - DNA, 25 bp, Homo sapien
gatttcaatgaatgagttcaagtca

SEQ ID NO: 176216 - DNA, 25 bp, Homo sapien
aattaggattgtaaagttctggtgg

SEQ ID NO: 176217 - DNA, 25 bp, Homo sapien
gatggggagccaggtgcattctcat

SEQ ID NO: 176218 - DNA, 25 bp, Homo sapien
tgtgaggcgctgggcccggaaacgg

SEQ ID NO: 176219 - DNA, 25 bp, Homo sapien
ccatgcttagagttagcatccaggt

SEQ ID NO: 176220 - DNA, 25 bp, Homo sapien
gcttagagttagcatccaggtggta

SEQ ID NO: 176221 - DNA, 25 bp, Homo sapien
tgcttagagttagcatccaggtggt

SEQ ID NO: 176222 - DNA, 25 bp, Homo sapien
tccacagacgttggtcctcaggtcc

SEQ ID NO: 176223 - DNA, 25 bp, Homo sapien
cacagacgttggtcctcaggtccaa

SEQ ID NO: 176224 - DNA, 25 bp, Homo sapien
cacatcattccacagacgttggtcc

SEQ ID NO: 176225 - DNA, 25 bp, Homo sapien
cattccacagacgttggtcctcagg

SEQ ID NO: 176226 - DNA, 25 bp, Homo sapien
tcttagtaaggaagtaggccacaca

SEQ ID NO: 176227 - DNA, 25 bp, Homo sapien
ggcgacttcgaagtttcttctcctc

SEQ ID NO: 176228 - DNA, 25 bp, Homo sapien
gttcagggagttgcggtactcacgc

SEQ ID NO: 176229 - DNA, 25 bp, Homo sapien
ccgatatcggcgacttcgaagtttc

SEQ ID NO: 176230 - DNA, 25 bp, Homo sapien
tggtcaccagctcttgcttgagctt

SEQ ID NO: 176231 - DNA, 25 bp, Homo sapien
actactgaaatattccaagaggact

SEQ ID NO: 176232 - DNA, 25 bp, Homo sapien
acttcactactgaaatattccaaga

SEQ ID NO: 176233 - DNA, 25 bp, Homo sapien
ttcactactgaaatattccaagagg

SEQ ID NO: 176234 - DNA, 25 bp, Homo sapien
agacccattgaatctcttgtcattg

SEQ ID NO: 176235 - DNA, 25 bp, Homo sapien
cagacccattgaatctcttgtcatt

SEQ ID NO: 176236 - DNA, 25 bp, Homo sapien
agggaccagaactcgctgtactgca

SEQ ID NO: 176237 - DNA, 25 bp, Homo sapien
gcagcagcggcattgagcatgtcct

SEQ ID NO: 176238 - DNA, 25 bp, Homo sapien
cgcttgcgcctggagttcttctgcc

SEQ ID NO: 176239 - DNA, 25 bp, Homo sapien
gagagtacaagatcccgcttgcgcc

SEQ ID NO: 176240 - DNA, 25 bp, Homo sapien
cctgccccggccacattcgactgtc

SEQ ID NO: 176241 - DNA, 25 bp, Homo sapien
cttgatcctgccccggccacattcg

SEQ ID NO: 176242 - DNA, 25 bp, Homo sapien
tcctgccccggccacattcgactgt

SEQ ID NO: 176243 - DNA, 25 bp, Homo sapien
gatcctgccccggccacattcgact

SEQ ID NO: 176244 - DNA, 25 bp, Homo sapien
aggaggaatagccctctgctgccat

SEQ ID NO: 176245 - DNA, 25 bp, Homo sapien
gaatagccctctgctgccatactca

SEQ ID NO: 176246 - DNA, 25 bp, Homo sapien
gaggaatagccctctgctgccatac

SEQ ID NO: 176247 - DNA, 25 bp, Homo sapien
ctaggaggaatagccctctgctgcc

SEQ ID NO: 176248 - DNA, 25 bp, Homo sapien
gggagccgcatgtccctctgagttg

SEQ ID NO: 176249 - DNA, 25 bp, Homo sapien
acggcagacagagccttaaaggctt

SEQ ID NO: 176250 - DNA, 25 bp, Homo sapien
ctctgagttgctgggaagcccaaag

SEQ ID NO: 176251 - DNA, 25 bp, Homo sapien
tgtcacactcctcttccacggcaga

SEQ ID NO: 176252 - DNA, 25 bp, Homo sapien
tggggaactatgtgcccggctttcc

SEQ ID NO: 176253 - DNA, 25 bp, Homo sapien
ccccatcttcatcagggatggacac

SEQ ID NO: 176254 - DNA, 25 bp, Homo sapien
ctggagacgttttaacaactcattg

SEQ ID NO: 176255 - DNA, 25 bp, Homo sapien
tggagacgttttaacaactcattgt

SEQ ID NO: 176256 - DNA, 25 bp, Homo sapien
gagacgttttaacaactcattgttg

SEQ ID NO: 176257 - DNA, 25 bp, Homo sapien
gacgttttaacaactcattgttggc

SEQ ID NO: 176258 - DNA, 25 bp, Homo sapien
agtctcactcttacaggcgcagcag

SEQ ID NO: 176259 - DNA, 25 bp, Homo sapien
gacccgctggtagataacatgcagg

SEQ ID NO: 176260 - DNA, 25 bp, Homo sapien
gggagcctgtgttgcctccattagt

SEQ ID NO: 176261 - DNA, 25 bp, Homo sapien
ccaagccatgtccagtcactgtgat

SEQ ID NO: 176262 - DNA, 25 bp, Homo sapien
ggagaagagaatggtggcactgaag

SEQ ID NO: 176263 - DNA, 25 bp, Homo sapien
agaagagaatggtggcactgaagga

SEQ ID NO: 176264 - DNA, 25 bp, Homo sapien
ggggagaagagaatggtggcactga

SEQ ID NO: 176265 - DNA, 25 bp, Homo sapien
gaagagaatggtggcactgaaggac

SEQ ID NO: 176266 - DNA, 25 bp, Homo sapien
cggatggggcagtaacaaccacgct

SEQ ID NO: 176267 - DNA, 25 bp, Homo sapien
ggcggatggggcagtaacaaccacg

SEQ ID NO: 176268 - DNA, 25 bp, Homo sapien
gatggggcagtaacaaccacgctta

SEQ ID NO: 176269 - DNA, 25 bp, Homo sapien
atggggcagtaacaaccacgcttac

SEQ ID NO: 176270 - DNA, 25 bp, Homo sapien
actgctgggccgctccaacaggtag

SEQ ID NO: 176271 - DNA, 25 bp, Homo sapien
gtaggaagcatcaacttctctggac

SEQ ID NO: 176272 - DNA, 25 bp, Homo sapien
caacaggtaggaagcatcaacttct

SEQ ID NO: 176273 - DNA, 25 bp, Homo sapien
ctgctgggccgctccaacaggtagg

SEQ ID NO: 176274 - DNA, 25 bp, Homo sapien
gagcccaggccccaagctgtagggt

SEQ ID NO: 176275 - DNA, 25 bp, Homo sapien
tctcaatgaggatggtcagaggagc

SEQ ID NO: 176276 - DNA, 25 bp, Homo sapien
ctttctcaatgaggatggtcagagg

SEQ ID NO: 176277 - DNA, 25 bp, Homo sapien
cctttctcaatgaggatggtcagag

SEQ ID NO: 176278 - DNA, 25 bp, Homo sapien
gactagtgcaacctaaggaacaggg

SEQ ID NO: 176279 - DNA, 25 bp, Homo sapien
gagtaaacaagccatgaagaagcac

SEQ ID NO: 176280 - DNA, 25 bp, Homo sapien
gacggtagagagcattccttctgcc

SEQ ID NO: 176281 - DNA, 25 bp, Homo sapien
aaatcaaggccttcctgatgaacgg

SEQ ID NO: 176282 - DNA, 25 bp, Homo sapien
tctcaagctccttaagggtggatcc

SEQ ID NO: 176283 - DNA, 25 bp, Homo sapien
tgctgtcactttgcctgcatgacca

SEQ ID NO: 176284 - DNA, 25 bp, Homo sapien
tctgtaatggaaactagctgtcctg

SEQ ID NO: 176285 - DNA, 25 bp, Homo sapien
gaatgtttgaacagctatgctgtca

SEQ ID NO: 176286 - DNA, 25 bp, Homo sapien
catttacagcttccttgtcattata

SEQ ID NO: 176287 - DNA, 25 bp, Homo sapien
tccttgtcattatagtcactgggag

SEQ ID NO: 176288 - DNA, 25 bp, Homo sapien
ctgggaggcacagctaaacctgaaa

SEQ ID NO: 176289 - DNA, 25 bp, Homo sapien
tcattatagtcactgggaggcacag

SEQ ID NO: 176290 - DNA, 25 bp, Homo sapien
aaagcttccagttgagccttgagca

SEQ ID NO: 176291 - DNA, 25 bp, Homo sapien
tgtataggattaactgatagggtag

SEQ ID NO: 176292 - DNA, 25 bp, Homo sapien
ccagttgagccttgagcaatgtata

SEQ ID NO: 176293 - DNA, 25 bp, Homo sapien
gccttgagcaatgtataggattaac

SEQ ID NO: 176294 - DNA, 25 bp, Homo sapien
tagccccgagagctttgagaacttg

SEQ ID NO: 176295 - DNA, 25 bp, Homo sapien
aagtagctcctagaactcgtgccag

SEQ ID NO: 176296 - DNA, 25 bp, Homo sapien
tacagatgttctaccgcgtgtgcct

SEQ ID NO: 176297 - DNA, 25 bp, Homo sapien
ttcagctacgggaaaggcgatcgca

SEQ ID NO: 176298 - DNA, 25 bp, Homo sapien
gattggcggttagacgatggctggg

SEQ ID NO: 176299 - DNA, 25 bp, Homo sapien
cttctggctcccggtgattggcggt

SEQ ID NO: 176300 - DNA, 25 bp, Homo sapien
ctcccggtgattggcggttagacga

SEQ ID NO: 176301 - DNA, 25 bp, Homo sapien
ggagcagggtcacggacactattgg

SEQ ID NO: 176302 - DNA, 25 bp, Homo sapien
cagtcactcaaaaagtcaggtaggg

SEQ ID NO: 176303 - DNA, 25 bp, Homo sapien
caagaacagtggatatgaccctacg

SEQ ID NO: 176304 - DNA, 25 bp, Homo sapien
cacaaatcggcgtcacacgttgggt

SEQ ID NO: 176305 - DNA, 25 bp, Homo sapien
gacttttagttactgctggcctcgg

SEQ ID NO: 176306 - DNA, 25 bp, Homo sapien
cactgctacagatctctatttttaa

SEQ ID NO: 176307 - DNA, 25 bp, Homo sapien
cacacacaagattaaggaggaaaaa

SEQ ID NO: 176308 - DNA, 25 bp, Homo sapien
cccaacactgctacagatctctatt

SEQ ID NO: 176309 - DNA, 25 bp, Homo sapien
aacacacacaagattaaggaggaaa

SEQ ID NO: 176310 - DNA, 25 bp, Homo sapien
tgtattcgtgtgtgtgcaaaaagga

SEQ ID NO: 176311 - DNA, 25 bp, Homo sapien
gtattcgtgtgtgtgcaaaaaggag

SEQ ID NO: 176312 - DNA, 25 bp, Homo sapien
ttgtattcgtgtgtgtgcaaaaagg

SEQ ID NO: 176313 - DNA, 25 bp, Homo sapien
tttgctctcgttctgtccatgaaag

SEQ ID NO: 176314 - DNA, 25 bp, Homo sapien
cttttgctctcgttctgtccatgaa

SEQ ID NO: 176315 - DNA, 25 bp, Homo sapien
ttttgctctcgttctgtccatgaaa

SEQ ID NO: 176316 - DNA, 25 bp, Homo sapien
tacaattgaaactttgggaattcaa

SEQ ID NO: 176317 - DNA, 25 bp, Homo sapien
caaaagtaacattcttgcctttgag

SEQ ID NO: 176318 - DNA, 25 bp, Homo sapien
gaattcaaaagtaacattcttgcct

SEQ ID NO: 176319 - DNA, 25 bp, Homo sapien
ttcaaaagtaacattcttgcctttg

SEQ ID NO: 176320 - DNA, 25 bp, Homo sapien
catttgctagctgaggaggatatca

SEQ ID NO: 176321 - DNA, 25 bp, Homo sapien
cacatagaatccgtgggccagaata

SEQ ID NO: 176322 - DNA, 25 bp, Homo sapien
cgtatctgttatagccctgggagca

SEQ ID NO: 176323 - DNA, 25 bp, Homo sapien
tactcctgacacaagggaaatgctc

SEQ ID NO: 176324 - DNA, 25 bp, Homo sapien
gaagatgtagcttgggtcctgccta

SEQ ID NO: 176325 - DNA, 25 bp, Homo sapien
acgcagctaaccatttcccaacagt

SEQ ID NO: 176326 - DNA, 25 bp, Homo sapien
tgggaggaagatgacctacctgtgc

SEQ ID NO: 176327 - DNA, 25 bp, Homo sapien
tcccaacagtctacgagaaggaaga

SEQ ID NO: 176328 - DNA, 25 bp, Homo sapien
gcagcagctcattaatgactggtaa

SEQ ID NO: 176329 - DNA, 25 bp, Homo sapien
tactgatacaattgaaggcccttcc

SEQ ID NO: 176330 - DNA, 25 bp, Homo sapien
catagaggtcaatgtgccagagctt

SEQ ID NO: 176331 - DNA, 25 bp, Homo sapien
cactataaataggatggaggatggg

SEQ ID NO: 176332 - DNA, 25 bp, Homo sapien
tcccgcacgtggtagaggttgactg

SEQ ID NO: 176333 - DNA, 25 bp, Homo sapien
ccaggtcataggaatagccccgatc

SEQ ID NO: 176334 - DNA, 25 bp, Homo sapien
ccttcactgtccacgtagtagaggc

SEQ ID NO: 176335 - DNA, 25 bp, Homo sapien
tagatggctcgacgggccagatcat

SEQ ID NO: 176336 - DNA, 25 bp, Homo sapien
cacccacaaaacaagtacattccaa

SEQ ID NO: 176337 - DNA, 25 bp, Homo sapien
gacttaggtttcaagcacagaactt

SEQ ID NO: 176338 - DNA, 25 bp, Homo sapien
tgccatgttgccgatcctctcagca

SEQ ID NO: 176339 - DNA, 25 bp, Homo sapien
gcacacccacaaaacaagtacattc

SEQ ID NO: 176340 - DNA, 25 bp, Homo sapien
tcatagattcgacattgccgagcca

SEQ ID NO: 176341 - DNA, 25 bp, Homo sapien
cagctgctacagagatgcgttcctt

SEQ ID NO: 176342 - DNA, 25 bp, Homo sapien
caccgtctgggaggcaatgtaagca

SEQ ID NO: 176343 - DNA, 25 bp, Homo sapien
cctagcaggtatgggttgatctcta

SEQ ID NO: 176344 - DNA, 25 bp, Homo sapien
ctgcaactatgactccatggcggaa

SEQ ID NO: 176345 - DNA, 25 bp, Homo sapien
ccgcaaactccggtcaggctgggag

SEQ ID NO: 176346 - DNA, 25 bp, Homo sapien
tgggccaatgagacagcaaaactgc

SEQ ID NO: 176347 - DNA, 25 bp, Homo sapien
caagtcgcgggcgttcagtactcag

SEQ ID NO: 176348 - DNA, 25 bp, Homo sapien
aaaactgctgcggtccgaacgagag

SEQ ID NO: 176349 - DNA, 25 bp, Homo sapien
aggccagggtggttgttccatgaag

SEQ ID NO: 176350 - DNA, 25 bp, Homo sapien
cttgaaggccagggtggttgttcca

SEQ ID NO: 176351 - DNA, 25 bp, Homo sapien
ccagggtggttgttccatgaagcat

SEQ ID NO: 176352 - DNA, 25 bp, Homo sapien
ttgaaggccagggtggttgttccat

SEQ ID NO: 176353 - DNA, 25 bp, Homo sapien
aggctcagaccatcactgagactcc

SEQ ID NO: 176354 - DNA, 25 bp, Homo sapien
cagaccatcactgagactccctgga

SEQ ID NO: 176355 - DNA, 25 bp, Homo sapien
gcggtctctccaacacgctggcaag

SEQ ID NO: 176356 - DNA, 25 bp, Homo sapien
aacccgcgctggttcaccggtagcg

SEQ ID NO: 176357 - DNA, 25 bp, Homo sapien
cctagcaaagataggccgggcaacg

SEQ ID NO: 176358 - DNA, 25 bp, Homo sapien
cattttgactgctggcaagcacgcc

SEQ ID NO: 176359 - DNA, 25 bp, Homo sapien
attaaatctattccggaatggagcc

SEQ ID NO: 176360 - DNA, 25 bp, Homo sapien
gaagggccagatgcgaaagaccatt

SEQ ID NO: 176361 - DNA, 25 bp, Homo sapien
gctttggtcatgcaagtagtcctgg

SEQ ID NO: 176362 - DNA, 25 bp, Homo sapien
gtcatgcaagtagtcctggatcaga

SEQ ID NO: 176363 - DNA, 25 bp, Homo sapien
aacgtccatgttgcgtaagggaagt

SEQ ID NO: 176364 - DNA, 25 bp, Homo sapien
gaagtgactgaaaacgtccatgttg

SEQ ID NO: 176365 - DNA, 25 bp, Homo sapien
ttctggtggaaattcgaataagtaa

SEQ ID NO: 176366 - DNA, 25 bp, Homo sapien
tctggtggaaattcgaataagtaat

SEQ ID NO: 176367 - DNA, 25 bp, Homo sapien
gaaattcgaataagtaatgaattgc

SEQ ID NO: 176368 - DNA, 25 bp, Homo sapien
cttctggtggaaattcgaataagta

SEQ ID NO: 176369 - DNA, 25 bp, Homo sapien
gactcggcataagagggtgcatatt

SEQ ID NO: 176370 - DNA, 25 bp, Homo sapien
acaggtgtatgtagttctgtgccca

SEQ ID NO: 176371 - DNA, 25 bp, Homo sapien
ttcacacgagtgtggcaggcgatgc

SEQ ID NO: 176372 - DNA, 25 bp, Homo sapien
ggtgcatattcatgtccacaggtgt

SEQ ID NO: 176373 - DNA, 25 bp, Homo sapien
gagctctcatgctggttcctgggtg

SEQ ID NO: 176374 - DNA, 25 bp, Homo sapien
gcctgagctctcatgctggttcctg

SEQ ID NO: 176375 - DNA, 25 bp, Homo sapien
gataattgcagttctggctcagctc

SEQ ID NO: 176376 - DNA, 25 bp, Homo sapien
ttgggagataattgcagttctggct

SEQ ID NO: 176377 - DNA, 25 bp, Homo sapien
ctagttgactgcttctgtccgtcaa

SEQ ID NO: 176378 - DNA, 25 bp, Homo sapien
ttgtgttctgcaaagactaagacca

SEQ ID NO: 176379 - DNA, 25 bp, Homo sapien
gactgcttctgtccgtcaacagcct

SEQ ID NO: 176380 - DNA, 25 bp, Homo sapien
ctcctttgtgttctgcaaagactaa

SEQ ID NO: 176381 - DNA, 25 bp, Homo sapien
ttccctctctcagctggaggccagt

SEQ ID NO: 176382 - DNA, 25 bp, Homo sapien
ggctgaggccatgagtaatggatgg

SEQ ID NO: 176383 - DNA, 25 bp, Homo sapien
gaggccatgagtaatggatggaacc

SEQ ID NO: 176384 - DNA, 25 bp, Homo sapien
agggaggcggccacacgggaggctg

SEQ ID NO: 176385 - DNA, 25 bp, Homo sapien
caggggagccacgttagaggcagtg

SEQ ID NO: 176386 - DNA, 25 bp, Homo sapien
aggggagccacgttagaggcagtgg

SEQ ID NO: 176387 - DNA, 25 bp, Homo sapien
gggagccacgttagaggcagtgggg

SEQ ID NO: 176388 - DNA, 25 bp, Homo sapien
acaggggagccacgttagaggcagt

SEQ ID NO: 176389 - DNA, 25 bp, Homo sapien
agagcatgtgtatgggcaaggaaga

SEQ ID NO: 176390 - DNA, 25 bp, Homo sapien
gagcatgtgtatgggcaaggaagac

SEQ ID NO: 176391 - DNA, 25 bp, Homo sapien
catgtgtatgggcaaggaagacgca

SEQ ID NO: 176392 - DNA, 25 bp, Homo sapien
acagagcatgtgtatgggcaaggaa

SEQ ID NO: 176393 - DNA, 25 bp, Homo sapien
tgcagagacaaaacgccacggagga

SEQ ID NO: 176394 - DNA, 25 bp, Homo sapien
cccggacagaggagcgtgtcacaga

SEQ ID NO: 176395 - DNA, 25 bp, Homo sapien
gatagagacaaagattcctggagag

SEQ ID NO: 176396 - DNA, 25 bp, Homo sapien
acacacaccgactcaggaggaggga

SEQ ID NO: 176397 - DNA, 25 bp, Homo sapien
gagggcctgtgcccgctgccccccc

SEQ ID NO: 176398 - DNA, 25 bp, Homo sapien
cagagggcctgtgcccgctgccccc

SEQ ID NO: 176399 - DNA, 25 bp, Homo sapien
tcactcagagggcctgtgcccgctg

SEQ ID NO: 176400 - DNA, 25 bp, Homo sapien
actcagagggcctgtgcccgctgcc

SEQ ID NO: 176401 - DNA, 25 bp, Homo sapien
tccttggccccatacagctcggcca

SEQ ID NO: 176402 - DNA, 25 bp, Homo sapien
agagcggaccccagtcgtccagcgg

SEQ ID NO: 176403 - DNA, 25 bp, Homo sapien
ggccagggtgcggaagagcggaccc

SEQ ID NO: 176404 - DNA, 25 bp, Homo sapien
tgagggagccgcaagaggagccgcg

SEQ ID NO: 176405 - DNA, 25 bp, Homo sapien
ctgcaccgagtcgtacgggggtacg

SEQ ID NO: 176406 - DNA, 25 bp, Homo sapien
gcgccaggagctgcgccacgtcggc

SEQ ID NO: 176407 - DNA, 25 bp, Homo sapien
gagctgcgccacgtcggcggggccg

SEQ ID NO: 176408 - DNA, 25 bp, Homo sapien
tgcaccgagtcgtacgggggtacgc

SEQ ID NO: 176409 - DNA, 25 bp, Homo sapien
gtgatgatgttctctcggacgtcct

SEQ ID NO: 176410 - DNA, 25 bp, Homo sapien
atgatgttctctcggacgtcctcct

SEQ ID NO: 176411 - DNA, 25 bp, Homo sapien
ggcaacacgtctcggcgcgcgggag

SEQ ID NO: 176412 - DNA, 25 bp, Homo sapien
ccctcgtcgtcgtaggtgatgatgt

SEQ ID NO: 176413 - DNA, 25 bp, Homo sapien
agggccacgaagagcaccaccaggg

SEQ ID NO: 176414 - DNA, 25 bp, Homo sapien
tatgtaccactgtggcctgactcac

SEQ ID NO: 176415 - DNA, 25 bp, Homo sapien
ctatgtaccactgtggcctgactca

SEQ ID NO: 176416 - DNA, 25 bp, Homo sapien
tgatggcaagcagggcgccggtgct

SEQ ID NO: 176417 - DNA, 25 bp, Homo sapien
agcggcacacactaacagtcactgt

SEQ ID NO: 176418 - DNA, 25 bp, Homo sapien
acactaacagtcactgtggcagtgc

SEQ ID NO: 176419 - DNA, 25 bp, Homo sapien
ggtgatgatggcaagcagggcgccg

SEQ ID NO: 176420 - DNA, 25 bp, Homo sapien
ctatgggaaccaagtagggggcatg

SEQ ID NO: 176421 - DNA, 25 bp, Homo sapien
tgggaaccaagtagggggcatggcg

SEQ ID NO: 176422 - DNA, 25 bp, Homo sapien
accaagtagggggcatggcggggtg

SEQ ID NO: 176423 - DNA, 25 bp, Homo sapien
ccaagtagggggcatggcggggtgg

SEQ ID NO: 176424 - DNA, 25 bp, Homo sapien
aggtagggttggtccagcccataga

SEQ ID NO: 176425 - DNA, 25 bp, Homo sapien
ttccaggtagggttggtccagccca

SEQ ID NO: 176426 - DNA, 25 bp, Homo sapien
aaggtttacaaagagccaacgaatg

SEQ ID NO: 176427 - DNA, 25 bp, Homo sapien
atgagtacaagtccacacccatctt

SEQ ID NO: 176428 - DNA, 25 bp, Homo sapien
gagacatggctactgttgccaactt

SEQ ID NO: 176429 - DNA, 25 bp, Homo sapien
gtaaagttggcatcagggcccagag

SEQ ID NO: 176430 - DNA, 25 bp, Homo sapien
aggaccttgaaaggagacatggcta

SEQ ID NO: 176431 - DNA, 25 bp, Homo sapien
aaagttggcatcagggcccagagga

SEQ ID NO: 176432 - DNA, 25 bp, Homo sapien
tgcagagtcacacacaaaagtatcg

SEQ ID NO: 176433 - DNA, 25 bp, Homo sapien
cacaaaagtatcgtagggctcagcc

SEQ ID NO: 176434 - DNA, 25 bp, Homo sapien
acgcgcgaggcctgtgcagaactgt

SEQ ID NO: 176435 - DNA, 25 bp, Homo sapien
gatggccacttgcacgcgcgaggcc

SEQ ID NO: 176436 - DNA, 25 bp, Homo sapien
tgcatgtaatgtacaggtagaaaac

SEQ ID NO: 176437 - DNA, 25 bp, Homo sapien
ggaacaataccaagtgcatacaata

SEQ ID NO: 176438 - DNA, 25 bp, Homo sapien
taacatatgtggtgcatgggcatgg

SEQ ID NO: 176439 - DNA, 25 bp, Homo sapien
gccacatgaagcatatagcatgcac

SEQ ID NO: 176440 - DNA, 25 bp, Homo sapien
cagatatccacatatacaagggcag

SEQ ID NO: 176441 - DNA, 25 bp, Homo sapien
tgcacattcatataggccttcactg

SEQ ID NO: 176442 - DNA, 25 bp, Homo sapien
tacacatggctgagaacatacccac

SEQ ID NO: 176443 - DNA, 25 bp, Homo sapien
gactattcacagaagatcgggaggg

SEQ ID NO: 176444 - DNA, 25 bp, Homo sapien
gggattcccacagcgcttccaacag

SEQ ID NO: 176445 - DNA, 25 bp, Homo sapien
tccactcagcaaccagaagaggtac

SEQ ID NO: 176446 - DNA, 25 bp, Homo sapien
agcaaccagaagaggtacccagccc

SEQ ID NO: 176447 - DNA, 25 bp, Homo sapien
agcgcttccaacagggcttctctgg

SEQ ID NO: 176448 - DNA, 25 bp, Homo sapien
tggtagcaaggatccaggctaggac

SEQ ID NO: 176449 - DNA, 25 bp, Homo sapien
ggcaagtcaggtaagggaatgactt

SEQ ID NO: 176450 - DNA, 25 bp, Homo sapien
gaatgctcaggcacacccactgtgc

SEQ ID NO: 176451 - DNA, 25 bp, Homo sapien
ggctatgtaaggtctagtttatttc

SEQ ID NO: 176452 - DNA, 25 bp, Homo sapien
cgatggcagttagcacccttctcca

SEQ ID NO: 176453 - DNA, 25 bp, Homo sapien
tggtgagggtgcgatggcagttagc

SEQ ID NO: 176454 - DNA, 25 bp, Homo sapien
tcagtggccgcacgctggtgagggt

SEQ ID NO: 176455 - DNA, 25 bp, Homo sapien
agggtgcgatggcagttagcaccct

SEQ ID NO: 176456 - DNA, 25 bp, Homo sapien
agaagcaacgctccggatctgagtg

SEQ ID NO: 176457 - DNA, 25 bp, Homo sapien
tgtgccaggcgcgagcctcgcgatc

SEQ ID NO: 176458 - DNA, 25 bp, Homo sapien
tcctcgggctggatagagaagcaac

SEQ ID NO: 176459 - DNA, 25 bp, Homo sapien
tgctgtatggatggtgccttcctcg

SEQ ID NO: 176460 - DNA, 25 bp, Homo sapien
gagtaggagcgctggctctcaaagt

SEQ ID NO: 176461 - DNA, 25 bp, Homo sapien
acgcacagaggccacatccttgaag

SEQ ID NO: 176462 - DNA, 25 bp, Homo sapien
gagtccaggtcagccgcggagatct

SEQ ID NO: 176463 - DNA, 25 bp, Homo sapien
ccgcagataggctgggtcaatgagc

SEQ ID NO: 176464 - DNA, 25 bp, Homo sapien
agtgaggagcccgtctcgaccctgc

SEQ ID NO: 176465 - DNA, 25 bp, Homo sapien
tgtatgccatcagggcgttgtcccc

SEQ ID NO: 176466 - DNA, 25 bp, Homo sapien
gaccctgcaagtctgtgctgatgct

SEQ ID NO: 176467 - DNA, 25 bp, Homo sapien
tccaccacggagaactggtataggc

SEQ ID NO: 176468 - DNA, 25 bp, Homo sapien
tggatcaccaccaagaactcctcct

SEQ ID NO: 176469 - DNA, 25 bp, Homo sapien
agcgtgacagtcaccgtagtgctgc

SEQ ID NO: 176470 - DNA, 25 bp, Homo sapien
gttgtcgttgacatcgctgagcgtg

SEQ ID NO: 176471 - DNA, 25 bp, Homo sapien
ttgacatcgctgagcgtgacagtca

SEQ ID NO: 176472 - DNA, 25 bp, Homo sapien
gtcatcagcatcgtgagcagtcacc

SEQ ID NO: 176473 - DNA, 25 bp, Homo sapien
gaacagtgtacaccagcttggcact

SEQ ID NO: 176474 - DNA, 25 bp, Homo sapien
cagaacagtgtacaccagcttggca

SEQ ID NO: 176475 - DNA, 25 bp, Homo sapien
catcgtgagcagtcacctggatcac

SEQ ID NO: 176476 - DNA, 25 bp, Homo sapien
tgccagcacgccattcagcagcagc

SEQ ID NO: 176477 - DNA, 25 bp, Homo sapien
gagagctccagaagacgggaactgg

SEQ ID NO: 176478 - DNA, 25 bp, Homo sapien
tctggggcagacaacaagaagggaa

SEQ ID NO: 176479 - DNA, 25 bp, Homo sapien
atgcagatacgagggaggctgaatt

SEQ ID NO: 176480 - DNA, 25 bp, Homo sapien
ggtggcatggtagggcccaagggga

SEQ ID NO: 176481 - DNA, 25 bp, Homo sapien
tggcatggtagggcccaaggggaaa

SEQ ID NO: 176482 - DNA, 25 bp, Homo sapien
cgacattggacatctcgggcacggt

SEQ ID NO: 176483 - DNA, 25 bp, Homo sapien
gacattggacatctcgggcacggtg

SEQ ID NO: 176484 - DNA, 25 bp, Homo sapien
ggtaacatgaatattgcctgtggcc

SEQ ID NO: 176485 - DNA, 25 bp, Homo sapien
tcaatcacaaatacggtgcctgccc

SEQ ID NO: 176486 - DNA, 25 bp, Homo sapien
tcaacaggtacttggtgcggccctc

SEQ ID NO: 176487 - DNA, 25 bp, Homo sapien
tgggccagtagcacatattgcgcct

SEQ ID NO: 176488 - DNA, 25 bp, Homo sapien
agagcaggccctgggtgttcccggg

SEQ ID NO: 176489 - DNA, 25 bp, Homo sapien
gctccttcgagtccgcagcagagca

SEQ ID NO: 176490 - DNA, 25 bp, Homo sapien
cttgccaatgagaacaggctctgga

SEQ ID NO: 176491 - DNA, 25 bp, Homo sapien
ccaatgagaacaggctctggaccag

SEQ ID NO: 176492 - DNA, 25 bp, Homo sapien
tgccagacgccccatgcagccccag

SEQ ID NO: 176493 - DNA, 25 bp, Homo sapien
gctgggccaggccacgtggcccatg

SEQ ID NO: 176494 - DNA, 25 bp, Homo sapien
ctgggccaggccacgtggcccatga

SEQ ID NO: 176495 - DNA, 25 bp, Homo sapien
gatgcgttgaggctaccccatggat

SEQ ID NO: 176496 - DNA, 25 bp, Homo sapien
gggcagatgcgttgaggctacccca

SEQ ID NO: 176497 - DNA, 25 bp, Homo sapien
cagatgcgttgaggctaccccatgg

SEQ ID NO: 176498 - DNA, 25 bp, Homo sapien
tgcgttgaggctaccccatggatcc

SEQ ID NO: 176499 - DNA, 25 bp, Homo sapien
tcaactctgagtagagaactgggga

SEQ ID NO: 176500 - DNA, 25 bp, Homo sapien
tctctggtcagtcaactctgagtag

SEQ ID NO: 176501 - DNA, 25 bp, Homo sapien
tccagccctccaagctgataaatct

SEQ ID NO: 176502 - DNA, 25 bp, Homo sapien
aaatctctggtcagtcaactctgag

SEQ ID NO: 176503 - DNA, 25 bp, Homo sapien
cgagccgattggagcgggcgccgcg

SEQ ID NO: 176504 - DNA, 25 bp, Homo sapien
cgggggcacagccccgagccgattg

SEQ ID NO: 176505 - DNA, 25 bp, Homo sapien
cccgagccgattggagcgggcgccg

SEQ ID NO: 176506 - DNA, 25 bp, Homo sapien
ccgggggcacagccccgagccgatt

SEQ ID NO: 176507 - DNA, 25 bp, Homo sapien
tgctccatgccttcccgaatgagga

SEQ ID NO: 176508 - DNA, 25 bp, Homo sapien
cggacacaggttgctccatgccttc

SEQ ID NO: 176509 - DNA, 25 bp, Homo sapien
cttcccgaatgaggaaggtccacag

SEQ ID NO: 176510 - DNA, 25 bp, Homo sapien
ggtgccgccacggacacaggttgct

SEQ ID NO: 176511 - DNA, 25 bp, Homo sapien
cagctcataggtgacccagtcctgg

SEQ ID NO: 176512 - DNA, 25 bp, Homo sapien
tacccagggaggtggtaagcaggat

SEQ ID NO: 176513 - DNA, 25 bp, Homo sapien
tgttcccaagagaaggctgtaagta

SEQ ID NO: 176514 - DNA, 25 bp, Homo sapien
aaaggtggatataaagtggaacctg

SEQ ID NO: 176515 - DNA, 25 bp, Homo sapien
ccatttggtatgtatgtagggatag

SEQ ID NO: 176516 - DNA, 25 bp, Homo sapien
ggctggtacctgcagctctagtgtt

SEQ ID NO: 176517 - DNA, 25 bp, Homo sapien
ggagactgtgcctatccctctgtgg

SEQ ID NO: 176518 - DNA, 25 bp, Homo sapien
tgatgtgaaagacccttggctccag

SEQ ID NO: 176519 - DNA, 25 bp, Homo sapien
tctcgctccagctgtcggttccgtt

SEQ ID NO: 176520 - DNA, 25 bp, Homo sapien
gactgtgctcccgacgtttctctcg

SEQ ID NO: 176521 - DNA, 25 bp, Homo sapien
tggcgcttggtgtccctgcgatccc

SEQ ID NO: 176522 - DNA, 25 bp, Homo sapien
gactccggcttctgctgtggcgctt

SEQ ID NO: 176523 - DNA, 25 bp, Homo sapien
ttctcagctaaatacaatcaagttc

SEQ ID NO: 176524 - DNA, 25 bp, Homo sapien
tagctccctaccgtcagcgtagatg

SEQ ID NO: 176525 - DNA, 25 bp, Homo sapien
catgcctagccaccaagtttcaact

SEQ ID NO: 176526 - DNA, 25 bp, Homo sapien
gcacggcctaaaatcaagttctaag

SEQ ID NO: 176527 - DNA, 25 bp, Homo sapien
agggagcagggcacgaagaagagca

SEQ ID NO: 176528 - DNA, 25 bp, Homo sapien
gagcagggcacgaagaagagcactc

SEQ ID NO: 176529 - DNA, 25 bp, Homo sapien
ctagggagcagggcacgaagaagag

SEQ ID NO: 176530 - DNA, 25 bp, Homo sapien
agcagggcacgaagaagagcactca

SEQ ID NO: 176531 - DNA, 25 bp, Homo sapien
tgccttggtctttcggaaaaggtca

SEQ ID NO: 176532 - DNA, 25 bp, Homo sapien
agtcagtgggagccaatagatgcag

SEQ ID NO: 176533 - DNA, 25 bp, Homo sapien
tcagtgggagccaatagatgcaggg

SEQ ID NO: 176534 - DNA, 25 bp, Homo sapien
ttggtctttcggaaaaggtcatcca

SEQ ID NO: 176535 - DNA, 25 bp, Homo sapien
cattcacgctctgatcgagtccgct

SEQ ID NO: 176536 - DNA, 25 bp, Homo sapien
acttcgcacgttccttgcggcggcg

SEQ ID NO: 176537 - DNA, 25 bp, Homo sapien
gcccttctcgaactttgtcccgatc

SEQ ID NO: 176538 - DNA, 25 bp, Homo sapien
gcggtcacgggaccttgatcgggaa

SEQ ID NO: 176539 - DNA, 25 bp, Homo sapien
agagggacggtccaccaagaggcct

SEQ ID NO: 176540 - DNA, 25 bp, Homo sapien
ggtccaccaagaggcctcggtgata

SEQ ID NO: 176541 - DNA, 25 bp, Homo sapien
tagtttcagagggacggtccaccaa

SEQ ID NO: 176542 - DNA, 25 bp, Homo sapien
accaagaggcctcggtgataatcca

SEQ ID NO: 176543 - DNA, 25 bp, Homo sapien
acaaggacagttaggatagaggtga

SEQ ID NO: 176544 - DNA, 25 bp, Homo sapien
agaggtgatatcactcccactcaag

SEQ ID NO: 176545 - DNA, 25 bp, Homo sapien
acagttaggatagaggtgatatcac

SEQ ID NO: 176546 - DNA, 25 bp, Homo sapien
ggatagaggtgatatcactcccact

SEQ ID NO: 176547 - DNA, 25 bp, Homo sapien
tggactggggccatttgaccccgtg

SEQ ID NO: 176548 - DNA, 25 bp, Homo sapien
ctcggcatagtcagcacaaaggaat

SEQ ID NO: 176549 - DNA, 25 bp, Homo sapien
ccgtgcagagctgtgcgggtggcaa

SEQ ID NO: 176550 - DNA, 25 bp, Homo sapien
gagctgtgcgggtggcaacagcttc

SEQ ID NO: 176551 - DNA, 25 bp, Homo sapien
tcctgtgcgccccaacaactccttt

SEQ ID NO: 176552 - DNA, 25 bp, Homo sapien
tgtgcgccccaacaactcctttagc

SEQ ID NO: 176553 - DNA, 25 bp, Homo sapien
gatttgatcttgtcaatccagaagg

SEQ ID NO: 176554 - DNA, 25 bp, Homo sapien
tgatcttgtcaatccagaaggcctc

SEQ ID NO: 176555 - DNA, 25 bp, Homo sapien
ctttcagggtctagcagaaggcaag

SEQ ID NO: 176556 - DNA, 25 bp, Homo sapien
gacgttgtatgtgaggccttctgca

SEQ ID NO: 176557 - DNA, 25 bp, Homo sapien
cccagcactaattgagacgttgtat

SEQ ID NO: 176558 - DNA, 25 bp, Homo sapien
caatctttagatttcccgagctgct

SEQ ID NO: 176559 - DNA, 25 bp, Homo sapien
ggtaatggaaactccggacttctgc

SEQ ID NO: 176560 - DNA, 25 bp, Homo sapien
gactgggtcatcaatggtaatggaa

SEQ ID NO: 176561 - DNA, 25 bp, Homo sapien
cacctgggcagttcggactgggtca

SEQ ID NO: 176562 - DNA, 25 bp, Homo sapien
tctgctggctaatggaacgtcgagt

SEQ ID NO: 176563 - DNA, 25 bp, Homo sapien
ccttaatctaaacgtgcagagcacc

SEQ ID NO: 176564 - DNA, 25 bp, Homo sapien
ttttggtaggaagcaatactggctc

SEQ ID NO: 176565 - DNA, 25 bp, Homo sapien
gctaggctaacctcctcatcatgga

SEQ ID NO: 176566 - DNA, 25 bp, Homo sapien
gctttcagcgatccaaatgaggtgc

SEQ ID NO: 176567 - DNA, 25 bp, Homo sapien
ttctttacttcatgctctgcaggtg

SEQ ID NO: 176568 - DNA, 25 bp, Homo sapien
gtgggggcaaggccacctctactga

SEQ ID NO: 176569 - DNA, 25 bp, Homo sapien
ggggcaaggccacctctactgacac

SEQ ID NO: 176570 - DNA, 25 bp, Homo sapien
ctttctttacttcatgctctgcagg

SEQ ID NO: 176571 - DNA, 25 bp, Homo sapien
ttctcctggccctctgcaggtacta

SEQ ID NO: 176572 - DNA, 25 bp, Homo sapien
ctggggaggtacaggaggttctgct

SEQ ID NO: 176573 - DNA, 25 bp, Homo sapien
gaggttctgcttcaggttccttctc

SEQ ID NO: 176574 - DNA, 25 bp, Homo sapien
gttctgcttcaggttccttctcttc

SEQ ID NO: 176575 - DNA, 25 bp, Homo sapien
tgactgtccggcatattttcagccc

SEQ ID NO: 176576 - DNA, 25 bp, Homo sapien
gagagtcatcagcatgaagatccac

SEQ ID NO: 176577 - DNA, 25 bp, Homo sapien
agccccttgtcatgggtcccatcat

SEQ ID NO: 176578 - DNA, 25 bp, Homo sapien
tcatcgccattacgctctgtctcat

SEQ ID NO: 176579 - DNA, 25 bp, Homo sapien
cgccaggggtttgatgtcggggatg

SEQ ID NO: 176580 - DNA, 25 bp, Homo sapien
tgccccgccaggggtttgatgtcgg

SEQ ID NO: 176581 - DNA, 25 bp, Homo sapien
ccgccaggggtttgatgtcggggat

SEQ ID NO: 176582 - DNA, 25 bp, Homo sapien
ctgccccgccaggggtttgatgtcg

SEQ ID NO: 176583 - DNA, 25 bp, Homo sapien
tactcccaccttaacaggtctcatc

SEQ ID NO: 176584 - DNA, 25 bp, Homo sapien
catgtctactcccaccttaacaggt

SEQ ID NO: 176585 - DNA, 25 bp, Homo sapien
ccgttacactgggcccatgtctact

SEQ ID NO: 176586 - DNA, 25 bp, Homo sapien
cccaccccgttacactgggcccatg

SEQ ID NO: 176587 - DNA, 25 bp, Homo sapien
tgattcagtggtgatactgatggaa

SEQ ID NO: 176588 - DNA, 25 bp, Homo sapien
agcgtcgtttccgaccaggctggcc

SEQ ID NO: 176589 - DNA, 25 bp, Homo sapien
tggctccccagcgtcgtttccgacc

SEQ ID NO: 176590 - DNA, 25 bp, Homo sapien
ctttagtgattcagtggtgatactg

SEQ ID NO: 176591 - DNA, 25 bp, Homo sapien
gacccaacagttagatggtctcagg

SEQ ID NO: 176592 - DNA, 25 bp, Homo sapien
aacagttagatggtctcaggacctc

SEQ ID NO: 176593 - DNA, 25 bp, Homo sapien
gaaatagacccaacagttagatggt

SEQ ID NO: 176594 - DNA, 25 bp, Homo sapien
agaaatagacccaacagttagatgg

SEQ ID NO: 176595 - DNA, 25 bp, Homo sapien
caggttacctctggctggagttttg

SEQ ID NO: 176596 - DNA, 25 bp, Homo sapien
gttacctctggctggagttttggta

SEQ ID NO: 176597 - DNA, 25 bp, Homo sapien
ctacaggttacctctggctggagtt

SEQ ID NO: 176598 - DNA, 25 bp, Homo sapien
cctctggctggagttttggtaaaag

SEQ ID NO: 176599 - DNA, 25 bp, Homo sapien
atcagggatttggggctggacttac

SEQ ID NO: 176600 - DNA, 25 bp, Homo sapien
ttttatcagggatttggggctggac

SEQ ID NO: 176601 - DNA, 25 bp, Homo sapien
tatcagggatttggggctggactta

SEQ ID NO: 176602 - DNA, 25 bp, Homo sapien
tttatcagggatttggggctggact

SEQ ID NO: 176603 - DNA, 25 bp, Homo sapien
gacaacggagatcttcctcttgaat

SEQ ID NO: 176604 - DNA, 25 bp, Homo sapien
agacaacggagatcttcctcttgaa

SEQ ID NO: 176605 - DNA, 25 bp, Homo sapien
gaggagttcagtagcctctcagccc

SEQ ID NO: 176606 - DNA, 25 bp, Homo sapien
gcggcaaacggcaaaaacgaagcag

SEQ ID NO: 176607 - DNA, 25 bp, Homo sapien
caccgtctgagtcgagaggacacca

SEQ ID NO: 176608 - DNA, 25 bp, Homo sapien
caggtccttccttgctaactcgagg

SEQ ID NO: 176609 - DNA, 25 bp, Homo sapien
caaggagatccttagactttccagc

SEQ ID NO: 176610 - DNA, 25 bp, Homo sapien
gctttgagatgcttggacagcagac

SEQ ID NO: 176611 - DNA, 25 bp, Homo sapien
gacatctttgggacaagtctctacc

SEQ ID NO: 176612 - DNA, 25 bp, Homo sapien
tgctagcaaaaagaactcaaaggtg

SEQ ID NO: 176613 - DNA, 25 bp, Homo sapien
tgggatcttcagttcagccaatcgc

SEQ ID NO: 176614 - DNA, 25 bp, Homo sapien
ggatcttcagttcagccaatcgcac

SEQ ID NO: 176615 - DNA, 25 bp, Homo sapien
ctgggatcttcagttcagccaatcg

SEQ ID NO: 176616 - DNA, 25 bp, Homo sapien
gggatcttcagttcagccaatcgca

SEQ ID NO: 176617 - DNA, 25 bp, Homo sapien
tgggttggcaaaaaaggtgggcgca

SEQ ID NO: 176618 - DNA, 25 bp, Homo sapien
tgtactgtatctagtcaaccgccgg

SEQ ID NO: 176619 - DNA, 25 bp, Homo sapien
caaccgccggtccaatcagaatgag

SEQ ID NO: 176620 - DNA, 25 bp, Homo sapien
atgagccctccctgctaggcgctgt

SEQ ID NO: 176621 - DNA, 25 bp, Homo sapien
gtagtcagcacggcactgccagagt

SEQ ID NO: 176622 - DNA, 25 bp, Homo sapien
gtttccatgatgtcaagacagttca

SEQ ID NO: 176623 - DNA, 25 bp, Homo sapien
cgtggtagtcagcacggcactgcca

SEQ ID NO: 176624 - DNA, 25 bp, Homo sapien
agtttccatgatgtcaagacagttc

SEQ ID NO: 176625 - DNA, 25 bp, Homo sapien
tgatccttgccttttatcgtgagag

SEQ ID NO: 176626 - DNA, 25 bp, Homo sapien
tacttggaatccaggtgatgactcc

SEQ ID NO: 176627 - DNA, 25 bp, Homo sapien
tatgtccaccagtggcaagctgcag

SEQ ID NO: 176628 - DNA, 25 bp, Homo sapien
tcttgcagtccctgatgagatggcc

SEQ ID NO: 176629 - DNA, 25 bp, Homo sapien
agcagcaaggtcagaatacttctct

SEQ ID NO: 176630 - DNA, 25 bp, Homo sapien
gcagcaaggtcagaatacttctctt

SEQ ID NO: 176631 - DNA, 25 bp, Homo sapien
tcttcggagagttgtggctggcatc

SEQ ID NO: 176632 - DNA, 25 bp, Homo sapien
gaatacttctcttcggagagttgtg

SEQ ID NO: 176633 - DNA, 25 bp, Homo sapien
catctgatgagcaagtggtgacaca

SEQ ID NO: 176634 - DNA, 25 bp, Homo sapien
cccaagtagggagatgatgcaagtc

SEQ ID NO: 176635 - DNA, 25 bp, Homo sapien
tcacagcttaagtagagggtcccac

SEQ ID NO: 176636 - DNA, 25 bp, Homo sapien
ggcactgcgatcacaaactttagga

SEQ ID NO: 176637 - DNA, 25 bp, Homo sapien
taaaggagttaccaccaggagaagc

SEQ ID NO: 176638 - DNA, 25 bp, Homo sapien
tacaaacgtctagagtctgggcact

SEQ ID NO: 176639 - DNA, 25 bp, Homo sapien
gggtctcccttgctaaaccagcgaa

SEQ ID NO: 176640 - DNA, 25 bp, Homo sapien
taacccaccgtgtaagagggatcac

SEQ ID NO: 176641 - DNA, 25 bp, Homo sapien
atcttcaacactgccctccgggcgg

SEQ ID NO: 176642 - DNA, 25 bp, Homo sapien
tgacttggtctgcaataggcatggg

SEQ ID NO: 176643 - DNA, 25 bp, Homo sapien
gccctccgggcggtcatcattgctg

SEQ ID NO: 176644 - DNA, 25 bp, Homo sapien
ggcggtcatcattgctgacttggtc

SEQ ID NO: 176645 - DNA, 25 bp, Homo sapien
ctccccctggaagtgctgtttatcc

SEQ ID NO: 176646 - DNA, 25 bp, Homo sapien
tttctccccctggaagtgctgttta

SEQ ID NO: 176647 - DNA, 25 bp, Homo sapien
ccctggaagtgctgtttatcccttt

SEQ ID NO: 176648 - DNA, 25 bp, Homo sapien
cccctggaagtgctgtttatccctt

SEQ ID NO: 176649 - DNA, 25 bp, Homo sapien
ccagccacccgatccagagagagaa

SEQ ID NO: 176650 - DNA, 25 bp, Homo sapien
gcttttaagagataagcgttaagtc

SEQ ID NO: 176651 - DNA, 25 bp, Homo sapien
gagatgtagcaaccggggatccaaa

SEQ ID NO: 176652 - DNA, 25 bp, Homo sapien
tgcggggaggctaaaacagatctgg

SEQ ID NO: 176653 - DNA, 25 bp, Homo sapien
ctctattgtattggcggagcggcag

SEQ ID NO: 176654 - DNA, 25 bp, Homo sapien
ttcggctggattggtctctctggag

SEQ ID NO: 176655 - DNA, 25 bp, Homo sapien
agcggcagcgatcagccggagacat

SEQ ID NO: 176656 - DNA, 25 bp, Homo sapien
gctgctggtagtggctggctctatt

SEQ ID NO: 176657 - DNA, 25 bp, Homo sapien
gcagcctgtgtgtgcggatggggga

SEQ ID NO: 176658 - DNA, 25 bp, Homo sapien
ctgtgtgtgcggatgggggagggcc

SEQ ID NO: 176659 - DNA, 25 bp, Homo sapien
cagcctgtgtgtgcggatgggggag

SEQ ID NO: 176660 - DNA, 25 bp, Homo sapien
cagcagcctgtgtgtgcggatgggg

SEQ ID NO: 176661 - DNA, 25 bp, Homo sapien
tgggcagaaagcgactgggaactaa

SEQ ID NO: 176662 - DNA, 25 bp, Homo sapien
aagcaagggctccaaggtgaggctc

SEQ ID NO: 176663 - DNA, 25 bp, Homo sapien
ccaaagctcagtgtctcgtgtaaca

SEQ ID NO: 176664 - DNA, 25 bp, Homo sapien
ggaatcttcactagaccaaagtggg

SEQ ID NO: 176665 - DNA, 25 bp, Homo sapien
aaaattggccagagctctagagggc

SEQ ID NO: 176666 - DNA, 25 bp, Homo sapien
ccaaatggtgacaggtccttgaagt

SEQ ID NO: 176667 - DNA, 25 bp, Homo sapien
gaagaccagagttttgaacagcact

SEQ ID NO: 176668 - DNA, 25 bp, Homo sapien
tcaactgaaacaggactgaggaccc

SEQ ID NO: 176669 - DNA, 25 bp, Homo sapien
gactgcttagtcaaagaaccctagg

SEQ ID NO: 176670 - DNA, 25 bp, Homo sapien
ggacattctacaaagcagttcaggg

SEQ ID NO: 176671 - DNA, 25 bp, Homo sapien
taaaggtggcagctcccaacatagt

SEQ ID NO: 176672 - DNA, 25 bp, Homo sapien
tgagttttccttgtgccctgacgac

SEQ ID NO: 176673 - DNA, 25 bp, Homo sapien
gcagatgagaggtctgagtctctga

SEQ ID NO: 176674 - DNA, 25 bp, Homo sapien
tggcagatgagaggtctgagtctct

SEQ ID NO: 176675 - DNA, 25 bp, Homo sapien
ggcagatgagaggtctgagtctctg

SEQ ID NO: 176676 - DNA, 25 bp, Homo sapien
atgcttttcagctgattcaggctga

SEQ ID NO: 176677 - DNA, 25 bp, Homo sapien
tgactcagacgccttgcttggacag

SEQ ID NO: 176678 - DNA, 25 bp, Homo sapien
ggaagtcctctcctttggctcacag

SEQ ID NO: 176679 - DNA, 25 bp, Homo sapien
gaggaggtggaagtcctctcctttg

SEQ ID NO: 176680 - DNA, 25 bp, Homo sapien
cagttgtggcactggtggagttgca

SEQ ID NO: 176681 - DNA, 25 bp, Homo sapien
gtggcactggtggagttgcaacctc

SEQ ID NO: 176682 - DNA, 25 bp, Homo sapien
gttgtggcactggtggagttgcaac

SEQ ID NO: 176683 - DNA, 25 bp, Homo sapien
ctgcagttgtggcactggtggagtt

SEQ ID NO: 176684 - DNA, 25 bp, Homo sapien
ctttggtttcagtatagctggtgct

SEQ ID NO: 176685 - DNA, 25 bp, Homo sapien
tttggtttcagtatagctggtgctg

SEQ ID NO: 176686 - DNA, 25 bp, Homo sapien
cagtgattcctttggccagtgctaa

SEQ ID NO: 176687 - DNA, 25 bp, Homo sapien
tgaatgagaccgagaacctgaactg

SEQ ID NO: 176688 - DNA, 25 bp, Homo sapien
tcttgggtctaccacgagggttggc

SEQ ID NO: 176689 - DNA, 25 bp, Homo sapien
gatactaatagctccctggtgtcag

SEQ ID NO: 176690 - DNA, 25 bp, Homo sapien
ctctttcaggattggtgcctcccta

SEQ ID NO: 176691 - DNA, 25 bp, Homo sapien
actctttcaggattggtgcctccct

SEQ ID NO: 176692 - DNA, 25 bp, Homo sapien
tctttcaggattggtgcctccctag

SEQ ID NO: 176693 - DNA, 25 bp, Homo sapien
cttcttccttaaactctttcaggat

SEQ ID NO: 176694 - DNA, 25 bp, Homo sapien
aaatttcgatctgctctgaccctta

SEQ ID NO: 176695 - DNA, 25 bp, Homo sapien
tttcaaatttcgatctgctctgacc

SEQ ID NO: 176696 - DNA, 25 bp, Homo sapien
tctgttttcaaatttcgatctgctc

SEQ ID NO: 176697 - DNA, 25 bp, Homo sapien
tgttttcaaatttcgatctgctctg

SEQ ID NO: 176698 - DNA, 25 bp, Homo sapien
ctaaatgtagagacatacaaactca

SEQ ID NO: 176699 - DNA, 25 bp, Homo sapien
agagacatacaaactcaaaacaagt

SEQ ID NO: 176700 - DNA, 25 bp, Homo sapien
tgtagagacatacaaactcaaaaca

SEQ ID NO: 176701 - DNA, 25 bp, Homo sapien
aaatgtagagacatacaaactcaaa

SEQ ID NO: 176702 - DNA, 25 bp, Homo sapien
gtaatgctttaggaggtatctgagt

SEQ ID NO: 176703 - DNA, 25 bp, Homo sapien
agaggtaatgctttaggaggtatct

SEQ ID NO: 176704 - DNA, 25 bp, Homo sapien
gaggtaatgctttaggaggtatctg

SEQ ID NO: 176705 - DNA, 25 bp, Homo sapien
ggtaatgctttaggaggtatctgag

SEQ ID NO: 176706 - DNA, 25 bp, Homo sapien
tcttcagaaattgaggagctttttc

SEQ ID NO: 176707 - DNA, 25 bp, Homo sapien
ttctcttcagaaattgaggagcttt

SEQ ID NO: 176708 - DNA, 25 bp, Homo sapien
tcatcatcagagtcacctttctctt

SEQ ID NO: 176709 - DNA, 25 bp, Homo sapien
caccgcacccggactaggtgagatt

SEQ ID NO: 176710 - DNA, 25 bp, Homo sapien
caatctaggttatcctgaacaataa

SEQ ID NO: 176711 - DNA, 25 bp, Homo sapien
gaaaccaccaatctaggttatcctg

SEQ ID NO: 176712 - DNA, 25 bp, Homo sapien
caataaatccatgtaaaacggaaag

SEQ ID NO: 176713 - DNA, 25 bp, Homo sapien
tgctgagattaaggtataaaccact

SEQ ID NO: 176714 - DNA, 25 bp, Homo sapien
aattaagatcaactaggcggccggg

SEQ ID NO: 176715 - DNA, 25 bp, Homo sapien
tgtgcccgagtctcaaatgtcatga

SEQ ID NO: 176716 - DNA, 25 bp, Homo sapien
aatgtcatgattgagaaaaaggagg

SEQ ID NO: 176717 - DNA, 25 bp, Homo sapien
ggatggatcatctcgtcctccgact

SEQ ID NO: 176718 - DNA, 25 bp, Homo sapien
tcgtcctccgactcagctgaagctt

SEQ ID NO: 176719 - DNA, 25 bp, Homo sapien
cactccctcaggatggatcatctcg

SEQ ID NO: 176720 - DNA, 25 bp, Homo sapien
gcagggaagccactccctcaggatg

SEQ ID NO: 176721 - DNA, 25 bp, Homo sapien
caaagtacagatcgggtcggggcag

SEQ ID NO: 176722 - DNA, 25 bp, Homo sapien
ctgcaaagtacagatcgggtcgggg

SEQ ID NO: 176723 - DNA, 25 bp, Homo sapien
aagtacagatcgggtcggggcaggg

SEQ ID NO: 176724 - DNA, 25 bp, Homo sapien
gcaaagtacagatcgggtcggggca

SEQ ID NO: 176725 - DNA, 25 bp, Homo sapien
gctgcttttccagatactgttttat

SEQ ID NO: 176726 - DNA, 25 bp, Homo sapien
ttctcgagcttcacgttccagacgc

SEQ ID NO: 176727 - DNA, 25 bp, Homo sapien
tccagacgctgcctaagtagctcct

SEQ ID NO: 176728 - DNA, 25 bp, Homo sapien
gacgctgcctaagtagctcctgctg

SEQ ID NO: 176729 - DNA, 25 bp, Homo sapien
tcatctagtactgaggctgcacact

SEQ ID NO: 176730 - DNA, 25 bp, Homo sapien
gcttcaaagactaacatgcaatggg

SEQ ID NO: 176731 - DNA, 25 bp, Homo sapien
aattgaacctctgaatgctggctag

SEQ ID NO: 176732 - DNA, 25 bp, Homo sapien
gaggagggctctcttgttttccaca

SEQ ID NO: 176733 - DNA, 25 bp, Homo sapien
tctgtaaattttctagcattagagc

SEQ ID NO: 176734 - DNA, 25 bp, Homo sapien
tggggtgttgagtgtttctgtaaat

SEQ ID NO: 176735 - DNA, 25 bp, Homo sapien
ggaatgcagcatggggtgttgagtg

SEQ ID NO: 176736 - DNA, 25 bp, Homo sapien
ctgggaatttggctggaatgcagca

SEQ ID NO: 176737 - DNA, 25 bp, Homo sapien
tccagtgcggccttcaggtcggtca

SEQ ID NO: 176738 - DNA, 25 bp, Homo sapien
aggcttcccgtccagagtcacctcc

SEQ ID NO: 176739 - DNA, 25 bp, Homo sapien
tcggtcacccgcagcgcctgaagag

SEQ ID NO: 176740 - DNA, 25 bp, Homo sapien
actcttctgcccgctcttggctagg

SEQ ID NO: 176741 - DNA, 25 bp, Homo sapien
ttgcgtgaggtactcgggtccgtcc

SEQ ID NO: 176742 - DNA, 25 bp, Homo sapien
cttgcgtgaggtactcgggtccgtc

SEQ ID NO: 176743 - DNA, 25 bp, Homo sapien
tgcgtgaggtactcgggtccgtccc

SEQ ID NO: 176744 - DNA, 25 bp, Homo sapien
tgtcctcggatgtttccgtctccac

SEQ ID NO: 176745 - DNA, 25 bp, Homo sapien
caacgcccttcgaacgtaccgagat

SEQ ID NO: 176746 - DNA, 25 bp, Homo sapien
tcgattaccactcagaactccccgg

SEQ ID NO: 176747 - DNA, 25 bp, Homo sapien
actgccatactctacccctcgatta

SEQ ID NO: 176748 - DNA, 25 bp, Homo sapien
gccgcagtagttggagtctaaggac

SEQ ID NO: 176749 - DNA, 25 bp, Homo sapien
cttcgggtgcccttcgagagaaaag

SEQ ID NO: 176750 - DNA, 25 bp, Homo sapien
tttccggacctagagatgaggcgct

SEQ ID NO: 176751 - DNA, 25 bp, Homo sapien
taaggactcgtgacaatcttcgggt

SEQ ID NO: 176752 - DNA, 25 bp, Homo sapien
ttgccaattggtcaggtccccagcg

SEQ ID NO: 176753 - DNA, 25 bp, Homo sapien
gatgtcttacatcacctcccaggag

SEQ ID NO: 176754 - DNA, 25 bp, Homo sapien
caaatgtgtcgcctaaagctctgga

SEQ ID NO: 176755 - DNA, 25 bp, Homo sapien
caaccactgctggatagtctggagc

SEQ ID NO: 176756 - DNA, 25 bp, Homo sapien
agtgagcgtgagatcactgtaacct

SEQ ID NO: 176757 - DNA, 25 bp, Homo sapien
ggcatgatcatcagtgagcgtgaga

SEQ ID NO: 176758 - DNA, 25 bp, Homo sapien
tacaggcccgcacaacaatatctgg

SEQ ID NO: 176759 - DNA, 25 bp, Homo sapien
tctaggctgaagtaatctttctgcc

SEQ ID NO: 176760 - DNA, 25 bp, Homo sapien
ccaagctagtggtaattgatgggcc

SEQ ID NO: 176761 - DNA, 25 bp, Homo sapien
tttttctggagagtcagagtcaggg

SEQ ID NO: 176762 - DNA, 25 bp, Homo sapien
taaagttggctcctccatgatacac

SEQ ID NO: 176763 - DNA, 25 bp, Homo sapien
tcagggccttgtgcagtgtagcaac

SEQ ID NO: 176764 - DNA, 25 bp, Homo sapien
tactgcttcagctagcccttcttgc

SEQ ID NO: 176765 - DNA, 25 bp, Homo sapien
taaagagagctggaatagtggatct

SEQ ID NO: 176766 - DNA, 25 bp, Homo sapien
ggcccagctaattctaaagagagct

SEQ ID NO: 176767 - DNA, 25 bp, Homo sapien
ttgctcgccaaagcctccagtactg

SEQ ID NO: 176768 - DNA, 25 bp, Homo sapien
tggggaagtaacagcattgatatct

SEQ ID NO: 176769 - DNA, 25 bp, Homo sapien
gggaagtaacagcattgatatcttc

SEQ ID NO: 176770 - DNA, 25 bp, Homo sapien
aggtggggaagtaacagcattgata

SEQ ID NO: 176771 - DNA, 25 bp, Homo sapien
gaagtaacagcattgatatcttcat

SEQ ID NO: 176772 - DNA, 25 bp, Homo sapien
acagccgaccccggggacagaagag

SEQ ID NO: 176773 - DNA, 25 bp, Homo sapien
agaagagaagaccatagtacccagg

SEQ ID NO: 176774 - DNA, 25 bp, Homo sapien
cagccgaccccggggacagaagaga

SEQ ID NO: 176775 - DNA, 25 bp, Homo sapien
catgggacccaaggcgagccctcca

SEQ ID NO: 176776 - DNA, 25 bp, Homo sapien
tttccaggaaggcatgggacccaag

SEQ ID NO: 176777 - DNA, 25 bp, Homo sapien
ggcatgggacccaaggcgagccctc

SEQ ID NO: 176778 - DNA, 25 bp, Homo sapien
tccaggaaggcatgggacccaaggc

SEQ ID NO: 176779 - DNA, 25 bp, Homo sapien
tgcattgatgtaagtagcagcggcc

SEQ ID NO: 176780 - DNA, 25 bp, Homo sapien
gatgcctgggcttatccccagggag

SEQ ID NO: 176781 - DNA, 25 bp, Homo sapien
tagcagcggcccatgagctctgctt

SEQ ID NO: 176782 - DNA, 25 bp, Homo sapien
ccagcagggaatccgttttccttct

SEQ ID NO: 176783 - DNA, 25 bp, Homo sapien
gggcttgtacatgcggcagccttcc

SEQ ID NO: 176784 - DNA, 25 bp, Homo sapien
cccattggctaagggcttgtacatg

SEQ ID NO: 176785 - DNA, 25 bp, Homo sapien
gctaagggcttgtacatgcggcagc

SEQ ID NO: 176786 - DNA, 25 bp, Homo sapien
attggctaagggcttgtacatgcgg

SEQ ID NO: 176787 - DNA, 25 bp, Homo sapien
agtgacactagaatcactggcagcc

SEQ ID NO: 176788 - DNA, 25 bp, Homo sapien
tggaatggatggtagagtgacacta

SEQ ID NO: 176789 - DNA, 25 bp, Homo sapien
tacagtcccctaaccactcagcaca

SEQ ID NO: 176790 - DNA, 25 bp, Homo sapien
ggtagagtgacactagaatcactgg

SEQ ID NO: 176791 - DNA, 25 bp, Homo sapien
tacagaagaagtctgaggagccagt

SEQ ID NO: 176792 - DNA, 25 bp, Homo sapien
aagaagtctgaggagccagtcccac

SEQ ID NO: 176793 - DNA, 25 bp, Homo sapien
tcccacatgtggtcaccaagccaaa

SEQ ID NO: 176794 - DNA, 25 bp, Homo sapien
ctgccagtacagaagaagtctgagg

SEQ ID NO: 176795 - DNA, 25 bp, Homo sapien
gtcgagtgcgctgggctccatcaaa

SEQ ID NO: 176796 - DNA, 25 bp, Homo sapien
agtagtctggcctcccagtgcgagg

SEQ ID NO: 176797 - DNA, 25 bp, Homo sapien
cagtcattaaagaaccctggagtag

SEQ ID NO: 176798 - DNA, 25 bp, Homo sapien
tcctctgcagcgctgtggttgacct

SEQ ID NO: 176799 - DNA, 25 bp, Homo sapien
ccgacactcccaagtgtttggccag

SEQ ID NO: 176800 - DNA, 25 bp, Homo sapien
cactcatcttgccttgtcactagtt

SEQ ID NO: 176801 - DNA, 25 bp, Homo sapien
caagtgtttggccaggctgaggcta

SEQ ID NO: 176802 - DNA, 25 bp, Homo sapien
ttggccaggctgaggctaacagctg

SEQ ID NO: 176803 - DNA, 25 bp, Homo sapien
aacccaaggcatggagcaattcatg

SEQ ID NO: 176804 - DNA, 25 bp, Homo sapien
atcctgaggggcagtctcgccattt

SEQ ID NO: 176805 - DNA, 25 bp, Homo sapien
gaggggcagtctcgccatttcttga

SEQ ID NO: 176806 - DNA, 25 bp, Homo sapien
aaacccaaggcatggagcaattcat

SEQ ID NO: 176807 - DNA, 25 bp, Homo sapien
tgagatgttgggcacagtagacaat

SEQ ID NO: 176808 - DNA, 25 bp, Homo sapien
gcaggcagcataggctatgacagag

SEQ ID NO: 176809 - DNA, 25 bp, Homo sapien
cagtagacaatggtaccagcgaggg

SEQ ID NO: 176810 - DNA, 25 bp, Homo sapien
gcagcaggcagcataggctatgaca

SEQ ID NO: 176811 - DNA, 25 bp, Homo sapien
agaaaatcagtgttttggaccccag

SEQ ID NO: 176812 - DNA, 25 bp, Homo sapien
cataaccgcgaagatgggtgtcagg

SEQ ID NO: 176813 - DNA, 25 bp, Homo sapien
ggaagtgtgagcaactcgcacatac

SEQ ID NO: 176814 - DNA, 25 bp, Homo sapien
ggccacaaggcataaccgcgaagat

SEQ ID NO: 176815 - DNA, 25 bp, Homo sapien
cagggagtgaaatgttgcattagca

SEQ ID NO: 176816 - DNA, 25 bp, Homo sapien
gcagggagtgaaatgttgcattagc

SEQ ID NO: 176817 - DNA, 25 bp, Homo sapien
agtgaaatgttgcattagcagaggg

SEQ ID NO: 176818 - DNA, 25 bp, Homo sapien
gggagtgaaatgttgcattagcaga

SEQ ID NO: 176819 - DNA, 25 bp, Homo sapien
tctcctttgtatcctgggttcaaga

SEQ ID NO: 176820 - DNA, 25 bp, Homo sapien
ctcctttgtatcctgggttcaagag

SEQ ID NO: 176821 - DNA, 25 bp, Homo sapien
ctttgcccccaggcaactctctcct

SEQ ID NO: 176822 - DNA, 25 bp, Homo sapien
caggcaactctctcctttgtatcct

SEQ ID NO: 176823 - DNA, 25 bp, Homo sapien
gagctgaggacatttctaggtatcc

SEQ ID NO: 176824 - DNA, 25 bp, Homo sapien
tataagaatgaagatctgtaggtga

SEQ ID NO: 176825 - DNA, 25 bp, Homo sapien
aatgaagatctgtaggtgagctgag

SEQ ID NO: 176826 - DNA, 25 bp, Homo sapien
tgagctgaggacatttctaggtatc

SEQ ID NO: 176827 - DNA, 25 bp, Homo sapien
tgcagggtctcgactcagaagcagg

SEQ ID NO: 176828 - DNA, 25 bp, Homo sapien
agggtctcgactcagaagcaggggt

SEQ ID NO: 176829 - DNA, 25 bp, Homo sapien
ctgtgcagggtctcgactcagaagc

SEQ ID NO: 176830 - DNA, 25 bp, Homo sapien
gggtctcgactcagaagcaggggtc

SEQ ID NO: 176831 - DNA, 25 bp, Homo sapien
ctgagtggcctctctcactgcggcc

SEQ ID NO: 176832 - DNA, 25 bp, Homo sapien
gagtggcctctctcactgcggccag

SEQ ID NO: 176833 - DNA, 25 bp, Homo sapien
gtggcctctctcactgcggccaggg

SEQ ID NO: 176834 - DNA, 25 bp, Homo sapien
tgagtggcctctctcactgcggcca

SEQ ID NO: 176835 - DNA, 25 bp, Homo sapien
ctcaggatcccaagctccatctgat

SEQ ID NO: 176836 - DNA, 25 bp, Homo sapien
tagatagcagctttggattcgtagg

SEQ ID NO: 176837 - DNA, 25 bp, Homo sapien
aggatcccaagctccatctgatata

SEQ ID NO: 176838 - DNA, 25 bp, Homo sapien
tatgatctcctagatagcagctttg

SEQ ID NO: 176839 - DNA, 25 bp, Homo sapien
ccaaagaggagcctgccttatccat

SEQ ID NO: 176840 - DNA, 25 bp, Homo sapien
tttccaaagaggagcctgccttatc

SEQ ID NO: 176841 - DNA, 25 bp, Homo sapien
ttccaaagaggagcctgccttatcc

SEQ ID NO: 176842 - DNA, 25 bp, Homo sapien
ctttccaaagaggagcctgccttat

SEQ ID NO: 176843 - DNA, 25 bp, Homo sapien
gtaaggttatagataaacagcatcc

SEQ ID NO: 176844 - DNA, 25 bp, Homo sapien
ggttatagataaacagcatcccaag

SEQ ID NO: 176845 - DNA, 25 bp, Homo sapien
ataggataatagtggagagaaggtc

SEQ ID NO: 176846 - DNA, 25 bp, Homo sapien
taggataatagtggagagaaggtca

SEQ ID NO: 176847 - DNA, 25 bp, Homo sapien
aaaccgtcccgattgcagcaggcca

SEQ ID NO: 176848 - DNA, 25 bp, Homo sapien
gttttgcaaaccgtcccgattgcag

SEQ ID NO: 176849 - DNA, 25 bp, Homo sapien
tttgcaaaccgtcccgattgcagca

SEQ ID NO: 176850 - DNA, 25 bp, Homo sapien
ctgcagccagcaggggttttgcaaa

SEQ ID NO: 176851 - DNA, 25 bp, Homo sapien
ccttactgtggtaaaggtgccagga

SEQ ID NO: 176852 - DNA, 25 bp, Homo sapien
tgctgtttggaccttgatttgctgg

SEQ ID NO: 176853 - DNA, 25 bp, Homo sapien
tgtggcctaagatcctgtctctcag

SEQ ID NO: 176854 - DNA, 25 bp, Homo sapien
tgggcgctgaagcaataggactgca

SEQ ID NO: 176855 - DNA, 25 bp, Homo sapien
caccccggttgccatttatccatgg

SEQ ID NO: 176856 - DNA, 25 bp, Homo sapien
ccagtcacagtgcaactttattcag

SEQ ID NO: 176857 - DNA, 25 bp, Homo sapien
gtctatgtctcagggttctaggccc

SEQ ID NO: 176858 - DNA, 25 bp, Homo sapien
gccatataatcattatgctgggtcc

SEQ ID NO: 176859 - DNA, 25 bp, Homo sapien
aatgcgcctcttggccttgtctcgg

SEQ ID NO: 176860 - DNA, 25 bp, Homo sapien
aggttggccgcctcaggaatctggc

SEQ ID NO: 176861 - DNA, 25 bp, Homo sapien
gaggcgctcgttctctgccatgtac

SEQ ID NO: 176862 - DNA, 25 bp, Homo sapien
tctgctgcgtctccagaatgcgcct

SEQ ID NO: 176863 - DNA, 25 bp, Homo sapien
caggggggtgcggcagtggccaaag

SEQ ID NO: 176864 - DNA, 25 bp, Homo sapien
ggggtgcggcagtggccaaaggggc

SEQ ID NO: 176865 - DNA, 25 bp, Homo sapien
aggggggtgcggcagtggccaaagg

SEQ ID NO: 176866 - DNA, 25 bp, Homo sapien
agagcgacaccaagcacaggctcag

SEQ ID NO: 176867 - DNA, 25 bp, Homo sapien
ggttgggtccatttcacagagcgac

SEQ ID NO: 176868 - DNA, 25 bp, Homo sapien
tcaagtaggtcagcttgccacaggg

SEQ ID NO: 176869 - DNA, 25 bp, Homo sapien
gagtctcccgttctatgaccagtag

SEQ ID NO: 176870 - DNA, 25 bp, Homo sapien
tccccagactcgatgtaggcggaga

SEQ ID NO: 176871 - DNA, 25 bp, Homo sapien
ctgagaactcgagtggctgctggcc

SEQ ID NO: 176872 - DNA, 25 bp, Homo sapien
cactcgtagtaggtcccgtgggaca

SEQ ID NO: 176873 - DNA, 25 bp, Homo sapien
ctggcttcacggcaaagagatcgga

SEQ ID NO: 176874 - DNA, 25 bp, Homo sapien
actcctggcctattcagcagttggg

SEQ ID NO: 176875 - DNA, 25 bp, Homo sapien
gatgtaagccttagagaaaggcgac

SEQ ID NO: 176876 - DNA, 25 bp, Homo sapien
cctctgtagtcaatgcctctcttct

SEQ ID NO: 176877 - DNA, 25 bp, Homo sapien
gggacactccttggtcagggaccaa

SEQ ID NO: 176878 - DNA, 25 bp, Homo sapien
tgctgtggtccggactcaggtggac

SEQ ID NO: 176879 - DNA, 25 bp, Homo sapien
ccaccaggtggcaatattggcccca

SEQ ID NO: 176880 - DNA, 25 bp, Homo sapien
caatatttcggactcggagggctgc

SEQ ID NO: 176881 - DNA, 25 bp, Homo sapien
agagggcagcctctcacagcgctgg

SEQ ID NO: 176882 - DNA, 25 bp, Homo sapien
acaggcagtggttccaacaaggcat

SEQ ID NO: 176883 - DNA, 25 bp, Homo sapien
gacagcatgacactgagacctgcga

SEQ ID NO: 176884 - DNA, 25 bp, Homo sapien
gacttaaggctgatctggctctgat

SEQ ID NO: 176885 - DNA, 25 bp, Homo sapien
ggcgtcctgaggagaaccgaattct

SEQ ID NO: 176886 - DNA, 25 bp, Homo sapien
ccagtttaagcagacagaattcggg

SEQ ID NO: 176887 - DNA, 25 bp, Homo sapien
ggcagtaatgagctccggttcctga

SEQ ID NO: 176888 - DNA, 25 bp, Homo sapien
tgggagggaaggcagtaatgagctc

SEQ ID NO: 176889 - DNA, 25 bp, Homo sapien
cacaccaaagtcctaccactgcctg

SEQ ID NO: 176890 - DNA, 25 bp, Homo sapien
agaggctggttctttgggtatgaat

SEQ ID NO: 176891 - DNA, 25 bp, Homo sapien
tgtgtactcgcatgtgttggcagga

SEQ ID NO: 176892 - DNA, 25 bp, Homo sapien
ctcgcatgtgttggcaggaccaagg

SEQ ID NO: 176893 - DNA, 25 bp, Homo sapien
tactcgcatgtgttggcaggaccaa

SEQ ID NO: 176894 - DNA, 25 bp, Homo sapien
tgtactcgcatgtgttggcaggacc

SEQ ID NO: 176895 - DNA, 25 bp, Homo sapien
gggagtgggttggtacatgggctgc

SEQ ID NO: 176896 - DNA, 25 bp, Homo sapien
cgtccttgtccttcgtgggagtggg

SEQ ID NO: 176897 - DNA, 25 bp, Homo sapien
tccttcgtgggagtgggttggtaca

SEQ ID NO: 176898 - DNA, 25 bp, Homo sapien
gggctgccccgccacgtccttgtcc

SEQ ID NO: 176899 - DNA, 25 bp, Homo sapien
gggtacacgaccacacacatcttct

SEQ ID NO: 176900 - DNA, 25 bp, Homo sapien
acatcttctggctcaccagggttag

SEQ ID NO: 176901 - DNA, 25 bp, Homo sapien
ttctggctcaccagggttagcagct

SEQ ID NO: 176902 - DNA, 25 bp, Homo sapien
tcggggtacacgaccacacacatct

SEQ ID NO: 176903 - DNA, 25 bp, Homo sapien
tattcttgcgggtctaaggtctgtg

SEQ ID NO: 176904 - DNA, 25 bp, Homo sapien
ggtctgtgtggaaatgccagctgtt

SEQ ID NO: 176905 - DNA, 25 bp, Homo sapien
cagggctctgtggactgaggagaag

SEQ ID NO: 176906 - DNA, 25 bp, Homo sapien
gaaggtgagcctagatctcctggcc

SEQ ID NO: 176907 - DNA, 25 bp, Homo sapien
gcttgtgttgccagtaaacacccag

SEQ ID NO: 176908 - DNA, 25 bp, Homo sapien
agtcactgaaacacttgggcttgtg

SEQ ID NO: 176909 - DNA, 25 bp, Homo sapien
cacccaggaaatagacaggcactcc

SEQ ID NO: 176910 - DNA, 25 bp, Homo sapien
acaggcactcctgtcagcatgatgg

SEQ ID NO: 176911 - DNA, 25 bp, Homo sapien
tatgaactgtgtaggccacgtggcc

SEQ ID NO: 176912 - DNA, 25 bp, Homo sapien
acgtggcccccaggactagggactg

SEQ ID NO: 176913 - DNA, 25 bp, Homo sapien
agcagaggcatgaggcgtatgaact

SEQ ID NO: 176914 - DNA, 25 bp, Homo sapien
cctcggctctgtggtcccacactca

SEQ ID NO: 176915 - DNA, 25 bp, Homo sapien
tagaaaatggcggtggaaatgccag

SEQ ID NO: 176916 - DNA, 25 bp, Homo sapien
tcttccctctagcagattttctaag

SEQ ID NO: 176917 - DNA, 25 bp, Homo sapien
tcctcgctcagaagggatgtgtgtg

SEQ ID NO: 176918 - DNA, 25 bp, Homo sapien
tgagagtatcctcttcagggctcca

SEQ ID NO: 176919 - DNA, 25 bp, Homo sapien
tcaggcttcttccagcgaaggacta

SEQ ID NO: 176920 - DNA, 25 bp, Homo sapien
gatgaagcccacatagttgatgagt

SEQ ID NO: 176921 - DNA, 25 bp, Homo sapien
tgagtgtgtacatgtcgctggtgac

SEQ ID NO: 176922 - DNA, 25 bp, Homo sapien
ggactatctgtccagcaaccgtgac

SEQ ID NO: 176923 - DNA, 25 bp, Homo sapien
gctcatcagtgatccgaaagatatt

SEQ ID NO: 176924 - DNA, 25 bp, Homo sapien
gagctcatcagtgatccgaaagata

SEQ ID NO: 176925 - DNA, 25 bp, Homo sapien
catcagtgatccgaaagatattcag

SEQ ID NO: 176926 - DNA, 25 bp, Homo sapien
cagtgatccgaaagatattcagaga

SEQ ID NO: 176927 - DNA, 25 bp, Homo sapien
tgtcagccccggtctcatttgtatg

SEQ ID NO: 176928 - DNA, 25 bp, Homo sapien
tatttaaccactcgtatggcacggg

SEQ ID NO: 176929 - DNA, 25 bp, Homo sapien
actggtattacctggctctgtgtca

SEQ ID NO: 176930 - DNA, 25 bp, Homo sapien
ggcacgggcactagccaattagaat

SEQ ID NO: 176931 - DNA, 25 bp, Homo sapien
ggctgggattggggtgcagcgcttc

SEQ ID NO: 176932 - DNA, 25 bp, Homo sapien
tgcagcgcttcacgtggatcatggc

SEQ ID NO: 176933 - DNA, 25 bp, Homo sapien
gcagcgcttcacgtggatcatggcc

SEQ ID NO: 176934 - DNA, 25 bp, Homo sapien
ggtgcagcgcttcacgtggatcatg

SEQ ID NO: 176935 - DNA, 25 bp, Homo sapien
tagttagttgtctttgtgggagtag

SEQ ID NO: 176936 - DNA, 25 bp, Homo sapien
ctcttgtcctagtcagagagtagtt

SEQ ID NO: 176937 - DNA, 25 bp, Homo sapien
tagtggttgaattttgacaactgtc

SEQ ID NO: 176938 - DNA, 25 bp, Homo sapien
tttgggtagtggttgaattttgaca

SEQ ID NO: 176939 - DNA, 25 bp, Homo sapien
taggccggtgtcactagtttcatgc

SEQ ID NO: 176940 - DNA, 25 bp, Homo sapien
ccgataacggaggagacgatgacat

SEQ ID NO: 176941 - DNA, 25 bp, Homo sapien
tcatcgtgcacatagccagggtcct

SEQ ID NO: 176942 - DNA, 25 bp, Homo sapien
tgtatccccaagtacccataagcag

SEQ ID NO: 176943 - DNA, 25 bp, Homo sapien
gagagacccattaactcctccaaat

SEQ ID NO: 176944 - DNA, 25 bp, Homo sapien
tcctccaaatgtggacagggcaaca

SEQ ID NO: 176945 - DNA, 25 bp, Homo sapien
gaggtgaagagagacccattaactc

SEQ ID NO: 176946 - DNA, 25 bp, Homo sapien
caaatgtggacagggcaacagaaat

SEQ ID NO: 176947 - DNA, 25 bp, Homo sapien
gacattgcagtgacataagcgacat

SEQ ID NO: 176948 - DNA, 25 bp, Homo sapien
cacaaatgtgaccagtgggatggag

SEQ ID NO: 176949 - DNA, 25 bp, Homo sapien
acagcgacggcgttggatgccagca

SEQ ID NO: 176950 - DNA, 25 bp, Homo sapien
tgacataagcgacattggcaaagac

SEQ ID NO: 176951 - DNA, 25 bp, Homo sapien
ccctgaaggaaagccagtgcgacga

SEQ ID NO: 176952 - DNA, 25 bp, Homo sapien
cgaggccgatgtcaggttcctggaa

SEQ ID NO: 176953 - DNA, 25 bp, Homo sapien
ctcagtcacgtaattcagaaagttc

SEQ ID NO: 176954 - DNA, 25 bp, Homo sapien
ttgtagggatcaacaagctcctcag

SEQ ID NO: 176955 - DNA, 25 bp, Homo sapien
tgcctgaaagcaatatataacctgt

SEQ ID NO: 176956 - DNA, 25 bp, Homo sapien
tcaatgagatagagagtaactgatc

SEQ ID NO: 176957 - DNA, 25 bp, Homo sapien
gcgcagtgatttccttaagtctaaa

SEQ ID NO: 176958 - DNA, 25 bp, Homo sapien
tatttttgacaagatagcgcagtga

SEQ ID NO: 176959 - DNA, 25 bp, Homo sapien
tgactttctccgtgaggcagtgacg

SEQ ID NO: 176960 - DNA, 25 bp, Homo sapien
caagattcaacagaagatgcaggga

SEQ ID NO: 176961 - DNA, 25 bp, Homo sapien
tggaaaccaaatatagcctcaggct

SEQ ID NO: 176962 - DNA, 25 bp, Homo sapien
gcctcatggtgccatgggtcccatg

SEQ ID NO: 176963 - DNA, 25 bp, Homo sapien
cagcctaaagggagcattccctact

SEQ ID NO: 176964 - DNA, 25 bp, Homo sapien
gtcactcaaggctagaattggggaa

SEQ ID NO: 176965 - DNA, 25 bp, Homo sapien
acagccttgaggtaagcatgggaga

SEQ ID NO: 176966 - DNA, 25 bp, Homo sapien
tttacctagctgtgctacagccttg

SEQ ID NO: 176967 - DNA, 25 bp, Homo sapien
tacctgtttttcctgcgatactcac

SEQ ID NO: 176968 - DNA, 25 bp, Homo sapien
tacatgcaaggggaggaaagctggg

SEQ ID NO: 176969 - DNA, 25 bp, Homo sapien
tgggcagtacctgtttttcctgcga

SEQ ID NO: 176970 - DNA, 25 bp, Homo sapien
aagctgggcagtacctgtttttcct

SEQ ID NO: 176971 - DNA, 25 bp, Homo sapien
ctttgcatatctgtacaatccccat

SEQ ID NO: 176972 - DNA, 25 bp, Homo sapien
ttgaacccgggtggcccaccgcaca

SEQ ID NO: 176973 - DNA, 25 bp, Homo sapien
gaacagttgacccatgtgaggagca

SEQ ID NO: 176974 - DNA, 25 bp, Homo sapien
gtggcccaccgcacactggaacagt

SEQ ID NO: 176975 - DNA, 25 bp, Homo sapien
cgcacactggaacagttgacccatg

SEQ ID NO: 176976 - DNA, 25 bp, Homo sapien
aggcacacaagcagaactgctccct

SEQ ID NO: 176977 - DNA, 25 bp, Homo sapien
cttcaggggctgtatctggctgcat

SEQ ID NO: 176978 - DNA, 25 bp, Homo sapien
ccaaggcacacaagcagaactgctc

SEQ ID NO: 176979 - DNA, 25 bp, Homo sapien
ctgtatctggctgcatgatgcccaa

SEQ ID NO: 176980 - DNA, 25 bp, Homo sapien
tgtaaccttcctttgtgcgccatct

SEQ ID NO: 176981 - DNA, 25 bp, Homo sapien
tggtcctgacattaaccgtctgtaa

SEQ ID NO: 176982 - DNA, 25 bp, Homo sapien
ggtgtggtcgctctgacttcacttg

SEQ ID NO: 176983 - DNA, 25 bp, Homo sapien
tacaaatcttctttggtggcatggg

SEQ ID NO: 176984 - DNA, 25 bp, Homo sapien
ctcgctggcttgcacctttctcagg

SEQ ID NO: 176985 - DNA, 25 bp, Homo sapien
gctggcttgcacctttctcaggagt

SEQ ID NO: 176986 - DNA, 25 bp, Homo sapien
caaactcccggaactccatttggat

SEQ ID NO: 176987 - DNA, 25 bp, Homo sapien
ctccaaactcccggaactccatttg

SEQ ID NO: 176988 - DNA, 25 bp, Homo sapien
ccagaagggttggcttctcagcctc

SEQ ID NO: 176989 - DNA, 25 bp, Homo sapien
tgggtcatggcctgccagaagggtt

SEQ ID NO: 176990 - DNA, 25 bp, Homo sapien
ggcctgccagaagggttggcttctc

SEQ ID NO: 176991 - DNA, 25 bp, Homo sapien
ctgggtcatggcctgccagaagggt

SEQ ID NO: 176992 - DNA, 25 bp, Homo sapien
gctggggcgttcacttctctgcctt

SEQ ID NO: 176993 - DNA, 25 bp, Homo sapien
ctgccttctgccacgctctggccag

SEQ ID NO: 176994 - DNA, 25 bp, Homo sapien
tctgccttctgccacgctctggcca

SEQ ID NO: 176995 - DNA, 25 bp, Homo sapien
ttttgctggggcgttcacttctctg

SEQ ID NO: 176996 - DNA, 25 bp, Homo sapien
caaaaggggtgaggcatgtccctcc

SEQ ID NO: 176997 - DNA, 25 bp, Homo sapien
agcaaaaggggtgaggcatgtccct

SEQ ID NO: 176998 - DNA, 25 bp, Homo sapien
gcaaaaggggtgaggcatgtccctc

SEQ ID NO: 176999 - DNA, 25 bp, Homo sapien
ttccttcttatcctgttagctcctg

SEQ ID NO: 177000 - DNA, 25 bp, Homo sapien
gctgtgagggctgtgagtgctcctg

SEQ ID NO: 177001 - DNA, 25 bp, Homo sapien
tccagctaagctcctgcccatactg

SEQ ID NO: 177002 - DNA, 25 bp, Homo sapien
gagtgctcctggaggcacacagctt

SEQ ID NO: 177003 - DNA, 25 bp, Homo sapien
agccactgcgcccggatatttttct

SEQ ID NO: 177004 - DNA, 25 bp, Homo sapien
ccactgcgcccggatatttttctct

SEQ ID NO: 177005 - DNA, 25 bp, Homo sapien
actgcgcccggatatttttctcttt

SEQ ID NO: 177006 - DNA, 25 bp, Homo sapien
tgagccactgcgcccggatattttt

SEQ ID NO: 177007 - DNA, 25 bp, Homo sapien
taataaggaacactttgtgaatttg

SEQ ID NO: 177008 - DNA, 25 bp, Homo sapien
ctccaagtaccactgggcctcactc

SEQ ID NO: 177009 - DNA, 25 bp, Homo sapien
ccaaagctccaagtaccactgggcc

SEQ ID NO: 177010 - DNA, 25 bp, Homo sapien
tccaagtaccactgggcctcactcc

SEQ ID NO: 177011 - DNA, 25 bp, Homo sapien
aagctccaagtaccactgggcctca

SEQ ID NO: 177012 - DNA, 25 bp, Homo sapien
gacataagagtccaaaagcacaggg

SEQ ID NO: 177013 - DNA, 25 bp, Homo sapien
gccattgtagacataagagtccaaa

SEQ ID NO: 177014 - DNA, 25 bp, Homo sapien
tctgccattgtagacataagagtcc

SEQ ID NO: 177015 - DNA, 25 bp, Homo sapien
tgtagacataagagtccaaaagcac

SEQ ID NO: 177016 - DNA, 25 bp, Homo sapien
gcccggccgacatagaacacattct

SEQ ID NO: 177017 - DNA, 25 bp, Homo sapien
ggttctaaccagagacctgctcagc

SEQ ID NO: 177018 - DNA, 25 bp, Homo sapien
acttgattccttcccttagtagtca

SEQ ID NO: 177019 - DNA, 25 bp, Homo sapien
tgcttgtcatcaatgctgggaacat

SEQ ID NO: 177020 - DNA, 25 bp, Homo sapien
gtttctctgtgacagcattctgcac

SEQ ID NO: 177021 - DNA, 25 bp, Homo sapien
acagcattctgcaccaggcagttgg

SEQ ID NO: 177022 - DNA, 25 bp, Homo sapien
tctgtgacagcattctgcaccaggc

SEQ ID NO: 177023 - DNA, 25 bp, Homo sapien
agcattctgcaccaggcagttggag

SEQ ID NO: 177024 - DNA, 25 bp, Homo sapien
tggcagctccacatggccttcacag

SEQ ID NO: 177025 - DNA, 25 bp, Homo sapien
gggatggcagctccacatggccttc

SEQ ID NO: 177026 - DNA, 25 bp, Homo sapien
tgtgcaccctgccgggcagagggat

SEQ ID NO: 177027 - DNA, 25 bp, Homo sapien
ctgccgggcagagggatggcagctc

SEQ ID NO: 177028 - DNA, 25 bp, Homo sapien
cactgcagttagaaatggtggactg

SEQ ID NO: 177029 - DNA, 25 bp, Homo sapien
actgcagttagaaatggtggactgg

SEQ ID NO: 177030 - DNA, 25 bp, Homo sapien
gcagttagaaatggtggactggaga

SEQ ID NO: 177031 - DNA, 25 bp, Homo sapien
ctgcagttagaaatggtggactgga

SEQ ID NO: 177032 - DNA, 25 bp, Homo sapien
gggtagatcaccagcacagcaatcc

SEQ ID NO: 177033 - DNA, 25 bp, Homo sapien
gtgagggcgatgacagcctggttgg

SEQ ID NO: 177034 - DNA, 25 bp, Homo sapien
gaaggtgagggcgatgacagcctgg

SEQ ID NO: 177035 - DNA, 25 bp, Homo sapien
gttggtggggtagatcaccagcaca

SEQ ID NO: 177036 - DNA, 25 bp, Homo sapien
caatccagacgatgagagcaaggcc

SEQ ID NO: 177037 - DNA, 25 bp, Homo sapien
agccagtcctccgaagatgtccttg

SEQ ID NO: 177038 - DNA, 25 bp, Homo sapien
gtgaccccgagttcagcatagcaga

SEQ ID NO: 177039 - DNA, 25 bp, Homo sapien
tgatgaagcccgtcacaatccagac

SEQ ID NO: 177040 - DNA, 25 bp, Homo sapien
tttggcgagacaaagattccagagc

SEQ ID NO: 177041 - DNA, 25 bp, Homo sapien
gcctctcaccctgtttacactttcc

SEQ ID NO: 177042 - DNA, 25 bp, Homo sapien
catgcctctcaccctgtttacactt

SEQ ID NO: 177043 - DNA, 25 bp, Homo sapien
atgcctctcaccctgtttacacttt

SEQ ID NO: 177044 - DNA, 25 bp, Homo sapien
tctcaccctgtttacactttcccat

SEQ ID NO: 177045 - DNA, 25 bp, Homo sapien
tgaaagacaggcatcgtagcctggg

SEQ ID NO: 177046 - DNA, 25 bp, Homo sapien
tgagtgttgcgccctcaaataagcc

SEQ ID NO: 177047 - DNA, 25 bp, Homo sapien
ctactgaaagacaggcatcgtagcc

SEQ ID NO: 177048 - DNA, 25 bp, Homo sapien
gctgagtgttgcgccctcaaataag

SEQ ID NO: 177049 - DNA, 25 bp, Homo sapien
aggacccacatcttgcctccagcat

SEQ ID NO: 177050 - DNA, 25 bp, Homo sapien
gaaggacccacatcttgcctccagc

SEQ ID NO: 177051 - DNA, 25 bp, Homo sapien
aaggacccacatcttgcctccagca

SEQ ID NO: 177052 - DNA, 25 bp, Homo sapien
agaactgataccaccacgcagagca

SEQ ID NO: 177053 - DNA, 25 bp, Homo sapien
cctggtttcaaggaactgtgtggaa

SEQ ID NO: 177054 - DNA, 25 bp, Homo sapien
cacatcgttgtgaggcaatcttgaa

SEQ ID NO: 177055 - DNA, 25 bp, Homo sapien
cagaagctgcatgagggctattgca

SEQ ID NO: 177056 - DNA, 25 bp, Homo sapien
gaatagtgcctattaactctacaag

SEQ ID NO: 177057 - DNA, 25 bp, Homo sapien
gaaaacacttgaatcacgatcatcc

SEQ ID NO: 177058 - DNA, 25 bp, Homo sapien
ttgacattggacaccagatccctga

SEQ ID NO: 177059 - DNA, 25 bp, Homo sapien
gcagttcctcagcacatctgtgact

SEQ ID NO: 177060 - DNA, 25 bp, Homo sapien
tattgcatagaacatggcgtcagcc

SEQ ID NO: 177061 - DNA, 25 bp, Homo sapien
cacaacgagctctcataaaggaact

SEQ ID NO: 177062 - DNA, 25 bp, Homo sapien
agaaactggttcaggggcaccagga

SEQ ID NO: 177063 - DNA, 25 bp, Homo sapien
aaaatatctctgagctattgcatag

SEQ ID NO: 177064 - DNA, 25 bp, Homo sapien
cgagaggcacaatctgtcccctctt

SEQ ID NO: 177065 - DNA, 25 bp, Homo sapien
tgaccaatccgatctctttcttcag

SEQ ID NO: 177066 - DNA, 25 bp, Homo sapien
gcactgaccaatccgatctctttct

SEQ ID NO: 177067 - DNA, 25 bp, Homo sapien
ttcttcagggctactccgccccctc

SEQ ID NO: 177068 - DNA, 25 bp, Homo sapien
actgaccaatccgatctctttcttc

SEQ ID NO: 177069 - DNA, 25 bp, Homo sapien
tcggtgttgtttcggtgcctggctc

SEQ ID NO: 177070 - DNA, 25 bp, Homo sapien
ggtgttgtttcggtgcctggctcct

SEQ ID NO: 177071 - DNA, 25 bp, Homo sapien
tttcggtgttgtttcggtgcctggc

SEQ ID NO: 177072 - DNA, 25 bp, Homo sapien
tgttgtttcggtgcctggctccttc

SEQ ID NO: 177073 - DNA, 25 bp, Homo sapien
cctgacggtgttgctctagatctgg

SEQ ID NO: 177074 - DNA, 25 bp, Homo sapien
gaaccactgctactctctaaaaaag

SEQ ID NO: 177075 - DNA, 25 bp, Homo sapien
aaatagaactgtgccagcgactccg

SEQ ID NO: 177076 - DNA, 25 bp, Homo sapien
aaaacaaactgtgaacctgacggtg

SEQ ID NO: 177077 - DNA, 25 bp, Homo sapien
tctgtttccaatatcggagccactg

SEQ ID NO: 177078 - DNA, 25 bp, Homo sapien
cagtcctcagtgtggccatatccca

SEQ ID NO: 177079 - DNA, 25 bp, Homo sapien
cagctgttttgcgtgcttcagatca

SEQ ID NO: 177080 - DNA, 25 bp, Homo sapien
agtacgtagtacaattctgtttcca

SEQ ID NO: 177081 - DNA, 25 bp, Homo sapien
ctctaaggcttcgatgtcctttgtt

SEQ ID NO: 177082 - DNA, 25 bp, Homo sapien
aggcttcgatgtcctttgttcccat

SEQ ID NO: 177083 - DNA, 25 bp, Homo sapien
aaggcttcgatgtcctttgttccca

SEQ ID NO: 177084 - DNA, 25 bp, Homo sapien
ctaaggcttcgatgtcctttgttcc

SEQ ID NO: 177085 - DNA, 25 bp, Homo sapien
gacatgtgtccgtgacagcctcagg

SEQ ID NO: 177086 - DNA, 25 bp, Homo sapien
cacaggccagaaaccctgtacacgg

SEQ ID NO: 177087 - DNA, 25 bp, Homo sapien
aggccagaaaccctgtacacggact

SEQ ID NO: 177088 - DNA, 25 bp, Homo sapien
aactaccagtttcttcaattgtgtc

SEQ ID NO: 177089 - DNA, 25 bp, Homo sapien
gccagaaaccctgtacacggactgt

SEQ ID NO: 177090 - DNA, 25 bp, Homo sapien
gcctttcatcgtcatggaaggagga

SEQ ID NO: 177091 - DNA, 25 bp, Homo sapien
tgcctttcatcgtcatggaaggagg

SEQ ID NO: 177092 - DNA, 25 bp, Homo sapien
ctgaacccagactactagcgcacag

SEQ ID NO: 177093 - DNA, 25 bp, Homo sapien
gactactagcgcacagcaaataaag

SEQ ID NO: 177094 - DNA, 25 bp, Homo sapien
taagatggttatgagcttgatactg

SEQ ID NO: 177095 - DNA, 25 bp, Homo sapien
ttgatatggtaagatggttatgagc

SEQ ID NO: 177096 - DNA, 25 bp, Homo sapien
ggttaggaattgcttaatactgaaa

SEQ ID NO: 177097 - DNA, 25 bp, Homo sapien
ttcttggttaggaattgcttaatac

SEQ ID NO: 177098 - DNA, 25 bp, Homo sapien
agatccagcttgaatcttctccaat

SEQ ID NO: 177099 - DNA, 25 bp, Homo sapien
ttaggaattgcttaatactgaaagt

SEQ ID NO: 177100 - DNA, 25 bp, Homo sapien
cattttctggttgaagatttaattt

SEQ ID NO: 177101 - DNA, 25 bp, Homo sapien
agtgtcctgcctctcaatcctcact

SEQ ID NO: 177102 - DNA, 25 bp, Homo sapien
taatttttcttcagtgtcctgcctc

SEQ ID NO: 177103 - DNA, 25 bp, Homo sapien
ttagtcattttctggttgaagattt

SEQ ID NO: 177104 - DNA, 25 bp, Homo sapien
gtgcaacccaaaacataaccctctg

SEQ ID NO: 177105 - DNA, 25 bp, Homo sapien
catccagagtgggtacttcagacat

SEQ ID NO: 177106 - DNA, 25 bp, Homo sapien
tgctcagagtgatacatagttacct

SEQ ID NO: 177107 - DNA, 25 bp, Homo sapien
aaaatcctttggtggcttcctatca

SEQ ID NO: 177108 - DNA, 25 bp, Homo sapien
catttacatgttaactttctttggg

SEQ ID NO: 177109 - DNA, 25 bp, Homo sapien
agcatttacatgttaactttctttg

SEQ ID NO: 177110 - DNA, 25 bp, Homo sapien
catgttaactttctttgggggctat

SEQ ID NO: 177111 - DNA, 25 bp, Homo sapien
ttcaagcatttacatgttaactttc

SEQ ID NO: 177112 - DNA, 25 bp, Homo sapien
taaagatactgtccattcaggcagg

SEQ ID NO: 177113 - DNA, 25 bp, Homo sapien
gctaggttttctgaggctgggtaca

SEQ ID NO: 177114 - DNA, 25 bp, Homo sapien
gacaaactggtaatcaatgactggg

SEQ ID NO: 177115 - DNA, 25 bp, Homo sapien
tcggagactttctattagtgacatg

SEQ ID NO: 177116 - DNA, 25 bp, Homo sapien
atctacatatgtgtgaagttcccaa

SEQ ID NO: 177117 - DNA, 25 bp, Homo sapien
tggcttgggttttgagcatatttag

SEQ ID NO: 177118 - DNA, 25 bp, Homo sapien
tgggttttgagcatatttaggctcc

SEQ ID NO: 177119 - DNA, 25 bp, Homo sapien
gggttttgagcatatttaggctcct

SEQ ID NO: 177120 - DNA, 25 bp, Homo sapien
gcttgggttttgagcatatttaggc

SEQ ID NO: 177121 - DNA, 25 bp, Homo sapien
tctgcctccctggtagtcatctctg

SEQ ID NO: 177122 - DNA, 25 bp, Homo sapien
ggtgtggtagtcatatgtcccagat

SEQ ID NO: 177123 - DNA, 25 bp, Homo sapien
agagattgtcacactagatgtagca

SEQ ID NO: 177124 - DNA, 25 bp, Homo sapien
caccataagctactgaaatgttcca

SEQ ID NO: 177125 - DNA, 25 bp, Homo sapien
tcagagagacttgcttgcccttttt

SEQ ID NO: 177126 - DNA, 25 bp, Homo sapien
cagtggtgtctgtctcgataagctt

SEQ ID NO: 177127 - DNA, 25 bp, Homo sapien
tcatacaacaggtcagagagacttg

SEQ ID NO: 177128 - DNA, 25 bp, Homo sapien
ttgctgttataaacacccacatcta

SEQ ID NO: 177129 - DNA, 25 bp, Homo sapien
ggtgatggccctggaaaatgtatcc

SEQ ID NO: 177130 - DNA, 25 bp, Homo sapien
gatggactgtagcttccagtacgca

SEQ ID NO: 177131 - DNA, 25 bp, Homo sapien
caacggaggcatatgggattaccca

SEQ ID NO: 177132 - DNA, 25 bp, Homo sapien
acagtggtcaggtcttacaaaaggc

SEQ ID NO: 177133 - DNA, 25 bp, Homo sapien
acctggctggcgatagatgctgaac

SEQ ID NO: 177134 - DNA, 25 bp, Homo sapien
gaatgggcgaacaacactatcactg

SEQ ID NO: 177135 - DNA, 25 bp, Homo sapien
caagggcctgtcctgtagcaaatgg

SEQ ID NO: 177136 - DNA, 25 bp, Homo sapien
tgatggctgagaaacaacctggctg

SEQ ID NO: 177137 - DNA, 25 bp, Homo sapien
tatttttagatggttaactcattga

SEQ ID NO: 177138 - DNA, 25 bp, Homo sapien
tttgccatatagctgatcccaactg

SEQ ID NO: 177139 - DNA, 25 bp, Homo sapien
tattctagcattttagggcttccac

SEQ ID NO: 177140 - DNA, 25 bp, Homo sapien
taattcacttaaagacgatggtccc

SEQ ID NO: 177141 - DNA, 25 bp, Homo sapien
taagagagtcagttgcattacgcac

SEQ ID NO: 177142 - DNA, 25 bp, Homo sapien
gctacaaggcaaagtggtcacagca

SEQ ID NO: 177143 - DNA, 25 bp, Homo sapien
caagctggacaggaggtagttaaca

SEQ ID NO: 177144 - DNA, 25 bp, Homo sapien
gaaaaattagtctctgtcaagctgg

SEQ ID NO: 177145 - DNA, 25 bp, Homo sapien
caacatctggcctctgtatagtaca

SEQ ID NO: 177146 - DNA, 25 bp, Homo sapien
ggatttctgctgatccaatcccagc

SEQ ID NO: 177147 - DNA, 25 bp, Homo sapien
cacaaagctttttagttctctgcca

SEQ ID NO: 177148 - DNA, 25 bp, Homo sapien
agtgccctatggtcattctccctgg

SEQ ID NO: 177149 - DNA, 25 bp, Homo sapien
tcagtcttgtatgatcacatcatca

SEQ ID NO: 177150 - DNA, 25 bp, Homo sapien
tcctcatcatcttctggcagttctt

SEQ ID NO: 177151 - DNA, 25 bp, Homo sapien
cctcttcttcatctagacaaactac

SEQ ID NO: 177152 - DNA, 25 bp, Homo sapien
agtcttgtatgatcacatcatcatc

SEQ ID NO: 177153 - DNA, 25 bp, Homo sapien
agagtcaaaccaatccagcacctgc

SEQ ID NO: 177154 - DNA, 25 bp, Homo sapien
tggctgaggtaatcgagagtcaaac

SEQ ID NO: 177155 - DNA, 25 bp, Homo sapien
tcaattgagggatatcagtttcccg

SEQ ID NO: 177156 - DNA, 25 bp, Homo sapien
cccgtagctgttggtgggctgccca

SEQ ID NO: 177157 - DNA, 25 bp, Homo sapien
caggtactgcgttgtcccgaaacca

SEQ ID NO: 177158 - DNA, 25 bp, Homo sapien
ggatttaaggatagccagctgctct

SEQ ID NO: 177159 - DNA, 25 bp, Homo sapien
tcaaggcatagcgtgtgtcaccaaa

SEQ ID NO: 177160 - DNA, 25 bp, Homo sapien
tgatctcaggccgaggtaaaccagt

SEQ ID NO: 177161 - DNA, 25 bp, Homo sapien
cggcagtagctccattagccagtac

SEQ ID NO: 177162 - DNA, 25 bp, Homo sapien
gatgtgggggtaatgcctgttcact

SEQ ID NO: 177163 - DNA, 25 bp, Homo sapien
ggaggggtttagaggcggcagtagc

SEQ ID NO: 177164 - DNA, 25 bp, Homo sapien
ccagatgtgggggtaatgcctgttc

SEQ ID NO: 177165 - DNA, 25 bp, Homo sapien
tactggcaattaatgcaattggtgg

SEQ ID NO: 177166 - DNA, 25 bp, Homo sapien
gaagagggagtaacactagatgctg

SEQ ID NO: 177167 - DNA, 25 bp, Homo sapien
gggtttatcccgagcttgtggctgg

SEQ ID NO: 177168 - DNA, 25 bp, Homo sapien
gactcctccttacaactactggcaa

SEQ ID NO: 177169 - DNA, 25 bp, Homo sapien
tggtaggggaatgctccactgccag

SEQ ID NO: 177170 - DNA, 25 bp, Homo sapien
tcatcagggactcctttaatttctg

SEQ ID NO: 177171 - DNA, 25 bp, Homo sapien
gccaaaaatctgattggtaggggaa

SEQ ID NO: 177172 - DNA, 25 bp, Homo sapien
atctgattggtaggggaatgctcca

SEQ ID NO: 177173 - DNA, 25 bp, Homo sapien
cgtctgggtaggcttgctaagagtt

SEQ ID NO: 177174 - DNA, 25 bp, Homo sapien
cctttcgtctgggtaggcttgctaa

SEQ ID NO: 177175 - DNA, 25 bp, Homo sapien
aatcctttcgtctgggtaggcttgc

SEQ ID NO: 177176 - DNA, 25 bp, Homo sapien
cttcaatcctttcgtctgggtaggc

SEQ ID NO: 177177 - DNA, 25 bp, Homo sapien
gacggtagactactcgggctcgagt

SEQ ID NO: 177178 - DNA, 25 bp, Homo sapien
gggccgtcccgcatgatgagtaaaa

SEQ ID NO: 177179 - DNA, 25 bp, Homo sapien
gatgagccccgctggtgaactactg

SEQ ID NO: 177180 - DNA, 25 bp, Homo sapien
tgaactactgagaccgctggcctct

SEQ ID NO: 177181 - DNA, 25 bp, Homo sapien
gtgccttctgatttgtgcccttcag

SEQ ID NO: 177182 - DNA, 25 bp, Homo sapien
ggtgccttctgatttgtgcccttca

SEQ ID NO: 177183 - DNA, 25 bp, Homo sapien
cttctgatttgtgcccttcagagat

SEQ ID NO: 177184 - DNA, 25 bp, Homo sapien
gccttctgatttgtgcccttcagag

SEQ ID NO: 177185 - DNA, 25 bp, Homo sapien
ctcatagatggagcagtggtgagca

SEQ ID NO: 177186 - DNA, 25 bp, Homo sapien
catttagagcaatgtgatcgcaggg

SEQ ID NO: 177187 - DNA, 25 bp, Homo sapien
gcaatactgcttgaagagcccctta

SEQ ID NO: 177188 - DNA, 25 bp, Homo sapien
gcaaatctaactaactgaggccacg

SEQ ID NO: 177189 - DNA, 25 bp, Homo sapien
cagcatggcatgacgggtagaaata

SEQ ID NO: 177190 - DNA, 25 bp, Homo sapien
ttactttcgtttaggtggcttgatg

SEQ ID NO: 177191 - DNA, 25 bp, Homo sapien
attctcggcatcagcttgatatttc

SEQ ID NO: 177192 - DNA, 25 bp, Homo sapien
tcggcatcagcttgatatttcagtg

SEQ ID NO: 177193 - DNA, 25 bp, Homo sapien
cttgatgtccttcacattctcggca

SEQ ID NO: 177194 - DNA, 25 bp, Homo sapien
ctttagttgctgccaagaagccagg

SEQ ID NO: 177195 - DNA, 25 bp, Homo sapien
cttaacaaaggcaatagtgataatc

SEQ ID NO: 177196 - DNA, 25 bp, Homo sapien
ttccaacttaacaaaggcaatagtg

SEQ ID NO: 177197 - DNA, 25 bp, Homo sapien
aggcttactgcctcatatccttcca

SEQ ID NO: 177198 - DNA, 25 bp, Homo sapien
acagccaggtttgagactccctgtg

SEQ ID NO: 177199 - DNA, 25 bp, Homo sapien
ccttcccattcaggttcaatagtct

SEQ ID NO: 177200 - DNA, 25 bp, Homo sapien
caatagtctgtactggggtccaggc

SEQ ID NO: 177201 - DNA, 25 bp, Homo sapien
tactggggtccaggcatccaaagtt

SEQ ID NO: 177202 - DNA, 25 bp, Homo sapien
tctcagtttcctggttggttctctt

SEQ ID NO: 177203 - DNA, 25 bp, Homo sapien
ttctcttagtatggctgggtacggg

SEQ ID NO: 177204 - DNA, 25 bp, Homo sapien
caggttctgcacgtgtgttgaggtc

SEQ ID NO: 177205 - DNA, 25 bp, Homo sapien
gaggtcgccaggaggtagccgtggg

SEQ ID NO: 177206 - DNA, 25 bp, Homo sapien
agcgatggccgaaaccgggactgcc

SEQ ID NO: 177207 - DNA, 25 bp, Homo sapien
gagtcctgattggtaggcgcaggcg

SEQ ID NO: 177208 - DNA, 25 bp, Homo sapien
cagccctgctcgagcaagttggagg

SEQ ID NO: 177209 - DNA, 25 bp, Homo sapien
aggcgggcgggcacgggcgaagcgc

SEQ ID NO: 177210 - DNA, 25 bp, Homo sapien
tggccattggctgcgtgggtctcgg

SEQ ID NO: 177211 - DNA, 25 bp, Homo sapien
ctaccgtcgacctatcggcgccgga

SEQ ID NO: 177212 - DNA, 25 bp, Homo sapien
taccgtcgacctatcggcgccggac

SEQ ID NO: 177213 - DNA, 25 bp, Homo sapien
cactttgctgaactgtctggaccgc

SEQ ID NO: 177214 - DNA, 25 bp, Homo sapien
cgagagggatcagatgtcttgccac

SEQ ID NO: 177215 - DNA, 25 bp, Homo sapien
tccggagccatacaaacgagctgcg

SEQ ID NO: 177216 - DNA, 25 bp, Homo sapien
taacaaagcgcctaaagcaactggg

SEQ ID NO: 177217 - DNA, 25 bp, Homo sapien
agtcagtagaaaaacccagtatatt

SEQ ID NO: 177218 - DNA, 25 bp, Homo sapien
tatctttactattggattgtttaac

SEQ ID NO: 177219 - DNA, 25 bp, Homo sapien
tgcaacctcaaacttaattgagcta

SEQ ID NO: 177220 - DNA, 25 bp, Homo sapien
tatttgagtacataaaggtgcaaga

SEQ ID NO: 177221 - DNA, 25 bp, Homo sapien
gagtaaattctctgtgccgacatca

SEQ ID NO: 177222 - DNA, 25 bp, Homo sapien
gccattatgatgtaatgaggaggca

SEQ ID NO: 177223 - DNA, 25 bp, Homo sapien
gaggcatctgttattctcagggtag

SEQ ID NO: 177224 - DNA, 25 bp, Homo sapien
cgacatcacaacttggccattatga

SEQ ID NO: 177225 - DNA, 25 bp, Homo sapien
caaggagggaatcttgcctctgagt

SEQ ID NO: 177226 - DNA, 25 bp, Homo sapien
caaggtgaccaagaaattgagtcaa

SEQ ID NO: 177227 - DNA, 25 bp, Homo sapien
gtgaccaagaaattgagtcaaggag

SEQ ID NO: 177228 - DNA, 25 bp, Homo sapien
tctcttgctgcccttagcccaaaac

SEQ ID NO: 177229 - DNA, 25 bp, Homo sapien
tactattgggttgcgggccaagtac

SEQ ID NO: 177230 - DNA, 25 bp, Homo sapien
tattcagtgggtggattattcagtc

SEQ ID NO: 177231 - DNA, 25 bp, Homo sapien
tcctccccaggttagctattcagtg

SEQ ID NO: 177232 - DNA, 25 bp, Homo sapien
cactgtgaaggaactgaggaggttc

SEQ ID NO: 177233 - DNA, 25 bp, Homo sapien
cacgggcttgtgtagagacctcttt

SEQ ID NO: 177234 - DNA, 25 bp, Homo sapien
caccacaccgagcagagacctgttt

SEQ ID NO: 177235 - DNA, 25 bp, Homo sapien
atgaaccaccacaccgagcagagac

SEQ ID NO: 177236 - DNA, 25 bp, Homo sapien
ctgatgttatcccttgccatgaaga

SEQ ID NO: 177237 - DNA, 25 bp, Homo sapien
atcttgagctgcactaacaaattct

SEQ ID NO: 177238 - DNA, 25 bp, Homo sapien
ctgggaatgggtgatcaggaggcct

SEQ ID NO: 177239 - DNA, 25 bp, Homo sapien
gaggcctgagtttaagtcccatctt

SEQ ID NO: 177240 - DNA, 25 bp, Homo sapien
tgaccctgctagagtcatttctcac

SEQ ID NO: 177241 - DNA, 25 bp, Homo sapien
tgccggatcaactcaacccaaggtg

SEQ ID NO: 177242 - DNA, 25 bp, Homo sapien
tcagattagactgcacccgctggga

SEQ ID NO: 177243 - DNA, 25 bp, Homo sapien
aaaacaggacggaggctatgggaca

SEQ ID NO: 177244 - DNA, 25 bp, Homo sapien
tgtgtgcctaagaagtagctcagcc

SEQ ID NO: 177245 - DNA, 25 bp, Homo sapien
ggttcacaatcctacttctgccatt

SEQ ID NO: 177246 - DNA, 25 bp, Homo sapien
tccctgggttcacaatcctacttct

SEQ ID NO: 177247 - DNA, 25 bp, Homo sapien
agctgtgcgatcttgaacaaatttc

SEQ ID NO: 177248 - DNA, 25 bp, Homo sapien
catcatggttacacagaggctctgg

SEQ ID NO: 177249 - DNA, 25 bp, Homo sapien
cagagataatgacaatgttctactt

SEQ ID NO: 177250 - DNA, 25 bp, Homo sapien
agagataatgacaatgttctactta

SEQ ID NO: 177251 - DNA, 25 bp, Homo sapien
aaacagagataatgacaatgttcta

SEQ ID NO: 177252 - DNA, 25 bp, Homo sapien
aacagagataatgacaatgttctac

SEQ ID NO: 177253 - DNA, 25 bp, Homo sapien
acaaaacagattttatgatcgagtc

SEQ ID NO: 177254 - DNA, 25 bp, Homo sapien
cagattttatgatcgagtcatagtt

SEQ ID NO: 177255 - DNA, 25 bp, Homo sapien
aaaacagattttatgatcgagtcat

SEQ ID NO: 177256 - DNA, 25 bp, Homo sapien
aacagattttatgatcgagtcatag

SEQ ID NO: 177257 - DNA, 25 bp, Homo sapien
acaagtgttaagtaaatgtgagccc

SEQ ID NO: 177258 - DNA, 25 bp, Homo sapien
gaaaaacccagatttgcgcacacaa

SEQ ID NO: 177259 - DNA, 25 bp, Homo sapien
agagattattacacactgagcctcc

SEQ ID NO: 177260 - DNA, 25 bp, Homo sapien
gggctcctaattgatgactaaacag

SEQ ID NO: 177261 - DNA, 25 bp, Homo sapien
gtttgcggaatgacttggagagttc

SEQ ID NO: 177262 - DNA, 25 bp, Homo sapien
gtttaaatgggcatttgtttgcgga

SEQ ID NO: 177263 - DNA, 25 bp, Homo sapien
aatgggcatttgtttgcggaatgac

SEQ ID NO: 177264 - DNA, 25 bp, Homo sapien
gggcatttgtttgcggaatgacttg

SEQ ID NO: 177265 - DNA, 25 bp, Homo sapien
tgggcatggtaacaagccaacaagc

SEQ ID NO: 177266 - DNA, 25 bp, Homo sapien
ggcacatgtgcatgcctgtcccctt

SEQ ID NO: 177267 - DNA, 25 bp, Homo sapien
tattctgaatgcatgtatgggcaca

SEQ ID NO: 177268 - DNA, 25 bp, Homo sapien
ttcactcagtgataaggaagaaggg

SEQ ID NO: 177269 - DNA, 25 bp, Homo sapien
tgggagatccttgttcatttgtaac

SEQ ID NO: 177270 - DNA, 25 bp, Homo sapien
atttgtaacatcaggaactgcttct

SEQ ID NO: 177271 - DNA, 25 bp, Homo sapien
aagactgtcaaggagcccgagtgag

SEQ ID NO: 177272 - DNA, 25 bp, Homo sapien
gtgagggaagcagaccaaccatggt

SEQ ID NO: 177273 - DNA, 25 bp, Homo sapien
aggttaaccaggaggagaggcttat

SEQ ID NO: 177274 - DNA, 25 bp, Homo sapien
gcttatataaggcatgaatgtgagt

SEQ ID NO: 177275 - DNA, 25 bp, Homo sapien
agaggaatcactcccctgttaaggt

SEQ ID NO: 177276 - DNA, 25 bp, Homo sapien
agagaagcaaagaggttaggaatag

SEQ ID NO: 177277 - DNA, 25 bp, Homo sapien
caaccaagtggattgattgaaatgc

SEQ ID NO: 177278 - DNA, 25 bp, Homo sapien
tttttacaaccaagtggattgattg

SEQ ID NO: 177279 - DNA, 25 bp, Homo sapien
tccatatacccattatcttttatcc

SEQ ID NO: 177280 - DNA, 25 bp, Homo sapien
ttctattccatatacccattatctt

SEQ ID NO: 177281 - DNA, 25 bp, Homo sapien
tttggggttcttaagcatcatttcc

SEQ ID NO: 177282 - DNA, 25 bp, Homo sapien
tttccaccaacagagatgtacctac

SEQ ID NO: 177283 - DNA, 25 bp, Homo sapien
tcatttccaccaacagagatgtacc

SEQ ID NO: 177284 - DNA, 25 bp, Homo sapien
catcatttccaccaacagagatgta

SEQ ID NO: 177285 - DNA, 25 bp, Homo sapien
acagttgtctcagagcatggaggct

SEQ ID NO: 177286 - DNA, 25 bp, Homo sapien
gctccagccagacgcttggggtgct

SEQ ID NO: 177287 - DNA, 25 bp, Homo sapien
aaggttggttatgggatgcttcctg

SEQ ID NO: 177288 - DNA, 25 bp, Homo sapien
gaacatctgtgccaaaaactggagg

SEQ ID NO: 177289 - DNA, 25 bp, Homo sapien
atcctcggctccagccagacgcttg

SEQ ID NO: 177290 - DNA, 25 bp, Homo sapien
gctagtcagggacttcctcttcgga

SEQ ID NO: 177291 - DNA, 25 bp, Homo sapien
ttaatccctaaagctgcctggaggc

SEQ ID NO: 177292 - DNA, 25 bp, Homo sapien
gacaaacagtccacaaagtgcttgg

SEQ ID NO: 177293 - DNA, 25 bp, Homo sapien
cctcttcggagacaaaggaaatcag

SEQ ID NO: 177294 - DNA, 25 bp, Homo sapien
tcataatgccaaggaccaaggagca

SEQ ID NO: 177295 - DNA, 25 bp, Homo sapien
agtccgcggacaccgcagccaggaa

SEQ ID NO: 177296 - DNA, 25 bp, Homo sapien
cagccaggaactgtcagaggtgaca

SEQ ID NO: 177297 - DNA, 25 bp, Homo sapien
ggtgacaagggaatcccgtcataat

SEQ ID NO: 177298 - DNA, 25 bp, Homo sapien
ttcaaccgcctaggcctgatggacc

SEQ ID NO: 177299 - DNA, 25 bp, Homo sapien
caatgtaaatgccttcgactgggtg

SEQ ID NO: 177300 - DNA, 25 bp, Homo sapien
gactgggtgggctacttcacatcat

SEQ ID NO: 177301 - DNA, 25 bp, Homo sapien
taagaagagggaatgcgccagcaat

SEQ ID NO: 177302 - DNA, 25 bp, Homo sapien
gactcccttggaccgctcccgccaa

SEQ ID NO: 177303 - DNA, 25 bp, Homo sapien
cgccctccccggcttgactcccttg

SEQ ID NO: 177304 - DNA, 25 bp, Homo sapien
accgctcccgccaatcctggtctct

SEQ ID NO: 177305 - DNA, 25 bp, Homo sapien
tcctccccgccacatcgggtcgccc

SEQ ID NO: 177306 - DNA, 25 bp, Homo sapien
ttggtgttttccgccgtcggccgca

SEQ ID NO: 177307 - DNA, 25 bp, Homo sapien
tgttttccgccgtcggccgcaggcg

SEQ ID NO: 177308 - DNA, 25 bp, Homo sapien
cgccgtcggccgcaggcgcctcgtc

SEQ ID NO: 177309 - DNA, 25 bp, Homo sapien
ccgccgtcggccgcaggcgcctcgt

SEQ ID NO: 177310 - DNA, 25 bp, Homo sapien
ggtgctcgggcccacgtagagcata

SEQ ID NO: 177311 - DNA, 25 bp, Homo sapien
ccgttgttgtcccagaactcgtgac

SEQ ID NO: 177312 - DNA, 25 bp, Homo sapien
catagtcacggccgccgttgttgtc

SEQ ID NO: 177313 - DNA, 25 bp, Homo sapien
gggcccacgtagagcatagtcacgg

SEQ ID NO: 177314 - DNA, 25 bp, Homo sapien
tcacacggtagcgcaaggcgaagag

SEQ ID NO: 177315 - DNA, 25 bp, Homo sapien
tgtcacacggtagcgcaaggcgaag

SEQ ID NO: 177316 - DNA, 25 bp, Homo sapien
acacggtagcgcaaggcgaagagca

SEQ ID NO: 177317 - DNA, 25 bp, Homo sapien
ctgtcacacggtagcgcaaggcgaa

SEQ ID NO: 177318 - DNA, 25 bp, Homo sapien
atgcgctgcgtcagcaagcgggcgg

SEQ ID NO: 177319 - DNA, 25 bp, Homo sapien
cgcctcggcgcgttccaggcagatg

SEQ ID NO: 177320 - DNA, 25 bp, Homo sapien
acgcgcttctcgtaggccaggtcca

SEQ ID NO: 177321 - DNA, 25 bp, Homo sapien
ggcggctggcgcctcgcgttggctc

SEQ ID NO: 177322 - DNA, 25 bp, Homo sapien
aacgcactctcttgcgggtgtctgg

SEQ ID NO: 177323 - DNA, 25 bp, Homo sapien
cggaagcggcgcacgacagccagct

SEQ ID NO: 177324 - DNA, 25 bp, Homo sapien
gagggcgtccctctgcaattggatc

SEQ ID NO: 177325 - DNA, 25 bp, Homo sapien
aaccccagtgcgtcggcgaaacgca

SEQ ID NO: 177326 - DNA, 25 bp, Homo sapien
gccgcctccggctggtgcagatcgg

SEQ ID NO: 177327 - DNA, 25 bp, Homo sapien
ggcggccccgactcggtgcgtgagc

SEQ ID NO: 177328 - DNA, 25 bp, Homo sapien
gctggtgcagatcgggcccggcggc

SEQ ID NO: 177329 - DNA, 25 bp, Homo sapien
gtgagcgcgggatcgggccccgaac

SEQ ID NO: 177330 - DNA, 25 bp, Homo sapien
ccgttagcgcggcgatgaagctcag

SEQ ID NO: 177331 - DNA, 25 bp, Homo sapien
gctacggtagtaggcgcgctccgtt

SEQ ID NO: 177332 - DNA, 25 bp, Homo sapien
gggccgctggctacggtagtaggcg

SEQ ID NO: 177333 - DNA, 25 bp, Homo sapien
tcaggttgcggggaatgtcggtgcc

SEQ ID NO: 177334 - DNA, 25 bp, Homo sapien
gatcctccacctcccgttgctttgc

SEQ ID NO: 177335 - DNA, 25 bp, Homo sapien
cgcagaagtcgctgggtccgcttct

SEQ ID NO: 177336 - DNA, 25 bp, Homo sapien
ctgctgtgtattctccttgcagaca

SEQ ID NO: 177337 - DNA, 25 bp, Homo sapien
tcagcgcagaagtcgctgggtccgc

SEQ ID NO: 177338 - DNA, 25 bp, Homo sapien
cttccagggtcttagactatcacat

SEQ ID NO: 177339 - DNA, 25 bp, Homo sapien
gcctcctgctagcggtctgctctga

SEQ ID NO: 177340 - DNA, 25 bp, Homo sapien
agcttccagggtcttagactatcac

SEQ ID NO: 177341 - DNA, 25 bp, Homo sapien
ctgcctcctgctagcggtctgctct

SEQ ID NO: 177342 - DNA, 25 bp, Homo sapien
tcccagcttaatgggaactgctcct

SEQ ID NO: 177343 - DNA, 25 bp, Homo sapien
ctggtagacggttcccagcttaatg

SEQ ID NO: 177344 - DNA, 25 bp, Homo sapien
tagacggttcccagcttaatgggaa

SEQ ID NO: 177345 - DNA, 25 bp, Homo sapien
ggttcccagcttaatgggaactgct

SEQ ID NO: 177346 - DNA, 25 bp, Homo sapien
caaggtgctaagattgctgctctcc

SEQ ID NO: 177347 - DNA, 25 bp, Homo sapien
tctgacacagtgctctagaaccctg

SEQ ID NO: 177348 - DNA, 25 bp, Homo sapien
gcaacgtagttgtgctcgccagaac

SEQ ID NO: 177349 - DNA, 25 bp, Homo sapien
cagaacgtgggaccaaattggcctc

SEQ ID NO: 177350 - DNA, 25 bp, Homo sapien
agcacactcttcaccctaccctcta

SEQ ID NO: 177351 - DNA, 25 bp, Homo sapien
gagcacactcttcaccctaccctct

SEQ ID NO: 177352 - DNA, 25 bp, Homo sapien
ggagcacactcttcaccctaccctc

SEQ ID NO: 177353 - DNA, 25 bp, Homo sapien
taaaagcttttgatatatactgcca

SEQ ID NO: 177354 - DNA, 25 bp, Homo sapien
ctatgtaacccttttaagagatgca

SEQ ID NO: 177355 - DNA, 25 bp, Homo sapien
gaagtgcacgtagcaccaattatgg

SEQ ID NO: 177356 - DNA, 25 bp, Homo sapien
gaaagattgtactggttcttgctcc

SEQ ID NO: 177357 - DNA, 25 bp, Homo sapien
tcgcatggggcgagggaaatggccg

SEQ ID NO: 177358 - DNA, 25 bp, Homo sapien
agcatggctgaggccgcgctctggc

SEQ ID NO: 177359 - DNA, 25 bp, Homo sapien
ggaaatggccgagcatggctgaggc

SEQ ID NO: 177360 - DNA, 25 bp, Homo sapien
agggaaatggccgagcatggctgag

SEQ ID NO: 177361 - DNA, 25 bp, Homo sapien
taccagaggctagctagttgatcct

SEQ ID NO: 177362 - DNA, 25 bp, Homo sapien
tgcaaggttaacttctcactgggcc

SEQ ID NO: 177363 - DNA, 25 bp, Homo sapien
gattgaagactgaacctcccttgga

SEQ ID NO: 177364 - DNA, 25 bp, Homo sapien
taagagctgtggaggactgaaaact

SEQ ID NO: 177365 - DNA, 25 bp, Homo sapien
gggattcgccatggacacgtctcaa

SEQ ID NO: 177366 - DNA, 25 bp, Homo sapien
gagaatcccataactaactgctgag

SEQ ID NO: 177367 - DNA, 25 bp, Homo sapien
caggtttctgtagccggaagatctc

SEQ ID NO: 177368 - DNA, 25 bp, Homo sapien
gaaggacaccaaactgttctgcttg

SEQ ID NO: 177369 - DNA, 25 bp, Homo sapien
ccccaagagatagaaggacaaacag

SEQ ID NO: 177370 - DNA, 25 bp, Homo sapien
cagttgtctgtaagtcaccactggg

SEQ ID NO: 177371 - DNA, 25 bp, Homo sapien
cgaagtgtgtcaagtgcttaggcca

SEQ ID NO: 177372 - DNA, 25 bp, Homo sapien
caagcagtcagtaagtggtgacagt

SEQ ID NO: 177373 - DNA, 25 bp, Homo sapien
cgtgaggtgcctctgagacttctgg

SEQ ID NO: 177374 - DNA, 25 bp, Homo sapien
tgagctctccgcgatggctggcgtg

SEQ ID NO: 177375 - DNA, 25 bp, Homo sapien
tgactctggccaaggaagtgaatgc

SEQ ID NO: 177376 - DNA, 25 bp, Homo sapien
gggtggatgtctttgggcgcaggat

SEQ ID NO: 177377 - DNA, 25 bp, Homo sapien
aggagcttgcgcttggtctccggca

SEQ ID NO: 177378 - DNA, 25 bp, Homo sapien
ccggcagcagcataatgctgagaat

SEQ ID NO: 177379 - DNA, 25 bp, Homo sapien
ggcaagcagcgggacgtggtcacag

SEQ ID NO: 177380 - DNA, 25 bp, Homo sapien
tccatggcccatgtggaggcgctgg

SEQ ID NO: 177381 - DNA, 25 bp, Homo sapien
gtggtgatggcagcctcgttcagat

SEQ ID NO: 177382 - DNA, 25 bp, Homo sapien
gaaagtggtgatggcagcctcgttc

SEQ ID NO: 177383 - DNA, 25 bp, Homo sapien
agtggtgatggcagcctcgttcaga

SEQ ID NO: 177384 - DNA, 25 bp, Homo sapien
aagtggtgatggcagcctcgttcag

SEQ ID NO: 177385 - DNA, 25 bp, Homo sapien
tgggcattcagtaattgactgggag

SEQ ID NO: 177386 - DNA, 25 bp, Homo sapien
caagagggatgatatgaatgcaggt

SEQ ID NO: 177387 - DNA, 25 bp, Homo sapien
cagtaattgactgggagagcagatg

SEQ ID NO: 177388 - DNA, 25 bp, Homo sapien
tcaaggctggcctagtcccgggtgt

SEQ ID NO: 177389 - DNA, 25 bp, Homo sapien
gccagaagaaatggctgtgcctgtc

SEQ ID NO: 177390 - DNA, 25 bp, Homo sapien
ttgggaggcctgtgccagaagaaat

SEQ ID NO: 177391 - DNA, 25 bp, Homo sapien
ctgtgccagaagaaatggctgtgcc

SEQ ID NO: 177392 - DNA, 25 bp, Homo sapien
gggcttgtcttgggaggcctgtgcc

SEQ ID NO: 177393 - DNA, 25 bp, Homo sapien
ccacactgtggggaagataggatgc

SEQ ID NO: 177394 - DNA, 25 bp, Homo sapien
tggggttcccttgttgagcccacac

SEQ ID NO: 177395 - DNA, 25 bp, Homo sapien
acactgtggggaagataggatgctc

SEQ ID NO: 177396 - DNA, 25 bp, Homo sapien
tctgttggggttcccttgttgagcc

SEQ ID NO: 177397 - DNA, 25 bp, Homo sapien
aagcaatgccggtaagggtcatgga

SEQ ID NO: 177398 - DNA, 25 bp, Homo sapien
gcagagagcacaggtagaagtccga

SEQ ID NO: 177399 - DNA, 25 bp, Homo sapien
tagcagtggcgaatggcatgggcaa

SEQ ID NO: 177400 - DNA, 25 bp, Homo sapien
ctgcggtgccgctggccagcagaga

SEQ ID NO: 177401 - DNA, 25 bp, Homo sapien
tgctgatggtcctccgcaggggtcc

SEQ ID NO: 177402 - DNA, 25 bp, Homo sapien
aggggtggggaagcaacgaacagag

SEQ ID NO: 177403 - DNA, 25 bp, Homo sapien
ccctcccgcagccttctacagtgct

SEQ ID NO: 177404 - DNA, 25 bp, Homo sapien
gtggggaagcaacgaacagagcctg

SEQ ID NO: 177405 - DNA, 25 bp, Homo sapien
ttttccagatgttgcggtagttgag

SEQ ID NO: 177406 - DNA, 25 bp, Homo sapien
tttccagatgttgcggtagttgagg

SEQ ID NO: 177407 - DNA, 25 bp, Homo sapien
tgttgcggtagttgaggagggaagc

SEQ ID NO: 177408 - DNA, 25 bp, Homo sapien
gcggtagttgaggagggaagcaaag

SEQ ID NO: 177409 - DNA, 25 bp, Homo sapien
gcatctgcccatggggccggtttcg

SEQ ID NO: 177410 - DNA, 25 bp, Homo sapien
gccaccgtgcggactccaggaacaa

SEQ ID NO: 177411 - DNA, 25 bp, Homo sapien
gggccggtttcgctcagccaggatc

SEQ ID NO: 177412 - DNA, 25 bp, Homo sapien
tcaatctgccgcttcactatcagcc

SEQ ID NO: 177413 - DNA, 25 bp, Homo sapien
gaaggggtatactgtgaggcctccc

SEQ ID NO: 177414 - DNA, 25 bp, Homo sapien
cttctcctgatctaggggtgggaaa

SEQ ID NO: 177415 - DNA, 25 bp, Homo sapien
ctcccttctcctgatctaggggtgg

SEQ ID NO: 177416 - DNA, 25 bp, Homo sapien
gggaaggggtatactgtgaggcctc

SEQ ID NO: 177417 - DNA, 25 bp, Homo sapien
gactggggctggggtaggcctggac

SEQ ID NO: 177418 - DNA, 25 bp, Homo sapien
ggactggggctggggtaggcctgga

SEQ ID NO: 177419 - DNA, 25 bp, Homo sapien
ctgagggactggggctggggtaggc

SEQ ID NO: 177420 - DNA, 25 bp, Homo sapien
agggactggggctggggtaggcctg

SEQ ID NO: 177421 - DNA, 25 bp, Homo sapien
ccgggctagggctagtttggaggca

SEQ ID NO: 177422 - DNA, 25 bp, Homo sapien
gtctccgggctagggctagtttgga

SEQ ID NO: 177423 - DNA, 25 bp, Homo sapien
cagacgacaggtgaagggtaatact

SEQ ID NO: 177424 - DNA, 25 bp, Homo sapien
cagagatgggaattgccagacgaca

SEQ ID NO: 177425 - DNA, 25 bp, Homo sapien
ggaagaggatgcagggagcggtgat

SEQ ID NO: 177426 - DNA, 25 bp, Homo sapien
gaagaggatgcagggagcggtgatc

SEQ ID NO: 177427 - DNA, 25 bp, Homo sapien
gaggatgcagggagcggtgatcatt

SEQ ID NO: 177428 - DNA, 25 bp, Homo sapien
ggatgcagggagcggtgatcattcg

SEQ ID NO: 177429 - DNA, 25 bp, Homo sapien
cacccgaagcctctgggttgggtcg

SEQ ID NO: 177430 - DNA, 25 bp, Homo sapien
tctgggttgggtcgcacagctccag

SEQ ID NO: 177431 - DNA, 25 bp, Homo sapien
gaatcgccaatccttagagacaagg

SEQ ID NO: 177432 - DNA, 25 bp, Homo sapien
ggaatcgccaatccttagagacaag

SEQ ID NO: 177433 - DNA, 25 bp, Homo sapien
agaggtcagacccagagtggaggct

SEQ ID NO: 177434 - DNA, 25 bp, Homo sapien
gactggggagactgttcagccctct

SEQ ID NO: 177435 - DNA, 25 bp, Homo sapien
attgcctcccttgctaacctctggg

SEQ ID NO: 177436 - DNA, 25 bp, Homo sapien
gagagagaggtcagacccagagtgg

SEQ ID NO: 177437 - DNA, 25 bp, Homo sapien
ccggcaagcagaaagcccaagagga

SEQ ID NO: 177438 - DNA, 25 bp, Homo sapien
ggtcaacaccggcaagcagaaagcc

SEQ ID NO: 177439 - DNA, 25 bp, Homo sapien
cccaggtcaacaccggcaagcagaa

SEQ ID NO: 177440 - DNA, 25 bp, Homo sapien
aggtagacacccaggtcaacaccgg

SEQ ID NO: 177441 - DNA, 25 bp, Homo sapien
gtcagcagcacaatcccgcgacggc

SEQ ID NO: 177442 - DNA, 25 bp, Homo sapien
caaggtcagcagcacaatcccgcga

SEQ ID NO: 177443 - DNA, 25 bp, Homo sapien
gacgcctgtggaggagcctgcagca

SEQ ID NO: 177444 - DNA, 25 bp, Homo sapien
aggtcagcagcacaatcccgcgacg

SEQ ID NO: 177445 - DNA, 25 bp, Homo sapien
ggaacattgactcttgggctattgg

SEQ ID NO: 177446 - DNA, 25 bp, Homo sapien
gctattggtcagagattagggcact

SEQ ID NO: 177447 - DNA, 25 bp, Homo sapien
tagggcacttgtcaatggatgtgac

SEQ ID NO: 177448 - DNA, 25 bp, Homo sapien
gctgcacacttcagagctagaggta

SEQ ID NO: 177449 - DNA, 25 bp, Homo sapien
aacaggtagccggaggcaaagccca

SEQ ID NO: 177450 - DNA, 25 bp, Homo sapien
acccaggaacaggtagccggaggca

SEQ ID NO: 177451 - DNA, 25 bp, Homo sapien
gccggaggcaaagcccaagatgaag

SEQ ID NO: 177452 - DNA, 25 bp, Homo sapien
ggtagccggaggcaaagcccaagat

SEQ ID NO: 177453 - DNA, 25 bp, Homo sapien
ggaaggccattatagtcccaatcct

SEQ ID NO: 177454 - DNA, 25 bp, Homo sapien
gtcggtactggtggcgacacggctg

SEQ ID NO: 177455 - DNA, 25 bp, Homo sapien
tggcggcgctggctgctagggcagc

SEQ ID NO: 177456 - DNA, 25 bp, Homo sapien
ccttgaggcaatggttgaagtccgg

SEQ ID NO: 177457 - DNA, 25 bp, Homo sapien
gcccagagccacgaagagcaccggc

SEQ ID NO: 177458 - DNA, 25 bp, Homo sapien
ccacgaagagcaccggcaggcagca

SEQ ID NO: 177459 - DNA, 25 bp, Homo sapien
gagccacgaagagcaccggcaggca

SEQ ID NO: 177460 - DNA, 25 bp, Homo sapien
ccagagccacgaagagcaccggcag

SEQ ID NO: 177461 - DNA, 25 bp, Homo sapien
agcgcctcaaagctgagggggcctg

SEQ ID NO: 177462 - DNA, 25 bp, Homo sapien
caggctgctgcccagtccgtcgccg

SEQ ID NO: 177463 - DNA, 25 bp, Homo sapien
ctgctgcccagtccgtcgccgcccg

SEQ ID NO: 177464 - DNA, 25 bp, Homo sapien
ggctgctgcccagtccgtcgccgcc

SEQ ID NO: 177465 - DNA, 25 bp, Homo sapien
ctccgtgggcaccgcatctccgagg

SEQ ID NO: 177466 - DNA, 25 bp, Homo sapien
ggcaccgcatctccgagggtcccga

SEQ ID NO: 177467 - DNA, 25 bp, Homo sapien
gctccgtgggcaccgcatctccgag

SEQ ID NO: 177468 - DNA, 25 bp, Homo sapien
gcaccgcatctccgagggtcccgac

SEQ ID NO: 177469 - DNA, 25 bp, Homo sapien
ttggggggcagggggtggcaggaga

SEQ ID NO: 177470 - DNA, 25 bp, Homo sapien
tgttggggggcagggggtggcagga

SEQ ID NO: 177471 - DNA, 25 bp, Homo sapien
ctgttggggggcagggggtggcagg

SEQ ID NO: 177472 - DNA, 25 bp, Homo sapien
gggtgatctctacagtgttgtcgat

SEQ ID NO: 177473 - DNA, 25 bp, Homo sapien
tacagtgttgtcgattttgccgccg

SEQ ID NO: 177474 - DNA, 25 bp, Homo sapien
tctctacagtgttgtcgattttgcc

SEQ ID NO: 177475 - DNA, 25 bp, Homo sapien
agtgttgtcgattttgccgccgccc

SEQ ID NO: 177476 - DNA, 25 bp, Homo sapien
gctgtcctctggctcagttgcgcgc

SEQ ID NO: 177477 - DNA, 25 bp, Homo sapien
tctggctcagttgcgcgccggctgc

SEQ ID NO: 177478 - DNA, 25 bp, Homo sapien
acagctcgaagagatcccgctctgc

SEQ ID NO: 177479 - DNA, 25 bp, Homo sapien
ccgcgccgaaaggatgcgctgtcct

SEQ ID NO: 177480 - DNA, 25 bp, Homo sapien
tctacaaggagaccactttcttggg

SEQ ID NO: 177481 - DNA, 25 bp, Homo sapien
ggaagactgtcttggccctgtatca

SEQ ID NO: 177482 - DNA, 25 bp, Homo sapien
gctgagcatgggcaggccattatcc

SEQ ID NO: 177483 - DNA, 25 bp, Homo sapien
gcagaaatcgtcttccagctcatgg

SEQ ID NO: 177484 - DNA, 25 bp, Homo sapien
gatgagcaggtcatcctgagatgat

SEQ ID NO: 177485 - DNA, 25 bp, Homo sapien
ctgcaaccgcggatcctccagaaaa

SEQ ID NO: 177486 - DNA, 25 bp, Homo sapien
acacattgcattcatctgcaaccgc

SEQ ID NO: 177487 - DNA, 25 bp, Homo sapien
agcaggtcatcctgagatgatctac

SEQ ID NO: 177488 - DNA, 25 bp, Homo sapien
gacttatttgtgtatcccactagaa

SEQ ID NO: 177489 - DNA, 25 bp, Homo sapien
ctggcgcgtcatgggagcagagaac

SEQ ID NO: 177490 - DNA, 25 bp, Homo sapien
gcagaactgtgcctggcgcgtcatg

SEQ ID NO: 177491 - DNA, 25 bp, Homo sapien
tatcccactagaacaatacattcac

SEQ ID NO: 177492 - DNA, 25 bp, Homo sapien
gtgtgtgtcccataggtatggctgc

SEQ ID NO: 177493 - DNA, 25 bp, Homo sapien
agggctgctcaccatgctcccaaga

SEQ ID NO: 177494 - DNA, 25 bp, Homo sapien
cagggctgctcaccatgctcccaag

SEQ ID NO: 177495 - DNA, 25 bp, Homo sapien
gtcccataggtatggctgctgagca

SEQ ID NO: 177496 - DNA, 25 bp, Homo sapien
cagtgcagtgctgatcttctagagc

SEQ ID NO: 177497 - DNA, 25 bp, Homo sapien
gacagtttatgtcttgcccgcactc

SEQ ID NO: 177498 - DNA, 25 bp, Homo sapien
tctttccgagaaccttcaaactctg

SEQ ID NO: 177499 - DNA, 25 bp, Homo sapien
cagcagggtttattaaggtgcacac

SEQ ID NO: 177500 - DNA, 25 bp, Homo sapien
tgggtggtagtgcagtgacctccac

SEQ ID NO: 177501 - DNA, 25 bp, Homo sapien
tgcagtgacctccaccctaggctga

SEQ ID NO: 177502 - DNA, 25 bp, Homo sapien
aggtgggtggtagtgcagtgacctc

SEQ ID NO: 177503 - DNA, 25 bp, Homo sapien
tggtagtgcagtgacctccacccta

SEQ ID NO: 177504 - DNA, 25 bp, Homo sapien
catttctcctagtcccttaacaaag

SEQ ID NO: 177505 - DNA, 25 bp, Homo sapien
tgctcctgacaaagcagggaataat

SEQ ID NO: 177506 - DNA, 25 bp, Homo sapien
ttagggggagaagacacctctgtga

SEQ ID NO: 177507 - DNA, 25 bp, Homo sapien
cctctgtgagaggttgagatgagca

SEQ ID NO: 177508 - DNA, 25 bp, Homo sapien
atggagccaggctagtgagcagggt

SEQ ID NO: 177509 - DNA, 25 bp, Homo sapien
ccaggctagtgagcagggtagtgaa

SEQ ID NO: 177510 - DNA, 25 bp, Homo sapien
gagccaggctagtgagcagggtagt

SEQ ID NO: 177511 - DNA, 25 bp, Homo sapien
ctagtgagcagggtagtgaattgca

SEQ ID NO: 177512 - DNA, 25 bp, Homo sapien
agtggcccgcaatgcctggcccagt

SEQ ID NO: 177513 - DNA, 25 bp, Homo sapien
cagcacagtggcccgcaatgcctgg

SEQ ID NO: 177514 - DNA, 25 bp, Homo sapien
agggcagctcccttgacagccagca

SEQ ID NO: 177515 - DNA, 25 bp, Homo sapien
acagtggcccgcaatgcctggccca

SEQ ID NO: 177516 - DNA, 25 bp, Homo sapien
ggctgattagcctgggtactggaca

SEQ ID NO: 177517 - DNA, 25 bp, Homo sapien
cctgggtactggacatcagggctgc

SEQ ID NO: 177518 - DNA, 25 bp, Homo sapien
ccaacaaacaccaggcgatgagcag

SEQ ID NO: 177519 - DNA, 25 bp, Homo sapien
aaacaccaggcgatgagcagccacc

SEQ ID NO: 177520 - DNA, 25 bp, Homo sapien
catagaagtacaggagctgcagatc

SEQ ID NO: 177521 - DNA, 25 bp, Homo sapien
tggcattgcccagcatagaagtaca

SEQ ID NO: 177522 - DNA, 25 bp, Homo sapien
ttgcccagcatagaagtacaggagc

SEQ ID NO: 177523 - DNA, 25 bp, Homo sapien
tgagtagtggctctggcattgccca

SEQ ID NO: 177524 - DNA, 25 bp, Homo sapien
gatccttttagctcttacctctgcc

SEQ ID NO: 177525 - DNA, 25 bp, Homo sapien
tacctctgcccatcggaaagtttag

SEQ ID NO: 177526 - DNA, 25 bp, Homo sapien
cttcccaagggcgatccttttagct

SEQ ID NO: 177527 - DNA, 25 bp, Homo sapien
gagagaacattctcatgagtgccat

SEQ ID NO: 177528 - DNA, 25 bp, Homo sapien
tctacgcagggttgaggaaaccacc

SEQ ID NO: 177529 - DNA, 25 bp, Homo sapien
gaagccaggtctcttaggagcccag

SEQ ID NO: 177530 - DNA, 25 bp, Homo sapien
cctggagagattaactgacggcttc

SEQ ID NO: 177531 - DNA, 25 bp, Homo sapien
gggtctggcacttggtaaatacctg

SEQ ID NO: 177532 - DNA, 25 bp, Homo sapien
ctctcgggcagttcaggatcccctg

SEQ ID NO: 177533 - DNA, 25 bp, Homo sapien
ggcctagatccctgagctttgtcca

SEQ ID NO: 177534 - DNA, 25 bp, Homo sapien
ggatcccctgtgcaggcctgatccg

SEQ ID NO: 177535 - DNA, 25 bp, Homo sapien
gatccgggggcctagatccctgagc

SEQ ID NO: 177536 - DNA, 25 bp, Homo sapien
cagttcctcgggtgcttcatacaaa

SEQ ID NO: 177537 - DNA, 25 bp, Homo sapien
tacaaattgagtaaggctgacgctc

SEQ ID NO: 177538 - DNA, 25 bp, Homo sapien
gaggcacatcatagggagcatcatc

SEQ ID NO: 177539 - DNA, 25 bp, Homo sapien
cggaatgccctcgtactcattgtgg

SEQ ID NO: 177540 - DNA, 25 bp, Homo sapien
ccactggagggcacccggagggcgg

SEQ ID NO: 177541 - DNA, 25 bp, Homo sapien
ggcagggcagtcataggggccactg

SEQ ID NO: 177542 - DNA, 25 bp, Homo sapien
cactggagggcacccggagggcggt

SEQ ID NO: 177543 - DNA, 25 bp, Homo sapien
cagtcataggggccactggagggca

SEQ ID NO: 177544 - DNA, 25 bp, Homo sapien
aggtccagctggaggtcctgaggtt

SEQ ID NO: 177545 - DNA, 25 bp, Homo sapien
ggtcctgaggttggacagggccgag

SEQ ID NO: 177546 - DNA, 25 bp, Homo sapien
gtcctgaggttggacagggccgagc

SEQ ID NO: 177547 - DNA, 25 bp, Homo sapien
tcctgaggttggacagggccgagct

SEQ ID NO: 177548 - DNA, 25 bp, Homo sapien
gggctggatatggtgagccaggctg

SEQ ID NO: 177549 - DNA, 25 bp, Homo sapien
ggctggatatggtgagccaggctgg

SEQ ID NO: 177550 - DNA, 25 bp, Homo sapien
tggccgtgtagggagcagaggcacc

SEQ ID NO: 177551 - DNA, 25 bp, Homo sapien
gtgttgtcatacagtgcccgggcca

SEQ ID NO: 177552 - DNA, 25 bp, Homo sapien
ggacatcccctcggcggaaggacag

SEQ ID NO: 177553 - DNA, 25 bp, Homo sapien
tgttggcgggcacaatgccctgctg

SEQ ID NO: 177554 - DNA, 25 bp, Homo sapien
ggccaggctcggttttgctgacttc

SEQ ID NO: 177555 - DNA, 25 bp, Homo sapien
gacttcagcggtggctgccccgcac

SEQ ID NO: 177556 - DNA, 25 bp, Homo sapien
cctcaggccaggctcggttttgctg

SEQ ID NO: 177557 - DNA, 25 bp, Homo sapien
ggctgccccgcaccatggtccgcgg

SEQ ID NO: 177558 - DNA, 25 bp, Homo sapien
tggaacaggcgggactgccttcccg

SEQ ID NO: 177559 - DNA, 25 bp, Homo sapien
gagagcgagaactgagacgcttgcc

SEQ ID NO: 177560 - DNA, 25 bp, Homo sapien
ggctcgcaggatccgaaaattccct

SEQ ID NO: 177561 - DNA, 25 bp, Homo sapien
gacgcttgccccaagttgcctggag

SEQ ID NO: 177562 - DNA, 25 bp, Homo sapien
caggctcacccctggcccgcggctg

SEQ ID NO: 177563 - DNA, 25 bp, Homo sapien
gggtcgcgcgtggcccgcaggctca

SEQ ID NO: 177564 - DNA, 25 bp, Homo sapien
cactgagagggctgcgaaggctccg

SEQ ID NO: 177565 - DNA, 25 bp, Homo sapien
cgggggtcgcgcgtggcccgcaggc

SEQ ID NO: 177566 - DNA, 25 bp, Homo sapien
cacctcggtctccttccttgtggat

SEQ ID NO: 177567 - DNA, 25 bp, Homo sapien
ccctactgccctgatccaggatgga

SEQ ID NO: 177568 - DNA, 25 bp, Homo sapien
gatatgggatgccttggctctggca

SEQ ID NO: 177569 - DNA, 25 bp, Homo sapien
tactgccctgatccaggatggacag

SEQ ID NO: 177570 - DNA, 25 bp, Homo sapien
ggacagatgggctcaggcagagttt

SEQ ID NO: 177571 - DNA, 25 bp, Homo sapien
ctggcaggaaggacagatgggctca

SEQ ID NO: 177572 - DNA, 25 bp, Homo sapien
gcaggaaggacagatgggctcaggc

SEQ ID NO: 177573 - DNA, 25 bp, Homo sapien
gacagatgggctcaggcagagtttg

SEQ ID NO: 177574 - DNA, 25 bp, Homo sapien
tattacaggttggcaagagtgaggt

SEQ ID NO: 177575 - DNA, 25 bp, Homo sapien
tatttattacaggttggcaagagtg

SEQ ID NO: 177576 - DNA, 25 bp, Homo sapien
atatttattacaggttggcaagagt

SEQ ID NO: 177577 - DNA, 25 bp, Homo sapien
tttattacaggttggcaagagtgag

SEQ ID NO: 177578 - DNA, 25 bp, Homo sapien
ggcaccaatgtcacggctcttggct

SEQ ID NO: 177579 - DNA, 25 bp, Homo sapien
gtcctgtagccgcagcaggttcttt

SEQ ID NO: 177580 - DNA, 25 bp, Homo sapien
gaccttcagttgcagcttgtccacc

SEQ ID NO: 177581 - DNA, 25 bp, Homo sapien
tcctgtagccgcagcaggttctttt

SEQ ID NO: 177582 - DNA, 25 bp, Homo sapien
gaaagactagttagaagagttttca

SEQ ID NO: 177583 - DNA, 25 bp, Homo sapien
ggaaggattctttgaactgttctga

SEQ ID NO: 177584 - DNA, 25 bp, Homo sapien
tggtagcacttagagttattaaaaa

SEQ ID NO: 177585 - DNA, 25 bp, Homo sapien
tagactcaagtcaaactgactgcag

SEQ ID NO: 177586 - DNA, 25 bp, Homo sapien
ccttgagggcgatctgctcggcctc

SEQ ID NO: 177587 - DNA, 25 bp, Homo sapien
ttgagggcgatctgctcggcctcgt

SEQ ID NO: 177588 - DNA, 25 bp, Homo sapien
cccttgagggcgatctgctcggcct

SEQ ID NO: 177589 - DNA, 25 bp, Homo sapien
tgagggcgatctgctcggcctcgtc

SEQ ID NO: 177590 - DNA, 25 bp, Homo sapien
cttctcctcggcgtttctgcactcc

SEQ ID NO: 177591 - DNA, 25 bp, Homo sapien
ggagctgggtcagatccgactccat

SEQ ID NO: 177592 - DNA, 25 bp, Homo sapien
tctcctcggcgtttctgcactcctg

SEQ ID NO: 177593 - DNA, 25 bp, Homo sapien
gctgggtcagatccgactccatctt

SEQ ID NO: 177594 - DNA, 25 bp, Homo sapien
gggctctgcactcagtaggtttcca

SEQ ID NO: 177595 - DNA, 25 bp, Homo sapien
gcactcagtaggtttccacaaggtg

SEQ ID NO: 177596 - DNA, 25 bp, Homo sapien
gtttccacaaggtggctcctgaccc

SEQ ID NO: 177597 - DNA, 25 bp, Homo sapien
tctgcactcagtaggtttccacaag

SEQ ID NO: 177598 - DNA, 25 bp, Homo sapien
tcaggtcgtcgttggcacggaccgc

SEQ ID NO: 177599 - DNA, 25 bp, Homo sapien
tcgtcgttggcacggaccgcatcgt

SEQ ID NO: 177600 - DNA, 25 bp, Homo sapien
cttcaggtcgtcgttggcacggacc

SEQ ID NO: 177601 - DNA, 25 bp, Homo sapien
ggtcgtcgttggcacggaccgcatc

SEQ ID NO: 177602 - DNA, 25 bp, Homo sapien
tgaggggacctcccgcccccatgta

SEQ ID NO: 177603 - DNA, 25 bp, Homo sapien
atggaggccagtcccctgaggggac

SEQ ID NO: 177604 - DNA, 25 bp, Homo sapien
cctgaggggacctcccgcccccatg

SEQ ID NO: 177605 - DNA, 25 bp, Homo sapien
gaggccagtcccctgaggggacctc

SEQ ID NO: 177606 - DNA, 25 bp, Homo sapien
gcaagctctggaggctcttgacttg

SEQ ID NO: 177607 - DNA, 25 bp, Homo sapien
cttcagcaagctctggaggctcttg

SEQ ID NO: 177608 - DNA, 25 bp, Homo sapien
cagcaagctctggaggctcttgact

SEQ ID NO: 177609 - DNA, 25 bp, Homo sapien
tcagcaagctctggaggctcttgac

SEQ ID NO: 177610 - DNA, 25 bp, Homo sapien
ggctgagctggatctccatctcatt

SEQ ID NO: 177611 - DNA, 25 bp, Homo sapien
gctgagctggatctccatctcattg

SEQ ID NO: 177612 - DNA, 25 bp, Homo sapien
tcgttgcggctgcgtgtctctgcat

SEQ ID NO: 177613 - DNA, 25 bp, Homo sapien
gttgcggctgcgtgtctctgcatcc

SEQ ID NO: 177614 - DNA, 25 bp, Homo sapien
ctcgttgcggctgcgtgtctctgca

SEQ ID NO: 177615 - DNA, 25 bp, Homo sapien
cgttgcggctgcgtgtctctgcatc

SEQ ID NO: 177616 - DNA, 25 bp, Homo sapien
gctgctcagtaaggtccgagatttc

SEQ ID NO: 177617 - DNA, 25 bp, Homo sapien
agctgctcagtaaggtccgagattt

SEQ ID NO: 177618 - DNA, 25 bp, Homo sapien
atctctggcctcttggacccccagc

SEQ ID NO: 177619 - DNA, 25 bp, Homo sapien
caactcatctctggcctcttggacc

SEQ ID NO: 177620 - DNA, 25 bp, Homo sapien
actcatctctggcctcttggacccc

SEQ ID NO: 177621 - DNA, 25 bp, Homo sapien
ctctggcctcttggacccccagcac

SEQ ID NO: 177622 - DNA, 25 bp, Homo sapien
ccgcttgaaggtctctaggtgctcc

SEQ ID NO: 177623 - DNA, 25 bp, Homo sapien
gcttgaaggtctctaggtgctccag

SEQ ID NO: 177624 - DNA, 25 bp, Homo sapien
ctcccgcttgaaggtctctaggtgc

SEQ ID NO: 177625 - DNA, 25 bp, Homo sapien
tgttctcccgcttgaaggtctctag

SEQ ID NO: 177626 - DNA, 25 bp, Homo sapien
agcagcagcattggagcgctctacg

SEQ ID NO: 177627 - DNA, 25 bp, Homo sapien
atctcattctgtagccggtgcttgg

SEQ ID NO: 177628 - DNA, 25 bp, Homo sapien
ctgtagccggtgcttggtcttctcc

SEQ ID NO: 177629 - DNA, 25 bp, Homo sapien
gagcgctctacgtccaccatcaagt

SEQ ID NO: 177630 - DNA, 25 bp, Homo sapien
catcaggtataacccgggccaaaag

SEQ ID NO: 177631 - DNA, 25 bp, Homo sapien
gctttttgctcgtcttatacgtgag

SEQ ID NO: 177632 - DNA, 25 bp, Homo sapien
tcgtcttatacgtgagcatcaggta

SEQ ID NO: 177633 - DNA, 25 bp, Homo sapien
tgaccaacaagctttttgctcgtct

SEQ ID NO: 177634 - DNA, 25 bp, Homo sapien
tcgagctcctcagtccgctgaatgg

SEQ ID NO: 177635 - DNA, 25 bp, Homo sapien
tgggccacctccgagttggccttgg

SEQ ID NO: 177636 - DNA, 25 bp, Homo sapien
ccactgggccacctccgagttggcc

SEQ ID NO: 177637 - DNA, 25 bp, Homo sapien
gcagtcatgccgggccgactgcagt

SEQ ID NO: 177638 - DNA, 25 bp, Homo sapien
cctccatttgctgggtataagagag

SEQ ID NO: 177639 - DNA, 25 bp, Homo sapien
ttgctgggtataagagagcttcccc

SEQ ID NO: 177640 - DNA, 25 bp, Homo sapien
gattagcgcctccttttcctctagc

SEQ ID NO: 177641 - DNA, 25 bp, Homo sapien
ccccgggtcagctgcgagattagcg

SEQ ID NO: 177642 - DNA, 25 bp, Homo sapien
aggggcttgtgggccatttcacaag

SEQ ID NO: 177643 - DNA, 25 bp, Homo sapien
ggggcttgtgggccatttcacaagt

SEQ ID NO: 177644 - DNA, 25 bp, Homo sapien
gggcttgtgggccatttcacaagtc

SEQ ID NO: 177645 - DNA, 25 bp, Homo sapien
aaatcattgagggagcgttgggcct

SEQ ID NO: 177646 - DNA, 25 bp, Homo sapien
gcctcttctagcttcacgcggtact

SEQ ID NO: 177647 - DNA, 25 bp, Homo sapien
cacgcggtactcattggcctggtcc

SEQ ID NO: 177648 - DNA, 25 bp, Homo sapien
gcgtccgagacactttctccaggtt

SEQ ID NO: 177649 - DNA, 25 bp, Homo sapien
tcaggaagcaagacaggaagggtga

SEQ ID NO: 177650 - DNA, 25 bp, Homo sapien
cttcaggaagcaagacaggaagggt

SEQ ID NO: 177651 - DNA, 25 bp, Homo sapien
aagcaagacaggaagggtgagtgtg

SEQ ID NO: 177652 - DNA, 25 bp, Homo sapien
gcaagacaggaagggtgagtgtggg

SEQ ID NO: 177653 - DNA, 25 bp, Homo sapien
cttggccttgatgatctgctccatg

SEQ ID NO: 177654 - DNA, 25 bp, Homo sapien
tgatgatctgctccatgttggaggt

SEQ ID NO: 177655 - DNA, 25 bp, Homo sapien
atgatctgctccatgttggaggtga

SEQ ID NO: 177656 - DNA, 25 bp, Homo sapien
gccttgatgatctgctccatgttgg

SEQ ID NO: 177657 - DNA, 25 bp, Homo sapien
tccagctccagcttgaactcgctct

SEQ ID NO: 177658 - DNA, 25 bp, Homo sapien
cagctccagcttgaactcgctcttc

SEQ ID NO: 177659 - DNA, 25 bp, Homo sapien
catccagctccagcttgaactcgct

SEQ ID NO: 177660 - DNA, 25 bp, Homo sapien
agctccagcttgaactcgctcttct

SEQ ID NO: 177661 - DNA, 25 bp, Homo sapien
tcccgccgcatcttctggaactcgg

SEQ ID NO: 177662 - DNA, 25 bp, Homo sapien
acgctgtcggcgtgcttcttgcgca

SEQ ID NO: 177663 - DNA, 25 bp, Homo sapien
tcatctcgatctgcacggacgtggc

SEQ ID NO: 177664 - DNA, 25 bp, Homo sapien
tgcaggttgtcgatctgctcgccca

SEQ ID NO: 177665 - DNA, 25 bp, Homo sapien
cctcctccagctcctcgatgcgtgc

SEQ ID NO: 177666 - DNA, 25 bp, Homo sapien
tcctcctccagctcctcgatgcgtg

SEQ ID NO: 177667 - DNA, 25 bp, Homo sapien
aatcttactgttctgctgattaatg

SEQ ID NO: 177668 - DNA, 25 bp, Homo sapien
cttactgttctgctgattaatgtca

SEQ ID NO: 177669 - DNA, 25 bp, Homo sapien
ctcaatcttactgttctgctgatta

SEQ ID NO: 177670 - DNA, 25 bp, Homo sapien
tctgtagttgaagggccagcacctg

SEQ ID NO: 177671 - DNA, 25 bp, Homo sapien
ttctcttgctctagggatccctcca

SEQ ID NO: 177672 - DNA, 25 bp, Homo sapien
tcagcttcaggtcgccctccagttt

SEQ ID NO: 177673 - DNA, 25 bp, Homo sapien
cattttccaggtccatgatgctctc

SEQ ID NO: 177674 - DNA, 25 bp, Homo sapien
agtttccgctttgctcgctccaggt

SEQ ID NO: 177675 - DNA, 25 bp, Homo sapien
gtcttcctcaacctgaaggtcatcc

SEQ ID NO: 177676 - DNA, 25 bp, Homo sapien
cagcttagcgatgatttcatccagc

SEQ ID NO: 177677 - DNA, 25 bp, Homo sapien
agcttagcgatgatttcatccagcc

SEQ ID NO: 177678 - DNA, 25 bp, Homo sapien
tgaccttagacttggacaggctgtt

SEQ ID NO: 177679 - DNA, 25 bp, Homo sapien
cagcatcattgaggttgtcttgttc

SEQ ID NO: 177680 - DNA, 25 bp, Homo sapien
cgtctctttgatgcgcccgaactct

SEQ ID NO: 177681 - DNA, 25 bp, Homo sapien
tgcggcgagcctcggacttctccag

SEQ ID NO: 177682 - DNA, 25 bp, Homo sapien
ccagcgtctctttgatgcgcccgaa

SEQ ID NO: 177683 - DNA, 25 bp, Homo sapien
ttgcggcgagcctcggacttctcca

SEQ ID NO: 177684 - DNA, 25 bp, Homo sapien
cgtgatgatgcggctcagcctctca

SEQ ID NO: 177685 - DNA, 25 bp, Homo sapien
tatcttcttgaactcaatgcgcatg

SEQ ID NO: 177686 - DNA, 25 bp, Homo sapien
aatgcgcatgagctggccccgggct

SEQ ID NO: 177687 - DNA, 25 bp, Homo sapien
cttgggcctgcatgcgcgtgatgat

SEQ ID NO: 177688 - DNA, 25 bp, Homo sapien
ccccttcctgctatcaatgaactgt

SEQ ID NO: 177689 - DNA, 25 bp, Homo sapien
cccttcctgctatcaatgaactgtc

SEQ ID NO: 177690 - DNA, 25 bp, Homo sapien
aagtccccgtagaggatgcggttgg

SEQ ID NO: 177691 - DNA, 25 bp, Homo sapien
tggtgcatgaccagggggttgtcca

SEQ ID NO: 177692 - DNA, 25 bp, Homo sapien
catgaccagggggttgtccatcacc

SEQ ID NO: 177693 - DNA, 25 bp, Homo sapien
ctctgccggaagtccccgtagagga

SEQ ID NO: 177694 - DNA, 25 bp, Homo sapien
tgatgcaacgcacaaagtgaggatg

SEQ ID NO: 177695 - DNA, 25 bp, Homo sapien
gatgatgcaacgcacaaagtgagga

SEQ ID NO: 177696 - DNA, 25 bp, Homo sapien
gagccttccgctcattggggatgat

SEQ ID NO: 177697 - DNA, 25 bp, Homo sapien
tggagccttccgctcattggggatg

SEQ ID NO: 177698 - DNA, 25 bp, Homo sapien
agagccgacaccgtctggaaggatg

SEQ ID NO: 177699 - DNA, 25 bp, Homo sapien
gacaccgtctggaaggatgagccct

SEQ ID NO: 177700 - DNA, 25 bp, Homo sapien
cggtggagagccgacaccgtctgga

SEQ ID NO: 177701 - DNA, 25 bp, Homo sapien
ccgtctggaaggatgagcccttttt

SEQ ID NO: 177702 - DNA, 25 bp, Homo sapien
tggtacagggccacaacagtctcgt

SEQ ID NO: 177703 - DNA, 25 bp, Homo sapien
tggaaattgttggacttgcccaggt

SEQ ID NO: 177704 - DNA, 25 bp, Homo sapien
atgttgcgtggcttctggaaattgt

SEQ ID NO: 177705 - DNA, 25 bp, Homo sapien
gccttgaaggtcatgtcagtggcct

SEQ ID NO: 177706 - DNA, 25 bp, Homo sapien
gcaaagagagaatcactgagcacac

SEQ ID NO: 177707 - DNA, 25 bp, Homo sapien
gggcgctgtgctggtacctcttacc

SEQ ID NO: 177708 - DNA, 25 bp, Homo sapien
agccagtagcgctggcctgctgaag

SEQ ID NO: 177709 - DNA, 25 bp, Homo sapien
gaatctggagccagtagcgctggcc

SEQ ID NO: 177710 - DNA, 25 bp, Homo sapien
aaggggcgctgtgctggtacctctt

SEQ ID NO: 177711 - DNA, 25 bp, Homo sapien
tctcgatgaggtcaatgcaggcctg

SEQ ID NO: 177712 - DNA, 25 bp, Homo sapien
gaggtcaatgcaggcctgcaggtcc

SEQ ID NO: 177713 - DNA, 25 bp, Homo sapien
ggtcaatgcaggcctgcaggtccat

SEQ ID NO: 177714 - DNA, 25 bp, Homo sapien
cttctcgatgaggtcaatgcaggcc

SEQ ID NO: 177715 - DNA, 25 bp, Homo sapien
gctccagcacgaacatgtggtggtt

SEQ ID NO: 177716 - DNA, 25 bp, Homo sapien
gcacgaacatgtggtggttgaagaa

SEQ ID NO: 177717 - DNA, 25 bp, Homo sapien
acatgtggtggttgaagaactgctg

SEQ ID NO: 177718 - DNA, 25 bp, Homo sapien
tcaatgccctccttcttgtactcct

SEQ ID NO: 177719 - DNA, 25 bp, Homo sapien
gccagagccccgatggagtagtaca

SEQ ID NO: 177720 - DNA, 25 bp, Homo sapien
gctctgccccttggtgacatactcg

SEQ ID NO: 177721 - DNA, 25 bp, Homo sapien
gcgtcaccatccagttgaacatctt

SEQ ID NO: 177722 - DNA, 25 bp, Homo sapien
gtagtacacctgctgcacgctctgc

SEQ ID NO: 177723 - DNA, 25 bp, Homo sapien
tatatcagacagtaccacgctccta

SEQ ID NO: 177724 - DNA, 25 bp, Homo sapien
cttcgttctctaccccagtgtctag

SEQ ID NO: 177725 - DNA, 25 bp, Homo sapien
ccaaatgtgccacccaacatgggta

SEQ ID NO: 177726 - DNA, 25 bp, Homo sapien
ccacatgttacccaatctgactggc

SEQ ID NO: 177727 - DNA, 25 bp, Homo sapien
tctgaagtgaagcccagcacgtcaa

SEQ ID NO: 177728 - DNA, 25 bp, Homo sapien
cgtcagcttgtagacgccagctttc

SEQ ID NO: 177729 - DNA, 25 bp, Homo sapien
gcttgtagacgccagctttctcctc

SEQ ID NO: 177730 - DNA, 25 bp, Homo sapien
ctgaagtgaagcccagcacgtcaaa

SEQ ID NO: 177731 - DNA, 25 bp, Homo sapien
aggcgtagtcgtagggattgttggt

SEQ ID NO: 177732 - DNA, 25 bp, Homo sapien
ctctccctgagacacgaaggcgtag

SEQ ID NO: 177733 - DNA, 25 bp, Homo sapien
atcaatggaggccacggacacctct

SEQ ID NO: 177734 - DNA, 25 bp, Homo sapien
tagtcgtagggattgttggtgacca

SEQ ID NO: 177735 - DNA, 25 bp, Homo sapien
aagatgtggtagtttctctcagctt

SEQ ID NO: 177736 - DNA, 25 bp, Homo sapien
ccagcaactccggcttcttgttgga

SEQ ID NO: 177737 - DNA, 25 bp, Homo sapien
agcaactccggcttcttgttggaca

SEQ ID NO: 177738 - DNA, 25 bp, Homo sapien
caactccggcttcttgttggacaga

SEQ ID NO: 177739 - DNA, 25 bp, Homo sapien
ccccaaagtggatcctaatgaattt

SEQ ID NO: 177740 - DNA, 25 bp, Homo sapien
ggccccaaagtggatcctaatgaat

SEQ ID NO: 177741 - DNA, 25 bp, Homo sapien
cccaaagtggatcctaatgaatttc

SEQ ID NO: 177742 - DNA, 25 bp, Homo sapien
gccccaaagtggatcctaatgaatt

SEQ ID NO: 177743 - DNA, 25 bp, Homo sapien
ggaggagttgtcgttccggacagtc

SEQ ID NO: 177744 - DNA, 25 bp, Homo sapien
aggagttgtcgttccggacagtctt

SEQ ID NO: 177745 - DNA, 25 bp, Homo sapien
gcgggaggagttgtcgttccggaca

SEQ ID NO: 177746 - DNA, 25 bp, Homo sapien
cgggaggagttgtcgttccggacag

SEQ ID NO: 177747 - DNA, 25 bp, Homo sapien
tgtccttcttgccacggtcacctat

SEQ ID NO: 177748 - DNA, 25 bp, Homo sapien
ggtcacctatggctgcaatgctggc

SEQ ID NO: 177749 - DNA, 25 bp, Homo sapien
tgttcgcattggcattgtccttctt

SEQ ID NO: 177750 - DNA, 25 bp, Homo sapien
cttgttcgcattggcattgtccttc

SEQ ID NO: 177751 - DNA, 25 bp, Homo sapien
gtgatgaggatggactggttctccc

SEQ ID NO: 177752 - DNA, 25 bp, Homo sapien
tgatgaggatggactggttctcccg

SEQ ID NO: 177753 - DNA, 25 bp, Homo sapien
atgaggatggactggttctcccgat

SEQ ID NO: 177754 - DNA, 25 bp, Homo sapien
gatgaggatggactggttctcccga

SEQ ID NO: 177755 - DNA, 25 bp, Homo sapien
tcctcttcttgccccggtaggcggc

SEQ ID NO: 177756 - DNA, 25 bp, Homo sapien
aggcggccaccacctcggcattgta

SEQ ID NO: 177757 - DNA, 25 bp, Homo sapien
catgtactgataggcgttgtcggag

SEQ ID NO: 177758 - DNA, 25 bp, Homo sapien
tgtacaccggcagccacttgtaggg

SEQ ID NO: 177759 - DNA, 25 bp, Homo sapien
ctgggcatgaggttggtggggagag

SEQ ID NO: 177760 - DNA, 25 bp, Homo sapien
tgggcatgaggttggtggggagagc

SEQ ID NO: 177761 - DNA, 25 bp, Homo sapien
ctggcttatttaggcctccacgcag

SEQ ID NO: 177762 - DNA, 25 bp, Homo sapien
taggcctccacgcagcacaggaagc

SEQ ID NO: 177763 - DNA, 25 bp, Homo sapien
gcttatttaggcctccacgcagcac

SEQ ID NO: 177764 - DNA, 25 bp, Homo sapien
cttgggagagcccccctggcttatt

SEQ ID NO: 177765 - DNA, 25 bp, Homo sapien
gaggttgaaaagcaccgcgggctcg

SEQ ID NO: 177766 - DNA, 25 bp, Homo sapien
cgctccttgaggttgaaaagcaccg

SEQ ID NO: 177767 - DNA, 25 bp, Homo sapien
gccgcgtagcgctccttgaggttga

SEQ ID NO: 177768 - DNA, 25 bp, Homo sapien
tagcgctccttgaggttgaaaagca

SEQ ID NO: 177769 - DNA, 25 bp, Homo sapien
tcagtgcgaatgtcaaagggccggg

SEQ ID NO: 177770 - DNA, 25 bp, Homo sapien
tctcggtttcagcaatgaccttgcc

SEQ ID NO: 177771 - DNA, 25 bp, Homo sapien
tcttccttgtcatcgggcacgaagc

SEQ ID NO: 177772 - DNA, 25 bp, Homo sapien
tgacttgcggaggtactgggccgct

SEQ ID NO: 177773 - DNA, 25 bp, Homo sapien
tcctgaagaatctggaccgtgggtg

SEQ ID NO: 177774 - DNA, 25 bp, Homo sapien
aacaacagaggtagagccgggcaga

SEQ ID NO: 177775 - DNA, 25 bp, Homo sapien
accgtgggtggagcaaggaacaaca

SEQ ID NO: 177776 - DNA, 25 bp, Homo sapien
ctggttatcccttcacggagaatcc

SEQ ID NO: 177777 - DNA, 25 bp, Homo sapien
ggctcctcctcctttgatcctttgg

SEQ ID NO: 177778 - DNA, 25 bp, Homo sapien
ctcctcctcctttgatcctttggct

SEQ ID NO: 177779 - DNA, 25 bp, Homo sapien
tggctcctcctcctttgatcctttg

SEQ ID NO: 177780 - DNA, 25 bp, Homo sapien
cctggctcctcctcctttgatcctt

SEQ ID NO: 177781 - DNA, 25 bp, Homo sapien
gcacacatttgcacatccgcatttg

SEQ ID NO: 177782 - DNA, 25 bp, Homo sapien
acacataggcttttgccctcccctg

SEQ ID NO: 177783 - DNA, 25 bp, Homo sapien
tcttttgtgtacatggatgcacaca

SEQ ID NO: 177784 - DNA, 25 bp, Homo sapien
cactcaagcttgcagatttcttttc

SEQ ID NO: 177785 - DNA, 25 bp, Homo sapien
cagaagaagatggtgctaatcctag

SEQ ID NO: 177786 - DNA, 25 bp, Homo sapien
aagaagatggtgctaatcctagggc

SEQ ID NO: 177787 - DNA, 25 bp, Homo sapien
ggcagaagaagatggtgctaatcct

SEQ ID NO: 177788 - DNA, 25 bp, Homo sapien
gaagaagatggtgctaatcctaggg

SEQ ID NO: 177789 - DNA, 25 bp, Homo sapien
tggcagggcagcggggagtggaggt

SEQ ID NO: 177790 - DNA, 25 bp, Homo sapien
ttggtataggtggtggtggcagggc

SEQ ID NO: 177791 - DNA, 25 bp, Homo sapien
cagggcagcggggagtggaggtggt

SEQ ID NO: 177792 - DNA, 25 bp, Homo sapien
gtggcagggcagcggggagtggagg

SEQ ID NO: 177793 - DNA, 25 bp, Homo sapien
ttgtcctgtggttgctcaatctctt

SEQ ID NO: 177794 - DNA, 25 bp, Homo sapien
ccttgtcctgtggttgctcaatctc

SEQ ID NO: 177795 - DNA, 25 bp, Homo sapien
taccttgtcctgtggttgctcaatc

SEQ ID NO: 177796 - DNA, 25 bp, Homo sapien
cttgtcctgtggttgctcaatctct

SEQ ID NO: 177797 - DNA, 25 bp, Homo sapien
cttctccggcttagggcccttggct

SEQ ID NO: 177798 - DNA, 25 bp, Homo sapien
gctctggctgccgcagtcctcagag

SEQ ID NO: 177799 - DNA, 25 bp, Homo sapien
gctattgtccagtactggtttctcc

SEQ ID NO: 177800 - DNA, 25 bp, Homo sapien
gcagtcctcagagctccgagctcag

SEQ ID NO: 177801 - DNA, 25 bp, Homo sapien
gggggtatgctggcttctggcggtg

SEQ ID NO: 177802 - DNA, 25 bp, Homo sapien
ggggtatgctggcttctggcggtgg

SEQ ID NO: 177803 - DNA, 25 bp, Homo sapien
ctgagcagatcaagatgtggcaaag

SEQ ID NO: 177804 - DNA, 25 bp, Homo sapien
ggctgagcagatcaagatgtggcaa

SEQ ID NO: 177805 - DNA, 25 bp, Homo sapien
gctgagcagatcaagatgtggcaaa

SEQ ID NO: 177806 - DNA, 25 bp, Homo sapien
ctcccaaggagctgttacacaggct

SEQ ID NO: 177807 - DNA, 25 bp, Homo sapien
tgctctgtctgggtatgcctgctgt

SEQ ID NO: 177808 - DNA, 25 bp, Homo sapien
cacagagaactgcattaccttggcc

SEQ ID NO: 177809 - DNA, 25 bp, Homo sapien
tgtgggggtgactagcaaagcccaa

SEQ ID NO: 177810 - DNA, 25 bp, Homo sapien
cagagaactgcattaccttggcctc

SEQ ID NO: 177811 - DNA, 25 bp, Homo sapien
tgctgcaccttgcggaacttggaca

SEQ ID NO: 177812 - DNA, 25 bp, Homo sapien
ctgcaccttgcggaacttggacagg

SEQ ID NO: 177813 - DNA, 25 bp, Homo sapien
tgcaccttgcggaacttggacaggt

SEQ ID NO: 177814 - DNA, 25 bp, Homo sapien
gcaccttgcggaacttggacaggtt

SEQ ID NO: 177815 - DNA, 25 bp, Homo sapien
tcctcggcctggcgcttgtaggcct

SEQ ID NO: 177816 - DNA, 25 bp, Homo sapien
cggcctggcgcttgtaggccttgac

SEQ ID NO: 177817 - DNA, 25 bp, Homo sapien
ctcggcctggcgcttgtaggccttg

SEQ ID NO: 177818 - DNA, 25 bp, Homo sapien
gcctcctcggcctggcgcttgtagg

SEQ ID NO: 177819 - DNA, 25 bp, Homo sapien
tgcagccgcagcaggtttttcctgt

SEQ ID NO: 177820 - DNA, 25 bp, Homo sapien
agccgcagcaggtttttcctgtcct

SEQ ID NO: 177821 - DNA, 25 bp, Homo sapien
ctttagctgcagcttgtctaccagg

SEQ ID NO: 177822 - DNA, 25 bp, Homo sapien
tttagctgcagcttgtctaccaggt

SEQ ID NO: 177823 - DNA, 25 bp, Homo sapien
tgagctccttgatgcgccgctcgct

SEQ ID NO: 177824 - DNA, 25 bp, Homo sapien
cgactctgcgttgcgcttctgctcg

SEQ ID NO: 177825 - DNA, 25 bp, Homo sapien
gtaggtgagctccttgatgcgccgc

SEQ ID NO: 177826 - DNA, 25 bp, Homo sapien
tcatgcccttcaccgactctgcgtt

SEQ ID NO: 177827 - DNA, 25 bp, Homo sapien
agggcgatctgctcggcttcgtcca

SEQ ID NO: 177828 - DNA, 25 bp, Homo sapien
gtgctgcaggtccttaatggtctgt

SEQ ID NO: 177829 - DNA, 25 bp, Homo sapien
cccttgagggcgatctgctcggctt

SEQ ID NO: 177830 - DNA, 25 bp, Homo sapien
gcaggtccttaatggtctgttccat

SEQ ID NO: 177831 - DNA, 25 bp, Homo sapien
tcctccacttcagtctggagctggg

SEQ ID NO: 177832 - DNA, 25 bp, Homo sapien
tcttctggttgatgaggctggtgtt

SEQ ID NO: 177833 - DNA, 25 bp, Homo sapien
gctgggacaggtcagcatccatctt

SEQ ID NO: 177834 - DNA, 25 bp, Homo sapien
ggccttctcctcagcattcctgcac

SEQ ID NO: 177835 - DNA, 25 bp, Homo sapien
tcgtcgttggcacggactgcatcgt

SEQ ID NO: 177836 - DNA, 25 bp, Homo sapien
cttcaggtcgtcgttggcacggact

SEQ ID NO: 177837 - DNA, 25 bp, Homo sapien
tcaggtcgtcgttggcacggactgc

SEQ ID NO: 177838 - DNA, 25 bp, Homo sapien
gctccaccacggcacgcaactcctc

SEQ ID NO: 177839 - DNA, 25 bp, Homo sapien
cccttcactaaaggcacctgtcaga

SEQ ID NO: 177840 - DNA, 25 bp, Homo sapien
aggccagtcccctctgggtgagtac

SEQ ID NO: 177841 - DNA, 25 bp, Homo sapien
gtggaggccagtcccctctgggtga

SEQ ID NO: 177842 - DNA, 25 bp, Homo sapien
tggaggccagtcccctctgggtgag

SEQ ID NO: 177843 - DNA, 25 bp, Homo sapien
gaggccagtcccctctgggtgagta

SEQ ID NO: 177844 - DNA, 25 bp, Homo sapien
ctcgttgcggctgcgtgtctctgcg

SEQ ID NO: 177845 - DNA, 25 bp, Homo sapien
cgttgcggctgcgtgtctctgcgtc

SEQ ID NO: 177846 - DNA, 25 bp, Homo sapien
gttgcggctgcgtgtctctgcgtcc

SEQ ID NO: 177847 - DNA, 25 bp, Homo sapien
tcgttgcggctgcgtgtctctgcgt

SEQ ID NO: 177848 - DNA, 25 bp, Homo sapien
tgctcagtcaagtcggagatctcct

SEQ ID NO: 177849 - DNA, 25 bp, Homo sapien
catggatagtctttccgctggaacc

SEQ ID NO: 177850 - DNA, 25 bp, Homo sapien
tttccgctggaacccaactgctcag

SEQ ID NO: 177851 - DNA, 25 bp, Homo sapien
aacccaactgctcagtcaagtcgga

SEQ ID NO: 177852 - DNA, 25 bp, Homo sapien
tctccagatgttccagggactcctc

SEQ ID NO: 177853 - DNA, 25 bp, Homo sapien
ttgttctcccgcttgaaggtctcca

SEQ ID NO: 177854 - DNA, 25 bp, Homo sapien
cagggactcctcataggcgttcttg

SEQ ID NO: 177855 - DNA, 25 bp, Homo sapien
gagcgagcctccttctgcgaggact

SEQ ID NO: 177856 - DNA, 25 bp, Homo sapien
agcagcagcattggagcgctctacg

SEQ ID NO: 177857 - DNA, 25 bp, Homo sapien
gagcgctctacgtccaccatcaagt

SEQ ID NO: 177858 - DNA, 25 bp, Homo sapien
atctcattctgtagccggtgcttgg

SEQ ID NO: 177859 - DNA, 25 bp, Homo sapien
ctgtagccggtgcttggtcttctcc

SEQ ID NO: 177860 - DNA, 25 bp, Homo sapien
gcagtcatgccgggccgactgcagt

SEQ ID NO: 177861 - DNA, 25 bp, Homo sapien
tcgagctcctcagtccgctgaatgg

SEQ ID NO: 177862 - DNA, 25 bp, Homo sapien
tgggccacctccgagttggccttgg

SEQ ID NO: 177863 - DNA, 25 bp, Homo sapien
ccactgggccacctccgagttggcc

SEQ ID NO: 177864 - DNA, 25 bp, Homo sapien
ttctcatccagctgccgggacagct

SEQ ID NO: 177865 - DNA, 25 bp, Homo sapien
ttgcctcgggtcagctgggagatca

SEQ ID NO: 177866 - DNA, 25 bp, Homo sapien
ggagatcagtgcctccttctcatcc

SEQ ID NO: 177867 - DNA, 25 bp, Homo sapien
gctgctgggtgtaggtgagcttgcc

SEQ ID NO: 177868 - DNA, 25 bp, Homo sapien
ctggtgaggtcgttgacagaacgct

SEQ ID NO: 177869 - DNA, 25 bp, Homo sapien
tcatctggtcttccaaggtccggca

SEQ ID NO: 177870 - DNA, 25 bp, Homo sapien
ggtttgcaacttggcccgctggctg

SEQ ID NO: 177871 - DNA, 25 bp, Homo sapien
gccttgctccggtgctcattcatct

SEQ ID NO: 177872 - DNA, 25 bp, Homo sapien
cttggccttgatgatctgctccatg

SEQ ID NO: 177873 - DNA, 25 bp, Homo sapien
tgatgatctgctccatgttggaggt

SEQ ID NO: 177874 - DNA, 25 bp, Homo sapien
gccttgatgatctgctccatgttgg

SEQ ID NO: 177875 - DNA, 25 bp, Homo sapien
atgatctgctccatgttggaggtga

SEQ ID NO: 177876 - DNA, 25 bp, Homo sapien
tccagctccagcttgaactcgctct

SEQ ID NO: 177877 - DNA, 25 bp, Homo sapien
cagctccagcttgaactcgctcttc

SEQ ID NO: 177878 - DNA, 25 bp, Homo sapien
agctccagcttgaactcgctcttct

SEQ ID NO: 177879 - DNA, 25 bp, Homo sapien
catccagctccagcttgaactcgct

SEQ ID NO: 177880 - DNA, 25 bp, Homo sapien
acgctgtcggcgtgcttcttgcgca

SEQ ID NO: 177881 - DNA, 25 bp, Homo sapien
tcccgccgcatcttctggaactcgg

SEQ ID NO: 177882 - DNA, 25 bp, Homo sapien
tcatctcgatctgcacggacgtggc

SEQ ID NO: 177883 - DNA, 25 bp, Homo sapien
tgcaggttgtcgatctgctcgccca

SEQ ID NO: 177884 - DNA, 25 bp, Homo sapien
cctcctccagctcctcgatgcgtgc

SEQ ID NO: 177885 - DNA, 25 bp, Homo sapien
tcctcctccagctcctcgatgcgtg

SEQ ID NO: 177886 - DNA, 25 bp, Homo sapien
gttcctgtaatgctgtgaacaggac

SEQ ID NO: 177887 - DNA, 25 bp, Homo sapien
actgtgatagctgcgtgcctgcctc

SEQ ID NO: 177888 - DNA, 25 bp, Homo sapien
cctgtaatgctgtgaacaggacacc

SEQ ID NO: 177889 - DNA, 25 bp, Homo sapien
gggcacactgtgatagctgcgtgcc

SEQ ID NO: 177890 - DNA, 25 bp, Homo sapien
caatccttgcgttgagagcattcag

SEQ ID NO: 177891 - DNA, 25 bp, Homo sapien
gagagcattcagctcaaagtctttt

SEQ ID NO: 177892 - DNA, 25 bp, Homo sapien
ttcatcctcaatccttgcgttgaga

SEQ ID NO: 177893 - DNA, 25 bp, Homo sapien
gctgccgagggcctgttcatcctca

SEQ ID NO: 177894 - DNA, 25 bp, Homo sapien
gcttcgctcgctccaggtccatgcg

SEQ ID NO: 177895 - DNA, 25 bp, Homo sapien
tttttcagccgctcatccagctgct

SEQ ID NO: 177896 - DNA, 25 bp, Homo sapien
cagctgctgcttgtcattctccagg

SEQ ID NO: 177897 - DNA, 25 bp, Homo sapien
ggtccatgcgcaccttcttctcttg

SEQ ID NO: 177898 - DNA, 25 bp, Homo sapien
ttggccttagtcagggtgttgacct

SEQ ID NO: 177899 - DNA, 25 bp, Homo sapien
tcagcttggcaatgatctcatccag

SEQ ID NO: 177900 - DNA, 25 bp, Homo sapien
ccttggtcagcttggcaatgatctc

SEQ ID NO: 177901 - DNA, 25 bp, Homo sapien
tgttggtgggcctcttgcagagctt

SEQ ID NO: 177902 - DNA, 25 bp, Homo sapien
ccatctcctttagggtcaaaggtca

SEQ ID NO: 177903 - DNA, 25 bp, Homo sapien
gaccaagaatcccatctcctttagg

SEQ ID NO: 177904 - DNA, 25 bp, Homo sapien
gggagctccatgtcaaggtccatgc

SEQ ID NO: 177905 - DNA, 25 bp, Homo sapien
gctccatgtcaaggtccatgctgct

SEQ ID NO: 177906 - DNA, 25 bp, Homo sapien
tcgatgtcccttttgagctctgagc

SEQ ID NO: 177907 - DNA, 25 bp, Homo sapien
tcagctccagatcatcgatgtccct

SEQ ID NO: 177908 - DNA, 25 bp, Homo sapien
tccagatcatcgatgtcccttttga

SEQ ID NO: 177909 - DNA, 25 bp, Homo sapien
gatcatcgatgtcccttttgagctc

SEQ ID NO: 177910 - DNA, 25 bp, Homo sapien
ctgaaggtgaggaacagaggggagg

SEQ ID NO: 177911 - DNA, 25 bp, Homo sapien
cggacttctctagcgcctctttgag

SEQ ID NO: 177912 - DNA, 25 bp, Homo sapien
gcgtgtgaactcctccttcatggag

SEQ ID NO: 177913 - DNA, 25 bp, Homo sapien
cctctttgaggcgtgtgaactcctc

SEQ ID NO: 177914 - DNA, 25 bp, Homo sapien
cttgcggcgagcctcggacttctct

SEQ ID NO: 177915 - DNA, 25 bp, Homo sapien
ccattgaaaggagtgctgagcctcc

SEQ ID NO: 177916 - DNA, 25 bp, Homo sapien
gggcccattgaaaggagtgctgagc

SEQ ID NO: 177917 - DNA, 25 bp, Homo sapien
ctgcaggggcccattgaaaggagtg

SEQ ID NO: 177918 - DNA, 25 bp, Homo sapien
gcccattgaaaggagtgctgagcct

SEQ ID NO: 177919 - DNA, 25 bp, Homo sapien
actgggcctggatacgcgtgatgat

SEQ ID NO: 177920 - DNA, 25 bp, Homo sapien
tgtactccattctggcgagcacacc

SEQ ID NO: 177921 - DNA, 25 bp, Homo sapien
tccattctggcgagcacacctcggg

SEQ ID NO: 177922 - DNA, 25 bp, Homo sapien
tgatgatgcggctcagcctctcgtc

SEQ ID NO: 177923 - DNA, 25 bp, Homo sapien
tgtcttcctttaattaattagtctc

SEQ ID NO: 177924 - DNA, 25 bp, Homo sapien
gttccactgggaggggtagcataca

SEQ ID NO: 177925 - DNA, 25 bp, Homo sapien
gcatcagaggagtcaatggaaaaga

SEQ ID NO: 177926 - DNA, 25 bp, Homo sapien
tagcatacaggtaagagattttgct

SEQ ID NO: 177927 - DNA, 25 bp, Homo sapien
ccccttcctgctatcaatgaactgt

SEQ ID NO: 177928 - DNA, 25 bp, Homo sapien
cccttcctgctatcaatgaactgtc

SEQ ID NO: 177929 - DNA, 25 bp, Homo sapien
tgcagtgatctgctctgcccataga

SEQ ID NO: 177930 - DNA, 25 bp, Homo sapien
gcccatagaattccagggtcacctg

SEQ ID NO: 177931 - DNA, 25 bp, Homo sapien
aggagggaagtgtccagagtcaccc

SEQ ID NO: 177932 - DNA, 25 bp, Homo sapien
ccctgttctatgagctctggtgcac

SEQ ID NO: 177933 - DNA, 25 bp, Homo sapien
gcatgaccagggggttgtccatcac

SEQ ID NO: 177934 - DNA, 25 bp, Homo sapien
aagtccccgtagaggatgcggttgg

SEQ ID NO: 177935 - DNA, 25 bp, Homo sapien
tggtgcatgaccagggggttgtcca

SEQ ID NO: 177936 - DNA, 25 bp, Homo sapien
ctctgccggaagtccccgtagagga

SEQ ID NO: 177937 - DNA, 25 bp, Homo sapien
gtggcaagaaggaagtaggaggagt

SEQ ID NO: 177938 - DNA, 25 bp, Homo sapien
tgtggcaagaaggaagtaggaggag

SEQ ID NO: 177939 - DNA, 25 bp, Homo sapien
ctgtggcaagaaggaagtaggagga

SEQ ID NO: 177940 - DNA, 25 bp, Homo sapien
aagtggggatgggtggagcgcaagt

SEQ ID NO: 177941 - DNA, 25 bp, Homo sapien
ttagggatgatacaacgtacaaagt

SEQ ID NO: 177942 - DNA, 25 bp, Homo sapien
gggatgggtggagcgcaagttggtc

SEQ ID NO: 177943 - DNA, 25 bp, Homo sapien
cattagggatgatacaacgtacaaa

SEQ ID NO: 177944 - DNA, 25 bp, Homo sapien
gagctgacacagtctgaaaggacga

SEQ ID NO: 177945 - DNA, 25 bp, Homo sapien
tgcagagctgacacagtctgaaagg

SEQ ID NO: 177946 - DNA, 25 bp, Homo sapien
gacacagtctgaaaggacgagcctt

SEQ ID NO: 177947 - DNA, 25 bp, Homo sapien
ctgaaaggacgagcctttcttggcc

SEQ ID NO: 177948 - DNA, 25 bp, Homo sapien
ctgcaggaaggagagtcaacaaaag

SEQ ID NO: 177949 - DNA, 25 bp, Homo sapien
acttctgatacaagcccacgacagt

SEQ ID NO: 177950 - DNA, 25 bp, Homo sapien
cattgagaggatccttgttcttctg

SEQ ID NO: 177951 - DNA, 25 bp, Homo sapien
gaagttggcggatttgcccaggtgg

SEQ ID NO: 177952 - DNA, 25 bp, Homo sapien
tagttggcaaacagggtgctgagca

SEQ ID NO: 177953 - DNA, 25 bp, Homo sapien
gggctgctattttgtctatggtgtt

SEQ ID NO: 177954 - DNA, 25 bp, Homo sapien
ttcaggtggtaaggccaaagaggca

SEQ ID NO: 177955 - DNA, 25 bp, Homo sapien
tgttcttgttgggtgtgcagggaga

SEQ ID NO: 177956 - DNA, 25 bp, Homo sapien
tcaggtggtaaggccaaagaggcac

SEQ ID NO: 177957 - DNA, 25 bp, Homo sapien
gccaaagtcaatgaatgtccactcg

SEQ ID NO: 177958 - DNA, 25 bp, Homo sapien
tctcgatgaggtcaatgcaggcctg

SEQ ID NO: 177959 - DNA, 25 bp, Homo sapien
tcaatgaatgtccactcgatgccct

SEQ ID NO: 177960 - DNA, 25 bp, Homo sapien
aagtcaatgaatgtccactcgatgc

SEQ ID NO: 177961 - DNA, 25 bp, Homo sapien
ggggctgtgcccgtccactgtgcct

SEQ ID NO: 177962 - DNA, 25 bp, Homo sapien
ccattggggctgtgcccgtccactg

SEQ ID NO: 177963 - DNA, 25 bp, Homo sapien
cattggggctgtgcccgtccactgt

SEQ ID NO: 177964 - DNA, 25 bp, Homo sapien
gctgtgcccgtccactgtgcctgag

SEQ ID NO: 177965 - DNA, 25 bp, Homo sapien
cgcgtcaccatccagttgaacatcc

SEQ ID NO: 177966 - DNA, 25 bp, Homo sapien
ccagtgccccagtggcatatatcac

SEQ ID NO: 177967 - DNA, 25 bp, Homo sapien
ggccagtgccccagtggcatatatc

SEQ ID NO: 177968 - DNA, 25 bp, Homo sapien
gccagtgccccagtggcatatatca

SEQ ID NO: 177969 - DNA, 25 bp, Homo sapien
ttctgccccttggtgacgtactcat

SEQ ID NO: 177970 - DNA, 25 bp, Homo sapien
attctgccccttggtgacgtactca

SEQ ID NO: 177971 - DNA, 25 bp, Homo sapien
cattctgccccttggtgacgtactc

SEQ ID NO: 177972 - DNA, 25 bp, Homo sapien
tgaagcccagcacatcaaaagcgtt

SEQ ID NO: 177973 - DNA, 25 bp, Homo sapien
agtgaagcccagcacatcaaaagcg

SEQ ID NO: 177974 - DNA, 25 bp, Homo sapien
aaagtgcatgatggcgcctgtcagc

SEQ ID NO: 177975 - DNA, 25 bp, Homo sapien
tcagcttatacatggagtttttctc

SEQ ID NO: 177976 - DNA, 25 bp, Homo sapien
aggccacggtggtctctccttggga

SEQ ID NO: 177977 - DNA, 25 bp, Homo sapien
gggagatgaatgcataatcgtaggg

SEQ ID NO: 177978 - DNA, 25 bp, Homo sapien
aatgcataatcgtaggggttgttgg

SEQ ID NO: 177979 - DNA, 25 bp, Homo sapien
cggtggtctctccttgggagatgaa

SEQ ID NO: 177980 - DNA, 25 bp, Homo sapien
tttggtagaaaatgtgataatctct

SEQ ID NO: 177981 - DNA, 25 bp, Homo sapien
tgctttcagctggaaaataactctg

SEQ ID NO: 177982 - DNA, 25 bp, Homo sapien
agaaaatgtgataatctctctctgc

SEQ ID NO: 177983 - DNA, 25 bp, Homo sapien
ctctgctttcagctggaaaataact

SEQ ID NO: 177984 - DNA, 25 bp, Homo sapien
gtctgcagatgccaactttcctgtt

SEQ ID NO: 177985 - DNA, 25 bp, Homo sapien
cccaaaatgaattcgaatgaatttc

SEQ ID NO: 177986 - DNA, 25 bp, Homo sapien
gccccaaaatgaattcgaatgaatt

SEQ ID NO: 177987 - DNA, 25 bp, Homo sapien
ttgccccaaaatgaattcgaatgaa

SEQ ID NO: 177988 - DNA, 25 bp, Homo sapien
gttgtcgttccggacggtcttggca

SEQ ID NO: 177989 - DNA, 25 bp, Homo sapien
aaggcctccagagcagggttggcct

SEQ ID NO: 177990 - DNA, 25 bp, Homo sapien
gtcgttccggacggtcttggcattg

SEQ ID NO: 177991 - DNA, 25 bp, Homo sapien
cctccagagcagggttggcctggat

SEQ ID NO: 177992 - DNA, 25 bp, Homo sapien
aggtgagagctcttctccctccctt

SEQ ID NO: 177993 - DNA, 25 bp, Homo sapien
tgcagaggccaagaaggaggcaggt

SEQ ID NO: 177994 - DNA, 25 bp, Homo sapien
aggcaggtgagagctcttctccctc

SEQ ID NO: 177995 - DNA, 25 bp, Homo sapien
ggcaggtgagagctcttctccctcc

SEQ ID NO: 177996 - DNA, 25 bp, Homo sapien
tgcaataacagcaaagtactggatg

SEQ ID NO: 177997 - DNA, 25 bp, Homo sapien
cttggtgttgactgtcttccctgct

SEQ ID NO: 177998 - DNA, 25 bp, Homo sapien
gctgcggtccccaatggctgcaata

SEQ ID NO: 177999 - DNA, 25 bp, Homo sapien
ctcttggtgttgactgtcttccctg

SEQ ID NO: 178000 - DNA, 25 bp, Homo sapien
gcttattgggcagtgaacaatacta

SEQ ID NO: 178001 - DNA, 25 bp, Homo sapien
caggggcttattgggcagtgaacaa

SEQ ID NO: 178002 - DNA, 25 bp, Homo sapien
gggcttattgggcagtgaacaatac

SEQ ID NO: 178003 - DNA, 25 bp, Homo sapien
aagacaggggcttattgggcagtga

SEQ ID NO: 178004 - DNA, 25 bp, Homo sapien
gatcaggatggactggttttctctg

SEQ ID NO: 178005 - DNA, 25 bp, Homo sapien
tgatcaggatggactggttttctct

SEQ ID NO: 178006 - DNA, 25 bp, Homo sapien
atcaggatggactggttttctctgt

SEQ ID NO: 178007 - DNA, 25 bp, Homo sapien
gtgatcaggatggactggttttctc

SEQ ID NO: 178008 - DNA, 25 bp, Homo sapien
tgtacaccggcagccacttgtaagg

SEQ ID NO: 178009 - DNA, 25 bp, Homo sapien
catgtactgataggcgttgtcggag

SEQ ID NO: 178010 - DNA, 25 bp, Homo sapien
acttgtaagggttgacggtgacaca

SEQ ID NO: 178011 - DNA, 25 bp, Homo sapien
ctcttcttgccccggtaggcagcca

SEQ ID NO: 178012 - DNA, 25 bp, Homo sapien
aggagcagtgacttgccagttgcga

SEQ ID NO: 178013 - DNA, 25 bp, Homo sapien
aaaggagcagtgacttgccagttgc

SEQ ID NO: 178014 - DNA, 25 bp, Homo sapien
aaggagcagtgacttgccagttgcg

SEQ ID NO: 178015 - DNA, 25 bp, Homo sapien
gaaaaggagcagtgacttgccagtt

SEQ ID NO: 178016 - DNA, 25 bp, Homo sapien
gagccgtagcgatccttgaggttgt

SEQ ID NO: 178017 - DNA, 25 bp, Homo sapien
tagatcatccaggagccgtagcgat

SEQ ID NO: 178018 - DNA, 25 bp, Homo sapien
cgatccttgaggttgtagagcaccg

SEQ ID NO: 178019 - DNA, 25 bp, Homo sapien
tagagcaccgcgggctcatgcagga

SEQ ID NO: 178020 - DNA, 25 bp, Homo sapien
ccttctctgacttgcgcaggtaggg

SEQ ID NO: 178021 - DNA, 25 bp, Homo sapien
ttcttgaggtcaaaaggcctggtct

SEQ ID NO: 178022 - DNA, 25 bp, Homo sapien
ttgccatactcggtctcggcagtga

SEQ ID NO: 178023 - DNA, 25 bp, Homo sapien
tttgtcatcaggcacgaagacatcc

SEQ ID NO: 178024 - DNA, 25 bp, Homo sapien
ctgggctactcaagtgtgtctacag

SEQ ID NO: 178025 - DNA, 25 bp, Homo sapien
tgggctactcaagtgtgtctacaga

SEQ ID NO: 178026 - DNA, 25 bp, Homo sapien
gctactcaagtgtgtctacagatga

SEQ ID NO: 178027 - DNA, 25 bp, Homo sapien
gggctactcaagtgtgtctacagat

SEQ ID NO: 178028 - DNA, 25 bp, Homo sapien
ctagtggtacctttctttgagccat

SEQ ID NO: 178029 - DNA, 25 bp, Homo sapien
catctagtggtacctttctttgagc

SEQ ID NO: 178030 - DNA, 25 bp, Homo sapien
ctgtacccatctagtggtacctttc

SEQ ID NO: 178031 - DNA, 25 bp, Homo sapien
tgtacccatctagtggtacctttct

SEQ ID NO: 178032 - DNA, 25 bp, Homo sapien
caaccccagggtgccatatatgcct

SEQ ID NO: 178033 - DNA, 25 bp, Homo sapien
ttgggcatgcctctcacatgaagac

SEQ ID NO: 178034 - DNA, 25 bp, Homo sapien
ccacaagccctctgatgaacactca

SEQ ID NO: 178035 - DNA, 25 bp, Homo sapien
gatgaacactcatgcctgctgcttg

SEQ ID NO: 178036 - DNA, 25 bp, Homo sapien
gccagacctggtctcaggggctgta

SEQ ID NO: 178037 - DNA, 25 bp, Homo sapien
gacctggtctcaggggctgtatata

SEQ ID NO: 178038 - DNA, 25 bp, Homo sapien
cagacctggtctcaggggctgtata

SEQ ID NO: 178039 - DNA, 25 bp, Homo sapien
gtctcaggggctgtatatatggggc

SEQ ID NO: 178040 - DNA, 25 bp, Homo sapien
ctgcccctgtccctggatgcatgtg

SEQ ID NO: 178041 - DNA, 25 bp, Homo sapien
tgcccctgtccctggatgcatgtga

SEQ ID NO: 178042 - DNA, 25 bp, Homo sapien
ctaaaccatagagctgcgtggtgta

SEQ ID NO: 178043 - DNA, 25 bp, Homo sapien
aaacgctcctcattccttggtttgg

SEQ ID NO: 178044 - DNA, 25 bp, Homo sapien
tccttggtttggtgaatgggacaca

SEQ ID NO: 178045 - DNA, 25 bp, Homo sapien
tgcgtggtgtagacctgcccttttt

SEQ ID NO: 178046 - DNA, 25 bp, Homo sapien
gttttgtgtcaaaagctggccttgg

SEQ ID NO: 178047 - DNA, 25 bp, Homo sapien
cttgaaggcagcaacgtggccaggt

SEQ ID NO: 178048 - DNA, 25 bp, Homo sapien
caacgtggccaggttttgtgtcaaa

SEQ ID NO: 178049 - DNA, 25 bp, Homo sapien
caaaagctggccttggttggcctga

SEQ ID NO: 178050 - DNA, 25 bp, Homo sapien
ggagctggatggcacttggtggtgg

SEQ ID NO: 178051 - DNA, 25 bp, Homo sapien
cacttggtggtggatgctggaactc

SEQ ID NO: 178052 - DNA, 25 bp, Homo sapien
gtggatgctggaactctggacgctc

SEQ ID NO: 178053 - DNA, 25 bp, Homo sapien
gatgctggaactctggacgctccat

SEQ ID NO: 178054 - DNA, 25 bp, Homo sapien
tggaaagaacaatctaagggtggaa

SEQ ID NO: 178055 - DNA, 25 bp, Homo sapien
ttaggaagtagagccgtgagtctca

SEQ ID NO: 178056 - DNA, 25 bp, Homo sapien
cattagtgtgcatgaataacctgag

SEQ ID NO: 178057 - DNA, 25 bp, Homo sapien
gatggagaagggaaatcatggaacc

SEQ ID NO: 178058 - DNA, 25 bp, Homo sapien
acccaacctttttcagtctgaaatg

SEQ ID NO: 178059 - DNA, 25 bp, Homo sapien
cccaacctttttcagtctgaaatgc

SEQ ID NO: 178060 - DNA, 25 bp, Homo sapien
taaacacctactatctctgtcagac

SEQ ID NO: 178061 - DNA, 25 bp, Homo sapien
cacattaagcattagggttagatac

SEQ ID NO: 178062 - DNA, 25 bp, Homo sapien
gaggtagaactgctatatctgaggg

SEQ ID NO: 178063 - DNA, 25 bp, Homo sapien
cacagtgaagtgtggtaacttggcc

SEQ ID NO: 178064 - DNA, 25 bp, Homo sapien
cctggagctcctggcattaagtgat

SEQ ID NO: 178065 - DNA, 25 bp, Homo sapien
ttgtctgattgttctggctcacttt

SEQ ID NO: 178066 - DNA, 25 bp, Homo sapien
tgagcacgggatatgtttccacttg

SEQ ID NO: 178067 - DNA, 25 bp, Homo sapien
cactcttggtgtatagcagtactac

SEQ ID NO: 178068 - DNA, 25 bp, Homo sapien
ccatcggctgccaacctagggccat

SEQ ID NO: 178069 - DNA, 25 bp, Homo sapien
cccagcttggcactgatctcgggga

SEQ ID NO: 178070 - DNA, 25 bp, Homo sapien
cagcttggcactgatctcggggaga

SEQ ID NO: 178071 - DNA, 25 bp, Homo sapien
ccagcttggcactgatctcggggag

SEQ ID NO: 178072 - DNA, 25 bp, Homo sapien
cacgtttggcagtgctgcactggca

SEQ ID NO: 178073 - DNA, 25 bp, Homo sapien
tgcttggcacccaaccaactggatg

SEQ ID NO: 178074 - DNA, 25 bp, Homo sapien
caactggatgctgccacgtttggca

SEQ ID NO: 178075 - DNA, 25 bp, Homo sapien
gaacagtgtctcagatcctggcact

SEQ ID NO: 178076 - DNA, 25 bp, Homo sapien
acagcttggtatgggcccaatgccc

SEQ ID NO: 178077 - DNA, 25 bp, Homo sapien
tggacccctcaaccatgtgcgtgcc

SEQ ID NO: 178078 - DNA, 25 bp, Homo sapien
caacagcttggtatgggcccaatgc

SEQ ID NO: 178079 - DNA, 25 bp, Homo sapien
agcaacagcttggtatgggcccaat

SEQ ID NO: 178080 - DNA, 25 bp, Homo sapien
catgccagcctccagtttggttaga

SEQ ID NO: 178081 - DNA, 25 bp, Homo sapien
aagttactgcagttcccagggtgca

SEQ ID NO: 178082 - DNA, 25 bp, Homo sapien
gagggatttgagctcccaccgaaca

SEQ ID NO: 178083 - DNA, 25 bp, Homo sapien
tctcagtggaacatcatgggataac

SEQ ID NO: 178084 - DNA, 25 bp, Homo sapien
cacaggtagcgatgggttacatcca

SEQ ID NO: 178085 - DNA, 25 bp, Homo sapien
catagagctgttggaagtaggcccc

SEQ ID NO: 178086 - DNA, 25 bp, Homo sapien
cgcccaaagaagcagaaggatctct

SEQ ID NO: 178087 - DNA, 25 bp, Homo sapien
gcaactggctttcgctcactggaga

SEQ ID NO: 178088 - DNA, 25 bp, Homo sapien
tgtggaggtgttggtttggtcgggc

SEQ ID NO: 178089 - DNA, 25 bp, Homo sapien
tctctgaggtaaggggcggcctggg

SEQ ID NO: 178090 - DNA, 25 bp, Homo sapien
ggtcgggcatgggtctctgaggtaa

SEQ ID NO: 178091 - DNA, 25 bp, Homo sapien
tgttggtttggtcgggcatgggtct

SEQ ID NO: 178092 - DNA, 25 bp, Homo sapien
tggtaggcaggaccgaagtggcgag

SEQ ID NO: 178093 - DNA, 25 bp, Homo sapien
caggaccgaagtggcgaggccgagg

SEQ ID NO: 178094 - DNA, 25 bp, Homo sapien
accgaagtggcgaggccgaggaggc

SEQ ID NO: 178095 - DNA, 25 bp, Homo sapien
tgtggtggtaggcaggaccgaagtg

SEQ ID NO: 178096 - DNA, 25 bp, Homo sapien
tcactcttcagctgggctcgaaccg

SEQ ID NO: 178097 - DNA, 25 bp, Homo sapien
cagacctggatgactctcttgggca

SEQ ID NO: 178098 - DNA, 25 bp, Homo sapien
tgaaaggagctaagttgcccagcgg

SEQ ID NO: 178099 - DNA, 25 bp, Homo sapien
tgctgacgggaaaagagatggcctc

SEQ ID NO: 178100 - DNA, 25 bp, Homo sapien
agcagatgaatcactcagatctcct

SEQ ID NO: 178101 - DNA, 25 bp, Homo sapien
ggaggtaggagaggtagaggtggct

SEQ ID NO: 178102 - DNA, 25 bp, Homo sapien
gaagcagatgaatcactcagatctc

SEQ ID NO: 178103 - DNA, 25 bp, Homo sapien
gaagctttaggtggttcctctgggc

SEQ ID NO: 178104 - DNA, 25 bp, Homo sapien
ctttcccaggtggtaggaaaggctg

SEQ ID NO: 178105 - DNA, 25 bp, Homo sapien
ggcttccctcccagtgccatcatct

SEQ ID NO: 178106 - DNA, 25 bp, Homo sapien
tgttggggtggtggcctctttccca

SEQ ID NO: 178107 - DNA, 25 bp, Homo sapien
aaaagcaggtgcttccctctttggg

SEQ ID NO: 178108 - DNA, 25 bp, Homo sapien
gtggcaggcggtttcactgctggac

SEQ ID NO: 178109 - DNA, 25 bp, Homo sapien
ttgcctaataagaggttgaacttgg

SEQ ID NO: 178110 - DNA, 25 bp, Homo sapien
cttgcctaataagaggttgaacttg

SEQ ID NO: 178111 - DNA, 25 bp, Homo sapien
gtggctgtggcaggcggtttcactg

SEQ ID NO: 178112 - DNA, 25 bp, Homo sapien
cagacctgtaccactcgctttttga

SEQ ID NO: 178113 - DNA, 25 bp, Homo sapien
catcttgcgtgttgggttggaatcc

SEQ ID NO: 178114 - DNA, 25 bp, Homo sapien
taccaacggtacaggatctctagct

SEQ ID NO: 178115 - DNA, 25 bp, Homo sapien
catgcttccgtttgagaggtggacc

SEQ ID NO: 178116 - DNA, 25 bp, Homo sapien
tggcaggaaatgtagtcggcggtga

SEQ ID NO: 178117 - DNA, 25 bp, Homo sapien
aaatgtagtcggcggtgactggtca

SEQ ID NO: 178118 - DNA, 25 bp, Homo sapien
tagtcggcggtgactggtcaggagg

SEQ ID NO: 178119 - DNA, 25 bp, Homo sapien
caggaaatgtagtcggcggtgactg

SEQ ID NO: 178120 - DNA, 25 bp, Homo sapien
ggctctggtaatgggccctcaggcc

SEQ ID NO: 178121 - DNA, 25 bp, Homo sapien
atctggaggctctggtaatgggccc

SEQ ID NO: 178122 - DNA, 25 bp, Homo sapien
aaggtgatggagtagccttctcttc

SEQ ID NO: 178123 - DNA, 25 bp, Homo sapien
ggaaggtgatggagtagccttctct

SEQ ID NO: 178124 - DNA, 25 bp, Homo sapien
cctcctcttcaagggtctggtcatc

SEQ ID NO: 178125 - DNA, 25 bp, Homo sapien
ctggaggttcaaggccctgttcctc

SEQ ID NO: 178126 - DNA, 25 bp, Homo sapien
ctcttcaagggtctggtcatcatag

SEQ ID NO: 178127 - DNA, 25 bp, Homo sapien
ttcaagggtctggtcatcatagcac

SEQ ID NO: 178128 - DNA, 25 bp, Homo sapien
aaagtggcgtggcaacgcctgcagc

SEQ ID NO: 178129 - DNA, 25 bp, Homo sapien
gaggtggcgcaccaactcaaaaaca

SEQ ID NO: 178130 - DNA, 25 bp, Homo sapien
acaggagaaagtggcgtggcaacgc

SEQ ID NO: 178131 - DNA, 25 bp, Homo sapien
ccagtgcctcctccggttggcatgg

SEQ ID NO: 178132 - DNA, 25 bp, Homo sapien
cagcataacggctcagggcttcaaa

SEQ ID NO: 178133 - DNA, 25 bp, Homo sapien
gggtaggcgctagtctcaaagaaag

SEQ ID NO: 178134 - DNA, 25 bp, Homo sapien
tctgtgaacttggttctggagaacc

SEQ ID NO: 178135 - DNA, 25 bp, Homo sapien
tttgcgtgctttctggcgggcattc

SEQ ID NO: 178136 - DNA, 25 bp, Homo sapien
cccaccttgagatcgtggaggtaga

SEQ ID NO: 178137 - DNA, 25 bp, Homo sapien
ccagctagtgtcagcttgggcccca

SEQ ID NO: 178138 - DNA, 25 bp, Homo sapien
caggtgcaggcccagctagtgtcag

SEQ ID NO: 178139 - DNA, 25 bp, Homo sapien
taagcagtgattcgggcaccagagg

SEQ ID NO: 178140 - DNA, 25 bp, Homo sapien
aaggcaatccagatatgaagccact

SEQ ID NO: 178141 - DNA, 25 bp, Homo sapien
aaaggcaatccagatatgaagccac

SEQ ID NO: 178142 - DNA, 25 bp, Homo sapien
ggctcttcttggctgcgttctggcc

SEQ ID NO: 178143 - DNA, 25 bp, Homo sapien
cccgagagcgagtctgatgcagaac

SEQ ID NO: 178144 - DNA, 25 bp, Homo sapien
caatcttggaatcagtcttggttcc

SEQ ID NO: 178145 - DNA, 25 bp, Homo sapien
cagaactgaccgcatgtggatctcc

SEQ ID NO: 178146 - DNA, 25 bp, Homo sapien
agctctggttgtaggagactctgca

SEQ ID NO: 178147 - DNA, 25 bp, Homo sapien
gaattataatgaaccaacagaatat

SEQ ID NO: 178148 - DNA, 25 bp, Homo sapien
accaacagaatattcttctgggtga

SEQ ID NO: 178149 - DNA, 25 bp, Homo sapien
cagaattataatgaaccaacagaat

SEQ ID NO: 178150 - DNA, 25 bp, Homo sapien
gacagaattataatgaaccaacaga

SEQ ID NO: 178151 - DNA, 25 bp, Homo sapien
agttggtggttttccgataggtcag

SEQ ID NO: 178152 - DNA, 25 bp, Homo sapien
cgggcagggtcgagaaacttgtcca

SEQ ID NO: 178153 - DNA, 25 bp, Homo sapien
gcagagcggagctccccagtggtcc

SEQ ID NO: 178154 - DNA, 25 bp, Homo sapien
tgggcggaggagctacgtcttcagc

SEQ ID NO: 178155 - DNA, 25 bp, Homo sapien
ggtttgtctgggacctcaactgagg

SEQ ID NO: 178156 - DNA, 25 bp, Homo sapien
tttgtctgggacctcaactgaggcc

SEQ ID NO: 178157 - DNA, 25 bp, Homo sapien
gagggtttgtctgggacctcaactg

SEQ ID NO: 178158 - DNA, 25 bp, Homo sapien
tcctgagggtttgtctgggacctca

SEQ ID NO: 178159 - DNA, 25 bp, Homo sapien
ctgctcggtgtaggctctggcccat

SEQ ID NO: 178160 - DNA, 25 bp, Homo sapien
ggcttaatgtgggtgcagacagcac

SEQ ID NO: 178161 - DNA, 25 bp, Homo sapien
ttcttggccattgtccagagggctt

SEQ ID NO: 178162 - DNA, 25 bp, Homo sapien
tgcctggtctctgctcggtgtaggc

SEQ ID NO: 178163 - DNA, 25 bp, Homo sapien
caccacgttgtgaaggtggctaagg

SEQ ID NO: 178164 - DNA, 25 bp, Homo sapien
tgaaggtggctaaggtggaagtgca

SEQ ID NO: 178165 - DNA, 25 bp, Homo sapien
aacgcactcgggcaccacgttgtga

SEQ ID NO: 178166 - DNA, 25 bp, Homo sapien
catgctgggagagtgtatgagccct

SEQ ID NO: 178167 - DNA, 25 bp, Homo sapien
agctgcagtatggacagcagtatac

SEQ ID NO: 178168 - DNA, 25 bp, Homo sapien
aagctgcagtatggacagcagtata

SEQ ID NO: 178169 - DNA, 25 bp, Homo sapien
gaagctgcagtatggacagcagtat

SEQ ID NO: 178170 - DNA, 25 bp, Homo sapien
tgcctctgtgaaccatcacctggaa

SEQ ID NO: 178171 - DNA, 25 bp, Homo sapien
gataggaaggcattatagcagaccc

SEQ ID NO: 178172 - DNA, 25 bp, Homo sapien
ccttggattgggacaaaggcctagc

SEQ ID NO: 178173 - DNA, 25 bp, Homo sapien
cctaattgaagaggaactagccaga

SEQ ID NO: 178174 - DNA, 25 bp, Homo sapien
ctgcatccaggctggcaccagtggc

SEQ ID NO: 178175 - DNA, 25 bp, Homo sapien
cctgcatccaggctggcaccagtgg

SEQ ID NO: 178176 - DNA, 25 bp, Homo sapien
agcctgcatccaggctggcaccagt

SEQ ID NO: 178177 - DNA, 25 bp, Homo sapien
ccagcctgcatccaggctggcacca

SEQ ID NO: 178178 - DNA, 25 bp, Homo sapien
cctgggtgctgcctaggtctgagtc

SEQ ID NO: 178179 - DNA, 25 bp, Homo sapien
ctaactaagggataaagagctgggc

SEQ ID NO: 178180 - DNA, 25 bp, Homo sapien
tacccttagtaagaggatgccagga

SEQ ID NO: 178181 - DNA, 25 bp, Homo sapien
gagcagatctcagtaaagccaggcc

SEQ ID NO: 178182 - DNA, 25 bp, Homo sapien
cgtggtctggttggcactgtctctg

SEQ ID NO: 178183 - DNA, 25 bp, Homo sapien
tggtctggttggcactgtctctgga

SEQ ID NO: 178184 - DNA, 25 bp, Homo sapien
gtggtctggttggcactgtctctgg

SEQ ID NO: 178185 - DNA, 25 bp, Homo sapien
gaaagggcaggaaactcagtagata

SEQ ID NO: 178186 - DNA, 25 bp, Homo sapien
tcaaagagggcggaagtgcctagcc

SEQ ID NO: 178187 - DNA, 25 bp, Homo sapien
caaggtcccgtgagcgtctcagaag

SEQ ID NO: 178188 - DNA, 25 bp, Homo sapien
gaggagattaaggaaccctgacagc

SEQ ID NO: 178189 - DNA, 25 bp, Homo sapien
tcttgttctgggcatctttctcagg

SEQ ID NO: 178190 - DNA, 25 bp, Homo sapien
gggtggctcagctaagggggtgaca

SEQ ID NO: 178191 - DNA, 25 bp, Homo sapien
gctaagggggtgacaggagccttcc

SEQ ID NO: 178192 - DNA, 25 bp, Homo sapien
attgttctgtcttgttctgggcatc

SEQ ID NO: 178193 - DNA, 25 bp, Homo sapien
agtcagcttaaagaggtgtggcatc

SEQ ID NO: 178194 - DNA, 25 bp, Homo sapien
aaaatggatggctcaatcagcaggt

SEQ ID NO: 178195 - DNA, 25 bp, Homo sapien
agcaggtaggagagtatgaaaagcc

SEQ ID NO: 178196 - DNA, 25 bp, Homo sapien
gcaggacaagcagccagtcaatgaa

SEQ ID NO: 178197 - DNA, 25 bp, Homo sapien
tattctccagtcccttcttcctcac

SEQ ID NO: 178198 - DNA, 25 bp, Homo sapien
ttattctccagtcccttcttcctca

SEQ ID NO: 178199 - DNA, 25 bp, Homo sapien
cttcctcagtggttgggccattctg

SEQ ID NO: 178200 - DNA, 25 bp, Homo sapien
gctgaagctcaggatgctctgaaga

SEQ ID NO: 178201 - DNA, 25 bp, Homo sapien
gaagagctgcgagtccttcctcagt

SEQ ID NO: 178202 - DNA, 25 bp, Homo sapien
tggttgggccattctgtagcagctg

SEQ ID NO: 178203 - DNA, 25 bp, Homo sapien
catcgcggtgggcaggtgtgcgcag

SEQ ID NO: 178204 - DNA, 25 bp, Homo sapien
tgtgcgcaggtgttgcagcacagcc

SEQ ID NO: 178205 - DNA, 25 bp, Homo sapien
cagccaagcgggagggtgtctccca

SEQ ID NO: 178206 - DNA, 25 bp, Homo sapien
cacgcacacaacaggcagtggtata

SEQ ID NO: 178207 - DNA, 25 bp, Homo sapien
gcctggcacactaggcagcggaaca

SEQ ID NO: 178208 - DNA, 25 bp, Homo sapien
cacagatgttgcagcgcaggtgtag

SEQ ID NO: 178209 - DNA, 25 bp, Homo sapien
tgggtgccatagcagcaaagcttgc

SEQ ID NO: 178210 - DNA, 25 bp, Homo sapien
ggctccggcctatgctgcagtggta

SEQ ID NO: 178211 - DNA, 25 bp, Homo sapien
caatctcctttggtgggacgaggcc

SEQ ID NO: 178212 - DNA, 25 bp, Homo sapien
tagagtagttgcagacgtcacagcg

SEQ ID NO: 178213 - DNA, 25 bp, Homo sapien
cacagcggtagggtttgtagccaca

SEQ ID NO: 178214 - DNA, 25 bp, Homo sapien
taaagccttggattgggtcaaagcc

SEQ ID NO: 178215 - DNA, 25 bp, Homo sapien
taccagtggtagaggctgagttaag

SEQ ID NO: 178216 - DNA, 25 bp, Homo sapien
gagaaggtgtccgaaggcagggacg

SEQ ID NO: 178217 - DNA, 25 bp, Homo sapien
gggtggtaccagtggtagaggctga

SEQ ID NO: 178218 - DNA, 25 bp, Homo sapien
gaggagaaggtgtccgaaggcaggg

SEQ ID NO: 178219 - DNA, 25 bp, Homo sapien
ggggctcatgtcagcgtgacagcca

SEQ ID NO: 178220 - DNA, 25 bp, Homo sapien
tcatgtcagcgtgacagccagtacc

SEQ ID NO: 178221 - DNA, 25 bp, Homo sapien
ctgggggctcatgtcagcgtgacag

SEQ ID NO: 178222 - DNA, 25 bp, Homo sapien
gctcatgtcagcgtgacagccagta

SEQ ID NO: 178223 - DNA, 25 bp, Homo sapien
cagagatagggcataattgatttcc

SEQ ID NO: 178224 - DNA, 25 bp, Homo sapien
aattgatttcccctggcatgcaggc

SEQ ID NO: 178225 - DNA, 25 bp, Homo sapien
ctgacgaggtaaattccctaagtct

SEQ ID NO: 178226 - DNA, 25 bp, Homo sapien
gtaaattccctaagtcttgccagag

SEQ ID NO: 178227 - DNA, 25 bp, Homo sapien
cgccccagcgcgctagcccatccat

SEQ ID NO: 178228 - DNA, 25 bp, Homo sapien
cacgccccagcgcgctagcccatcc

SEQ ID NO: 178229 - DNA, 25 bp, Homo sapien
acgccccagcgcgctagcccatcca

SEQ ID NO: 178230 - DNA, 25 bp, Homo sapien
tcaatgctatttggctgcggctgaa

SEQ ID NO: 178231 - DNA, 25 bp, Homo sapien
gctgaagtgtttccccggcttcgtg

SEQ ID NO: 178232 - DNA, 25 bp, Homo sapien
taaataaattcacggcggtgaggga

SEQ ID NO: 178233 - DNA, 25 bp, Homo sapien
ctggaagcagggacgggagtcgaac

SEQ ID NO: 178234 - DNA, 25 bp, Homo sapien
tgagcaggtgcagcgacccgcccgc

SEQ ID NO: 178235 - DNA, 25 bp, Homo sapien
agcaggtgcagcgacccgcccgccg

SEQ ID NO: 178236 - DNA, 25 bp, Homo sapien
gagcaggtgcagcgacccgcccgcc

SEQ ID NO: 178237 - DNA, 25 bp, Homo sapien
tccagaaacatactggtgagagggc

SEQ ID NO: 178238 - DNA, 25 bp, Homo sapien
ttaagagccacggttcctcagggag

SEQ ID NO: 178239 - DNA, 25 bp, Homo sapien
tcagggagcttcctcacatggaagg

SEQ ID NO: 178240 - DNA, 25 bp, Homo sapien
caggtgttgagaacatggcacttct

SEQ ID NO: 178241 - DNA, 25 bp, Homo sapien
tagagtaccgcaggcaccaagtgca

SEQ ID NO: 178242 - DNA, 25 bp, Homo sapien
ccagttcagctttaggtagagtacc

SEQ ID NO: 178243 - DNA, 25 bp, Homo sapien
accaagtgcagctttcctgtcgcca

SEQ ID NO: 178244 - DNA, 25 bp, Homo sapien
tgtgaatggcttgtattccaggccc

SEQ ID NO: 178245 - DNA, 25 bp, Homo sapien
gctcagacccaggatcttcagatca

SEQ ID NO: 178246 - DNA, 25 bp, Homo sapien
gatgcactgcccactacactgagag

SEQ ID NO: 178247 - DNA, 25 bp, Homo sapien
cagatcatgagactgatgcactgcc

SEQ ID NO: 178248 - DNA, 25 bp, Homo sapien
tgccctctgggaggctcagacccag

SEQ ID NO: 178249 - DNA, 25 bp, Homo sapien
ggtttgggacacaggagaatttcag

SEQ ID NO: 178250 - DNA, 25 bp, Homo sapien
tgcaaagccagagcgccacctgctg

SEQ ID NO: 178251 - DNA, 25 bp, Homo sapien
tggtccccagtttttgcagtgcaaa

SEQ ID NO: 178252 - DNA, 25 bp, Homo sapien
cctcaggtgtaggttcgaagctgct

SEQ ID NO: 178253 - DNA, 25 bp, Homo sapien
caggcaagttgttcacctcaaagat

SEQ ID NO: 178254 - DNA, 25 bp, Homo sapien
tcctgcaccgactggtgaaagtggt

SEQ ID NO: 178255 - DNA, 25 bp, Homo sapien
aaagtggtcgtaggtgaggcgcagc

SEQ ID NO: 178256 - DNA, 25 bp, Homo sapien
taggtgaggcgcagctttagccgca

SEQ ID NO: 178257 - DNA, 25 bp, Homo sapien
attctgaagagctgggtgataggaa

SEQ ID NO: 178258 - DNA, 25 bp, Homo sapien
gagctggaactgtgttcccactggg

SEQ ID NO: 178259 - DNA, 25 bp, Homo sapien
ggtgataggaaggccaccccgagct

SEQ ID NO: 178260 - DNA, 25 bp, Homo sapien
gccaccccgagctggaactgtgttc

SEQ ID NO: 178261 - DNA, 25 bp, Homo sapien
tccccaagtgctgatctccagatga

SEQ ID NO: 178262 - DNA, 25 bp, Homo sapien
atgactcaatcccatctcacactgt

SEQ ID NO: 178263 - DNA, 25 bp, Homo sapien
ggcagcccctctatactcagtggct

SEQ ID NO: 178264 - DNA, 25 bp, Homo sapien
ggagtttaacagagcacagtatggc

SEQ ID NO: 178265 - DNA, 25 bp, Homo sapien
agctgtactccctcacgctcaaaca

SEQ ID NO: 178266 - DNA, 25 bp, Homo sapien
tcagggggtcgaatgaaagacagat

SEQ ID NO: 178267 - DNA, 25 bp, Homo sapien
acgctcaaacactttgagatctggg

SEQ ID NO: 178268 - DNA, 25 bp, Homo sapien
tccctcacgctcaaacactttgaga

SEQ ID NO: 178269 - DNA, 25 bp, Homo sapien
cagggaaggtcaagcaggtgtacca

SEQ ID NO: 178270 - DNA, 25 bp, Homo sapien
tcaagcaggtgtaccagggcacctc

SEQ ID NO: 178271 - DNA, 25 bp, Homo sapien
aaggtcaagcaggtgtaccagggca

SEQ ID NO: 178272 - DNA, 25 bp, Homo sapien
cacagggaaggtcaagcaggtgtac

SEQ ID NO: 178273 - DNA, 25 bp, Homo sapien
tggggaggggtccagatggggagga

SEQ ID NO: 178274 - DNA, 25 bp, Homo sapien
atccaggagatctagcagatccagg

SEQ ID NO: 178275 - DNA, 25 bp, Homo sapien
ccatccaggagatctagcagatcca

SEQ ID NO: 178276 - DNA, 25 bp, Homo sapien
catccaggagatctagcagatccag

SEQ ID NO: 178277 - DNA, 25 bp, Homo sapien
cccatccaggagatctagcagatcc

SEQ ID NO: 178278 - DNA, 25 bp, Homo sapien
atctcgctccacaagaggcattttt

SEQ ID NO: 178279 - DNA, 25 bp, Homo sapien
ctgagggccatctcgctccacaaga

SEQ ID NO: 178280 - DNA, 25 bp, Homo sapien
tgagggccatctcgctccacaagag

SEQ ID NO: 178281 - DNA, 25 bp, Homo sapien
ccatctcgctccacaagaggcattt

SEQ ID NO: 178282 - DNA, 25 bp, Homo sapien
tgggcacatggtggctcagaagtac

SEQ ID NO: 178283 - DNA, 25 bp, Homo sapien
tctgggcctttcacaagaggcatct

SEQ ID NO: 178284 - DNA, 25 bp, Homo sapien
gcttcaattaacagtgggtgggaag

SEQ ID NO: 178285 - DNA, 25 bp, Homo sapien
acaaggagggttggaagccagctta

SEQ ID NO: 178286 - DNA, 25 bp, Homo sapien
cgtggatatggaagaacacaggtga

SEQ ID NO: 178287 - DNA, 25 bp, Homo sapien
gaaaagggcatttgggagagggcag

SEQ ID NO: 178288 - DNA, 25 bp, Homo sapien
agaaaagggcatttgggagagggca

SEQ ID NO: 178289 - DNA, 25 bp, Homo sapien
tagaaaagggcatttgggagagggc

SEQ ID NO: 178290 - DNA, 25 bp, Homo sapien
cacgtccaagcagctcccgtagatg

SEQ ID NO: 178291 - DNA, 25 bp, Homo sapien
agctcccgtagatggacaccacctg

SEQ ID NO: 178292 - DNA, 25 bp, Homo sapien
tcatgtggtcgtatttccggaagag

SEQ ID NO: 178293 - DNA, 25 bp, Homo sapien
ctcatgtggtcgtatttccggaaga

SEQ ID NO: 178294 - DNA, 25 bp, Homo sapien
tatgtaagtggctatggcagtgtgc

SEQ ID NO: 178295 - DNA, 25 bp, Homo sapien
agtatgtaagtggctatggcagtgt

SEQ ID NO: 178296 - DNA, 25 bp, Homo sapien
tgtaagtggctatggcagtgtgcca

SEQ ID NO: 178297 - DNA, 25 bp, Homo sapien
tgggccagtgtagtatgtaagtggc

SEQ ID NO: 178298 - DNA, 25 bp, Homo sapien
ctcaaaaatgggtggacccagtgac

SEQ ID NO: 178299 - DNA, 25 bp, Homo sapien
ccagtgacaggccatctctcaaggg

SEQ ID NO: 178300 - DNA, 25 bp, Homo sapien
gagcagggaaatacccagatttggc

SEQ ID NO: 178301 - DNA, 25 bp, Homo sapien
gaaaggcccacggagcagggaaata

SEQ ID NO: 178302 - DNA, 25 bp, Homo sapien
agggcatatcctcgagtggctggca

SEQ ID NO: 178303 - DNA, 25 bp, Homo sapien
gcagcaccttttccagcaatgccag

SEQ ID NO: 178304 - DNA, 25 bp, Homo sapien
gagtgctgagcttcatgagggctgt

SEQ ID NO: 178305 - DNA, 25 bp, Homo sapien
ctgtgagggcatatcctcgagtggc

SEQ ID NO: 178306 - DNA, 25 bp, Homo sapien
gtccccatactccccaatgcaccag

SEQ ID NO: 178307 - DNA, 25 bp, Homo sapien
ccccatactccccaatgcaccaggc

SEQ ID NO: 178308 - DNA, 25 bp, Homo sapien
cccatactccccaatgcaccaggct

SEQ ID NO: 178309 - DNA, 25 bp, Homo sapien
ggtccccatactccccaatgcacca

SEQ ID NO: 178310 - DNA, 25 bp, Homo sapien
ggatgatgctttctgcccaccctat

SEQ ID NO: 178311 - DNA, 25 bp, Homo sapien
ctacatgggataagaaactgctggg

SEQ ID NO: 178312 - DNA, 25 bp, Homo sapien
gaactacatggcctaaccaaacagg

SEQ ID NO: 178313 - DNA, 25 bp, Homo sapien
caatatccctttaggcagtgcagag

SEQ ID NO: 178314 - DNA, 25 bp, Homo sapien
cagagtcaggacaaaagcccagatg

SEQ ID NO: 178315 - DNA, 25 bp, Homo sapien
gaggcagtcagggtacatggagcat

SEQ ID NO: 178316 - DNA, 25 bp, Homo sapien
agggaagttagtcatctgtagttac

SEQ ID NO: 178317 - DNA, 25 bp, Homo sapien
tagttacataaccaggaggtaccag

SEQ ID NO: 178318 - DNA, 25 bp, Homo sapien
aaattggaatctagtagggaggagg

SEQ ID NO: 178319 - DNA, 25 bp, Homo sapien
aattggaatctagtagggaggaggt

SEQ ID NO: 178320 - DNA, 25 bp, Homo sapien
aaaattggaatctagtagggaggag

SEQ ID NO: 178321 - DNA, 25 bp, Homo sapien
tagaggcggcgcacagagtaggcat

SEQ ID NO: 178322 - DNA, 25 bp, Homo sapien
cttctgccagggcattgtagaggcg

SEQ ID NO: 178323 - DNA, 25 bp, Homo sapien
gagtaggcatgtagctcctgggccc

SEQ ID NO: 178324 - DNA, 25 bp, Homo sapien
tcagctgggtcaggttggccactgc

SEQ ID NO: 178325 - DNA, 25 bp, Homo sapien
ggccaagtcagtgtggtgaatcttg

SEQ ID NO: 178326 - DNA, 25 bp, Homo sapien
gaaggtgtgggcatggccaagtcag

SEQ ID NO: 178327 - DNA, 25 bp, Homo sapien
tggccaagtcagtgtggtgaatctt

SEQ ID NO: 178328 - DNA, 25 bp, Homo sapien
gttgtcagcacatgcaggatggtgt

SEQ ID NO: 178329 - DNA, 25 bp, Homo sapien
cgttgtcagcacatgcaggatggtg

SEQ ID NO: 178330 - DNA, 25 bp, Homo sapien
tatgtgccagcgtttggttggagca

SEQ ID NO: 178331 - DNA, 25 bp, Homo sapien
tgtgccagcgtttggttggagcaaa

SEQ ID NO: 178332 - DNA, 25 bp, Homo sapien
ctatgtgccagcgtttggttggagc

SEQ ID NO: 178333 - DNA, 25 bp, Homo sapien
gtgccagcgtttggttggagcaaac

SEQ ID NO: 178334 - DNA, 25 bp, Homo sapien
agtcctggtactgacgctccccaga

SEQ ID NO: 178335 - DNA, 25 bp, Homo sapien
ggatatatggctcatcagtcctggt

SEQ ID NO: 178336 - DNA, 25 bp, Homo sapien
gattctaccctcttcgactcctggg

SEQ ID NO: 178337 - DNA, 25 bp, Homo sapien
tggctcatcagtcctggtactgacg

SEQ ID NO: 178338 - DNA, 25 bp, Homo sapien
cattggagctatttaccagagccag

SEQ ID NO: 178339 - DNA, 25 bp, Homo sapien
ttaccagagccaggcttagttccag

SEQ ID NO: 178340 - DNA, 25 bp, Homo sapien
cttgcatcatggctcgcacattgga

SEQ ID NO: 178341 - DNA, 25 bp, Homo sapien
agccaggcttagttccagggctctc

SEQ ID NO: 178342 - DNA, 25 bp, Homo sapien
tttccatgcaggtagcccaggtcat

SEQ ID NO: 178343 - DNA, 25 bp, Homo sapien
ccatgcaggtagcccaggtcatcct

SEQ ID NO: 178344 - DNA, 25 bp, Homo sapien
ggcaggagaaagaggtttccatgca

SEQ ID NO: 178345 - DNA, 25 bp, Homo sapien
ttccatgcaggtagcccaggtcatc

SEQ ID NO: 178346 - DNA, 25 bp, Homo sapien
tctaaactggctcgagtcttggcca

SEQ ID NO: 178347 - DNA, 25 bp, Homo sapien
ccttagtccccttactccagctgct

SEQ ID NO: 178348 - DNA, 25 bp, Homo sapien
ccttactccagctgctctaaactgg

SEQ ID NO: 178349 - DNA, 25 bp, Homo sapien
cagctgctctaaactggctcgagtc

SEQ ID NO: 178350 - DNA, 25 bp, Homo sapien
gggaggcatcagtttcccgtagaca

SEQ ID NO: 178351 - DNA, 25 bp, Homo sapien
gatcagactgcaccagtcgaagcag

SEQ ID NO: 178352 - DNA, 25 bp, Homo sapien
gcaccagtcgaagcagtgatgtcag

SEQ ID NO: 178353 - DNA, 25 bp, Homo sapien
ggccgatgccgctgcacagcactgt

SEQ ID NO: 178354 - DNA, 25 bp, Homo sapien
gatgggggaggttctatcataccat

SEQ ID NO: 178355 - DNA, 25 bp, Homo sapien
gggggaggttctatcataccatggc

SEQ ID NO: 178356 - DNA, 25 bp, Homo sapien
atgggggaggttctatcataccatg

SEQ ID NO: 178357 - DNA, 25 bp, Homo sapien
tgggggaggttctatcataccatgg

SEQ ID NO: 178358 - DNA, 25 bp, Homo sapien
tcctgtcactgttgagtaggaagcg

SEQ ID NO: 178359 - DNA, 25 bp, Homo sapien
cactgttgagtaggaagcgaccaag

SEQ ID NO: 178360 - DNA, 25 bp, Homo sapien
taggaagcgaccaagaatgttgaca

SEQ ID NO: 178361 - DNA, 25 bp, Homo sapien
tgagtaggaagcgaccaagaatgtt

SEQ ID NO: 178362 - DNA, 25 bp, Homo sapien
ctgggaacacattggcgcaagatga

SEQ ID NO: 178363 - DNA, 25 bp, Homo sapien
acattggcgcaagatgatggggcta

SEQ ID NO: 178364 - DNA, 25 bp, Homo sapien
gcagaagttggggtcagtcggaaag

SEQ ID NO: 178365 - DNA, 25 bp, Homo sapien
gggtcagtcggaaaggagcaacctg

SEQ ID NO: 178366 - DNA, 25 bp, Homo sapien
tatccatgatggtgagtactgtctc

SEQ ID NO: 178367 - DNA, 25 bp, Homo sapien
atttcggctggtgtccgtgttagtg

SEQ ID NO: 178368 - DNA, 25 bp, Homo sapien
caaacaggaccgcatttccggcatt

SEQ ID NO: 178369 - DNA, 25 bp, Homo sapien
gctgcagagcggatatccatgatgg

SEQ ID NO: 178370 - DNA, 25 bp, Homo sapien
gagatgtatctgctcaaggccctcc

SEQ ID NO: 178371 - DNA, 25 bp, Homo sapien
gagttcactgtctagaggagatgga

SEQ ID NO: 178372 - DNA, 25 bp, Homo sapien
gggcaatagcactaagacagactgt

SEQ ID NO: 178373 - DNA, 25 bp, Homo sapien
agatggagaggcaattacacggcca

SEQ ID NO: 178374 - DNA, 25 bp, Homo sapien
tcattcatggtctcactgctctcct

SEQ ID NO: 178375 - DNA, 25 bp, Homo sapien
agtcattcatggtctcactgctctc

SEQ ID NO: 178376 - DNA, 25 bp, Homo sapien
ccaggatccgaagcagacgaagtat

SEQ ID NO: 178377 - DNA, 25 bp, Homo sapien
tctcctcgtggttccggcccaggat

SEQ ID NO: 178378 - DNA, 25 bp, Homo sapien
ctcctcacctccacaggtcccttgg

SEQ ID NO: 178379 - DNA, 25 bp, Homo sapien
tcctcacctccacaggtcccttggt

SEQ ID NO: 178380 - DNA, 25 bp, Homo sapien
cctcacctccacaggtcccttggtc

SEQ ID NO: 178381 - DNA, 25 bp, Homo sapien
tatgctgtgttctgtggagtatccc

SEQ ID NO: 178382 - DNA, 25 bp, Homo sapien
cagagtccggaggatgtgtaccagc

SEQ ID NO: 178383 - DNA, 25 bp, Homo sapien
attgtcaccagagtccggaggatgt

SEQ ID NO: 178384 - DNA, 25 bp, Homo sapien
gggtcgctgactccagatatgctgt

SEQ ID NO: 178385 - DNA, 25 bp, Homo sapien
gagggagggcacaactttgggcatt

SEQ ID NO: 178386 - DNA, 25 bp, Homo sapien
cattcgttctaatcctctccagcta

SEQ ID NO: 178387 - DNA, 25 bp, Homo sapien
caactttgggcattcgttctaatcc

SEQ ID NO: 178388 - DNA, 25 bp, Homo sapien
gggcacaactttgggcattcgttct

SEQ ID NO: 178389 - DNA, 25 bp, Homo sapien
gctgcagggcttcgttcgcagagct

SEQ ID NO: 178390 - DNA, 25 bp, Homo sapien
ggcttcgttcgcagagctccgtgat

SEQ ID NO: 178391 - DNA, 25 bp, Homo sapien
gtgatcagcgtgatggtgcccagca

SEQ ID NO: 178392 - DNA, 25 bp, Homo sapien
cgcagagctccgtgatcagcgtgat

SEQ ID NO: 178393 - DNA, 25 bp, Homo sapien
tgtgtgtgtgcactacccttctcct

SEQ ID NO: 178394 - DNA, 25 bp, Homo sapien
ccaggggcaagagagtctattgcgt

SEQ ID NO: 178395 - DNA, 25 bp, Homo sapien
catccgattttcaattcttctgtcc

SEQ ID NO: 178396 - DNA, 25 bp, Homo sapien
agagagtctattgcgtgtgtgcctg

SEQ ID NO: 178397 - DNA, 25 bp, Homo sapien
aagcaaaggatggggggccccacag

SEQ ID NO: 178398 - DNA, 25 bp, Homo sapien
ctgaagcaaaggatggggggcccca

SEQ ID NO: 178399 - DNA, 25 bp, Homo sapien
agacctgaagcaaaggatggggggc

SEQ ID NO: 178400 - DNA, 25 bp, Homo sapien
gacctgaagcaaaggatggggggcc

SEQ ID NO: 178401 - DNA, 25 bp, Homo sapien
agttcagggaccttccggatcatgt

SEQ ID NO: 178402 - DNA, 25 bp, Homo sapien
cgctcatgaagcagttgggcacagg

SEQ ID NO: 178403 - DNA, 25 bp, Homo sapien
tcatgtgcactgcagtcagaatagc

SEQ ID NO: 178404 - DNA, 25 bp, Homo sapien
catggtgacgctcatgaagcagttg

SEQ ID NO: 178405 - DNA, 25 bp, Homo sapien
ctcaaagtgcacaaggccaggcctt

SEQ ID NO: 178406 - DNA, 25 bp, Homo sapien
catggtgctcaaagtgcacaaggcc

SEQ ID NO: 178407 - DNA, 25 bp, Homo sapien
ggccaggtctcggcacatctcagca

SEQ ID NO: 178408 - DNA, 25 bp, Homo sapien
cagcagagcccatggtgctcaaagt

SEQ ID NO: 178409 - DNA, 25 bp, Homo sapien
ggacggtcagtcaaacctctgagaa

SEQ ID NO: 178410 - DNA, 25 bp, Homo sapien
tgattccaagtgattgccagaaccc

SEQ ID NO: 178411 - DNA, 25 bp, Homo sapien
ccacaacaggcagtcccctgggatt

SEQ ID NO: 178412 - DNA, 25 bp, Homo sapien
atctccctgattccaagtgattgcc

SEQ ID NO: 178413 - DNA, 25 bp, Homo sapien
ccctcttgtctgtgaatctggagga

SEQ ID NO: 178414 - DNA, 25 bp, Homo sapien
aggcgatcagtttcaggcactccat

SEQ ID NO: 178415 - DNA, 25 bp, Homo sapien
gaggaggcgatcagtttcaggcact

SEQ ID NO: 178416 - DNA, 25 bp, Homo sapien
ggtgggcatcgtgcctctcatccaa

SEQ ID NO: 178417 - DNA, 25 bp, Homo sapien
gcagtttggccagctgccggtgcct

SEQ ID NO: 178418 - DNA, 25 bp, Homo sapien
catgtggacgtagagcagtttggcc

SEQ ID NO: 178419 - DNA, 25 bp, Homo sapien
tgtgcactgggtccccgtcgcggaa

SEQ ID NO: 178420 - DNA, 25 bp, Homo sapien
gcccaacatgtggacgtagagcagt

SEQ ID NO: 178421 - DNA, 25 bp, Homo sapien
tgagtcttggccccgcgaatctctt

SEQ ID NO: 178422 - DNA, 25 bp, Homo sapien
gccccgcgaatctcttcgatgaggt

SEQ ID NO: 178423 - DNA, 25 bp, Homo sapien
gcctgagtcttggccccgcgaatct

SEQ ID NO: 178424 - DNA, 25 bp, Homo sapien
tcttggccccgcgaatctcttcgat

SEQ ID NO: 178425 - DNA, 25 bp, Homo sapien
tgaagcttcagcgaaggcaccacca

SEQ ID NO: 178426 - DNA, 25 bp, Homo sapien
gaagcttcagcgaaggcaccaccat

SEQ ID NO: 178427 - DNA, 25 bp, Homo sapien
ctgaagcttcagcgaaggcaccacc

SEQ ID NO: 178428 - DNA, 25 bp, Homo sapien
cccaggcccgtcctgtgtcaagacc

SEQ ID NO: 178429 - DNA, 25 bp, Homo sapien
ggcgtgcctgggctttcggcccagg

SEQ ID NO: 178430 - DNA, 25 bp, Homo sapien
gtcgggcgtgcctgggctttcggcc

SEQ ID NO: 178431 - DNA, 25 bp, Homo sapien
aaacactctctggtcgggcgtgcct

SEQ ID NO: 178432 - DNA, 25 bp, Homo sapien
gaagtgggtctccaaattccgcgcc

SEQ ID NO: 178433 - DNA, 25 bp, Homo sapien
gcatgcgcgggagccccacctattt

SEQ ID NO: 178434 - DNA, 25 bp, Homo sapien
gagaagcccactacgcatgcgtccg

SEQ ID NO: 178435 - DNA, 25 bp, Homo sapien
gaccctccgctgtttcttccgcgag

SEQ ID NO: 178436 - DNA, 25 bp, Homo sapien
cctcaggctttagcggagagacagc

SEQ ID NO: 178437 - DNA, 25 bp, Homo sapien
ttaccacccggagagcctcagtttg

SEQ ID NO: 178438 - DNA, 25 bp, Homo sapien
gacagcatgataggcctggagttct

SEQ ID NO: 178439 - DNA, 25 bp, Homo sapien
tttggatttgaagccatcgcacccc

SEQ ID NO: 178440 - DNA, 25 bp, Homo sapien
gggcagtaacccagctcagtgcttg

SEQ ID NO: 178441 - DNA, 25 bp, Homo sapien
cacccgcagcgaagttgaggtctaa

SEQ ID NO: 178442 - DNA, 25 bp, Homo sapien
taatcaaaggccacaagtgagtcca

SEQ ID NO: 178443 - DNA, 25 bp, Homo sapien
caagacttggtgttggcggcactgt

SEQ ID NO: 178444 - DNA, 25 bp, Homo sapien
gggagaacaggaatgccaggctgag

SEQ ID NO: 178445 - DNA, 25 bp, Homo sapien
gtccaggagggccacggctcccacc

SEQ ID NO: 178446 - DNA, 25 bp, Homo sapien
ggctcccaccaccagggggttggca

SEQ ID NO: 178447 - DNA, 25 bp, Homo sapien
gctgggagaacaggaatgccaggct

SEQ ID NO: 178448 - DNA, 25 bp, Homo sapien
gaggtgcctggccttagtagcagac

SEQ ID NO: 178449 - DNA, 25 bp, Homo sapien
atcagcatatcatgtgtcccaggca

SEQ ID NO: 178450 - DNA, 25 bp, Homo sapien
tcccatcagcatatcatgtgtccca

SEQ ID NO: 178451 - DNA, 25 bp, Homo sapien
gcctggccttagtagcagacattgg

SEQ ID NO: 178452 - DNA, 25 bp, Homo sapien
aggcctctcggttgcagcgggctcc

SEQ ID NO: 178453 - DNA, 25 bp, Homo sapien
ggaaccttctgagtcctgcctgggt

SEQ ID NO: 178454 - DNA, 25 bp, Homo sapien
ccagcatggcgatgggctcaggctc

SEQ ID NO: 178455 - DNA, 25 bp, Homo sapien
gggtcagtccgttctcatatacccc

SEQ ID NO: 178456 - DNA, 25 bp, Homo sapien
tcagtttggccattcgagctgcctc

SEQ ID NO: 178457 - DNA, 25 bp, Homo sapien
ggcctctagcatgggctgcaggtcc

SEQ ID NO: 178458 - DNA, 25 bp, Homo sapien
gcaggtcctgggctatcagtttggc

SEQ ID NO: 178459 - DNA, 25 bp, Homo sapien
tgcctttaggagggcgtctgctgcc

SEQ ID NO: 178460 - DNA, 25 bp, Homo sapien
gccatgggcttgaattgatcacacc

SEQ ID NO: 178461 - DNA, 25 bp, Homo sapien
taacgtggctcttctgtcttaggac

SEQ ID NO: 178462 - DNA, 25 bp, Homo sapien
tataactagccctgtcctgaaactg

SEQ ID NO: 178463 - DNA, 25 bp, Homo sapien
acctggtgggtcaaagatctttaga

SEQ ID NO: 178464 - DNA, 25 bp, Homo sapien
gacttagtctgtgctcaggcatcag

SEQ ID NO: 178465 - DNA, 25 bp, Homo sapien
gccagtcgggattgccaggcctgtt

SEQ ID NO: 178466 - DNA, 25 bp, Homo sapien
ggatgatcaagtcccacacagtaga

SEQ ID NO: 178467 - DNA, 25 bp, Homo sapien
ggcctgaaactggtgcactgatgag

SEQ ID NO: 178468 - DNA, 25 bp, Homo sapien
aagtccctgggctctaacatccaga

SEQ ID NO: 178469 - DNA, 25 bp, Homo sapien
aaacgtctactctgcatttggcatg

SEQ ID NO: 178470 - DNA, 25 bp, Homo sapien
tatctagcctaaaatgttccctggt

SEQ ID NO: 178471 - DNA, 25 bp, Homo sapien
cactgcctgatcctctagttactga

SEQ ID NO: 178472 - DNA, 25 bp, Homo sapien
ttaaggggcggtcccgtgctgccca

SEQ ID NO: 178473 - DNA, 25 bp, Homo sapien
gaaacgtgtctagtctgaatggaaa

SEQ ID NO: 178474 - DNA, 25 bp, Homo sapien
tattattaaaattcatcacacctgc

SEQ ID NO: 178475 - DNA, 25 bp, Homo sapien
tactggttaccagttgaaatgataa

SEQ ID NO: 178476 - DNA, 25 bp, Homo sapien
cccaaggctgaaatggtgtcaggct

SEQ ID NO: 178477 - DNA, 25 bp, Homo sapien
tgtagcctcggatataaacaccaag

SEQ ID NO: 178478 - DNA, 25 bp, Homo sapien
gatagcaaggttcctgatgcaagga

SEQ ID NO: 178479 - DNA, 25 bp, Homo sapien
gacagcactgctttagatagcaagg

SEQ ID NO: 178480 - DNA, 25 bp, Homo sapien
tgcaccagccggttgcgcttgtact

SEQ ID NO: 178481 - DNA, 25 bp, Homo sapien
cctcgtagcgcagcccgttggagcg

SEQ ID NO: 178482 - DNA, 25 bp, Homo sapien
gatctcctggcgctgacgggcagca

SEQ ID NO: 178483 - DNA, 25 bp, Homo sapien
acgggcagcactcacggctcgacgg

SEQ ID NO: 178484 - DNA, 25 bp, Homo sapien
cgagccgggcggtccggtgctgccc

SEQ ID NO: 178485 - DNA, 25 bp, Homo sapien
agccgggcggtccggtgctgcccac

SEQ ID NO: 178486 - DNA, 25 bp, Homo sapien
ctccgagccgggcggtccggtgctg

SEQ ID NO: 178487 - DNA, 25 bp, Homo sapien
gagccgggcggtccggtgctgccca

SEQ ID NO: 178488 - DNA, 25 bp, Homo sapien
tgcgctttcgggacgacgcgccgtc

SEQ ID NO: 178489 - DNA, 25 bp, Homo sapien
gcagcgaacggcgaaagaatccgcc

SEQ ID NO: 178490 - DNA, 25 bp, Homo sapien
tggcgtaccccgtagccgtggcgct

SEQ ID NO: 178491 - DNA, 25 bp, Homo sapien
agcagcgccgcctgatggtagggca

SEQ ID NO: 178492 - DNA, 25 bp, Homo sapien
gcgtagcgcaggccggacacgcttt

SEQ ID NO: 178493 - DNA, 25 bp, Homo sapien
ggtctcagtgccgtagccgtcctgg

SEQ ID NO: 178494 - DNA, 25 bp, Homo sapien
cgggccccgtgaagacgcccagtga

SEQ ID NO: 178495 - DNA, 25 bp, Homo sapien
tgactcgaagccgtgtgcccagcag

SEQ ID NO: 178496 - DNA, 25 bp, Homo sapien
agcagcccccgtcgtcaaagtcgaa

SEQ ID NO: 178497 - DNA, 25 bp, Homo sapien
ccccacgtagcagcccccgtcgtca

SEQ ID NO: 178498 - DNA, 25 bp, Homo sapien
cagccccccacgtagcagcccccgt

SEQ ID NO: 178499 - DNA, 25 bp, Homo sapien
acgtagcagcccccgtcgtcaaagt

SEQ ID NO: 178500 - DNA, 25 bp, Homo sapien
catgtagttggcgcggcctcagccc

SEQ ID NO: 178501 - DNA, 25 bp, Homo sapien
gtagttggcgcggcctcagcccccc

SEQ ID NO: 178502 - DNA, 25 bp, Homo sapien
gcatgtagttggcgcggcctcagcc

SEQ ID NO: 178503 - DNA, 25 bp, Homo sapien
atgtagttggcgcggcctcagcccc

SEQ ID NO: 178504 - DNA, 25 bp, Homo sapien
gcagggccggaccctcatcctgagt

SEQ ID NO: 178505 - DNA, 25 bp, Homo sapien
cagggccggaccctcatcctgagtg

SEQ ID NO: 178506 - DNA, 25 bp, Homo sapien
agggccggaccctcatcctgagtgg

SEQ ID NO: 178507 - DNA, 25 bp, Homo sapien
cctctgccccggttcttcggcgtct

SEQ ID NO: 178508 - DNA, 25 bp, Homo sapien
ctagaaccccgaagtgtcgagtgtg

SEQ ID NO: 178509 - DNA, 25 bp, Homo sapien
aaccccgaagtgtcgagtgtggatg

SEQ ID NO: 178510 - DNA, 25 bp, Homo sapien
ggcagaatcgtagggcacccgtttc

SEQ ID NO: 178511 - DNA, 25 bp, Homo sapien
tgtccgctaacccttcggtgaggga

SEQ ID NO: 178512 - DNA, 25 bp, Homo sapien
gcagaaaaggatgggtgtccgctaa

SEQ ID NO: 178513 - DNA, 25 bp, Homo sapien
aaatcaatgtttgctccatcccagc

SEQ ID NO: 178514 - DNA, 25 bp, Homo sapien
aaggatacggtgaagaagagacagc

SEQ ID NO: 178515 - DNA, 25 bp, Homo sapien
agggcatcatgcttggtgatggcat

SEQ ID NO: 178516 - DNA, 25 bp, Homo sapien
ctctgggttgtccctctgaaggaga

SEQ ID NO: 178517 - DNA, 25 bp, Homo sapien
catgcttggtgatggcatgaagatc

SEQ ID NO: 178518 - DNA, 25 bp, Homo sapien
ttggtgatggcatgaagatcccagg

SEQ ID NO: 178519 - DNA, 25 bp, Homo sapien
tctgagctgcaaattaagtgtaggg

SEQ ID NO: 178520 - DNA, 25 bp, Homo sapien
aatgaagtcccgaagaaatctctga

SEQ ID NO: 178521 - DNA, 25 bp, Homo sapien
tgttggaagctatactgtattctga

SEQ ID NO: 178522 - DNA, 25 bp, Homo sapien
tggtcctggaacacccgtgccttgt

SEQ ID NO: 178523 - DNA, 25 bp, Homo sapien
aattttgtatcctacttattcactt

SEQ ID NO: 178524 - DNA, 25 bp, Homo sapien
taaaaccacccctagtctcactgta

SEQ ID NO: 178525 - DNA, 25 bp, Homo sapien
agtctcactgtataacagtttagta

SEQ ID NO: 178526 - DNA, 25 bp, Homo sapien
aaaacagtgcatatacaattttgta

SEQ ID NO: 178527 - DNA, 25 bp, Homo sapien
gcagtgtttgtgtgtccggcgttgg

SEQ ID NO: 178528 - DNA, 25 bp, Homo sapien
gtgtttgtgtgtccggcgttggtgg

SEQ ID NO: 178529 - DNA, 25 bp, Homo sapien
cagtgtttgtgtgtccggcgttggt

SEQ ID NO: 178530 - DNA, 25 bp, Homo sapien
agtgtttgtgtgtccggcgttggtg

SEQ ID NO: 178531 - DNA, 25 bp, Homo sapien
ggatatttgatacgatttctactgt

SEQ ID NO: 178532 - DNA, 25 bp, Homo sapien
gtgacataaggtatggtctatcttg

SEQ ID NO: 178533 - DNA, 25 bp, Homo sapien
tgaccattgactgtttaggagcatg

SEQ ID NO: 178534 - DNA, 25 bp, Homo sapien
atcatccctggccaagtctttctac

SEQ ID NO: 178535 - DNA, 25 bp, Homo sapien
ggtgcatgtctaaggtcatactcgc

SEQ ID NO: 178536 - DNA, 25 bp, Homo sapien
aatacgttcagagtgactgtgggca

SEQ ID NO: 178537 - DNA, 25 bp, Homo sapien
ttcaccttcaaccactactgtgtct

SEQ ID NO: 178538 - DNA, 25 bp, Homo sapien
gcactctgcttatgctggcacagga

SEQ ID NO: 178539 - DNA, 25 bp, Homo sapien
tgtgagtacccctctttcccaccac

SEQ ID NO: 178540 - DNA, 25 bp, Homo sapien
tgagtacccctctttcccaccacat

SEQ ID NO: 178541 - DNA, 25 bp, Homo sapien
gtgagtacccctctttcccaccaca

SEQ ID NO: 178542 - DNA, 25 bp, Homo sapien
ctgtgagtacccctctttcccacca

SEQ ID NO: 178543 - DNA, 25 bp, Homo sapien
acagtcctgacacgggcagagccat

SEQ ID NO: 178544 - DNA, 25 bp, Homo sapien
cccgggttccatgtgtttgccaact

SEQ ID NO: 178545 - DNA, 25 bp, Homo sapien
tgggaggattgacagtcctgacacg

SEQ ID NO: 178546 - DNA, 25 bp, Homo sapien
gggttccatgtgtttgccaactggg

SEQ ID NO: 178547 - DNA, 25 bp, Homo sapien
gaaaacagttataccgaatcttgtg

SEQ ID NO: 178548 - DNA, 25 bp, Homo sapien
gctttctcagaaaaggccctgtgta

SEQ ID NO: 178549 - DNA, 25 bp, Homo sapien
gaatcttgtgcataattccagttag

SEQ ID NO: 178550 - DNA, 25 bp, Homo sapien
ctttgagaacccagagaaaacagtt

SEQ ID NO: 178551 - DNA, 25 bp, Homo sapien
actgtgtcacaaggaggagaatctc

SEQ ID NO: 178552 - DNA, 25 bp, Homo sapien
ccatgagttcgtttccaaggccaaa

SEQ ID NO: 178553 - DNA, 25 bp, Homo sapien
tgctgctctgtccaatggagagttt

SEQ ID NO: 178554 - DNA, 25 bp, Homo sapien
gatctttttgatcaccatggagaca

SEQ ID NO: 178555 - DNA, 25 bp, Homo sapien
aagcctgctccttttccacctcgct

SEQ ID NO: 178556 - DNA, 25 bp, Homo sapien
ttaagcctgctccttttccacctcg

SEQ ID NO: 178557 - DNA, 25 bp, Homo sapien
gctccttttccacctcgctctccct

SEQ ID NO: 178558 - DNA, 25 bp, Homo sapien
cctgctccttttccacctcgctctc

SEQ ID NO: 178559 - DNA, 25 bp, Homo sapien
ctggctgaactcctctccgaagcaa

SEQ ID NO: 178560 - DNA, 25 bp, Homo sapien
gaactcctctccgaagcaatgccat

SEQ ID NO: 178561 - DNA, 25 bp, Homo sapien
aatattcccctagagtccagctgtc

SEQ ID NO: 178562 - DNA, 25 bp, Homo sapien
gatggtgtgggaagataatattccc

SEQ ID NO: 178563 - DNA, 25 bp, Homo sapien
ttggaaagtttcatgcctatgtaag

SEQ ID NO: 178564 - DNA, 25 bp, Homo sapien
catcttattaattatgctgctgaac

SEQ ID NO: 178565 - DNA, 25 bp, Homo sapien
cagtcatcctttatcattctgtagc

SEQ ID NO: 178566 - DNA, 25 bp, Homo sapien
cacttttattgtgtacagaggcaaa

SEQ ID NO: 178567 - DNA, 25 bp, Homo sapien
ccactagctttaatgagctcttaaa

SEQ ID NO: 178568 - DNA, 25 bp, Homo sapien
tgagctcttaaagtaagtgaagact

SEQ ID NO: 178569 - DNA, 25 bp, Homo sapien
gaagacttccagctgcaacaactct

SEQ ID NO: 178570 - DNA, 25 bp, Homo sapien
tgtatcgccatagaaacaagacctt

SEQ ID NO: 178571 - DNA, 25 bp, Homo sapien
cccagcaggccggactgcagactgc

SEQ ID NO: 178572 - DNA, 25 bp, Homo sapien
cgcccagcaggccggactgcagact

SEQ ID NO: 178573 - DNA, 25 bp, Homo sapien
ccagcaggccggactgcagactgca

SEQ ID NO: 178574 - DNA, 25 bp, Homo sapien
gcccagcaggccggactgcagactg

SEQ ID NO: 178575 - DNA, 25 bp, Homo sapien
ggtgtggcatgtgtccacacgcatg

SEQ ID NO: 178576 - DNA, 25 bp, Homo sapien
tgtccacacgcatgggcctgaactc

SEQ ID NO: 178577 - DNA, 25 bp, Homo sapien
tggcatgtgtccacacgcatgggcc

SEQ ID NO: 178578 - DNA, 25 bp, Homo sapien
catgtgtccacacgcatgggcctga

SEQ ID NO: 178579 - DNA, 25 bp, Homo sapien
taactgttcttacctttggacacag

SEQ ID NO: 178580 - DNA, 25 bp, Homo sapien
aactcagggcgccataactgttctt

SEQ ID NO: 178581 - DNA, 25 bp, Homo sapien
tgccatccaactcagggcgccataa

SEQ ID NO: 178582 - DNA, 25 bp, Homo sapien
gtctgctgccatccaactcagggcg

SEQ ID NO: 178583 - DNA, 25 bp, Homo sapien
cctgacaagtgttcttgaagaatgc

SEQ ID NO: 178584 - DNA, 25 bp, Homo sapien
agcagtgaattgacccagaatacat

SEQ ID NO: 178585 - DNA, 25 bp, Homo sapien
ctgaacctgacaagtgttcttgaag

SEQ ID NO: 178586 - DNA, 25 bp, Homo sapien
tcatactgaacctgacaagtgttct

SEQ ID NO: 178587 - DNA, 25 bp, Homo sapien
ttggcttttgctggcttcaattctc

SEQ ID NO: 178588 - DNA, 25 bp, Homo sapien
cattggcttttgctggcttcaattc

SEQ ID NO: 178589 - DNA, 25 bp, Homo sapien
gcattggcttttgctggcttcaatt

SEQ ID NO: 178590 - DNA, 25 bp, Homo sapien
attggcttttgctggcttcaattct

SEQ ID NO: 178591 - DNA, 25 bp, Homo sapien
gccaccacaatgttgtctccagtga

SEQ ID NO: 178592 - DNA, 25 bp, Homo sapien
gtctccagtgatgtggccggtgtct

SEQ ID NO: 178593 - DNA, 25 bp, Homo sapien
tgctggccaccacaatgttgtctcc

SEQ ID NO: 178594 - DNA, 25 bp, Homo sapien
tgtggccggtgtctggagagcacag

SEQ ID NO: 178595 - DNA, 25 bp, Homo sapien
gtgatccctcaagaccaggtcctca

SEQ ID NO: 178596 - DNA, 25 bp, Homo sapien
gagattcttcgtgtgatccctcaag

SEQ ID NO: 178597 - DNA, 25 bp, Homo sapien
tcttcgtgtgatccctcaagaccag

SEQ ID NO: 178598 - DNA, 25 bp, Homo sapien
ctctgaagagattcttcgtgtgatc

SEQ ID NO: 178599 - DNA, 25 bp, Homo sapien
ttcccaccaagggactgatccctgc

SEQ ID NO: 178600 - DNA, 25 bp, Homo sapien
accaagggactgatccctgccacac

SEQ ID NO: 178601 - DNA, 25 bp, Homo sapien
acttcccaccaagggactgatccct

SEQ ID NO: 178602 - DNA, 25 bp, Homo sapien
ccaccaagggactgatccctgccac

SEQ ID NO: 178603 - DNA, 25 bp, Homo sapien
tgggccctatcgtgggccagacgct

SEQ ID NO: 178604 - DNA, 25 bp, Homo sapien
ctgctgatgactacgtgggccctat

SEQ ID NO: 178605 - DNA, 25 bp, Homo sapien
acgctgggcaatggcgaagccgaac

SEQ ID NO: 178606 - DNA, 25 bp, Homo sapien
gccacagcccagtccacgttctgct

SEQ ID NO: 178607 - DNA, 25 bp, Homo sapien
agctttgatggctagtttgagccta

SEQ ID NO: 178608 - DNA, 25 bp, Homo sapien
ctagtttgagcctatagttggctcc

SEQ ID NO: 178609 - DNA, 25 bp, Homo sapien
gatggctagtttgagcctatagttg

SEQ ID NO: 178610 - DNA, 25 bp, Homo sapien
gagcctatagttggctccactgctg

SEQ ID NO: 178611 - DNA, 25 bp, Homo sapien
cccattctataggttatgtttactc

SEQ ID NO: 178612 - DNA, 25 bp, Homo sapien
tgtgaaatctttgccccctcctatg

SEQ ID NO: 178613 - DNA, 25 bp, Homo sapien
agtctttaatctgtactgaattgat

SEQ ID NO: 178614 - DNA, 25 bp, Homo sapien
gatattagaccttcatcaaatgcat

SEQ ID NO: 178615 - DNA, 25 bp, Homo sapien
atttatgcttgagggcactaccaag

SEQ ID NO: 178616 - DNA, 25 bp, Homo sapien
ctatttatgcttgagggcactacca

SEQ ID NO: 178617 - DNA, 25 bp, Homo sapien
tatttatgcttgagggcactaccaa

SEQ ID NO: 178618 - DNA, 25 bp, Homo sapien
tgcttactaaagagcccctcagtct

SEQ ID NO: 178619 - DNA, 25 bp, Homo sapien
aacttgggggcctgtcattcctcca

SEQ ID NO: 178620 - DNA, 25 bp, Homo sapien
agacacaaggattttccatctggtg

SEQ ID NO: 178621 - DNA, 25 bp, Homo sapien
ccatctggtggccacattcatgctt

SEQ ID NO: 178622 - DNA, 25 bp, Homo sapien
gactggagcagtctgaatgtacact

SEQ ID NO: 178623 - DNA, 25 bp, Homo sapien
caatttcaacaggaccaaagatcac

SEQ ID NO: 178624 - DNA, 25 bp, Homo sapien
aaatggctccgacagacttgctaga

SEQ ID NO: 178625 - DNA, 25 bp, Homo sapien
gaaatgagtacacgttgttgggaaa

SEQ ID NO: 178626 - DNA, 25 bp, Homo sapien
tacttccctctacacagacacagga

SEQ ID NO: 178627 - DNA, 25 bp, Homo sapien
cggagagcgggatttggtagggtca

SEQ ID NO: 178628 - DNA, 25 bp, Homo sapien
tgtttctcggagagcgggatttggt

SEQ ID NO: 178629 - DNA, 25 bp, Homo sapien
ctacttccctctacacagacacagg

SEQ ID NO: 178630 - DNA, 25 bp, Homo sapien
gaatgtgtgataaaactttgaagcc

SEQ ID NO: 178631 - DNA, 25 bp, Homo sapien
tccagtcgttagctacctgatttta

SEQ ID NO: 178632 - DNA, 25 bp, Homo sapien
tgtgtcttatactatgaatgtgtga

SEQ ID NO: 178633 - DNA, 25 bp, Homo sapien
tataccatgtcccatacctcattag

SEQ ID NO: 178634 - DNA, 25 bp, Homo sapien
tggagctttttgtgatctgagttcc

SEQ ID NO: 178635 - DNA, 25 bp, Homo sapien
tgtgatctgagttccttgttctctt

SEQ ID NO: 178636 - DNA, 25 bp, Homo sapien
ttaattggagctttttgtgatctga

SEQ ID NO: 178637 - DNA, 25 bp, Homo sapien
tttttgtgatctgagttccttgttc

SEQ ID NO: 178638 - DNA, 25 bp, Homo sapien
tgtccagaaggaaaacacctagttg

SEQ ID NO: 178639 - DNA, 25 bp, Homo sapien
ggtcccagcagtaatctgtgtcata

SEQ ID NO: 178640 - DNA, 25 bp, Homo sapien
gcaaatgccattttaccgctttctt

SEQ ID NO: 178641 - DNA, 25 bp, Homo sapien
gagctggaagaacacaacgaacctt

SEQ ID NO: 178642 - DNA, 25 bp, Homo sapien
tcagcttgcatagcccatccccagg

SEQ ID NO: 178643 - DNA, 25 bp, Homo sapien
cgcagtgagcaatcagcttgcatag

SEQ ID NO: 178644 - DNA, 25 bp, Homo sapien
tcttgctactcgcagtgagcaatca

SEQ ID NO: 178645 - DNA, 25 bp, Homo sapien
accacctctggtggggtcctagtgc

SEQ ID NO: 178646 - DNA, 25 bp, Homo sapien
caaaaaacagtggattcagtttcag

SEQ ID NO: 178647 - DNA, 25 bp, Homo sapien
ggaacatgcccttccagtgatgaga

SEQ ID NO: 178648 - DNA, 25 bp, Homo sapien
aaagttgttgtccatcatccatccc

SEQ ID NO: 178649 - DNA, 25 bp, Homo sapien
ccaacctggagtaataattagaaag

SEQ ID NO: 178650 - DNA, 25 bp, Homo sapien
aggagagagagttggctggtactga

SEQ ID NO: 178651 - DNA, 25 bp, Homo sapien
gagagagagttggctggtactgaag

SEQ ID NO: 178652 - DNA, 25 bp, Homo sapien
gagttggctggtactgaaggatctt

SEQ ID NO: 178653 - DNA, 25 bp, Homo sapien
gctggtactgaaggatctttcaacc

SEQ ID NO: 178654 - DNA, 25 bp, Homo sapien
tatgtaaccagaaggacaaatccac

SEQ ID NO: 178655 - DNA, 25 bp, Homo sapien
tatctgggcttagtacaagttctcc

SEQ ID NO: 178656 - DNA, 25 bp, Homo sapien
tggacaccattacacaggactgcct

SEQ ID NO: 178657 - DNA, 25 bp, Homo sapien
aagttctcctagctacatgtacaag

SEQ ID NO: 178658 - DNA, 25 bp, Homo sapien
tagaggatccttacttcagtgcatc

SEQ ID NO: 178659 - DNA, 25 bp, Homo sapien
tccaaagggtttatccgaagtggca

SEQ ID NO: 178660 - DNA, 25 bp, Homo sapien
tctgtccaaggatttgatctggccc

SEQ ID NO: 178661 - DNA, 25 bp, Homo sapien
catgaacctccagaactcgatgtgc

SEQ ID NO: 178662 - DNA, 25 bp, Homo sapien
tggttagggagaacttgagtgcccc

SEQ ID NO: 178663 - DNA, 25 bp, Homo sapien
aatgaccatagtctgccctccaggg

SEQ ID NO: 178664 - DNA, 25 bp, Homo sapien
ttgtcaacggacatgagaatgctgt

SEQ ID NO: 178665 - DNA, 25 bp, Homo sapien
tttccaccactgcttgagggactgt

SEQ ID NO: 178666 - DNA, 25 bp, Homo sapien
tgggcagtctcaaaacatttgccct

SEQ ID NO: 178667 - DNA, 25 bp, Homo sapien
ggtggactccatggcgaccacaggc

SEQ ID NO: 178668 - DNA, 25 bp, Homo sapien
ctcacctccatgggcagtctcaaaa

SEQ ID NO: 178669 - DNA, 25 bp, Homo sapien
ctggtggactccatggcgaccacag

SEQ ID NO: 178670 - DNA, 25 bp, Homo sapien
caggcaacttgaacggagagctcac

SEQ ID NO: 178671 - DNA, 25 bp, Homo sapien
gaaaaggtgggcaagcagatgcaga

SEQ ID NO: 178672 - DNA, 25 bp, Homo sapien
gggcgagccctacaggcaacttgaa

SEQ ID NO: 178673 - DNA, 25 bp, Homo sapien
ctgcgggttcctgcaagggccaggg

SEQ ID NO: 178674 - DNA, 25 bp, Homo sapien
gtcaccgcccctgggaagagtggaa

SEQ ID NO: 178675 - DNA, 25 bp, Homo sapien
acagaccgctcacagcggtaccggg

SEQ ID NO: 178676 - DNA, 25 bp, Homo sapien
tgcccctcgccctactctgtcaccg

SEQ ID NO: 178677 - DNA, 25 bp, Homo sapien
aagccccagtcaggcggaaggtaga

SEQ ID NO: 178678 - DNA, 25 bp, Homo sapien
ccggagtttctgaggccctggctgc

SEQ ID NO: 178679 - DNA, 25 bp, Homo sapien
aattcggtgcggatggccagctccg

SEQ ID NO: 178680 - DNA, 25 bp, Homo sapien
cccgctcgcaaataaggtggccctg

SEQ ID NO: 178681 - DNA, 25 bp, Homo sapien
tggtctgatccatgcacaaggcggg

SEQ ID NO: 178682 - DNA, 25 bp, Homo sapien
gaagccactccgaatcccctagccc

SEQ ID NO: 178683 - DNA, 25 bp, Homo sapien
gtagccacgtggtccgcctgaagcc

SEQ ID NO: 178684 - DNA, 25 bp, Homo sapien
acgtggtccgcctgaagccactccg

SEQ ID NO: 178685 - DNA, 25 bp, Homo sapien
gtggtccgcctgaagccactccgaa

SEQ ID NO: 178686 - DNA, 25 bp, Homo sapien
gtgccacctctgtgcagccctatcg

SEQ ID NO: 178687 - DNA, 25 bp, Homo sapien
gccacctctgtgcagccctatcgat

SEQ ID NO: 178688 - DNA, 25 bp, Homo sapien
ctggcacaactgtgccacctctgtg

SEQ ID NO: 178689 - DNA, 25 bp, Homo sapien
ctctggcacaactgtgccacctctg

SEQ ID NO: 178690 - DNA, 25 bp, Homo sapien
cacaggccttagcagtctttgtctc

SEQ ID NO: 178691 - DNA, 25 bp, Homo sapien
caaacccgggcagtcttaacttcag

SEQ ID NO: 178692 - DNA, 25 bp, Homo sapien
taacttcagagctcatactgtcgac

SEQ ID NO: 178693 - DNA, 25 bp, Homo sapien
tttctgctcacaggatcggcttcgc

SEQ ID NO: 178694 - DNA, 25 bp, Homo sapien
caaacacatgtgtactgagcacggc

SEQ ID NO: 178695 - DNA, 25 bp, Homo sapien
tagatttacacattgacagcccagc

SEQ ID NO: 178696 - DNA, 25 bp, Homo sapien
caaatccggagcacaaagttgaccg

SEQ ID NO: 178697 - DNA, 25 bp, Homo sapien
gagcacggcgcacatcacttattaa

SEQ ID NO: 178698 - DNA, 25 bp, Homo sapien
caacatgggtaaatgcacctccctt

SEQ ID NO: 178699 - DNA, 25 bp, Homo sapien
tcgatatcctagtctccaatgctgc

SEQ ID NO: 178700 - DNA, 25 bp, Homo sapien
gataaggtctcgctgcatggcccag

SEQ ID NO: 178701 - DNA, 25 bp, Homo sapien
ttacttactgcagccctggtccaga

SEQ ID NO: 178702 - DNA, 25 bp, Homo sapien
gggattctgattgtagcctgtcccc

SEQ ID NO: 178703 - DNA, 25 bp, Homo sapien
agcagttgtctagaacagtgtaaac

SEQ ID NO: 178704 - DNA, 25 bp, Homo sapien
gaaggtgactcctcatgatcccact

SEQ ID NO: 178705 - DNA, 25 bp, Homo sapien
cagacagtccttcctagagggccaa

SEQ ID NO: 178706 - DNA, 25 bp, Homo sapien
ctccagaacttgagcgtgatgttca

SEQ ID NO: 178707 - DNA, 25 bp, Homo sapien
atgttcacgggtggaggtgtctgca

SEQ ID NO: 178708 - DNA, 25 bp, Homo sapien
aacttgagcgtgatgttcacgggtg

SEQ ID NO: 178709 - DNA, 25 bp, Homo sapien
tgatgttcacgggtggaggtgtctg

SEQ ID NO: 178710 - DNA, 25 bp, Homo sapien
cgacgggcctctcacgccggagccg

SEQ ID NO: 178711 - DNA, 25 bp, Homo sapien
tctcacgccggagccggcaagaaag

SEQ ID NO: 178712 - DNA, 25 bp, Homo sapien
ctctcaggaggctcggcagcgcgac

SEQ ID NO: 178713 - DNA, 25 bp, Homo sapien
cggcaagaaaggtcggcgccagccc

SEQ ID NO: 178714 - DNA, 25 bp, Homo sapien
cggcgctcagcataccaaggacttg

SEQ ID NO: 178715 - DNA, 25 bp, Homo sapien
gctcagcataccaaggacttgcacc

SEQ ID NO: 178716 - DNA, 25 bp, Homo sapien
tatcgtcattatttcagtaaaaagg

SEQ ID NO: 178717 - DNA, 25 bp, Homo sapien
ttatcgtcattatttcagtaaaaag

SEQ ID NO: 178718 - DNA, 25 bp, Homo sapien
catgtgaggaatagaatctacgtca

SEQ ID NO: 178719 - DNA, 25 bp, Homo sapien
gactggacgtgcatgtaagccagat

SEQ ID NO: 178720 - DNA, 25 bp, Homo sapien
ggaatagaatctacgtcataattaa

SEQ ID NO: 178721 - DNA, 25 bp, Homo sapien
ctatgactggacgtgcatgtaagcc

SEQ ID NO: 178722 - DNA, 25 bp, Homo sapien
ggtagaactgcaacttgaaacaggg

SEQ ID NO: 178723 - DNA, 25 bp, Homo sapien
ggagaggactcccattgcaggctcc

SEQ ID NO: 178724 - DNA, 25 bp, Homo sapien
caggagtatcattttgagacccagg

SEQ ID NO: 178725 - DNA, 25 bp, Homo sapien
tatatgtggcctagttgtgtgctca

SEQ ID NO: 178726 - DNA, 25 bp, Homo sapien
gcagaagtcgtccaatccacatgag

SEQ ID NO: 178727 - DNA, 25 bp, Homo sapien
cagcaaattgtcatcccaggagaag

SEQ ID NO: 178728 - DNA, 25 bp, Homo sapien
gacagtaactcgtgaggcggctgct

SEQ ID NO: 178729 - DNA, 25 bp, Homo sapien
tgccgaggacccacgtatgtgctca

SEQ ID NO: 178730 - DNA, 25 bp, Homo sapien
ctaaattcgggcatgacttgaggac

SEQ ID NO: 178731 - DNA, 25 bp, Homo sapien
gatatttgcgcggtcatacagggcg

SEQ ID NO: 178732 - DNA, 25 bp, Homo sapien
cagaaggcgctctggtaacgatgca

SEQ ID NO: 178733 - DNA, 25 bp, Homo sapien
taacgatgcagagaaccgtgcagcc

SEQ ID NO: 178734 - DNA, 25 bp, Homo sapien
ggttcttcagcgtgcggcgcctctg

SEQ ID NO: 178735 - DNA, 25 bp, Homo sapien
gtttagctcccgcacagacatcgag

SEQ ID NO: 178736 - DNA, 25 bp, Homo sapien
gagccttgtagagatcgcgctcccg

SEQ ID NO: 178737 - DNA, 25 bp, Homo sapien
ttagccggtcacagcgagccttgta

SEQ ID NO: 178738 - DNA, 25 bp, Homo sapien
cttccacgcagtctgtttcggtcca

SEQ ID NO: 178739 - DNA, 25 bp, Homo sapien
cacgcagtctgtttcggtccagagc

SEQ ID NO: 178740 - DNA, 25 bp, Homo sapien
cggaaggctcgcccttccacgcagt

SEQ ID NO: 178741 - DNA, 25 bp, Homo sapien
cagtctgtttcggtccagagcccgc

SEQ ID NO: 178742 - DNA, 25 bp, Homo sapien
cccgggtgtgtccagtggacccgca

SEQ ID NO: 178743 - DNA, 25 bp, Homo sapien
cgttgctccagtcaggcgggcgccc

SEQ ID NO: 178744 - DNA, 25 bp, Homo sapien
cctccaacgcgctgcgtttccctgt

SEQ ID NO: 178745 - DNA, 25 bp, Homo sapien
tcgtctctgggatccccggcatcca

SEQ ID NO: 178746 - DNA, 25 bp, Homo sapien
cactgagctgtaaggtgtggagccc

SEQ ID NO: 178747 - DNA, 25 bp, Homo sapien
tcttcaggactcagccccaatgcct

SEQ ID NO: 178748 - DNA, 25 bp, Homo sapien
ggcctggccgggtgccctcggttgc

SEQ ID NO: 178749 - DNA, 25 bp, Homo sapien
tgggtagtagccatggggcccatca

SEQ ID NO: 178750 - DNA, 25 bp, Homo sapien
gccagggggctggggggcagggcca

SEQ ID NO: 178751 - DNA, 25 bp, Homo sapien
ccagggggctggggggcagggccat

SEQ ID NO: 178752 - DNA, 25 bp, Homo sapien
ctggagctgggctgggaggagtgca

SEQ ID NO: 178753 - DNA, 25 bp, Homo sapien
ccaaccaataaggtaaggagatcat

SEQ ID NO: 178754 - DNA, 25 bp, Homo sapien
ccaataaggtaaggagatcatttgc

SEQ ID NO: 178755 - DNA, 25 bp, Homo sapien
aaggtaaggagatcatttgcatatc

SEQ ID NO: 178756 - DNA, 25 bp, Homo sapien
caggagactgaaggctccatggagc

SEQ ID NO: 178757 - DNA, 25 bp, Homo sapien
gtgtgtgtctctgcccctctctcct

SEQ ID NO: 178758 - DNA, 25 bp, Homo sapien
ctctctcctctctcactcattctag

SEQ ID NO: 178759 - DNA, 25 bp, Homo sapien
tgtgtgtgtctctgcccctctctcc

SEQ ID NO: 178760 - DNA, 25 bp, Homo sapien
tctcctctctcactcattctagttc

SEQ ID NO: 178761 - DNA, 25 bp, Homo sapien
caaatgactctttaagcccgtgtcc

SEQ ID NO: 178762 - DNA, 25 bp, Homo sapien
cttagggtgaccgagcaaatgactc

SEQ ID NO: 178763 - DNA, 25 bp, Homo sapien
catcttggaggtcaagtgcggcatt

SEQ ID NO: 178764 - DNA, 25 bp, Homo sapien
gaagtgccttagaagctatcacctg

SEQ ID NO: 178765 - DNA, 25 bp, Homo sapien
gagcagacacccatcatagatatgc

SEQ ID NO: 178766 - DNA, 25 bp, Homo sapien
tatgctgagtttgaggtgctatata

SEQ ID NO: 178767 - DNA, 25 bp, Homo sapien
gatatccagtggtctcaggttggag

SEQ ID NO: 178768 - DNA, 25 bp, Homo sapien
caatggaggtatagcttgagaaatc

SEQ ID NO: 178769 - DNA, 25 bp, Homo sapien
ccaggctcgtcctgtttgtctgcct

SEQ ID NO: 178770 - DNA, 25 bp, Homo sapien
gcctgtcctcttagtctcctattta

SEQ ID NO: 178771 - DNA, 25 bp, Homo sapien
tagtctcctatttattctctgaggc

SEQ ID NO: 178772 - DNA, 25 bp, Homo sapien
ccccaggctcgtcctgtttgtctgc

SEQ ID NO: 178773 - DNA, 25 bp, Homo sapien
ggcaagcatgcgtattatgacccga

SEQ ID NO: 178774 - DNA, 25 bp, Homo sapien
ccctgacaggacaaggtaagcacct

SEQ ID NO: 178775 - DNA, 25 bp, Homo sapien
gattgtaactccttctcagcgggac

SEQ ID NO: 178776 - DNA, 25 bp, Homo sapien
cataaggccaacagaagacctggag

SEQ ID NO: 178777 - DNA, 25 bp, Homo sapien
gatctcagcggcctcagagctatag

SEQ ID NO: 178778 - DNA, 25 bp, Homo sapien
aggaggttcgtgacattcggagcta

SEQ ID NO: 178779 - DNA, 25 bp, Homo sapien
tgctagactggatctgccggcggtt

SEQ ID NO: 178780 - DNA, 25 bp, Homo sapien
gagctatagacaccactcagctgtt

SEQ ID NO: 178781 - DNA, 25 bp, Homo sapien
tgcccagctcacttgtgcgttaagc

SEQ ID NO: 178782 - DNA, 25 bp, Homo sapien
caactaccggaagaggcataggtgt

SEQ ID NO: 178783 - DNA, 25 bp, Homo sapien
ttcttcagcagatcaactaccggaa

SEQ ID NO: 178784 - DNA, 25 bp, Homo sapien
taaaaaatgattccgtcctgagact

SEQ ID NO: 178785 - DNA, 25 bp, Homo sapien
tatcaatcatcgtgctccgctgtcc

SEQ ID NO: 178786 - DNA, 25 bp, Homo sapien
cagtggcggcagtcggtgtaaacaa

SEQ ID NO: 178787 - DNA, 25 bp, Homo sapien
tccgctgtccagttggctggccaag

SEQ ID NO: 178788 - DNA, 25 bp, Homo sapien
ccgtcgtgtgacgtttgcagcccgc

SEQ ID NO: 178789 - DNA, 25 bp, Homo sapien
tggcatctacagcaaagatggtcaa

SEQ ID NO: 178790 - DNA, 25 bp, Homo sapien
cactgatagctactctcagaaggct

SEQ ID NO: 178791 - DNA, 25 bp, Homo sapien
tgcccaatgatctgggcttcactga

SEQ ID NO: 178792 - DNA, 25 bp, Homo sapien
caaatattcatgtctgcttgccaag

SEQ ID NO: 178793 - DNA, 25 bp, Homo sapien
gactgccgatatggccgtttccgta

SEQ ID NO: 178794 - DNA, 25 bp, Homo sapien
taaattcaagagcatcaaggcccgc

SEQ ID NO: 178795 - DNA, 25 bp, Homo sapien
gacaatccgactctatgactgccga

SEQ ID NO: 178796 - DNA, 25 bp, Homo sapien
atgtggccttcacccctgatgggaa

SEQ ID NO: 178797 - DNA, 25 bp, Homo sapien
gcaatatctatggtgagggagatac

SEQ ID NO: 178798 - DNA, 25 bp, Homo sapien
tcctcagatggacgagaagtactag

SEQ ID NO: 178799 - DNA, 25 bp, Homo sapien
gccagatgagcgtcgctttgctgtc

SEQ ID NO: 178800 - DNA, 25 bp, Homo sapien
tcagatggacgagaagtactaggag

SEQ ID NO: 178801 - DNA, 25 bp, Homo sapien
tgtctcctcagatggacgagaagta

SEQ ID NO: 178802 - DNA, 25 bp, Homo sapien
tgtctttgaccgagaacagaaccgg

SEQ ID NO: 178803 - DNA, 25 bp, Homo sapien
gtatgtctttgaccgagaacagaac

SEQ ID NO: 178804 - DNA, 25 bp, Homo sapien
ctttgaccgagaacagaaccggcgc

SEQ ID NO: 178805 - DNA, 25 bp, Homo sapien
ctgtatgtctttgaccgagaacaga

SEQ ID NO: 178806 - DNA, 25 bp, Homo sapien
tctgcaaagtgtgggatcgacgcac

SEQ ID NO: 178807 - DNA, 25 bp, Homo sapien
cagtggcctttgctgatataagctc

SEQ ID NO: 178808 - DNA, 25 bp, Homo sapien
ggcctttgctgatataagctcccaa

SEQ ID NO: 178809 - DNA, 25 bp, Homo sapien
tgcgggaggatgaccccaagcctgt

SEQ ID NO: 178810 - DNA, 25 bp, Homo sapien
gaaggcatggaagcttcacgccagg

SEQ ID NO: 178811 - DNA, 25 bp, Homo sapien
tctgctcaactagagaacgggaact

SEQ ID NO: 178812 - DNA, 25 bp, Homo sapien
tgacaggcgccgacatttgcaagct

SEQ ID NO: 178813 - DNA, 25 bp, Homo sapien
gatatccgacgcttttccagccggg

SEQ ID NO: 178814 - DNA, 25 bp, Homo sapien
caaagcagatttcctaacctagggt

SEQ ID NO: 178815 - DNA, 25 bp, Homo sapien
tcaggactggtggtacgaaacaatc

SEQ ID NO: 178816 - DNA, 25 bp, Homo sapien
ggcatttgtctctgggcatcgaacc

SEQ ID NO: 178817 - DNA, 25 bp, Homo sapien
gagccaccacttgaagattggaaag

SEQ ID NO: 178818 - DNA, 25 bp, Homo sapien
tctgttgagatttttccctcacctt

SEQ ID NO: 178819 - DNA, 25 bp, Homo sapien
tcagcccaagtctctttattggaac

SEQ ID NO: 178820 - DNA, 25 bp, Homo sapien
agcccaagtctctttattggaaccg

SEQ ID NO: 178821 - DNA, 25 bp, Homo sapien
cagcccaagtctctttattggaacc

SEQ ID NO: 178822 - DNA, 25 bp, Homo sapien
caggcatttccatttccattagtgg

SEQ ID NO: 178823 - DNA, 25 bp, Homo sapien
tcaggcatttccatttccattagtg

SEQ ID NO: 178824 - DNA, 25 bp, Homo sapien
aggcatttccatttccattagtggg

SEQ ID NO: 178825 - DNA, 25 bp, Homo sapien
ccggatgtcatcaaggtggcagtca

SEQ ID NO: 178826 - DNA, 25 bp, Homo sapien
tggcagtcaaagtccacaaggtgct

SEQ ID NO: 178827 - DNA, 25 bp, Homo sapien
tgagccgctggttggtccagtcctg

SEQ ID NO: 178828 - DNA, 25 bp, Homo sapien
ggtgggcccgatcttccagtagagc

SEQ ID NO: 178829 - DNA, 25 bp, Homo sapien
ctgaaatagtaacccccatggaggt

SEQ ID NO: 178830 - DNA, 25 bp, Homo sapien
gcaagtagtgggtccagacacagac

SEQ ID NO: 178831 - DNA, 25 bp, Homo sapien
cacagacttaacagagattgggtct

SEQ ID NO: 178832 - DNA, 25 bp, Homo sapien
taacccccatggaggtcaaacagca

SEQ ID NO: 178833 - DNA, 25 bp, Homo sapien
ttggttctccaggacgatgaccggg

SEQ ID NO: 178834 - DNA, 25 bp, Homo sapien
tgaccgggggcacacgaggctgagg

SEQ ID NO: 178835 - DNA, 25 bp, Homo sapien
tatccttagggacccagcggagacc

SEQ ID NO: 178836 - DNA, 25 bp, Homo sapien
ccagcggagaccttggttctccagg

SEQ ID NO: 178837 - DNA, 25 bp, Homo sapien
agatgggcaagtgagagtttcaagg

SEQ ID NO: 178838 - DNA, 25 bp, Homo sapien
gatgggcaagtgagagtttcaaggg

SEQ ID NO: 178839 - DNA, 25 bp, Homo sapien
aaagatgggcaagtgagagtttcaa

SEQ ID NO: 178840 - DNA, 25 bp, Homo sapien
aagatgggcaagtgagagtttcaag

SEQ ID NO: 178841 - DNA, 25 bp, Homo sapien
tgcaattcgcccagcaattttcaag

SEQ ID NO: 178842 - DNA, 25 bp, Homo sapien
ggaagaattctgcaattcgcccagc

SEQ ID NO: 178843 - DNA, 25 bp, Homo sapien
aattcgcccagcaattttcaaggcc

SEQ ID NO: 178844 - DNA, 25 bp, Homo sapien
aattctgcaattcgcccagcaattt

SEQ ID NO: 178845 - DNA, 25 bp, Homo sapien
gaagatcagaggagtgaggagccaa

SEQ ID NO: 178846 - DNA, 25 bp, Homo sapien
cccaggtctcataggtgtgggcgca

SEQ ID NO: 178847 - DNA, 25 bp, Homo sapien
tgctggatgcttgatgcacgactgc

SEQ ID NO: 178848 - DNA, 25 bp, Homo sapien
gtgaggagccaactgtgggcaaaac

SEQ ID NO: 178849 - DNA, 25 bp, Homo sapien
gtgggagacaggtgctcagatattg

SEQ ID NO: 178850 - DNA, 25 bp, Homo sapien
ctgtgggagacaggtgctcagatat

SEQ ID NO: 178851 - DNA, 25 bp, Homo sapien
tgtgggagacaggtgctcagatatt

SEQ ID NO: 178852 - DNA, 25 bp, Homo sapien
tctgatcgttcacagctgcattggc

SEQ ID NO: 178853 - DNA, 25 bp, Homo sapien
gctgcattggcatggtagtaaccag

SEQ ID NO: 178854 - DNA, 25 bp, Homo sapien
tgatcgttcacagctgcattggcat

SEQ ID NO: 178855 - DNA, 25 bp, Homo sapien
tggtagtaaccagccaccaccagac

SEQ ID NO: 178856 - DNA, 25 bp, Homo sapien
tgggggatgggcatccaacggaggc

SEQ ID NO: 178857 - DNA, 25 bp, Homo sapien
agggaccggggatgaacttgggctg

SEQ ID NO: 178858 - DNA, 25 bp, Homo sapien
tgctgccaagggaccggggatgaac

SEQ ID NO: 178859 - DNA, 25 bp, Homo sapien
ggggatgggcatccaacggaggcac

SEQ ID NO: 178860 - DNA, 25 bp, Homo sapien
tcacgtaggccagggccgagatctc

SEQ ID NO: 178861 - DNA, 25 bp, Homo sapien
cacacagtcggtgaggcacaggcat

SEQ ID NO: 178862 - DNA, 25 bp, Homo sapien
gctggcgccaaaaacagcccgttga

SEQ ID NO: 178863 - DNA, 25 bp, Homo sapien
tggttgagggcgacctccaacatga

SEQ ID NO: 178864 - DNA, 25 bp, Homo sapien
cgggaagcagcaagccggattagta

SEQ ID NO: 178865 - DNA, 25 bp, Homo sapien
ctggacgggaagcagcaagccggat

SEQ ID NO: 178866 - DNA, 25 bp, Homo sapien
gggaagcagcaagccggattagtac

SEQ ID NO: 178867 - DNA, 25 bp, Homo sapien
gacgggaagcagcaagccggattag

SEQ ID NO: 178868 - DNA, 25 bp, Homo sapien
tgcctagctcgcgtccgtgaagctc

SEQ ID NO: 178869 - DNA, 25 bp, Homo sapien
ttaggcgagccggtgcctagctcgc

SEQ ID NO: 178870 - DNA, 25 bp, Homo sapien
gtgaagctccctccagcgcttcggc

SEQ ID NO: 178871 - DNA, 25 bp, Homo sapien
gcttcggcacgctctttgacccttc

SEQ ID NO: 178872 - DNA, 25 bp, Homo sapien
gctaactcgactcgcaggtagcccg

SEQ ID NO: 178873 - DNA, 25 bp, Homo sapien
aggaggtcccgattgcatccgagcc

SEQ ID NO: 178874 - DNA, 25 bp, Homo sapien
tccaggaggaggtcccgattgcatc

SEQ ID NO: 178875 - DNA, 25 bp, Homo sapien
ttcggttcggcgacaacgctaactc

SEQ ID NO: 178876 - DNA, 25 bp, Homo sapien
ggctctgtactctagatcggctctg

SEQ ID NO: 178877 - DNA, 25 bp, Homo sapien
gcagaccgccttgcgcctattatgg

SEQ ID NO: 178878 - DNA, 25 bp, Homo sapien
ggatggatcgctatcccgtagccgg

SEQ ID NO: 178879 - DNA, 25 bp, Homo sapien
tgtgaagcacagaaaattgcccgca

SEQ ID NO: 178880 - DNA, 25 bp, Homo sapien
ggcttccagccagtctagtgcttcg

SEQ ID NO: 178881 - DNA, 25 bp, Homo sapien
tgttgccttcgcgactgcaggtttt

SEQ ID NO: 178882 - DNA, 25 bp, Homo sapien
ccttcgcgactgcaggttttcttgc

SEQ ID NO: 178883 - DNA, 25 bp, Homo sapien
gcttcgcagcacattcttatctcat

SEQ ID NO: 178884 - DNA, 25 bp, Homo sapien
ctgaattaaagaacaatcccatgga

SEQ ID NO: 178885 - DNA, 25 bp, Homo sapien
tgaattaaagaacaatcccatggag

SEQ ID NO: 178886 - DNA, 25 bp, Homo sapien
gaattaaagaacaatcccatggagt

SEQ ID NO: 178887 - DNA, 25 bp, Homo sapien
atagatcatttattttccttctagt

SEQ ID NO: 178888 - DNA, 25 bp, Homo sapien
catatagatcatttattttccttct

SEQ ID NO: 178889 - DNA, 25 bp, Homo sapien
agatcatttattttccttctagtcc

SEQ ID NO: 178890 - DNA, 25 bp, Homo sapien
atcatttattttccttctagtcccg

SEQ ID NO: 178891 - DNA, 25 bp, Homo sapien
gctgctgatgatatgataaagctca

SEQ ID NO: 178892 - DNA, 25 bp, Homo sapien
aggttgctgctgatgatatgataaa

SEQ ID NO: 178893 - DNA, 25 bp, Homo sapien
gggttgacaattttctccaggttgc

SEQ ID NO: 178894 - DNA, 25 bp, Homo sapien
cctttgggttgacaattttctccag

SEQ ID NO: 178895 - DNA, 25 bp, Homo sapien
aaggccagagtgcaagagtcaggtt

SEQ ID NO: 178896 - DNA, 25 bp, Homo sapien
aggttcttagccaatcccctgcctg

SEQ ID NO: 178897 - DNA, 25 bp, Homo sapien
catccacctcccctaaagccttact

SEQ ID NO: 178898 - DNA, 25 bp, Homo sapien
gcaagagtcaggttcttagccaatc

SEQ ID NO: 178899 - DNA, 25 bp, Homo sapien
gctcatgcaccaaggcccggtaatc

SEQ ID NO: 178900 - DNA, 25 bp, Homo sapien
aaggccctcaggtccagcaccatgg

SEQ ID NO: 178901 - DNA, 25 bp, Homo sapien
cataggctgcctcatctcgctcatg

SEQ ID NO: 178902 - DNA, 25 bp, Homo sapien
atggccctgagctccccataggctg

SEQ ID NO: 178903 - DNA, 25 bp, Homo sapien
gaatgaaccccttcttagcaccaag

SEQ ID NO: 178904 - DNA, 25 bp, Homo sapien
gctaaaaggctggtggactatccac

SEQ ID NO: 178905 - DNA, 25 bp, Homo sapien
gcaccaagaaataggatcccaaagg

SEQ ID NO: 178906 - DNA, 25 bp, Homo sapien
aaagctgagtcagtcccatgggagg

SEQ ID NO: 178907 - DNA, 25 bp, Homo sapien
ggccacagcatccccacgttctgag

SEQ ID NO: 178908 - DNA, 25 bp, Homo sapien
cacagcatccccacgttctgagaag

SEQ ID NO: 178909 - DNA, 25 bp, Homo sapien
agcatccccacgttctgagaagtac

SEQ ID NO: 178910 - DNA, 25 bp, Homo sapien
ttggccacagcatccccacgttctg

SEQ ID NO: 178911 - DNA, 25 bp, Homo sapien
tctcccatcatcctgatagggctgc

SEQ ID NO: 178912 - DNA, 25 bp, Homo sapien
ctgccagaagcaagggaataccaca

SEQ ID NO: 178913 - DNA, 25 bp, Homo sapien
gggagatgtactccctcagaccctt

SEQ ID NO: 178914 - DNA, 25 bp, Homo sapien
taccacaggaatgagtgttcaggga

SEQ ID NO: 178915 - DNA, 25 bp, Homo sapien
aatggttgtctggaaagcttccact

SEQ ID NO: 178916 - DNA, 25 bp, Homo sapien
gaaatggttgtctggaaagcttcca

SEQ ID NO: 178917 - DNA, 25 bp, Homo sapien
tggttgtctggaaagcttccacttt

SEQ ID NO: 178918 - DNA, 25 bp, Homo sapien
ttggaaatggttgtctggaaagctt

SEQ ID NO: 178919 - DNA, 25 bp, Homo sapien
ggattgctaccccaaaatcatttcc

SEQ ID NO: 178920 - DNA, 25 bp, Homo sapien
ccatcttcaatcttggggatcaggt

SEQ ID NO: 178921 - DNA, 25 bp, Homo sapien
gggatcaggtgttggatccatgtaa

SEQ ID NO: 178922 - DNA, 25 bp, Homo sapien
atcaggtgttggatccatgtaatca

SEQ ID NO: 178923 - DNA, 25 bp, Homo sapien
tacagcagtaggttctgaggttaca

SEQ ID NO: 178924 - DNA, 25 bp, Homo sapien
ccagctaggtaactgatagaatcac

SEQ ID NO: 178925 - DNA, 25 bp, Homo sapien
tatgaaggacttgtatctacggagg

SEQ ID NO: 178926 - DNA, 25 bp, Homo sapien
gaacctaagcagtctctctctaggg

SEQ ID NO: 178927 - DNA, 25 bp, Homo sapien
tttctgcttcccccatttcccaggc

SEQ ID NO: 178928 - DNA, 25 bp, Homo sapien
ctctttctgcttcccccatttccca

SEQ ID NO: 178929 - DNA, 25 bp, Homo sapien
tctctttctgcttcccccatttccc

SEQ ID NO: 178930 - DNA, 25 bp, Homo sapien
ctgcttcccccatttcccaggctta

SEQ ID NO: 178931 - DNA, 25 bp, Homo sapien
gggcaagcagggacaggactttctc

SEQ ID NO: 178932 - DNA, 25 bp, Homo sapien
ccagacttctggcttaaccagggca

SEQ ID NO: 178933 - DNA, 25 bp, Homo sapien
tcccagggagaaatccacacttatg

SEQ ID NO: 178934 - DNA, 25 bp, Homo sapien
ccagggcaagcagggacaggacttt

SEQ ID NO: 178935 - DNA, 25 bp, Homo sapien
ccccttccctagtcacctcttatct

SEQ ID NO: 178936 - DNA, 25 bp, Homo sapien
tttctcatccagtagtcagtgtgcc

SEQ ID NO: 178937 - DNA, 25 bp, Homo sapien
agtagtcagtgtgccatcacccctt

SEQ ID NO: 178938 - DNA, 25 bp, Homo sapien
cctagtcacctcttatctctcttac

SEQ ID NO: 178939 - DNA, 25 bp, Homo sapien
ttcttctcctgcttatctgtttcca

SEQ ID NO: 178940 - DNA, 25 bp, Homo sapien
cttctttcttctcctgcttatctgt

SEQ ID NO: 178941 - DNA, 25 bp, Homo sapien
tcttctcctgcttatctgtttccat

SEQ ID NO: 178942 - DNA, 25 bp, Homo sapien
ctttcttctcctgcttatctgtttc

SEQ ID NO: 178943 - DNA, 25 bp, Homo sapien
agggctatcttctccattgggttta

SEQ ID NO: 178944 - DNA, 25 bp, Homo sapien
aaaagtcacagaggttgaagggcta

SEQ ID NO: 178945 - DNA, 25 bp, Homo sapien
gaaagtagctttagaaaagtcacag

SEQ ID NO: 178946 - DNA, 25 bp, Homo sapien
ccattgggtttatagtccaagtcct

SEQ ID NO: 178947 - DNA, 25 bp, Homo sapien
gaagtcaagtcagccacattgaggg

SEQ ID NO: 178948 - DNA, 25 bp, Homo sapien
agtcagccacattgagggagtcctc

SEQ ID NO: 178949 - DNA, 25 bp, Homo sapien
gcccggagggaagtcaagtcagcca

SEQ ID NO: 178950 - DNA, 25 bp, Homo sapien
gtcaagtcagccacattgagggagt

SEQ ID NO: 178951 - DNA, 25 bp, Homo sapien
tcacgccatcctaatgttcctaatc

SEQ ID NO: 178952 - DNA, 25 bp, Homo sapien
actgtcaagggctgcccaacctctt

SEQ ID NO: 178953 - DNA, 25 bp, Homo sapien
gaatccagttgttagctagagaggg

SEQ ID NO: 178954 - DNA, 25 bp, Homo sapien
tcttcccttcatcctaggtcacagc

SEQ ID NO: 178955 - DNA, 25 bp, Homo sapien
gagctgattcaggtatatgattttc

SEQ ID NO: 178956 - DNA, 25 bp, Homo sapien
ttcaggtatatgattttctgtggca

SEQ ID NO: 178957 - DNA, 25 bp, Homo sapien
ggtatatgattttctgtggcaagaa

SEQ ID NO: 178958 - DNA, 25 bp, Homo sapien
gcaagagctgattcaggtatatgat

SEQ ID NO: 178959 - DNA, 25 bp, Homo sapien
agatgtctgacaaatggaactggaa

SEQ ID NO: 178960 - DNA, 25 bp, Homo sapien
ctgtgggttacattgcaagggaggg

SEQ ID NO: 178961 - DNA, 25 bp, Homo sapien
ggcctttggaaatcactgggtccaa

SEQ ID NO: 178962 - DNA, 25 bp, Homo sapien
ctgggtccaagacttgcaaatgagg

SEQ ID NO: 178963 - DNA, 25 bp, Homo sapien
taaaggtagctatcaataattccgg

SEQ ID NO: 178964 - DNA, 25 bp, Homo sapien
ccagaagtcgggagagtcataagaa

SEQ ID NO: 178965 - DNA, 25 bp, Homo sapien
tctgggtcaaatcgctcaaatccag

SEQ ID NO: 178966 - DNA, 25 bp, Homo sapien
tccacatcaaaagacgggagaagtg

SEQ ID NO: 178967 - DNA, 25 bp, Homo sapien
gaaaagattctgtctgaagacctcc

SEQ ID NO: 178968 - DNA, 25 bp, Homo sapien
aaagattctgtctgaagacctccac

SEQ ID NO: 178969 - DNA, 25 bp, Homo sapien
ctcctggaaaagattctgtctgaag

SEQ ID NO: 178970 - DNA, 25 bp, Homo sapien
ctggaaaagattctgtctgaagacc

SEQ ID NO: 178971 - DNA, 25 bp, Homo sapien
tcaaaagcttccacccacaacaggg

SEQ ID NO: 178972 - DNA, 25 bp, Homo sapien
agcagtacccggatgttggttaagg

SEQ ID NO: 178973 - DNA, 25 bp, Homo sapien
ggtctgggttgtcaaaagcttccac

SEQ ID NO: 178974 - DNA, 25 bp, Homo sapien
ctacacagagagcagtacccggatg

SEQ ID NO: 178975 - DNA, 25 bp, Homo sapien
ctgtttgcgggcttccccgctcagg

SEQ ID NO: 178976 - DNA, 25 bp, Homo sapien
tgccttcaggacagaccggagatgg

SEQ ID NO: 178977 - DNA, 25 bp, Homo sapien
tcccagccagttgccactaggagag

SEQ ID NO: 178978 - DNA, 25 bp, Homo sapien
tggagaaggactagcagctcttaga

SEQ ID NO: 178979 - DNA, 25 bp, Homo sapien
ttgagctgaataggataaccccgcg

SEQ ID NO: 178980 - DNA, 25 bp, Homo sapien
gagcctggctggatcgtcatggcaa

SEQ ID NO: 178981 - DNA, 25 bp, Homo sapien
tcttctcggctctgcagtactcggg

SEQ ID NO: 178982 - DNA, 25 bp, Homo sapien
gcctgtccagaggagatcttctcgg

SEQ ID NO: 178983 - DNA, 25 bp, Homo sapien
agtggttgcgctcagaactgcccta

SEQ ID NO: 178984 - DNA, 25 bp, Homo sapien
aacttagctgggcctagcggtgcat

SEQ ID NO: 178985 - DNA, 25 bp, Homo sapien
agccatactccacagaatcttatca

SEQ ID NO: 178986 - DNA, 25 bp, Homo sapien
catactccacagaatcttatcacag

SEQ ID NO: 178987 - DNA, 25 bp, Homo sapien
tactccacagaatcttatcacagtg

SEQ ID NO: 178988 - DNA, 25 bp, Homo sapien
ctccacagaatcttatcacagtgaa

SEQ ID NO: 178989 - DNA, 25 bp, Homo sapien
taatcgtgtcctgaaaatcctcgca

SEQ ID NO: 178990 - DNA, 25 bp, Homo sapien
tctgtaagggactaggaaattccaa

SEQ ID NO: 178991 - DNA, 25 bp, Homo sapien
aggcctttgcccgatacttgctgga

SEQ ID NO: 178992 - DNA, 25 bp, Homo sapien
gcagccattctgtccctggtgtaga

SEQ ID NO: 178993 - DNA, 25 bp, Homo sapien
tctcaagtttgacgcatcacgtggc

SEQ ID NO: 178994 - DNA, 25 bp, Homo sapien
gaattccgactcagatccgaacggg

SEQ ID NO: 178995 - DNA, 25 bp, Homo sapien
ttaacttggctttctaggtgcaccc

SEQ ID NO: 178996 - DNA, 25 bp, Homo sapien
cagccggttggtgaagcgcgaatac

SEQ ID NO: 178997 - DNA, 25 bp, Homo sapien
tcctttcgatatccctcaggtaggg

SEQ ID NO: 178998 - DNA, 25 bp, Homo sapien
tggccatgatggagaccctagaaga

SEQ ID NO: 178999 - DNA, 25 bp, Homo sapien
tccgaatagatatggagactgagct

SEQ ID NO: 179000 - DNA, 25 bp, Homo sapien
tgatggaacacctgctagcttggcc

SEQ ID NO: 179001 - DNA, 25 bp, Homo sapien
gggtctgattagaatccaggttacc

SEQ ID NO: 179002 - DNA, 25 bp, Homo sapien
gttaagcagtgtacccagggtcagg

SEQ ID NO: 179003 - DNA, 25 bp, Homo sapien
ggctcacagtggttaagcagtgtac

SEQ ID NO: 179004 - DNA, 25 bp, Homo sapien
tcaggatgccagagattagcctggg

SEQ ID NO: 179005 - DNA, 25 bp, Homo sapien
gggtcttagttctacttctcccatc

SEQ ID NO: 179006 - DNA, 25 bp, Homo sapien
gagcccagtgttccccttatggtgt

SEQ ID NO: 179007 - DNA, 25 bp, Homo sapien
taggtaagcacctagagaagaggcg

SEQ ID NO: 179008 - DNA, 25 bp, Homo sapien
agaagaggcgcagtgggaccacacc

SEQ ID NO: 179009 - DNA, 25 bp, Homo sapien
tgccaggaaaccggccacttctagt

SEQ ID NO: 179010 - DNA, 25 bp, Homo sapien
taaaccacgtcgtgcctcactgggt

SEQ ID NO: 179011 - DNA, 25 bp, Homo sapien
agccggggcccagattccactgagg

SEQ ID NO: 179012 - DNA, 25 bp, Homo sapien
cctgcttacctcatttctgaatgtg

SEQ ID NO: 179013 - DNA, 25 bp, Homo sapien
gcctgggcaggctctattctctctg

SEQ ID NO: 179014 - DNA, 25 bp, Homo sapien
tccaaatgggtatgagtctcagaat

SEQ ID NO: 179015 - DNA, 25 bp, Homo sapien
tttggtaaggcagaactgaactggg

SEQ ID NO: 179016 - DNA, 25 bp, Homo sapien
catgactcatttgtaacagatccag

SEQ ID NO: 179017 - DNA, 25 bp, Homo sapien
tgagcccagagctgcttgaaagctg

SEQ ID NO: 179018 - DNA, 25 bp, Homo sapien
aaagctgtcggtgtgctgtttggcc

SEQ ID NO: 179019 - DNA, 25 bp, Homo sapien
ctgtttggccaggaacgtcaggagc

SEQ ID NO: 179020 - DNA, 25 bp, Homo sapien
agcagcaacagtgcggccttggtgt

SEQ ID NO: 179021 - DNA, 25 bp, Homo sapien
cagaagctcgggagccacatctata

SEQ ID NO: 179022 - DNA, 25 bp, Homo sapien
ggtgggatcttgttgtcagccagaa

SEQ ID NO: 179023 - DNA, 25 bp, Homo sapien
ctggtgggatcttgttgtcagccag

SEQ ID NO: 179024 - DNA, 25 bp, Homo sapien
gaatgaggctgcagatacgcagaag

SEQ ID NO: 179025 - DNA, 25 bp, Homo sapien
agctgaagaggcgcccaatggtgac

SEQ ID NO: 179026 - DNA, 25 bp, Homo sapien
tgaagaggcgcccaatggtgaccca

SEQ ID NO: 179027 - DNA, 25 bp, Homo sapien
agaggcgcccaatggtgacccactc

SEQ ID NO: 179028 - DNA, 25 bp, Homo sapien
aagctgaagaggcgcccaatggtga

SEQ ID NO: 179029 - DNA, 25 bp, Homo sapien
gatcatgtcgctcccgcgccaggag

SEQ ID NO: 179030 - DNA, 25 bp, Homo sapien
gcgggcaagtgccccacagatgttg

SEQ ID NO: 179031 - DNA, 25 bp, Homo sapien
tttcctggtgggactggccatcaac

SEQ ID NO: 179032 - DNA, 25 bp, Homo sapien
tgttgtcacggacacgatcatgtcg

SEQ ID NO: 179033 - DNA, 25 bp, Homo sapien
ccctcccgtcctgcgagccaaggat

SEQ ID NO: 179034 - DNA, 25 bp, Homo sapien
tccctcccgtcctgcgagccaagga

SEQ ID NO: 179035 - DNA, 25 bp, Homo sapien
agtccctcccgtcctgcgagccaag

SEQ ID NO: 179036 - DNA, 25 bp, Homo sapien
ctcccgtcctgcgagccaaggatac

SEQ ID NO: 179037 - DNA, 25 bp, Homo sapien
cacgcccatcccgaagatggcattg

SEQ ID NO: 179038 - DNA, 25 bp, Homo sapien
gcccatcccgaagatggcattgctt

SEQ ID NO: 179039 - DNA, 25 bp, Homo sapien
tcccgaagatggcattgcttcgcac

SEQ ID NO: 179040 - DNA, 25 bp, Homo sapien
tgccagcacgcccatcccgaagatg

SEQ ID NO: 179041 - DNA, 25 bp, Homo sapien
ggccctgaatagtctctgccaaggt

SEQ ID NO: 179042 - DNA, 25 bp, Homo sapien
tgccaaggtccccactgcaaaggac

SEQ ID NO: 179043 - DNA, 25 bp, Homo sapien
gccgagacacaaactgggctgaggc

SEQ ID NO: 179044 - DNA, 25 bp, Homo sapien
gcacagggagcagccgagacacaaa

SEQ ID NO: 179045 - DNA, 25 bp, Homo sapien
taatggcaggaaaccggcaaagaat

SEQ ID NO: 179046 - DNA, 25 bp, Homo sapien
tgtcttgcacaccaataatggcagg

SEQ ID NO: 179047 - DNA, 25 bp, Homo sapien
ctccagcaacatggcgtcgtattca

SEQ ID NO: 179048 - DNA, 25 bp, Homo sapien
ccagcgtgctccagcaacatggcgt

SEQ ID NO: 179049 - DNA, 25 bp, Homo sapien
ctcctcctcgtcagtatcctgacag

SEQ ID NO: 179050 - DNA, 25 bp, Homo sapien
ctcctcgtcagtatcctgacaggct

SEQ ID NO: 179051 - DNA, 25 bp, Homo sapien
tcctcgtcagtatcctgacaggctg

SEQ ID NO: 179052 - DNA, 25 bp, Homo sapien
tcctcctcgtcagtatcctgacagg

SEQ ID NO: 179053 - DNA, 25 bp, Homo sapien
tagctcaacttagcggagctttcac

SEQ ID NO: 179054 - DNA, 25 bp, Homo sapien
gaagtagctcaacttagcggagctt

SEQ ID NO: 179055 - DNA, 25 bp, Homo sapien
ttagcggagctttcacgccccttct

SEQ ID NO: 179056 - DNA, 25 bp, Homo sapien
aacttagcggagctttcacgcccct

SEQ ID NO: 179057 - DNA, 25 bp, Homo sapien
agctgcggagcacccctgtcagggc

SEQ ID NO: 179058 - DNA, 25 bp, Homo sapien
tgtaggatggcacgactcgggccag

SEQ ID NO: 179059 - DNA, 25 bp, Homo sapien
acagccttgagcacgccacagagct

SEQ ID NO: 179060 - DNA, 25 bp, Homo sapien
ttcagtgtgagggtcccacagctgc

SEQ ID NO: 179061 - DNA, 25 bp, Homo sapien
attattggctgaagcaccagtcagg

SEQ ID NO: 179062 - DNA, 25 bp, Homo sapien
ttggctgaagcaccagtcaggccct

SEQ ID NO: 179063 - DNA, 25 bp, Homo sapien
tggggacattattggctgaagcacc

SEQ ID NO: 179064 - DNA, 25 bp, Homo sapien
ggggacattattggctgaagcacca

SEQ ID NO: 179065 - DNA, 25 bp, Homo sapien
cagtgttgggttccgaggggcagct

SEQ ID NO: 179066 - DNA, 25 bp, Homo sapien
gttgggttccgaggggcagctttga

SEQ ID NO: 179067 - DNA, 25 bp, Homo sapien
gcagctttgacaggccttgtgcagt

SEQ ID NO: 179068 - DNA, 25 bp, Homo sapien
cagcagtgttgggttccgaggggca

SEQ ID NO: 179069 - DNA, 25 bp, Homo sapien
tgccttccgcacattcaggtgaggg

SEQ ID NO: 179070 - DNA, 25 bp, Homo sapien
ggctgccttccgcacattcaggtga

SEQ ID NO: 179071 - DNA, 25 bp, Homo sapien
gcaaaactgacccagagcctcatgg

SEQ ID NO: 179072 - DNA, 25 bp, Homo sapien
gccttccgcacattcaggtgagggc

SEQ ID NO: 179073 - DNA, 25 bp, Homo sapien
ttccatgtatggaaggaaggccaca

SEQ ID NO: 179074 - DNA, 25 bp, Homo sapien
gacactttccatgtatggaaggaag

SEQ ID NO: 179075 - DNA, 25 bp, Homo sapien
ctttccatgtatggaaggaaggcca

SEQ ID NO: 179076 - DNA, 25 bp, Homo sapien
aaagacactttccatgtatggaagg

SEQ ID NO: 179077 - DNA, 25 bp, Homo sapien
tccttctcatcgaagaaggcattct

SEQ ID NO: 179078 - DNA, 25 bp, Homo sapien
ccttctcatcgaagaaggcattctc

SEQ ID NO: 179079 - DNA, 25 bp, Homo sapien
aaggagctgctcccgtcatactgag

SEQ ID NO: 179080 - DNA, 25 bp, Homo sapien
ccctcggtggaacgcagtgacagca

SEQ ID NO: 179081 - DNA, 25 bp, Homo sapien
acaatgccctcggtggaacgcagtg

SEQ ID NO: 179082 - DNA, 25 bp, Homo sapien
cgataaggctgcaaataggctgtac

SEQ ID NO: 179083 - DNA, 25 bp, Homo sapien
tcacccatcagacccgataaggctg

SEQ ID NO: 179084 - DNA, 25 bp, Homo sapien
gtcagggtcgtctacctggtcgcag

SEQ ID NO: 179085 - DNA, 25 bp, Homo sapien
tgcagcgccgcaagtcagggtcgtc

SEQ ID NO: 179086 - DNA, 25 bp, Homo sapien
cgccgcaagtcagggtcgtctacct

SEQ ID NO: 179087 - DNA, 25 bp, Homo sapien
gcaagtcagggtcgtctacctggtc

SEQ ID NO: 179088 - DNA, 25 bp, Homo sapien
gcaggtgctccatgatggcagggaa

SEQ ID NO: 179089 - DNA, 25 bp, Homo sapien
ttaacaggaattcccgcaggtgctc

SEQ ID NO: 179090 - DNA, 25 bp, Homo sapien
ggcctgttaacaggaattcccgcag

SEQ ID NO: 179091 - DNA, 25 bp, Homo sapien
caggctgaaggtcctcacggcctgt

SEQ ID NO: 179092 - DNA, 25 bp, Homo sapien
cattccataagctccggaaggtagg

SEQ ID NO: 179093 - DNA, 25 bp, Homo sapien
ccataagctccggaaggtagggctg

SEQ ID NO: 179094 - DNA, 25 bp, Homo sapien
catgcattccataagctccggaagg

SEQ ID NO: 179095 - DNA, 25 bp, Homo sapien
agcatgcattccataagctccggaa

SEQ ID NO: 179096 - DNA, 25 bp, Homo sapien
ggcatagcaggccttggctaggtgg

SEQ ID NO: 179097 - DNA, 25 bp, Homo sapien
catagcaggccttggctaggtggtg

SEQ ID NO: 179098 - DNA, 25 bp, Homo sapien
gcatagcaggccttggctaggtggt

SEQ ID NO: 179099 - DNA, 25 bp, Homo sapien
gggcatagcaggccttggctaggtg

SEQ ID NO: 179100 - DNA, 25 bp, Homo sapien
gcattacctcccttgaatagctgct

SEQ ID NO: 179101 - DNA, 25 bp, Homo sapien
gtaggcgaggagcagtggcattacc

SEQ ID NO: 179102 - DNA, 25 bp, Homo sapien
tcccttgaatagctgctgatatggg

SEQ ID NO: 179103 - DNA, 25 bp, Homo sapien
tcaagtaggcgaggagcagtggcat

SEQ ID NO: 179104 - DNA, 25 bp, Homo sapien
ctgccgggcacacacaagagtgctg

SEQ ID NO: 179105 - DNA, 25 bp, Homo sapien
gggacattcaagtggtggctcccac

SEQ ID NO: 179106 - DNA, 25 bp, Homo sapien
aaggggacattcaagtggtggctcc

SEQ ID NO: 179107 - DNA, 25 bp, Homo sapien
cgggcacacacaagagtgctgatgg

SEQ ID NO: 179108 - DNA, 25 bp, Homo sapien
gcagcattgcgtacaacttgcgagg

SEQ ID NO: 179109 - DNA, 25 bp, Homo sapien
ctggcccagggcaaacagcgcagca

SEQ ID NO: 179110 - DNA, 25 bp, Homo sapien
aggcccttgcacacaatctgcagca

SEQ ID NO: 179111 - DNA, 25 bp, Homo sapien
cttgcacacaatctgcagcagtggg

SEQ ID NO: 179112 - DNA, 25 bp, Homo sapien
tggtatgggctctcgctccgcaaag

SEQ ID NO: 179113 - DNA, 25 bp, Homo sapien
tgatgtggtcgccagctccgtcaga

SEQ ID NO: 179114 - DNA, 25 bp, Homo sapien
ctccgcaaagcctcttccaacatgg

SEQ ID NO: 179115 - DNA, 25 bp, Homo sapien
cagcaccaggagtccagctttgcgc

SEQ ID NO: 179116 - DNA, 25 bp, Homo sapien
ggcaggtgtagtgccagcatgtcca

SEQ ID NO: 179117 - DNA, 25 bp, Homo sapien
ggtgtagtgccagcatgtccacaac

SEQ ID NO: 179118 - DNA, 25 bp, Homo sapien
ctcggggggcaggtgtagtgccagc

SEQ ID NO: 179119 - DNA, 25 bp, Homo sapien
tggggacagagcttctcggggggca

SEQ ID NO: 179120 - DNA, 25 bp, Homo sapien
ttgtacagcgaaatgcttgggagtc

SEQ ID NO: 179121 - DNA, 25 bp, Homo sapien
tcctcgggatccaactggcctggtg

SEQ ID NO: 179122 - DNA, 25 bp, Homo sapien
caagggtggcaggagacgattcttc

SEQ ID NO: 179123 - DNA, 25 bp, Homo sapien
ctggtcctcgggatccaactggcct

SEQ ID NO: 179124 - DNA, 25 bp, Homo sapien
gaatcctggtcctcgggatccaact

SEQ ID NO: 179125 - DNA, 25 bp, Homo sapien
cagagaatacgtatgcgtatcgcat

SEQ ID NO: 179126 - DNA, 25 bp, Homo sapien
cttgctcttgactttgaccaagaaa

SEQ ID NO: 179127 - DNA, 25 bp, Homo sapien
atgcgtatcgcattgcccagggcca

SEQ ID NO: 179128 - DNA, 25 bp, Homo sapien
tacgtatgcgtatcgcattgcccag

SEQ ID NO: 179129 - DNA, 25 bp, Homo sapien
aacagttcatccaaagcctcaaggg

SEQ ID NO: 179130 - DNA, 25 bp, Homo sapien
cagaatgtgaggacttcagagaggt

SEQ ID NO: 179131 - DNA, 25 bp, Homo sapien
atgaccggcacctctgactccaaca

SEQ ID NO: 179132 - DNA, 25 bp, Homo sapien
ttcatccaaagcctcaagggcctca

SEQ ID NO: 179133 - DNA, 25 bp, Homo sapien
agcttgggcaccaacatccgagcga

SEQ ID NO: 179134 - DNA, 25 bp, Homo sapien
tgggcaccaacatccgagcgagagg

SEQ ID NO: 179135 - DNA, 25 bp, Homo sapien
gatcagcttgggcaccaacatccga

SEQ ID NO: 179136 - DNA, 25 bp, Homo sapien
cttgggcaccaacatccgagcgaga

SEQ ID NO: 179137 - DNA, 25 bp, Homo sapien
caccacacttagcagcaaaagcccc

SEQ ID NO: 179138 - DNA, 25 bp, Homo sapien
ggtggtcagagtgcgcagggagtag

SEQ ID NO: 179139 - DNA, 25 bp, Homo sapien
cccacctcaccaagagtctcattca

SEQ ID NO: 179140 - DNA, 25 bp, Homo sapien
tagggagccatggtggtcagagtgc

SEQ ID NO: 179141 - DNA, 25 bp, Homo sapien
ctccaagccttcctttcgaaaaatg

SEQ ID NO: 179142 - DNA, 25 bp, Homo sapien
ctgtgggtactgtgctgaagcagct

SEQ ID NO: 179143 - DNA, 25 bp, Homo sapien
cttcctttcgaaaaatggtggctga

SEQ ID NO: 179144 - DNA, 25 bp, Homo sapien
tgggtactgtgctgaagcagctgca

SEQ ID NO: 179145 - DNA, 25 bp, Homo sapien
tctgcagggccgtcaggatcaggga

SEQ ID NO: 179146 - DNA, 25 bp, Homo sapien
gcagggccgtcaggatcagggactt

SEQ ID NO: 179147 - DNA, 25 bp, Homo sapien
ctgcagggccgtcaggatcagggac

SEQ ID NO: 179148 - DNA, 25 bp, Homo sapien
tgcagggccgtcaggatcagggact

SEQ ID NO: 179149 - DNA, 25 bp, Homo sapien
gaacacaggtggcaggtgtttggta

SEQ ID NO: 179150 - DNA, 25 bp, Homo sapien
acaggtggcaggtgtttggtaccca

SEQ ID NO: 179151 - DNA, 25 bp, Homo sapien
acacaggtggcaggtgtttggtacc

SEQ ID NO: 179152 - DNA, 25 bp, Homo sapien
ctggaacacaggtggcaggtgtttg

SEQ ID NO: 179153 - DNA, 25 bp, Homo sapien
ccgccagccgtcgccagcgggtgtt

SEQ ID NO: 179154 - DNA, 25 bp, Homo sapien
gccagccgtcgccagcgggtgttca

SEQ ID NO: 179155 - DNA, 25 bp, Homo sapien
gccgccagccgtcgccagcgggtgt

SEQ ID NO: 179156 - DNA, 25 bp, Homo sapien
ccagccgtcgccagcgggtgttcag

SEQ ID NO: 179157 - DNA, 25 bp, Homo sapien
ctgcgggtcagcacggccgcaaact

SEQ ID NO: 179158 - DNA, 25 bp, Homo sapien
aatactggggcttgaccggtggcgt

SEQ ID NO: 179159 - DNA, 25 bp, Homo sapien
ggcgtacagtgggaagctcggaggg

SEQ ID NO: 179160 - DNA, 25 bp, Homo sapien
gagcggaccgcagtgggcgaatact

SEQ ID NO: 179161 - DNA, 25 bp, Homo sapien
taggacgaggaagcaagcacgtggg

SEQ ID NO: 179162 - DNA, 25 bp, Homo sapien
gccgccgaggctagcaggtcgcaga

SEQ ID NO: 179163 - DNA, 25 bp, Homo sapien
gggtcggccgccgaggctagcaggt

SEQ ID NO: 179164 - DNA, 25 bp, Homo sapien
gtcggccgccgaggctagcaggtcg

SEQ ID NO: 179165 - DNA, 25 bp, Homo sapien
cgccgaggctagcaggtcgcagaga

SEQ ID NO: 179166 - DNA, 25 bp, Homo sapien
cgaagaacgatctggagctgttccg

SEQ ID NO: 179167 - DNA, 25 bp, Homo sapien
aagaacgatctggagctgttccgtg

SEQ ID NO: 179168 - DNA, 25 bp, Homo sapien
cccgaagaacgatctggagctgttc

SEQ ID NO: 179169 - DNA, 25 bp, Homo sapien
ggcccgaagaacgatctggagctgt

SEQ ID NO: 179170 - DNA, 25 bp, Homo sapien
ctggcccggttacgcctgctccgta

SEQ ID NO: 179171 - DNA, 25 bp, Homo sapien
gcctttcccgcaacctcccgctcgc

SEQ ID NO: 179172 - DNA, 25 bp, Homo sapien
gctaggggtgagagttgggcctttc

SEQ ID NO: 179173 - DNA, 25 bp, Homo sapien
cgccctggcccggttacgcctgctc

SEQ ID NO: 179174 - DNA, 25 bp, Homo sapien
ggtagcagcagctcccgtaggagct

SEQ ID NO: 179175 - DNA, 25 bp, Homo sapien
ggagctgctctagcccggctgactc

SEQ ID NO: 179176 - DNA, 25 bp, Homo sapien
atgcgctcggtgtccggtagcagca

SEQ ID NO: 179177 - DNA, 25 bp, Homo sapien
ggatgcgctcggtgtccggtagcag

SEQ ID NO: 179178 - DNA, 25 bp, Homo sapien
gacagcacgtggaggttctgacacc

SEQ ID NO: 179179 - DNA, 25 bp, Homo sapien
aggaaagggcgttgctgcacgcccc

SEQ ID NO: 179180 - DNA, 25 bp, Homo sapien
tccggaggaaagggcgttgctgcac

SEQ ID NO: 179181 - DNA, 25 bp, Homo sapien
aaagggcgttgctgcacgccccgcg

SEQ ID NO: 179182 - DNA, 25 bp, Homo sapien
gagagaacagcaatagttctgccat

SEQ ID NO: 179183 - DNA, 25 bp, Homo sapien
attcagtcaatcagaagagaagctg

SEQ ID NO: 179184 - DNA, 25 bp, Homo sapien
taggagagttcaacagggcatgaag

SEQ ID NO: 179185 - DNA, 25 bp, Homo sapien
gcaacaatgccatcacacaattcag

SEQ ID NO: 179186 - DNA, 25 bp, Homo sapien
catcttgaggttaacatagatatac

SEQ ID NO: 179187 - DNA, 25 bp, Homo sapien
ccatcttgaggttaacatagatata

SEQ ID NO: 179188 - DNA, 25 bp, Homo sapien
ggagcgccgggcataatagaaaact

SEQ ID NO: 179189 - DNA, 25 bp, Homo sapien
ccagcatgaggaagaagacataacc

SEQ ID NO: 179190 - DNA, 25 bp, Homo sapien
ctgtactgccccagacatgttggag

SEQ ID NO: 179191 - DNA, 25 bp, Homo sapien
taaccagtgagtaaggagtagccga

SEQ ID NO: 179192 - DNA, 25 bp, Homo sapien
ccatgttgctgggtcattgtgaaaa

SEQ ID NO: 179193 - DNA, 25 bp, Homo sapien
ttagccgctctcacttcaagaatat

SEQ ID NO: 179194 - DNA, 25 bp, Homo sapien
ggattttttgcctatgattagccgc

SEQ ID NO: 179195 - DNA, 25 bp, Homo sapien
ccctaatagattgagggcagggatc

SEQ ID NO: 179196 - DNA, 25 bp, Homo sapien
tattcaacaaagtaaatgggtcatc

SEQ ID NO: 179197 - DNA, 25 bp, Homo sapien
ccggagagctttataagtgagacac

SEQ ID NO: 179198 - DNA, 25 bp, Homo sapien
cattaaagtcagaaaccaggaaggt

SEQ ID NO: 179199 - DNA, 25 bp, Homo sapien
tcatatcattcaagctcagtcctgc

SEQ ID NO: 179200 - DNA, 25 bp, Homo sapien
tctctgaatggtaccactgaaccag

SEQ ID NO: 179201 - DNA, 25 bp, Homo sapien
ttagggtactggatgagtagggaca

SEQ ID NO: 179202 - DNA, 25 bp, Homo sapien
tagccatggaataaagggaggatac

SEQ ID NO: 179203 - DNA, 25 bp, Homo sapien
ggataggaggaaccatttaatgatc

SEQ ID NO: 179204 - DNA, 25 bp, Homo sapien
ccaacagtcatgtggatgacagtag

SEQ ID NO: 179205 - DNA, 25 bp, Homo sapien
catgtggatgacagtagacttgtac

SEQ ID NO: 179206 - DNA, 25 bp, Homo sapien
aagcctccaacagtcatgtggatga

SEQ ID NO: 179207 - DNA, 25 bp, Homo sapien
ggatgacagtagacttgtaccaggg

SEQ ID NO: 179208 - DNA, 25 bp, Homo sapien
ccaatgacagtgaggggaaagccca

SEQ ID NO: 179209 - DNA, 25 bp, Homo sapien
gggctggcgttgttcttcccaaaga

SEQ ID NO: 179210 - DNA, 25 bp, Homo sapien
agcagccaaaccgtcagaagcagca

SEQ ID NO: 179211 - DNA, 25 bp, Homo sapien
cccgggcgatgttcttggtgcgaca

SEQ ID NO: 179212 - DNA, 25 bp, Homo sapien
aatgcactgagttcaccacactcca

SEQ ID NO: 179213 - DNA, 25 bp, Homo sapien
ctgtgtcgaaccattggcccaatgc

SEQ ID NO: 179214 - DNA, 25 bp, Homo sapien
ggcccaatgcactgagttcaccaca

SEQ ID NO: 179215 - DNA, 25 bp, Homo sapien
acactccacgtcaggaagaaaggca

SEQ ID NO: 179216 - DNA, 25 bp, Homo sapien
taggagctacatctctaagggcacc

SEQ ID NO: 179217 - DNA, 25 bp, Homo sapien
tgtccctgcagagtcgactgccttc

SEQ ID NO: 179218 - DNA, 25 bp, Homo sapien
ccacttacatccaggaccaaaaggg

SEQ ID NO: 179219 - DNA, 25 bp, Homo sapien
tctaacggcagactcatgctcctgg

SEQ ID NO: 179220 - DNA, 25 bp, Homo sapien
tttgctctttatcttaccaacacca

SEQ ID NO: 179221 - DNA, 25 bp, Homo sapien
ccaacccggtgtcattaaggatcca

SEQ ID NO: 179222 - DNA, 25 bp, Homo sapien
ggtagctactacataatctgagagt

SEQ ID NO: 179223 - DNA, 25 bp, Homo sapien
caccacacccggactctttgctctt

SEQ ID NO: 179224 - DNA, 25 bp, Homo sapien
gagactactactgcctttgaaaggg

SEQ ID NO: 179225 - DNA, 25 bp, Homo sapien
gaaagggcaatctggtttgaaagcc

SEQ ID NO: 179226 - DNA, 25 bp, Homo sapien
caagaagggttcagaacagagacta

SEQ ID NO: 179227 - DNA, 25 bp, Homo sapien
aaagcctagagtgggcccaccttca

SEQ ID NO: 179228 - DNA, 25 bp, Homo sapien
tcatcctgactctatcccaagttct

SEQ ID NO: 179229 - DNA, 25 bp, Homo sapien
tctatcccaagttctatgatgtgtt

SEQ ID NO: 179230 - DNA, 25 bp, Homo sapien
ttcaagcctcatcctgactctatcc

SEQ ID NO: 179231 - DNA, 25 bp, Homo sapien
tgactctatcccaagttctatgatg

SEQ ID NO: 179232 - DNA, 25 bp, Homo sapien
tgtgaccagccacaatgtgttcttc

SEQ ID NO: 179233 - DNA, 25 bp, Homo sapien
cactgtgaccagccacaatgtgttc

SEQ ID NO: 179234 - DNA, 25 bp, Homo sapien
gaccagccacaatgtgttcttcatt

SEQ ID NO: 179235 - DNA, 25 bp, Homo sapien
actgtgaccagccacaatgtgttct

SEQ ID NO: 179236 - DNA, 25 bp, Homo sapien
tcgcctccaatctgccggtagaagt

SEQ ID NO: 179237 - DNA, 25 bp, Homo sapien
ggctggacacgtagccagagatgca

SEQ ID NO: 179238 - DNA, 25 bp, Homo sapien
tcagggcatacaacaagatggctgc

SEQ ID NO: 179239 - DNA, 25 bp, Homo sapien
ggccccatgacggtgcacattgaac

SEQ ID NO: 179240 - DNA, 25 bp, Homo sapien
aatctcccccagttttgctatccag

SEQ ID NO: 179241 - DNA, 25 bp, Homo sapien
ctgcaggacggtagcggaaagccca

SEQ ID NO: 179242 - DNA, 25 bp, Homo sapien
tcccccagttttgctatccagaaaa

SEQ ID NO: 179243 - DNA, 25 bp, Homo sapien
caagttaggcctcacctgtgtctct

SEQ ID NO: 179244 - DNA, 25 bp, Homo sapien
cccatgagataaatccccaattcat

SEQ ID NO: 179245 - DNA, 25 bp, Homo sapien
tcccatgagataaatccccaattca

SEQ ID NO: 179246 - DNA, 25 bp, Homo sapien
gacgtcccgcactgaaacattggca

SEQ ID NO: 179247 - DNA, 25 bp, Homo sapien
aggtcgtaacccatccaagctgtgg

SEQ ID NO: 179248 - DNA, 25 bp, Homo sapien
taaggcctaggaactcgtcaggtcg

SEQ ID NO: 179249 - DNA, 25 bp, Homo sapien
ggtcattccgaagcacacgcattag

SEQ ID NO: 179250 - DNA, 25 bp, Homo sapien
aaagactcagccattcggtccccat

SEQ ID NO: 179251 - DNA, 25 bp, Homo sapien
tgagctgcatgtggcacagaattct

SEQ ID NO: 179252 - DNA, 25 bp, Homo sapien
cgttttcccgaaagcggatctcata

SEQ ID NO: 179253 - DNA, 25 bp, Homo sapien
ttgtgacgtatcttctcagggcagc

SEQ ID NO: 179254 - DNA, 25 bp, Homo sapien
ttgtagtgtgtcacgccttccaccc

SEQ ID NO: 179255 - DNA, 25 bp, Homo sapien
ggtcgccggccttgtagtgtgtcac

SEQ ID NO: 179256 - DNA, 25 bp, Homo sapien
tcctgagggttatggtagggtccca

SEQ ID NO: 179257 - DNA, 25 bp, Homo sapien
gttgacatacagaataacagggtcg

SEQ ID NO: 179258 - DNA, 25 bp, Homo sapien
ggcagctccaacttcgagggttccc

SEQ ID NO: 179259 - DNA, 25 bp, Homo sapien
tgtgcccagcaacagtatcaggatt

SEQ ID NO: 179260 - DNA, 25 bp, Homo sapien
gcaacagtatcaggattggcaacca

SEQ ID NO: 179261 - DNA, 25 bp, Homo sapien
ttcgagggttccctacgactgtcat

SEQ ID NO: 179262 - DNA, 25 bp, Homo sapien
ttacagaaaccccaggtcaggtgcc

SEQ ID NO: 179263 - DNA, 25 bp, Homo sapien
taccccacgtctctctatcccaaag

SEQ ID NO: 179264 - DNA, 25 bp, Homo sapien
ctgaggttatagaaaccagggaggt

SEQ ID NO: 179265 - DNA, 25 bp, Homo sapien
gtgcctcgaactgaggtcccctggc

SEQ ID NO: 179266 - DNA, 25 bp, Homo sapien
tcccgccacagccccggggtcctca

SEQ ID NO: 179267 - DNA, 25 bp, Homo sapien
ggctgcggctacaccgcgctggaca

SEQ ID NO: 179268 - DNA, 25 bp, Homo sapien
aggacctgccgaccgacttctacgg

SEQ ID NO: 179269 - DNA, 25 bp, Homo sapien
ggtctctcccacagcggcgcggtag

SEQ ID NO: 179270 - DNA, 25 bp, Homo sapien
gggttgcccgttgctgcgcctgaca

SEQ ID NO: 179271 - DNA, 25 bp, Homo sapien
tcctcccggcgatcggcagcgcggc

SEQ ID NO: 179272 - DNA, 25 bp, Homo sapien
gaccccgtgaggctcggcttgcccc

SEQ ID NO: 179273 - DNA, 25 bp, Homo sapien
cttgccccgcccgtcttcggcgagg

SEQ ID NO: 179274 - DNA, 25 bp, Homo sapien
cccgttgcgccttctccatctggag

SEQ ID NO: 179275 - DNA, 25 bp, Homo sapien
ctcagcctggcggaaagctccttgc

SEQ ID NO: 179276 - DNA, 25 bp, Homo sapien
ttgcctggaacgcagagggccttcg

SEQ ID NO: 179277 - DNA, 25 bp, Homo sapien
agggccttcgctgctgcggcccctg

SEQ ID NO: 179278 - DNA, 25 bp, Homo sapien
tggggactccttcgcgacggcttcc

SEQ ID NO: 179279 - DNA, 25 bp, Homo sapien
cgagggccggggagatggagcgcag

SEQ ID NO: 179280 - DNA, 25 bp, Homo sapien
gcgagggccggggagatggagcgca

SEQ ID NO: 179281 - DNA, 25 bp, Homo sapien
cgcgggacgggactagcgagggccg

SEQ ID NO: 179282 - DNA, 25 bp, Homo sapien
ctagcgagggccggggagatggagc

SEQ ID NO: 179283 - DNA, 25 bp, Homo sapien
ggtttgtttatagcatatctcactg

SEQ ID NO: 179284 - DNA, 25 bp, Homo sapien
agttgccaccaagttacctatccgg

SEQ ID NO: 179285 - DNA, 25 bp, Homo sapien
gatcttcgcatgaactggtttaccc

SEQ ID NO: 179286 - DNA, 25 bp, Homo sapien
taggcagcttaatacatgatcttcg

SEQ ID NO: 179287 - DNA, 25 bp, Homo sapien
agattgaggatatagagctggcttc

SEQ ID NO: 179288 - DNA, 25 bp, Homo sapien
ctagattgaggatatagagctggct

SEQ ID NO: 179289 - DNA, 25 bp, Homo sapien
tgctagattgaggatatagagctgg

SEQ ID NO: 179290 - DNA, 25 bp, Homo sapien
tagattgaggatatagagctggctt

SEQ ID NO: 179291 - DNA, 25 bp, Homo sapien
caaactacccagtctcatgtttttg

SEQ ID NO: 179292 - DNA, 25 bp, Homo sapien
ctacccagtctcatgtttttgtttg

SEQ ID NO: 179293 - DNA, 25 bp, Homo sapien
ttacaaactacccagtctcatgttt

SEQ ID NO: 179294 - DNA, 25 bp, Homo sapien
aactacccagtctcatgtttttgtt

SEQ ID NO: 179295 - DNA, 25 bp, Homo sapien
ctcacggcaagagggtggtgctaca

SEQ ID NO: 179296 - DNA, 25 bp, Homo sapien
ttcatcagaaacccacctccatgat

SEQ ID NO: 179297 - DNA, 25 bp, Homo sapien
gggagcaagtatctcacatggtggg

SEQ ID NO: 179298 - DNA, 25 bp, Homo sapien
ccacatctcataactcacggcaaga

SEQ ID NO: 179299 - DNA, 25 bp, Homo sapien
atctcgtaaaccgaggaggatgtac

SEQ ID NO: 179300 - DNA, 25 bp, Homo sapien
gtaaaccgaggaggatgtacatcgc

SEQ ID NO: 179301 - DNA, 25 bp, Homo sapien
taaaccgaggaggatgtacatcgcc

SEQ ID NO: 179302 - DNA, 25 bp, Homo sapien
tcgtaaaccgaggaggatgtacatc

SEQ ID NO: 179303 - DNA, 25 bp, Homo sapien
aatacgtgcctgagggtgggtctct

SEQ ID NO: 179304 - DNA, 25 bp, Homo sapien
taccttgtgaagtacgtgatctttg

SEQ ID NO: 179305 - DNA, 25 bp, Homo sapien
ggctgtcttctatggttgaaactgt

SEQ ID NO: 179306 - DNA, 25 bp, Homo sapien
gcctccctttgcctttgatattcta

SEQ ID NO: 179307 - DNA, 25 bp, Homo sapien
ttatccatgcagcttagattccgca

SEQ ID NO: 179308 - DNA, 25 bp, Homo sapien
gctgtgacagacaaagtattgggcc

SEQ ID NO: 179309 - DNA, 25 bp, Homo sapien
cctatatagcttagtgggagatgca

SEQ ID NO: 179310 - DNA, 25 bp, Homo sapien
gattccgcattccatttcagccaca

SEQ ID NO: 179311 - DNA, 25 bp, Homo sapien
caaaaacagacggggcgcggtggct

SEQ ID NO: 179312 - DNA, 25 bp, Homo sapien
aggtcgggagttcaagacctgcctg

SEQ ID NO: 179313 - DNA, 25 bp, Homo sapien
catgcctataatcccagcactttgg

SEQ ID NO: 179314 - DNA, 25 bp, Homo sapien
gaggccaaggtgggcagatcacctg

SEQ ID NO: 179315 - DNA, 25 bp, Homo sapien
ggataggaggcttccaagtagtaaa

SEQ ID NO: 179316 - DNA, 25 bp, Homo sapien
caagttcctagtggagggctgagtc

SEQ ID NO: 179317 - DNA, 25 bp, Homo sapien
cagactcgtgtgactatataggcaa

SEQ ID NO: 179318 - DNA, 25 bp, Homo sapien
tttgataccctagccttcagcagct

SEQ ID NO: 179319 - DNA, 25 bp, Homo sapien
tccttgaatggatccagcgctacgg

SEQ ID NO: 179320 - DNA, 25 bp, Homo sapien
tctatcgggccattgagagcacatc

SEQ ID NO: 179321 - DNA, 25 bp, Homo sapien
caggtaatgaaagtcttgcggcaca

SEQ ID NO: 179322 - DNA, 25 bp, Homo sapien
tatgaaatacaatggtgagctcccg

SEQ ID NO: 179323 - DNA, 25 bp, Homo sapien
ttagaaatgggtattcgagctgggt

SEQ ID NO: 179324 - DNA, 25 bp, Homo sapien
tctgcctgtctatagtccaaagtaa

SEQ ID NO: 179325 - DNA, 25 bp, Homo sapien
tggctctgcctgtctatagtccaaa

SEQ ID NO: 179326 - DNA, 25 bp, Homo sapien
ctgtctatagtccaaagtaatggca

SEQ ID NO: 179327 - DNA, 25 bp, Homo sapien
taggcaactctaggacaaaccggct

SEQ ID NO: 179328 - DNA, 25 bp, Homo sapien
gagatgcctccacgtggttctaagt

SEQ ID NO: 179329 - DNA, 25 bp, Homo sapien
taggttgagatactaggaatgccca

SEQ ID NO: 179330 - DNA, 25 bp, Homo sapien
tactgacacaatagcagggagacaa

SEQ ID NO: 179331 - DNA, 25 bp, Homo sapien
tctgtagcaagatccttcttcagag

SEQ ID NO: 179332 - DNA, 25 bp, Homo sapien
gaacaagggcattataactgctatc

SEQ ID NO: 179333 - DNA, 25 bp, Homo sapien
cagttttattgggaacaagggcatt

SEQ ID NO: 179334 - DNA, 25 bp, Homo sapien
caagggctccttctgtagcaagatc

SEQ ID NO: 179335 - DNA, 25 bp, Homo sapien
tcagcatgacttccccaaaaagtta

SEQ ID NO: 179336 - DNA, 25 bp, Homo sapien
aggtagcattaggaagacaagccca

SEQ ID NO: 179337 - DNA, 25 bp, Homo sapien
ttttcaggcagggtcacactaccac

SEQ ID NO: 179338 - DNA, 25 bp, Homo sapien
tcagcacttggcacttaaggaagaa

SEQ ID NO: 179339 - DNA, 25 bp, Homo sapien
ctcagccaactgctttagtgcttct

SEQ ID NO: 179340 - DNA, 25 bp, Homo sapien
actcagccaactgctttagtgcttc

SEQ ID NO: 179341 - DNA, 25 bp, Homo sapien
tcagccaactgctttagtgcttctt

SEQ ID NO: 179342 - DNA, 25 bp, Homo sapien
taaaccagggtacacggcttgttga

SEQ ID NO: 179343 - DNA, 25 bp, Homo sapien
caggctaggtgggtgcctatatgca

SEQ ID NO: 179344 - DNA, 25 bp, Homo sapien
ggtatggtccttctgcttgctaggc

SEQ ID NO: 179345 - DNA, 25 bp, Homo sapien
gaagcagtaaggtctcagcaactcc

SEQ ID NO: 179346 - DNA, 25 bp, Homo sapien
tagaaggtacactaggcaatttgac

SEQ ID NO: 179347 - DNA, 25 bp, Homo sapien
tcttcttccttgtcgcccacattta

SEQ ID NO: 179348 - DNA, 25 bp, Homo sapien
ccctgccggcagatgagtagaaggt

SEQ ID NO: 179349 - DNA, 25 bp, Homo sapien
ttaacaactcctgggccaattcctc

SEQ ID NO: 179350 - DNA, 25 bp, Homo sapien
gtgttccttctggccagtcccatac

SEQ ID NO: 179351 - DNA, 25 bp, Homo sapien
ctggccagtcccatactttctgcaa

SEQ ID NO: 179352 - DNA, 25 bp, Homo sapien
tgcaatattccctgacccttcaccc

SEQ ID NO: 179353 - DNA, 25 bp, Homo sapien
cttctggccagtcccatactttctg

SEQ ID NO: 179354 - DNA, 25 bp, Homo sapien
tccaaagcccataggccgagaaatg

SEQ ID NO: 179355 - DNA, 25 bp, Homo sapien
tcctgttgttccgtgatgtcagtca

SEQ ID NO: 179356 - DNA, 25 bp, Homo sapien
gaaatggcatctgagatctgctggg

SEQ ID NO: 179357 - DNA, 25 bp, Homo sapien
gtcagtcatcagttcatctaccttg

SEQ ID NO: 179358 - DNA, 25 bp, Homo sapien
ctgagaatgagatagatagctaaga

SEQ ID NO: 179359 - DNA, 25 bp, Homo sapien
tgagatagatagctaagaaatcacg

SEQ ID NO: 179360 - DNA, 25 bp, Homo sapien
gctaagaaatcacgcaacaatgccc

SEQ ID NO: 179361 - DNA, 25 bp, Homo sapien
gatagctaagaaatcacgcaacaat

SEQ ID NO: 179362 - DNA, 25 bp, Homo sapien
gggcagcaagctccatggtacgaag

SEQ ID NO: 179363 - DNA, 25 bp, Homo sapien
ggcagcaagctccatggtacgaagg

SEQ ID NO: 179364 - DNA, 25 bp, Homo sapien
cagcaagctccatggtacgaaggac

SEQ ID NO: 179365 - DNA, 25 bp, Homo sapien
gcagcaagctccatggtacgaagga

SEQ ID NO: 179366 - DNA, 25 bp, Homo sapien
taatgtcccgtcagtttgtgccagc

SEQ ID NO: 179367 - DNA, 25 bp, Homo sapien
cctcacgctgaaactccagggtgga

SEQ ID NO: 179368 - DNA, 25 bp, Homo sapien
ggcattctcaatggcctcacgctga

SEQ ID NO: 179369 - DNA, 25 bp, Homo sapien
tgccagctgctgttcgaatcttttc

SEQ ID NO: 179370 - DNA, 25 bp, Homo sapien
cccatctgggccctccccataggct

SEQ ID NO: 179371 - DNA, 25 bp, Homo sapien
cttcttggctgtttgtagctcctgt

SEQ ID NO: 179372 - DNA, 25 bp, Homo sapien
tcttggctgtttgtagctcctgttg

SEQ ID NO: 179373 - DNA, 25 bp, Homo sapien
catacttcttggctgtttgtagctc

SEQ ID NO: 179374 - DNA, 25 bp, Homo sapien
tacttcttggctgtttgtagctcct

SEQ ID NO: 179375 - DNA, 25 bp, Homo sapien
caagatgtggcagtatgagttctaa

SEQ ID NO: 179376 - DNA, 25 bp, Homo sapien
gagtccagtggagtaggcccaaatt

SEQ ID NO: 179377 - DNA, 25 bp, Homo sapien
catagtatgtgctagagacctgact

SEQ ID NO: 179378 - DNA, 25 bp, Homo sapien
gactgtgttattgctaatccccaaa

SEQ ID NO: 179379 - DNA, 25 bp, Homo sapien
cgcgccgggctaagaaggcagtctt

SEQ ID NO: 179380 - DNA, 25 bp, Homo sapien
cgccgggctaagaaggcagtctttc

SEQ ID NO: 179381 - DNA, 25 bp, Homo sapien
ccccgcgccgggctaagaaggcagt

SEQ ID NO: 179382 - DNA, 25 bp, Homo sapien
gccgggctaagaaggcagtctttct

SEQ ID NO: 179383 - DNA, 25 bp, Homo sapien
gaacagtgggagtcagcacgatcgc

SEQ ID NO: 179384 - DNA, 25 bp, Homo sapien
gcgccccgacatggtgtgccttttg

SEQ ID NO: 179385 - DNA, 25 bp, Homo sapien
gaaactcgtcttcaagcctgaacag

SEQ ID NO: 179386 - DNA, 25 bp, Homo sapien
tgccttttggcaccggcgatgagcc

SEQ ID NO: 179387 - DNA, 25 bp, Homo sapien
ccttcccgaagagcctgccgagacc

SEQ ID NO: 179388 - DNA, 25 bp, Homo sapien
cccgaagagcctgccgagaccactc

SEQ ID NO: 179389 - DNA, 25 bp, Homo sapien
cgaagagcctgccgagaccactcat

SEQ ID NO: 179390 - DNA, 25 bp, Homo sapien
ttcccgaagagcctgccgagaccac

SEQ ID NO: 179391 - DNA, 25 bp, Homo sapien
agccttgcccaatccgtcctcaggg

SEQ ID NO: 179392 - DNA, 25 bp, Homo sapien
tcagcgtcctccagacttccgcctt

SEQ ID NO: 179393 - DNA, 25 bp, Homo sapien
gagggtgatgtctcatcacacaggg

SEQ ID NO: 179394 - DNA, 25 bp, Homo sapien
ttgcccaatccgtcctcagggcgcc

SEQ ID NO: 179395 - DNA, 25 bp, Homo sapien
tacgtgcttgttctccggaaggaaa

SEQ ID NO: 179396 - DNA, 25 bp, Homo sapien
tttagatggcaaacctgatgcagtc

SEQ ID NO: 179397 - DNA, 25 bp, Homo sapien
gaccgacgcgctcctcttaaagctg

SEQ ID NO: 179398 - DNA, 25 bp, Homo sapien
aaatgtgcagtgtgatggcacctca

SEQ ID NO: 179399 - DNA, 25 bp, Homo sapien
ttacaaatgcacctgaaaatgcctt

SEQ ID NO: 179400 - DNA, 25 bp, Homo sapien
tacaaatgcacctgaaaatgccttc

SEQ ID NO: 179401 - DNA, 25 bp, Homo sapien
cattccattctggatgtgaatgcag

SEQ ID NO: 179402 - DNA, 25 bp, Homo sapien
tcaaaggcccagtttgggccttcgc

SEQ ID NO: 179403 - DNA, 25 bp, Homo sapien
gacttagagtttgaagattcattcc

SEQ ID NO: 179404 - DNA, 25 bp, Homo sapien
tcgcaaatgtctctaacccttgact

SEQ ID NO: 179405 - DNA, 25 bp, Homo sapien
tatagggcaaactatccaacctgta

SEQ ID NO: 179406 - DNA, 25 bp, Homo sapien
catttcattaagctttcagggttct

SEQ ID NO: 179407 - DNA, 25 bp, Homo sapien
gggttctccattattactctgacct

SEQ ID NO: 179408 - DNA, 25 bp, Homo sapien
ctttgtgagtgccacctatagggca

SEQ ID NO: 179409 - DNA, 25 bp, Homo sapien
ctcctagggaccccaaatggctgtt

SEQ ID NO: 179410 - DNA, 25 bp, Homo sapien
tcctagggaccccaaatggctgttc

SEQ ID NO: 179411 - DNA, 25 bp, Homo sapien
ccctcctagggaccccaaatggctg

SEQ ID NO: 179412 - DNA, 25 bp, Homo sapien
cctcctagggaccccaaatggctgt

SEQ ID NO: 179413 - DNA, 25 bp, Homo sapien
ccagtttgctgacgtctacaatatt

SEQ ID NO: 179414 - DNA, 25 bp, Homo sapien
acaatattccgcctctcatcatcaa

SEQ ID NO: 179415 - DNA, 25 bp, Homo sapien
gacgtctacaatattccgcctctca

SEQ ID NO: 179416 - DNA, 25 bp, Homo sapien
tgctgacgtctacaatattccgcct

SEQ ID NO: 179417 - DNA, 25 bp, Homo sapien
aagctagtatcttggtttcccaggc

SEQ ID NO: 179418 - DNA, 25 bp, Homo sapien
caagctagtatcttggtttcccagg

SEQ ID NO: 179419 - DNA, 25 bp, Homo sapien
agacagggcaggagtaaccaagcta

SEQ ID NO: 179420 - DNA, 25 bp, Homo sapien
gcaggagtaaccaagctagtatctt

SEQ ID NO: 179421 - DNA, 25 bp, Homo sapien
cctgctcctcccttatctccgcata

SEQ ID NO: 179422 - DNA, 25 bp, Homo sapien
ctgctcctcccttatctccgcatac

SEQ ID NO: 179423 - DNA, 25 bp, Homo sapien
gatcttgctgcctggatagatttcc

SEQ ID NO: 179424 - DNA, 25 bp, Homo sapien
gtgtgtgatcttgctgcctggatag

SEQ ID NO: 179425 - DNA, 25 bp, Homo sapien
tgctgcctggatagatttcccgatg

SEQ ID NO: 179426 - DNA, 25 bp, Homo sapien
tgcctggatagatttcccgatgaac

SEQ ID NO: 179427 - DNA, 25 bp, Homo sapien
aggtcaaagagctccagtagctggt

SEQ ID NO: 179428 - DNA, 25 bp, Homo sapien
ctgaagaggtcaaagagctccagta

SEQ ID NO: 179429 - DNA, 25 bp, Homo sapien
gaggtcaaagagctccagtagctgg

SEQ ID NO: 179430 - DNA, 25 bp, Homo sapien
gaagaggtcaaagagctccagtagc

SEQ ID NO: 179431 - DNA, 25 bp, Homo sapien
ccaaggctctgcaatcgttttagga

SEQ ID NO: 179432 - DNA, 25 bp, Homo sapien
cacctctgggtacagtcggacgtct

SEQ ID NO: 179433 - DNA, 25 bp, Homo sapien
ttggccccgcctatctcgtacagtt

SEQ ID NO: 179434 - DNA, 25 bp, Homo sapien
caatcgttttaggacctcaggcacc

SEQ ID NO: 179435 - DNA, 25 bp, Homo sapien
gctgggtcctatctcgcccccagtc

SEQ ID NO: 179436 - DNA, 25 bp, Homo sapien
tgggtcctatctcgcccccagtctt

SEQ ID NO: 179437 - DNA, 25 bp, Homo sapien
ggctgggtcctatctcgcccccagt

SEQ ID NO: 179438 - DNA, 25 bp, Homo sapien
cctggctgggtcctatctcgccccc

SEQ ID NO: 179439 - DNA, 25 bp, Homo sapien
ctgctcttatggaacggagggtcta

SEQ ID NO: 179440 - DNA, 25 bp, Homo sapien
cgtgtcgacccagaaaggccagaga

SEQ ID NO: 179441 - DNA, 25 bp, Homo sapien
cttatggaacggagggtctacgtgc

SEQ ID NO: 179442 - DNA, 25 bp, Homo sapien
gagggtctacgtgcgtgtcgaccca

SEQ ID NO: 179443 - DNA, 25 bp, Homo sapien
gagagcaccttacgaaattctcccc

SEQ ID NO: 179444 - DNA, 25 bp, Homo sapien
ttcgggagctgctgttagggatgtg

SEQ ID NO: 179445 - DNA, 25 bp, Homo sapien
tggaaaaggagagcaccttacgaaa

SEQ ID NO: 179446 - DNA, 25 bp, Homo sapien
agggattcgggagctgctgttaggg

SEQ ID NO: 179447 - DNA, 25 bp, Homo sapien
caaatcaaagactgccagcttcggt

SEQ ID NO: 179448 - DNA, 25 bp, Homo sapien
atcaaagactgccagcttcggtagc

SEQ ID NO: 179449 - DNA, 25 bp, Homo sapien
aagactgccagcttcggtagccgcg

SEQ ID NO: 179450 - DNA, 25 bp, Homo sapien
ctgccagcttcggtagccgcgccat

SEQ ID NO: 179451 - DNA, 25 bp, Homo sapien
gacccgcaccgcaggctgcgcgcag

SEQ ID NO: 179452 - DNA, 25 bp, Homo sapien
tattccagccatagagtacagtgtc

SEQ ID NO: 179453 - DNA, 25 bp, Homo sapien
agtgtcagccaaacccttgaaggcg

SEQ ID NO: 179454 - DNA, 25 bp, Homo sapien
tctttctaaggcattggccacgggc

SEQ ID NO: 179455 - DNA, 25 bp, Homo sapien
ggattgcagcgaggtaccaacacga

SEQ ID NO: 179456 - DNA, 25 bp, Homo sapien
gccaggaaatattttattgacaacc

SEQ ID NO: 179457 - DNA, 25 bp, Homo sapien
ccaggaaatattttattgacaacca

SEQ ID NO: 179458 - DNA, 25 bp, Homo sapien
gactgcaaactaacacccagtagcc

SEQ ID NO: 179459 - DNA, 25 bp, Homo sapien
ctgcaaactaacacccagtagccag

SEQ ID NO: 179460 - DNA, 25 bp, Homo sapien
ctcattatgagcgacagggtaaaga

SEQ ID NO: 179461 - DNA, 25 bp, Homo sapien
ttatgagcgacagggtaaagaggta

SEQ ID NO: 179462 - DNA, 25 bp, Homo sapien
caacaccaggtgaaggactgaacca

SEQ ID NO: 179463 - DNA, 25 bp, Homo sapien
aacaccaggtgaaggactgaaccac

SEQ ID NO: 179464 - DNA, 25 bp, Homo sapien
aaatcttgtaatcagctgctgtctt

SEQ ID NO: 179465 - DNA, 25 bp, Homo sapien
atcttgtaatcagctgctgtcttct

SEQ ID NO: 179466 - DNA, 25 bp, Homo sapien
ctaaaatcttgtaatcagctgctgt

SEQ ID NO: 179467 - DNA, 25 bp, Homo sapien
taaaatcttgtaatcagctgctgtc

SEQ ID NO: 179468 - DNA, 25 bp, Homo sapien
tgaaaaaatcttattctgagaaggg

SEQ ID NO: 179469 - DNA, 25 bp, Homo sapien
gggcttagaggcttcaccagattgc

SEQ ID NO: 179470 - DNA, 25 bp, Homo sapien
tgccaaagagtcttaggcaccaaaa

SEQ ID NO: 179471 - DNA, 25 bp, Homo sapien
aaaaacaagaggcacccctgatcca

SEQ ID NO: 179472 - DNA, 25 bp, Homo sapien
tcttcacataagatcgccatgctgt

SEQ ID NO: 179473 - DNA, 25 bp, Homo sapien
gatcgccatgctgtcattctcactc

SEQ ID NO: 179474 - DNA, 25 bp, Homo sapien
cataagatcgccatgctgtcattct

SEQ ID NO: 179475 - DNA, 25 bp, Homo sapien
ttcacataagatcgccatgctgtca

SEQ ID NO: 179476 - DNA, 25 bp, Homo sapien
tccacacgctccttgattcgctcca

SEQ ID NO: 179477 - DNA, 25 bp, Homo sapien
agcctctgctgttgtggggggattc

SEQ ID NO: 179478 - DNA, 25 bp, Homo sapien
tttctcctccacacgctccttgatt

SEQ ID NO: 179479 - DNA, 25 bp, Homo sapien
cttgccactgtagatgagcctctgc

SEQ ID NO: 179480 - DNA, 25 bp, Homo sapien
tttagagagacaagtagtcaggggc

SEQ ID NO: 179481 - DNA, 25 bp, Homo sapien
aagaacaagggctatgcagacagca

SEQ ID NO: 179482 - DNA, 25 bp, Homo sapien
tgcttaggggtaggaccatggaaac

SEQ ID NO: 179483 - DNA, 25 bp, Homo sapien
gcatgagagcaaaaggaccaagttc

SEQ ID NO: 179484 - DNA, 25 bp, Homo sapien
gtctgtaggttcaatgtcaatctca

SEQ ID NO: 179485 - DNA, 25 bp, Homo sapien
caatctcaatctcctttccggtcag

SEQ ID NO: 179486 - DNA, 25 bp, Homo sapien
tctcaatctcctttccggtcagcgt

SEQ ID NO: 179487 - DNA, 25 bp, Homo sapien
cttgtctgtaggttcaatgtcaatc

SEQ ID NO: 179488 - DNA, 25 bp, Homo sapien
acatcctatgttggtctttgggatc

SEQ ID NO: 179489 - DNA, 25 bp, Homo sapien
ccttaaagcccaatgtacaatttgt

SEQ ID NO: 179490 - DNA, 25 bp, Homo sapien
aaacaggcaatggtttcatgagtcc

SEQ ID NO: 179491 - DNA, 25 bp, Homo sapien
tcttctaggtaaaacatcctatgtt

SEQ ID NO: 179492 - DNA, 25 bp, Homo sapien
tggagaatgagaaggctttgaacat

SEQ ID NO: 179493 - DNA, 25 bp, Homo sapien
ggagaatgagaaggctttgaacata

SEQ ID NO: 179494 - DNA, 25 bp, Homo sapien
gagaatgagaaggctttgaacatac

SEQ ID NO: 179495 - DNA, 25 bp, Homo sapien
gaaccatctgatcctcttaattcca

SEQ ID NO: 179496 - DNA, 25 bp, Homo sapien
cttaattccatgagtcatcttccaa

SEQ ID NO: 179497 - DNA, 25 bp, Homo sapien
ttccatgagtcatcttccaacatca

SEQ ID NO: 179498 - DNA, 25 bp, Homo sapien
tatcaaatatttttaggctgtaaac

SEQ ID NO: 179499 - DNA, 25 bp, Homo sapien
tgtactccgtcctacctgagtctgg

SEQ ID NO: 179500 - DNA, 25 bp, Homo sapien
gcaaggactacagggtgtgtgcacc

SEQ ID NO: 179501 - DNA, 25 bp, Homo sapien
tagagattggatccagattccctgg

SEQ ID NO: 179502 - DNA, 25 bp, Homo sapien
gacccaatgtacactcctatagtag

SEQ ID NO: 179503 - DNA, 25 bp, Homo sapien
ctggaatgctcatacactgcaggtg

SEQ ID NO: 179504 - DNA, 25 bp, Homo sapien
gagtaagacccgagaccagaatgag

SEQ ID NO: 179505 - DNA, 25 bp, Homo sapien
cacacagtaaagacagttgccaaag

SEQ ID NO: 179506 - DNA, 25 bp, Homo sapien
tttatggtgctacaagggtaccgtc

SEQ ID NO: 179507 - DNA, 25 bp, Homo sapien
aaaatgaatcattcggctgggcatg

SEQ ID NO: 179508 - DNA, 25 bp, Homo sapien
gaaaatgaatcattcggctgggcat

SEQ ID NO: 179509 - DNA, 25 bp, Homo sapien
ccagaagttttagactagcgtgggc

SEQ ID NO: 179510 - DNA, 25 bp, Homo sapien
tgcctcagccaaggaagtgaggctg

SEQ ID NO: 179511 - DNA, 25 bp, Homo sapien
tcagaaaggcaggtactgactgaac

SEQ ID NO: 179512 - DNA, 25 bp, Homo sapien
tccaggatgccaggctcagaaaggc

SEQ ID NO: 179513 - DNA, 25 bp, Homo sapien
tgactgaacacactccccgctttgg

SEQ ID NO: 179514 - DNA, 25 bp, Homo sapien
ctgtaggacgggtgagataccacac

SEQ ID NO: 179515 - DNA, 25 bp, Homo sapien
gctgtgctcggaggcgacctacgtt

SEQ ID NO: 179516 - DNA, 25 bp, Homo sapien
aaggctcatagtctagcccttggga

SEQ ID NO: 179517 - DNA, 25 bp, Homo sapien
caccttggcaaccaccagtaaaggc

SEQ ID NO: 179518 - DNA, 25 bp, Homo sapien
atgactgcgggggttcgaatacagt

SEQ ID NO: 179519 - DNA, 25 bp, Homo sapien
gctaggccttctctatgactgcggg

SEQ ID NO: 179520 - DNA, 25 bp, Homo sapien
ggagagcagcgcttactccaagaat

SEQ ID NO: 179521 - DNA, 25 bp, Homo sapien
ggagtcaagccgctgctaggccttc

SEQ ID NO: 179522 - DNA, 25 bp, Homo sapien
ctcttgcctgcaagggccacttcta

SEQ ID NO: 179523 - DNA, 25 bp, Homo sapien
attgctgctcctaccgctccggtcg

SEQ ID NO: 179524 - DNA, 25 bp, Homo sapien
ttctacttccgggtcactgtctggc

SEQ ID NO: 179525 - DNA, 25 bp, Homo sapien
cactgggttccggaaaggctcaggg

SEQ ID NO: 179526 - DNA, 25 bp, Homo sapien
tctgataagttcaaaaggccatctg

SEQ ID NO: 179527 - DNA, 25 bp, Homo sapien
gatggccaaggttctctgtaaggta

SEQ ID NO: 179528 - DNA, 25 bp, Homo sapien
cagttctctggcagttagcagtcag

SEQ ID NO: 179529 - DNA, 25 bp, Homo sapien
tccagttagcccagctgactgcaga

SEQ ID NO: 179530 - DNA, 25 bp, Homo sapien
ttgagaacatatgcactctgctggt

SEQ ID NO: 179531 - DNA, 25 bp, Homo sapien
aggaatctttctgttgcccactgtc

SEQ ID NO: 179532 - DNA, 25 bp, Homo sapien
tgctggttgatccatgtagccctgg

SEQ ID NO: 179533 - DNA, 25 bp, Homo sapien
tctgactgcagagttaacaggcgtg

SEQ ID NO: 179534 - DNA, 25 bp, Homo sapien
tgtccctgttgatcatagcaccttg

SEQ ID NO: 179535 - DNA, 25 bp, Homo sapien
gccaatcaactggtcaaatgggtct

SEQ ID NO: 179536 - DNA, 25 bp, Homo sapien
gaaaagtgcatcatggacctcggct

SEQ ID NO: 179537 - DNA, 25 bp, Homo sapien
tgtaaatcagatgtgagcctggtcc

SEQ ID NO: 179538 - DNA, 25 bp, Homo sapien
tctacgtgtacctatgtgggagcag

SEQ ID NO: 179539 - DNA, 25 bp, Homo sapien
tctagggtcaggctaagagaggctc

SEQ ID NO: 179540 - DNA, 25 bp, Homo sapien
tacccactgaggaatagaggccagg

SEQ ID NO: 179541 - DNA, 25 bp, Homo sapien
aatcttcagtgaggcgtgctagacc

SEQ ID NO: 179542 - DNA, 25 bp, Homo sapien
tctgtacaaggctagcatctgggtg

SEQ ID NO: 179543 - DNA, 25 bp, Homo sapien
gacttatgctgaccttatggaaacc

SEQ ID NO: 179544 - DNA, 25 bp, Homo sapien
caaagtatattctggcctgaggaca

SEQ ID NO: 179545 - DNA, 25 bp, Homo sapien
gaagtatctccattctagtgccacc

SEQ ID NO: 179546 - DNA, 25 bp, Homo sapien
tatttttagcagtgtagttaggcaa

SEQ ID NO: 179547 - DNA, 25 bp, Homo sapien
ctactaaactacttgcagagctgag

SEQ ID NO: 179548 - DNA, 25 bp, Homo sapien
tagttaggcaatccaagcctggact

SEQ ID NO: 179549 - DNA, 25 bp, Homo sapien
caggagactagagtacagagagcat

SEQ ID NO: 179550 - DNA, 25 bp, Homo sapien
ggtatcaaggtgtcaaactttgtct

SEQ ID NO: 179551 - DNA, 25 bp, Homo sapien
taggtattcacagagagtgggtatc

SEQ ID NO: 179552 - DNA, 25 bp, Homo sapien
aagaaacaggtatggcaccgtggcc

SEQ ID NO: 179553 - DNA, 25 bp, Homo sapien
caaaggtctagaactgtctctacag

SEQ ID NO: 179554 - DNA, 25 bp, Homo sapien
gagagcctactatccgaaaccattc

SEQ ID NO: 179555 - DNA, 25 bp, Homo sapien
agcagggagagcctactatccgaaa

SEQ ID NO: 179556 - DNA, 25 bp, Homo sapien
aaaccattccctgaaccctctgaat

SEQ ID NO: 179557 - DNA, 25 bp, Homo sapien
tgaattctgaagcatgtggatttct

SEQ ID NO: 179558 - DNA, 25 bp, Homo sapien
aaccaagtcccctatggtaatgacg

SEQ ID NO: 179559 - DNA, 25 bp, Homo sapien
ccaagtcccctatggtaatgacgga

SEQ ID NO: 179560 - DNA, 25 bp, Homo sapien
accaagtcccctatggtaatgacgg

SEQ ID NO: 179561 - DNA, 25 bp, Homo sapien
caagtcccctatggtaatgacggag

SEQ ID NO: 179562 - DNA, 25 bp, Homo sapien
gatccaatcctgactcagactacct

SEQ ID NO: 179563 - DNA, 25 bp, Homo sapien
actactacttctagatgaacacagg

SEQ ID NO: 179564 - DNA, 25 bp, Homo sapien
aagagaggaggctgttgatccaatc

SEQ ID NO: 179565 - DNA, 25 bp, Homo sapien
tgaacacaggctcttgagagtcccc

SEQ ID NO: 179566 - DNA, 25 bp, Homo sapien
ggcttcctggccctaggaggtaata

SEQ ID NO: 179567 - DNA, 25 bp, Homo sapien
tagtctcagggggtccatgtagcaa

SEQ ID NO: 179568 - DNA, 25 bp, Homo sapien
cctaggaggtaataatgatagtctc

SEQ ID NO: 179569 - DNA, 25 bp, Homo sapien
gggtccatgtagcaatccaagcaat

SEQ ID NO: 179570 - DNA, 25 bp, Homo sapien
tgctcctagtaagaagcaactctgt

SEQ ID NO: 179571 - DNA, 25 bp, Homo sapien
aaagaatgtgctcctagtaagaagc

SEQ ID NO: 179572 - DNA, 25 bp, Homo sapien
tcctagtaagaagcaactctgttcc

SEQ ID NO: 179573 - DNA, 25 bp, Homo sapien
agaggataggatgaagggaaggcag

SEQ ID NO: 179574 - DNA, 25 bp, Homo sapien
tctggcatggactcttagacttccc

SEQ ID NO: 179575 - DNA, 25 bp, Homo sapien
tgtgcccatggctaggtctgctgtg

SEQ ID NO: 179576 - DNA, 25 bp, Homo sapien
tggtgagccgagattcctaaaggga

SEQ ID NO: 179577 - DNA, 25 bp, Homo sapien
tagatatgacctgggttggtgagcc

SEQ ID NO: 179578 - DNA, 25 bp, Homo sapien
ctgaactcttcgtcggcctagaggg

SEQ ID NO: 179579 - DNA, 25 bp, Homo sapien
tatggcctcccctagtggaggccca

SEQ ID NO: 179580 - DNA, 25 bp, Homo sapien
tagtggaggcccattgggactgaac

SEQ ID NO: 179581 - DNA, 25 bp, Homo sapien
cctagaggggccagattgaagtgtc

SEQ ID NO: 179582 - DNA, 25 bp, Homo sapien
tagaggttctgggtgcgtccttgaa

SEQ ID NO: 179583 - DNA, 25 bp, Homo sapien
gttccatgggctcagccaggttcac

SEQ ID NO: 179584 - DNA, 25 bp, Homo sapien
ttgtggagtgctagtctttgttgct

SEQ ID NO: 179585 - DNA, 25 bp, Homo sapien
gtccttgaagatggtccctgaggaa

SEQ ID NO: 179586 - DNA, 25 bp, Homo sapien
cctcaaaaggtctcaggctaaacac

SEQ ID NO: 179587 - DNA, 25 bp, Homo sapien
actggtttcttatgcccggagccca

SEQ ID NO: 179588 - DNA, 25 bp, Homo sapien
agatagtaacagaataactggtttc

SEQ ID NO: 179589 - DNA, 25 bp, Homo sapien
tattccagtggactgcctcaaaagg

SEQ ID NO: 179590 - DNA, 25 bp, Homo sapien
ccaggctgcatccaactcagcacat

SEQ ID NO: 179591 - DNA, 25 bp, Homo sapien
ggctgcatccaactcagcacatcct

SEQ ID NO: 179592 - DNA, 25 bp, Homo sapien
catgtccacaccatattgtctccag

SEQ ID NO: 179593 - DNA, 25 bp, Homo sapien
cccatgtccacaccatattgtctcc

SEQ ID NO: 179594 - DNA, 25 bp, Homo sapien
acagaggtatgaagaccacaatcct

SEQ ID NO: 179595 - DNA, 25 bp, Homo sapien
cagaggtatgaagaccacaatcctt

SEQ ID NO: 179596 - DNA, 25 bp, Homo sapien
gaggtatgaagaccacaatccttga

SEQ ID NO: 179597 - DNA, 25 bp, Homo sapien
ggtatgaagaccacaatccttgaaa

SEQ ID NO: 179598 - DNA, 25 bp, Homo sapien
tttctccagctgacacaagtactca

SEQ ID NO: 179599 - DNA, 25 bp, Homo sapien
cggtgtaggcagtgctttctccagc

SEQ ID NO: 179600 - DNA, 25 bp, Homo sapien
agggttccccatactcttgttcaag

SEQ ID NO: 179601 - DNA, 25 bp, Homo sapien
tggcagccagaaagggttccccata

SEQ ID NO: 179602 - DNA, 25 bp, Homo sapien
atagccacataatagccttcaaacc

SEQ ID NO: 179603 - DNA, 25 bp, Homo sapien
agagaaaatagccacataatagcct

SEQ ID NO: 179604 - DNA, 25 bp, Homo sapien
gaaaatagccacataatagccttca

SEQ ID NO: 179605 - DNA, 25 bp, Homo sapien
agattaggtcaaaagtgggttagtg

SEQ ID NO: 179606 - DNA, 25 bp, Homo sapien
gcagcttcgaggccaaatccacagg

SEQ ID NO: 179607 - DNA, 25 bp, Homo sapien
gctggtaaaaagtttcctgtgcctc

SEQ ID NO: 179608 - DNA, 25 bp, Homo sapien
ctgcagcttcgaggccaaatccaca

SEQ ID NO: 179609 - DNA, 25 bp, Homo sapien
tgcagcttcgaggccaaatccacag

SEQ ID NO: 179610 - DNA, 25 bp, Homo sapien
tcagggcttgttccggggattactc

SEQ ID NO: 179611 - DNA, 25 bp, Homo sapien
cagtagacaggaggagcaactttgc

SEQ ID NO: 179612 - DNA, 25 bp, Homo sapien
gacagagaagttagcaccaacatcc

SEQ ID NO: 179613 - DNA, 25 bp, Homo sapien
tgtaactggggtcagggcttgttcc

SEQ ID NO: 179614 - DNA, 25 bp, Homo sapien
ttcaggacttgggcccaaggccggc

SEQ ID NO: 179615 - DNA, 25 bp, Homo sapien
agccttgggatcccgcactataggt

SEQ ID NO: 179616 - DNA, 25 bp, Homo sapien
gatcccgcactataggtccagattc

SEQ ID NO: 179617 - DNA, 25 bp, Homo sapien
tgggatcccgcactataggtccaga

SEQ ID NO: 179618 - DNA, 25 bp, Homo sapien
tcagaatccccacttcggggcaagc

SEQ ID NO: 179619 - DNA, 25 bp, Homo sapien
gaatccccacttcggggcaagctga

SEQ ID NO: 179620 - DNA, 25 bp, Homo sapien
attcagaatccccacttcggggcaa

SEQ ID NO: 179621 - DNA, 25 bp, Homo sapien
ctgaattcagaatccccacttcggg

SEQ ID NO: 179622 - DNA, 25 bp, Homo sapien
agctgtgggcccttgtcaggtgctc

SEQ ID NO: 179623 - DNA, 25 bp, Homo sapien
ttttccaactagtctcatccccaag

SEQ ID NO: 179624 - DNA, 25 bp, Homo sapien
aggtgctcgcatcccgcccctttct

SEQ ID NO: 179625 - DNA, 25 bp, Homo sapien
cttttccaactagtctcatccccaa

SEQ ID NO: 179626 - DNA, 25 bp, Homo sapien
caacagcgcgcagagatcgcagaaa

SEQ ID NO: 179627 - DNA, 25 bp, Homo sapien
gtggtgccggtagcgaaccaagcca

SEQ ID NO: 179628 - DNA, 25 bp, Homo sapien
ctttaggcccatacaaaggcgttcg

SEQ ID NO: 179629 - DNA, 25 bp, Homo sapien
cagtactcgcggaaaatgttccacg

SEQ ID NO: 179630 - DNA, 25 bp, Homo sapien
gacccgccaccaggggcgtagccat

SEQ ID NO: 179631 - DNA, 25 bp, Homo sapien
tgcgggacccgccaccaggggcgta

SEQ ID NO: 179632 - DNA, 25 bp, Homo sapien
ctgcgggacccgccaccaggggcgt

SEQ ID NO: 179633 - DNA, 25 bp, Homo sapien
ggacccgccaccaggggcgtagcca

SEQ ID NO: 179634 - DNA, 25 bp, Homo sapien
tgggtacctcgcgatctgactcggc

SEQ ID NO: 179635 - DNA, 25 bp, Homo sapien
tctctgccggctgacatgagttggc

SEQ ID NO: 179636 - DNA, 25 bp, Homo sapien
ggtcgctcagctttaaacgtcgccg

SEQ ID NO: 179637 - DNA, 25 bp, Homo sapien
gctttcttcgcggagcctgcggaga

SEQ ID NO: 179638 - DNA, 25 bp, Homo sapien
caccatgttctttggccatgtccag

SEQ ID NO: 179639 - DNA, 25 bp, Homo sapien
gacatttcttcaagcgcaccatgtt

SEQ ID NO: 179640 - DNA, 25 bp, Homo sapien
tcttcaagcgcaccatgttctttgg

SEQ ID NO: 179641 - DNA, 25 bp, Homo sapien
caagcgcaccatgttctttggccat

SEQ ID NO: 179642 - DNA, 25 bp, Homo sapien
ttcaaagtggctactttcctcctcc

SEQ ID NO: 179643 - DNA, 25 bp, Homo sapien
gggatcctggtaaaacttgtggcca

SEQ ID NO: 179644 - DNA, 25 bp, Homo sapien
tccagcctggttgcaatgaattgca

SEQ ID NO: 179645 - DNA, 25 bp, Homo sapien
cctttgccagaatcacggggcaggg

SEQ ID NO: 179646 - DNA, 25 bp, Homo sapien
ccttgagctcagtgatctgcgtgcc

SEQ ID NO: 179647 - DNA, 25 bp, Homo sapien
gctctcaaatttgtccaccctaagc

SEQ ID NO: 179648 - DNA, 25 bp, Homo sapien
cctggtactggctccccagaagttt

SEQ ID NO: 179649 - DNA, 25 bp, Homo sapien
ctaagcctccagctatgagtcaatt

SEQ ID NO: 179650 - DNA, 25 bp, Homo sapien
ttattagcatctgttcccccagtgc

SEQ ID NO: 179651 - DNA, 25 bp, Homo sapien
ttagcatctgttcccccagtgcaag

SEQ ID NO: 179652 - DNA, 25 bp, Homo sapien
catctgttcccccagtgcaagtgaa

SEQ ID NO: 179653 - DNA, 25 bp, Homo sapien
ctgttcccccagtgcaagtgaagac

SEQ ID NO: 179654 - DNA, 25 bp, Homo sapien
tcatctgactccagtcccattgctc

SEQ ID NO: 179655 - DNA, 25 bp, Homo sapien
ccagtcccattgctcctggcacggg

SEQ ID NO: 179656 - DNA, 25 bp, Homo sapien
cctatcttggggcaatgtccttgct

SEQ ID NO: 179657 - DNA, 25 bp, Homo sapien
gggagctgctctgtagtgtgcccct

SEQ ID NO: 179658 - DNA, 25 bp, Homo sapien
ctcgagatgccatagggatggtctc

SEQ ID NO: 179659 - DNA, 25 bp, Homo sapien
tagggatggtctctcctaagtgact

SEQ ID NO: 179660 - DNA, 25 bp, Homo sapien
tgccatagggatggtctctcctaag

SEQ ID NO: 179661 - DNA, 25 bp, Homo sapien
gatgccatagggatggtctctccta

SEQ ID NO: 179662 - DNA, 25 bp, Homo sapien
atgacaccgtgcacctgggagagct

SEQ ID NO: 179663 - DNA, 25 bp, Homo sapien
gggcctggtcgcacaggcacaaacg

SEQ ID NO: 179664 - DNA, 25 bp, Homo sapien
cgactggcgcagtgtcactgtttca

SEQ ID NO: 179665 - DNA, 25 bp, Homo sapien
acctggatgacaccgtgcacctggg

SEQ ID NO: 179666 - DNA, 25 bp, Homo sapien
tctgtaacccagagccttcgagccg

SEQ ID NO: 179667 - DNA, 25 bp, Homo sapien
gggttcttgaagacaatctgtactt

SEQ ID NO: 179668 - DNA, 25 bp, Homo sapien
ttcgagccggaagacgacattggtg

SEQ ID NO: 179669 - DNA, 25 bp, Homo sapien
gccttcgagccggaagacgacattg

SEQ ID NO: 179670 - DNA, 25 bp, Homo sapien
cagacggaaggtgtgctgcttggcc

SEQ ID NO: 179671 - DNA, 25 bp, Homo sapien
tctggggtgcgcagacggaaggtgt

SEQ ID NO: 179672 - DNA, 25 bp, Homo sapien
agacggaaggtgtgctgcttggcca

SEQ ID NO: 179673 - DNA, 25 bp, Homo sapien
gagaggtctggggtgcgcagacgga

SEQ ID NO: 179674 - DNA, 25 bp, Homo sapien
gcctgagacattgagcagcatggcc

SEQ ID NO: 179675 - DNA, 25 bp, Homo sapien
ggtccacaagatggggccggtattc

SEQ ID NO: 179676 - DNA, 25 bp, Homo sapien
ggtattccttgtaggccactggcat

SEQ ID NO: 179677 - DNA, 25 bp, Homo sapien
cgtggcctgagacattgagcagcat

SEQ ID NO: 179678 - DNA, 25 bp, Homo sapien
ccggttggcatacacattgggtttg

SEQ ID NO: 179679 - DNA, 25 bp, Homo sapien
gtgattgatcagcatcacagagacc

SEQ ID NO: 179680 - DNA, 25 bp, Homo sapien
ccttgaagatggtaccactgacacc

SEQ ID NO: 179681 - DNA, 25 bp, Homo sapien
cactgacaccagtatagaaagtgac

SEQ ID NO: 179682 - DNA, 25 bp, Homo sapien
tgcttatagaggtaggtgatgtcct

SEQ ID NO: 179683 - DNA, 25 bp, Homo sapien
gccagtacaccttgtcactattcac

SEQ ID NO: 179684 - DNA, 25 bp, Homo sapien
tgacaatgagtgtgccgatggcctt

SEQ ID NO: 179685 - DNA, 25 bp, Homo sapien
tctcctccacataaacaatcttgaa

SEQ ID NO: 179686 - DNA, 25 bp, Homo sapien
tgaagttgggaccagagaacccatg

SEQ ID NO: 179687 - DNA, 25 bp, Homo sapien
cctggcagagcactttggcaatatc

SEQ ID NO: 179688 - DNA, 25 bp, Homo sapien
gagactttccaagacgagccagacg

SEQ ID NO: 179689 - DNA, 25 bp, Homo sapien
caatggctgactttacgactagtga

SEQ ID NO: 179690 - DNA, 25 bp, Homo sapien
ggcgtgtcgtacttcatgtagacca

SEQ ID NO: 179691 - DNA, 25 bp, Homo sapien
gtcgtacttcatgtagaccaggcca

SEQ ID NO: 179692 - DNA, 25 bp, Homo sapien
aaaatgaaaggcgtgtcgtacttca

SEQ ID NO: 179693 - DNA, 25 bp, Homo sapien
gaaaggcgtgtcgtacttcatgtag

SEQ ID NO: 179694 - DNA, 25 bp, Homo sapien
tccagcagtcgttccacacatggaa

SEQ ID NO: 179695 - DNA, 25 bp, Homo sapien
catcaaagcccgagggcagatccgg

SEQ ID NO: 179696 - DNA, 25 bp, Homo sapien
cactgctagtctcttggggtgtggc

SEQ ID NO: 179697 - DNA, 25 bp, Homo sapien
ggggtgtggcatccaccacctgcca

SEQ ID NO: 179698 - DNA, 25 bp, Homo sapien
ctcgtcgaagtagatgtccatggta

SEQ ID NO: 179699 - DNA, 25 bp, Homo sapien
ccatggtaagggatgtgtctgtgtc

SEQ ID NO: 179700 - DNA, 25 bp, Homo sapien
gggcttcatgttctcgtcgaagtag

SEQ ID NO: 179701 - DNA, 25 bp, Homo sapien
gtgacagtacgggtggccagaccca

SEQ ID NO: 179702 - DNA, 25 bp, Homo sapien
gtgaggcatcgtgtcaggagtatca

SEQ ID NO: 179703 - DNA, 25 bp, Homo sapien
caagtgaggcatcgtgtcaggagta

SEQ ID NO: 179704 - DNA, 25 bp, Homo sapien
caagctgggcatagactgccagggt

SEQ ID NO: 179705 - DNA, 25 bp, Homo sapien
gaagggcaactaggattgccaagct

SEQ ID NO: 179706 - DNA, 25 bp, Homo sapien
tcgggagtaatcaccagaccagttc

SEQ ID NO: 179707 - DNA, 25 bp, Homo sapien
taggtagctaagcaggatctccacg

SEQ ID NO: 179708 - DNA, 25 bp, Homo sapien
tggtggtcacgccagcaaagaccca

SEQ ID NO: 179709 - DNA, 25 bp, Homo sapien
ggaatatcccgtgcgtaggtagcta

SEQ ID NO: 179710 - DNA, 25 bp, Homo sapien
agatgacccgggagacattgactgg

SEQ ID NO: 179711 - DNA, 25 bp, Homo sapien
caggatgtataagcaggcatccagc

SEQ ID NO: 179712 - DNA, 25 bp, Homo sapien
ccccgccggtccaggatgtataagc

SEQ ID NO: 179713 - DNA, 25 bp, Homo sapien
catggcagagatgacccgggagaca

SEQ ID NO: 179714 - DNA, 25 bp, Homo sapien
accaatctgtgcttcggtcccgtag

SEQ ID NO: 179715 - DNA, 25 bp, Homo sapien
cattaagaacatactcctgccgcca

SEQ ID NO: 179716 - DNA, 25 bp, Homo sapien
tcatggtccacgtacacaatgtcct

SEQ ID NO: 179717 - DNA, 25 bp, Homo sapien
gtagttccaggtccgctcaccaatc

SEQ ID NO: 179718 - DNA, 25 bp, Homo sapien
tgaactgaaacttgccgatgatggc

SEQ ID NO: 179719 - DNA, 25 bp, Homo sapien
agtgtggacccgcaggttcagattc

SEQ ID NO: 179720 - DNA, 25 bp, Homo sapien
aactccccagcgtctgattgtgtgc

SEQ ID NO: 179721 - DNA, 25 bp, Homo sapien
gcccactgggatgatcacgtgcgtg

SEQ ID NO: 179722 - DNA, 25 bp, Homo sapien
cctgatcctgaaggccaaccctgcc

SEQ ID NO: 179723 - DNA, 25 bp, Homo sapien
ccccgtatgaaagggcagtcctgat

SEQ ID NO: 179724 - DNA, 25 bp, Homo sapien
ctgatcctgaaggccaaccctgcct

SEQ ID NO: 179725 - DNA, 25 bp, Homo sapien
ctgccccgtatgaaagggcagtcct

SEQ ID NO: 179726 - DNA, 25 bp, Homo sapien
tcagaggattcataggtccgggaca

SEQ ID NO: 179727 - DNA, 25 bp, Homo sapien
gtaactcaagggtgatgcgatcaga

SEQ ID NO: 179728 - DNA, 25 bp, Homo sapien
agcatatggaaaggctgcccgcggc

SEQ ID NO: 179729 - DNA, 25 bp, Homo sapien
tatcagctcgtcgtactcatactcg

SEQ ID NO: 179730 - DNA, 25 bp, Homo sapien
ctcggatggtgccatctccagctgc

SEQ ID NO: 179731 - DNA, 25 bp, Homo sapien
gtgccatctccagctgcattgacac

SEQ ID NO: 179732 - DNA, 25 bp, Homo sapien
gccatctccagctgcattgacaccg

SEQ ID NO: 179733 - DNA, 25 bp, Homo sapien
tggtgccatctccagctgcattgac

SEQ ID NO: 179734 - DNA, 25 bp, Homo sapien
aggtcttcgagtgccagagctggac

SEQ ID NO: 179735 - DNA, 25 bp, Homo sapien
ctggaccctcgacccctggagtcag

SEQ ID NO: 179736 - DNA, 25 bp, Homo sapien
tgccccgggatacaggccggcggga

SEQ ID NO: 179737 - DNA, 25 bp, Homo sapien
tgagccccgggagccaggtcttcga

SEQ ID NO: 179738 - DNA, 25 bp, Homo sapien
tctgcgagagcgtccgtctggctct

SEQ ID NO: 179739 - DNA, 25 bp, Homo sapien
ccgcatttcggcatgaacagcagcc

SEQ ID NO: 179740 - DNA, 25 bp, Homo sapien
ccagtcgtcatctgccgcatttcgg

SEQ ID NO: 179741 - DNA, 25 bp, Homo sapien
agcagcgagcccagaaggaacggcc

SEQ ID NO: 179742 - DNA, 25 bp, Homo sapien
cccaacggcccacatcggaacgtgg

SEQ ID NO: 179743 - DNA, 25 bp, Homo sapien
gggctgcaaggggttgccaccccaa

SEQ ID NO: 179744 - DNA, 25 bp, Homo sapien
ccacatcggaacgtggcccatccat

SEQ ID NO: 179745 - DNA, 25 bp, Homo sapien
agatggcgtggtagggggctgcaag

SEQ ID NO: 179746 - DNA, 25 bp, Homo sapien
aactgcccaatgaagaaacccactc

SEQ ID NO: 179747 - DNA, 25 bp, Homo sapien
gaaatccacatagttccctgcatgg

SEQ ID NO: 179748 - DNA, 25 bp, Homo sapien
atggacacttgtcccagcctcaaga

SEQ ID NO: 179749 - DNA, 25 bp, Homo sapien
ccaccaaacaacatccgaaaaactg

SEQ ID NO: 179750 - DNA, 25 bp, Homo sapien
ggaaagcagagtcttggtgttggga

SEQ ID NO: 179751 - DNA, 25 bp, Homo sapien
ttggtgttgggaacagcctagctgg

SEQ ID NO: 179752 - DNA, 25 bp, Homo sapien
gttggcaaccgcagtactgagtcct

SEQ ID NO: 179753 - DNA, 25 bp, Homo sapien
aaccgcagtactgagtcctggggct

SEQ ID NO: 179754 - DNA, 25 bp, Homo sapien
tggcaaccgcagtactgagtcctgg

SEQ ID NO: 179755 - DNA, 25 bp, Homo sapien
ggcaaccgcagtactgagtcctggg

SEQ ID NO: 179756 - DNA, 25 bp, Homo sapien
tcaggactctctaggtcaggacaag

SEQ ID NO: 179757 - DNA, 25 bp, Homo sapien
tgtagtgatagcagcgacaacagct

SEQ ID NO: 179758 - DNA, 25 bp, Homo sapien
gtttgagtcagtgccctaacccctg

SEQ ID NO: 179759 - DNA, 25 bp, Homo sapien
gacactcagctcaggacctcaagga

SEQ ID NO: 179760 - DNA, 25 bp, Homo sapien
ccattctttattcagtcccaataag

SEQ ID NO: 179761 - DNA, 25 bp, Homo sapien
ttcagtcccaataagttaaagggca

SEQ ID NO: 179762 - DNA, 25 bp, Homo sapien
cagtcccaataagttaaagggcaag

SEQ ID NO: 179763 - DNA, 25 bp, Homo sapien
tctttattcagtcccaataagttaa

SEQ ID NO: 179764 - DNA, 25 bp, Homo sapien
tccaagatgcccaccgcttggcaca

SEQ ID NO: 179765 - DNA, 25 bp, Homo sapien
tgctccaagatgcccaccgcttggc

SEQ ID NO: 179766 - DNA, 25 bp, Homo sapien
ttggcacagcgggttaccctgcagg

SEQ ID NO: 179767 - DNA, 25 bp, Homo sapien
gcccaccgcttggcacagcgggtta

SEQ ID NO: 179768 - DNA, 25 bp, Homo sapien
ggcaagaggctggagcactgcaggc

SEQ ID NO: 179769 - DNA, 25 bp, Homo sapien
caagaggctggagcactgcaggctg

SEQ ID NO: 179770 - DNA, 25 bp, Homo sapien
ggaggcaagaggctggagcactgca

SEQ ID NO: 179771 - DNA, 25 bp, Homo sapien
gcaggaggcaagaggctggagcact

SEQ ID NO: 179772 - DNA, 25 bp, Homo sapien
tgtctgaaaggcacccagaaggaag

SEQ ID NO: 179773 - DNA, 25 bp, Homo sapien
gtctgaaaggcacccagaaggaagg

SEQ ID NO: 179774 - DNA, 25 bp, Homo sapien
gaaaggcacccagaaggaaggatac

SEQ ID NO: 179775 - DNA, 25 bp, Homo sapien
ctgaaaggcacccagaaggaaggat

SEQ ID NO: 179776 - DNA, 25 bp, Homo sapien
gtaggttggtgacgccgtccaggga

SEQ ID NO: 179777 - DNA, 25 bp, Homo sapien
tctatggcattatcactggcctgca

SEQ ID NO: 179778 - DNA, 25 bp, Homo sapien
ccagggactctatggcattatcact

SEQ ID NO: 179779 - DNA, 25 bp, Homo sapien
gcagccggggtaggttggtgacgcc

SEQ ID NO: 179780 - DNA, 25 bp, Homo sapien
gtcagccagggatggttcagcaact

SEQ ID NO: 179781 - DNA, 25 bp, Homo sapien
agctcagggtgacgggtccacagag

SEQ ID NO: 179782 - DNA, 25 bp, Homo sapien
gaggagctcagggtgacgggtccac

SEQ ID NO: 179783 - DNA, 25 bp, Homo sapien
tgtcagccagggatggttcagcaac

SEQ ID NO: 179784 - DNA, 25 bp, Homo sapien
acatctccttgtaggatgggcagac

SEQ ID NO: 179785 - DNA, 25 bp, Homo sapien
gggtcaggctgcgtgatggaggtgg

SEQ ID NO: 179786 - DNA, 25 bp, Homo sapien
aggtggaaggcacgcagttacctgt

SEQ ID NO: 179787 - DNA, 25 bp, Homo sapien
gaaggcacgcagttacctgttcggg

SEQ ID NO: 179788 - DNA, 25 bp, Homo sapien
gtgacagggacggagacatgggtac

SEQ ID NO: 179789 - DNA, 25 bp, Homo sapien
ccacccgtgacagggacggagacat

SEQ ID NO: 179790 - DNA, 25 bp, Homo sapien
ccgtgacagggacggagacatgggt

SEQ ID NO: 179791 - DNA, 25 bp, Homo sapien
agaaccacccgtgacagggacggag

SEQ ID NO: 179792 - DNA, 25 bp, Homo sapien
gaggcgattgtgtgacaagtcaaga

SEQ ID NO: 179793 - DNA, 25 bp, Homo sapien
caggtggcagggttcggaggcgatt

SEQ ID NO: 179794 - DNA, 25 bp, Homo sapien
tcaagatgggtgaccaagagcagct

SEQ ID NO: 179795 - DNA, 25 bp, Homo sapien
gtgacaagtcaagatgggtgaccaa

SEQ ID NO: 179796 - DNA, 25 bp, Homo sapien
acttgctgcgcaggtcatccagata

SEQ ID NO: 179797 - DNA, 25 bp, Homo sapien
cgctattctccagcaagaacttgct

SEQ ID NO: 179798 - DNA, 25 bp, Homo sapien
ccatcttgagcacgctattctccag

SEQ ID NO: 179799 - DNA, 25 bp, Homo sapien
tcatccagatacgttgcccgcatgg

SEQ ID NO: 179800 - DNA, 25 bp, Homo sapien
gcagggtatgcatgtcagctgcctg

SEQ ID NO: 179801 - DNA, 25 bp, Homo sapien
gtccagtgcccgcatcagcaggatg

SEQ ID NO: 179802 - DNA, 25 bp, Homo sapien
tgcccgcatcagcaggatgatggta

SEQ ID NO: 179803 - DNA, 25 bp, Homo sapien
agcaggatgatggtaagcaggcacc

SEQ ID NO: 179804 - DNA, 25 bp, Homo sapien
cgcatcagcaggatgatggtaagca

SEQ ID NO: 179805 - DNA, 25 bp, Homo sapien
cagctccttacaggattccagctca

SEQ ID NO: 179806 - DNA, 25 bp, Homo sapien
tcctgcagctccttacaggattcca

SEQ ID NO: 179807 - DNA, 25 bp, Homo sapien
gattccagctcagactgcagcactg

SEQ ID NO: 179808 - DNA, 25 bp, Homo sapien
gcagcactgtggacttctccactga

SEQ ID NO: 179809 - DNA, 25 bp, Homo sapien
atctagactgaaacagctccttgag

SEQ ID NO: 179810 - DNA, 25 bp, Homo sapien
ttcccagtatctagactgaaacagc

SEQ ID NO: 179811 - DNA, 25 bp, Homo sapien
ggaggagttgaggcccacagccctg

SEQ ID NO: 179812 - DNA, 25 bp, Homo sapien
cagtatctagactgaaacagctcct

SEQ ID NO: 179813 - DNA, 25 bp, Homo sapien
ctgaatagctgctcgtctgtcgtgg

SEQ ID NO: 179814 - DNA, 25 bp, Homo sapien
gctcgtctgtcgtggagtcccggca

SEQ ID NO: 179815 - DNA, 25 bp, Homo sapien
gtctgtcgtggagtcccggcaccag

SEQ ID NO: 179816 - DNA, 25 bp, Homo sapien
tagctgctcgtctgtcgtggagtcc

SEQ ID NO: 179817 - DNA, 25 bp, Homo sapien
ctggggaaagagtaggtggttggag

SEQ ID NO: 179818 - DNA, 25 bp, Homo sapien
gaaagagtaggtggttggagggtgc

SEQ ID NO: 179819 - DNA, 25 bp, Homo sapien
aagagtaggtggttggagggtgcac

SEQ ID NO: 179820 - DNA, 25 bp, Homo sapien
agagtaggtggttggagggtgcacc

SEQ ID NO: 179821 - DNA, 25 bp, Homo sapien
gggctgctgcaaggggtggaggctg

SEQ ID NO: 179822 - DNA, 25 bp, Homo sapien
cttgagaggaaaagagtgatggggg

SEQ ID NO: 179823 - DNA, 25 bp, Homo sapien
ggaaaagagtgatgggggctgctgc

SEQ ID NO: 179824 - DNA, 25 bp, Homo sapien
ggctgctgcaaggggtggaggctgc

SEQ ID NO: 179825 - DNA, 25 bp, Homo sapien
gctgtccaaatgacgcgaaatgtat

SEQ ID NO: 179826 - DNA, 25 bp, Homo sapien
tttaaaagcacgcattctttctgga

SEQ ID NO: 179827 - DNA, 25 bp, Homo sapien
gcaactggtcgttgagggaggcagc

SEQ ID NO: 179828 - DNA, 25 bp, Homo sapien
cattctttctggacatcgcctgctg

SEQ ID NO: 179829 - DNA, 25 bp, Homo sapien
ggagtactgggtcaaggaaatgccc

SEQ ID NO: 179830 - DNA, 25 bp, Homo sapien
agtactgggtcaaggaaatgcccca

SEQ ID NO: 179831 - DNA, 25 bp, Homo sapien
atgccccagcctaaccacttttttg

SEQ ID NO: 179832 - DNA, 25 bp, Homo sapien
cacttttttgactgtcccacccagc

SEQ ID NO: 179833 - DNA, 25 bp, Homo sapien
ggggagaatcatcaaccatgagcag

SEQ ID NO: 179834 - DNA, 25 bp, Homo sapien
caaccatgagcagcaagatctccat

SEQ ID NO: 179835 - DNA, 25 bp, Homo sapien
ccagacatggctgggccggttcctg

SEQ ID NO: 179836 - DNA, 25 bp, Homo sapien
gccggttcctgccatctggggtcct

SEQ ID NO: 179837 - DNA, 25 bp, Homo sapien
gacagtcagacaggcctcgtcccgg

SEQ ID NO: 179838 - DNA, 25 bp, Homo sapien
tcacatgcaggcagcgcagtgcatc

SEQ ID NO: 179839 - DNA, 25 bp, Homo sapien
aaggagacagtcagacaggcctcgt

SEQ ID NO: 179840 - DNA, 25 bp, Homo sapien
ctcgtcccggctcacatgcaggcag

SEQ ID NO: 179841 - DNA, 25 bp, Homo sapien
taggagccaacggtgataaaaccag

SEQ ID NO: 179842 - DNA, 25 bp, Homo sapien
ctcggcctaggagccaacggtgata

SEQ ID NO: 179843 - DNA, 25 bp, Homo sapien
gataaaaccaggcactctggtcatt

SEQ ID NO: 179844 - DNA, 25 bp, Homo sapien
aaaaccaggcactctggtcattggg

SEQ ID NO: 179845 - DNA, 25 bp, Homo sapien
tgcacaggggctacgtatgtcagtt

SEQ ID NO: 179846 - DNA, 25 bp, Homo sapien
acttaagcttccttcagccagggac

SEQ ID NO: 179847 - DNA, 25 bp, Homo sapien
cagggactgattcttaagcacccct

SEQ ID NO: 179848 - DNA, 25 bp, Homo sapien
tggagccacgcatgaagtaggtgct

SEQ ID NO: 179849 - DNA, 25 bp, Homo sapien
tcctgagcatccctgaccctggtta

SEQ ID NO: 179850 - DNA, 25 bp, Homo sapien
gcactgcagagtcctcctgagcatc

SEQ ID NO: 179851 - DNA, 25 bp, Homo sapien
gctggaagggtggcactgcagagtc

SEQ ID NO: 179852 - DNA, 25 bp, Homo sapien
tgagtgacaggttcaggaacagggt

SEQ ID NO: 179853 - DNA, 25 bp, Homo sapien
gcccctgtggtccagaatccggctg

SEQ ID NO: 179854 - DNA, 25 bp, Homo sapien
ggcgcccctgtggtccagaatccgg

SEQ ID NO: 179855 - DNA, 25 bp, Homo sapien
ggaggcgcccctgtggtccagaatc

SEQ ID NO: 179856 - DNA, 25 bp, Homo sapien
cccctgtggtccagaatccggctgg

SEQ ID NO: 179857 - DNA, 25 bp, Homo sapien
ctgtgtggccacaaaccgccgatag

SEQ ID NO: 179858 - DNA, 25 bp, Homo sapien
caagagacaggagcggtaatgccag

SEQ ID NO: 179859 - DNA, 25 bp, Homo sapien
agcggtaatgccaggaagagtagtt

SEQ ID NO: 179860 - DNA, 25 bp, Homo sapien
agtgaaggctagctcttctgcaggg

SEQ ID NO: 179861 - DNA, 25 bp, Homo sapien
ctggaggggagaggtgacagcatat

SEQ ID NO: 179862 - DNA, 25 bp, Homo sapien
tggtgccaggtaccataagacttgg

SEQ ID NO: 179863 - DNA, 25 bp, Homo sapien
tctcgggtccagttgggctcaggca

SEQ ID NO: 179864 - DNA, 25 bp, Homo sapien
cggcctagcagccagcatcggtggt

SEQ ID NO: 179865 - DNA, 25 bp, Homo sapien
taagacttggggttcacccgcaggc

SEQ ID NO: 179866 - DNA, 25 bp, Homo sapien
tgctggagcacctctcgtcggcagt

SEQ ID NO: 179867 - DNA, 25 bp, Homo sapien
agttccagcacggactcatccagct

SEQ ID NO: 179868 - DNA, 25 bp, Homo sapien
cccagaatctggcttgtcagttcca

SEQ ID NO: 179869 - DNA, 25 bp, Homo sapien
ggtggcaaaatcagggttggctccc

SEQ ID NO: 179870 - DNA, 25 bp, Homo sapien
gctctagccttttggcctccgcctg

SEQ ID NO: 179871 - DNA, 25 bp, Homo sapien
cttctggaatacggcctgggtggct

SEQ ID NO: 179872 - DNA, 25 bp, Homo sapien
cgcctgctcttctgacgtcttcacc

SEQ ID NO: 179873 - DNA, 25 bp, Homo sapien
tggctgactggtatagcttcagctt

SEQ ID NO: 179874 - DNA, 25 bp, Homo sapien
ctacaaggatgaacgggttggaaga

SEQ ID NO: 179875 - DNA, 25 bp, Homo sapien
aagagtgcaggttgccttgcagaag

SEQ ID NO: 179876 - DNA, 25 bp, Homo sapien
ttggaagagtgcaggttgccttgca

SEQ ID NO: 179877 - DNA, 25 bp, Homo sapien
aacgggttggaagagtgcaggttgc

SEQ ID NO: 179878 - DNA, 25 bp, Homo sapien
cggggcaaccatggcactgccactg

SEQ ID NO: 179879 - DNA, 25 bp, Homo sapien
ccacactgtggagccctaggttcat

SEQ ID NO: 179880 - DNA, 25 bp, Homo sapien
aaaccccacactgtggagccctagg

SEQ ID NO: 179881 - DNA, 25 bp, Homo sapien
cctaggttcatacggggcaaccatg

SEQ ID NO: 179882 - DNA, 25 bp, Homo sapien
aagggtccagtggtagcccttgaag

SEQ ID NO: 179883 - DNA, 25 bp, Homo sapien
ggaagggtccagtggtagcccttga

SEQ ID NO: 179884 - DNA, 25 bp, Homo sapien
gaagggtccagtggtagcccttgaa

SEQ ID NO: 179885 - DNA, 25 bp, Homo sapien
agggtccagtggtagcccttgaagt

SEQ ID NO: 179886 - DNA, 25 bp, Homo sapien
agaagtgtcaatcacgtagccccgc

SEQ ID NO: 179887 - DNA, 25 bp, Homo sapien
aggagagaagtgtcaatcacgtagc

SEQ ID NO: 179888 - DNA, 25 bp, Homo sapien
ctgtgtccggaagcagcaagcgtgc

SEQ ID NO: 179889 - DNA, 25 bp, Homo sapien
ccacagctgtgtccggaagcagcaa

SEQ ID NO: 179890 - DNA, 25 bp, Homo sapien
cgtgtggcccttcctatagcccgat

SEQ ID NO: 179891 - DNA, 25 bp, Homo sapien
gggacaggctttgcacgttccacaa

SEQ ID NO: 179892 - DNA, 25 bp, Homo sapien
gactaggacttccatccgtgtggcc

SEQ ID NO: 179893 - DNA, 25 bp, Homo sapien
aagaggtgagcacccggactaggac

SEQ ID NO: 179894 - DNA, 25 bp, Homo sapien
ggctcatcgaaacgcagcgcactct

SEQ ID NO: 179895 - DNA, 25 bp, Homo sapien
ctagagcggcgccacgtcccggctc

SEQ ID NO: 179896 - DNA, 25 bp, Homo sapien
ccggctcatcgaaacgcagcgcact

SEQ ID NO: 179897 - DNA, 25 bp, Homo sapien
ccaggcgctggctagagcggcgcca

SEQ ID NO: 179898 - DNA, 25 bp, Homo sapien
cccctcttcagggatgatctggcag

SEQ ID NO: 179899 - DNA, 25 bp, Homo sapien
gatgatctggcagaacctagaatcc

SEQ ID NO: 179900 - DNA, 25 bp, Homo sapien
tagaaaaccccctcttcagggatga

SEQ ID NO: 179901 - DNA, 25 bp, Homo sapien
tcagggatgatctggcagaacctag

SEQ ID NO: 179902 - DNA, 25 bp, Homo sapien
gctttgctggagccggccagggcca

SEQ ID NO: 179903 - DNA, 25 bp, Homo sapien
ttgctggagccggccagggccagga

SEQ ID NO: 179904 - DNA, 25 bp, Homo sapien
atgctttgctggagccggccagggc

SEQ ID NO: 179905 - DNA, 25 bp, Homo sapien
catgctttgctggagccggccaggg

SEQ ID NO: 179906 - DNA, 25 bp, Homo sapien
agagacctctgggaatcttgggtgg

SEQ ID NO: 179907 - DNA, 25 bp, Homo sapien
gagacctctgggaatcttgggtggg

SEQ ID NO: 179908 - DNA, 25 bp, Homo sapien
cagagacctctgggaatcttgggtg

SEQ ID NO: 179909 - DNA, 25 bp, Homo sapien
agacctctgggaatcttgggtgggg

SEQ ID NO: 179910 - DNA, 25 bp, Homo sapien
cttggacacttggtttgaatgcttg

SEQ ID NO: 179911 - DNA, 25 bp, Homo sapien
cccatgggggttgccacgtgcctgt

SEQ ID NO: 179912 - DNA, 25 bp, Homo sapien
ggaaattgcttgatggcccatgggg

SEQ ID NO: 179913 - DNA, 25 bp, Homo sapien
tgctccccagttccttctgagtcag

SEQ ID NO: 179914 - DNA, 25 bp, Homo sapien
cggttttgggcatatatgatgtgag

SEQ ID NO: 179915 - DNA, 25 bp, Homo sapien
tatatgatgtgagtggtaccaggag

SEQ ID NO: 179916 - DNA, 25 bp, Homo sapien
gaggcagaagccctgacgttctatg

SEQ ID NO: 179917 - DNA, 25 bp, Homo sapien
gggcaccatcacattcggttttggg

SEQ ID NO: 179918 - DNA, 25 bp, Homo sapien
agagaaatgagacttttattagctc

SEQ ID NO: 179919 - DNA, 25 bp, Homo sapien
agaaatgagacttttattagctcca

SEQ ID NO: 179920 - DNA, 25 bp, Homo sapien
gagaaatgagacttttattagctcc

SEQ ID NO: 179921 - DNA, 25 bp, Homo sapien
aaagagaaatgagacttttattagc

SEQ ID NO: 179922 - DNA, 25 bp, Homo sapien
gcacaaagaagggacctaggcgcac

SEQ ID NO: 179923 - DNA, 25 bp, Homo sapien
tgagaagacaagcagagacgtagtg

SEQ ID NO: 179924 - DNA, 25 bp, Homo sapien
aggctgctgtttcactgagacagga

SEQ ID NO: 179925 - DNA, 25 bp, Homo sapien
gacgaaccaccaagtccaaatgaga

SEQ ID NO: 179926 - DNA, 25 bp, Homo sapien
tcaaagacaaatagtcttggacggg

SEQ ID NO: 179927 - DNA, 25 bp, Homo sapien
tccacttgggcacacggaggaagga

SEQ ID NO: 179928 - DNA, 25 bp, Homo sapien
ggacacgtgtgagagaacagagctc

SEQ ID NO: 179929 - DNA, 25 bp, Homo sapien
aacttgctagtgtagagggcaataa

SEQ ID NO: 179930 - DNA, 25 bp, Homo sapien
cagagggaacagcagtcaaggctga

SEQ ID NO: 179931 - DNA, 25 bp, Homo sapien
agtgggcagggaacagagggaacag

SEQ ID NO: 179932 - DNA, 25 bp, Homo sapien
tcaaggctgactgctgtgccagggt

SEQ ID NO: 179933 - DNA, 25 bp, Homo sapien
cttggctggagagaccgagggagga

SEQ ID NO: 179934 - DNA, 25 bp, Homo sapien
atggcagcaccttaccactcaggct

SEQ ID NO: 179935 - DNA, 25 bp, Homo sapien
catagcgtcgagcaaggtcacagga

SEQ ID NO: 179936 - DNA, 25 bp, Homo sapien
gatggcagcaccttaccactcaggc

SEQ ID NO: 179937 - DNA, 25 bp, Homo sapien
tcccgaaggccatagcgtcgagcaa

SEQ ID NO: 179938 - DNA, 25 bp, Homo sapien
tatgcagagtgacaaggtttgggcc

SEQ ID NO: 179939 - DNA, 25 bp, Homo sapien
tgggaatgctgaccccttgggcctc

SEQ ID NO: 179940 - DNA, 25 bp, Homo sapien
gatctgggcactggatgctaccgca

SEQ ID NO: 179941 - DNA, 25 bp, Homo sapien
gaatgacatgttcctcaaccaactc

SEQ ID NO: 179942 - DNA, 25 bp, Homo sapien
ccacacatttgccactcaattctgt

SEQ ID NO: 179943 - DNA, 25 bp, Homo sapien
gccaccacacatttgccactcaatt

SEQ ID NO: 179944 - DNA, 25 bp, Homo sapien
catttgccactcaattctgtggttt

SEQ ID NO: 179945 - DNA, 25 bp, Homo sapien
cacatttgccactcaattctgtggt

SEQ ID NO: 179946 - DNA, 25 bp, Homo sapien
ggatctgctgtctttgctaagtgga

SEQ ID NO: 179947 - DNA, 25 bp, Homo sapien
tcaagcagggcctgtaggacccaaa

SEQ ID NO: 179948 - DNA, 25 bp, Homo sapien
gaccttctaagctagctggtgtggg

SEQ ID NO: 179949 - DNA, 25 bp, Homo sapien
caagtgcatggtctttggagctaga

SEQ ID NO: 179950 - DNA, 25 bp, Homo sapien
atcttgttattgaggatgcagaggc

SEQ ID NO: 179951 - DNA, 25 bp, Homo sapien
atctgatcttgttattgaggatgca

SEQ ID NO: 179952 - DNA, 25 bp, Homo sapien
agcacctggtgagtgggagtatctg

SEQ ID NO: 179953 - DNA, 25 bp, Homo sapien
cctggtgagtgggagtatctgatct

SEQ ID NO: 179954 - DNA, 25 bp, Homo sapien
catggcgccgcagctcgtgggcaca

SEQ ID NO: 179955 - DNA, 25 bp, Homo sapien
tttgccatatgctccttcagcagtt

SEQ ID NO: 179956 - DNA, 25 bp, Homo sapien
tcctttgccatatgctccttcagca

SEQ ID NO: 179957 - DNA, 25 bp, Homo sapien
gcagttctgtctgcacaatccccgg

SEQ ID NO: 179958 - DNA, 25 bp, Homo sapien
gggtaagagccacctagccatgtca

SEQ ID NO: 179959 - DNA, 25 bp, Homo sapien
gaggagccagccttaccattctgac

SEQ ID NO: 179960 - DNA, 25 bp, Homo sapien
gattgtacctcctgagctataggta

SEQ ID NO: 179961 - DNA, 25 bp, Homo sapien
caagcaaaggaactgtccatggatg

SEQ ID NO: 179962 - DNA, 25 bp, Homo sapien
ctcagctcctatgccactgggtcct

SEQ ID NO: 179963 - DNA, 25 bp, Homo sapien
tcctcagctcctatgccactgggtc

SEQ ID NO: 179964 - DNA, 25 bp, Homo sapien
ctcctcagctcctatgccactgggt

SEQ ID NO: 179965 - DNA, 25 bp, Homo sapien
agctcctatgccactgggtcctcac

SEQ ID NO: 179966 - DNA, 25 bp, Homo sapien
gctttgcccacaccataggggacat

SEQ ID NO: 179967 - DNA, 25 bp, Homo sapien
cgcagctttgcccacaccatagggg

SEQ ID NO: 179968 - DNA, 25 bp, Homo sapien
tgcccacaccataggggacattgaa

SEQ ID NO: 179969 - DNA, 25 bp, Homo sapien
cacaccataggggacattgaacata

SEQ ID NO: 179970 - DNA, 25 bp, Homo sapien
tgccccatacactgagcaaaagtag

SEQ ID NO: 179971 - DNA, 25 bp, Homo sapien
cgtgccccatacactgagcaaaagt

SEQ ID NO: 179972 - DNA, 25 bp, Homo sapien
agccgtgccccatacactgagcaaa

SEQ ID NO: 179973 - DNA, 25 bp, Homo sapien
gctggtaccatcagccgtgccccat

SEQ ID NO: 179974 - DNA, 25 bp, Homo sapien
aatgaaccgtgttagtgctggcctg

SEQ ID NO: 179975 - DNA, 25 bp, Homo sapien
tgtatataaagagcagggcgaggct

SEQ ID NO: 179976 - DNA, 25 bp, Homo sapien
tgtccactaggaaggctacacaggg

SEQ ID NO: 179977 - DNA, 25 bp, Homo sapien
gaaatggaacgcaagagccctgtca

SEQ ID NO: 179978 - DNA, 25 bp, Homo sapien
agtgcagcccaaggtaatacagagg

SEQ ID NO: 179979 - DNA, 25 bp, Homo sapien
cacagtctctataacctaagggaag

SEQ ID NO: 179980 - DNA, 25 bp, Homo sapien
tcctcccaatagaatacgtacaagt

SEQ ID NO: 179981 - DNA, 25 bp, Homo sapien
cacacacataacttggtaaccagaa

SEQ ID NO: 179982 - DNA, 25 bp, Homo sapien
ttcccagaatgccttattcctggtg

SEQ ID NO: 179983 - DNA, 25 bp, Homo sapien
ttgatatcatcccacatggaggcag

SEQ ID NO: 179984 - DNA, 25 bp, Homo sapien
ctgagtccgacgttgttgatatcat

SEQ ID NO: 179985 - DNA, 25 bp, Homo sapien
ccagaatgccttattcctggtgttc

SEQ ID NO: 179986 - DNA, 25 bp, Homo sapien
aaggcacagggagggtgatgaatga

SEQ ID NO: 179987 - DNA, 25 bp, Homo sapien
ggaaggcacagggagggtgatgaat

SEQ ID NO: 179988 - DNA, 25 bp, Homo sapien
aggcacagggagggtgatgaatgat

SEQ ID NO: 179989 - DNA, 25 bp, Homo sapien
ctggaaggcacagggagggtgatga

SEQ ID NO: 179990 - DNA, 25 bp, Homo sapien
ctgaaggtagggaggtgtgaggggc

SEQ ID NO: 179991 - DNA, 25 bp, Homo sapien
gaggggctgggtaatggaagggaca

SEQ ID NO: 179992 - DNA, 25 bp, Homo sapien
gctgggtaatggaagggacaatgag

SEQ ID NO: 179993 - DNA, 25 bp, Homo sapien
ggtaatggaagggacaatgagtggg

SEQ ID NO: 179994 - DNA, 25 bp, Homo sapien
gatccacttgctcaaacaggcttcg

SEQ ID NO: 179995 - DNA, 25 bp, Homo sapien
atctagacgcccttgctgttcccga

SEQ ID NO: 179996 - DNA, 25 bp, Homo sapien
cattgttgaccagcacatctagacg

SEQ ID NO: 179997 - DNA, 25 bp, Homo sapien
tggacccctgcataagcattgttga

SEQ ID NO: 179998 - DNA, 25 bp, Homo sapien
gagtaggacaggggatatgagctca

SEQ ID NO: 179999 - DNA, 25 bp, Homo sapien
ctggagtaggacaggggatatgagc

SEQ ID NO: 180000 - DNA, 25 bp, Homo sapien
agtaggacaggggatatgagctcac

SEQ ID NO: 180001 - DNA, 25 bp, Homo sapien
tggagtaggacaggggatatgagct

SEQ ID NO: 180002 - DNA, 25 bp, Homo sapien
gacaatcaatcctaggagagcctgc

SEQ ID NO: 180003 - DNA, 25 bp, Homo sapien
tcatgacaaaactccccaaccaaag

SEQ ID NO: 180004 - DNA, 25 bp, Homo sapien
tgagaactgagaagacaatcaatcc

SEQ ID NO: 180005 - DNA, 25 bp, Homo sapien
aaccaaagtgggcttgagaactgag

SEQ ID NO: 180006 - DNA, 25 bp, Homo sapien
taaatattcacatcttgttgagtag

SEQ ID NO: 180007 - DNA, 25 bp, Homo sapien
tcataaaactcacttggcggcaaaa

SEQ ID NO: 180008 - DNA, 25 bp, Homo sapien
tagtattatagtttcaggtaaggga

SEQ ID NO: 180009 - DNA, 25 bp, Homo sapien
tgttaagtggaagggctctctcggg

SEQ ID NO: 180010 - DNA, 25 bp, Homo sapien
cagatggcggccagtgatgtaaact

SEQ ID NO: 180011 - DNA, 25 bp, Homo sapien
agtgatgtaaactgtggcgcctgct

SEQ ID NO: 180012 - DNA, 25 bp, Homo sapien
tcctgagcaacaacgcgaagggtgt

SEQ ID NO: 180013 - DNA, 25 bp, Homo sapien
atgccacggccaatacccctggagg

SEQ ID NO: 180014 - DNA, 25 bp, Homo sapien
tgtggctgcctggatatgggaatct

SEQ ID NO: 180015 - DNA, 25 bp, Homo sapien
cagaggtggacaactactacaaccc

SEQ ID NO: 180016 - DNA, 25 bp, Homo sapien
tgaggacaaggctgactgtcttttg

SEQ ID NO: 180017 - DNA, 25 bp, Homo sapien
ctaagaggaggagccaaggtaagaa

SEQ ID NO: 180018 - DNA, 25 bp, Homo sapien
gattgattctgtagtaggacccggg

SEQ ID NO: 180019 - DNA, 25 bp, Homo sapien
gaggcagtgttcaaggattgattct

SEQ ID NO: 180020 - DNA, 25 bp, Homo sapien
cggtggaagtctgggttctcgccca

SEQ ID NO: 180021 - DNA, 25 bp, Homo sapien
tcgcccagattgagccggcgacgtg

SEQ ID NO: 180022 - DNA, 25 bp, Homo sapien
ggcaaaatggggtatccaccccatc

SEQ ID NO: 180023 - DNA, 25 bp, Homo sapien
ctggtttaaattggagtcagaagtc

SEQ ID NO: 180024 - DNA, 25 bp, Homo sapien
ctttggatctgggactgggtgttga

SEQ ID NO: 180025 - DNA, 25 bp, Homo sapien
ctttcctggtttaaattggagtcag

SEQ ID NO: 180026 - DNA, 25 bp, Homo sapien
gattagatgtagcagcagtcaggct

SEQ ID NO: 180027 - DNA, 25 bp, Homo sapien
gaaattgggtgggttatctagcctg

SEQ ID NO: 180028 - DNA, 25 bp, Homo sapien
gaacagcattcttcaggtaagggta

SEQ ID NO: 180029 - DNA, 25 bp, Homo sapien
gacagatctcaaggtaaagtcagag

SEQ ID NO: 180030 - DNA, 25 bp, Homo sapien
ttagtaggaatggaggcggcccttc

SEQ ID NO: 180031 - DNA, 25 bp, Homo sapien
aggaatggaggcggcccttctgctg

SEQ ID NO: 180032 - DNA, 25 bp, Homo sapien
agtaggaatggaggcggcccttctg

SEQ ID NO: 180033 - DNA, 25 bp, Homo sapien
taggaatggaggcggcccttctgct

SEQ ID NO: 180034 - DNA, 25 bp, Homo sapien
cccctccactgcatgacgaagggtg

SEQ ID NO: 180035 - DNA, 25 bp, Homo sapien
gcatgacgaagggtggaggaaattc

SEQ ID NO: 180036 - DNA, 25 bp, Homo sapien
tgtggaggtccaacgaaggagctcc

SEQ ID NO: 180037 - DNA, 25 bp, Homo sapien
cagcagtgtggaggtccaacgaagg

SEQ ID NO: 180038 - DNA, 25 bp, Homo sapien
cgagggttttgcttgtacacgtcaa

SEQ ID NO: 180039 - DNA, 25 bp, Homo sapien
tacacgtcaaaggtgaatcgggcga

SEQ ID NO: 180040 - DNA, 25 bp, Homo sapien
gctgccaaagaggtctcgagggttt

SEQ ID NO: 180041 - DNA, 25 bp, Homo sapien
gagcccgtagaatgtggctttgaca

SEQ ID NO: 180042 - DNA, 25 bp, Homo sapien
cactgtccactgcagttccatcctc

SEQ ID NO: 180043 - DNA, 25 bp, Homo sapien
agctctgaccagactgcaacaccat

SEQ ID NO: 180044 - DNA, 25 bp, Homo sapien
ccagggttagcactccattcagcag

SEQ ID NO: 180045 - DNA, 25 bp, Homo sapien
aacaccatcaggcacgtgtcatcct

SEQ ID NO: 180046 - DNA, 25 bp, Homo sapien
cgggtggcagctgtcaggcctttcc

SEQ ID NO: 180047 - DNA, 25 bp, Homo sapien
ggatggtccgcttgtgatcacagac

SEQ ID NO: 180048 - DNA, 25 bp, Homo sapien
tgatcacagacacggaaaggtcgct

SEQ ID NO: 180049 - DNA, 25 bp, Homo sapien
caaactccgagcttatattagatac

SEQ ID NO: 180050 - DNA, 25 bp, Homo sapien
ggttcagagctgagaggtactccat

SEQ ID NO: 180051 - DNA, 25 bp, Homo sapien
aagtcactggggttcagagctgaga

SEQ ID NO: 180052 - DNA, 25 bp, Homo sapien
tggggttcagagctgagaggtactc

SEQ ID NO: 180053 - DNA, 25 bp, Homo sapien
ctgagtaagtcactggggttcagag

SEQ ID NO: 180054 - DNA, 25 bp, Homo sapien
tggaccggagagttccttccctgga

SEQ ID NO: 180055 - DNA, 25 bp, Homo sapien
ccattggagcttgtatgtgtgtctt

SEQ ID NO: 180056 - DNA, 25 bp, Homo sapien
tgatgacatgtgttgtgagggtaga

SEQ ID NO: 180057 - DNA, 25 bp, Homo sapien
ggaagaattgcctggcaaaagccat

SEQ ID NO: 180058 - DNA, 25 bp, Homo sapien
ttttctgttacaaacctgggatctc

SEQ ID NO: 180059 - DNA, 25 bp, Homo sapien
gatttcagttgcagccgtgatggac

SEQ ID NO: 180060 - DNA, 25 bp, Homo sapien
ccttttgccgattagtggacgtgac

SEQ ID NO: 180061 - DNA, 25 bp, Homo sapien
cagggatgtcctttgatggcatcaa

SEQ ID NO: 180062 - DNA, 25 bp, Homo sapien
caagactttagcttctggtgcgctg

SEQ ID NO: 180063 - DNA, 25 bp, Homo sapien
catgccttacatggaaaagctgtca

SEQ ID NO: 180064 - DNA, 25 bp, Homo sapien
gctgttacttgagcagaggcctttc

SEQ ID NO: 180065 - DNA, 25 bp, Homo sapien
aaactaagacagtgctcctggtgcc

SEQ ID NO: 180066 - DNA, 25 bp, Homo sapien
gaaaaggtattcaggttgttgccca

SEQ ID NO: 180067 - DNA, 25 bp, Homo sapien
ttttgcccagatgtgctagaatggg

SEQ ID NO: 180068 - DNA, 25 bp, Homo sapien
tgcaaatgtgataggcacaggacag

SEQ ID NO: 180069 - DNA, 25 bp, Homo sapien
gctcccagcttggtaagtagatctg

SEQ ID NO: 180070 - DNA, 25 bp, Homo sapien
tagatctgtgcacgtccctttacac

SEQ ID NO: 180071 - DNA, 25 bp, Homo sapien
gggtctgggtcctcgtggaagtcag

SEQ ID NO: 180072 - DNA, 25 bp, Homo sapien
cttctcatcgggcatcacaggtggg

SEQ ID NO: 180073 - DNA, 25 bp, Homo sapien
aggaggcatggcaccttctcatcgg

SEQ ID NO: 180074 - DNA, 25 bp, Homo sapien
ctgcagggaagtaaggaggaggcat

SEQ ID NO: 180075 - DNA, 25 bp, Homo sapien
tgaacgccctctgtggcgccttcca

SEQ ID NO: 180076 - DNA, 25 bp, Homo sapien
cccagaaggatgtcggtctgctacc

SEQ ID NO: 180077 - DNA, 25 bp, Homo sapien
tgtactacgtgtgcgcgctcagcat

SEQ ID NO: 180078 - DNA, 25 bp, Homo sapien
tggagactctgaccgctttcgtgct

SEQ ID NO: 180079 - DNA, 25 bp, Homo sapien
tggtgagcgccatcgtgcttgcctt

SEQ ID NO: 180080 - DNA, 25 bp, Homo sapien
actattgtgtgcttgcaagttggca

SEQ ID NO: 180081 - DNA, 25 bp, Homo sapien
ctacccctcagctgaaagtggtggg

SEQ ID NO: 180082 - DNA, 25 bp, Homo sapien
caagttggcatgtacccatgtgcca

SEQ ID NO: 180083 - DNA, 25 bp, Homo sapien
gacccttctttgactagagtttgga

SEQ ID NO: 180084 - DNA, 25 bp, Homo sapien
tcaaggaaaggagacattcctctgt

SEQ ID NO: 180085 - DNA, 25 bp, Homo sapien
aggagacattcctctgtccaggaaa

SEQ ID NO: 180086 - DNA, 25 bp, Homo sapien
aaaggagacattcctctgtccagga

SEQ ID NO: 180087 - DNA, 25 bp, Homo sapien
ggaaaggagacattcctctgtccag

SEQ ID NO: 180088 - DNA, 25 bp, Homo sapien
gtgaaccccgtgctgtacgcgtgcg

SEQ ID NO: 180089 - DNA, 25 bp, Homo sapien
ggcagaatgctagctctgagccagt

SEQ ID NO: 180090 - DNA, 25 bp, Homo sapien
cgtgggcttcgtcgccaagctgctg

SEQ ID NO: 180091 - DNA, 25 bp, Homo sapien
agttaaacgaactgaactaggcctg

SEQ ID NO: 180092 - DNA, 25 bp, Homo sapien
ctaaaattggcctgggaagaagaag

SEQ ID NO: 180093 - DNA, 25 bp, Homo sapien
caaaatactataatcaagttggcag

SEQ ID NO: 180094 - DNA, 25 bp, Homo sapien
tgagggagttctcttcctgagcttg

SEQ ID NO: 180095 - DNA, 25 bp, Homo sapien
tatgcttccaaggtgtacaaaatac

SEQ ID NO: 180096 - DNA, 25 bp, Homo sapien
tattgaggttcttagaaggcgagtg

SEQ ID NO: 180097 - DNA, 25 bp, Homo sapien
ccagacaccccagagtctctttatt

SEQ ID NO: 180098 - DNA, 25 bp, Homo sapien
aggttcttagaaggcgagtgcaatc

SEQ ID NO: 180099 - DNA, 25 bp, Homo sapien
gtctctttattgaggttcttagaag

SEQ ID NO: 180100 - DNA, 25 bp, Homo sapien
aaggaggtccagttcgtgtcaagtc

SEQ ID NO: 180101 - DNA, 25 bp, Homo sapien
tgttcaggaagtaggtgcagagctg

SEQ ID NO: 180102 - DNA, 25 bp, Homo sapien
tagctgaaggaggtccagttcgtgt

SEQ ID NO: 180103 - DNA, 25 bp, Homo sapien
tcgtgtcaagtctgtgttcaggaag

SEQ ID NO: 180104 - DNA, 25 bp, Homo sapien
cttgatgacaccccggctgtagcag

SEQ ID NO: 180105 - DNA, 25 bp, Homo sapien
ttgatgacaccccggctgtagcagg

SEQ ID NO: 180106 - DNA, 25 bp, Homo sapien
tggaggtggccctattcttagtccc

SEQ ID NO: 180107 - DNA, 25 bp, Homo sapien
ggcgagggaatatggaggtggccct

SEQ ID NO: 180108 - DNA, 25 bp, Homo sapien
ccctccccctatgcctccaatgtgg

SEQ ID NO: 180109 - DNA, 25 bp, Homo sapien
gggaatatggaggtggccctattct

SEQ ID NO: 180110 - DNA, 25 bp, Homo sapien
gccccaaatgtcatattgcggcttc

SEQ ID NO: 180111 - DNA, 25 bp, Homo sapien
taactccagctactacgggtccatg

SEQ ID NO: 180112 - DNA, 25 bp, Homo sapien
gtcatattgcggcttctgggcccca

SEQ ID NO: 180113 - DNA, 25 bp, Homo sapien
gctactacgggtccatggttcaacc

SEQ ID NO: 180114 - DNA, 25 bp, Homo sapien
tctctaagggctggaggaatgtagc

SEQ ID NO: 180115 - DNA, 25 bp, Homo sapien
gtgggagagcctcgtacctccttgc

SEQ ID NO: 180116 - DNA, 25 bp, Homo sapien
aatgagggatgtggtaatgacagac

SEQ ID NO: 180117 - DNA, 25 bp, Homo sapien
gaaaaagagtgggagagcctcgtac

SEQ ID NO: 180118 - DNA, 25 bp, Homo sapien
gactgctgcagcaggggaagtctct

SEQ ID NO: 180119 - DNA, 25 bp, Homo sapien
tgctgcagcaggggaagtctctcac

SEQ ID NO: 180120 - DNA, 25 bp, Homo sapien
cagactgctgcagcaggggaagtct

SEQ ID NO: 180121 - DNA, 25 bp, Homo sapien
actgctgcagcaggggaagtctctc

SEQ ID NO: 180122 - DNA, 25 bp, Homo sapien
atgacgtccagcttagaccccaggg

SEQ ID NO: 180123 - DNA, 25 bp, Homo sapien
gccacggcaaattccaccatagtgc

SEQ ID NO: 180124 - DNA, 25 bp, Homo sapien
ttccaccatagtgccaaggtggctg

SEQ ID NO: 180125 - DNA, 25 bp, Homo sapien
tgaatgcttgttgatgacgtccagc

SEQ ID NO: 180126 - DNA, 25 bp, Homo sapien
aggtggcatttaagcctgtggctgc

SEQ ID NO: 180127 - DNA, 25 bp, Homo sapien
ggtggcatttaagcctgtggctgcc

SEQ ID NO: 180128 - DNA, 25 bp, Homo sapien
ctccaccccactgaacttgggcttg

SEQ ID NO: 180129 - DNA, 25 bp, Homo sapien
ccaagcctttggagttaaaggatca

SEQ ID NO: 180130 - DNA, 25 bp, Homo sapien
aagcctttggagttaaaggatcagg

SEQ ID NO: 180131 - DNA, 25 bp, Homo sapien
caagcctttggagttaaaggatcag

SEQ ID NO: 180132 - DNA, 25 bp, Homo sapien
tgaggcgaagaggacacaaacgcat

SEQ ID NO: 180133 - DNA, 25 bp, Homo sapien
acaaacgcattcataggactggtgg

SEQ ID NO: 180134 - DNA, 25 bp, Homo sapien
tcagacactctaggccctcatgatt

SEQ ID NO: 180135 - DNA, 25 bp, Homo sapien
tatctcattgagcagcctcagacac

SEQ ID NO: 180136 - DNA, 25 bp, Homo sapien
tgaggggtgtgtgtcatgttcctct

SEQ ID NO: 180137 - DNA, 25 bp, Homo sapien
gaggggtgtgtgtcatgttcctctc

SEQ ID NO: 180138 - DNA, 25 bp, Homo sapien
ttctagaggtctgcgtggggccctc

SEQ ID NO: 180139 - DNA, 25 bp, Homo sapien
tctcccttctagaggtctgcgtggg

SEQ ID NO: 180140 - DNA, 25 bp, Homo sapien
cccaaggatgggtttcatggaagac

SEQ ID NO: 180141 - DNA, 25 bp, Homo sapien
taaaatttcatatggctaatggcta

SEQ ID NO: 180142 - DNA, 25 bp, Homo sapien
aagttttccacgcacccaggctgtg

SEQ ID NO: 180143 - DNA, 25 bp, Homo sapien
gggtggactgtatcctctagaccag

SEQ ID NO: 180144 - DNA, 25 bp, Homo sapien
gactagtatcagtctgcggcctggg

SEQ ID NO: 180145 - DNA, 25 bp, Homo sapien
cgcctaggcttctggaatgtatgga

SEQ ID NO: 180146 - DNA, 25 bp, Homo sapien
caagcacaagggcttgggtgaccct

SEQ ID NO: 180147 - DNA, 25 bp, Homo sapien
tcccaacaggtcatggactagtatc

SEQ ID NO: 180148 - DNA, 25 bp, Homo sapien
gagcagccgagtcaggttctccatc

SEQ ID NO: 180149 - DNA, 25 bp, Homo sapien
cgtgtgcagggagcacgttctccaa

SEQ ID NO: 180150 - DNA, 25 bp, Homo sapien
cagccgagtcaggttctccatcgtc

SEQ ID NO: 180151 - DNA, 25 bp, Homo sapien
ccaagagcagccgagtcaggttctc

SEQ ID NO: 180152 - DNA, 25 bp, Homo sapien
ggcattcaaccctggagattagaaa

SEQ ID NO: 180153 - DNA, 25 bp, Homo sapien
tagggatagagaattggcagcagac

SEQ ID NO: 180154 - DNA, 25 bp, Homo sapien
cgcttagaagcttccaatgggcatt

SEQ ID NO: 180155 - DNA, 25 bp, Homo sapien
agccccaactccatgatgcctgaaa

SEQ ID NO: 180156 - DNA, 25 bp, Homo sapien
gatgaagaaggagatagcacccatc

SEQ ID NO: 180157 - DNA, 25 bp, Homo sapien
ccctgtgggtgattcaggtcggtga

SEQ ID NO: 180158 - DNA, 25 bp, Homo sapien
tgattcaggtcggtgaggccaggac

SEQ ID NO: 180159 - DNA, 25 bp, Homo sapien
gcctccgcttccctcccactttgcc

SEQ ID NO: 180160 - DNA, 25 bp, Homo sapien
ccccatgtaggcctccgcttccctc

SEQ ID NO: 180161 - DNA, 25 bp, Homo sapien
gggggcccggcacctctgtccagca

SEQ ID NO: 180162 - DNA, 25 bp, Homo sapien
ccagggggcccggcacctctgtcca

SEQ ID NO: 180163 - DNA, 25 bp, Homo sapien
ggcccggcacctctgtccagcagct

SEQ ID NO: 180164 - DNA, 25 bp, Homo sapien
gcccggcacctctgtccagcagctg

SEQ ID NO: 180165 - DNA, 25 bp, Homo sapien
gacgatgaggcattccgacagccag

SEQ ID NO: 180166 - DNA, 25 bp, Homo sapien
ttcagctcgaagctcatgtgcagaa

SEQ ID NO: 180167 - DNA, 25 bp, Homo sapien
acagccaggcatgggagtgcaggaa

SEQ ID NO: 180168 - DNA, 25 bp, Homo sapien
aagcccagcgtgcagcagtgcatgg

SEQ ID NO: 180169 - DNA, 25 bp, Homo sapien
cacactgggtgtgacttatgtctgt

SEQ ID NO: 180170 - DNA, 25 bp, Homo sapien
ggagacagggggcatcatacacact

SEQ ID NO: 180171 - DNA, 25 bp, Homo sapien
caggagtgggcatgtcccataggca

SEQ ID NO: 180172 - DNA, 25 bp, Homo sapien
atccacagaatggagcgttcctcca

SEQ ID NO: 180173 - DNA, 25 bp, Homo sapien
gggagcttggaaagggcagtctgat

SEQ ID NO: 180174 - DNA, 25 bp, Homo sapien
agaggttggaaatcatggaggacac

SEQ ID NO: 180175 - DNA, 25 bp, Homo sapien
cagtctgatgatgttgggaagaaga

SEQ ID NO: 180176 - DNA, 25 bp, Homo sapien
gaggacacattgggagcttggaaag

SEQ ID NO: 180177 - DNA, 25 bp, Homo sapien
gcagaggagatgaggagttgaagag

SEQ ID NO: 180178 - DNA, 25 bp, Homo sapien
ctcagtcctggtcgtgtggccacca

SEQ ID NO: 180179 - DNA, 25 bp, Homo sapien
tattctcagtcctggtcgtgtggcc

SEQ ID NO: 180180 - DNA, 25 bp, Homo sapien
gcccaaggctattctcagtcctggt

SEQ ID NO: 180181 - DNA, 25 bp, Homo sapien
acaaggaggatggtggcggtgccca

SEQ ID NO: 180182 - DNA, 25 bp, Homo sapien
gaaggtgatgctatacgtgatggcc

SEQ ID NO: 180183 - DNA, 25 bp, Homo sapien
tgctatacgtgatggccagagctgg

SEQ ID NO: 180184 - DNA, 25 bp, Homo sapien
aagcagacaaaaaggatgaggagga

SEQ ID NO: 180185 - DNA, 25 bp, Homo sapien
ggtgatgctatacgtgatggccaga

SEQ ID NO: 180186 - DNA, 25 bp, Homo sapien
cctctgtgggtaagtgcctgaagct

SEQ ID NO: 180187 - DNA, 25 bp, Homo sapien
gccacctggctgagttaagaacaag

SEQ ID NO: 180188 - DNA, 25 bp, Homo sapien
cagtggactaggaatgagggcctac

SEQ ID NO: 180189 - DNA, 25 bp, Homo sapien
tacaaggttaagataagggccgtga

SEQ ID NO: 180190 - DNA, 25 bp, Homo sapien
aggtgcaggcttcatagtatttgaa

SEQ ID NO: 180191 - DNA, 25 bp, Homo sapien
gtttgtcactagcatctggatgatg

SEQ ID NO: 180192 - DNA, 25 bp, Homo sapien
ttgaaggcggggattgcagagagtc

SEQ ID NO: 180193 - DNA, 25 bp, Homo sapien
caggcttcatagtatttgaaggcgg

SEQ ID NO: 180194 - DNA, 25 bp, Homo sapien
ggatcacaaactgagcagacttggg

SEQ ID NO: 180195 - DNA, 25 bp, Homo sapien
gatcacaaactgagcagacttgggg

SEQ ID NO: 180196 - DNA, 25 bp, Homo sapien
tcacaaactgagcagacttggggag

SEQ ID NO: 180197 - DNA, 25 bp, Homo sapien
taggatcacaaactgagcagacttg

SEQ ID NO: 180198 - DNA, 25 bp, Homo sapien
tgaagtacagtgtcagtgggttgaa

SEQ ID NO: 180199 - DNA, 25 bp, Homo sapien
cagtgggttgaagtccttcgactgc

SEQ ID NO: 180200 - DNA, 25 bp, Homo sapien
cagtgtcagtgggttgaagtccttc

SEQ ID NO: 180201 - DNA, 25 bp, Homo sapien
gaagtccttcgactgcttccactgt

SEQ ID NO: 180202 - DNA, 25 bp, Homo sapien
cctgcggcccccccagccctctttg

SEQ ID NO: 180203 - DNA, 25 bp, Homo sapien
cagggcctgcggcccccccagccct

SEQ ID NO: 180204 - DNA, 25 bp, Homo sapien
ctcagggcctgcggcccccccagcc

SEQ ID NO: 180205 - DNA, 25 bp, Homo sapien
ctgcggcccccccagccctctttgt

SEQ ID NO: 180206 - DNA, 25 bp, Homo sapien
tctgcgagttgagctgctcaatgac

SEQ ID NO: 180207 - DNA, 25 bp, Homo sapien
ttctgcgagttgagctgctcaatga

SEQ ID NO: 180208 - DNA, 25 bp, Homo sapien
ctggaagaacttggcatccccggtg

SEQ ID NO: 180209 - DNA, 25 bp, Homo sapien
catcatctagtccccggggggtacg

SEQ ID NO: 180210 - DNA, 25 bp, Homo sapien
agaacttggcatccccggtgtccag

SEQ ID NO: 180211 - DNA, 25 bp, Homo sapien
tggcatccccggtgtccagttcatc

SEQ ID NO: 180212 - DNA, 25 bp, Homo sapien
gtgctgaaggaagccagggtcttct

SEQ ID NO: 180213 - DNA, 25 bp, Homo sapien
caggctccactgggtgctgaaggaa

SEQ ID NO: 180214 - DNA, 25 bp, Homo sapien
tccaggctccactgggtgctgaagg

SEQ ID NO: 180215 - DNA, 25 bp, Homo sapien
cgatccaggctccactgggtgctga

SEQ ID NO: 180216 - DNA, 25 bp, Homo sapien
ctgtagggatcttgtatcttctctg

SEQ ID NO: 180217 - DNA, 25 bp, Homo sapien
tgtagggatcttgtatcttctctga

SEQ ID NO: 180218 - DNA, 25 bp, Homo sapien
tgtatcttctctgaggtgagctgga

SEQ ID NO: 180219 - DNA, 25 bp, Homo sapien
tctgtagggatcttgtatcttctct

SEQ ID NO: 180220 - DNA, 25 bp, Homo sapien
tgaggccctcaagcgaggacagcaa

SEQ ID NO: 180221 - DNA, 25 bp, Homo sapien
gtctccgtggctcaggtgggcaaaa

SEQ ID NO: 180222 - DNA, 25 bp, Homo sapien
tcagcagtgatggacgcatcttgag

SEQ ID NO: 180223 - DNA, 25 bp, Homo sapien
ccaggtaacgggtcatcagcagtga

SEQ ID NO: 180224 - DNA, 25 bp, Homo sapien
ggcacagaagagatcaggcctgttg

SEQ ID NO: 180225 - DNA, 25 bp, Homo sapien
ggcacataagggctgacagtaaaga

SEQ ID NO: 180226 - DNA, 25 bp, Homo sapien
gggctgacagtaaagaccacagaca

SEQ ID NO: 180227 - DNA, 25 bp, Homo sapien
cagtaaagaccacagacacttcctc

SEQ ID NO: 180228 - DNA, 25 bp, Homo sapien
gatgaccagataggtaggctcccct

SEQ ID NO: 180229 - DNA, 25 bp, Homo sapien
cagggccagggtagcccctgtgatg

SEQ ID NO: 180230 - DNA, 25 bp, Homo sapien
aggctcccctagctcccgaaggtag

SEQ ID NO: 180231 - DNA, 25 bp, Homo sapien
atgcctgcgtcctccacagcataag

SEQ ID NO: 180232 - DNA, 25 bp, Homo sapien
agtacgctgcctgagtgcacgccca

SEQ ID NO: 180233 - DNA, 25 bp, Homo sapien
tcatgtgaccaaacgtcgtactgcc

SEQ ID NO: 180234 - DNA, 25 bp, Homo sapien
tgcagcccgatgactccacacagta

SEQ ID NO: 180235 - DNA, 25 bp, Homo sapien
tggtacaccgcctgcctccatgtgg

SEQ ID NO: 180236 - DNA, 25 bp, Homo sapien
attcctcttgaccaccgcctgagct

SEQ ID NO: 180237 - DNA, 25 bp, Homo sapien
gattctcacaaagaggacttctgtc

SEQ ID NO: 180238 - DNA, 25 bp, Homo sapien
acaccccagattctcacaaagagga

SEQ ID NO: 180239 - DNA, 25 bp, Homo sapien
tgtgggacaatctgagtcctaccct

SEQ ID NO: 180240 - DNA, 25 bp, Homo sapien
ggcccggcacatgtccaggcccatg

SEQ ID NO: 180241 - DNA, 25 bp, Homo sapien
caggcccatgcgcacgcagttgatg

SEQ ID NO: 180242 - DNA, 25 bp, Homo sapien
gcgcacgcagttgatggcatggtct

SEQ ID NO: 180243 - DNA, 25 bp, Homo sapien
gatcttgatccgcatgcattcatgc

SEQ ID NO: 180244 - DNA, 25 bp, Homo sapien
catgcactgaagtgggcctgggatc

SEQ ID NO: 180245 - DNA, 25 bp, Homo sapien
tctgtggcgatattgagggatctct

SEQ ID NO: 180246 - DNA, 25 bp, Homo sapien
ctcagaagagtttccccaagggctg

SEQ ID NO: 180247 - DNA, 25 bp, Homo sapien
gaattggttgcttggaggcatccct

SEQ ID NO: 180248 - DNA, 25 bp, Homo sapien
ccttaggggaacactcgctggccag

SEQ ID NO: 180249 - DNA, 25 bp, Homo sapien
agctccttaggggaacactcgctgg

SEQ ID NO: 180250 - DNA, 25 bp, Homo sapien
aagcccacgatgtcagcatacagca

SEQ ID NO: 180251 - DNA, 25 bp, Homo sapien
gcccacgatgtcagcatacagcacg

SEQ ID NO: 180252 - DNA, 25 bp, Homo sapien
gggccagggtcttagcccacaggcc

SEQ ID NO: 180253 - DNA, 25 bp, Homo sapien
gcatagggcagactgtgtcagcagg

SEQ ID NO: 180254 - DNA, 25 bp, Homo sapien
catagggcagactgtgtcagcaggg

SEQ ID NO: 180255 - DNA, 25 bp, Homo sapien
gcagggccagggtcttagcccacag

SEQ ID NO: 180256 - DNA, 25 bp, Homo sapien
tggccgtgacccctgtcctgcctgc

SEQ ID NO: 180257 - DNA, 25 bp, Homo sapien
ccctggtgcctcttgacatagaggc

SEQ ID NO: 180258 - DNA, 25 bp, Homo sapien
atctctcgggccaggtaggcaggaa

SEQ ID NO: 180259 - DNA, 25 bp, Homo sapien
gcagccgtgccatgatctctgcctt

SEQ ID NO: 180260 - DNA, 25 bp, Homo sapien
ttctgcaccctaaagccaggaggcc

SEQ ID NO: 180261 - DNA, 25 bp, Homo sapien
cttctgcaccctaaagccaggaggc

SEQ ID NO: 180262 - DNA, 25 bp, Homo sapien
tcttctgcaccctaaagccaggagg

SEQ ID NO: 180263 - DNA, 25 bp, Homo sapien
aaccttctaagatgggcaataccca

SEQ ID NO: 180264 - DNA, 25 bp, Homo sapien
cactgatcacctttagtgactaaac

SEQ ID NO: 180265 - DNA, 25 bp, Homo sapien
ggagccccgttatgtaatctaagca

SEQ ID NO: 180266 - DNA, 25 bp, Homo sapien
taatatcataatgctctaaagtgct

SEQ ID NO: 180267 - DNA, 25 bp, Homo sapien
gccggcgtgagtgcagggagctgag

SEQ ID NO: 180268 - DNA, 25 bp, Homo sapien
agctgagtgcctcccggaacgtggc

SEQ ID NO: 180269 - DNA, 25 bp, Homo sapien
cacgttcccgcacaggaacagcact

SEQ ID NO: 180270 - DNA, 25 bp, Homo sapien
ttgtggtacactcctgccacgttcc

SEQ ID NO: 180271 - DNA, 25 bp, Homo sapien
tgggctttacagtgagggacctaac

SEQ ID NO: 180272 - DNA, 25 bp, Homo sapien
taaaaggagcctactagcacgtggc

SEQ ID NO: 180273 - DNA, 25 bp, Homo sapien
tctggtaacagcaggcattgcatca

SEQ ID NO: 180274 - DNA, 25 bp, Homo sapien
tgtaccagctctgcgaaagcacggt

SEQ ID NO: 180275 - DNA, 25 bp, Homo sapien
gcatacgccgtgaagatgacgaaga

SEQ ID NO: 180276 - DNA, 25 bp, Homo sapien
gctgtggcccaagatacagcccgag

SEQ ID NO: 180277 - DNA, 25 bp, Homo sapien
cccgaggaccagcagatgcgagagt

SEQ ID NO: 180278 - DNA, 25 bp, Homo sapien
ccaagggcagcatggcatacgccgt

SEQ ID NO: 180279 - DNA, 25 bp, Homo sapien
cgcgggaagccgaaggcccaagtgg

SEQ ID NO: 180280 - DNA, 25 bp, Homo sapien
gcgcgggaagccgaaggcccaagtg

SEQ ID NO: 180281 - DNA, 25 bp, Homo sapien
gtgagggatcgaagcccgggccgtc

SEQ ID NO: 180282 - DNA, 25 bp, Homo sapien
attcaaggcctggtgagggatcgaa

SEQ ID NO: 180283 - DNA, 25 bp, Homo sapien
cctggtgagggatcgaagcccgggc

SEQ ID NO: 180284 - DNA, 25 bp, Homo sapien
ctattcaaggcctggtgagggatcg

SEQ ID NO: 180285 - DNA, 25 bp, Homo sapien
cgtggcctagcgctagcagcgcgac

SEQ ID NO: 180286 - DNA, 25 bp, Homo sapien
caggaagctcgggtctgaggtcagc

SEQ ID NO: 180287 - DNA, 25 bp, Homo sapien
gcgacccataccaagccggacaggg

SEQ ID NO: 180288 - DNA, 25 bp, Homo sapien
gacgcgtccagcgctgcagtcgctg

SEQ ID NO: 180289 - DNA, 25 bp, Homo sapien
gaacccggacagaaacgagaagcat

SEQ ID NO: 180290 - DNA, 25 bp, Homo sapien
gatttattgtagaacccgtagacca

SEQ ID NO: 180291 - DNA, 25 bp, Homo sapien
tcataaagtctgtcagaacccggac

SEQ ID NO: 180292 - DNA, 25 bp, Homo sapien
aaaatgctccccaggtagagaccct

SEQ ID NO: 180293 - DNA, 25 bp, Homo sapien
caggctgtagtaggtctcgtagaag

SEQ ID NO: 180294 - DNA, 25 bp, Homo sapien
tgctggctcaggctgtagtaggtct

SEQ ID NO: 180295 - DNA, 25 bp, Homo sapien
tctcgtagaagaggtcttcgctggg

SEQ ID NO: 180296 - DNA, 25 bp, Homo sapien
tgtagtaggtctcgtagaagaggtc

SEQ ID NO: 180297 - DNA, 25 bp, Homo sapien
tgtagaggtgccctagaaaagcctc

SEQ ID NO: 180298 - DNA, 25 bp, Homo sapien
cctcatcgccaggagggcaggattt

SEQ ID NO: 180299 - DNA, 25 bp, Homo sapien
tcctccctcaaacccggattgtaga

SEQ ID NO: 180300 - DNA, 25 bp, Homo sapien
ttttctcacccgctcaaagccgcta

SEQ ID NO: 180301 - DNA, 25 bp, Homo sapien
tggcgcagcggagtgggctaggtcc

SEQ ID NO: 180302 - DNA, 25 bp, Homo sapien
gcgcagcggagtgggctaggtccgg

SEQ ID NO: 180303 - DNA, 25 bp, Homo sapien
gcgctggcgcagcggagtgggctag

SEQ ID NO: 180304 - DNA, 25 bp, Homo sapien
gctggcgcagcggagtgggctaggt

SEQ ID NO: 180305 - DNA, 25 bp, Homo sapien
ggccagactgccctagaaggaagtc

SEQ ID NO: 180306 - DNA, 25 bp, Homo sapien
ggcaggccagactgccctagaagga

SEQ ID NO: 180307 - DNA, 25 bp, Homo sapien
ggggacaggtcacaaagtcagtttg

SEQ ID NO: 180308 - DNA, 25 bp, Homo sapien
ctgggggacaggtcacaaagtcagt

SEQ ID NO: 180309 - DNA, 25 bp, Homo sapien
ccttaactcgtaactcttggaggca

SEQ ID NO: 180310 - DNA, 25 bp, Homo sapien
gggtggcactcttccttaactcgta

SEQ ID NO: 180311 - DNA, 25 bp, Homo sapien
tcttccttaactcgtaactcttgga

SEQ ID NO: 180312 - DNA, 25 bp, Homo sapien
ctcgtaactcttggaggcaagcttg

SEQ ID NO: 180313 - DNA, 25 bp, Homo sapien
atgattataccaaccctgtggcctg

SEQ ID NO: 180314 - DNA, 25 bp, Homo sapien
ctatgattataccaaccctgtggcc

SEQ ID NO: 180315 - DNA, 25 bp, Homo sapien
tatgattataccaaccctgtggcct

SEQ ID NO: 180316 - DNA, 25 bp, Homo sapien
ttgtatatgttaacgagcggtcgcc

SEQ ID NO: 180317 - DNA, 25 bp, Homo sapien
catagtcaagtagttgttgtctcca

SEQ ID NO: 180318 - DNA, 25 bp, Homo sapien
cccatgtgggcaaggcagttgtctg

SEQ ID NO: 180319 - DNA, 25 bp, Homo sapien
aacttgcaccccagagcagttgtat

SEQ ID NO: 180320 - DNA, 25 bp, Homo sapien
tagtgatggtggcaggagggtttag

SEQ ID NO: 180321 - DNA, 25 bp, Homo sapien
aatagtgatggtggcaggagggttt

SEQ ID NO: 180322 - DNA, 25 bp, Homo sapien
ctttaagagaaatagtgatggtggc

SEQ ID NO: 180323 - DNA, 25 bp, Homo sapien
gaaatagtgatggtggcaggagggt

SEQ ID NO: 180324 - DNA, 25 bp, Homo sapien
gaattgtgttagcagaagctctaga

SEQ ID NO: 180325 - DNA, 25 bp, Homo sapien
gctctagagagtggcaattgacatt

SEQ ID NO: 180326 - DNA, 25 bp, Homo sapien
cctccacaaagtaccctgaatctag

SEQ ID NO: 180327 - DNA, 25 bp, Homo sapien
gaatctagatataggtctggaggag

SEQ ID NO: 180328 - DNA, 25 bp, Homo sapien
ctgttactggatttggctccggggt

SEQ ID NO: 180329 - DNA, 25 bp, Homo sapien
tccggggtcctgcaggaccagttca

SEQ ID NO: 180330 - DNA, 25 bp, Homo sapien
tgttactggatttggctccggggtc

SEQ ID NO: 180331 - DNA, 25 bp, Homo sapien
accagttcatgccttgtctctcagc

SEQ ID NO: 180332 - DNA, 25 bp, Homo sapien
aatctgaagatgtgcctgctgtcca

SEQ ID NO: 180333 - DNA, 25 bp, Homo sapien
tgggccatcgaatctgaagatgtgc

SEQ ID NO: 180334 - DNA, 25 bp, Homo sapien
catcgaatctgaagatgtgcctgct

SEQ ID NO: 180335 - DNA, 25 bp, Homo sapien
gaggttgggccatcgaatctgaaga

SEQ ID NO: 180336 - DNA, 25 bp, Homo sapien
gaaaatctcctattgctgctcctga

SEQ ID NO: 180337 - DNA, 25 bp, Homo sapien
catgacatcattacgagagtgctgg

SEQ ID NO: 180338 - DNA, 25 bp, Homo sapien
gggaggctcctctagattcagtttg

SEQ ID NO: 180339 - DNA, 25 bp, Homo sapien
gcattttttaggaacagagctggga

SEQ ID NO: 180340 - DNA, 25 bp, Homo sapien
gggatgggaggagtttgctgggtat

SEQ ID NO: 180341 - DNA, 25 bp, Homo sapien
cccaagggagtagtctctcggtcca

SEQ ID NO: 180342 - DNA, 25 bp, Homo sapien
cagagtaaacccaagggagtagtct

SEQ ID NO: 180343 - DNA, 25 bp, Homo sapien
gtctctcggtccataatctgttgtc

SEQ ID NO: 180344 - DNA, 25 bp, Homo sapien
tggggaggggtgatgttggcactca

SEQ ID NO: 180345 - DNA, 25 bp, Homo sapien
ggggaggggtgatgttggcactcac

SEQ ID NO: 180346 - DNA, 25 bp, Homo sapien
ctcctggggaggggtgatgttggca

SEQ ID NO: 180347 - DNA, 25 bp, Homo sapien
cctggggaggggtgatgttggcact

SEQ ID NO: 180348 - DNA, 25 bp, Homo sapien
caccatctggaagacttcatcagtt

SEQ ID NO: 180349 - DNA, 25 bp, Homo sapien
gcagcattcatattgttctccacca

SEQ ID NO: 180350 - DNA, 25 bp, Homo sapien
gagacagcagcattcatattgttct

SEQ ID NO: 180351 - DNA, 25 bp, Homo sapien
ttcatattgttctccaccatctgga

SEQ ID NO: 180352 - DNA, 25 bp, Homo sapien
ggaaggagggtctgtccttgggctc

SEQ ID NO: 180353 - DNA, 25 bp, Homo sapien
aaggagggtctgtccttgggctcac

SEQ ID NO: 180354 - DNA, 25 bp, Homo sapien
cctggaaggagggtctgtccttggg

SEQ ID NO: 180355 - DNA, 25 bp, Homo sapien
ctggaaggagggtctgtccttgggc

SEQ ID NO: 180356 - DNA, 25 bp, Homo sapien
cttctaagccgggagtctcaggccc

SEQ ID NO: 180357 - DNA, 25 bp, Homo sapien
cagtccttctaagccgggagtctca

SEQ ID NO: 180358 - DNA, 25 bp, Homo sapien
tccttctaagccgggagtctcaggc

SEQ ID NO: 180359 - DNA, 25 bp, Homo sapien
gcagctcagccaatgaaggccggtt

SEQ ID NO: 180360 - DNA, 25 bp, Homo sapien
tacacgagtgatggttcggttggca

SEQ ID NO: 180361 - DNA, 25 bp, Homo sapien
tgcttcgtacacgagtgatggttcg

SEQ ID NO: 180362 - DNA, 25 bp, Homo sapien
tcgtacacgagtgatggttcggttg

SEQ ID NO: 180363 - DNA, 25 bp, Homo sapien
cttcgtacacgagtgatggttcggt

SEQ ID NO: 180364 - DNA, 25 bp, Homo sapien
cagtctaagtaggtgagcgggaagg

SEQ ID NO: 180365 - DNA, 25 bp, Homo sapien
aagggaattatctgcttcatcatgg

SEQ ID NO: 180366 - DNA, 25 bp, Homo sapien
gcacctggggttaaggatcccagaa

SEQ ID NO: 180367 - DNA, 25 bp, Homo sapien
ttggggctttcaagagaagggcacc

SEQ ID NO: 180368 - DNA, 25 bp, Homo sapien
cactgcccacattaggatcccgaag

SEQ ID NO: 180369 - DNA, 25 bp, Homo sapien
gcactgcccacattaggatcccgaa

SEQ ID NO: 180370 - DNA, 25 bp, Homo sapien
agcactgcccacattaggatcccga

SEQ ID NO: 180371 - DNA, 25 bp, Homo sapien
gggcccagagaagtgtaggaatcct

SEQ ID NO: 180372 - DNA, 25 bp, Homo sapien
tgtgtgtttgggccgggatccttac

SEQ ID NO: 180373 - DNA, 25 bp, Homo sapien
caagactcctttcctatacatcatc

SEQ ID NO: 180374 - DNA, 25 bp, Homo sapien
ggagacacaaagctgaggatcggtc

SEQ ID NO: 180375 - DNA, 25 bp, Homo sapien
cctgaaatgtggacaggccaaaatc

SEQ ID NO: 180376 - DNA, 25 bp, Homo sapien
cctccctgaaatgtggacaggccaa

SEQ ID NO: 180377 - DNA, 25 bp, Homo sapien
gagcctccctgaaatgtggacaggc

SEQ ID NO: 180378 - DNA, 25 bp, Homo sapien
tccctgaaatgtggacaggccaaaa

SEQ ID NO: 180379 - DNA, 25 bp, Homo sapien
ggctaggtcaaggtctgagtctcca

SEQ ID NO: 180380 - DNA, 25 bp, Homo sapien
gaaatgactcgtgtggctcagggcc

SEQ ID NO: 180381 - DNA, 25 bp, Homo sapien
cctattcaatagacagggctctgga

SEQ ID NO: 180382 - DNA, 25 bp, Homo sapien
cagagagagaggctacgcctattca

SEQ ID NO: 180383 - DNA, 25 bp, Homo sapien
aggctgagaggggtgtagaccagct

SEQ ID NO: 180384 - DNA, 25 bp, Homo sapien
cagcaggacgttggatggcttgagg

SEQ ID NO: 180385 - DNA, 25 bp, Homo sapien
ttgacgtgcagctctgggtccagca

SEQ ID NO: 180386 - DNA, 25 bp, Homo sapien
tctgggtccagcaggacgttggatg

SEQ ID NO: 180387 - DNA, 25 bp, Homo sapien
ggtccagcaggacgttggatggctt

SEQ ID NO: 180388 - DNA, 25 bp, Homo sapien
cagagccggcttgggatcttggtcc

SEQ ID NO: 180389 - DNA, 25 bp, Homo sapien
ttctaggcgcagcacgaattcgtta

SEQ ID NO: 180390 - DNA, 25 bp, Homo sapien
gagccgttctccatgaatttagtca

SEQ ID NO: 180391 - DNA, 25 bp, Homo sapien
gaattcgttatccagacttgccatg

SEQ ID NO: 180392 - DNA, 25 bp, Homo sapien
tggagtcgcaccggggtcgtgggaa

SEQ ID NO: 180393 - DNA, 25 bp, Homo sapien
ctggagtcgcaccggggtcgtggga

SEQ ID NO: 180394 - DNA, 25 bp, Homo sapien
ccagattgcggctggggtcaaccgg

SEQ ID NO: 180395 - DNA, 25 bp, Homo sapien
ttgcggctggggtcaaccggggtca

SEQ ID NO: 180396 - DNA, 25 bp, Homo sapien
gctggggtcaaccggggtcactcac

SEQ ID NO: 180397 - DNA, 25 bp, Homo sapien
cagattgcggctggggtcaaccggg

SEQ ID NO: 180398 - DNA, 25 bp, Homo sapien
gaacactgtgccgaacccgcctttg

SEQ ID NO: 180399 - DNA, 25 bp, Homo sapien
tcgtagccccacttcctatgttgcg

SEQ ID NO: 180400 - DNA, 25 bp, Homo sapien
cctttgccgacgagctcctggttct

SEQ ID NO: 180401 - DNA, 25 bp, Homo sapien
gagtttacgatcttgaccgccacat

SEQ ID NO: 180402 - DNA, 25 bp, Homo sapien
ctcgatggacaccaagggggcgggg

SEQ ID NO: 180403 - DNA, 25 bp, Homo sapien
cctctggaaattgcgagccgtagga

SEQ ID NO: 180404 - DNA, 25 bp, Homo sapien
gggcctctggaaattgcgagccgta

SEQ ID NO: 180405 - DNA, 25 bp, Homo sapien
ctggaaattgcgagccgtaggagat

SEQ ID NO: 180406 - DNA, 25 bp, Homo sapien
agccgtaggagatggagtgacttct

SEQ ID NO: 180407 - DNA, 25 bp, Homo sapien
caagacggtgagtctactttccggg

SEQ ID NO: 180408 - DNA, 25 bp, Homo sapien
ctttttccgagttgactgaacaact

SEQ ID NO: 180409 - DNA, 25 bp, Homo sapien
ttttccgagttgactgaacaacttc

SEQ ID NO: 180410 - DNA, 25 bp, Homo sapien
tcagtctctagaccaagacggtgag

SEQ ID NO: 180411 - DNA, 25 bp, Homo sapien
acccacaatcaacccactcctacag

SEQ ID NO: 180412 - DNA, 25 bp, Homo sapien
ccagtggagcaggccactgcttcat

SEQ ID NO: 180413 - DNA, 25 bp, Homo sapien
cccagtggagcaggccactgcttca

SEQ ID NO: 180414 - DNA, 25 bp, Homo sapien
gtatatgtgttgccaaagtgagcac

SEQ ID NO: 180415 - DNA, 25 bp, Homo sapien
catcctattcttctctgtatcattt

SEQ ID NO: 180416 - DNA, 25 bp, Homo sapien
ttgcatgtcatccttgtgcaggggc

SEQ ID NO: 180417 - DNA, 25 bp, Homo sapien
taaaaatatgagacactccatgaat

SEQ ID NO: 180418 - DNA, 25 bp, Homo sapien
aacttaaatccgcaactacccgctg

SEQ ID NO: 180419 - DNA, 25 bp, Homo sapien
cggctagagaaaccgcgaaccaagg

SEQ ID NO: 180420 - DNA, 25 bp, Homo sapien
tctgccgcagccgagacagattgga

SEQ ID NO: 180421 - DNA, 25 bp, Homo sapien
aacgccaggccgagcatttcagaag

SEQ ID NO: 180422 - DNA, 25 bp, Homo sapien
tggagcctgtatggtccaagccccg

SEQ ID NO: 180423 - DNA, 25 bp, Homo sapien
tctgagctaaatgaggcggcctccc

SEQ ID NO: 180424 - DNA, 25 bp, Homo sapien
gcttcttctccgatgcctctgacga

SEQ ID NO: 180425 - DNA, 25 bp, Homo sapien
tctgacgaggcagccctgtatgcag

SEQ ID NO: 180426 - DNA, 25 bp, Homo sapien
gcccctatatccaaatttagcatcc

SEQ ID NO: 180427 - DNA, 25 bp, Homo sapien
tgcctctggcccctatatccaaatt

SEQ ID NO: 180428 - DNA, 25 bp, Homo sapien
gcctctggcccctatatccaaattt

SEQ ID NO: 180429 - DNA, 25 bp, Homo sapien
tctggcccctatatccaaatttagc

SEQ ID NO: 180430 - DNA, 25 bp, Homo sapien
taaaaatgggtggtagacctgagag

SEQ ID NO: 180431 - DNA, 25 bp, Homo sapien
agcccatacgttttccatgcagtgg

SEQ ID NO: 180432 - DNA, 25 bp, Homo sapien
gacctgggaattggttcaccttcta

SEQ ID NO: 180433 - DNA, 25 bp, Homo sapien
aagcttcattttggtaagggacaca

SEQ ID NO: 180434 - DNA, 25 bp, Homo sapien
gtaattctatagtgtctcactgacc

SEQ ID NO: 180435 - DNA, 25 bp, Homo sapien
tacttgtacctgtaacacccgatcc

SEQ ID NO: 180436 - DNA, 25 bp, Homo sapien
tcctctgcaacatacctacttgtac

SEQ ID NO: 180437 - DNA, 25 bp, Homo sapien
taacacccgatccaaactccagagg

SEQ ID NO: 180438 - DNA, 25 bp, Homo sapien
attctctagttgttttattgataga

SEQ ID NO: 180439 - DNA, 25 bp, Homo sapien
ttctctagttgttttattgatagat

SEQ ID NO: 180440 - DNA, 25 bp, Homo sapien
cattctctagttgttttattgatag

SEQ ID NO: 180441 - DNA, 25 bp, Homo sapien
ggaatgaatcatggaatcccaggta

SEQ ID NO: 180442 - DNA, 25 bp, Homo sapien
tttagcatactggcaggagagggtc

SEQ ID NO: 180443 - DNA, 25 bp, Homo sapien
ggctgggccaatgggacagcgggat

SEQ ID NO: 180444 - DNA, 25 bp, Homo sapien
tgggacagcgggataagaaagagag

SEQ ID NO: 180445 - DNA, 25 bp, Homo sapien
cagtgaagataactcagtgagagag

SEQ ID NO: 180446 - DNA, 25 bp, Homo sapien
ggatatgctggaacaggtacagtga

SEQ ID NO: 180447 - DNA, 25 bp, Homo sapien
gctggaacaggtacagtgaagataa

SEQ ID NO: 180448 - DNA, 25 bp, Homo sapien
caggtacagtgaagataactcagtg

SEQ ID NO: 180449 - DNA, 25 bp, Homo sapien
tccagctctgtatacctgctctcag

SEQ ID NO: 180450 - DNA, 25 bp, Homo sapien
agttcaaacttcaaaggtggagcag

SEQ ID NO: 180451 - DNA, 25 bp, Homo sapien
gctggctgctctgctatacatgcag

SEQ ID NO: 180452 - DNA, 25 bp, Homo sapien
gatccagcatagaaggacagccagg

SEQ ID NO: 180453 - DNA, 25 bp, Homo sapien
gctggctgagatccgtgatgctggc

SEQ ID NO: 180454 - DNA, 25 bp, Homo sapien
gtgctggctgagatccgtgatgctg

SEQ ID NO: 180455 - DNA, 25 bp, Homo sapien
ctgagatccgtgatgctggctttcc

SEQ ID NO: 180456 - DNA, 25 bp, Homo sapien
tggctgagatccgtgatgctggctt

SEQ ID NO: 180457 - DNA, 25 bp, Homo sapien
tgcagggtacgctgaggcttgtcca

SEQ ID NO: 180458 - DNA, 25 bp, Homo sapien
aagaagcctgcagggtacgctgagg

SEQ ID NO: 180459 - DNA, 25 bp, Homo sapien
cctgcagggtacgctgaggcttgtc

SEQ ID NO: 180460 - DNA, 25 bp, Homo sapien
gcagggtacgctgaggcttgtccat

SEQ ID NO: 180461 - DNA, 25 bp, Homo sapien
gccacctgtccctgatcagcattga

SEQ ID NO: 180462 - DNA, 25 bp, Homo sapien
agcagaggccgcaaagtagtgcaga

SEQ ID NO: 180463 - DNA, 25 bp, Homo sapien
ccgcaaagtagtgcagatcttcctt

SEQ ID NO: 180464 - DNA, 25 bp, Homo sapien
cctgtccctgatcagcattgagcag

SEQ ID NO: 180465 - DNA, 25 bp, Homo sapien
cttgccaaaccttgccctgatccta

SEQ ID NO: 180466 - DNA, 25 bp, Homo sapien
ttgccaaaccttgccctgatcctag

SEQ ID NO: 180467 - DNA, 25 bp, Homo sapien
gccaaaccttgccctgatcctaggg

SEQ ID NO: 180468 - DNA, 25 bp, Homo sapien
tgccaaaccttgccctgatcctagg

SEQ ID NO: 180469 - DNA, 25 bp, Homo sapien
tgggtggaaaggcctggtctggaga

SEQ ID NO: 180470 - DNA, 25 bp, Homo sapien
gtgggtggaaaggcctggtctggag

SEQ ID NO: 180471 - DNA, 25 bp, Homo sapien
gggtggaaaggcctggtctggagat

SEQ ID NO: 180472 - DNA, 25 bp, Homo sapien
tcttgtgcttgaaagacttgggtcc

SEQ ID NO: 180473 - DNA, 25 bp, Homo sapien
agaggtgggataggagccagaggga

SEQ ID NO: 180474 - DNA, 25 bp, Homo sapien
gccagagaaacttgagtatttccaa

SEQ ID NO: 180475 - DNA, 25 bp, Homo sapien
aggaagccagagaaacttgagtatt

SEQ ID NO: 180476 - DNA, 25 bp, Homo sapien
ccagagaaacttgagtatttccaac

SEQ ID NO: 180477 - DNA, 25 bp, Homo sapien
aagccagagaaacttgagtatttcc

SEQ ID NO: 180478 - DNA, 25 bp, Homo sapien
cgtcaggatcattggcaaaggctga

SEQ ID NO: 180479 - DNA, 25 bp, Homo sapien
tgacaggccacgtgttcagcatcag

SEQ ID NO: 180480 - DNA, 25 bp, Homo sapien
tccaagggcagtagcacagagctgg

SEQ ID NO: 180481 - DNA, 25 bp, Homo sapien
ctcccgggtcacgtcaggatcattg

SEQ ID NO: 180482 - DNA, 25 bp, Homo sapien
cttcaccacatggaaccggaagctg

SEQ ID NO: 180483 - DNA, 25 bp, Homo sapien
gaagctgtagacaccccggacaggg

SEQ ID NO: 180484 - DNA, 25 bp, Homo sapien
cggtcaaagccaccgccctcgttca

SEQ ID NO: 180485 - DNA, 25 bp, Homo sapien
gccagaggcccggtcaaagccaccg

SEQ ID NO: 180486 - DNA, 25 bp, Homo sapien
tggtcgaagtagatggccccactgg

SEQ ID NO: 180487 - DNA, 25 bp, Homo sapien
gtgccattgccggtttcccctgctg

SEQ ID NO: 180488 - DNA, 25 bp, Homo sapien
gcaaatgccactcgcccagggggtg

SEQ ID NO: 180489 - DNA, 25 bp, Homo sapien
gtggtggcttcggaccgcagcaaat

SEQ ID NO: 180490 - DNA, 25 bp, Homo sapien
ggccacatctttattcgcgggaaac

SEQ ID NO: 180491 - DNA, 25 bp, Homo sapien
cgagaagtaactgcgcagaatgcgc

SEQ ID NO: 180492 - DNA, 25 bp, Homo sapien
gcatggttcccctttccgagaagta

SEQ ID NO: 180493 - DNA, 25 bp, Homo sapien
agtgtgtgcatatgccagaggcagc

SEQ ID NO: 180494 - DNA, 25 bp, Homo sapien
cgcgtccccagatcgctttgcggtg

SEQ ID NO: 180495 - DNA, 25 bp, Homo sapien
gagaacaaggttcgggaacagcagc

SEQ ID NO: 180496 - DNA, 25 bp, Homo sapien
agcagccccatgtggagcgcatctt

SEQ ID NO: 180497 - DNA, 25 bp, Homo sapien
tccttccgaaggactgtccggacaa

SEQ ID NO: 180498 - DNA, 25 bp, Homo sapien
tgaggctggtcatacctccaggaac

SEQ ID NO: 180499 - DNA, 25 bp, Homo sapien
gatctgcttgaagtcctcctgtgcc

SEQ ID NO: 180500 - DNA, 25 bp, Homo sapien
cctgtgccagggaatttactatctc

SEQ ID NO: 180501 - DNA, 25 bp, Homo sapien
agttggaaggcacttgactggccac

SEQ ID NO: 180502 - DNA, 25 bp, Homo sapien
catccagggtgactacagggcccat

SEQ ID NO: 180503 - DNA, 25 bp, Homo sapien
gaaacggtgatgagagagactgctc

SEQ ID NO: 180504 - DNA, 25 bp, Homo sapien
gacattccttgaagtaaatcccagg

SEQ ID NO: 180505 - DNA, 25 bp, Homo sapien
ccagtcagatgagaggcaagtccta

SEQ ID NO: 180506 - DNA, 25 bp, Homo sapien
gagcattctctacacagcgtaaagg

SEQ ID NO: 180507 - DNA, 25 bp, Homo sapien
cattctctacacagcgtaaaggaga

SEQ ID NO: 180508 - DNA, 25 bp, Homo sapien
cagagcattctctacacagcgtaaa

SEQ ID NO: 180509 - DNA, 25 bp, Homo sapien
gcagagcattctctacacagcgtaa

SEQ ID NO: 180510 - DNA, 25 bp, Homo sapien
gacatgtagagaaaccaaactggga

SEQ ID NO: 180511 - DNA, 25 bp, Homo sapien
tgtcccaacctgatgagattacggc

SEQ ID NO: 180512 - DNA, 25 bp, Homo sapien
caaggagttgaaaagattaatgtcc

SEQ ID NO: 180513 - DNA, 25 bp, Homo sapien
ccttgagacaataaggtggagcaac

SEQ ID NO: 180514 - DNA, 25 bp, Homo sapien
gactgggagaggaatctaagaacca

SEQ ID NO: 180515 - DNA, 25 bp, Homo sapien
gcctcaggcccttgccacgacctac

SEQ ID NO: 180516 - DNA, 25 bp, Homo sapien
tgggagaggaatctaagaaccagat

SEQ ID NO: 180517 - DNA, 25 bp, Homo sapien
gaatctaagaaccagatggcttcag

SEQ ID NO: 180518 - DNA, 25 bp, Homo sapien
tgttcgctgtgggatcaccttctgg

SEQ ID NO: 180519 - DNA, 25 bp, Homo sapien
tgccaggtccccgatgtgtatccag

SEQ ID NO: 180520 - DNA, 25 bp, Homo sapien
cttcaagggcatgggtcaggattcc

SEQ ID NO: 180521 - DNA, 25 bp, Homo sapien
tgggcaaactcagcattagtggcgg

SEQ ID NO: 180522 - DNA, 25 bp, Homo sapien
ctgagccgatggggccccccaggcc

SEQ ID NO: 180523 - DNA, 25 bp, Homo sapien
tgagccgatggggccccccaggccc

SEQ ID NO: 180524 - DNA, 25 bp, Homo sapien
tcagccttgaaggagcccactgctc

SEQ ID NO: 180525 - DNA, 25 bp, Homo sapien
gagggaaggtacaggggtcctctca

SEQ ID NO: 180526 - DNA, 25 bp, Homo sapien
ggtcctctcagccttgaaggagccc

SEQ ID NO: 180527 - DNA, 25 bp, Homo sapien
cactgctcctcctggtttctgtttc

SEQ ID NO: 180528 - DNA, 25 bp, Homo sapien
gtctgatacccaggcccgtttctca

SEQ ID NO: 180529 - DNA, 25 bp, Homo sapien
gttggctagaagtggtggcatcctc

SEQ ID NO: 180530 - DNA, 25 bp, Homo sapien
tgagcagtatggctgtctttaagac

SEQ ID NO: 180531 - DNA, 25 bp, Homo sapien
tgtaattgtaatctcagctctccta

SEQ ID NO: 180532 - DNA, 25 bp, Homo sapien
tgcagcttcccatttggttacgagg

SEQ ID NO: 180533 - DNA, 25 bp, Homo sapien
tgagcgcaccaccacctggcgtgta

SEQ ID NO: 180534 - DNA, 25 bp, Homo sapien
ggcgtgtagaatctccaggaagcct

SEQ ID NO: 180535 - DNA, 25 bp, Homo sapien
tactccgcagtcagactgggctggt

SEQ ID NO: 180536 - DNA, 25 bp, Homo sapien
gcctggctctctgtagtggaggctc

SEQ ID NO: 180537 - DNA, 25 bp, Homo sapien
acacaatcatttgccctgggtgtcc

SEQ ID NO: 180538 - DNA, 25 bp, Homo sapien
ggtggaacacaatcatttgccctgg

SEQ ID NO: 180539 - DNA, 25 bp, Homo sapien
ctgccggtggaacacaatcatttgc

SEQ ID NO: 180540 - DNA, 25 bp, Homo sapien
ggaactctggttgcagggctaaact

SEQ ID NO: 180541 - DNA, 25 bp, Homo sapien
tgtgtgcatagctacagaggtctga

SEQ ID NO: 180542 - DNA, 25 bp, Homo sapien
catgcatggatcaagggcctaggaa

SEQ ID NO: 180543 - DNA, 25 bp, Homo sapien
gaacaggaacttgggtaccaggcgc

SEQ ID NO: 180544 - DNA, 25 bp, Homo sapien
tagccagcaattgggtggtctctag

SEQ ID NO: 180545 - DNA, 25 bp, Homo sapien
ccagcaattgggtggtctctaggcg

SEQ ID NO: 180546 - DNA, 25 bp, Homo sapien
gctttagccagcaattgggtggtct

SEQ ID NO: 180547 - DNA, 25 bp, Homo sapien
tggctttagccagcaattgggtggt

SEQ ID NO: 180548 - DNA, 25 bp, Homo sapien
cagtcaacgtctcctgtagagggaa

SEQ ID NO: 180549 - DNA, 25 bp, Homo sapien
gtttagttcggaatctgggagctcc

SEQ ID NO: 180550 - DNA, 25 bp, Homo sapien
tacgtgaggacttaagccaattggc

SEQ ID NO: 180551 - DNA, 25 bp, Homo sapien
tcggcttaagagaaacagtcaacgt

SEQ ID NO: 180552 - DNA, 25 bp, Homo sapien
ggtatcagctttagggcccgggctg

SEQ ID NO: 180553 - DNA, 25 bp, Homo sapien
gtatcagctttagggcccgggctga

SEQ ID NO: 180554 - DNA, 25 bp, Homo sapien
ctgtgctctagtgggtatcagcttt

SEQ ID NO: 180555 - DNA, 25 bp, Homo sapien
ctccctgtgctctagtgggtatcag

SEQ ID NO: 180556 - DNA, 25 bp, Homo sapien
ggatgttctctccggccaggttgac

SEQ ID NO: 180557 - DNA, 25 bp, Homo sapien
aggatgttctctccggccaggttga

SEQ ID NO: 180558 - DNA, 25 bp, Homo sapien
gaggatgttctctccggccaggttg

SEQ ID NO: 180559 - DNA, 25 bp, Homo sapien
gatgttctctccggccaggttgacg

SEQ ID NO: 180560 - DNA, 25 bp, Homo sapien
acccgcttccagaggatggacttac

SEQ ID NO: 180561 - DNA, 25 bp, Homo sapien
ggagaaagcacacagtgcccctgcc

SEQ ID NO: 180562 - DNA, 25 bp, Homo sapien
ccacccgcttccagaggatggactt

SEQ ID NO: 180563 - DNA, 25 bp, Homo sapien
ctgtcggagaaagcacacagtgccc

SEQ ID NO: 180564 - DNA, 25 bp, Homo sapien
gctgggttagggctgtcccaatgaa

SEQ ID NO: 180565 - DNA, 25 bp, Homo sapien
gctttcgggagaccaacgtcacttc

SEQ ID NO: 180566 - DNA, 25 bp, Homo sapien
aacgtcacttcgtggcctctggcat

SEQ ID NO: 180567 - DNA, 25 bp, Homo sapien
ggttagggctgtcccaatgaagcct

SEQ ID NO: 180568 - DNA, 25 bp, Homo sapien
ctcctcgcgatgcagaggtgacaca

SEQ ID NO: 180569 - DNA, 25 bp, Homo sapien
tcacagggattagggagattcggct

SEQ ID NO: 180570 - DNA, 25 bp, Homo sapien
tgtgcactagacagtgccctcccgg

SEQ ID NO: 180571 - DNA, 25 bp, Homo sapien
cggaagcggattcccagtcctcaat

SEQ ID NO: 180572 - DNA, 25 bp, Homo sapien
cgactaggacctaacgcgcctgcgt

SEQ ID NO: 180573 - DNA, 25 bp, Homo sapien
agcgactaggacctaacgcgcctgc

SEQ ID NO: 180574 - DNA, 25 bp, Homo sapien
actaggacctaacgcgcctgcgtaa

SEQ ID NO: 180575 - DNA, 25 bp, Homo sapien
taggacctaacgcgcctgcgtaaag

SEQ ID NO: 180576 - DNA, 25 bp, Homo sapien
tgcgcatgcccctttcgggaagcgc

SEQ ID NO: 180577 - DNA, 25 bp, Homo sapien
ctcagacgcgactacgacctctctg

SEQ ID NO: 180578 - DNA, 25 bp, Homo sapien
gaagcgcgttccaatcgaggtcgca

SEQ ID NO: 180579 - DNA, 25 bp, Homo sapien
gcgactacgacctctctgcgcatgc

SEQ ID NO: 180580 - DNA, 25 bp, Homo sapien
cagttaccaggctttaacagaagac

SEQ ID NO: 180581 - DNA, 25 bp, Homo sapien
tctcagtatcaatgggcacctgctg

SEQ ID NO: 180582 - DNA, 25 bp, Homo sapien
tgtgtcaccaaatctaatccctagt

SEQ ID NO: 180583 - DNA, 25 bp, Homo sapien
tcagagctggatcctaggaccttct

SEQ ID NO: 180584 - DNA, 25 bp, Homo sapien
caggctcacctcttggtaatttttc

SEQ ID NO: 180585 - DNA, 25 bp, Homo sapien
tcttgccttgatatcagagttccac

SEQ ID NO: 180586 - DNA, 25 bp, Homo sapien
gaagaaacacttggcttgcctctgg

SEQ ID NO: 180587 - DNA, 25 bp, Homo sapien
gaatgggatgcatgggccttgatga

SEQ ID NO: 180588 - DNA, 25 bp, Homo sapien
gctcagtcaacctctggggcatcag

SEQ ID NO: 180589 - DNA, 25 bp, Homo sapien
acagcattcctgaacctcgatgtct

SEQ ID NO: 180590 - DNA, 25 bp, Homo sapien
cgatgtctgtggagatgccaggtct

SEQ ID NO: 180591 - DNA, 25 bp, Homo sapien
aacctcgatgtctgtggagatgcca

SEQ ID NO: 180592 - DNA, 25 bp, Homo sapien
cactaagacttttagatgcccccat

SEQ ID NO: 180593 - DNA, 25 bp, Homo sapien
ggactgtggcccagaaaacttttca

SEQ ID NO: 180594 - DNA, 25 bp, Homo sapien
tcatgggacagtggaaaggccccgc

SEQ ID NO: 180595 - DNA, 25 bp, Homo sapien
tttcactcgaaaggtgccatgttcc

SEQ ID NO: 180596 - DNA, 25 bp, Homo sapien
ggagccttagcccaaaggcagggca

SEQ ID NO: 180597 - DNA, 25 bp, Homo sapien
ctaggaggaagttgcgctggtcaag

SEQ ID NO: 180598 - DNA, 25 bp, Homo sapien
taggaggaagttgcgctggtcaaga

SEQ ID NO: 180599 - DNA, 25 bp, Homo sapien
aggaagttgcgctggtcaagacggt

SEQ ID NO: 180600 - DNA, 25 bp, Homo sapien
ggaggaagttgcgctggtcaagacg

SEQ ID NO: 180601 - DNA, 25 bp, Homo sapien
ggacaccgcatctgctagaggtggc

SEQ ID NO: 180602 - DNA, 25 bp, Homo sapien
ctcttatcttcagggacaccgcatc

SEQ ID NO: 180603 - DNA, 25 bp, Homo sapien
tcagggacaccgcatctgctagagg

SEQ ID NO: 180604 - DNA, 25 bp, Homo sapien
tcttcagggacaccgcatctgctag

SEQ ID NO: 180605 - DNA, 25 bp, Homo sapien
aagaaaataatcttcaatccagaat

SEQ ID NO: 180606 - DNA, 25 bp, Homo sapien
ttaaagaaaataatcttcaatccag

SEQ ID NO: 180607 - DNA, 25 bp, Homo sapien
ttcttaaagaaaataatcttcaatc

SEQ ID NO: 180608 - DNA, 25 bp, Homo sapien
agaaaataatcttcaatccagaatt

SEQ ID NO: 180609 - DNA, 25 bp, Homo sapien
cagcaacatatcaaaaagctgatcc

SEQ ID NO: 180610 - DNA, 25 bp, Homo sapien
atccagcaacatatcaaaaagctga

SEQ ID NO: 180611 - DNA, 25 bp, Homo sapien
caacatatcaaaaagctgatccacc

SEQ ID NO: 180612 - DNA, 25 bp, Homo sapien
gcaacatatcaaaaagctgatccac

SEQ ID NO: 180613 - DNA, 25 bp, Homo sapien
ggttgttgaggactagataaatcat

SEQ ID NO: 180614 - DNA, 25 bp, Homo sapien
ctaggttgttgaggactagataaat

SEQ ID NO: 180615 - DNA, 25 bp, Homo sapien
aggttgttgaggactagataaatca

SEQ ID NO: 180616 - DNA, 25 bp, Homo sapien
taggttgttgaggactagataaatc

SEQ ID NO: 180617 - DNA, 25 bp, Homo sapien
tctgtgacctgtaggatacttctgg

SEQ ID NO: 180618 - DNA, 25 bp, Homo sapien
gaggtttattgagagttctgtgacc

SEQ ID NO: 180619 - DNA, 25 bp, Homo sapien
ggtagaccagaatgagtggcacaca

SEQ ID NO: 180620 - DNA, 25 bp, Homo sapien
tgctgctcaggtccagttccagctt

SEQ ID NO: 180621 - DNA, 25 bp, Homo sapien
gcctgcaggatctggttgatccagg

SEQ ID NO: 180622 - DNA, 25 bp, Homo sapien
atccagggccggtaatgggagattc

SEQ ID NO: 180623 - DNA, 25 bp, Homo sapien
ccgtccataggatacgatgccctgg

SEQ ID NO: 180624 - DNA, 25 bp, Homo sapien
gggagattcgggtgaagacagcagg

SEQ ID NO: 180625 - DNA, 25 bp, Homo sapien
gaagattgtggtcaaagtctctgaa

SEQ ID NO: 180626 - DNA, 25 bp, Homo sapien
agctgaagattgtggtcaaagtctc

SEQ ID NO: 180627 - DNA, 25 bp, Homo sapien
gctgaagattgtggtcaaagtctct

SEQ ID NO: 180628 - DNA, 25 bp, Homo sapien
agattgtggtcaaagtctctgaagt

SEQ ID NO: 180629 - DNA, 25 bp, Homo sapien
tgagcccggcttcaacacacctgtt

SEQ ID NO: 180630 - DNA, 25 bp, Homo sapien
cattctcccaggtgggacaaagttg

SEQ ID NO: 180631 - DNA, 25 bp, Homo sapien
acaaagttgaattgggatgggaagg

SEQ ID NO: 180632 - DNA, 25 bp, Homo sapien
tgcagagtgtctgagcccggcttca

SEQ ID NO: 180633 - DNA, 25 bp, Homo sapien
gcttaggagaatgggaagtggaaag

SEQ ID NO: 180634 - DNA, 25 bp, Homo sapien
ctgaaggagaagcttaggagaatgg

SEQ ID NO: 180635 - DNA, 25 bp, Homo sapien
aaggagaagcttaggagaatgggaa

SEQ ID NO: 180636 - DNA, 25 bp, Homo sapien
gaagcttaggagaatgggaagtgga

SEQ ID NO: 180637 - DNA, 25 bp, Homo sapien
tcctctgttatgttatgggctccaa

SEQ ID NO: 180638 - DNA, 25 bp, Homo sapien
ggctccaagggtgactgttatagac

SEQ ID NO: 180639 - DNA, 25 bp, Homo sapien
ctttagtaacatgatatcgtggtga

SEQ ID NO: 180640 - DNA, 25 bp, Homo sapien
ttggatgacggaattgctttataac

SEQ ID NO: 180641 - DNA, 25 bp, Homo sapien
gaagttacaatttccaggtaggcca

SEQ ID NO: 180642 - DNA, 25 bp, Homo sapien
cagcacaaagttccgtcttataagg

SEQ ID NO: 180643 - DNA, 25 bp, Homo sapien
gcttgcattctgtgcccccgatgat

SEQ ID NO: 180644 - DNA, 25 bp, Homo sapien
ttcctgcacaatgagcagccgtcag

SEQ ID NO: 180645 - DNA, 25 bp, Homo sapien
ctctggagcacaagagaaagagcag

SEQ ID NO: 180646 - DNA, 25 bp, Homo sapien
gcttcagctctggagcacaagagaa

SEQ ID NO: 180647 - DNA, 25 bp, Homo sapien
ctggagcacaagagaaagagcagca

SEQ ID NO: 180648 - DNA, 25 bp, Homo sapien
tcagctctggagcacaagagaaaga

SEQ ID NO: 180649 - DNA, 25 bp, Homo sapien
cagtcttgggttttataactcccag

SEQ ID NO: 180650 - DNA, 25 bp, Homo sapien
tgggttttataactcccagaaggca

SEQ ID NO: 180651 - DNA, 25 bp, Homo sapien
ctggtaaccacaggaactgcatggt

SEQ ID NO: 180652 - DNA, 25 bp, Homo sapien
ctagtcattcttggttgcaaggaga

SEQ ID NO: 180653 - DNA, 25 bp, Homo sapien
gtcattcttggttgcaaggagattc

SEQ ID NO: 180654 - DNA, 25 bp, Homo sapien
ttccttagtctcttgaagggcagat

SEQ ID NO: 180655 - DNA, 25 bp, Homo sapien
cagatgctgcccaggatgcaggtat

SEQ ID NO: 180656 - DNA, 25 bp, Homo sapien
tgcattttccctgcgacattgccca

SEQ ID NO: 180657 - DNA, 25 bp, Homo sapien
ggaagaccagcaaaatgatcagggc

SEQ ID NO: 180658 - DNA, 25 bp, Homo sapien
aggaagaccagcaaaatgatcaggg

SEQ ID NO: 180659 - DNA, 25 bp, Homo sapien
ttccctgcgacattgcccatactga

SEQ ID NO: 180660 - DNA, 25 bp, Homo sapien
ggctagttctgtcaccccttcactg

SEQ ID NO: 180661 - DNA, 25 bp, Homo sapien
ctagttctgtcaccccttcactggg

SEQ ID NO: 180662 - DNA, 25 bp, Homo sapien
gctagttctgtcaccccttcactgg

SEQ ID NO: 180663 - DNA, 25 bp, Homo sapien
tagttctgtcaccccttcactgggc

SEQ ID NO: 180664 - DNA, 25 bp, Homo sapien
tctgtctttcatgctggcatggtta

SEQ ID NO: 180665 - DNA, 25 bp, Homo sapien
catgctggcatggttatcttcctca

SEQ ID NO: 180666 - DNA, 25 bp, Homo sapien
ctcatttctgtctttcatgctggca

SEQ ID NO: 180667 - DNA, 25 bp, Homo sapien
tttcatgctggcatggttatcttcc

SEQ ID NO: 180668 - DNA, 25 bp, Homo sapien
ctatttatcagcttcatcaaggcca

SEQ ID NO: 180669 - DNA, 25 bp, Homo sapien
gttctaaattggacggaagtgctcc

SEQ ID NO: 180670 - DNA, 25 bp, Homo sapien
aggttctaaattggacggaagtgct

SEQ ID NO: 180671 - DNA, 25 bp, Homo sapien
ttctatttatcagcttcatcaaggc

SEQ ID NO: 180672 - DNA, 25 bp, Homo sapien
cagggacttcttggtataggcagtg

SEQ ID NO: 180673 - DNA, 25 bp, Homo sapien
ggtataggcagtggcttgggctttg

SEQ ID NO: 180674 - DNA, 25 bp, Homo sapien
gacttcttggtataggcagtggctt

SEQ ID NO: 180675 - DNA, 25 bp, Homo sapien
cagtggcttgggctttggcctcctt

SEQ ID NO: 180676 - DNA, 25 bp, Homo sapien
actccttctccgaatactctgttca

SEQ ID NO: 180677 - DNA, 25 bp, Homo sapien
ctccttctccgaatactctgttcat

SEQ ID NO: 180678 - DNA, 25 bp, Homo sapien
tccaatactccttctccgaatactc

SEQ ID NO: 180679 - DNA, 25 bp, Homo sapien
gcttccaatactccttctccgaata

SEQ ID NO: 180680 - DNA, 25 bp, Homo sapien
gtactgaatgacgtttaatgaacaa

SEQ ID NO: 180681 - DNA, 25 bp, Homo sapien
aagtactgaatgacgtttaatgaac

SEQ ID NO: 180682 - DNA, 25 bp, Homo sapien
gaatgacgtttaatgaacaaatgag

SEQ ID NO: 180683 - DNA, 25 bp, Homo sapien
gacgtttaatgaacaaatgaggaat

SEQ ID NO: 180684 - DNA, 25 bp, Homo sapien
gacgtttattaaggctctggcaaca

SEQ ID NO: 180685 - DNA, 25 bp, Homo sapien
tctgtggacgtttattaaggctctg

SEQ ID NO: 180686 - DNA, 25 bp, Homo sapien
tttattaaggctctggcaacactgt

SEQ ID NO: 180687 - DNA, 25 bp, Homo sapien
tgtggacgtttattaaggctctggc

SEQ ID NO: 180688 - DNA, 25 bp, Homo sapien
gcaggaaacttgagaccctggtgaa

SEQ ID NO: 180689 - DNA, 25 bp, Homo sapien
tggaggaacccctgacgactttcca

SEQ ID NO: 180690 - DNA, 25 bp, Homo sapien
ctttccataggagacgatgccgtgg

SEQ ID NO: 180691 - DNA, 25 bp, Homo sapien
tgggccacattgttacacagcaggg

SEQ ID NO: 180692 - DNA, 25 bp, Homo sapien
ggagccaagcctctggatcttttcg

SEQ ID NO: 180693 - DNA, 25 bp, Homo sapien
cccttcaattgctgggtgtgtgtga

SEQ ID NO: 180694 - DNA, 25 bp, Homo sapien
gatcttttcggtcgctggacttcag

SEQ ID NO: 180695 - DNA, 25 bp, Homo sapien
tgggtgggccccttcaattgctggg

SEQ ID NO: 180696 - DNA, 25 bp, Homo sapien
cacctctcggagtgtatctgttccc

SEQ ID NO: 180697 - DNA, 25 bp, Homo sapien
cagagccactgggttcacgtttcga

SEQ ID NO: 180698 - DNA, 25 bp, Homo sapien
agtgcacagcgtcccgggtctcagt

SEQ ID NO: 180699 - DNA, 25 bp, Homo sapien
taggaaccgaagatgcggaggcact

SEQ ID NO: 180700 - DNA, 25 bp, Homo sapien
gctctgcgcgcagtgatgtgttgct

SEQ ID NO: 180701 - DNA, 25 bp, Homo sapien
ttgagggtggcggatggctctgcgc

SEQ ID NO: 180702 - DNA, 25 bp, Homo sapien
ctctggatattgtgggcgcccaggg

SEQ ID NO: 180703 - DNA, 25 bp, Homo sapien
gtcattctggatggtccgctgatta

SEQ ID NO: 180704 - DNA, 25 bp, Homo sapien
ggatctgaagatacgccatgtaggg

SEQ ID NO: 180705 - DNA, 25 bp, Homo sapien
tgctggactctggatctgaagatac

SEQ ID NO: 180706 - DNA, 25 bp, Homo sapien
tgctctcccggcctccgatgatctc

SEQ ID NO: 180707 - DNA, 25 bp, Homo sapien
cagcacaaagtcttctcgcaccagg

SEQ ID NO: 180708 - DNA, 25 bp, Homo sapien
gcacttagctctatgcttgctgaac

SEQ ID NO: 180709 - DNA, 25 bp, Homo sapien
tggcacttagctctatgcttgctga

SEQ ID NO: 180710 - DNA, 25 bp, Homo sapien
catttggcacttagctctatgcttg

SEQ ID NO: 180711 - DNA, 25 bp, Homo sapien
gaagcatttggcacttagctctatg

SEQ ID NO: 180712 - DNA, 25 bp, Homo sapien
aatgtgggtaccagattggtggctc

SEQ ID NO: 180713 - DNA, 25 bp, Homo sapien
ctgcaatgtgggtaccagattggtg

SEQ ID NO: 180714 - DNA, 25 bp, Homo sapien
taccagattggtggctccagaaagg

SEQ ID NO: 180715 - DNA, 25 bp, Homo sapien
tgggtaccagattggtggctccaga

SEQ ID NO: 180716 - DNA, 25 bp, Homo sapien
cccagtgggtaggagaaaggccagc

SEQ ID NO: 180717 - DNA, 25 bp, Homo sapien
cctagactttaaggccctgagagag

SEQ ID NO: 180718 - DNA, 25 bp, Homo sapien
tgaaaggctgcccagtcagttgctg

SEQ ID NO: 180719 - DNA, 25 bp, Homo sapien
aaaggctgcccagtcagttgctgct

SEQ ID NO: 180720 - DNA, 25 bp, Homo sapien
tcctcctagactttaaggccctgag

SEQ ID NO: 180721 - DNA, 25 bp, Homo sapien
caccagagatccatttattacagtc

SEQ ID NO: 180722 - DNA, 25 bp, Homo sapien
gcccagaggaaggttagtctcatgc

SEQ ID NO: 180723 - DNA, 25 bp, Homo sapien
ggcccagaggaaggttagtctcatg

SEQ ID NO: 180724 - DNA, 25 bp, Homo sapien
tttattacagtcctgcaaccccgac

SEQ ID NO: 180725 - DNA, 25 bp, Homo sapien
cttgatgtagactcctggaggtgtc

SEQ ID NO: 180726 - DNA, 25 bp, Homo sapien
agagaataccttgggctacgtcctt

SEQ ID NO: 180727 - DNA, 25 bp, Homo sapien
tttgtttccataggagagaatacct

SEQ ID NO: 180728 - DNA, 25 bp, Homo sapien
gaccttgatgtagactcctggaggt

SEQ ID NO: 180729 - DNA, 25 bp, Homo sapien
ctgtgaacagagagaggaaagactg

SEQ ID NO: 180730 - DNA, 25 bp, Homo sapien
gtgaacagagagaggaaagactgag

SEQ ID NO: 180731 - DNA, 25 bp, Homo sapien
tgtgaacagagagaggaaagactga

SEQ ID NO: 180732 - DNA, 25 bp, Homo sapien
tggaagagacgttcacactggcagt

SEQ ID NO: 180733 - DNA, 25 bp, Homo sapien
gtgtcttctttggatcccccacaca

SEQ ID NO: 180734 - DNA, 25 bp, Homo sapien
gcagtgtggttgctaaagtgctcat

SEQ ID NO: 180735 - DNA, 25 bp, Homo sapien
cactggcagtccttctgcactgtca

SEQ ID NO: 180736 - DNA, 25 bp, Homo sapien
ccttgctgctaggtagcctgagagg

SEQ ID NO: 180737 - DNA, 25 bp, Homo sapien
cgcacagctgtggtccacttggcct

SEQ ID NO: 180738 - DNA, 25 bp, Homo sapien
cctgagaggccgcacagctgtggtc

SEQ ID NO: 180739 - DNA, 25 bp, Homo sapien
tgggccttgctgctaggtagcctga

SEQ ID NO: 180740 - DNA, 25 bp, Homo sapien
tcaggcaatggccttctgggccccg

SEQ ID NO: 180741 - DNA, 25 bp, Homo sapien
agcaagaaagtccaggtcaggcaat

SEQ ID NO: 180742 - DNA, 25 bp, Homo sapien
cggcatcccagtgggagtggaacca

SEQ ID NO: 180743 - DNA, 25 bp, Homo sapien
ggcacaggaactgaccaagaggtca

SEQ ID NO: 180744 - DNA, 25 bp, Homo sapien
gatgtcgttggagaagttcttagga

SEQ ID NO: 180745 - DNA, 25 bp, Homo sapien
tggagaagttcttaggattataggc

SEQ ID NO: 180746 - DNA, 25 bp, Homo sapien
agtagcatgatgtcgttggagaagt

SEQ ID NO: 180747 - DNA, 25 bp, Homo sapien
gagaagttcttaggattataggctg

SEQ ID NO: 180748 - DNA, 25 bp, Homo sapien
tgtcagcacaaagtcctttctcact

SEQ ID NO: 180749 - DNA, 25 bp, Homo sapien
tgccgccacacctcttccgactctt

SEQ ID NO: 180750 - DNA, 25 bp, Homo sapien
gccacacctcttccgactcttctct

SEQ ID NO: 180751 - DNA, 25 bp, Homo sapien
aggatgccgccacacctcttccgac

SEQ ID NO: 180752 - DNA, 25 bp, Homo sapien
ctgaaaggaaagactggaagataaa

SEQ ID NO: 180753 - DNA, 25 bp, Homo sapien
aggaaagactggaagataaagtagc

SEQ ID NO: 180754 - DNA, 25 bp, Homo sapien
aagactggaagataaagtagctggg

SEQ ID NO: 180755 - DNA, 25 bp, Homo sapien
actggaagataaagtagctggggat

SEQ ID NO: 180756 - DNA, 25 bp, Homo sapien
aaatgaatcgcaaagcccaggtgga

SEQ ID NO: 180757 - DNA, 25 bp, Homo sapien
tctgagatcagttgcaccatgggct

SEQ ID NO: 180758 - DNA, 25 bp, Homo sapien
gaggtctagggagaggctaacaccc

SEQ ID NO: 180759 - DNA, 25 bp, Homo sapien
cagtgctcatgggtacagggtatct

SEQ ID NO: 180760 - DNA, 25 bp, Homo sapien
tcagaagaaaggccaacaggaggag

SEQ ID NO: 180761 - DNA, 25 bp, Homo sapien
aagaaaggccaacaggaggaggaat

SEQ ID NO: 180762 - DNA, 25 bp, Homo sapien
ccaggggtcagaagaaaggccaaca

SEQ ID NO: 180763 - DNA, 25 bp, Homo sapien
gggtcagaagaaaggccaacaggag

SEQ ID NO: 180764 - DNA, 25 bp, Homo sapien
ccaggtcagagctgttggtgttgac

SEQ ID NO: 180765 - DNA, 25 bp, Homo sapien
cccaggtcagagctgttggtgttga

SEQ ID NO: 180766 - DNA, 25 bp, Homo sapien
ctgcccaggtcagagctgttggtgt

SEQ ID NO: 180767 - DNA, 25 bp, Homo sapien
tctcaggaaggctgcccaggtcaga

SEQ ID NO: 180768 - DNA, 25 bp, Homo sapien
ggagggagatgaaggagggatgggt

SEQ ID NO: 180769 - DNA, 25 bp, Homo sapien
ctggagggagatgaaggagggatgg

SEQ ID NO: 180770 - DNA, 25 bp, Homo sapien
tggagggagatgaaggagggatggg

SEQ ID NO: 180771 - DNA, 25 bp, Homo sapien
ggttgccacacaggcctggtttttc

SEQ ID NO: 180772 - DNA, 25 bp, Homo sapien
ctggttgccacacaggcctggtttt

SEQ ID NO: 180773 - DNA, 25 bp, Homo sapien
cacaggcctggtttttctgaggccc

SEQ ID NO: 180774 - DNA, 25 bp, Homo sapien
gccacacaggcctggtttttctgag

SEQ ID NO: 180775 - DNA, 25 bp, Homo sapien
cagatgtggtgcctgagaatgaggg

SEQ ID NO: 180776 - DNA, 25 bp, Homo sapien
gtgcctgagaatgagggtcaatgaa

SEQ ID NO: 180777 - DNA, 25 bp, Homo sapien
tgtggtgcctgagaatgagggtcaa

SEQ ID NO: 180778 - DNA, 25 bp, Homo sapien
gcctgagaatgagggtcaatgaata

SEQ ID NO: 180779 - DNA, 25 bp, Homo sapien
ttacagcgggggcttagtttgcttc

SEQ ID NO: 180780 - DNA, 25 bp, Homo sapien
aaggtgtttcattacagcgggggct

SEQ ID NO: 180781 - DNA, 25 bp, Homo sapien
ggtgtttcattacagcgggggctta

SEQ ID NO: 180782 - DNA, 25 bp, Homo sapien
cgggggcttagtttgcttcctgtag

SEQ ID NO: 180783 - DNA, 25 bp, Homo sapien
tctttatccagtgtacaaagcttga

SEQ ID NO: 180784 - DNA, 25 bp, Homo sapien
tagtagcgtttcatggttttcttta

SEQ ID NO: 180785 - DNA, 25 bp, Homo sapien
ttatccagtgtacaaagcttgagac

SEQ ID NO: 180786 - DNA, 25 bp, Homo sapien
tttatccagtgtacaaagcttgaga

SEQ ID NO: 180787 - DNA, 25 bp, Homo sapien
ggctcgtggaggcatgccattgttt

SEQ ID NO: 180788 - DNA, 25 bp, Homo sapien
cattgtttcgtccataggagacaat

SEQ ID NO: 180789 - DNA, 25 bp, Homo sapien
cctgggccaccttgttacacacaag

SEQ ID NO: 180790 - DNA, 25 bp, Homo sapien
ttacacacaagagggcctccagagt

SEQ ID NO: 180791 - DNA, 25 bp, Homo sapien
cactacttgagtctccaggtctcag

SEQ ID NO: 180792 - DNA, 25 bp, Homo sapien
gagtgttgcaaattcatccttccaa

SEQ ID NO: 180793 - DNA, 25 bp, Homo sapien
caatccaggcaggtgcatagtctta

SEQ ID NO: 180794 - DNA, 25 bp, Homo sapien
cagtctagtgggtgaaggagtcccc

SEQ ID NO: 180795 - DNA, 25 bp, Homo sapien
cacgcacaactcaatggtactgtcg

SEQ ID NO: 180796 - DNA, 25 bp, Homo sapien
gattcgcactttcgatcttcctgca

SEQ ID NO: 180797 - DNA, 25 bp, Homo sapien
tgtcatcttcacctcttgtagtgtg

SEQ ID NO: 180798 - DNA, 25 bp, Homo sapien
tgtcgtaataatggcgtaagtcaga

SEQ ID NO: 180799 - DNA, 25 bp, Homo sapien
ggcaagaaagtccaggtcagccaac

SEQ ID NO: 180800 - DNA, 25 bp, Homo sapien
aagaaagtccaggtcagccaacgaa

SEQ ID NO: 180801 - DNA, 25 bp, Homo sapien
ggaagaggcaagaaagtccaggtca

SEQ ID NO: 180802 - DNA, 25 bp, Homo sapien
gaaagtccaggtcagccaacgaact

SEQ ID NO: 180803 - DNA, 25 bp, Homo sapien
cctctcctctgaggcataggaacta

SEQ ID NO: 180804 - DNA, 25 bp, Homo sapien
tctcctctgaggcataggaactaac

SEQ ID NO: 180805 - DNA, 25 bp, Homo sapien
ttccctctcctctgaggcataggaa

SEQ ID NO: 180806 - DNA, 25 bp, Homo sapien
atggggctgcacaatcttccctctc

SEQ ID NO: 180807 - DNA, 25 bp, Homo sapien
aaggagggaagggccggcattccag

SEQ ID NO: 180808 - DNA, 25 bp, Homo sapien
aggagggaagggccggcattccagg

SEQ ID NO: 180809 - DNA, 25 bp, Homo sapien
aagggccggcattccagggggagtg

SEQ ID NO: 180810 - DNA, 25 bp, Homo sapien
ggcattccagggggagtggaaccaa

SEQ ID NO: 180811 - DNA, 25 bp, Homo sapien
caagagtggcaggagtgtgcctcac

SEQ ID NO: 180812 - DNA, 25 bp, Homo sapien
agcaagagtggcaggagtgtgcctc

SEQ ID NO: 180813 - DNA, 25 bp, Homo sapien
agagcaagagtggcaggagtgtgcc

SEQ ID NO: 180814 - DNA, 25 bp, Homo sapien
gcaagagtggcaggagtgtgcctca

SEQ ID NO: 180815 - DNA, 25 bp, Homo sapien
catgatgtcgttggagaagttctta

SEQ ID NO: 180816 - DNA, 25 bp, Homo sapien
gatgtcgttggagaagttcttagga

SEQ ID NO: 180817 - DNA, 25 bp, Homo sapien
agtagcatgatgtcgttggagaagt

SEQ ID NO: 180818 - DNA, 25 bp, Homo sapien
cgttggagaagttcttaggattata

SEQ ID NO: 180819 - DNA, 25 bp, Homo sapien
ggataaactgctgggtcggctcctg

SEQ ID NO: 180820 - DNA, 25 bp, Homo sapien
gggataaactgctgggtcggctcct

SEQ ID NO: 180821 - DNA, 25 bp, Homo sapien
gtcgtctcgtatcaggaagccaccg

SEQ ID NO: 180822 - DNA, 25 bp, Homo sapien
gcagctgtcagcacgaagtcgtctc

SEQ ID NO: 180823 - DNA, 25 bp, Homo sapien
cataagataagccatgtaggggcgg

SEQ ID NO: 180824 - DNA, 25 bp, Homo sapien
gtatcaggaagccaccgcacctctt

SEQ ID NO: 180825 - DNA, 25 bp, Homo sapien
cttgtgggcacccatggaatctgct

SEQ ID NO: 180826 - DNA, 25 bp, Homo sapien
gcttgtgggcacccatggaatctgc

SEQ ID NO: 180827 - DNA, 25 bp, Homo sapien
cctgggatagcctggagttgggagt

SEQ ID NO: 180828 - DNA, 25 bp, Homo sapien
tagagcctgacatgtagtgggtgcc

SEQ ID NO: 180829 - DNA, 25 bp, Homo sapien
ggaaagtcctactctccaggtgaca

SEQ ID NO: 180830 - DNA, 25 bp, Homo sapien
ggcgagcatacctgtcttagggaca

SEQ ID NO: 180831 - DNA, 25 bp, Homo sapien
tgccgtagtgcctcatccttggaaa

SEQ ID NO: 180832 - DNA, 25 bp, Homo sapien
gttcagaacattcctggtagataga

SEQ ID NO: 180833 - DNA, 25 bp, Homo sapien
tagcttatccagcatcacacttggg

SEQ ID NO: 180834 - DNA, 25 bp, Homo sapien
ggtagatagatggatcaggaatgtg

SEQ ID NO: 180835 - DNA, 25 bp, Homo sapien
tcttggtagaatgggagctggagtt

SEQ ID NO: 180836 - DNA, 25 bp, Homo sapien
ccccgagggtggagacggtcactca

SEQ ID NO: 180837 - DNA, 25 bp, Homo sapien
gaaggccagcagaagcaggattggt

SEQ ID NO: 180838 - DNA, 25 bp, Homo sapien
aggaggaaggccagcagaagcagga

SEQ ID NO: 180839 - DNA, 25 bp, Homo sapien
ccagcagaagcaggattggttgcat

SEQ ID NO: 180840 - DNA, 25 bp, Homo sapien
gccagcagaagcaggattggttgca

SEQ ID NO: 180841 - DNA, 25 bp, Homo sapien
aaggctgccctggttggagctgctg

SEQ ID NO: 180842 - DNA, 25 bp, Homo sapien
ttctcaggaaggctgccctggttgg

SEQ ID NO: 180843 - DNA, 25 bp, Homo sapien
gtttcctccttgctctcttttagct

SEQ ID NO: 180844 - DNA, 25 bp, Homo sapien
cctggttggagctgctgttgtttcc

SEQ ID NO: 180845 - DNA, 25 bp, Homo sapien
aggaaagaggtggagcaggctcagt

SEQ ID NO: 180846 - DNA, 25 bp, Homo sapien
gggagaggaaagaggtggagcaggc

SEQ ID NO: 180847 - DNA, 25 bp, Homo sapien
agaggaaagaggtggagcaggctca

SEQ ID NO: 180848 - DNA, 25 bp, Homo sapien
ggtggagcaggctcagtgacttcat

SEQ ID NO: 180849 - DNA, 25 bp, Homo sapien
tctgcctgatgacgtcctctgggtg

SEQ ID NO: 180850 - DNA, 25 bp, Homo sapien
ttcccagtgatagaaccgccaatgc

SEQ ID NO: 180851 - DNA, 25 bp, Homo sapien
agagtggaccacctattcagcccag

SEQ ID NO: 180852 - DNA, 25 bp, Homo sapien
cttgtgtgagaatcatgcagtgacc

SEQ ID NO: 180853 - DNA, 25 bp, Homo sapien
aagtcagccaactagctcaggcggt

SEQ ID NO: 180854 - DNA, 25 bp, Homo sapien
tgcttgcaacctagatggccgctgc

SEQ ID NO: 180855 - DNA, 25 bp, Homo sapien
taatctctagcagggatggacctcc

SEQ ID NO: 180856 - DNA, 25 bp, Homo sapien
tgcttgcactcctagactctactgg

SEQ ID NO: 180857 - DNA, 25 bp, Homo sapien
tcagcgcttctgtctgcgctgcgtg

SEQ ID NO: 180858 - DNA, 25 bp, Homo sapien
ttgcacagaagcagcccttgccgaa

SEQ ID NO: 180859 - DNA, 25 bp, Homo sapien
ccttgccgaagaacccaggaccaga

SEQ ID NO: 180860 - DNA, 25 bp, Homo sapien
tgcgctgcgtgagttgcagccctgt

SEQ ID NO: 180861 - DNA, 25 bp, Homo sapien
ccgttgaatgttgtgtgcctagcca

SEQ ID NO: 180862 - DNA, 25 bp, Homo sapien
atgttgtgtgcctagccagcatgcc

SEQ ID NO: 180863 - DNA, 25 bp, Homo sapien
tgaatgttgtgtgcctagccagcat

SEQ ID NO: 180864 - DNA, 25 bp, Homo sapien
aaaccgttgaatgttgtgtgcctag

SEQ ID NO: 180865 - DNA, 25 bp, Homo sapien
cttgacatggaaaaaccaacccagt

SEQ ID NO: 180866 - DNA, 25 bp, Homo sapien
aaaaccaacccagtcctggcggctg

SEQ ID NO: 180867 - DNA, 25 bp, Homo sapien
caacccagtcctggcggctgccaca

SEQ ID NO: 180868 - DNA, 25 bp, Homo sapien
ttgacatggaaaaaccaacccagtc

SEQ ID NO: 180869 - DNA, 25 bp, Homo sapien
caacatctgagcaaaatcaggccga

SEQ ID NO: 180870 - DNA, 25 bp, Homo sapien
aatcaggccgagattcctcctgctc

SEQ ID NO: 180871 - DNA, 25 bp, Homo sapien
caaaatcaggccgagattcctcctg

SEQ ID NO: 180872 - DNA, 25 bp, Homo sapien
tctgagcaaaatcaggccgagattc

SEQ ID NO: 180873 - DNA, 25 bp, Homo sapien
gagcctagtatgagttcaggtattg

SEQ ID NO: 180874 - DNA, 25 bp, Homo sapien
gttcaggtattgtgtcagtcgccat

SEQ ID NO: 180875 - DNA, 25 bp, Homo sapien
tgagagcctagtatgagttcaggta

SEQ ID NO: 180876 - DNA, 25 bp, Homo sapien
aaatgtttgagagcctagtatgagt

SEQ ID NO: 180877 - DNA, 25 bp, Homo sapien
tatccaagcccgtaattctgtacat

SEQ ID NO: 180878 - DNA, 25 bp, Homo sapien
ctatccaagcccgtaattctgtaca

SEQ ID NO: 180879 - DNA, 25 bp, Homo sapien
ggccaaggcagattgtagtttctta

SEQ ID NO: 180880 - DNA, 25 bp, Homo sapien
tcttggaccaggcccgtagccttat

SEQ ID NO: 180881 - DNA, 25 bp, Homo sapien
caaggcagattgtagtttcttatca

SEQ ID NO: 180882 - DNA, 25 bp, Homo sapien
gcccgtagccttataactgccaact

SEQ ID NO: 180883 - DNA, 25 bp, Homo sapien
tgaactcaggttaagtatggcccct

SEQ ID NO: 180884 - DNA, 25 bp, Homo sapien
cacttgaactcaggttaagtatggc

SEQ ID NO: 180885 - DNA, 25 bp, Homo sapien
caggttaagtatggcccctctagcc

SEQ ID NO: 180886 - DNA, 25 bp, Homo sapien
tgttccacttgaactcaggttaagt

SEQ ID NO: 180887 - DNA, 25 bp, Homo sapien
ctttgaaccaaacaggctcagacat

SEQ ID NO: 180888 - DNA, 25 bp, Homo sapien
tttatcatctttgaaccaaacaggc

SEQ ID NO: 180889 - DNA, 25 bp, Homo sapien
ttatcatctttgaaccaaacaggct

SEQ ID NO: 180890 - DNA, 25 bp, Homo sapien
catctttgaaccaaacaggctcaga

SEQ ID NO: 180891 - DNA, 25 bp, Homo sapien
gggctgccagaaatctcaccactga

SEQ ID NO: 180892 - DNA, 25 bp, Homo sapien
tagaattcggaaggcaaagatagaa

SEQ ID NO: 180893 - DNA, 25 bp, Homo sapien
gacactctctatcctagaattcgga

SEQ ID NO: 180894 - DNA, 25 bp, Homo sapien
aagatagaaaaaggtcgggctgcca

SEQ ID NO: 180895 - DNA, 25 bp, Homo sapien
aagagacagcatgggcttggaggca

SEQ ID NO: 180896 - DNA, 25 bp, Homo sapien
catttgcaacaactcgtgtacctac

SEQ ID NO: 180897 - DNA, 25 bp, Homo sapien
taatctggacaaagaaattcgctgg

SEQ ID NO: 180898 - DNA, 25 bp, Homo sapien
ggatttaaggattcaggagtctgct

SEQ ID NO: 180899 - DNA, 25 bp, Homo sapien
gatatccagttgttgttgggctacc

SEQ ID NO: 180900 - DNA, 25 bp, Homo sapien
caggtaggcacagtgaaggacgtcc

SEQ ID NO: 180901 - DNA, 25 bp, Homo sapien
cacagtgaaggacgtcccgaatgca

SEQ ID NO: 180902 - DNA, 25 bp, Homo sapien
ccagttgttgttgggctaccttcag

SEQ ID NO: 180903 - DNA, 25 bp, Homo sapien
agtgaggaatggcttgtgctttcca

SEQ ID NO: 180904 - DNA, 25 bp, Homo sapien
gtgaggaatggcttgtgctttccag

SEQ ID NO: 180905 - DNA, 25 bp, Homo sapien
tcctgaaagcacgtatgacgttgca

SEQ ID NO: 180906 - DNA, 25 bp, Homo sapien
gagctatgggagcttgaaatatgac

SEQ ID NO: 180907 - DNA, 25 bp, Homo sapien
tgaccaggggccttcctaaattggc

SEQ ID NO: 180908 - DNA, 25 bp, Homo sapien
ctcccattttcatggagctatggga

SEQ ID NO: 180909 - DNA, 25 bp, Homo sapien
gggtacctccaccaacaatctcagt

SEQ ID NO: 180910 - DNA, 25 bp, Homo sapien
cagaaatcactaaaatttctagcaa

SEQ ID NO: 180911 - DNA, 25 bp, Homo sapien
tctgagtgatgatgagagtgcagca

SEQ ID NO: 180912 - DNA, 25 bp, Homo sapien
ttctagcaattcctggggtacctcc

SEQ ID NO: 180913 - DNA, 25 bp, Homo sapien
tccagctgtcctgcccagttctggg

SEQ ID NO: 180914 - DNA, 25 bp, Homo sapien
gggccagtccagctgtcctgcccag

SEQ ID NO: 180915 - DNA, 25 bp, Homo sapien
ccagtccagctgtcctgcccagttc

SEQ ID NO: 180916 - DNA, 25 bp, Homo sapien
agtccagctgtcctgcccagttctg

SEQ ID NO: 180917 - DNA, 25 bp, Homo sapien
ggtacagctattatttcagtcagac

SEQ ID NO: 180918 - DNA, 25 bp, Homo sapien
caggtgggcaattgttcacaggctc

SEQ ID NO: 180919 - DNA, 25 bp, Homo sapien
cagtgagagttatgaaacggctgcc

SEQ ID NO: 180920 - DNA, 25 bp, Homo sapien
tccaaatgatcctgtaggtacagct

SEQ ID NO: 180921 - DNA, 25 bp, Homo sapien
tactacagctatattccaggaagaa

SEQ ID NO: 180922 - DNA, 25 bp, Homo sapien
ccaaactggtcccaaatcatgacag

SEQ ID NO: 180923 - DNA, 25 bp, Homo sapien
aaatagatgcacaacctttgctagc

SEQ ID NO: 180924 - DNA, 25 bp, Homo sapien
ttctgacaagctcaaccaaactggt

SEQ ID NO: 180925 - DNA, 25 bp, Homo sapien
tatcactgggctcctctgcaagagg

SEQ ID NO: 180926 - DNA, 25 bp, Homo sapien
tgttatcactgggctcctctgcaag

SEQ ID NO: 180927 - DNA, 25 bp, Homo sapien
tgtgttatcactgggctcctctgca

SEQ ID NO: 180928 - DNA, 25 bp, Homo sapien
atgtgttatcactgggctcctctgc

SEQ ID NO: 180929 - DNA, 25 bp, Homo sapien
tgttttatatcagaccaggcaaggt

SEQ ID NO: 180930 - DNA, 25 bp, Homo sapien
gcttaaaaatcaatgcgctgcagtg

SEQ ID NO: 180931 - DNA, 25 bp, Homo sapien
tcaaaggtatgaacgcagcctggaa

SEQ ID NO: 180932 - DNA, 25 bp, Homo sapien
cctaggtaggactttgacactgaga

SEQ ID NO: 180933 - DNA, 25 bp, Homo sapien
gctaggacagtgagtgaaactaatc

SEQ ID NO: 180934 - DNA, 25 bp, Homo sapien
tgcaaggagcaaaatctaagactgc

SEQ ID NO: 180935 - DNA, 25 bp, Homo sapien
cagtttagactcagcgcagtttatc

SEQ ID NO: 180936 - DNA, 25 bp, Homo sapien
cgctggtgatggttcatgcaaaaga

SEQ ID NO: 180937 - DNA, 25 bp, Homo sapien
gcaagcggaggtcccgaattcttgt

SEQ ID NO: 180938 - DNA, 25 bp, Homo sapien
aagaagcaagcggaggtcccgaatt

SEQ ID NO: 180939 - DNA, 25 bp, Homo sapien
ttcagtttctcttaagaagagtcac

SEQ ID NO: 180940 - DNA, 25 bp, Homo sapien
tattagcaagatcattagggaaatg

SEQ ID NO: 180941 - DNA, 25 bp, Homo sapien
ggtgatactattagaaggtggaatc

SEQ ID NO: 180942 - DNA, 25 bp, Homo sapien
ggacatgatgaggaggtgccatcta

SEQ ID NO: 180943 - DNA, 25 bp, Homo sapien
tataaagtggctgaagcgagacccc

SEQ ID NO: 180944 - DNA, 25 bp, Homo sapien
gccacgaccagctaagatttgcaga

SEQ ID NO: 180945 - DNA, 25 bp, Homo sapien
ttattcaactgggagctctaggagc

SEQ ID NO: 180946 - DNA, 25 bp, Homo sapien
taactttgcatgaagcccggagctc

SEQ ID NO: 180947 - DNA, 25 bp, Homo sapien
tctactggactctacaaaggtgtgc

SEQ ID NO: 180948 - DNA, 25 bp, Homo sapien
catggtcagcctatgctagcaggtc

SEQ ID NO: 180949 - DNA, 25 bp, Homo sapien
cattaacagacactagtaacccctc

SEQ ID NO: 180950 - DNA, 25 bp, Homo sapien
gcttgttaggaatactgccagtgcc

SEQ ID NO: 180951 - DNA, 25 bp, Homo sapien
tgcaagtctggccatgacactctct

SEQ ID NO: 180952 - DNA, 25 bp, Homo sapien
cttatctaaagaggtcaatctgctt

SEQ ID NO: 180953 - DNA, 25 bp, Homo sapien
ggcataaattttcccactggtcaag

SEQ ID NO: 180954 - DNA, 25 bp, Homo sapien
caggccatctggttaggttatccaa

SEQ ID NO: 180955 - DNA, 25 bp, Homo sapien
actgaaatcacggaagctgctgttg

SEQ ID NO: 180956 - DNA, 25 bp, Homo sapien
cagtatcagggaaacagggctacca

SEQ ID NO: 180957 - DNA, 25 bp, Homo sapien
tccttgaaggaactcgaaatgggcc

SEQ ID NO: 180958 - DNA, 25 bp, Homo sapien
gatagatctagccaattctccttga

SEQ ID NO: 180959 - DNA, 25 bp, Homo sapien
ccacgggcaacagtgcagtaagacc

SEQ ID NO: 180960 - DNA, 25 bp, Homo sapien
tctgcattttcagatagatctagcc

SEQ ID NO: 180961 - DNA, 25 bp, Homo sapien
atgaatgagatgacaagacagcgct

SEQ ID NO: 180962 - DNA, 25 bp, Homo sapien
cagagaatgaatgagatgacaagac

SEQ ID NO: 180963 - DNA, 25 bp, Homo sapien
tgctttttaggttatccatccttgt

SEQ ID NO: 180964 - DNA, 25 bp, Homo sapien
tgagatgacaagacagcgctgtgca

SEQ ID NO: 180965 - DNA, 25 bp, Homo sapien
gctggctgccaataaaaactgcccc

SEQ ID NO: 180966 - DNA, 25 bp, Homo sapien
agttctcagcgagtatgagaatgtg

SEQ ID NO: 180967 - DNA, 25 bp, Homo sapien
ttagatagctggctgccaataaaaa

SEQ ID NO: 180968 - DNA, 25 bp, Homo sapien
ggcacagttctcagcgagtatgaga

SEQ ID NO: 180969 - DNA, 25 bp, Homo sapien
tacactcaggatgagaaagggacag

SEQ ID NO: 180970 - DNA, 25 bp, Homo sapien
gataaggacacactgctacactcag

SEQ ID NO: 180971 - DNA, 25 bp, Homo sapien
tagccccgaggtgcgtagttccctg

SEQ ID NO: 180972 - DNA, 25 bp, Homo sapien
tcagtcacgcaggaaatgcccttct

SEQ ID NO: 180973 - DNA, 25 bp, Homo sapien
tctgcaaactgctgggcgctgttct

SEQ ID NO: 180974 - DNA, 25 bp, Homo sapien
tgcactgcgctggtcacgctgtcag

SEQ ID NO: 180975 - DNA, 25 bp, Homo sapien
taatcgctctccacgctcattcaag

SEQ ID NO: 180976 - DNA, 25 bp, Homo sapien
tgtcagcagctgaatggaggatgct

SEQ ID NO: 180977 - DNA, 25 bp, Homo sapien
cagtgaccagactccggcagggtga

SEQ ID NO: 180978 - DNA, 25 bp, Homo sapien
gagcaggagcatcagaaactggctc

SEQ ID NO: 180979 - DNA, 25 bp, Homo sapien
accagactccggcagggtgagtatc

SEQ ID NO: 180980 - DNA, 25 bp, Homo sapien
gcaggagcatcagaaactggctcag

SEQ ID NO: 180981 - DNA, 25 bp, Homo sapien
ccactgactgcaggacctaggaaaa

SEQ ID NO: 180982 - DNA, 25 bp, Homo sapien
gggtttgactgacgcacttgcagca

SEQ ID NO: 180983 - DNA, 25 bp, Homo sapien
tgcttctctataaactcatcactga

SEQ ID NO: 180984 - DNA, 25 bp, Homo sapien
gaaaggccgctcgtctagtgtctag

SEQ ID NO: 180985 - DNA, 25 bp, Homo sapien
gttgcttgaaattaagcttgcacgt

SEQ ID NO: 180986 - DNA, 25 bp, Homo sapien
tgaaattaagcttgcacgtgatgtc

SEQ ID NO: 180987 - DNA, 25 bp, Homo sapien
tgtcaggtaacatcacactcagttt

SEQ ID NO: 180988 - DNA, 25 bp, Homo sapien
agcttgcacgtgatgtcaggtaaca

SEQ ID NO: 180989 - DNA, 25 bp, Homo sapien
aatgacctatcgagtccattgccta

SEQ ID NO: 180990 - DNA, 25 bp, Homo sapien
tgacctatcgagtccattgcctatt

SEQ ID NO: 180991 - DNA, 25 bp, Homo sapien
acctatcgagtccattgcctatttt

SEQ ID NO: 180992 - DNA, 25 bp, Homo sapien
caatgacctatcgagtccattgcct

SEQ ID NO: 180993 - DNA, 25 bp, Homo sapien
gctggtccctggtacaacaggattt

SEQ ID NO: 180994 - DNA, 25 bp, Homo sapien
ctgtgctggtccctggtacaacagg

SEQ ID NO: 180995 - DNA, 25 bp, Homo sapien
tgtgctggtccctggtacaacagga

SEQ ID NO: 180996 - DNA, 25 bp, Homo sapien
aggatttaaagtaatggtctgaggc

SEQ ID NO: 180997 - DNA, 25 bp, Homo sapien
tcttgggctaagaagacttggtacc

SEQ ID NO: 180998 - DNA, 25 bp, Homo sapien
tccctaaggagcaattggtcacagc

SEQ ID NO: 180999 - DNA, 25 bp, Homo sapien
catgtgggatatggcagagtcagtc

SEQ ID NO: 181000 - DNA, 25 bp, Homo sapien
gtcagtcccaggctagtggccagtt

SEQ ID NO: 181001 - DNA, 25 bp, Homo sapien
gaagtcacggtctccatttaataga

SEQ ID NO: 181002 - DNA, 25 bp, Homo sapien
tgaggactaagtagcaggtcttgac

SEQ ID NO: 181003 - DNA, 25 bp, Homo sapien
gcttattaagggaacgtggaagtca

SEQ ID NO: 181004 - DNA, 25 bp, Homo sapien
ctcatctgtacttggtggaggaaac

SEQ ID NO: 181005 - DNA, 25 bp, Homo sapien
gctcagagttcaagtaaaaggcttg

SEQ ID NO: 181006 - DNA, 25 bp, Homo sapien
ggcttggatatgcttcagtttatgc

SEQ ID NO: 181007 - DNA, 25 bp, Homo sapien
ggcatatgaatactaggccaacagt

SEQ ID NO: 181008 - DNA, 25 bp, Homo sapien
caccaaagatttctacagttcacag

SEQ ID NO: 181009 - DNA, 25 bp, Homo sapien
aactctggcttcctgtccgtgaggt

SEQ ID NO: 181010 - DNA, 25 bp, Homo sapien
ctctggcaggtatggtggaggatct

SEQ ID NO: 181011 - DNA, 25 bp, Homo sapien
ctgtccgtgaggtacctctggcagg

SEQ ID NO: 181012 - DNA, 25 bp, Homo sapien
tcccataattttggattggcagtta

SEQ ID NO: 181013 - DNA, 25 bp, Homo sapien
ttaggatcgataccattaacctggc

SEQ ID NO: 181014 - DNA, 25 bp, Homo sapien
ttgacctttgtgatggacgcctgtg

SEQ ID NO: 181015 - DNA, 25 bp, Homo sapien
tgtgatctccgaacaaatgatgtgg

SEQ ID NO: 181016 - DNA, 25 bp, Homo sapien
gaagctgctcgagcatccactgtga

SEQ ID NO: 181017 - DNA, 25 bp, Homo sapien
gccaagaaaagatcactcagattag

SEQ ID NO: 181018 - DNA, 25 bp, Homo sapien
gaaaagatcactcagattagtgcac

SEQ ID NO: 181019 - DNA, 25 bp, Homo sapien
ctgccaagaaaagatcactcagatt

SEQ ID NO: 181020 - DNA, 25 bp, Homo sapien
caagaaaagatcactcagattagtg

SEQ ID NO: 181021 - DNA, 25 bp, Homo sapien
acattcagtgctgtttctacaggac

SEQ ID NO: 181022 - DNA, 25 bp, Homo sapien
cacattcagtgctgtttctacagga

SEQ ID NO: 181023 - DNA, 25 bp, Homo sapien
caaattatctggatcagtaatatca

SEQ ID NO: 181024 - DNA, 25 bp, Homo sapien
aatgcaaccaaattatctggatcag

SEQ ID NO: 181025 - DNA, 25 bp, Homo sapien
tttccaaaggaaagctaattgacag

SEQ ID NO: 181026 - DNA, 25 bp, Homo sapien
gacagtacaccctggaaaatgcaac

SEQ ID NO: 181027 - DNA, 25 bp, Homo sapien
ctgctgctgagcttcctctttcaaa

SEQ ID NO: 181028 - DNA, 25 bp, Homo sapien
tcctctttcaaaacatagattaggt

SEQ ID NO: 181029 - DNA, 25 bp, Homo sapien
tgctgctgagcttcctctttcaaaa

SEQ ID NO: 181030 - DNA, 25 bp, Homo sapien
tgagcttcctctttcaaaacataga

SEQ ID NO: 181031 - DNA, 25 bp, Homo sapien
cccactactggatggtgcctggaga

SEQ ID NO: 181032 - DNA, 25 bp, Homo sapien
caaaggcaatgcatctgctcgagag

SEQ ID NO: 181033 - DNA, 25 bp, Homo sapien
caaggactgtctgcatggcgttgct

SEQ ID NO: 181034 - DNA, 25 bp, Homo sapien
cctgggaccatggatcaaaacattc

SEQ ID NO: 181035 - DNA, 25 bp, Homo sapien
tcttttgctgatgtgcagatgcaaa

SEQ ID NO: 181036 - DNA, 25 bp, Homo sapien
ttggatagacagatgccttcttttg

SEQ ID NO: 181037 - DNA, 25 bp, Homo sapien
agcccttcgttgtcaattctgctgc

SEQ ID NO: 181038 - DNA, 25 bp, Homo sapien
gatgcaaaagcccttcgttgtcaat

SEQ ID NO: 181039 - DNA, 25 bp, Homo sapien
acacacgtttcatcctcattagctg

SEQ ID NO: 181040 - DNA, 25 bp, Homo sapien
ctgaatttcttagcagacacgctgg

SEQ ID NO: 181041 - DNA, 25 bp, Homo sapien
tttttcagtccaccactacaatgtg

SEQ ID NO: 181042 - DNA, 25 bp, Homo sapien
cttctctctaaaattcactaaatgt

SEQ ID NO: 181043 - DNA, 25 bp, Homo sapien
tctagtgcagaaactgtaggccagg

SEQ ID NO: 181044 - DNA, 25 bp, Homo sapien
taaaaggaccacgtctctagtgcag

SEQ ID NO: 181045 - DNA, 25 bp, Homo sapien
taaccaggaaacgtacaggaagtca

SEQ ID NO: 181046 - DNA, 25 bp, Homo sapien
caacgtgcatagagaggaagatcct

SEQ ID NO: 181047 - DNA, 25 bp, Homo sapien
gatggatcgattatgtacaccccgg

SEQ ID NO: 181048 - DNA, 25 bp, Homo sapien
ataaggttccgacattcatccactg

SEQ ID NO: 181049 - DNA, 25 bp, Homo sapien
aagaagagttagcagaacagcactg

SEQ ID NO: 181050 - DNA, 25 bp, Homo sapien
caaggccgtgctatggatcaatgat

SEQ ID NO: 181051 - DNA, 25 bp, Homo sapien
tacttgcttccccatacaccttact

SEQ ID NO: 181052 - DNA, 25 bp, Homo sapien
ttccccatacaccttactttgcagg

SEQ ID NO: 181053 - DNA, 25 bp, Homo sapien
actatctacttgcttccccatacac

SEQ ID NO: 181054 - DNA, 25 bp, Homo sapien
ttgcttccccatacaccttactttg

SEQ ID NO: 181055 - DNA, 25 bp, Homo sapien
caatttgccaaaaattggaggccag

SEQ ID NO: 181056 - DNA, 25 bp, Homo sapien
atacagagcaactgtgtgtacaggg

SEQ ID NO: 181057 - DNA, 25 bp, Homo sapien
tatctcaagaccagttcctacctga

SEQ ID NO: 181058 - DNA, 25 bp, Homo sapien
gcaaatcaggaagttagttttctcc

SEQ ID NO: 181059 - DNA, 25 bp, Homo sapien
ctatagtgtttaatccccctgggat

SEQ ID NO: 181060 - DNA, 25 bp, Homo sapien
tctatagtgtttaatccccctggga

SEQ ID NO: 181061 - DNA, 25 bp, Homo sapien
cagaaacagaaggtaccaacatctc

SEQ ID NO: 181062 - DNA, 25 bp, Homo sapien
gaaacagaaggtaccaacatctcca

SEQ ID NO: 181063 - DNA, 25 bp, Homo sapien
tcagaaacagaaggtaccaacatct

SEQ ID NO: 181064 - DNA, 25 bp, Homo sapien
ttcagaaacagaaggtaccaacatc

SEQ ID NO: 181065 - DNA, 25 bp, Homo sapien
tgcaagatgggcggcatgcgctgac

SEQ ID NO: 181066 - DNA, 25 bp, Homo sapien
gtgaaccaaccgtcagtgcaagatg

SEQ ID NO: 181067 - DNA, 25 bp, Homo sapien
gaaccaaccgtcagtgcaagatggg

SEQ ID NO: 181068 - DNA, 25 bp, Homo sapien
caagatgggcggcatgcgctgacat

SEQ ID NO: 181069 - DNA, 25 bp, Homo sapien
gtcttccatgagcattcggagcaga

SEQ ID NO: 181070 - DNA, 25 bp, Homo sapien
tgagcattcggagcagactgccaga

SEQ ID NO: 181071 - DNA, 25 bp, Homo sapien
actctggtccttgtgctctggcatc

SEQ ID NO: 181072 - DNA, 25 bp, Homo sapien
cagcactgagttgcaatcctccggg

SEQ ID NO: 181073 - DNA, 25 bp, Homo sapien
tctgctcacatctgcattaactttt

SEQ ID NO: 181074 - DNA, 25 bp, Homo sapien
actctgctcacatctgcattaactt

SEQ ID NO: 181075 - DNA, 25 bp, Homo sapien
ctctgctcacatctgcattaacttt

SEQ ID NO: 181076 - DNA, 25 bp, Homo sapien
tatcccaggctttgtaaaacatcgg

SEQ ID NO: 181077 - DNA, 25 bp, Homo sapien
tatcagaaccacgtttcaacccagg

SEQ ID NO: 181078 - DNA, 25 bp, Homo sapien
gaggtttctggacccatctcatggg

SEQ ID NO: 181079 - DNA, 25 bp, Homo sapien
tgtcctcatcaaagcacctactggg

SEQ ID NO: 181080 - DNA, 25 bp, Homo sapien
tcagtcacacaactcaagggctggc

SEQ ID NO: 181081 - DNA, 25 bp, Homo sapien
tctacgttgacagggaaccaatgtt

SEQ ID NO: 181082 - DNA, 25 bp, Homo sapien
tttggctgaccaaacctggacaggt

SEQ ID NO: 181083 - DNA, 25 bp, Homo sapien
caggaacatcgctcttgtgagtggc

SEQ ID NO: 181084 - DNA, 25 bp, Homo sapien
gcaactatcctgaatgccagggccg

SEQ ID NO: 181085 - DNA, 25 bp, Homo sapien
gacaggctggttgcattatcctccc

SEQ ID NO: 181086 - DNA, 25 bp, Homo sapien
tatactgcccttaattagtcaaagg

SEQ ID NO: 181087 - DNA, 25 bp, Homo sapien
ttagtcaaaggacgaaaaatctata

SEQ ID NO: 181088 - DNA, 25 bp, Homo sapien
tgtttctcagagctaacaaaaatac

SEQ ID NO: 181089 - DNA, 25 bp, Homo sapien
tttccaaaggatgtagctcttagct

SEQ ID NO: 181090 - DNA, 25 bp, Homo sapien
tttccctaagctatccgttgtcatg

SEQ ID NO: 181091 - DNA, 25 bp, Homo sapien
gaagcaaaacattagtctccctcag

SEQ ID NO: 181092 - DNA, 25 bp, Homo sapien
tgtttatgaatgcaggactgatgcg

SEQ ID NO: 181093 - DNA, 25 bp, Homo sapien
ctcctgggtgagcaatccacattcc

SEQ ID NO: 181094 - DNA, 25 bp, Homo sapien
gagagcttctccgtggtattccaca

SEQ ID NO: 181095 - DNA, 25 bp, Homo sapien
tgcgttgtgagagatgagagcttct

SEQ ID NO: 181096 - DNA, 25 bp, Homo sapien
agtggccgactttgtttcctccttg

SEQ ID NO: 181097 - DNA, 25 bp, Homo sapien
tctcagtggccgactttgtttcctc

SEQ ID NO: 181098 - DNA, 25 bp, Homo sapien
ttggttctcagtggccgactttgtt

SEQ ID NO: 181099 - DNA, 25 bp, Homo sapien
tggccgactttgtttcctccttggc

SEQ ID NO: 181100 - DNA, 25 bp, Homo sapien
gacaccactttccagctctttagca

SEQ ID NO: 181101 - DNA, 25 bp, Homo sapien
ttttgacaccactttccagctcttt

SEQ ID NO: 181102 - DNA, 25 bp, Homo sapien
gctctttagcaactgcttcagatac

SEQ ID NO: 181103 - DNA, 25 bp, Homo sapien
agcttttgacaccactttccagctc

SEQ ID NO: 181104 - DNA, 25 bp, Homo sapien
ttttccattacaactttccacatgc

SEQ ID NO: 181105 - DNA, 25 bp, Homo sapien
caactttccacatgcctacagagag

SEQ ID NO: 181106 - DNA, 25 bp, Homo sapien
ctacagagagctgaagctgtttccc

SEQ ID NO: 181107 - DNA, 25 bp, Homo sapien
agagagctgaagctgtttcccccat

SEQ ID NO: 181108 - DNA, 25 bp, Homo sapien
caatgaaacgcacttggaagtcact

SEQ ID NO: 181109 - DNA, 25 bp, Homo sapien
cgtactcacaactacagtggccaat

SEQ ID NO: 181110 - DNA, 25 bp, Homo sapien
gactcactgaaagctgatctgatcc

SEQ ID NO: 181111 - DNA, 25 bp, Homo sapien
tctgaaaggcaagtgtggccctgca

SEQ ID NO: 181112 - DNA, 25 bp, Homo sapien
tcacattgttctgaaccagtcagcc

SEQ ID NO: 181113 - DNA, 25 bp, Homo sapien
gtgtgttgtagtggaccccagaaat

SEQ ID NO: 181114 - DNA, 25 bp, Homo sapien
aacagatagatgagcccttccttga

SEQ ID NO: 181115 - DNA, 25 bp, Homo sapien
caaaaaacactacacacggtggctc

SEQ ID NO: 181116 - DNA, 25 bp, Homo sapien
gccttagtattacacagagggcaca

SEQ ID NO: 181117 - DNA, 25 bp, Homo sapien
gaggcttctaggtggtggcattacc

SEQ ID NO: 181118 - DNA, 25 bp, Homo sapien
cctggtacctggacccaaagaatct

SEQ ID NO: 181119 - DNA, 25 bp, Homo sapien
gcacagagtgctacatccatgaaga

SEQ ID NO: 181120 - DNA, 25 bp, Homo sapien
ctttggataaggacagacagcttgg

SEQ ID NO: 181121 - DNA, 25 bp, Homo sapien
gatgttagagtgatcaacctcctgg

SEQ ID NO: 181122 - DNA, 25 bp, Homo sapien
tgctgtaacagccaactaacctgct

SEQ ID NO: 181123 - DNA, 25 bp, Homo sapien
caccgttgttttgatctggctacta

SEQ ID NO: 181124 - DNA, 25 bp, Homo sapien
ctagccaacataagggctctaggca

SEQ ID NO: 181125 - DNA, 25 bp, Homo sapien
tcctgtcaggagtgggacacagact

SEQ ID NO: 181126 - DNA, 25 bp, Homo sapien
aatagaacagcagtgtgatgccacc

SEQ ID NO: 181127 - DNA, 25 bp, Homo sapien
gaggcctaaacacaaagggcttctg

SEQ ID NO: 181128 - DNA, 25 bp, Homo sapien
cagggacaggacttcgattgactaa

SEQ ID NO: 181129 - DNA, 25 bp, Homo sapien
ccataaggtgccaatatttatctta

SEQ ID NO: 181130 - DNA, 25 bp, Homo sapien
ggcaaagcaacgacttgtgaactga

SEQ ID NO: 181131 - DNA, 25 bp, Homo sapien
gtgaactgaatcaacctcctcacat

SEQ ID NO: 181132 - DNA, 25 bp, Homo sapien
gtgccaatatttatcttaagacaag

SEQ ID NO: 181133 - DNA, 25 bp, Homo sapien
tcagtgtccccgtgagggcaagtat

SEQ ID NO: 181134 - DNA, 25 bp, Homo sapien
tgaactggaaaatacacccgaattg

SEQ ID NO: 181135 - DNA, 25 bp, Homo sapien
cgagaattccagaggatagcccatt

SEQ ID NO: 181136 - DNA, 25 bp, Homo sapien
tgtgaatgtaaacctcctggatacc

SEQ ID NO: 181137 - DNA, 25 bp, Homo sapien
ggcagatataagttaaatattcgcc

SEQ ID NO: 181138 - DNA, 25 bp, Homo sapien
tgtcctcctcttgacttggacagct

SEQ ID NO: 181139 - DNA, 25 bp, Homo sapien
ccttgacctccagttgccaagaaag

SEQ ID NO: 181140 - DNA, 25 bp, Homo sapien
tgctgatagcagatttggcactcat

SEQ ID NO: 181141 - DNA, 25 bp, Homo sapien
gaacaagtgaggacagcacgcagtg

SEQ ID NO: 181142 - DNA, 25 bp, Homo sapien
tgtagaacaagtgaggacagcacgc

SEQ ID NO: 181143 - DNA, 25 bp, Homo sapien
caagtgaggacagcacgcagtgaat

SEQ ID NO: 181144 - DNA, 25 bp, Homo sapien
tagaacaagtgaggacagcacgcag

SEQ ID NO: 181145 - DNA, 25 bp, Homo sapien
ttatcatcaccaccaggttcttcat

SEQ ID NO: 181146 - DNA, 25 bp, Homo sapien
acttgtgctccaatcccaacatttt

SEQ ID NO: 181147 - DNA, 25 bp, Homo sapien
atctacttgtgctccaatcccaaca

SEQ ID NO: 181148 - DNA, 25 bp, Homo sapien
tacttgtgctccaatcccaacattt

SEQ ID NO: 181149 - DNA, 25 bp, Homo sapien
tgttctcggaccagtgccttcccag

SEQ ID NO: 181150 - DNA, 25 bp, Homo sapien
ccggtgttctcggaccagtgccttc

SEQ ID NO: 181151 - DNA, 25 bp, Homo sapien
gtgttctcggaccagtgccttccca

SEQ ID NO: 181152 - DNA, 25 bp, Homo sapien
ttgctttttcatctcaggtccacag

SEQ ID NO: 181153 - DNA, 25 bp, Homo sapien
gagatgtcttcacctacctcctgga

SEQ ID NO: 181154 - DNA, 25 bp, Homo sapien
ttcttcatggagcacaagttttaga

SEQ ID NO: 181155 - DNA, 25 bp, Homo sapien
cacctaagacttatgtgatttctgg

SEQ ID NO: 181156 - DNA, 25 bp, Homo sapien
tttagaatcaaacaaactcaggttc

SEQ ID NO: 181157 - DNA, 25 bp, Homo sapien
tggaaatagccaaatctattccaac

SEQ ID NO: 181158 - DNA, 25 bp, Homo sapien
gaaatagccaaatctattccaacca

SEQ ID NO: 181159 - DNA, 25 bp, Homo sapien
ggaaatagccaaatctattccaacc

SEQ ID NO: 181160 - DNA, 25 bp, Homo sapien
gggccttctatcttttgctgacagt

SEQ ID NO: 181161 - DNA, 25 bp, Homo sapien
ctttgctgtattacccccactctgg

SEQ ID NO: 181162 - DNA, 25 bp, Homo sapien
cagcaatgccctgagtttcaccaat

SEQ ID NO: 181163 - DNA, 25 bp, Homo sapien
tttctgggccttctatcttttgctg

SEQ ID NO: 181164 - DNA, 25 bp, Homo sapien
gacagggtttctcagtacctattcc

SEQ ID NO: 181165 - DNA, 25 bp, Homo sapien
tgttgacagggtttctcagtaccta

SEQ ID NO: 181166 - DNA, 25 bp, Homo sapien
caggagcctggatcagctgttgaca

SEQ ID NO: 181167 - DNA, 25 bp, Homo sapien
ggatcagctgttgacagggtttctc

SEQ ID NO: 181168 - DNA, 25 bp, Homo sapien
acgctgaggatactgaggagaagaa

SEQ ID NO: 181169 - DNA, 25 bp, Homo sapien
caacaaagtactttccctcatggag

SEQ ID NO: 181170 - DNA, 25 bp, Homo sapien
cactgcattgtcctaacgctgagga

SEQ ID NO: 181171 - DNA, 25 bp, Homo sapien
tgtcctaacgctgaggatactgagg

SEQ ID NO: 181172 - DNA, 25 bp, Homo sapien
cagacagcccccaatccaaggtgga

SEQ ID NO: 181173 - DNA, 25 bp, Homo sapien
tggaaagcagagaatactctgcagg

SEQ ID NO: 181174 - DNA, 25 bp, Homo sapien
tgcttcagccgacggagacagacag

SEQ ID NO: 181175 - DNA, 25 bp, Homo sapien
tgggtgtgccctgaattgcttcagc

SEQ ID NO: 181176 - DNA, 25 bp, Homo sapien
ggcaggtgggtcacttgagcccggg

SEQ ID NO: 181177 - DNA, 25 bp, Homo sapien
tgaggcaggtgggtcacttgagccc

SEQ ID NO: 181178 - DNA, 25 bp, Homo sapien
acttgggaggctgaggcaggtgggt

SEQ ID NO: 181179 - DNA, 25 bp, Homo sapien
gtggctcacatctgttgtcccagct

SEQ ID NO: 181180 - DNA, 25 bp, Homo sapien
agttaagcaacaagtcagcactgaa

SEQ ID NO: 181181 - DNA, 25 bp, Homo sapien
cttatgactttctaagtcctgttga

SEQ ID NO: 181182 - DNA, 25 bp, Homo sapien
atgactttctaagtcctgttgaaga

SEQ ID NO: 181183 - DNA, 25 bp, Homo sapien
tatgactttctaagtcctgttgaag

SEQ ID NO: 181184 - DNA, 25 bp, Homo sapien
gcgggcccagttcgatggaattcaa

SEQ ID NO: 181185 - DNA, 25 bp, Homo sapien
ggatgactcctgttactggccaagg

SEQ ID NO: 181186 - DNA, 25 bp, Homo sapien
ttttgcttcttccatgcgggcccag

SEQ ID NO: 181187 - DNA, 25 bp, Homo sapien
caggaaatgatgttccccagggaaa

SEQ ID NO: 181188 - DNA, 25 bp, Homo sapien
tttagttgggactgcacttcatgga

SEQ ID NO: 181189 - DNA, 25 bp, Homo sapien
cttcatggaaaactccacacacaaa

SEQ ID NO: 181190 - DNA, 25 bp, Homo sapien
gccttttagttgggactgcacttca

SEQ ID NO: 181191 - DNA, 25 bp, Homo sapien
tgcacttcatggaaaactccacaca

SEQ ID NO: 181192 - DNA, 25 bp, Homo sapien
ctagtacttcaaggtccttatgaag

SEQ ID NO: 181193 - DNA, 25 bp, Homo sapien
cttcaaggtccttatgaaggagcag

SEQ ID NO: 181194 - DNA, 25 bp, Homo sapien
ggagcagaactttctaaacaggaaa

SEQ ID NO: 181195 - DNA, 25 bp, Homo sapien
aaggagcagaactttctaaacagga

SEQ ID NO: 181196 - DNA, 25 bp, Homo sapien
tgagaacccctaggcatcctcagac

SEQ ID NO: 181197 - DNA, 25 bp, Homo sapien
aattgttttgaccttatggactcac

SEQ ID NO: 181198 - DNA, 25 bp, Homo sapien
tcactaatagggtcttgagaacccc

SEQ ID NO: 181199 - DNA, 25 bp, Homo sapien
tggcctagcatacaaaaagcaggga

SEQ ID NO: 181200 - DNA, 25 bp, Homo sapien
ttctgttctatcaccattgtgttgt

SEQ ID NO: 181201 - DNA, 25 bp, Homo sapien
tatcaccattgtgttgtactgcttt

SEQ ID NO: 181202 - DNA, 25 bp, Homo sapien
tcctccagtgtgcataaataggact

SEQ ID NO: 181203 - DNA, 25 bp, Homo sapien
gacttccggagattcttaatacatc

SEQ ID NO: 181204 - DNA, 25 bp, Homo sapien
gctggttctgtccaacgatttgcca

SEQ ID NO: 181205 - DNA, 25 bp, Homo sapien
ggtttcagttactgccaaagcctga

SEQ ID NO: 181206 - DNA, 25 bp, Homo sapien
taaactatagactgatgggcctgct

SEQ ID NO: 181207 - DNA, 25 bp, Homo sapien
ttacacatgacaacagatgtctcca

SEQ ID NO: 181208 - DNA, 25 bp, Homo sapien
attgcactgccagtcaccttcagag

SEQ ID NO: 181209 - DNA, 25 bp, Homo sapien
tttgattgcactgccagtcaccttc

SEQ ID NO: 181210 - DNA, 25 bp, Homo sapien
ggttttgattgcactgccagtcacc

SEQ ID NO: 181211 - DNA, 25 bp, Homo sapien
agccacaagggattcagttaaactt

SEQ ID NO: 181212 - DNA, 25 bp, Homo sapien
aattctaggaactcaagatgtttaa

SEQ ID NO: 181213 - DNA, 25 bp, Homo sapien
tttctctagtaacataaagtgatta

SEQ ID NO: 181214 - DNA, 25 bp, Homo sapien
aatgacttacattttctctagtaac

SEQ ID NO: 181215 - DNA, 25 bp, Homo sapien
taaaaattctaggaactcaagatgt

SEQ ID NO: 181216 - DNA, 25 bp, Homo sapien
cttcctatccctatgctggttctgg

SEQ ID NO: 181217 - DNA, 25 bp, Homo sapien
cagtctaatcaatgggcaaacacag

SEQ ID NO: 181218 - DNA, 25 bp, Homo sapien
cttggtggtgtctgccctaaggctg

SEQ ID NO: 181219 - DNA, 25 bp, Homo sapien
catcaaatggaatactggaagtcct

SEQ ID NO: 181220 - DNA, 25 bp, Homo sapien
ttgttcaagtccgatcttaccacca

SEQ ID NO: 181221 - DNA, 25 bp, Homo sapien
tgttcaagtccgatcttaccaccaa

SEQ ID NO: 181222 - DNA, 25 bp, Homo sapien
ctaagcaggagcactcaacccgtcc

SEQ ID NO: 181223 - DNA, 25 bp, Homo sapien
taagcaggagcactcaacccgtccg

SEQ ID NO: 181224 - DNA, 25 bp, Homo sapien
caggagcactcaacccgtccgggga

SEQ ID NO: 181225 - DNA, 25 bp, Homo sapien
agcaggagcactcaacccgtccggg

SEQ ID NO: 181226 - DNA, 25 bp, Homo sapien
cccggcggtgttggtgaggctcgat

SEQ ID NO: 181227 - DNA, 25 bp, Homo sapien
gaattcggaacctggcgcccttgac

SEQ ID NO: 181228 - DNA, 25 bp, Homo sapien
ccagccacgttgcccggcggtgttg

SEQ ID NO: 181229 - DNA, 25 bp, Homo sapien
ctcgatgccggcgtgcacggcaagc

SEQ ID NO: 181230 - DNA, 25 bp, Homo sapien
gaaatcgctccgttctgcggcttgc

SEQ ID NO: 181231 - DNA, 25 bp, Homo sapien
gatgccagagttcgcgaagatcgga

SEQ ID NO: 181232 - DNA, 25 bp, Homo sapien
gaaaagctcgcctcagttttggcag

SEQ ID NO: 181233 - DNA, 25 bp, Homo sapien
gatttctgcgctcaagctagaggcg

SEQ ID NO: 181234 - DNA, 25 bp, Homo sapien
ctccgggctccggacaaggcttagc

SEQ ID NO: 181235 - DNA, 25 bp, Homo sapien
ggcacgcgtcccagagcacgaggct

SEQ ID NO: 181236 - DNA, 25 bp, Homo sapien
tgccgtgccagtgcgcggcacgcgt

SEQ ID NO: 181237 - DNA, 25 bp, Homo sapien
aactccgggcgctggagctccagct

SEQ ID NO: 181238 - DNA, 25 bp, Homo sapien
tccttggtagctgtatttcctattc

SEQ ID NO: 181239 - DNA, 25 bp, Homo sapien
tattttgttgctatcaatgagaatg

SEQ ID NO: 181240 - DNA, 25 bp, Homo sapien
gctatcaatgagaatggacttctcc

SEQ ID NO: 181241 - DNA, 25 bp, Homo sapien
ctccttggtagctgtatttcctatt

SEQ ID NO: 181242 - DNA, 25 bp, Homo sapien
tcagagcctgaaaatttaggtagtg

SEQ ID NO: 181243 - DNA, 25 bp, Homo sapien
tcttgggaatttatgatcccacctt

SEQ ID NO: 181244 - DNA, 25 bp, Homo sapien
atcccaccttctggtcatacaatct

SEQ ID NO: 181245 - DNA, 25 bp, Homo sapien
atttaggtagtgattgttgattcca

SEQ ID NO: 181246 - DNA, 25 bp, Homo sapien
aggtaggatcatattccagagagct

SEQ ID NO: 181247 - DNA, 25 bp, Homo sapien
caaggtaggatcatattccagagag

SEQ ID NO: 181248 - DNA, 25 bp, Homo sapien
tcaaggtaggatcatattccagaga

SEQ ID NO: 181249 - DNA, 25 bp, Homo sapien
aaggtaggatcatattccagagagc

SEQ ID NO: 181250 - DNA, 25 bp, Homo sapien
gactctctctgccttgaacggggga

SEQ ID NO: 181251 - DNA, 25 bp, Homo sapien
gcatctggcaagcactgcttcaagc

SEQ ID NO: 181252 - DNA, 25 bp, Homo sapien
ccactggaaaaacagggatcctgtt

SEQ ID NO: 181253 - DNA, 25 bp, Homo sapien
gttaggcccatggacttcagcactg

SEQ ID NO: 181254 - DNA, 25 bp, Homo sapien
cacatcagtggtgttggattgagaa

SEQ ID NO: 181255 - DNA, 25 bp, Homo sapien
gccacatcagtggtgttggattgag

SEQ ID NO: 181256 - DNA, 25 bp, Homo sapien
tccaaatcctgccacatcagtggtg

SEQ ID NO: 181257 - DNA, 25 bp, Homo sapien
aatcctgccacatcagtggtgttgg

SEQ ID NO: 181258 - DNA, 25 bp, Homo sapien
gccccatgagaactatcgatttaag

SEQ ID NO: 181259 - DNA, 25 bp, Homo sapien
aacttgatgacttgccccatgagaa

SEQ ID NO: 181260 - DNA, 25 bp, Homo sapien
gatttaagtcccacaagcctctgtg

SEQ ID NO: 181261 - DNA, 25 bp, Homo sapien
gcctctgtgttagttcacagaggga

SEQ ID NO: 181262 - DNA, 25 bp, Homo sapien
gcctccaaccttgctggctggagta

SEQ ID NO: 181263 - DNA, 25 bp, Homo sapien
tggctcccaagcacttgctgaccag

SEQ ID NO: 181264 - DNA, 25 bp, Homo sapien
cagccttgcctccaaccttgctggc

SEQ ID NO: 181265 - DNA, 25 bp, Homo sapien
cttgctggctggagtatctgtggct

SEQ ID NO: 181266 - DNA, 25 bp, Homo sapien
caaaagaggcacagattgctggagt

SEQ ID NO: 181267 - DNA, 25 bp, Homo sapien
gtgagtcactgtcacggttattggt

SEQ ID NO: 181268 - DNA, 25 bp, Homo sapien
cactgtcacggttattggtccaatc

SEQ ID NO: 181269 - DNA, 25 bp, Homo sapien
aatgtttgcaaaagaggcacagatt

SEQ ID NO: 181270 - DNA, 25 bp, Homo sapien
tctagtacttcacgtacttgagaag

SEQ ID NO: 181271 - DNA, 25 bp, Homo sapien
tgtctggggttagatgccctcctct

SEQ ID NO: 181272 - DNA, 25 bp, Homo sapien
tcctctggtctctagtacttcacgt

SEQ ID NO: 181273 - DNA, 25 bp, Homo sapien
cttgagaagatccattcacgttagg

SEQ ID NO: 181274 - DNA, 25 bp, Homo sapien
catatgcatggcacttagcaaaggt

SEQ ID NO: 181275 - DNA, 25 bp, Homo sapien
catttgccctccgtttggtgtacac

SEQ ID NO: 181276 - DNA, 25 bp, Homo sapien
gatgagtggtaacagcatttgccct

SEQ ID NO: 181277 - DNA, 25 bp, Homo sapien
tcaaaagtcttgcacgatgagtggt

SEQ ID NO: 181278 - DNA, 25 bp, Homo sapien
tccttctatgaagttgatgcctgga

SEQ ID NO: 181279 - DNA, 25 bp, Homo sapien
aaccaaaccaaactatgatgttcat

SEQ ID NO: 181280 - DNA, 25 bp, Homo sapien
caaaccaaaccaaactatgatgttc

SEQ ID NO: 181281 - DNA, 25 bp, Homo sapien
aaaccaaaccaaactatgatgttca

SEQ ID NO: 181282 - DNA, 25 bp, Homo sapien
tcatctccttacactcagtagtttc

SEQ ID NO: 181283 - DNA, 25 bp, Homo sapien
tgtggtaggagctgtggcaactcca

SEQ ID NO: 181284 - DNA, 25 bp, Homo sapien
cttacactcagtagtttctgacttt

SEQ ID NO: 181285 - DNA, 25 bp, Homo sapien
tcctgggtgtgacggctgggctttg

SEQ ID NO: 181286 - DNA, 25 bp, Homo sapien
agggcaagagaattattaaacccat

SEQ ID NO: 181287 - DNA, 25 bp, Homo sapien
ctaacagtcaatgatcccaaatgag

SEQ ID NO: 181288 - DNA, 25 bp, Homo sapien
taacagtcaatgatcccaaatgagc

SEQ ID NO: 181289 - DNA, 25 bp, Homo sapien
aacagtcaatgatcccaaatgagca

SEQ ID NO: 181290 - DNA, 25 bp, Homo sapien
cacgtctaagcagtgtattcagagt

SEQ ID NO: 181291 - DNA, 25 bp, Homo sapien
acgtctaagcagtgtattcagagtt

SEQ ID NO: 181292 - DNA, 25 bp, Homo sapien
tcagagttgtgaaagaagctggctt

SEQ ID NO: 181293 - DNA, 25 bp, Homo sapien
aatttactgagggactataggtaca

SEQ ID NO: 181294 - DNA, 25 bp, Homo sapien
tagcagaatttactgagggactata

SEQ ID NO: 181295 - DNA, 25 bp, Homo sapien
tcctggagaggagtagaaaacagct

SEQ ID NO: 181296 - DNA, 25 bp, Homo sapien
tcagtcaagagacacattgtagcag

SEQ ID NO: 181297 - DNA, 25 bp, Homo sapien
tgtctccagctaaggcatcgtaagt

SEQ ID NO: 181298 - DNA, 25 bp, Homo sapien
gcatcgtaagtccccttcagggcca

SEQ ID NO: 181299 - DNA, 25 bp, Homo sapien
gccaacgtagccatcatccttgttg

SEQ ID NO: 181300 - DNA, 25 bp, Homo sapien
agaggatcccaaccacgaggccaga

SEQ ID NO: 181301 - DNA, 25 bp, Homo sapien
tatcctgtggatattactttgacca

SEQ ID NO: 181302 - DNA, 25 bp, Homo sapien
ctttgaccattgcagccagaaattc

SEQ ID NO: 181303 - DNA, 25 bp, Homo sapien
tcataattcctgtcatatcctgtgg

SEQ ID NO: 181304 - DNA, 25 bp, Homo sapien
tatatggaacagaactctcaggtag

SEQ ID NO: 181305 - DNA, 25 bp, Homo sapien
catggttgacctttgagctggataa

SEQ ID NO: 181306 - DNA, 25 bp, Homo sapien
gtagaaatctacttgcacccctgtc

SEQ ID NO: 181307 - DNA, 25 bp, Homo sapien
tagtgtgggtctactctcctgcatg

SEQ ID NO: 181308 - DNA, 25 bp, Homo sapien
ttagatgccagcaggatccttcagt

SEQ ID NO: 181309 - DNA, 25 bp, Homo sapien
gcttgagttctattgtgccatctga

SEQ ID NO: 181310 - DNA, 25 bp, Homo sapien
tagtcctttacaatcctgttcttgc

SEQ ID NO: 181311 - DNA, 25 bp, Homo sapien
tgagcagatgggctgttaataagct

SEQ ID NO: 181312 - DNA, 25 bp, Homo sapien
ctttacaatcctgttcttgcatcca

SEQ ID NO: 181313 - DNA, 25 bp, Homo sapien
gatatcctgggtgtgacccttgtta

SEQ ID NO: 181314 - DNA, 25 bp, Homo sapien
gctagttagtgggaaagagaagcca

SEQ ID NO: 181315 - DNA, 25 bp, Homo sapien
aagccatccttgtgtgatatcctgg

SEQ ID NO: 181316 - DNA, 25 bp, Homo sapien
gggtgtgacccttgttatcactaga

SEQ ID NO: 181317 - DNA, 25 bp, Homo sapien
catgttggggcctcgagatgctgag

SEQ ID NO: 181318 - DNA, 25 bp, Homo sapien
tgctgagagtagaaatcaagttctg

SEQ ID NO: 181319 - DNA, 25 bp, Homo sapien
gaacttttggatcagcaggccgcca

SEQ ID NO: 181320 - DNA, 25 bp, Homo sapien
tctccatgaacttttggatcagcag

SEQ ID NO: 181321 - DNA, 25 bp, Homo sapien
tcagtgcattttgctagaagcaaag

SEQ ID NO: 181322 - DNA, 25 bp, Homo sapien
tgtactgcccagtattgctcattaa

SEQ ID NO: 181323 - DNA, 25 bp, Homo sapien
gaagcaaagataatgagccattgat

SEQ ID NO: 181324 - DNA, 25 bp, Homo sapien
gatgtagaatcaataatacttgaac

SEQ ID NO: 181325 - DNA, 25 bp, Homo sapien
tttgttgatatgtacccacagtcct

SEQ ID NO: 181326 - DNA, 25 bp, Homo sapien
ctttgttgatatgtacccacagtcc

SEQ ID NO: 181327 - DNA, 25 bp, Homo sapien
tatgtacccacagtccttctcatta

SEQ ID NO: 181328 - DNA, 25 bp, Homo sapien
gtacccacagtccttctcattagcc

SEQ ID NO: 181329 - DNA, 25 bp, Homo sapien
acaattgttaacagtatacaacaac

SEQ ID NO: 181330 - DNA, 25 bp, Homo sapien
tgggcagacaattgttaacagtata

SEQ ID NO: 181331 - DNA, 25 bp, Homo sapien
attgttaacagtatacaacaacttt

SEQ ID NO: 181332 - DNA, 25 bp, Homo sapien
gatactttccataaataatcatggt

SEQ ID NO: 181333 - DNA, 25 bp, Homo sapien
ggtgttttcctcacataaatccagc

SEQ ID NO: 181334 - DNA, 25 bp, Homo sapien
gaaaggtgttttcctcacataaatc

SEQ ID NO: 181335 - DNA, 25 bp, Homo sapien
tggagactttctgttagtgacatgt

SEQ ID NO: 181336 - DNA, 25 bp, Homo sapien
tcctcacataaatccagctttggag

SEQ ID NO: 181337 - DNA, 25 bp, Homo sapien
caggtttggcagacaacctcgcgga

SEQ ID NO: 181338 - DNA, 25 bp, Homo sapien
acaggggactttctaggcttgggct

SEQ ID NO: 181339 - DNA, 25 bp, Homo sapien
ctttacaggggactttctaggcttg

SEQ ID NO: 181340 - DNA, 25 bp, Homo sapien
cgcggatcttctctgcggttcgtcc

SEQ ID NO: 181341 - DNA, 25 bp, Homo sapien
tgcgggatgcagctgcgcgcgggct

SEQ ID NO: 181342 - DNA, 25 bp, Homo sapien
tggcgggatgtaggtgctggatgcg

SEQ ID NO: 181343 - DNA, 25 bp, Homo sapien
tggatgcgggatgcagctgcgcgcg

SEQ ID NO: 181344 - DNA, 25 bp, Homo sapien
ggtgacggccacgacggtggcggga

SEQ ID NO: 181345 - DNA, 25 bp, Homo sapien
gaatttgcatcagtgtactgcctct

SEQ ID NO: 181346 - DNA, 25 bp, Homo sapien
tttcatggaatttgcatcagtgtac

SEQ ID NO: 181347 - DNA, 25 bp, Homo sapien
tcctgatacattcctctggtggttc

SEQ ID NO: 181348 - DNA, 25 bp, Homo sapien
catggaatttgcatcagtgtactgc

SEQ ID NO: 181349 - DNA, 25 bp, Homo sapien
ggtaccaaccattccgaggtggcca

SEQ ID NO: 181350 - DNA, 25 bp, Homo sapien
acactgggtcactgccttagcagag

SEQ ID NO: 181351 - DNA, 25 bp, Homo sapien
gccacactgggtcactgccttagca

SEQ ID NO: 181352 - DNA, 25 bp, Homo sapien
gtaccaaccattccgaggtggccac

SEQ ID NO: 181353 - DNA, 25 bp, Homo sapien
catacggtgaagtcatagttgtcag

SEQ ID NO: 181354 - DNA, 25 bp, Homo sapien
gaagtcatagttgtcagatgtgggc

SEQ ID NO: 181355 - DNA, 25 bp, Homo sapien
tgacagtagacaccgtcagaggaag

SEQ ID NO: 181356 - DNA, 25 bp, Homo sapien
gagcctagatgatggtgcatccatg

SEQ ID NO: 181357 - DNA, 25 bp, Homo sapien
tgtcgtttatcctggtttttgccga

SEQ ID NO: 181358 - DNA, 25 bp, Homo sapien
ttaggaagtgatattttgtcgttta

SEQ ID NO: 181359 - DNA, 25 bp, Homo sapien
aaatctcttgtttagcgagagaaaa

SEQ ID NO: 181360 - DNA, 25 bp, Homo sapien
tgtttagcgagagaaaatgcaagtg

SEQ ID NO: 181361 - DNA, 25 bp, Homo sapien
ttgtaaagaattctgagatggaaaa

SEQ ID NO: 181362 - DNA, 25 bp, Homo sapien
aaagaattctgagatggaaaatctg

SEQ ID NO: 181363 - DNA, 25 bp, Homo sapien
gaattctgagatggaaaatctgtaa

SEQ ID NO: 181364 - DNA, 25 bp, Homo sapien
ttctgagatggaaaatctgtaaatg

SEQ ID NO: 181365 - DNA, 25 bp, Homo sapien
taaaccatttgcttcaggcttgatt

SEQ ID NO: 181366 - DNA, 25 bp, Homo sapien
aacgtttctaaaccatttgcttcag

SEQ ID NO: 181367 - DNA, 25 bp, Homo sapien
aaaccatttgcttcaggcttgattc

SEQ ID NO: 181368 - DNA, 25 bp, Homo sapien
ccatttgcttcaggcttgattctca

SEQ ID NO: 181369 - DNA, 25 bp, Homo sapien
gaagtccaaaacctgtatcagtagg

SEQ ID NO: 181370 - DNA, 25 bp, Homo sapien
cttcccataaagatacatgtggttg

SEQ ID NO: 181371 - DNA, 25 bp, Homo sapien
cagcattccttgagtcatggcagca

SEQ ID NO: 181372 - DNA, 25 bp, Homo sapien
gagggacacatttttcagcctgttg

SEQ ID NO: 181373 - DNA, 25 bp, Homo sapien
cttctactgtgtttcctaggcacat

SEQ ID NO: 181374 - DNA, 25 bp, Homo sapien
tttttgaagcatcagtagcagcctg

SEQ ID NO: 181375 - DNA, 25 bp, Homo sapien
tgcataaacctgagtgaatttggca

SEQ ID NO: 181376 - DNA, 25 bp, Homo sapien
tgacccttggtttcagaagatacta

SEQ ID NO: 181377 - DNA, 25 bp, Homo sapien
atttggcaacttgaaaaaggcttag

SEQ ID NO: 181378 - DNA, 25 bp, Homo sapien
atgaagtcaccttcataacaatgac

SEQ ID NO: 181379 - DNA, 25 bp, Homo sapien
gaagtcaccttcataacaatgactt

SEQ ID NO: 181380 - DNA, 25 bp, Homo sapien
tgaagtcaccttcataacaatgact

SEQ ID NO: 181381 - DNA, 25 bp, Homo sapien
aagtcaccttcataacaatgacttg

SEQ ID NO: 181382 - DNA, 25 bp, Homo sapien
tcaatggtatataccacagtcaccc

SEQ ID NO: 181383 - DNA, 25 bp, Homo sapien
atggtatataccacagtcaccctca

SEQ ID NO: 181384 - DNA, 25 bp, Homo sapien
tggcctcaatggtatataccacagt

SEQ ID NO: 181385 - DNA, 25 bp, Homo sapien
tggtggcctcaatggtatataccac

SEQ ID NO: 181386 - DNA, 25 bp, Homo sapien
aacaaagttgctgcccaaactgaaa

SEQ ID NO: 181387 - DNA, 25 bp, Homo sapien
tttgcacctgtatgaagatcccagt

SEQ ID NO: 181388 - DNA, 25 bp, Homo sapien
cctgtatgaagatcccagtgaatct

SEQ ID NO: 181389 - DNA, 25 bp, Homo sapien
tcccagtgaatctcagtagaacaaa

SEQ ID NO: 181390 - DNA, 25 bp, Homo sapien
tcctggaaagttatcatttcttgca

SEQ ID NO: 181391 - DNA, 25 bp, Homo sapien
aaagttatcatttcttgcaagtgag

SEQ ID NO: 181392 - DNA, 25 bp, Homo sapien
gttatcatttcttgcaagtgagtct

SEQ ID NO: 181393 - DNA, 25 bp, Homo sapien
gaaagttatcatttcttgcaagtga

SEQ ID NO: 181394 - DNA, 25 bp, Homo sapien
ctgaatgctgggcaccttgccaaag

SEQ ID NO: 181395 - DNA, 25 bp, Homo sapien
ctgggtcccatttgcttgtgctttc

SEQ ID NO: 181396 - DNA, 25 bp, Homo sapien
ggtcccatttgcttgtgctttctct

SEQ ID NO: 181397 - DNA, 25 bp, Homo sapien
tgggcaccttgccaaaggcatctgc

SEQ ID NO: 181398 - DNA, 25 bp, Homo sapien
tttgagaccgtgatactcttttcat

SEQ ID NO: 181399 - DNA, 25 bp, Homo sapien
ttcctcttgcacctttttgattctt

SEQ ID NO: 181400 - DNA, 25 bp, Homo sapien
ttgattctttgagaccgtgatactc

SEQ ID NO: 181401 - DNA, 25 bp, Homo sapien
gattctttgagaccgtgatactctt

SEQ ID NO: 181402 - DNA, 25 bp, Homo sapien
ttcaacagagtgcacatcacatggg

SEQ ID NO: 181403 - DNA, 25 bp, Homo sapien
ttagcctggagtatgaacacatgtg

SEQ ID NO: 181404 - DNA, 25 bp, Homo sapien
agcctggagtatgaacacatgtgac

SEQ ID NO: 181405 - DNA, 25 bp, Homo sapien
cattcaacagagtgcacatcacatg

SEQ ID NO: 181406 - DNA, 25 bp, Homo sapien
gtttccttcctatcatgtctgcaga

SEQ ID NO: 181407 - DNA, 25 bp, Homo sapien
cttcctatcatgtctgcagagctcc

SEQ ID NO: 181408 - DNA, 25 bp, Homo sapien
ttccttcctatcatgtctgcagagc

SEQ ID NO: 181409 - DNA, 25 bp, Homo sapien
tccttcctatcatgtctgcagagct

SEQ ID NO: 181410 - DNA, 25 bp, Homo sapien
gaaatgcctggccactgcggtttag

SEQ ID NO: 181411 - DNA, 25 bp, Homo sapien
ggcattttatcctgggtcgcgacac

SEQ ID NO: 181412 - DNA, 25 bp, Homo sapien
tctctgggtctagggcggtaaagca

SEQ ID NO: 181413 - DNA, 25 bp, Homo sapien
gatgataaagggtgcatgatcgcca

SEQ ID NO: 181414 - DNA, 25 bp, Homo sapien
catccgttcataccgccaagggcag

SEQ ID NO: 181415 - DNA, 25 bp, Homo sapien
agggcaggtagctccggtgcacagg

SEQ ID NO: 181416 - DNA, 25 bp, Homo sapien
agcatccgttcataccgccaagggc

SEQ ID NO: 181417 - DNA, 25 bp, Homo sapien
agcagcatccgttcataccgccaag

SEQ ID NO: 181418 - DNA, 25 bp, Homo sapien
ccgggatcactccacacggtggccc

SEQ ID NO: 181419 - DNA, 25 bp, Homo sapien
gggatcactccacacggtggcccca

SEQ ID NO: 181420 - DNA, 25 bp, Homo sapien
ctagcccgggatcactccacacggt

SEQ ID NO: 181421 - DNA, 25 bp, Homo sapien
agcccgggatcactccacacggtgg

SEQ ID NO: 181422 - DNA, 25 bp, Homo sapien
tcgtggttcctcacaatcatctttt

SEQ ID NO: 181423 - DNA, 25 bp, Homo sapien
tcctgtcctcgtggttcctcacaat

SEQ ID NO: 181424 - DNA, 25 bp, Homo sapien
tgtcctcgtggttcctcacaatcat

SEQ ID NO: 181425 - DNA, 25 bp, Homo sapien
catctttttgtatagcttctgctgc

SEQ ID NO: 181426 - DNA, 25 bp, Homo sapien
gacaagttctccctgcctggcgatg

SEQ ID NO: 181427 - DNA, 25 bp, Homo sapien
tatcgtattcataaactggacggca

SEQ ID NO: 181428 - DNA, 25 bp, Homo sapien
tcccacagcaggtcgacaagttctc

SEQ ID NO: 181429 - DNA, 25 bp, Homo sapien
gcgatggcggattttatcgtattca

SEQ ID NO: 181430 - DNA, 25 bp, Homo sapien
ccctctggtcatggaaggcaggtac

SEQ ID NO: 181431 - DNA, 25 bp, Homo sapien
cttcatctgcccctctggtcatgga

SEQ ID NO: 181432 - DNA, 25 bp, Homo sapien
catctgcccctctggtcatggaagg

SEQ ID NO: 181433 - DNA, 25 bp, Homo sapien
tgcccctctggtcatggaaggcagg

SEQ ID NO: 181434 - DNA, 25 bp, Homo sapien
gctggtcatcattcgcagcaggtaa

SEQ ID NO: 181435 - DNA, 25 bp, Homo sapien
ggtcatcattcgcagcaggtaagtc

SEQ ID NO: 181436 - DNA, 25 bp, Homo sapien
tcatcattcgcagcaggtaagtcat

SEQ ID NO: 181437 - DNA, 25 bp, Homo sapien
ccagctggtcatcattcgcagcagg

SEQ ID NO: 181438 - DNA, 25 bp, Homo sapien
ggcattgccgaattgatggtcatac

SEQ ID NO: 181439 - DNA, 25 bp, Homo sapien
aaggcattgccgaattgatggtcat

SEQ ID NO: 181440 - DNA, 25 bp, Homo sapien
ccagaaggcattgccgaattgatgg

SEQ ID NO: 181441 - DNA, 25 bp, Homo sapien
agaaggcattgccgaattgatggtc

SEQ ID NO: 181442 - DNA, 25 bp, Homo sapien
agggtaaactgtggctccaatttca

SEQ ID NO: 181443 - DNA, 25 bp, Homo sapien
cagggtaaactgtggctccaatttc

SEQ ID NO: 181444 - DNA, 25 bp, Homo sapien
ttcagtcagtctcttagccagcagg

SEQ ID NO: 181445 - DNA, 25 bp, Homo sapien
agtctcttagccagcaggtggcgat

SEQ ID NO: 181446 - DNA, 25 bp, Homo sapien
tatatcttgcacttgttcagtcagt

SEQ ID NO: 181447 - DNA, 25 bp, Homo sapien
aagatgagggataggcagcttgctt

SEQ ID NO: 181448 - DNA, 25 bp, Homo sapien
ttccaagcgctcaaaccagatgtgt

SEQ ID NO: 181449 - DNA, 25 bp, Homo sapien
ccaagcgctcaaaccagatgtgtgg

SEQ ID NO: 181450 - DNA, 25 bp, Homo sapien
accagatgtgtgggcaagtcttcac

SEQ ID NO: 181451 - DNA, 25 bp, Homo sapien
aaaccagatgtgtgggcaagtcttc

SEQ ID NO: 181452 - DNA, 25 bp, Homo sapien
tatgaagcaagtatcccgccacagt

SEQ ID NO: 181453 - DNA, 25 bp, Homo sapien
gaatcaaacctatgagtcccccatg

SEQ ID NO: 181454 - DNA, 25 bp, Homo sapien
atcacatcgattggcgaggtatgaa

SEQ ID NO: 181455 - DNA, 25 bp, Homo sapien
tatgagtcccccatgcatttgaccc

SEQ ID NO: 181456 - DNA, 25 bp, Homo sapien
aaggctaatccctgtcaaggccagc

SEQ ID NO: 181457 - DNA, 25 bp, Homo sapien
caggaagcagtaccaaatcagccct

SEQ ID NO: 181458 - DNA, 25 bp, Homo sapien
aggccagcgctatcctgcgcagcag

SEQ ID NO: 181459 - DNA, 25 bp, Homo sapien
agcaggaagcagtaccaaatcagcc

SEQ ID NO: 181460 - DNA, 25 bp, Homo sapien
cacaggaccgtgacctgaagggtga

SEQ ID NO: 181461 - DNA, 25 bp, Homo sapien
ggaccgtgacctgaagggtgatgta

SEQ ID NO: 181462 - DNA, 25 bp, Homo sapien
acaggaccgtgacctgaagggtgat

SEQ ID NO: 181463 - DNA, 25 bp, Homo sapien
ccgtgacctgaagggtgatgtacct

SEQ ID NO: 181464 - DNA, 25 bp, Homo sapien
tggaactctggagtgttgtccagag

SEQ ID NO: 181465 - DNA, 25 bp, Homo sapien
tttccggcaaaagtagaaaatgtca

SEQ ID NO: 181466 - DNA, 25 bp, Homo sapien
gaactctggagtgttgtccagagcc

SEQ ID NO: 181467 - DNA, 25 bp, Homo sapien
aaaagtagaaaatgtcagagagctg

SEQ ID NO: 181468 - DNA, 25 bp, Homo sapien
tcttctagtgaagtgggatcctttg

SEQ ID NO: 181469 - DNA, 25 bp, Homo sapien
ttctagtgaagtgggatcctttgca

SEQ ID NO: 181470 - DNA, 25 bp, Homo sapien
tgatctcttcttctagtgaagtggg

SEQ ID NO: 181471 - DNA, 25 bp, Homo sapien
ctcttcttctagtgaagtgggatcc

SEQ ID NO: 181472 - DNA, 25 bp, Homo sapien
ggtgctgcttcttcttggctctttg

SEQ ID NO: 181473 - DNA, 25 bp, Homo sapien
tggtgctgcttcttcttggctcttt

SEQ ID NO: 181474 - DNA, 25 bp, Homo sapien
gtgctgcttcttcttggctctttgc

SEQ ID NO: 181475 - DNA, 25 bp, Homo sapien
ctggtgctgcttcttcttggctctt

SEQ ID NO: 181476 - DNA, 25 bp, Homo sapien
tctgtggattttgctgactactcta

SEQ ID NO: 181477 - DNA, 25 bp, Homo sapien
ttcagagtagttagaataatggatg

SEQ ID NO: 181478 - DNA, 25 bp, Homo sapien
tactcgggtgtaattaaatctgtgg

SEQ ID NO: 181479 - DNA, 25 bp, Homo sapien
tcttttctgcaattactcgggtgta

SEQ ID NO: 181480 - DNA, 25 bp, Homo sapien
cagggccaatctgatggtgcctcac

SEQ ID NO: 181481 - DNA, 25 bp, Homo sapien
gctgctcaactcatgctttagcaac

SEQ ID NO: 181482 - DNA, 25 bp, Homo sapien
agctgctcaactcatgctttagcaa

SEQ ID NO: 181483 - DNA, 25 bp, Homo sapien
cagagtcttatctgaagcaattgtg

SEQ ID NO: 181484 - DNA, 25 bp, Homo sapien
gaagcaattgtgtaaaacacctgca

SEQ ID NO: 181485 - DNA, 25 bp, Homo sapien
cctgagcatgcaagtggagggatac

SEQ ID NO: 181486 - DNA, 25 bp, Homo sapien
tattggtaggcctgagcatgcaagt

SEQ ID NO: 181487 - DNA, 25 bp, Homo sapien
ctaaagtattggtaggcctgagcat

SEQ ID NO: 181488 - DNA, 25 bp, Homo sapien
agtggagggatacaggcacattcag

SEQ ID NO: 181489 - DNA, 25 bp, Homo sapien
agattttgacaattgacactccatg

SEQ ID NO: 181490 - DNA, 25 bp, Homo sapien
tattttgtgaaaggaggctttcagc

SEQ ID NO: 181491 - DNA, 25 bp, Homo sapien
cagaaagtggaaatcaataggacat

SEQ ID NO: 181492 - DNA, 25 bp, Homo sapien
gcaaacagattttgacaattgacac

SEQ ID NO: 181493 - DNA, 25 bp, Homo sapien
gggatgagaaacataagattttgta

SEQ ID NO: 181494 - DNA, 25 bp, Homo sapien
tgggatgagaaacataagattttgt

SEQ ID NO: 181495 - DNA, 25 bp, Homo sapien
tctgtgcttatttgcttggctcttc

SEQ ID NO: 181496 - DNA, 25 bp, Homo sapien
ccctggcatgttggttctgtgctta

SEQ ID NO: 181497 - DNA, 25 bp, Homo sapien
tactgttctgggagtggagacctca

SEQ ID NO: 181498 - DNA, 25 bp, Homo sapien
aatgatgatgcaatgtagtagcggg

SEQ ID NO: 181499 - DNA, 25 bp, Homo sapien
ctctgtctctgaatttctgcctcta

SEQ ID NO: 181500 - DNA, 25 bp, Homo sapien
tgaatttctgcctctatgaccttga

SEQ ID NO: 181501 - DNA, 25 bp, Homo sapien
gtctctgaatttctgcctctatgac

SEQ ID NO: 181502 - DNA, 25 bp, Homo sapien
ctgtctctgaatttctgcctctatg

SEQ ID NO: 181503 - DNA, 25 bp, Homo sapien
gctttttctcttggacggttctgaa

SEQ ID NO: 181504 - DNA, 25 bp, Homo sapien
gcatcttccttatgtgagatgcaca

SEQ ID NO: 181505 - DNA, 25 bp, Homo sapien
tttaccaactagactttcagattta

SEQ ID NO: 181506 - DNA, 25 bp, Homo sapien
tatgtgagatgcacattttgctata

SEQ ID NO: 181507 - DNA, 25 bp, Homo sapien
ttttcctcttctatctcgttttcca

SEQ ID NO: 181508 - DNA, 25 bp, Homo sapien
ttctatctcgttttccagctccaca

SEQ ID NO: 181509 - DNA, 25 bp, Homo sapien
tcctcttctatctcgttttccagct

SEQ ID NO: 181510 - DNA, 25 bp, Homo sapien
tcttctatctcgttttccagctcca

SEQ ID NO: 181511 - DNA, 25 bp, Homo sapien
ggctcccttgcttcgtactgtcaca

SEQ ID NO: 181512 - DNA, 25 bp, Homo sapien
gctacaatacctgttcctggttcgt

SEQ ID NO: 181513 - DNA, 25 bp, Homo sapien
tggttcgtgagaaccctgggctccc

SEQ ID NO: 181514 - DNA, 25 bp, Homo sapien
gcttcgtactgtcacaagatacagc

SEQ ID NO: 181515 - DNA, 25 bp, Homo sapien
aaattcttgtagagatttgcccaca

SEQ ID NO: 181516 - DNA, 25 bp, Homo sapien
aaaattcttgtagagatttgcccac

SEQ ID NO: 181517 - DNA, 25 bp, Homo sapien
aattcttgtagagatttgcccacat

SEQ ID NO: 181518 - DNA, 25 bp, Homo sapien
gaaaattcttgtagagatttgccca

SEQ ID NO: 181519 - DNA, 25 bp, Homo sapien
gccactggagagtctgggcaccctg

SEQ ID NO: 181520 - DNA, 25 bp, Homo sapien
tagatgacgcttccacggtgccaca

SEQ ID NO: 181521 - DNA, 25 bp, Homo sapien
ccatgagaatttctgactgaggtca

SEQ ID NO: 181522 - DNA, 25 bp, Homo sapien
gatctgcagcatgtgattctaaggg

SEQ ID NO: 181523 - DNA, 25 bp, Homo sapien
tagaatctggaaggtttgcaaacct

SEQ ID NO: 181524 - DNA, 25 bp, Homo sapien
tctaagagttgtagagatagaatct

SEQ ID NO: 181525 - DNA, 25 bp, Homo sapien
ttggctggtgtagccatttgacttt

SEQ ID NO: 181526 - DNA, 25 bp, Homo sapien
ttttggctggtgtagccatttgact

SEQ ID NO: 181527 - DNA, 25 bp, Homo sapien
gcgccttctgcttaagctgtctgag

SEQ ID NO: 181528 - DNA, 25 bp, Homo sapien
tcctccaagaaccatcgtgatatac

SEQ ID NO: 181529 - DNA, 25 bp, Homo sapien
gcttaagctgtctgagctcgtttcc

SEQ ID NO: 181530 - DNA, 25 bp, Homo sapien
tatgccttcgcaaccacatgctctg

SEQ ID NO: 181531 - DNA, 25 bp, Homo sapien
ggaagatttgtaccgctctgcctcg

SEQ ID NO: 181532 - DNA, 25 bp, Homo sapien
gtataacgtgctgctcctcggttct

SEQ ID NO: 181533 - DNA, 25 bp, Homo sapien
ttagaagtacactgtgccatctggg

SEQ ID NO: 181534 - DNA, 25 bp, Homo sapien
ccatctttcaaacgctcagaaggga

SEQ ID NO: 181535 - DNA, 25 bp, Homo sapien
gaacagtataaacacagtgcaggct

SEQ ID NO: 181536 - DNA, 25 bp, Homo sapien
tatggatgttcctatctcgaacagt

SEQ ID NO: 181537 - DNA, 25 bp, Homo sapien
taatcggcctttagctgctcctgtc

SEQ ID NO: 181538 - DNA, 25 bp, Homo sapien
tttcaattgtcaaaacagatgaaag

SEQ ID NO: 181539 - DNA, 25 bp, Homo sapien
cctgagacataggcaaacagggctg

SEQ ID NO: 181540 - DNA, 25 bp, Homo sapien
ctgctcctgagacataggcaaacag

SEQ ID NO: 181541 - DNA, 25 bp, Homo sapien
ttactgctcctgagacataggcaaa

SEQ ID NO: 181542 - DNA, 25 bp, Homo sapien
tactgctcctgagacataggcaaac

SEQ ID NO: 181543 - DNA, 25 bp, Homo sapien
ttccaaggcctctaatgcatagctt

SEQ ID NO: 181544 - DNA, 25 bp, Homo sapien
cttgctcagtatgtgacattttgct

SEQ ID NO: 181545 - DNA, 25 bp, Homo sapien
cctctaatgcatagctttgggccat

SEQ ID NO: 181546 - DNA, 25 bp, Homo sapien
cattttgctatgttccagatcctgc

SEQ ID NO: 181547 - DNA, 25 bp, Homo sapien
aagacttcgcttttgattcagatca

SEQ ID NO: 181548 - DNA, 25 bp, Homo sapien
tcagatcattaactacaattcccat

SEQ ID NO: 181549 - DNA, 25 bp, Homo sapien
ccaaacagctttgcttaacaaagag

SEQ ID NO: 181550 - DNA, 25 bp, Homo sapien
aaaacaagacttcgcttttgattca

SEQ ID NO: 181551 - DNA, 25 bp, Homo sapien
gatcttgtaacctgggcagtttcta

SEQ ID NO: 181552 - DNA, 25 bp, Homo sapien
tttggaaagcacaatgcttttgatc

SEQ ID NO: 181553 - DNA, 25 bp, Homo sapien
tgcttttgatcagctattgaggtca

SEQ ID NO: 181554 - DNA, 25 bp, Homo sapien
tctactgcattaaattgcatcctga

SEQ ID NO: 181555 - DNA, 25 bp, Homo sapien
tagtcaggacgaagtggataacaac

SEQ ID NO: 181556 - DNA, 25 bp, Homo sapien
caactggatagctgccgattctgcc

SEQ ID NO: 181557 - DNA, 25 bp, Homo sapien
tataatctgatcagctagtcaggac

SEQ ID NO: 181558 - DNA, 25 bp, Homo sapien
gaagatctttgtgcctccaactgga

SEQ ID NO: 181559 - DNA, 25 bp, Homo sapien
gaatttgactcagttagccactccc

SEQ ID NO: 181560 - DNA, 25 bp, Homo sapien
ggttattcgcttgcatctctggtgg

SEQ ID NO: 181561 - DNA, 25 bp, Homo sapien
caacctctttgtgaccagagccagt

SEQ ID NO: 181562 - DNA, 25 bp, Homo sapien
cagagccagtgatgtttggttctca

SEQ ID NO: 181563 - DNA, 25 bp, Homo sapien
actgggtatcagtcatgagcatgac

SEQ ID NO: 181564 - DNA, 25 bp, Homo sapien
caatttggtcatgacactgggtatc

SEQ ID NO: 181565 - DNA, 25 bp, Homo sapien
tgaacaggccatagcacaactaatc

SEQ ID NO: 181566 - DNA, 25 bp, Homo sapien
aaatgaatggaatcactttactcca

SEQ ID NO: 181567 - DNA, 25 bp, Homo sapien
caatatgaagctttataggaagccc

SEQ ID NO: 181568 - DNA, 25 bp, Homo sapien
ggcccttggatctctaaattgctgt

SEQ ID NO: 181569 - DNA, 25 bp, Homo sapien
gattattaagtgttggcccatagca

SEQ ID NO: 181570 - DNA, 25 bp, Homo sapien
gattttgtctagtgaagtgcagcca

SEQ ID NO: 181571 - DNA, 25 bp, Homo sapien
tttctaaatgacccaatctcaagaa

SEQ ID NO: 181572 - DNA, 25 bp, Homo sapien
ttctaaatgacccaatctcaagaag

SEQ ID NO: 181573 - DNA, 25 bp, Homo sapien
tctaaatgacccaatctcaagaagc

SEQ ID NO: 181574 - DNA, 25 bp, Homo sapien
tctttgccagcagtatgctaggtgg

SEQ ID NO: 181575 - DNA, 25 bp, Homo sapien
tatgctaggtggtagataggaaacc

SEQ ID NO: 181576 - DNA, 25 bp, Homo sapien
gtattccgtaagctctctttgccag

SEQ ID NO: 181577 - DNA, 25 bp, Homo sapien
aaccgagaggccagtgaaaggaagt

SEQ ID NO: 181578 - DNA, 25 bp, Homo sapien
gagggcaagttttacgcaccaggga

SEQ ID NO: 181579 - DNA, 25 bp, Homo sapien
gctgtgacagcagacaccgacatgt

SEQ ID NO: 181580 - DNA, 25 bp, Homo sapien
gcagggttctctacttgcatataga

SEQ ID NO: 181581 - DNA, 25 bp, Homo sapien
tccagcaacagactataaccctcaa

SEQ ID NO: 181582 - DNA, 25 bp, Homo sapien
aagaattgcctttcatgccccacag

SEQ ID NO: 181583 - DNA, 25 bp, Homo sapien
cattatacatgctccctcacggtgg

SEQ ID NO: 181584 - DNA, 25 bp, Homo sapien
taacattcaggttgctcctacaggc

SEQ ID NO: 181585 - DNA, 25 bp, Homo sapien
gaaagcaccagctacatgccataag

SEQ ID NO: 181586 - DNA, 25 bp, Homo sapien
cttggttgacttcaggctgagttga

SEQ ID NO: 181587 - DNA, 25 bp, Homo sapien
cactctactcccttggagaatgaag

SEQ ID NO: 181588 - DNA, 25 bp, Homo sapien
tgactctggcctatgatctgcagcg

SEQ ID NO: 181589 - DNA, 25 bp, Homo sapien
ttcctcagagctacactgtggcttg

SEQ ID NO: 181590 - DNA, 25 bp, Homo sapien
tgccagctagacatcccctaggtgg

SEQ ID NO: 181591 - DNA, 25 bp, Homo sapien
gcctggagcatgcagcaacttatat

SEQ ID NO: 181592 - DNA, 25 bp, Homo sapien
tatagaatagaagtacctgcaacag

SEQ ID NO: 181593 - DNA, 25 bp, Homo sapien
gatccatgcacatcagctcaagagc

SEQ ID NO: 181594 - DNA, 25 bp, Homo sapien
tgccttgagtgctctcattcatgtg

SEQ ID NO: 181595 - DNA, 25 bp, Homo sapien
gtaaagatgataaagaacactgttt

SEQ ID NO: 181596 - DNA, 25 bp, Homo sapien
cttgagtgctctcattcatgtgtac

SEQ ID NO: 181597 - DNA, 25 bp, Homo sapien
gaataattaggttctatcccttcat

SEQ ID NO: 181598 - DNA, 25 bp, Homo sapien
caattgcatagataactgctgtgag

SEQ ID NO: 181599 - DNA, 25 bp, Homo sapien
ttctcaattgcatagataactgctg

SEQ ID NO: 181600 - DNA, 25 bp, Homo sapien
cgtgtggtccataattctcaattgc

SEQ ID NO: 181601 - DNA, 25 bp, Homo sapien
tcattgacctgattcgtgtggtcca

SEQ ID NO: 181602 - DNA, 25 bp, Homo sapien
tcatcttcataagcctcatttgtaa

SEQ ID NO: 181603 - DNA, 25 bp, Homo sapien
ttcatcttcataagcctcatttgta

SEQ ID NO: 181604 - DNA, 25 bp, Homo sapien
ttacaagcttggacttcccttggct

SEQ ID NO: 181605 - DNA, 25 bp, Homo sapien
caagcttggacttcccttggctgtt

SEQ ID NO: 181606 - DNA, 25 bp, Homo sapien
tcagtggaagtagaataaagctgga

SEQ ID NO: 181607 - DNA, 25 bp, Homo sapien
aatgtaaatgcaaactaatcagtgg

SEQ ID NO: 181608 - DNA, 25 bp, Homo sapien
taaatcatgaatgccgagcagctgg

SEQ ID NO: 181609 - DNA, 25 bp, Homo sapien
aagctggaagccctataaatcaaaa

SEQ ID NO: 181610 - DNA, 25 bp, Homo sapien
tgttgcaaccaaacctatcagttct

SEQ ID NO: 181611 - DNA, 25 bp, Homo sapien
ttttcttgttgcaaccaaacctatc

SEQ ID NO: 181612 - DNA, 25 bp, Homo sapien
ctatctcctctaccagttttcttgt

SEQ ID NO: 181613 - DNA, 25 bp, Homo sapien
agttcttcctatcagtccctcagcc

SEQ ID NO: 181614 - DNA, 25 bp, Homo sapien
tccatagaaattgaaagtgcacttg

SEQ ID NO: 181615 - DNA, 25 bp, Homo sapien
tcactgtatttgactagacaatgac

SEQ ID NO: 181616 - DNA, 25 bp, Homo sapien
gatcatttgatactctatttcccac

SEQ ID NO: 181617 - DNA, 25 bp, Homo sapien
cacaaaatgcgcaatttccatagaa

SEQ ID NO: 181618 - DNA, 25 bp, Homo sapien
tctgcatatcggcatcatcagtgtc

SEQ ID NO: 181619 - DNA, 25 bp, Homo sapien
tatttgatgtggtctgcatatcggc

SEQ ID NO: 181620 - DNA, 25 bp, Homo sapien
gtgtctgtggaagtagtaagcagcc

SEQ ID NO: 181621 - DNA, 25 bp, Homo sapien
tatgctgatagctctgctgttctat

SEQ ID NO: 181622 - DNA, 25 bp, Homo sapien
ccatatcaggcttcccaattagctc

SEQ ID NO: 181623 - DNA, 25 bp, Homo sapien
cagagaagggagacgactgactgca

SEQ ID NO: 181624 - DNA, 25 bp, Homo sapien
tgatggccagcgtgataagagcagt

SEQ ID NO: 181625 - DNA, 25 bp, Homo sapien
gagcagtaattgaggtacatatcag

SEQ ID NO: 181626 - DNA, 25 bp, Homo sapien
gtccttgtcctgcatccggctcttt

SEQ ID NO: 181627 - DNA, 25 bp, Homo sapien
ccggctctttatcatcatggttgga

SEQ ID NO: 181628 - DNA, 25 bp, Homo sapien
catggttggattgggcagagagagc

SEQ ID NO: 181629 - DNA, 25 bp, Homo sapien
tttatcatcatggttggattgggca

SEQ ID NO: 181630 - DNA, 25 bp, Homo sapien
cacatacatgaccaggagctcctga

SEQ ID NO: 181631 - DNA, 25 bp, Homo sapien
atacatgaccaggagctcctgacgg

SEQ ID NO: 181632 - DNA, 25 bp, Homo sapien
atgaccaggagctcctgacggccct

SEQ ID NO: 181633 - DNA, 25 bp, Homo sapien
tgcacacatacatgaccaggagctc

SEQ ID NO: 181634 - DNA, 25 bp, Homo sapien
tatgttctggtaccctgtcttgggc

SEQ ID NO: 181635 - DNA, 25 bp, Homo sapien
tcacaattgctcttccaatctgaac

SEQ ID NO: 181636 - DNA, 25 bp, Homo sapien
ctgccaatgagggtttcgaggagaa

SEQ ID NO: 181637 - DNA, 25 bp, Homo sapien
gctgaatacagtacacctggagctc

SEQ ID NO: 181638 - DNA, 25 bp, Homo sapien
agactagagcccgagccattcagct

SEQ ID NO: 181639 - DNA, 25 bp, Homo sapien
tttctgcaaggatctacaagactag

SEQ ID NO: 181640 - DNA, 25 bp, Homo sapien
tctacaagactagagcccgagccat

SEQ ID NO: 181641 - DNA, 25 bp, Homo sapien
tcctcctccactttgtttctgcaag

SEQ ID NO: 181642 - DNA, 25 bp, Homo sapien
gagactctgagacatacatttccat

SEQ ID NO: 181643 - DNA, 25 bp, Homo sapien
ttccatcaagtatgcagattcaggc

SEQ ID NO: 181644 - DNA, 25 bp, Homo sapien
cagaccactgaagtttgggtttcct

SEQ ID NO: 181645 - DNA, 25 bp, Homo sapien
ccatcaagtatgcagattcaggctt

SEQ ID NO: 181646 - DNA, 25 bp, Homo sapien
cctgggaatctactatctgcgctaa

SEQ ID NO: 181647 - DNA, 25 bp, Homo sapien
tcagcaagaaccaagcatgggtcac

SEQ ID NO: 181648 - DNA, 25 bp, Homo sapien
tcaggagtccctgttcaaagaatgc

SEQ ID NO: 181649 - DNA, 25 bp, Homo sapien
tcagccatagcagagcagtactggg

SEQ ID NO: 181650 - DNA, 25 bp, Homo sapien
atcataacaactcttcagatccttc

SEQ ID NO: 181651 - DNA, 25 bp, Homo sapien
ccaaatcataacaactcttcagatc

SEQ ID NO: 181652 - DNA, 25 bp, Homo sapien
cttttgtatgagagtcaagaaagga

SEQ ID NO: 181653 - DNA, 25 bp, Homo sapien
tgtatgagagtcaagaaaggatatg

SEQ ID NO: 181654 - DNA, 25 bp, Homo sapien
agtgacatccagtcaataggaagcc

SEQ ID NO: 181655 - DNA, 25 bp, Homo sapien
ttacatcagtaggatcttgtgcctt

SEQ ID NO: 181656 - DNA, 25 bp, Homo sapien
cagtgacatccagtcaataggaagc

SEQ ID NO: 181657 - DNA, 25 bp, Homo sapien
ttcagtgacatccagtcaataggaa

SEQ ID NO: 181658 - DNA, 25 bp, Homo sapien
caatgagttttgtccaacctaataa

SEQ ID NO: 181659 - DNA, 25 bp, Homo sapien
atgagttttgtccaacctaataact

SEQ ID NO: 181660 - DNA, 25 bp, Homo sapien
ctccagatctttcaatgaaggtgat

SEQ ID NO: 181661 - DNA, 25 bp, Homo sapien
ctgggatcactgcaaagccccatca

SEQ ID NO: 181662 - DNA, 25 bp, Homo sapien
tgacttcccaaatacagcctctata

SEQ ID NO: 181663 - DNA, 25 bp, Homo sapien
gccttgatttctcgtgcttctcctg

SEQ ID NO: 181664 - DNA, 25 bp, Homo sapien
catgatcacatgctttgacttccca

SEQ ID NO: 181665 - DNA, 25 bp, Homo sapien
tttctgccccacaggaaacataagc

SEQ ID NO: 181666 - DNA, 25 bp, Homo sapien
gtcttggaagtcagtctgtagcctg

SEQ ID NO: 181667 - DNA, 25 bp, Homo sapien
aaacataagcaggatgtgtgtgctc

SEQ ID NO: 181668 - DNA, 25 bp, Homo sapien
gctgagctatagcaattgtcacctg

SEQ ID NO: 181669 - DNA, 25 bp, Homo sapien
tgaacattaattcatttaaattctt

SEQ ID NO: 181670 - DNA, 25 bp, Homo sapien
gaacattaattcatttaaattctta

SEQ ID NO: 181671 - DNA, 25 bp, Homo sapien
cttgaacattaattcatttaaattc

SEQ ID NO: 181672 - DNA, 25 bp, Homo sapien
cctgccacctctttagaccatttcc

SEQ ID NO: 181673 - DNA, 25 bp, Homo sapien
tcctgccacctctttagaccatttc

SEQ ID NO: 181674 - DNA, 25 bp, Homo sapien
tgattggaccctggttttgcattta

SEQ ID NO: 181675 - DNA, 25 bp, Homo sapien
ggggtattttgcaagaacagacaag

SEQ ID NO: 181676 - DNA, 25 bp, Homo sapien
gaatattgtaatttgattgccatct

SEQ ID NO: 181677 - DNA, 25 bp, Homo sapien
gattgccatcttattctgattggac

SEQ ID NO: 181678 - DNA, 25 bp, Homo sapien
tgcttgctttgtggcctcactatcc

SEQ ID NO: 181679 - DNA, 25 bp, Homo sapien
gattaacagtgcttgctttgtggcc

SEQ ID NO: 181680 - DNA, 25 bp, Homo sapien
tgttttttgtataaataagcttgaa

SEQ ID NO: 181681 - DNA, 25 bp, Homo sapien
tcttgactcttgctgattaacagtg

SEQ ID NO: 181682 - DNA, 25 bp, Homo sapien
catacccatggtttgaggtatatca

SEQ ID NO: 181683 - DNA, 25 bp, Homo sapien
acccatggtttgaggtatatcatca

SEQ ID NO: 181684 - DNA, 25 bp, Homo sapien
ggttccatacccatggtttgaggta

SEQ ID NO: 181685 - DNA, 25 bp, Homo sapien
ttccggttccatacccatggtttga

SEQ ID NO: 181686 - DNA, 25 bp, Homo sapien
tggataccatatgattcagacagct

SEQ ID NO: 181687 - DNA, 25 bp, Homo sapien
cagacagctccctgttcaaagagag

SEQ ID NO: 181688 - DNA, 25 bp, Homo sapien
aactgacggctgtcgtttttcctga

SEQ ID NO: 181689 - DNA, 25 bp, Homo sapien
tgatcctattgcatcagcaacatgg

SEQ ID NO: 181690 - DNA, 25 bp, Homo sapien
tccttgtacgattgacacccttggc

SEQ ID NO: 181691 - DNA, 25 bp, Homo sapien
aatgcaatgcaggtgctccttgtac

SEQ ID NO: 181692 - DNA, 25 bp, Homo sapien
tgctccttgtacgattgacaccctt

SEQ ID NO: 181693 - DNA, 25 bp, Homo sapien
ttgtacgattgacacccttggccca

SEQ ID NO: 181694 - DNA, 25 bp, Homo sapien
tccacctcttccaaccatacttact

SEQ ID NO: 181695 - DNA, 25 bp, Homo sapien
cacccacctaaaagcacgttcttct

SEQ ID NO: 181696 - DNA, 25 bp, Homo sapien
ccacctaaaagcacgttcttctttg

SEQ ID NO: 181697 - DNA, 25 bp, Homo sapien
ttccaaccatacttacttcctcttc

SEQ ID NO: 181698 - DNA, 25 bp, Homo sapien
cagtgaaatatttctattggttcac

SEQ ID NO: 181699 - DNA, 25 bp, Homo sapien
ctttctgcccaatgacagtgaaata

SEQ ID NO: 181700 - DNA, 25 bp, Homo sapien
ggtttttagctttctgcccaatgac

SEQ ID NO: 181701 - DNA, 25 bp, Homo sapien
tggttcacttgcaaaagtatttatt

SEQ ID NO: 181702 - DNA, 25 bp, Homo sapien
gctgtgtaggcggtcccagtaaatt

SEQ ID NO: 181703 - DNA, 25 bp, Homo sapien
taggcggtcccagtaaatttagcag

SEQ ID NO: 181704 - DNA, 25 bp, Homo sapien
cggtcccagtaaatttagcagccaa

SEQ ID NO: 181705 - DNA, 25 bp, Homo sapien
atcctcagctgtgtaggcggtccca

SEQ ID NO: 181706 - DNA, 25 bp, Homo sapien
ggataaagctgagaaacacacagcc

SEQ ID NO: 181707 - DNA, 25 bp, Homo sapien
gaaccacatcagatgatggtggagt

SEQ ID NO: 181708 - DNA, 25 bp, Homo sapien
acacagccatcagaaccacatcaga

SEQ ID NO: 181709 - DNA, 25 bp, Homo sapien
gataaagctgagaaacacacagcca

SEQ ID NO: 181710 - DNA, 25 bp, Homo sapien
aatgagagcaaaaagcccacatccg

SEQ ID NO: 181711 - DNA, 25 bp, Homo sapien
cccacatccgtgatggatttccact

SEQ ID NO: 181712 - DNA, 25 bp, Homo sapien
gcaaaaagcccacatccgtgatgga

SEQ ID NO: 181713 - DNA, 25 bp, Homo sapien
gcccacatccgtgatggatttccac

SEQ ID NO: 181714 - DNA, 25 bp, Homo sapien
gttatgaacaatgtagtgattattc

SEQ ID NO: 181715 - DNA, 25 bp, Homo sapien
aaatcagtctgcatgtcaaagcccc

SEQ ID NO: 181716 - DNA, 25 bp, Homo sapien
tttctgctcatcctggtccacttta

SEQ ID NO: 181717 - DNA, 25 bp, Homo sapien
gcagagttatgaacaatgtagtgat

SEQ ID NO: 181718 - DNA, 25 bp, Homo sapien
gagtctgcccagaaagtatccttaa

SEQ ID NO: 181719 - DNA, 25 bp, Homo sapien
ccgagtctgcccagaaagtatcctt

SEQ ID NO: 181720 - DNA, 25 bp, Homo sapien
ctgagttctggactccgagtctgcc

SEQ ID NO: 181721 - DNA, 25 bp, Homo sapien
agtctgcccagaaagtatccttaaa

SEQ ID NO: 181722 - DNA, 25 bp, Homo sapien
cctttaggcttgtcacaggaagagg

SEQ ID NO: 181723 - DNA, 25 bp, Homo sapien
gaaaaagaagtagtgcaactcccta

SEQ ID NO: 181724 - DNA, 25 bp, Homo sapien
tagtgcaactccctaactagcttac

SEQ ID NO: 181725 - DNA, 25 bp, Homo sapien
gagctcagactagttttccttgcag

SEQ ID NO: 181726 - DNA, 25 bp, Homo sapien
agtggacgttttgactccctcctca

SEQ ID NO: 181727 - DNA, 25 bp, Homo sapien
ccagttatgagcttgtgaatagcac

SEQ ID NO: 181728 - DNA, 25 bp, Homo sapien
tgttacaaatgacacgacatctctg

SEQ ID NO: 181729 - DNA, 25 bp, Homo sapien
gcctcagtgtggaaattactcagca

SEQ ID NO: 181730 - DNA, 25 bp, Homo sapien
tcacaggactggagcggaatgataa

SEQ ID NO: 181731 - DNA, 25 bp, Homo sapien
gaatgataaggagagcttccatgat

SEQ ID NO: 181732 - DNA, 25 bp, Homo sapien
gagcggaatgataaggagagcttcc

SEQ ID NO: 181733 - DNA, 25 bp, Homo sapien
ttccatgatagagttggtgatgtgg

SEQ ID NO: 181734 - DNA, 25 bp, Homo sapien
gagggaactcaagcactctaccatg

SEQ ID NO: 181735 - DNA, 25 bp, Homo sapien
gatatatcaaaacgagagggaactc

SEQ ID NO: 181736 - DNA, 25 bp, Homo sapien
tcagagatctgtgcctcataataca

SEQ ID NO: 181737 - DNA, 25 bp, Homo sapien
taccatgtttcctcgcccttactga

SEQ ID NO: 181738 - DNA, 25 bp, Homo sapien
tattctccagagtcacaagttaatg

SEQ ID NO: 181739 - DNA, 25 bp, Homo sapien
ttattctccagagtcacaagttaat

SEQ ID NO: 181740 - DNA, 25 bp, Homo sapien
caactatcttcagtatagctaggct

SEQ ID NO: 181741 - DNA, 25 bp, Homo sapien
tggcaaatgttagacctgtgtatac

SEQ ID NO: 181742 - DNA, 25 bp, Homo sapien
tagctaggctagcttgacctgtggc

SEQ ID NO: 181743 - DNA, 25 bp, Homo sapien
ccatcctcagaaagcacaactatct

SEQ ID NO: 181744 - DNA, 25 bp, Homo sapien
tccttccagcaatctggtttccttt

SEQ ID NO: 181745 - DNA, 25 bp, Homo sapien
ggtttcctttattgccctgccagtc

SEQ ID NO: 181746 - DNA, 25 bp, Homo sapien
tatccttccagcaatctggtttcct

SEQ ID NO: 181747 - DNA, 25 bp, Homo sapien
tccagcaatctggtttcctttattg

SEQ ID NO: 181748 - DNA, 25 bp, Homo sapien
gctggccactgggtagcaggattca

SEQ ID NO: 181749 - DNA, 25 bp, Homo sapien
gaacatggcgagggccttggaaaac

SEQ ID NO: 181750 - DNA, 25 bp, Homo sapien
ttggaaaacttctctgtaccaagca

SEQ ID NO: 181751 - DNA, 25 bp, Homo sapien
ctatctctacaacatcaggactctc

SEQ ID NO: 181752 - DNA, 25 bp, Homo sapien
gatgtttccaaaggtacgtcccata

SEQ ID NO: 181753 - DNA, 25 bp, Homo sapien
ggtcaatgagttatcatcccacagg

SEQ ID NO: 181754 - DNA, 25 bp, Homo sapien
tagttctttaggctcccatggctcc

SEQ ID NO: 181755 - DNA, 25 bp, Homo sapien
tccctgaaattagagcatagcttcc

SEQ ID NO: 181756 - DNA, 25 bp, Homo sapien
caggtagattaccagttggagtgga

SEQ ID NO: 181757 - DNA, 25 bp, Homo sapien
taagaaggcagcgtacaggtcaggt

SEQ ID NO: 181758 - DNA, 25 bp, Homo sapien
taatgtaacttcatagagccctaag

SEQ ID NO: 181759 - DNA, 25 bp, Homo sapien
gatgtctccatgataacgagcctga

SEQ ID NO: 181760 - DNA, 25 bp, Homo sapien
ggagttcccagacttggaagaaaga

SEQ ID NO: 181761 - DNA, 25 bp, Homo sapien
caggagttcccagacttggaagaaa

SEQ ID NO: 181762 - DNA, 25 bp, Homo sapien
aggagttcccagacttggaagaaag

SEQ ID NO: 181763 - DNA, 25 bp, Homo sapien
tatgtacctatattccctgctgcca

SEQ ID NO: 181764 - DNA, 25 bp, Homo sapien
gtggataatcagttgcagttggaat

SEQ ID NO: 181765 - DNA, 25 bp, Homo sapien
gcagttggaatgaggtatgtaccta

SEQ ID NO: 181766 - DNA, 25 bp, Homo sapien
gaatgaggtatgtacctatattccc

SEQ ID NO: 181767 - DNA, 25 bp, Homo sapien
atatccctcttaataatgtagaaat

SEQ ID NO: 181768 - DNA, 25 bp, Homo sapien
tggctgtagctaaagccttacaagt

SEQ ID NO: 181769 - DNA, 25 bp, Homo sapien
tgtagaaattggctgtagctaaagc

SEQ ID NO: 181770 - DNA, 25 bp, Homo sapien
ttcacaggggccattcaaaatatcc

SEQ ID NO: 181771 - DNA, 25 bp, Homo sapien
agactctcaggtcatattcgtcaag

SEQ ID NO: 181772 - DNA, 25 bp, Homo sapien
tagactctcaggtcatattcgtcaa

SEQ ID NO: 181773 - DNA, 25 bp, Homo sapien
ctagactctcaggtcatattcgtca

SEQ ID NO: 181774 - DNA, 25 bp, Homo sapien
ctgatagattctggaggatacataa

SEQ ID NO: 181775 - DNA, 25 bp, Homo sapien
gaagttgaattctgatagattctgg

SEQ ID NO: 181776 - DNA, 25 bp, Homo sapien
tgatagattctggaggatacataaa

SEQ ID NO: 181777 - DNA, 25 bp, Homo sapien
gatagattctggaggatacataaaa

SEQ ID NO: 181778 - DNA, 25 bp, Homo sapien
gtgacaagaaggatgaattgtcttc

SEQ ID NO: 181779 - DNA, 25 bp, Homo sapien
cttttccggcagacctaaagtgctg

SEQ ID NO: 181780 - DNA, 25 bp, Homo sapien
ctgcttttccggcagacctaaagtg

SEQ ID NO: 181781 - DNA, 25 bp, Homo sapien
ttccggcagacctaaagtgctgcca

SEQ ID NO: 181782 - DNA, 25 bp, Homo sapien
cagactgtggatcaactgtccttac

SEQ ID NO: 181783 - DNA, 25 bp, Homo sapien
aataccacatcgaaggacaggcagc

SEQ ID NO: 181784 - DNA, 25 bp, Homo sapien
caatgtcatataggcctttttccca

SEQ ID NO: 181785 - DNA, 25 bp, Homo sapien
gggatatgagccaataccacatcga

SEQ ID NO: 181786 - DNA, 25 bp, Homo sapien
gggtacgactaatgaacagcactgt

SEQ ID NO: 181787 - DNA, 25 bp, Homo sapien
gacacaggcagcactctcttgcata

SEQ ID NO: 181788 - DNA, 25 bp, Homo sapien
tgaaatagtgtttgcctccgacaca

SEQ ID NO: 181789 - DNA, 25 bp, Homo sapien
gggatgttgtactgcgagccattca

SEQ ID NO: 181790 - DNA, 25 bp, Homo sapien
tttcttttgtctccacctgactggc

SEQ ID NO: 181791 - DNA, 25 bp, Homo sapien
taatgggggctacatgatccaaagt

SEQ ID NO: 181792 - DNA, 25 bp, Homo sapien
tcatactggtgttgaggatttatca

SEQ ID NO: 181793 - DNA, 25 bp, Homo sapien
ttttgtctccacctgactggcttcc

SEQ ID NO: 181794 - DNA, 25 bp, Homo sapien
gaatgagcttaagccactgagtgag

SEQ ID NO: 181795 - DNA, 25 bp, Homo sapien
taagaagacgttaactgagccctgc

SEQ ID NO: 181796 - DNA, 25 bp, Homo sapien
tattcacctggcaacaaattggctt

SEQ ID NO: 181797 - DNA, 25 bp, Homo sapien
aattaaaagccgaacacagagagac

SEQ ID NO: 181798 - DNA, 25 bp, Homo sapien
ccttgccaaacatcagtcttggcct

SEQ ID NO: 181799 - DNA, 25 bp, Homo sapien
ccttgggctctcttgtctagatttg

SEQ ID NO: 181800 - DNA, 25 bp, Homo sapien
ctcttgtctagatttgtctggatga

SEQ ID NO: 181801 - DNA, 25 bp, Homo sapien
tgccaaacatcagtcttggccttgg

SEQ ID NO: 181802 - DNA, 25 bp, Homo sapien
cacttgcactggtgttcctttctca

SEQ ID NO: 181803 - DNA, 25 bp, Homo sapien
catatgaggggttcttgatgcttag

SEQ ID NO: 181804 - DNA, 25 bp, Homo sapien
ggccatatgaggggttcttgatgct

SEQ ID NO: 181805 - DNA, 25 bp, Homo sapien
gcacttgcactggtgttcctttctc

SEQ ID NO: 181806 - DNA, 25 bp, Homo sapien
cagtcgacttctaggttggatttcc

SEQ ID NO: 181807 - DNA, 25 bp, Homo sapien
cctaccaggagggaagcttcagaaa

SEQ ID NO: 181808 - DNA, 25 bp, Homo sapien
gagaaaacttattgccagggctgtc

SEQ ID NO: 181809 - DNA, 25 bp, Homo sapien
gaagacaaatctatactcacagcag

SEQ ID NO: 181810 - DNA, 25 bp, Homo sapien
cactttgatgcttccctctggcgga

SEQ ID NO: 181811 - DNA, 25 bp, Homo sapien
cctggtatcttatgcttcgagaagc

SEQ ID NO: 181812 - DNA, 25 bp, Homo sapien
aaggtgtcctgggtttatctgtgtc

SEQ ID NO: 181813 - DNA, 25 bp, Homo sapien
caaccacttcttagtctttggacca

SEQ ID NO: 181814 - DNA, 25 bp, Homo sapien
agtccaagatcaatcagcccacatc

SEQ ID NO: 181815 - DNA, 25 bp, Homo sapien
cccacatccgatgatggccttcatg

SEQ ID NO: 181816 - DNA, 25 bp, Homo sapien
aatcagcccacatccgatgatggcc

SEQ ID NO: 181817 - DNA, 25 bp, Homo sapien
gatcaatcagcccacatccgatgat

SEQ ID NO: 181818 - DNA, 25 bp, Homo sapien
taatacaggagaattctatattccc

SEQ ID NO: 181819 - DNA, 25 bp, Homo sapien
gggctaaatcctatccgatcctgac

SEQ ID NO: 181820 - DNA, 25 bp, Homo sapien
cttagattagctgcaatatttgggc

SEQ ID NO: 181821 - DNA, 25 bp, Homo sapien
tatttgggctaaatcctatccgatc

SEQ ID NO: 181822 - DNA, 25 bp, Homo sapien
gctacacactcaatgtcaaaaagca

SEQ ID NO: 181823 - DNA, 25 bp, Homo sapien
gttgctacacactcaatgtcaaaaa

SEQ ID NO: 181824 - DNA, 25 bp, Homo sapien
gggtgttgctacacactcaatgtca

SEQ ID NO: 181825 - DNA, 25 bp, Homo sapien
tcagggtgttgctacacactcaatg

SEQ ID NO: 181826 - DNA, 25 bp, Homo sapien
gagcccaggaaactccatcaatgtt

SEQ ID NO: 181827 - DNA, 25 bp, Homo sapien
catcaatgttacagctatgtgcctg

SEQ ID NO: 181828 - DNA, 25 bp, Homo sapien
caaacaccagtgtgtcttaagaatg

SEQ ID NO: 181829 - DNA, 25 bp, Homo sapien
tagatgcttcctcagggatcctagg

SEQ ID NO: 181830 - DNA, 25 bp, Homo sapien
gcatctcataactgacagctatgaa

SEQ ID NO: 181831 - DNA, 25 bp, Homo sapien
tgtgtgcatctcataactgacagct

SEQ ID NO: 181832 - DNA, 25 bp, Homo sapien
tcataactgacagctatgaatccca

SEQ ID NO: 181833 - DNA, 25 bp, Homo sapien
ctgttgtgtgcatctcataactgac

SEQ ID NO: 181834 - DNA, 25 bp, Homo sapien
tttggtggccttcccactgacatgt

SEQ ID NO: 181835 - DNA, 25 bp, Homo sapien
tttttggtggccttcccactgacat

SEQ ID NO: 181836 - DNA, 25 bp, Homo sapien
atcatttttggtggccttcccactg

SEQ ID NO: 181837 - DNA, 25 bp, Homo sapien
catttttggtggccttcccactgac

SEQ ID NO: 181838 - DNA, 25 bp, Homo sapien
tgattaagaaaatagtaagccagaa

SEQ ID NO: 181839 - DNA, 25 bp, Homo sapien
ttaagaaaatagtaagccagaaagc

SEQ ID NO: 181840 - DNA, 25 bp, Homo sapien
taagaaaatagtaagccagaaagcc

SEQ ID NO: 181841 - DNA, 25 bp, Homo sapien
ctttgattaagaaaatagtaagcca

SEQ ID NO: 181842 - DNA, 25 bp, Homo sapien
cattcacggtaggtattgaaagttt

SEQ ID NO: 181843 - DNA, 25 bp, Homo sapien
tttctgtgaaagtatgatagcatgc

SEQ ID NO: 181844 - DNA, 25 bp, Homo sapien
tgtgaaagtatgatagcatgcttca

SEQ ID NO: 181845 - DNA, 25 bp, Homo sapien
ttagcattcacggtaggtattgaaa

SEQ ID NO: 181846 - DNA, 25 bp, Homo sapien
tggaacagtcttctcctgaagcaaa

SEQ ID NO: 181847 - DNA, 25 bp, Homo sapien
tctcttttggagcaaagcttccctc

SEQ ID NO: 181848 - DNA, 25 bp, Homo sapien
taggtttctttgttctgccagtgcc

SEQ ID NO: 181849 - DNA, 25 bp, Homo sapien
tgccagtgccgagtctctttgagcc

SEQ ID NO: 181850 - DNA, 25 bp, Homo sapien
tcatgtcatcttcgtttttggcagt

SEQ ID NO: 181851 - DNA, 25 bp, Homo sapien
catcatgtcatcttcgtttttggca

SEQ ID NO: 181852 - DNA, 25 bp, Homo sapien
tgtcatcttcgtttttggcagtgtt

SEQ ID NO: 181853 - DNA, 25 bp, Homo sapien
catgtcatcttcgtttttggcagtg

SEQ ID NO: 181854 - DNA, 25 bp, Homo sapien
acaaactagacatcatagaggtact

SEQ ID NO: 181855 - DNA, 25 bp, Homo sapien
ctgccacaaactagacatcatagag

SEQ ID NO: 181856 - DNA, 25 bp, Homo sapien
aactgccacaaactagacatcatag

SEQ ID NO: 181857 - DNA, 25 bp, Homo sapien
gccacaaactagacatcatagaggt

SEQ ID NO: 181858 - DNA, 25 bp, Homo sapien
gctagctgaagcatatgcaaaactc

SEQ ID NO: 181859 - DNA, 25 bp, Homo sapien
ttctcaactgcacaaaagctagctg

SEQ ID NO: 181860 - DNA, 25 bp, Homo sapien
tctgttaccatatgtgctccactca

SEQ ID NO: 181861 - DNA, 25 bp, Homo sapien
cactgtgacagatgggtattgatat

SEQ ID NO: 181862 - DNA, 25 bp, Homo sapien
gctgagaagtaggtctgatttttgc

SEQ ID NO: 181863 - DNA, 25 bp, Homo sapien
tcagaagtacatcttcgtattttgc

SEQ ID NO: 181864 - DNA, 25 bp, Homo sapien
gaagtaggtctgatttttgctgcgt

SEQ ID NO: 181865 - DNA, 25 bp, Homo sapien
gctgcagactctgtcagaagtacat

SEQ ID NO: 181866 - DNA, 25 bp, Homo sapien
ttctataatagtgctcccactgaag

SEQ ID NO: 181867 - DNA, 25 bp, Homo sapien
cccactgaagccgactggggtgcat

SEQ ID NO: 181868 - DNA, 25 bp, Homo sapien
tagcctgggtgcatatattctataa

SEQ ID NO: 181869 - DNA, 25 bp, Homo sapien
ttagtggtgagttcctttcggatac

SEQ ID NO: 181870 - DNA, 25 bp, Homo sapien
atgggaaggtgtgccttttcttcac

SEQ ID NO: 181871 - DNA, 25 bp, Homo sapien
catgggaaggtgtgccttttcttca

SEQ ID NO: 181872 - DNA, 25 bp, Homo sapien
tcatgggaaggtgtgccttttcttc

SEQ ID NO: 181873 - DNA, 25 bp, Homo sapien
gggccccagtaatgtagcaggtcct

SEQ ID NO: 181874 - DNA, 25 bp, Homo sapien
ctttgtgggcctctgatttcaggcc

SEQ ID NO: 181875 - DNA, 25 bp, Homo sapien
gaagagagtacttccaggtttggag

SEQ ID NO: 181876 - DNA, 25 bp, Homo sapien
caggtcctgctttcggtaagtgggt

SEQ ID NO: 181877 - DNA, 25 bp, Homo sapien
ggtccagtgaaggtgagtctcgctc

SEQ ID NO: 181878 - DNA, 25 bp, Homo sapien
ggcaggtctaggaagccacacagga

SEQ ID NO: 181879 - DNA, 25 bp, Homo sapien
ttttccagccagactgggtccagtg

SEQ ID NO: 181880 - DNA, 25 bp, Homo sapien
catctgtcctgaagttgtccaaata

SEQ ID NO: 181881 - DNA, 25 bp, Homo sapien
ctaatttcagaaggcgggtggttct

SEQ ID NO: 181882 - DNA, 25 bp, Homo sapien
taaagctaatttcagaaggcgggtg

SEQ ID NO: 181883 - DNA, 25 bp, Homo sapien
agctaatttcagaaggcgggtggtt

SEQ ID NO: 181884 - DNA, 25 bp, Homo sapien
gagagactggcttctccaaatggac

SEQ ID NO: 181885 - DNA, 25 bp, Homo sapien
gcagaatgaagcatggtaagccata

SEQ ID NO: 181886 - DNA, 25 bp, Homo sapien
tcaactgaagaagcaaccctggtct

SEQ ID NO: 181887 - DNA, 25 bp, Homo sapien
cacctatgatgtcaggagagtggcc

SEQ ID NO: 181888 - DNA, 25 bp, Homo sapien
tccaaaaggatctaactggttcagt

SEQ ID NO: 181889 - DNA, 25 bp, Homo sapien
ctgtcattgtcccaatcttattatt

SEQ ID NO: 181890 - DNA, 25 bp, Homo sapien
tatccaattgggtttctactgtcat

SEQ ID NO: 181891 - DNA, 25 bp, Homo sapien
aatggaatcccctctatttttccat

SEQ ID NO: 181892 - DNA, 25 bp, Homo sapien
gaaggaaagggtggacattccagaa

SEQ ID NO: 181893 - DNA, 25 bp, Homo sapien
ggcagcatctacacggagagcacag

SEQ ID NO: 181894 - DNA, 25 bp, Homo sapien
tttctcaaatagcacactccctggg

SEQ ID NO: 181895 - DNA, 25 bp, Homo sapien
tccctgggagggtctatgacaacag

SEQ ID NO: 181896 - DNA, 25 bp, Homo sapien
tttcaattggttgggaaaggcagca

SEQ ID NO: 181897 - DNA, 25 bp, Homo sapien
gcttaaccatgtaatggcggctggc

SEQ ID NO: 181898 - DNA, 25 bp, Homo sapien
ctggtggcttaaccatgtaatggcg

SEQ ID NO: 181899 - DNA, 25 bp, Homo sapien
tacactagggatggggcttttagcc

SEQ ID NO: 181900 - DNA, 25 bp, Homo sapien
taaccatgtaatggcggctggctgt

SEQ ID NO: 181901 - DNA, 25 bp, Homo sapien
cccatgaaactgatcaggttgccaa

SEQ ID NO: 181902 - DNA, 25 bp, Homo sapien
cctctctatgcttcttgcttgtctt

SEQ ID NO: 181903 - DNA, 25 bp, Homo sapien
aagttcttcctgacatcaaagcagg

SEQ ID NO: 181904 - DNA, 25 bp, Homo sapien
gcttgtcttattctgctccccatga

SEQ ID NO: 181905 - DNA, 25 bp, Homo sapien
tgtgctgatttgagactgccatcga

SEQ ID NO: 181906 - DNA, 25 bp, Homo sapien
actgccatcgagtaagtagtgtttc

SEQ ID NO: 181907 - DNA, 25 bp, Homo sapien
tgagactgccatcgagtaagtagtg

SEQ ID NO: 181908 - DNA, 25 bp, Homo sapien
tgatttgagactgccatcgagtaag

SEQ ID NO: 181909 - DNA, 25 bp, Homo sapien
ataggtctacaggcttcctcttatc

SEQ ID NO: 181910 - DNA, 25 bp, Homo sapien
aggtctacaggcttcctcttatcag

SEQ ID NO: 181911 - DNA, 25 bp, Homo sapien
taggtctacaggcttcctcttatca

SEQ ID NO: 181912 - DNA, 25 bp, Homo sapien
aagcaaatgcaaactggtcctttgt

SEQ ID NO: 181913 - DNA, 25 bp, Homo sapien
gactgaggaggcaccatggttcaga

SEQ ID NO: 181914 - DNA, 25 bp, Homo sapien
tttttatgaaatggagactctacac

SEQ ID NO: 181915 - DNA, 25 bp, Homo sapien
tttcatttggtaccgagttaaagca

SEQ ID NO: 181916 - DNA, 25 bp, Homo sapien
tttatgagaaaccaagcagaaggca

SEQ ID NO: 181917 - DNA, 25 bp, Homo sapien
tgtgtatagccatgcttgccctgta

SEQ ID NO: 181918 - DNA, 25 bp, Homo sapien
tagaccagtggaatgacatcctgtc

SEQ ID NO: 181919 - DNA, 25 bp, Homo sapien
caaggaaacatagggcctgtaacgt

SEQ ID NO: 181920 - DNA, 25 bp, Homo sapien
taaaaagtctaggtgcaatgttgtg

SEQ ID NO: 181921 - DNA, 25 bp, Homo sapien
gaaagaaaagctcccagtgataaag

SEQ ID NO: 181922 - DNA, 25 bp, Homo sapien
tgtaagcaatgagtcgaaatgagcc

SEQ ID NO: 181923 - DNA, 25 bp, Homo sapien
gaagtgcagacgaaattggtcttca

SEQ ID NO: 181924 - DNA, 25 bp, Homo sapien
aattcgtattcagcgtgttcaccag

SEQ ID NO: 181925 - DNA, 25 bp, Homo sapien
agtgttgaggaaaagatcttggatc

SEQ ID NO: 181926 - DNA, 25 bp, Homo sapien
actgtgtctcagagcgcccattcaa

SEQ ID NO: 181927 - DNA, 25 bp, Homo sapien
gctgcagaactgaggtaattcgtat

SEQ ID NO: 181928 - DNA, 25 bp, Homo sapien
cataagatgtttggcccttgtatca

SEQ ID NO: 181929 - DNA, 25 bp, Homo sapien
caagtctataaatagttgcatttca

SEQ ID NO: 181930 - DNA, 25 bp, Homo sapien
ctccattttggatcagtacagctga

SEQ ID NO: 181931 - DNA, 25 bp, Homo sapien
gtacagctgaacagccattgttaca

SEQ ID NO: 181932 - DNA, 25 bp, Homo sapien
tacacagctacagagtatcgacgat

SEQ ID NO: 181933 - DNA, 25 bp, Homo sapien
gacgaaattcagacatggagcatca

SEQ ID NO: 181934 - DNA, 25 bp, Homo sapien
gcggcaatgctaaccactgattcca

SEQ ID NO: 181935 - DNA, 25 bp, Homo sapien
ccagatgaaatgcatgggctccaca

SEQ ID NO: 181936 - DNA, 25 bp, Homo sapien
ttttgtccattgaatttaagactgc

SEQ ID NO: 181937 - DNA, 25 bp, Homo sapien
tttttgtccattgaatttaagactg

SEQ ID NO: 181938 - DNA, 25 bp, Homo sapien
ggatgcccctatgagtggccttgag

SEQ ID NO: 181939 - DNA, 25 bp, Homo sapien
tccatcatgggagcaaacagctaaa

SEQ ID NO: 181940 - DNA, 25 bp, Homo sapien
ttctactggccaggcgatgggatca

SEQ ID NO: 181941 - DNA, 25 bp, Homo sapien
cagttggcactcaggagaggtacag

SEQ ID NO: 181942 - DNA, 25 bp, Homo sapien
tcactgtgccctaagcaggaagtaa

SEQ ID NO: 181943 - DNA, 25 bp, Homo sapien
gaaaactatacgcatatccctgtct

SEQ ID NO: 181944 - DNA, 25 bp, Homo sapien
ggcaggcttaaatcttacactagaa

SEQ ID NO: 181945 - DNA, 25 bp, Homo sapien
tacaggacagtgctttggcctcact

SEQ ID NO: 181946 - DNA, 25 bp, Homo sapien
ggagatctgtatccttgcaccagtc

SEQ ID NO: 181947 - DNA, 25 bp, Homo sapien
tgaggattggcagcccgaactcctt

SEQ ID NO: 181948 - DNA, 25 bp, Homo sapien
tccttgtgccaggtacgaattctcc

SEQ ID NO: 181949 - DNA, 25 bp, Homo sapien
agcctgtgttgcagctggtgttcca

SEQ ID NO: 181950 - DNA, 25 bp, Homo sapien
aaatatccattggttgcagcagtag

SEQ ID NO: 181951 - DNA, 25 bp, Homo sapien
caaaatatccattggttgcagcagt

SEQ ID NO: 181952 - DNA, 25 bp, Homo sapien
atatccattggttgcagcagtagca

SEQ ID NO: 181953 - DNA, 25 bp, Homo sapien
gagaagcagctccaaaatatccatt

SEQ ID NO: 181954 - DNA, 25 bp, Homo sapien
tccccgccgtaccaccagctgtgct

SEQ ID NO: 181955 - DNA, 25 bp, Homo sapien
ctaatgcaaatgtccccgccgtacc

SEQ ID NO: 181956 - DNA, 25 bp, Homo sapien
taatgcaaatgtccccgccgtacca

SEQ ID NO: 181957 - DNA, 25 bp, Homo sapien
atgtccccgccgtaccaccagctgt

SEQ ID NO: 181958 - DNA, 25 bp, Homo sapien
cataggtggccaataaattggctgc

SEQ ID NO: 181959 - DNA, 25 bp, Homo sapien
ggcataggtggccaataaattggct

SEQ ID NO: 181960 - DNA, 25 bp, Homo sapien
agccaaagcccctgttgctgctgct

SEQ ID NO: 181961 - DNA, 25 bp, Homo sapien
cttcactggcataggtggccaataa

SEQ ID NO: 181962 - DNA, 25 bp, Homo sapien
caacgccagcaaggttagcatgtcc

SEQ ID NO: 181963 - DNA, 25 bp, Homo sapien
cataactgatattgagacagctgcc

SEQ ID NO: 181964 - DNA, 25 bp, Homo sapien
gataaaactgctggaaaggctgcaa

SEQ ID NO: 181965 - DNA, 25 bp, Homo sapien
ggacctgtcacattggcataactga

SEQ ID NO: 181966 - DNA, 25 bp, Homo sapien
tgctgttgggaactataatctttac

SEQ ID NO: 181967 - DNA, 25 bp, Homo sapien
cccttccctattatcagacctgctg

SEQ ID NO: 181968 - DNA, 25 bp, Homo sapien
agccttcacagtagcacctcccttc

SEQ ID NO: 181969 - DNA, 25 bp, Homo sapien
gtgctgttgggaactataatcttta

SEQ ID NO: 181970 - DNA, 25 bp, Homo sapien
ggtgcttttatgtagttaatactca

SEQ ID NO: 181971 - DNA, 25 bp, Homo sapien
tgtcaaccacaatcaatgtttaatc

SEQ ID NO: 181972 - DNA, 25 bp, Homo sapien
gaagaattatatgacaatgtctatc

SEQ ID NO: 181973 - DNA, 25 bp, Homo sapien
aaatattgatgtggccccaagtttt

SEQ ID NO: 181974 - DNA, 25 bp, Homo sapien
tcacctagcgacattgtaaccgttg

SEQ ID NO: 181975 - DNA, 25 bp, Homo sapien
tacgtgccaggtataattccaaatg

SEQ ID NO: 181976 - DNA, 25 bp, Homo sapien
tactgctctgctagttgtacacaaa

SEQ ID NO: 181977 - DNA, 25 bp, Homo sapien
cataggttttacagtccagtggtat

SEQ ID NO: 181978 - DNA, 25 bp, Homo sapien
ccttctgccctaccacatgattaga

SEQ ID NO: 181979 - DNA, 25 bp, Homo sapien
taatcaggactattgacaagaaaca

SEQ ID NO: 181980 - DNA, 25 bp, Homo sapien
gatataagtcagtatagcaaagcta

SEQ ID NO: 181981 - DNA, 25 bp, Homo sapien
tattgacagtccattagttcttttc

SEQ ID NO: 181982 - DNA, 25 bp, Homo sapien
atgatatccaggagatattatgctt

SEQ ID NO: 181983 - DNA, 25 bp, Homo sapien
tcatgatatccaggagatattatgc

SEQ ID NO: 181984 - DNA, 25 bp, Homo sapien
catgatatccaggagatattatgct

SEQ ID NO: 181985 - DNA, 25 bp, Homo sapien
ttgtgtttgtcacgtttacatttgg

SEQ ID NO: 181986 - DNA, 25 bp, Homo sapien
tggttgtgtttgtcacgtttacatt

SEQ ID NO: 181987 - DNA, 25 bp, Homo sapien
tgtttgtcacgtttacatttggaaa

SEQ ID NO: 181988 - DNA, 25 bp, Homo sapien
gtggttgtgtttgtcacgtttacat

SEQ ID NO: 181989 - DNA, 25 bp, Homo sapien
caaattaaagtacagtatggctctg

SEQ ID NO: 181990 - DNA, 25 bp, Homo sapien
tgaagaatgacctacaaatagtacc

SEQ ID NO: 181991 - DNA, 25 bp, Homo sapien
tgcaaagtttgtcagcagagcaatg

SEQ ID NO: 181992 - DNA, 25 bp, Homo sapien
tcacctaaatgaagctcaactcaca

SEQ ID NO: 181993 - DNA, 25 bp, Homo sapien
ttctaggaagatacaataagggaga

SEQ ID NO: 181994 - DNA, 25 bp, Homo sapien
aaattctaggaagatacaataaggg

SEQ ID NO: 181995 - DNA, 25 bp, Homo sapien
ataaataggcttcagtgctccatta

SEQ ID NO: 181996 - DNA, 25 bp, Homo sapien
gctccattaggtagtcaaattttaa

SEQ ID NO: 181997 - DNA, 25 bp, Homo sapien
atggtgcatatatgtgaatgaacga

SEQ ID NO: 181998 - DNA, 25 bp, Homo sapien
tttctccagtttgcaggcaatcacc

SEQ ID NO: 181999 - DNA, 25 bp, Homo sapien
cagtttgcaggcaatcacccgtgaa

SEQ ID NO: 182000 - DNA, 25 bp, Homo sapien
ggcaatcacccgtgaaaagtatggt

SEQ ID NO: 182001 - DNA, 25 bp, Homo sapien
cacccgtgaaaagtatggtgtagat

SEQ ID NO: 182002 - DNA, 25 bp, Homo sapien
gattagctctggaggtggtcatggg

SEQ ID NO: 182003 - DNA, 25 bp, Homo sapien
tgattagctctggaggtggtcatgg

SEQ ID NO: 182004 - DNA, 25 bp, Homo sapien
ctgattagctctggaggtggtcatg

SEQ ID NO: 182005 - DNA, 25 bp, Homo sapien
aatttctagacaatatcaatgtgcc

SEQ ID NO: 182006 - DNA, 25 bp, Homo sapien
ccctaataattgtgatgctgtttct

SEQ ID NO: 182007 - DNA, 25 bp, Homo sapien
taaaatttaatatcgaatggctcag

SEQ ID NO: 182008 - DNA, 25 bp, Homo sapien
gaaaaagtgttctcataaacagcta

SEQ ID NO: 182009 - DNA, 25 bp, Homo sapien
tcttttgaagccatagtctgtgata

SEQ ID NO: 182010 - DNA, 25 bp, Homo sapien
gaacattggccctttatgacatatg

SEQ ID NO: 182011 - DNA, 25 bp, Homo sapien
taaaaagggcaatcactaagagtca

SEQ ID NO: 182012 - DNA, 25 bp, Homo sapien
aactgatcaatctaaggatgagacc

SEQ ID NO: 182013 - DNA, 25 bp, Homo sapien
agtgcttcaaccgttccctggatca

SEQ ID NO: 182014 - DNA, 25 bp, Homo sapien
gatgcgatctggattaacggtggtc

SEQ ID NO: 182015 - DNA, 25 bp, Homo sapien
tggatcaagcacactcgctcagtag

SEQ ID NO: 182016 - DNA, 25 bp, Homo sapien
tttctgcaatgaatccatgaactgc

SEQ ID NO: 182017 - DNA, 25 bp, Homo sapien
gaaaatattccacactttgcattaa

SEQ ID NO: 182018 - DNA, 25 bp, Homo sapien
cagaaaatattccacactttgcatt

SEQ ID NO: 182019 - DNA, 25 bp, Homo sapien
aaaattatgaaaaaggatgatatca

SEQ ID NO: 182020 - DNA, 25 bp, Homo sapien
ttttcagaaaatattccacactttg

SEQ ID NO: 182021 - DNA, 25 bp, Homo sapien
ggaatggcatctactagaatgctag

SEQ ID NO: 182022 - DNA, 25 bp, Homo sapien
caggaatggcatctactagaatgct

SEQ ID NO: 182023 - DNA, 25 bp, Homo sapien
tggcatctactagaatgctagtaac

SEQ ID NO: 182024 - DNA, 25 bp, Homo sapien
aatggcatctactagaatgctagta

SEQ ID NO: 182025 - DNA, 25 bp, Homo sapien
gatgaatagataagcaaactagccc

SEQ ID NO: 182026 - DNA, 25 bp, Homo sapien
taagcatacttcacactagacaatg

SEQ ID NO: 182027 - DNA, 25 bp, Homo sapien
tatacacacttaagcacacatagca

SEQ ID NO: 182028 - DNA, 25 bp, Homo sapien
gaatatgtctaaggtggcttgctaa

SEQ ID NO: 182029 - DNA, 25 bp, Homo sapien
gggtcagtcaactaaaggctgcagg

SEQ ID NO: 182030 - DNA, 25 bp, Homo sapien
ggccaaatacaactcaccacctgtt

SEQ ID NO: 182031 - DNA, 25 bp, Homo sapien
tatgagctaagcaaaactggtccta

SEQ ID NO: 182032 - DNA, 25 bp, Homo sapien
cacacatttctagttagcttcaaca

SEQ ID NO: 182033 - DNA, 25 bp, Homo sapien
cacatcccaatagtatatttctttc

SEQ ID NO: 182034 - DNA, 25 bp, Homo sapien
gtaaacccacatcccaatagtatat

SEQ ID NO: 182035 - DNA, 25 bp, Homo sapien
cttcaaagtaaacccacatcccaat

SEQ ID NO: 182036 - DNA, 25 bp, Homo sapien
tcaaagtaaacccacatcccaatag

SEQ ID NO: 182037 - DNA, 25 bp, Homo sapien
ggctactcaattaactcagactatg

SEQ ID NO: 182038 - DNA, 25 bp, Homo sapien
tacttatttatccttgcagcaacag

SEQ ID NO: 182039 - DNA, 25 bp, Homo sapien
taacatttggcctaaaggaactgac

SEQ ID NO: 182040 - DNA, 25 bp, Homo sapien
gagaacagtgtcaggtaggagccaa

SEQ ID NO: 182041 - DNA, 25 bp, Homo sapien
caaatctcttctcgtgaaattagta

SEQ ID NO: 182042 - DNA, 25 bp, Homo sapien
tagagttgcttcagaaggaaatacc

SEQ ID NO: 182043 - DNA, 25 bp, Homo sapien
tacatggctatatttgcatgactct

SEQ ID NO: 182044 - DNA, 25 bp, Homo sapien
ttggcaataaggaactattacgacg

SEQ ID NO: 182045 - DNA, 25 bp, Homo sapien
taatcactgtaatggcaagatatgc

SEQ ID NO: 182046 - DNA, 25 bp, Homo sapien
tagtggttcttaggttagtgatgcc

SEQ ID NO: 182047 - DNA, 25 bp, Homo sapien
gtacaacctgtgaactaaactgagt

SEQ ID NO: 182048 - DNA, 25 bp, Homo sapien
taagaataggtagagtagggccaga

SEQ ID NO: 182049 - DNA, 25 bp, Homo sapien
ccccaagggcataactcaagtaatc

SEQ ID NO: 182050 - DNA, 25 bp, Homo sapien
cacatcatagggagatacagagggc

SEQ ID NO: 182051 - DNA, 25 bp, Homo sapien
aaaagtagccaacatgacctagcag

SEQ ID NO: 182052 - DNA, 25 bp, Homo sapien
tgtggaacagggtattacaatctgg

SEQ ID NO: 182053 - DNA, 25 bp, Homo sapien
tctgaccatatctaaagatggaatc

SEQ ID NO: 182054 - DNA, 25 bp, Homo sapien
ttctgaccatatctaaagatggaat

SEQ ID NO: 182055 - DNA, 25 bp, Homo sapien
ctgaccatatctaaagatggaatct

SEQ ID NO: 182056 - DNA, 25 bp, Homo sapien
tttctgaccatatctaaagatggaa

SEQ ID NO: 182057 - DNA, 25 bp, Homo sapien
gccaggacattatcacaagaggtct

SEQ ID NO: 182058 - DNA, 25 bp, Homo sapien
tatctatttgagagggatataaaaa

SEQ ID NO: 182059 - DNA, 25 bp, Homo sapien
aaatatattgccatatagtttccta

SEQ ID NO: 182060 - DNA, 25 bp, Homo sapien
taaagcctctaatggaaagctagat

SEQ ID NO: 182061 - DNA, 25 bp, Homo sapien
gtaccaatcagaagaccttaaaata

SEQ ID NO: 182062 - DNA, 25 bp, Homo sapien
ggagagcagcactaagtttaactga

SEQ ID NO: 182063 - DNA, 25 bp, Homo sapien
ggagtgcatccatctatttgttatt

SEQ ID NO: 182064 - DNA, 25 bp, Homo sapien
tcttattgggctttccagtctaggg

SEQ ID NO: 182065 - DNA, 25 bp, Homo sapien
gtactcctagtcagtttcactctgc

SEQ ID NO: 182066 - DNA, 25 bp, Homo sapien
tgtacagcaccatgtacaatttctt

SEQ ID NO: 182067 - DNA, 25 bp, Homo sapien
gcacagtggagaaataccttctgta

SEQ ID NO: 182068 - DNA, 25 bp, Homo sapien
agtctatgtagtactcctagtcagt

SEQ ID NO: 182069 - DNA, 25 bp, Homo sapien
cagaagtggctgcaattcggtggtg

SEQ ID NO: 182070 - DNA, 25 bp, Homo sapien
cagttgctgcgttccacctcagaag

SEQ ID NO: 182071 - DNA, 25 bp, Homo sapien
gggaaagtgcgctgttaaacagttg

SEQ ID NO: 182072 - DNA, 25 bp, Homo sapien
ttcggtggtgggtgaagtgactcct

SEQ ID NO: 182073 - DNA, 25 bp, Homo sapien
ctagagtccacatatgaaatttaag

SEQ ID NO: 182074 - DNA, 25 bp, Homo sapien
agacatagaccagagattcccaatc

SEQ ID NO: 182075 - DNA, 25 bp, Homo sapien
ggaattctaggaaactgcatactaa

SEQ ID NO: 182076 - DNA, 25 bp, Homo sapien
gaaatgggccataagattttgttag

SEQ ID NO: 182077 - DNA, 25 bp, Homo sapien
gttgttaacatgtcagatcttccct

SEQ ID NO: 182078 - DNA, 25 bp, Homo sapien
cagttatcacttatgtcaaccagga

SEQ ID NO: 182079 - DNA, 25 bp, Homo sapien
tgctaccgtaatttgttatcacaca

SEQ ID NO: 182080 - DNA, 25 bp, Homo sapien
gagaagaaccacaatattccaatga

SEQ ID NO: 182081 - DNA, 25 bp, Homo sapien
gtgctgacagcacatcgtctagatt

SEQ ID NO: 182082 - DNA, 25 bp, Homo sapien
gctgacagcacatcgtctagattca

SEQ ID NO: 182083 - DNA, 25 bp, Homo sapien
gcacatcgtctagattcagaaatta

SEQ ID NO: 182084 - DNA, 25 bp, Homo sapien
gacagcacatcgtctagattcagaa

SEQ ID NO: 182085 - DNA, 25 bp, Homo sapien
aattgtggaaaaacggaagtcatca

SEQ ID NO: 182086 - DNA, 25 bp, Homo sapien
cggaagtcatcattataaggaaaac

SEQ ID NO: 182087 - DNA, 25 bp, Homo sapien
tgtggaaaaacggaagtcatcatta

SEQ ID NO: 182088 - DNA, 25 bp, Homo sapien
gaaaaacggaagtcatcattataag

SEQ ID NO: 182089 - DNA, 25 bp, Homo sapien
cacttacaaaggctggtgaagagca

SEQ ID NO: 182090 - DNA, 25 bp, Homo sapien
taagtgtcctcacgttctaaaaaga

SEQ ID NO: 182091 - DNA, 25 bp, Homo sapien
tggaagtattcctcccctaaggtgc

SEQ ID NO: 182092 - DNA, 25 bp, Homo sapien
gtttaacccactgttcacatacatg

SEQ ID NO: 182093 - DNA, 25 bp, Homo sapien
catacttggcacataactggttaaa

SEQ ID NO: 182094 - DNA, 25 bp, Homo sapien
tccatacttggcacataactggtta

SEQ ID NO: 182095 - DNA, 25 bp, Homo sapien
acataactggttaaacacaactcac

SEQ ID NO: 182096 - DNA, 25 bp, Homo sapien
aatctgtcattcactaactgtcctc

SEQ ID NO: 182097 - DNA, 25 bp, Homo sapien
ctcttttctgtatttctagttgccc

SEQ ID NO: 182098 - DNA, 25 bp, Homo sapien
ttttctgtatttctagttgccccat

SEQ ID NO: 182099 - DNA, 25 bp, Homo sapien
atttcttaacatctcttttctgtat

SEQ ID NO: 182100 - DNA, 25 bp, Homo sapien
tttcttaacatctcttttctgtatt

SEQ ID NO: 182101 - DNA, 25 bp, Homo sapien
aatccatccgccagactataagtgt

SEQ ID NO: 182102 - DNA, 25 bp, Homo sapien
tcctaagcagaaagccagaatccaa

SEQ ID NO: 182103 - DNA, 25 bp, Homo sapien
tatgcactagattgtctcttacctg

SEQ ID NO: 182104 - DNA, 25 bp, Homo sapien
aattatacttttgaacaactgggca

SEQ ID NO: 182105 - DNA, 25 bp, Homo sapien
cagacaagaaacactatgatatggt

SEQ ID NO: 182106 - DNA, 25 bp, Homo sapien
tgtcagctcctcttcgaagtcttct

SEQ ID NO: 182107 - DNA, 25 bp, Homo sapien
ttttagacccctgaatataacagaa

SEQ ID NO: 182108 - DNA, 25 bp, Homo sapien
taatacttaaaatccgtggcaaaga

SEQ ID NO: 182109 - DNA, 25 bp, Homo sapien
tttgctgttaaaaacctcaagacat

SEQ ID NO: 182110 - DNA, 25 bp, Homo sapien
gctgttaaaaacctcaagacattaa

SEQ ID NO: 182111 - DNA, 25 bp, Homo sapien
tgctgttaaaaacctcaagacatta

SEQ ID NO: 182112 - DNA, 25 bp, Homo sapien
ctgttaaaaacctcaagacattaat

SEQ ID NO: 182113 - DNA, 25 bp, Homo sapien
ttcctgtcaacaatgctatgacagg

SEQ ID NO: 182114 - DNA, 25 bp, Homo sapien
tcctgtcaacaatgctatgacaggc

SEQ ID NO: 182115 - DNA, 25 bp, Homo sapien
cctgtcaacaatgctatgacaggcc

SEQ ID NO: 182116 - DNA, 25 bp, Homo sapien
caagtgacaactaacctcttctctc

SEQ ID NO: 182117 - DNA, 25 bp, Homo sapien
tattccagtactgaacaagtgacaa

SEQ ID NO: 182118 - DNA, 25 bp, Homo sapien
tctctctagtcacttgctcccactg

SEQ ID NO: 182119 - DNA, 25 bp, Homo sapien
gtagtattccagtactgaacaagtg

SEQ ID NO: 182120 - DNA, 25 bp, Homo sapien
taagtgtcccttacgtacatctgag

SEQ ID NO: 182121 - DNA, 25 bp, Homo sapien
taaagcagtattggttccctcagca

SEQ ID NO: 182122 - DNA, 25 bp, Homo sapien
tgtattaaaatgtcccgagtgtgtc

SEQ ID NO: 182123 - DNA, 25 bp, Homo sapien
gattggctatgaaaaagaagtcctc

SEQ ID NO: 182124 - DNA, 25 bp, Homo sapien
tcaaacaatctcttcaccattgcac

SEQ ID NO: 182125 - DNA, 25 bp, Homo sapien
acaatctcttcaccattgcacctac

SEQ ID NO: 182126 - DNA, 25 bp, Homo sapien
aaacaatctcttcaccattgcacct

SEQ ID NO: 182127 - DNA, 25 bp, Homo sapien
aacaatctcttcaccattgcaccta

SEQ ID NO: 182128 - DNA, 25 bp, Homo sapien
tcccaattatagatccagcagcata

SEQ ID NO: 182129 - DNA, 25 bp, Homo sapien
tttgcaactgaacaattgtctgtcc

SEQ ID NO: 182130 - DNA, 25 bp, Homo sapien
gcagcataactaggtatgagaacct

SEQ ID NO: 182131 - DNA, 25 bp, Homo sapien
tgagaacctttagaaaatactggcc

SEQ ID NO: 182132 - DNA, 25 bp, Homo sapien
gcttccagcggccttttccgcgagt

SEQ ID NO: 182133 - DNA, 25 bp, Homo sapien
cctcttggtgctgccggcttcaggg

SEQ ID NO: 182134 - DNA, 25 bp, Homo sapien
cgcccgtattggtcctcttggtgct

SEQ ID NO: 182135 - DNA, 25 bp, Homo sapien
tccggcgggtccaggtctatgggaa

SEQ ID NO: 182136 - DNA, 25 bp, Homo sapien
ccgctgctaccgggagaaggttctc

SEQ ID NO: 182137 - DNA, 25 bp, Homo sapien
gggtgtgagagacggagggtgaaag

SEQ ID NO: 182138 - DNA, 25 bp, Homo sapien
gagggggtgtgagagacggagggtg

SEQ ID NO: 182139 - DNA, 25 bp, Homo sapien
tttttaatcggatcaatataaatct

SEQ ID NO: 182140 - DNA, 25 bp, Homo sapien
tacaactccactagatccttggata

SEQ ID NO: 182141 - DNA, 25 bp, Homo sapien
catggagcataaggagtaatggtaa

SEQ ID NO: 182142 - DNA, 25 bp, Homo sapien
tggtaaagacacaattcccattaag

SEQ ID NO: 182143 - DNA, 25 bp, Homo sapien
cagcccatatcctcatccttatgtt

SEQ ID NO: 182144 - DNA, 25 bp, Homo sapien
tcagtcaaagccacgggtataggta

SEQ ID NO: 182145 - DNA, 25 bp, Homo sapien
caaagccacgggtataggtatgttt

SEQ ID NO: 182146 - DNA, 25 bp, Homo sapien
gtcaaagccacgggtataggtatgt

SEQ ID NO: 182147 - DNA, 25 bp, Homo sapien
cagtcaaagccacgggtataggtat

SEQ ID NO: 182148 - DNA, 25 bp, Homo sapien
tctctgttgtgacaggattattttt

SEQ ID NO: 182149 - DNA, 25 bp, Homo sapien
ctctgttgtgacaggattatttttg

SEQ ID NO: 182150 - DNA, 25 bp, Homo sapien
aaaagaggctatgatggctgctgaa

SEQ ID NO: 182151 - DNA, 25 bp, Homo sapien
gctctccccattcagtggagttttc

SEQ ID NO: 182152 - DNA, 25 bp, Homo sapien
ttcctttctgtgctaaaagaggcta

SEQ ID NO: 182153 - DNA, 25 bp, Homo sapien
tctgtgctaaaagaggctatgatgg

SEQ ID NO: 182154 - DNA, 25 bp, Homo sapien
caggtacaggcattatttggatttc

SEQ ID NO: 182155 - DNA, 25 bp, Homo sapien
ccagtatttgcatgcgccctttttg

SEQ ID NO: 182156 - DNA, 25 bp, Homo sapien
caagtcaccgtcaccatatttaaga

SEQ ID NO: 182157 - DNA, 25 bp, Homo sapien
taaccatagcatacagtcaaaacca

SEQ ID NO: 182158 - DNA, 25 bp, Homo sapien
gactgtgaggcctagctgacagcac

SEQ ID NO: 182159 - DNA, 25 bp, Homo sapien
tacttgttgccactccaagggccat

SEQ ID NO: 182160 - DNA, 25 bp, Homo sapien
tgatgcccaggtgcttgtttgatgc

SEQ ID NO: 182161 - DNA, 25 bp, Homo sapien
ggaagaacaagctctcgaaaactac

SEQ ID NO: 182162 - DNA, 25 bp, Homo sapien
tagaggtttctaagcctttggaaga

SEQ ID NO: 182163 - DNA, 25 bp, Homo sapien
gattctctcagagggagtctgtctt

SEQ ID NO: 182164 - DNA, 25 bp, Homo sapien
cattggacgactgcctacaagtagc

SEQ ID NO: 182165 - DNA, 25 bp, Homo sapien
ccaagccagctatcagatgaattca

SEQ ID NO: 182166 - DNA, 25 bp, Homo sapien
gatgaattcacaacagtatcctttg

SEQ ID NO: 182167 - DNA, 25 bp, Homo sapien
aagagacaccttggcacatgctggc

SEQ ID NO: 182168 - DNA, 25 bp, Homo sapien
aaataatgtggataggtataaacaa

SEQ ID NO: 182169 - DNA, 25 bp, Homo sapien
aaaataatgtggataggtataaaca

SEQ ID NO: 182170 - DNA, 25 bp, Homo sapien
ctcttgggcttggaaagagacacct

SEQ ID NO: 182171 - DNA, 25 bp, Homo sapien
agtgcccagttgaccagagttgctt

SEQ ID NO: 182172 - DNA, 25 bp, Homo sapien
cccagttgaccagagttgctttaac

SEQ ID NO: 182173 - DNA, 25 bp, Homo sapien
ttagtgcccagttgaccagagttgc

SEQ ID NO: 182174 - DNA, 25 bp, Homo sapien
tgcccagttgaccagagttgcttta

SEQ ID NO: 182175 - DNA, 25 bp, Homo sapien
tggttcttctctaatcgggtcactc

SEQ ID NO: 182176 - DNA, 25 bp, Homo sapien
gtctggttcttctctaatcgggtca

SEQ ID NO: 182177 - DNA, 25 bp, Homo sapien
ttctctaatcgggtcactctccttc

SEQ ID NO: 182178 - DNA, 25 bp, Homo sapien
ttcttctctaatcgggtcactctcc

SEQ ID NO: 182179 - DNA, 25 bp, Homo sapien
atttgctctttacaagtaatagaca

SEQ ID NO: 182180 - DNA, 25 bp, Homo sapien
agatttgctctttacaagtaataga

SEQ ID NO: 182181 - DNA, 25 bp, Homo sapien
gatttgctctttacaagtaatagac

SEQ ID NO: 182182 - DNA, 25 bp, Homo sapien
ttgtcccctttctgagagttttcca

SEQ ID NO: 182183 - DNA, 25 bp, Homo sapien
gccagctttcactgttgctgcctgc

SEQ ID NO: 182184 - DNA, 25 bp, Homo sapien
cagctttcactgttgctgcctgcat

SEQ ID NO: 182185 - DNA, 25 bp, Homo sapien
ttttctgccagctttcactgttgct

SEQ ID NO: 182186 - DNA, 25 bp, Homo sapien
ttctgccagctttcactgttgctgc

SEQ ID NO: 182187 - DNA, 25 bp, Homo sapien
tacaatcctattgataaagtccact

SEQ ID NO: 182188 - DNA, 25 bp, Homo sapien
tatgtgatactgctatgttggaggt

SEQ ID NO: 182189 - DNA, 25 bp, Homo sapien
tctgtagtacttgctatgtcctaga

SEQ ID NO: 182190 - DNA, 25 bp, Homo sapien
gcacttcttgtagtgaaggaaatgg

SEQ ID NO: 182191 - DNA, 25 bp, Homo sapien
tatttggactcaataggcagaaacc

SEQ ID NO: 182192 - DNA, 25 bp, Homo sapien
catgaaggcttcagtgtatatatag

SEQ ID NO: 182193 - DNA, 25 bp, Homo sapien
cagaaacctattacgggattcgata

SEQ ID NO: 182194 - DNA, 25 bp, Homo sapien
gaatttctcagaatggactctatat

SEQ ID NO: 182195 - DNA, 25 bp, Homo sapien
accaagctggcaattctcatcttga

SEQ ID NO: 182196 - DNA, 25 bp, Homo sapien
gagtaagcttgaactgtcagaacat

SEQ ID NO: 182197 - DNA, 25 bp, Homo sapien
tgctcatagcaatcaatgacaactg

SEQ ID NO: 182198 - DNA, 25 bp, Homo sapien
gatctgtcattaagcttgagtaagc

SEQ ID NO: 182199 - DNA, 25 bp, Homo sapien
taactccgggtaactctgatctctg

SEQ ID NO: 182200 - DNA, 25 bp, Homo sapien
aactccgggtaactctgatctctgc

SEQ ID NO: 182201 - DNA, 25 bp, Homo sapien
cggtaactccgggtaactctgatct

SEQ ID NO: 182202 - DNA, 25 bp, Homo sapien
ctgccggtaactccgggtaactctg

SEQ ID NO: 182203 - DNA, 25 bp, Homo sapien
tgcagagtccatctgaatacacaga

SEQ ID NO: 182204 - DNA, 25 bp, Homo sapien
caatttacaggatagcactgcagag

SEQ ID NO: 182205 - DNA, 25 bp, Homo sapien
caaggtcctgcacaatagcagactt

SEQ ID NO: 182206 - DNA, 25 bp, Homo sapien
agacttgacacatctatttcctggg

SEQ ID NO: 182207 - DNA, 25 bp, Homo sapien
cagtgactttggagtgtctcatcct

SEQ ID NO: 182208 - DNA, 25 bp, Homo sapien
tcacacttggcaatagctgcagttc

SEQ ID NO: 182209 - DNA, 25 bp, Homo sapien
ttggagtgtctcatcctcaaacccc

SEQ ID NO: 182210 - DNA, 25 bp, Homo sapien
ttggcaatagctgcagttctacctt

SEQ ID NO: 182211 - DNA, 25 bp, Homo sapien
tattcttggtattcacagcctaaac

SEQ ID NO: 182212 - DNA, 25 bp, Homo sapien
cagatttcttaggtcataacattat

SEQ ID NO: 182213 - DNA, 25 bp, Homo sapien
gtcatgcagatggaatacactttgc

SEQ ID NO: 182214 - DNA, 25 bp, Homo sapien
ttcacagcctaaactgtcatgcaga

SEQ ID NO: 182215 - DNA, 25 bp, Homo sapien
ctcctcaggtcaaagtcaaagtaag

SEQ ID NO: 182216 - DNA, 25 bp, Homo sapien
gaattaactcccgaagcaattttga

SEQ ID NO: 182217 - DNA, 25 bp, Homo sapien
tcaaagtaaggatgaattaactccc

SEQ ID NO: 182218 - DNA, 25 bp, Homo sapien
gatattgcagttgttggaccaggtg

SEQ ID NO: 182219 - DNA, 25 bp, Homo sapien
tcctcattaatcacaatttgacaag

SEQ ID NO: 182220 - DNA, 25 bp, Homo sapien
tgttgatatccagtaaatcctcatt

SEQ ID NO: 182221 - DNA, 25 bp, Homo sapien
cgaagactcatatgttgatatccag

SEQ ID NO: 182222 - DNA, 25 bp, Homo sapien
gtatttcaggaaggaactaggtata

SEQ ID NO: 182223 - DNA, 25 bp, Homo sapien
aagtggttctcaggtataagacaac

SEQ ID NO: 182224 - DNA, 25 bp, Homo sapien
caggtataagacaacaagatttgag

SEQ ID NO: 182225 - DNA, 25 bp, Homo sapien
cttttagattcgaagtggttctcag

SEQ ID NO: 182226 - DNA, 25 bp, Homo sapien
taagacaacaagatttgagaaaaac

SEQ ID NO: 182227 - DNA, 25 bp, Homo sapien
ttccttaaggaagtgcacgtgaaag

SEQ ID NO: 182228 - DNA, 25 bp, Homo sapien
gatgaagaaagtgcagaggctcttt

SEQ ID NO: 182229 - DNA, 25 bp, Homo sapien
accacgtctctgcagtttactaggc

SEQ ID NO: 182230 - DNA, 25 bp, Homo sapien
gactgtgaagtgcagaggctcctca

SEQ ID NO: 182231 - DNA, 25 bp, Homo sapien
gagaaattcccattgtagtaggcaa

SEQ ID NO: 182232 - DNA, 25 bp, Homo sapien
gaaattcccattgtagtaggcaacc

SEQ ID NO: 182233 - DNA, 25 bp, Homo sapien
gtaggcaacccccttctcgttgtga

SEQ ID NO: 182234 - DNA, 25 bp, Homo sapien
aggcaacccccttctcgttgtgaat

SEQ ID NO: 182235 - DNA, 25 bp, Homo sapien
tattttgttcacaatggtttcttag

SEQ ID NO: 182236 - DNA, 25 bp, Homo sapien
gttgatcatatctgtatcaaggaga

SEQ ID NO: 182237 - DNA, 25 bp, Homo sapien
tatctgtatcaaggagagcactgcc

SEQ ID NO: 182238 - DNA, 25 bp, Homo sapien
gtttcttagtaaaaagttgctgatg

SEQ ID NO: 182239 - DNA, 25 bp, Homo sapien
ttgcccttgcgatagcttgctgacg

SEQ ID NO: 182240 - DNA, 25 bp, Homo sapien
ccttgcgatagcttgctgacgatag

SEQ ID NO: 182241 - DNA, 25 bp, Homo sapien
agcttgctgacgatagtttgctgag

SEQ ID NO: 182242 - DNA, 25 bp, Homo sapien
cgatagcttgctgacgatagtttgc

SEQ ID NO: 182243 - DNA, 25 bp, Homo sapien
ggccagcaagccacttgtagtttag

SEQ ID NO: 182244 - DNA, 25 bp, Homo sapien
tggtctacactgagtggctctgtct

SEQ ID NO: 182245 - DNA, 25 bp, Homo sapien
gctgatctaggatggtctacactga

SEQ ID NO: 182246 - DNA, 25 bp, Homo sapien
tgtctcagaatgtgggttcactgga

SEQ ID NO: 182247 - DNA, 25 bp, Homo sapien
ctcggccctcagtaattgtaattgt

SEQ ID NO: 182248 - DNA, 25 bp, Homo sapien
agtaattgtaattgtgtggggccct

SEQ ID NO: 182249 - DNA, 25 bp, Homo sapien
gccctgagagtccagtttcctgaag

SEQ ID NO: 182250 - DNA, 25 bp, Homo sapien
ccctcagtaattgtaattgtgtggg

SEQ ID NO: 182251 - DNA, 25 bp, Homo sapien
tatgttgcagacagctaccctgagg

SEQ ID NO: 182252 - DNA, 25 bp, Homo sapien
tatcccaggcacttaattaagtggc

SEQ ID NO: 182253 - DNA, 25 bp, Homo sapien
ggaacatctacccagtaagccttgc

SEQ ID NO: 182254 - DNA, 25 bp, Homo sapien
cagctgagcatttagtggaacatct

SEQ ID NO: 182255 - DNA, 25 bp, Homo sapien
taaatgttagcttctggcaggtgac

SEQ ID NO: 182256 - DNA, 25 bp, Homo sapien
cgctttgttatagtttggccaggac

SEQ ID NO: 182257 - DNA, 25 bp, Homo sapien
tgtaatgactgtaaacgtcggtggg

SEQ ID NO: 182258 - DNA, 25 bp, Homo sapien
gagaacaattagtttacctggctgg

SEQ ID NO: 182259 - DNA, 25 bp, Homo sapien
aagctgctgggagaacattgctgcg

SEQ ID NO: 182260 - DNA, 25 bp, Homo sapien
aattcttggcagtgctattccttgg

SEQ ID NO: 182261 - DNA, 25 bp, Homo sapien
ccaatgcagaatgacgtcaagctgc

SEQ ID NO: 182262 - DNA, 25 bp, Homo sapien
cattgctgcgcagttcctgtcagag

SEQ ID NO: 182263 - DNA, 25 bp, Homo sapien
cttagtcgtattggacaatatttca

SEQ ID NO: 182264 - DNA, 25 bp, Homo sapien
caaaattcttagtcgtattggacaa

SEQ ID NO: 182265 - DNA, 25 bp, Homo sapien
tctgcaaaattcttagtcgtattgg

SEQ ID NO: 182266 - DNA, 25 bp, Homo sapien
tcgtattggacaatatttcagtctt

SEQ ID NO: 182267 - DNA, 25 bp, Homo sapien
gaaatgcaaggagctgttctgatct

SEQ ID NO: 182268 - DNA, 25 bp, Homo sapien
gcacctgcatttgataggattactc

SEQ ID NO: 182269 - DNA, 25 bp, Homo sapien
accctcaattctaggtgtgctgaca

SEQ ID NO: 182270 - DNA, 25 bp, Homo sapien
ctggctctgaaatcaatcgtcttct

SEQ ID NO: 182271 - DNA, 25 bp, Homo sapien
gaagcccaggttggctgcctacaat

SEQ ID NO: 182272 - DNA, 25 bp, Homo sapien
caccatatgcccctgactggagaga

SEQ ID NO: 182273 - DNA, 25 bp, Homo sapien
cccagaaggcggctgacagtattcc

SEQ ID NO: 182274 - DNA, 25 bp, Homo sapien
ggctgcctacaatcagagtccacat

SEQ ID NO: 182275 - DNA, 25 bp, Homo sapien
tatattttagctgatttacattcat

SEQ ID NO: 182276 - DNA, 25 bp, Homo sapien
ttatattttagctgatttacattca

SEQ ID NO: 182277 - DNA, 25 bp, Homo sapien
tggaggcctgatatcagtttgtcac

SEQ ID NO: 182278 - DNA, 25 bp, Homo sapien
cagcatctttgccacatgtttggag

SEQ ID NO: 182279 - DNA, 25 bp, Homo sapien
gatatcagtttgtcaccatgtactg

SEQ ID NO: 182280 - DNA, 25 bp, Homo sapien
cacatgtttggaggcctgatatcag

SEQ ID NO: 182281 - DNA, 25 bp, Homo sapien
cccttattgcactggagcccttgag

SEQ ID NO: 182282 - DNA, 25 bp, Homo sapien
gggaacattgatccccttattgcac

SEQ ID NO: 182283 - DNA, 25 bp, Homo sapien
tgtccaacagctttgggaacattga

SEQ ID NO: 182284 - DNA, 25 bp, Homo sapien
cccttgagtcatttgcagagatttg

SEQ ID NO: 182285 - DNA, 25 bp, Homo sapien
tcattttgattagctcgttccctta

SEQ ID NO: 182286 - DNA, 25 bp, Homo sapien
cattttgattagctcgttcccttaa

SEQ ID NO: 182287 - DNA, 25 bp, Homo sapien
cttgccctgcacttcttcattttga

SEQ ID NO: 182288 - DNA, 25 bp, Homo sapien
ccccgctaggtggtggaatacaaag

SEQ ID NO: 182289 - DNA, 25 bp, Homo sapien
aatcgcttgtcttccttgaggtccg

SEQ ID NO: 182290 - DNA, 25 bp, Homo sapien
taacgaggctaaaccatggagcagc

SEQ ID NO: 182291 - DNA, 25 bp, Homo sapien
taaggttcacagcaagggctattcc

SEQ ID NO: 182292 - DNA, 25 bp, Homo sapien
tccacggtgggaaattgcactatga

SEQ ID NO: 182293 - DNA, 25 bp, Homo sapien
tattttgctgcaggccaaagacggc

SEQ ID NO: 182294 - DNA, 25 bp, Homo sapien
gcactatgaggagagtaaaacacac

SEQ ID NO: 182295 - DNA, 25 bp, Homo sapien
gccattttgacatgggagcagccca

SEQ ID NO: 182296 - DNA, 25 bp, Homo sapien
tgcatatgtttacatgcaatgacag

SEQ ID NO: 182297 - DNA, 25 bp, Homo sapien
gagtttaggactgtaggtacacata

SEQ ID NO: 182298 - DNA, 25 bp, Homo sapien
tctgtggggagtttaggactgtagg

SEQ ID NO: 182299 - DNA, 25 bp, Homo sapien
cacatatttgagaatcttttacata

SEQ ID NO: 182300 - DNA, 25 bp, Homo sapien
ttctggttggaatgcttcttctgtt

SEQ ID NO: 182301 - DNA, 25 bp, Homo sapien
tagagacgctgctcttttctggttg

SEQ ID NO: 182302 - DNA, 25 bp, Homo sapien
cttcctccaaggtttagctctggca

SEQ ID NO: 182303 - DNA, 25 bp, Homo sapien
ctgttttcacttgatcttctcttcc

SEQ ID NO: 182304 - DNA, 25 bp, Homo sapien
gatactgtaatacctgaatagtgat

SEQ ID NO: 182305 - DNA, 25 bp, Homo sapien
gagatactgtaatacctgaatagtg

SEQ ID NO: 182306 - DNA, 25 bp, Homo sapien
tgtaatacctgaatagtgatggtca

SEQ ID NO: 182307 - DNA, 25 bp, Homo sapien
ctgaagagatactgtaatacctgaa

SEQ ID NO: 182308 - DNA, 25 bp, Homo sapien
tctttcttcaatggccaataccctt

SEQ ID NO: 182309 - DNA, 25 bp, Homo sapien
tgctctgagtggccgtcagaaaaat

SEQ ID NO: 182310 - DNA, 25 bp, Homo sapien
tgagtggccgtcagaaaaattgtga

SEQ ID NO: 182311 - DNA, 25 bp, Homo sapien
ctctttcttcaatggccaataccct

SEQ ID NO: 182312 - DNA, 25 bp, Homo sapien
cacctgcgtgacatgcctagagccc

SEQ ID NO: 182313 - DNA, 25 bp, Homo sapien
atttctccccacctgcgtgacatgc

SEQ ID NO: 182314 - DNA, 25 bp, Homo sapien
cgtgacatgcctagagccccagtgc

SEQ ID NO: 182315 - DNA, 25 bp, Homo sapien
ccccacctgcgtgacatgcctagag

SEQ ID NO: 182316 - DNA, 25 bp, Homo sapien
atgttggctgcaaatacatcaaagg

SEQ ID NO: 182317 - DNA, 25 bp, Homo sapien
cattgcttttaggatgttggctgca

SEQ ID NO: 182318 - DNA, 25 bp, Homo sapien
ctttccattgcttttaggatgttgg

SEQ ID NO: 182319 - DNA, 25 bp, Homo sapien
cttttaggatgttggctgcaaatac

SEQ ID NO: 182320 - DNA, 25 bp, Homo sapien
acaggtgcaaatgagagaggataca

SEQ ID NO: 182321 - DNA, 25 bp, Homo sapien
aaaacaggtgcaaatgagagaggat

SEQ ID NO: 182322 - DNA, 25 bp, Homo sapien
cctgcttatagccaagaatacctga

SEQ ID NO: 182323 - DNA, 25 bp, Homo sapien
tatagccaagaatacctgatagaaa

SEQ ID NO: 182324 - DNA, 25 bp, Homo sapien
tataccatggcaaaaattctctgag

SEQ ID NO: 182325 - DNA, 25 bp, Homo sapien
ataccatggcaaaaattctctgaga

SEQ ID NO: 182326 - DNA, 25 bp, Homo sapien
attataccatggcaaaaattctctg

SEQ ID NO: 182327 - DNA, 25 bp, Homo sapien
aaattataccatggcaaaaattctc

SEQ ID NO: 182328 - DNA, 25 bp, Homo sapien
taaactggcggtgttgatctacagc

SEQ ID NO: 182329 - DNA, 25 bp, Homo sapien
atggccatgtgcacaagcctgatgg

SEQ ID NO: 182330 - DNA, 25 bp, Homo sapien
gatctacagctgtatacagaccaca

SEQ ID NO: 182331 - DNA, 25 bp, Homo sapien
gatggatgcctcattctgtgaataa

SEQ ID NO: 182332 - DNA, 25 bp, Homo sapien
ttggtatgaccgaccagacccagca

SEQ ID NO: 182333 - DNA, 25 bp, Homo sapien
gaagtcggcttgcaataaagggaag

SEQ ID NO: 182334 - DNA, 25 bp, Homo sapien
gacccagcaaccatcgatcttcatt

SEQ ID NO: 182335 - DNA, 25 bp, Homo sapien
gcaacaactttaagattggactgaa

SEQ ID NO: 182336 - DNA, 25 bp, Homo sapien
tctacaattatcacatttgcatact

SEQ ID NO: 182337 - DNA, 25 bp, Homo sapien
tttctacaattatcacatttgcata

SEQ ID NO: 182338 - DNA, 25 bp, Homo sapien
catttgcatactgctgtcttgtatt

SEQ ID NO: 182339 - DNA, 25 bp, Homo sapien
actgctgtcttgtattgctattgtc

SEQ ID NO: 182340 - DNA, 25 bp, Homo sapien
aaactatcaaccatggtcattgttg

SEQ ID NO: 182341 - DNA, 25 bp, Homo sapien
actatcaaccatggtcattgttgga

SEQ ID NO: 182342 - DNA, 25 bp, Homo sapien
ttagaaaactatcaaccatggtcat

SEQ ID NO: 182343 - DNA, 25 bp, Homo sapien
cacttagaaaactatcaaccatggt

SEQ ID NO: 182344 - DNA, 25 bp, Homo sapien
aacctcttagcatttgtgcaaaagg

SEQ ID NO: 182345 - DNA, 25 bp, Homo sapien
tagtgcatagtggagccaacaaacc

SEQ ID NO: 182346 - DNA, 25 bp, Homo sapien
tgttttcctccataacagggtgaat

SEQ ID NO: 182347 - DNA, 25 bp, Homo sapien
ggcaaatgtccagagcatgatcaca

SEQ ID NO: 182348 - DNA, 25 bp, Homo sapien
tattattgaatctacccgtacaggg

SEQ ID NO: 182349 - DNA, 25 bp, Homo sapien
gggtaatccttatcagtccacacag

SEQ ID NO: 182350 - DNA, 25 bp, Homo sapien
gcaacaacagttgtaaatcctcagt

SEQ ID NO: 182351 - DNA, 25 bp, Homo sapien
gtggtcctctttggaactcaatggt

SEQ ID NO: 182352 - DNA, 25 bp, Homo sapien
tgccctctgtgcatggttttagcct

SEQ ID NO: 182353 - DNA, 25 bp, Homo sapien
tcagaggcatgtgtgagtccagagc

SEQ ID NO: 182354 - DNA, 25 bp, Homo sapien
catggttttagccttgcaaacctga

SEQ ID NO: 182355 - DNA, 25 bp, Homo sapien
agaactgctatctctgtgccctctg

SEQ ID NO: 182356 - DNA, 25 bp, Homo sapien
taacctaattatgaagtgaccagat

SEQ ID NO: 182357 - DNA, 25 bp, Homo sapien
gcctccaagtgtgacgtctgatgtt

SEQ ID NO: 182358 - DNA, 25 bp, Homo sapien
agagttgctatgaatctgctgcagc

SEQ ID NO: 182359 - DNA, 25 bp, Homo sapien
gaaaattgcacggaataaccatcaa

SEQ ID NO: 182360 - DNA, 25 bp, Homo sapien
ttgacatttgttaacagatggcttc

SEQ ID NO: 182361 - DNA, 25 bp, Homo sapien
tgcatgcagctggagaaaaaccaac

SEQ ID NO: 182362 - DNA, 25 bp, Homo sapien
ttctttatcatcaacttgacatttg

SEQ ID NO: 182363 - DNA, 25 bp, Homo sapien
gatttgtctgtgatggctcttttac

SEQ ID NO: 182364 - DNA, 25 bp, Homo sapien
tgtaagctgctagcttgacgtaagg

SEQ ID NO: 182365 - DNA, 25 bp, Homo sapien
ctgtgtaagctgctagcttgacgta

SEQ ID NO: 182366 - DNA, 25 bp, Homo sapien
tagataattgtctgtgtaagctgct

SEQ ID NO: 182367 - DNA, 25 bp, Homo sapien
agctgctagcttgacgtaaggccat

SEQ ID NO: 182368 - DNA, 25 bp, Homo sapien
cacaaccgtttcttaactggaaatg

SEQ ID NO: 182369 - DNA, 25 bp, Homo sapien
cacaggtaggtgtgagacagttgca

SEQ ID NO: 182370 - DNA, 25 bp, Homo sapien
cacttttaataagggagacatgaga

SEQ ID NO: 182371 - DNA, 25 bp, Homo sapien
gaaatgctcaactatcagatatagg

SEQ ID NO: 182372 - DNA, 25 bp, Homo sapien
tctggcagatccctcagagcgttgt

SEQ ID NO: 182373 - DNA, 25 bp, Homo sapien
tgtcacatgttaactgggctccctg

SEQ ID NO: 182374 - DNA, 25 bp, Homo sapien
tccaataagcactggagccaaacag

SEQ ID NO: 182375 - DNA, 25 bp, Homo sapien
gacctcagaacttgtgccaagagtg

SEQ ID NO: 182376 - DNA, 25 bp, Homo sapien
aagaagactgagaccccaaattagg

SEQ ID NO: 182377 - DNA, 25 bp, Homo sapien
tactccatacggtaaggcctcgagg

SEQ ID NO: 182378 - DNA, 25 bp, Homo sapien
tcaggagaccagaaaataggaagcg

SEQ ID NO: 182379 - DNA, 25 bp, Homo sapien
tttagcgtcagatccccatatggca

SEQ ID NO: 182380 - DNA, 25 bp, Homo sapien
catctgaagggcattgaaggtgatt

SEQ ID NO: 182381 - DNA, 25 bp, Homo sapien
gcattgaaggtgattaattttgcca

SEQ ID NO: 182382 - DNA, 25 bp, Homo sapien
tctgaagggcattgaaggtgattaa

SEQ ID NO: 182383 - DNA, 25 bp, Homo sapien
gaagggcattgaaggtgattaattt

SEQ ID NO: 182384 - DNA, 25 bp, Homo sapien
taatgtcctagtcaaagtgccccca

SEQ ID NO: 182385 - DNA, 25 bp, Homo sapien
gatgaagagcggacttatttttaat

SEQ ID NO: 182386 - DNA, 25 bp, Homo sapien
cttggaagtggtacaaggcttcttc

SEQ ID NO: 182387 - DNA, 25 bp, Homo sapien
ccagcctaacctttctcttatgctt

SEQ ID NO: 182388 - DNA, 25 bp, Homo sapien
taaagatcggtcttggctgatcagg

SEQ ID NO: 182389 - DNA, 25 bp, Homo sapien
gctgatcaggaggaattccttcctc

SEQ ID NO: 182390 - DNA, 25 bp, Homo sapien
cagtaaagatcggtcttggctgatc

SEQ ID NO: 182391 - DNA, 25 bp, Homo sapien
tgatcaggaggaattccttcctcat

SEQ ID NO: 182392 - DNA, 25 bp, Homo sapien
tgtattggagggttcaaccttacag

SEQ ID NO: 182393 - DNA, 25 bp, Homo sapien
ttcaaccttacaggtcttccctgta

SEQ ID NO: 182394 - DNA, 25 bp, Homo sapien
caaccttacaggtcttccctgtaag

SEQ ID NO: 182395 - DNA, 25 bp, Homo sapien
tctattgtattggagggttcaacct

SEQ ID NO: 182396 - DNA, 25 bp, Homo sapien
gaaagctgatgctataacagtagcg

SEQ ID NO: 182397 - DNA, 25 bp, Homo sapien
taatacaaccctggtacctgcctga

SEQ ID NO: 182398 - DNA, 25 bp, Homo sapien
caatattaagtgtaggctcatggag

SEQ ID NO: 182399 - DNA, 25 bp, Homo sapien
tagggcttccaatattaaaactctg

SEQ ID NO: 182400 - DNA, 25 bp, Homo sapien
taaccaagcgtaactcattaaatct

SEQ ID NO: 182401 - DNA, 25 bp, Homo sapien
taggtaggaacatctcctgaatttt

SEQ ID NO: 182402 - DNA, 25 bp, Homo sapien
taaatctattcatttggatagctgg

SEQ ID NO: 182403 - DNA, 25 bp, Homo sapien
cttagttttctgtcataaccaagcg

SEQ ID NO: 182404 - DNA, 25 bp, Homo sapien
aagatagagccatactggtctggtt

SEQ ID NO: 182405 - DNA, 25 bp, Homo sapien
tcatgaagatagagccatactggtc

SEQ ID NO: 182406 - DNA, 25 bp, Homo sapien
gatagagccatactggtctggttta

SEQ ID NO: 182407 - DNA, 25 bp, Homo sapien
tagagccatactggtctggtttatt

SEQ ID NO: 182408 - DNA, 25 bp, Homo sapien
gttcagccaacattccatcatcctt

SEQ ID NO: 182409 - DNA, 25 bp, Homo sapien
aggtgacctgatggaaactgtggat

SEQ ID NO: 182410 - DNA, 25 bp, Homo sapien
ctgtggattggttgttcagccaaca

SEQ ID NO: 182411 - DNA, 25 bp, Homo sapien
ccttatggagaactagcttcacaga

SEQ ID NO: 182412 - DNA, 25 bp, Homo sapien
tactccgcagatgtgaaaacttgca

SEQ ID NO: 182413 - DNA, 25 bp, Homo sapien
tattggagccccgtactccgcagat

SEQ ID NO: 182414 - DNA, 25 bp, Homo sapien
tgagaggaatattggagccccgtac

SEQ ID NO: 182415 - DNA, 25 bp, Homo sapien
tcgagttgagaggaatattggagcc

SEQ ID NO: 182416 - DNA, 25 bp, Homo sapien
gctttctcattttgatattgacccc

SEQ ID NO: 182417 - DNA, 25 bp, Homo sapien
tttctcattttgatattgacccctc

SEQ ID NO: 182418 - DNA, 25 bp, Homo sapien
ctctctgtggttgctttctcatttt

SEQ ID NO: 182419 - DNA, 25 bp, Homo sapien
tctcattttgatattgacccctcat

SEQ ID NO: 182420 - DNA, 25 bp, Homo sapien
gatgtaatgagagtacagaagatgc

SEQ ID NO: 182421 - DNA, 25 bp, Homo sapien
ctgatgtaatgagagtacagaagat

SEQ ID NO: 182422 - DNA, 25 bp, Homo sapien
gtaatgagagtacagaagatgctca

SEQ ID NO: 182423 - DNA, 25 bp, Homo sapien
tgtaatgagagtacagaagatgctc

SEQ ID NO: 182424 - DNA, 25 bp, Homo sapien
cttttaccctctctttctctcaact

SEQ ID NO: 182425 - DNA, 25 bp, Homo sapien
tttaccctctctttctctcaacttc

SEQ ID NO: 182426 - DNA, 25 bp, Homo sapien
ggccttttaccctctctttctctca

SEQ ID NO: 182427 - DNA, 25 bp, Homo sapien
taccctctctttctctcaacttcat

SEQ ID NO: 182428 - DNA, 25 bp, Homo sapien
cctgtgctactgttatggagaagac

SEQ ID NO: 182429 - DNA, 25 bp, Homo sapien
tgccgtatgcagtcaggttaaacaa

SEQ ID NO: 182430 - DNA, 25 bp, Homo sapien
cagacaattcaaaaaacacggaggt

SEQ ID NO: 182431 - DNA, 25 bp, Homo sapien
cacggaggtaacacatttagacatg

SEQ ID NO: 182432 - DNA, 25 bp, Homo sapien
tagggaccacaatggttctcatcac

SEQ ID NO: 182433 - DNA, 25 bp, Homo sapien
tgtgaggtcttcagtagtgaaagct

SEQ ID NO: 182434 - DNA, 25 bp, Homo sapien
agttctcagcaaaggcttctgagtt

SEQ ID NO: 182435 - DNA, 25 bp, Homo sapien
tactgtaagagctgttgaagttctc

SEQ ID NO: 182436 - DNA, 25 bp, Homo sapien
cacaattcagcaagttctttggcac

SEQ ID NO: 182437 - DNA, 25 bp, Homo sapien
taagccatcagatagaagtaagcca

SEQ ID NO: 182438 - DNA, 25 bp, Homo sapien
gaccttcacagaattggctgtactg

SEQ ID NO: 182439 - DNA, 25 bp, Homo sapien
tcacaaaacacgagagcacaattca

SEQ ID NO: 182440 - DNA, 25 bp, Homo sapien
ccctctgcattggttatcttggaaa

SEQ ID NO: 182441 - DNA, 25 bp, Homo sapien
caggtgttccagatacagtattctt

SEQ ID NO: 182442 - DNA, 25 bp, Homo sapien
cagagcaggtctagaggtaatgaac

SEQ ID NO: 182443 - DNA, 25 bp, Homo sapien
catctggtcccttctagcttataag

SEQ ID NO: 182444 - DNA, 25 bp, Homo sapien
gacaaaacagttatcgggcctagag

SEQ ID NO: 182445 - DNA, 25 bp, Homo sapien
gactcgtatacatgaaaccgctttg

SEQ ID NO: 182446 - DNA, 25 bp, Homo sapien
tcatgcccatcagtctttagagtag

SEQ ID NO: 182447 - DNA, 25 bp, Homo sapien
ggaaatgtacccaacttgactgaaa

SEQ ID NO: 182448 - DNA, 25 bp, Homo sapien
caatcagaattgtgtaggctggacc

SEQ ID NO: 182449 - DNA, 25 bp, Homo sapien
aaagactctagtgaagctctctcag

SEQ ID NO: 182450 - DNA, 25 bp, Homo sapien
tgtttgagaggtatgagcaggaacc

SEQ ID NO: 182451 - DNA, 25 bp, Homo sapien
cttatctgtagctcatctgtgtgca

SEQ ID NO: 182452 - DNA, 25 bp, Homo sapien
taagataccaactccacattctgtg

SEQ ID NO: 182453 - DNA, 25 bp, Homo sapien
taggatatgtaatgacttaagatac

SEQ ID NO: 182454 - DNA, 25 bp, Homo sapien
aaatgtatggacacctatagcctga

SEQ ID NO: 182455 - DNA, 25 bp, Homo sapien
cacattctgtggtaagagatgaaga

SEQ ID NO: 182456 - DNA, 25 bp, Homo sapien
tattagttaagtcaagatcatcttt

SEQ ID NO: 182457 - DNA, 25 bp, Homo sapien
gaaatattagttaagtcaagatcat

SEQ ID NO: 182458 - DNA, 25 bp, Homo sapien
aatattagttaagtcaagatcatct

SEQ ID NO: 182459 - DNA, 25 bp, Homo sapien
aaatattagttaagtcaagatcatc

SEQ ID NO: 182460 - DNA, 25 bp, Homo sapien
attatttctgctgaacaacaactct

SEQ ID NO: 182461 - DNA, 25 bp, Homo sapien
cactgacttctagaagaaccttgcc

SEQ ID NO: 182462 - DNA, 25 bp, Homo sapien
tacatcattgcaccctgaaagtttc

SEQ ID NO: 182463 - DNA, 25 bp, Homo sapien
gatgattcacaaatttccggtactt

SEQ ID NO: 182464 - DNA, 25 bp, Homo sapien
tgtcaatactcttcctgttttaggg

SEQ ID NO: 182465 - DNA, 25 bp, Homo sapien
cacccaggattagaatagtaccaga

SEQ ID NO: 182466 - DNA, 25 bp, Homo sapien
gtaactggtctaataaacttcaaca

SEQ ID NO: 182467 - DNA, 25 bp, Homo sapien
gcaattggtacataaaaacttcaag

SEQ ID NO: 182468 - DNA, 25 bp, Homo sapien
gacacataacattcagcaattggta

SEQ ID NO: 182469 - DNA, 25 bp, Homo sapien
actcaatttccatacattggtttgg

SEQ ID NO: 182470 - DNA, 25 bp, Homo sapien
cattactcaatttccatacattggt

SEQ ID NO: 182471 - DNA, 25 bp, Homo sapien
ctcaatttccatacattggtttggt

SEQ ID NO: 182472 - DNA, 25 bp, Homo sapien
ttactcaatttccatacattggttt

SEQ ID NO: 182473 - DNA, 25 bp, Homo sapien
tgtgattgtttatgacccatgtgta

SEQ ID NO: 182474 - DNA, 25 bp, Homo sapien
ttttatttgtcttatgctcaaagtc

SEQ ID NO: 182475 - DNA, 25 bp, Homo sapien
tacatcattagatttgcaaaactac

SEQ ID NO: 182476 - DNA, 25 bp, Homo sapien
gctcaaagtcttattcttatactac

SEQ ID NO: 182477 - DNA, 25 bp, Homo sapien
gaagatcctggctacactgagggaa

SEQ ID NO: 182478 - DNA, 25 bp, Homo sapien
gagttgttatagagtcagggtgccc

SEQ ID NO: 182479 - DNA, 25 bp, Homo sapien
tattctcccgtgtaggcctcttgaa

SEQ ID NO: 182480 - DNA, 25 bp, Homo sapien
aacctctctggaaacgtaatcacgg

SEQ ID NO: 182481 - DNA, 25 bp, Homo sapien
tgaagaatagggactcctctccatc

SEQ ID NO: 182482 - DNA, 25 bp, Homo sapien
gaatagctggtacaaatcctactga

SEQ ID NO: 182483 - DNA, 25 bp, Homo sapien
caaaaatgccaaggactagatggat

SEQ ID NO: 182484 - DNA, 25 bp, Homo sapien
cacagccgaattctagtagatattg

SEQ ID NO: 182485 - DNA, 25 bp, Homo sapien
ataaaactatcgttcgggcgtggtg

SEQ ID NO: 182486 - DNA, 25 bp, Homo sapien
aactatcgttcgggcgtggtgcctc

SEQ ID NO: 182487 - DNA, 25 bp, Homo sapien
aaactatcgttcgggcgtggtgcct

SEQ ID NO: 182488 - DNA, 25 bp, Homo sapien
caatttccacctccgagtagaaact

SEQ ID NO: 182489 - DNA, 25 bp, Homo sapien
gatttctatactttcatttctacca

SEQ ID NO: 182490 - DNA, 25 bp, Homo sapien
gttcttacagtcaagtctcttattt

SEQ ID NO: 182491 - DNA, 25 bp, Homo sapien
gaattctgatctcaagtattttcaa

SEQ ID NO: 182492 - DNA, 25 bp, Homo sapien
tacccaaacttgtaaaggatatgca

SEQ ID NO: 182493 - DNA, 25 bp, Homo sapien
gcctgcagtaaccaagctgtgtgaa

SEQ ID NO: 182494 - DNA, 25 bp, Homo sapien
tatcctcctgaaatcgcatctagga

SEQ ID NO: 182495 - DNA, 25 bp, Homo sapien
gatgcagctcttgtttactaataag

SEQ ID NO: 182496 - DNA, 25 bp, Homo sapien
gaagctaaagggaacgattatatag

SEQ ID NO: 182497 - DNA, 25 bp, Homo sapien
gaagctaaagtcatctatgtctatc

SEQ ID NO: 182498 - DNA, 25 bp, Homo sapien
taaagggaacgattatataggaagc

SEQ ID NO: 182499 - DNA, 25 bp, Homo sapien
acgattatataggaagctaaagtca

SEQ ID NO: 182500 - DNA, 25 bp, Homo sapien
tgctcgctctccgtgcctcctcggc

SEQ ID NO: 182501 - DNA, 25 bp, Homo sapien
agcgtgcaggcagcccttgctcgct

SEQ ID NO: 182502 - DNA, 25 bp, Homo sapien
gcccttgctcgctctccgtgcctcc

SEQ ID NO: 182503 - DNA, 25 bp, Homo sapien
aggcagcccttgctcgctctccgtg

SEQ ID NO: 182504 - DNA, 25 bp, Homo sapien
taaaacatgggcgagagattgggct

SEQ ID NO: 182505 - DNA, 25 bp, Homo sapien
aactgtaacatagcaatcctgcctg

SEQ ID NO: 182506 - DNA, 25 bp, Homo sapien
cctaaaattggacttggcaaggaca

SEQ ID NO: 182507 - DNA, 25 bp, Homo sapien
tatcaagggtgagaaggttctccac

SEQ ID NO: 182508 - DNA, 25 bp, Homo sapien
taggacatgtgataaccgaacagag

SEQ ID NO: 182509 - DNA, 25 bp, Homo sapien
ctaggacatgtgataaccgaacaga

SEQ ID NO: 182510 - DNA, 25 bp, Homo sapien
ctctataggtagaatactataaaca

SEQ ID NO: 182511 - DNA, 25 bp, Homo sapien
gagatatgctggctatggtatcaca

SEQ ID NO: 182512 - DNA, 25 bp, Homo sapien
ggctatggtatcacacacattcaca

SEQ ID NO: 182513 - DNA, 25 bp, Homo sapien
aaaggagatatgctggctatggtat

SEQ ID NO: 182514 - DNA, 25 bp, Homo sapien
tatgctggctatggtatcacacaca

SEQ ID NO: 182515 - DNA, 25 bp, Homo sapien
ttcaaaggggagcaattcagcaccc

SEQ ID NO: 182516 - DNA, 25 bp, Homo sapien
gggagcaattcagcaccccagggcc

SEQ ID NO: 182517 - DNA, 25 bp, Homo sapien
aaaggggagcaattcagcaccccag

SEQ ID NO: 182518 - DNA, 25 bp, Homo sapien
tgaggagattcaccacagagttctt

SEQ ID NO: 182519 - DNA, 25 bp, Homo sapien
caagggcttgtataccctgtttagg

SEQ ID NO: 182520 - DNA, 25 bp, Homo sapien
tgagttgtgggtctgccacaaagca

SEQ ID NO: 182521 - DNA, 25 bp, Homo sapien
attttggaatgagttgtgggtctgc

SEQ ID NO: 182522 - DNA, 25 bp, Homo sapien
tcttcaagggcttgtataccctgtt

SEQ ID NO: 182523 - DNA, 25 bp, Homo sapien
tcagcctcagctaaactctggcagc

SEQ ID NO: 182524 - DNA, 25 bp, Homo sapien
tgcagaagtacaagtactgctgcag

SEQ ID NO: 182525 - DNA, 25 bp, Homo sapien
gagcttcccgggttctgcagaagta

SEQ ID NO: 182526 - DNA, 25 bp, Homo sapien
ctattgcatagttgtacagagcttc

SEQ ID NO: 182527 - DNA, 25 bp, Homo sapien
ttttcgtccaacagccagatgatga

SEQ ID NO: 182528 - DNA, 25 bp, Homo sapien
gatggagtctaacctctgaattcct

SEQ ID NO: 182529 - DNA, 25 bp, Homo sapien
tctctcttttcgtccaacagccaga

SEQ ID NO: 182530 - DNA, 25 bp, Homo sapien
gatgatctgactccttccaaagatg

SEQ ID NO: 182531 - DNA, 25 bp, Homo sapien
tgagattccaaactggcaacagacg

SEQ ID NO: 182532 - DNA, 25 bp, Homo sapien
ctttgaccagtaagcattgcacatt

SEQ ID NO: 182533 - DNA, 25 bp, Homo sapien
atctgacccttctaagcatgagcgg

SEQ ID NO: 182534 - DNA, 25 bp, Homo sapien
gcatgagcgggtcatatttccttgg

SEQ ID NO: 182535 - DNA, 25 bp, Homo sapien
tctcctggttagcagtgataattct

SEQ ID NO: 182536 - DNA, 25 bp, Homo sapien
ctcatattctacgtcactttttggg

SEQ ID NO: 182537 - DNA, 25 bp, Homo sapien
cctggttagcagtgataattctctc

SEQ ID NO: 182538 - DNA, 25 bp, Homo sapien
attctctcatattctacgtcacttt

SEQ ID NO: 182539 - DNA, 25 bp, Homo sapien
ttttcacggcttatagcatctatta

SEQ ID NO: 182540 - DNA, 25 bp, Homo sapien
cagcagtgacttttcacggcttata

SEQ ID NO: 182541 - DNA, 25 bp, Homo sapien
agccagcagtgacttttcacggctt

SEQ ID NO: 182542 - DNA, 25 bp, Homo sapien
gacttttcacggcttatagcatcta

SEQ ID NO: 182543 - DNA, 25 bp, Homo sapien
ctcccttcattcttttcattcccat

SEQ ID NO: 182544 - DNA, 25 bp, Homo sapien
ccttcattcttttcattcccatcca

SEQ ID NO: 182545 - DNA, 25 bp, Homo sapien
cttcattcttttcattcccatccat

SEQ ID NO: 182546 - DNA, 25 bp, Homo sapien
ctccactcccttcattcttttcatt

SEQ ID NO: 182547 - DNA, 25 bp, Homo sapien
tcttttatgtctaccagttttcagc

SEQ ID NO: 182548 - DNA, 25 bp, Homo sapien
cagggtctcttttatgtctaccagt

SEQ ID NO: 182549 - DNA, 25 bp, Homo sapien
gtcagggtctcttttatgtctacca

SEQ ID NO: 182550 - DNA, 25 bp, Homo sapien
tatgtctaccagttttcagcatcat

SEQ ID NO: 182551 - DNA, 25 bp, Homo sapien
tcaaattgtgatgcaagcagtaatg

SEQ ID NO: 182552 - DNA, 25 bp, Homo sapien
tcaacctctgtaatcatgttagcca

SEQ ID NO: 182553 - DNA, 25 bp, Homo sapien
gaacccagactaatacaattctaag

SEQ ID NO: 182554 - DNA, 25 bp, Homo sapien
ctacctaactaatctgagtttggga

SEQ ID NO: 182555 - DNA, 25 bp, Homo sapien
tcattcgagtttaaagttagcctgt

SEQ ID NO: 182556 - DNA, 25 bp, Homo sapien
cattcgagtttaaagttagcctgtt

SEQ ID NO: 182557 - DNA, 25 bp, Homo sapien
gctgggacccacaagaataaattca

SEQ ID NO: 182558 - DNA, 25 bp, Homo sapien
tttatctgtctacttaagaagtgac

SEQ ID NO: 182559 - DNA, 25 bp, Homo sapien
caaattgttatgatatagctgggac

SEQ ID NO: 182560 - DNA, 25 bp, Homo sapien
aagaagtgactactgtggactaggc

SEQ ID NO: 182561 - DNA, 25 bp, Homo sapien
tcacccatttctgggagataaattg

SEQ ID NO: 182562 - DNA, 25 bp, Homo sapien
cttcacccatttctgggagataaat

SEQ ID NO: 182563 - DNA, 25 bp, Homo sapien
gctcttcacccatttctgggagata

SEQ ID NO: 182564 - DNA, 25 bp, Homo sapien
tcttcacccatttctgggagataaa

SEQ ID NO: 182565 - DNA, 25 bp, Homo sapien
tctgttggttcccagggtgaagtag

SEQ ID NO: 182566 - DNA, 25 bp, Homo sapien
cagcatcactgcctgaaaggattct

SEQ ID NO: 182567 - DNA, 25 bp, Homo sapien
cactgcctgaaaggattctaaaata

SEQ ID NO: 182568 - DNA, 25 bp, Homo sapien
catcactgcctgaaaggattctaaa

SEQ ID NO: 182569 - DNA, 25 bp, Homo sapien
ttctatacatctccataaagtcttc

SEQ ID NO: 182570 - DNA, 25 bp, Homo sapien
ctttctatacatctccataaagtct

SEQ ID NO: 182571 - DNA, 25 bp, Homo sapien
aaagtcttcctgatacgcattctgc

SEQ ID NO: 182572 - DNA, 25 bp, Homo sapien
ttcctgatacgcattctgcctcttc

SEQ ID NO: 182573 - DNA, 25 bp, Homo sapien
cagacacagcggcatacagaggctt

SEQ ID NO: 182574 - DNA, 25 bp, Homo sapien
gcggatattcactagttcacacaga

SEQ ID NO: 182575 - DNA, 25 bp, Homo sapien
caccggcaacttttctgagtgacta

SEQ ID NO: 182576 - DNA, 25 bp, Homo sapien
tctaccttagatatgcactcaccgg

SEQ ID NO: 182577 - DNA, 25 bp, Homo sapien
tttagttttgcaccagaactggaag

SEQ ID NO: 182578 - DNA, 25 bp, Homo sapien
aggttttagttttgcaccagaactg

SEQ ID NO: 182579 - DNA, 25 bp, Homo sapien
accatccacagatcagcaccacaga

SEQ ID NO: 182580 - DNA, 25 bp, Homo sapien
aataccatccacagatcagcaccac

SEQ ID NO: 182581 - DNA, 25 bp, Homo sapien
taggcctccaaactgctagcattac

SEQ ID NO: 182582 - DNA, 25 bp, Homo sapien
ggtatgagccacaacacatgaccag

SEQ ID NO: 182583 - DNA, 25 bp, Homo sapien
gcatcaccacgccacgctgtgtttt

SEQ ID NO: 182584 - DNA, 25 bp, Homo sapien
ccacgccacgctgtgttttgcagaa

SEQ ID NO: 182585 - DNA, 25 bp, Homo sapien
gaacatggaagctggaaatttacat

SEQ ID NO: 182586 - DNA, 25 bp, Homo sapien
tataatagggatacgacatttcacc

SEQ ID NO: 182587 - DNA, 25 bp, Homo sapien
ggttctctgccacgacaatgtacaa

SEQ ID NO: 182588 - DNA, 25 bp, Homo sapien
cagaatactggtcaaaatttactga

SEQ ID NO: 182589 - DNA, 25 bp, Homo sapien
gccacatgtcatgggccaaactaat

SEQ ID NO: 182590 - DNA, 25 bp, Homo sapien
acatgtcatgggccaaactaatact

SEQ ID NO: 182591 - DNA, 25 bp, Homo sapien
ccaaactaatactccttgtggataa

SEQ ID NO: 182592 - DNA, 25 bp, Homo sapien
caaactaatactccttgtggataaa

SEQ ID NO: 182593 - DNA, 25 bp, Homo sapien
tagtggattacttctgagcttgcaa

SEQ ID NO: 182594 - DNA, 25 bp, Homo sapien
catgagtctggacggagtagctcca

SEQ ID NO: 182595 - DNA, 25 bp, Homo sapien
cactgaagagctgttagatcctggg

SEQ ID NO: 182596 - DNA, 25 bp, Homo sapien
tattggaaggcgtctgacaacctcc

SEQ ID NO: 182597 - DNA, 25 bp, Homo sapien
tcagcttgtgaaagctgacattctc

SEQ ID NO: 182598 - DNA, 25 bp, Homo sapien
gcttgtgaaagctgacattctcact

SEQ ID NO: 182599 - DNA, 25 bp, Homo sapien
gtgaaagctgacattctcactcaaa

SEQ ID NO: 182600 - DNA, 25 bp, Homo sapien
ctcatcagcttgtgaaagctgacat

SEQ ID NO: 182601 - DNA, 25 bp, Homo sapien
attttctcaatggagtttaaatggc

SEQ ID NO: 182602 - DNA, 25 bp, Homo sapien
ttttctcaatggagtttaaatggct

SEQ ID NO: 182603 - DNA, 25 bp, Homo sapien
cattgttgttgcaaggtctacgctc

SEQ ID NO: 182604 - DNA, 25 bp, Homo sapien
ggagtaaaatatcggcaagccaatt

SEQ ID NO: 182605 - DNA, 25 bp, Homo sapien
taaggtctctactgaaggagtaaaa

SEQ ID NO: 182606 - DNA, 25 bp, Homo sapien
cagaaggttgttgtaaggtctctac

SEQ ID NO: 182607 - DNA, 25 bp, Homo sapien
gaaggattttggtggtatatacctg

SEQ ID NO: 182608 - DNA, 25 bp, Homo sapien
gattttggtggtatatacctgatca

SEQ ID NO: 182609 - DNA, 25 bp, Homo sapien
aaggattttggtggtatatacctga

SEQ ID NO: 182610 - DNA, 25 bp, Homo sapien
caagaaggattttggtggtatatac

SEQ ID NO: 182611 - DNA, 25 bp, Homo sapien
tagccttggttactctaggtaccca

SEQ ID NO: 182612 - DNA, 25 bp, Homo sapien
atccccttagaaaccttgtagatag

SEQ ID NO: 182613 - DNA, 25 bp, Homo sapien
ttctcattggaatcactttcacgca

SEQ ID NO: 182614 - DNA, 25 bp, Homo sapien
ttccctgatttactgaaagacaccg

SEQ ID NO: 182615 - DNA, 25 bp, Homo sapien
ccaccaccacaaatttgcagtggag

SEQ ID NO: 182616 - DNA, 25 bp, Homo sapien
tcagagggctaatcctcgtcctggg

SEQ ID NO: 182617 - DNA, 25 bp, Homo sapien
agagggctaatcctcgtcctgggaa

SEQ ID NO: 182618 - DNA, 25 bp, Homo sapien
accacaaatttgcagtggagcttcc

SEQ ID NO: 182619 - DNA, 25 bp, Homo sapien
tctttccacacaccgagagactgct

SEQ ID NO: 182620 - DNA, 25 bp, Homo sapien
cccagtttaacatatatggagtctt

SEQ ID NO: 182621 - DNA, 25 bp, Homo sapien
cattaactcagcaagttttctttcc

SEQ ID NO: 182622 - DNA, 25 bp, Homo sapien
cgagagactgctatacccagtttaa

SEQ ID NO: 182623 - DNA, 25 bp, Homo sapien
ccaaacaggttacagagatggcaaa

SEQ ID NO: 182624 - DNA, 25 bp, Homo sapien
tattgagacagtttaccaaacaggt

SEQ ID NO: 182625 - DNA, 25 bp, Homo sapien
gagaaattgcaccattcttacattg

SEQ ID NO: 182626 - DNA, 25 bp, Homo sapien
acaccaaatgttcgcaaaaattctg

SEQ ID NO: 182627 - DNA, 25 bp, Homo sapien
tgcagtttcttagcgttgatggtct

SEQ ID NO: 182628 - DNA, 25 bp, Homo sapien
ctgatgcagtttcttagcgttgatg

SEQ ID NO: 182629 - DNA, 25 bp, Homo sapien
ggccttctaaacttcctgtgtgagt

SEQ ID NO: 182630 - DNA, 25 bp, Homo sapien
gaacattgctttagaaagctctttg

SEQ ID NO: 182631 - DNA, 25 bp, Homo sapien
cctgtgtgagtgatactagcaaaat

SEQ ID NO: 182632 - DNA, 25 bp, Homo sapien
gattctggcgaagtactatgggtta

SEQ ID NO: 182633 - DNA, 25 bp, Homo sapien
tttgagtgcagaggccacagcattc

SEQ ID NO: 182634 - DNA, 25 bp, Homo sapien
ctttgagtgcagaggccacagcatt

SEQ ID NO: 182635 - DNA, 25 bp, Homo sapien
tgagtgcagaggccacagcattcat

SEQ ID NO: 182636 - DNA, 25 bp, Homo sapien
ttgagtgcagaggccacagcattca

SEQ ID NO: 182637 - DNA, 25 bp, Homo sapien
tcaaggtggccggtttggccataag

SEQ ID NO: 182638 - DNA, 25 bp, Homo sapien
agaggactcttcaagatatcgagac

SEQ ID NO: 182639 - DNA, 25 bp, Homo sapien
tgtgttaatcgcagttttaaaggtg

SEQ ID NO: 182640 - DNA, 25 bp, Homo sapien
gggctgtcctgctacctagccacat

SEQ ID NO: 182641 - DNA, 25 bp, Homo sapien
tgatactgtccaccacctgaacaca

SEQ ID NO: 182642 - DNA, 25 bp, Homo sapien
cagctttagcctgatactgtccacc

SEQ ID NO: 182643 - DNA, 25 bp, Homo sapien
tttagcctgatactgtccaccacct

SEQ ID NO: 182644 - DNA, 25 bp, Homo sapien
tgaaggacacgtccaactcccctgg

SEQ ID NO: 182645 - DNA, 25 bp, Homo sapien
gtggctgcttgcgactattactgtc

SEQ ID NO: 182646 - DNA, 25 bp, Homo sapien
gcacacgtggctgcttgcgactatt

SEQ ID NO: 182647 - DNA, 25 bp, Homo sapien
cacgtggctgcttgcgactattact

SEQ ID NO: 182648 - DNA, 25 bp, Homo sapien
ggctgcttgcgactattactgtcat

SEQ ID NO: 182649 - DNA, 25 bp, Homo sapien
caaaaatgaaaaacgctgcagtgtc

SEQ ID NO: 182650 - DNA, 25 bp, Homo sapien
caaggtctagattttatccgatcca

SEQ ID NO: 182651 - DNA, 25 bp, Homo sapien
ggcagtctcccttacctagtcagtc

SEQ ID NO: 182652 - DNA, 25 bp, Homo sapien
cttccctgacagagatgcccaaact

SEQ ID NO: 182653 - DNA, 25 bp, Homo sapien
gcgagcagttcctttcccaccaata

SEQ ID NO: 182654 - DNA, 25 bp, Homo sapien
atgaaccttcttctttctgcgagca

SEQ ID NO: 182655 - DNA, 25 bp, Homo sapien
cagttcctttcccaccaatacgcac

SEQ ID NO: 182656 - DNA, 25 bp, Homo sapien
gaaccttcttctttctgcgagcagt

SEQ ID NO: 182657 - DNA, 25 bp, Homo sapien
ttttcttggttcataattgcgtctt

SEQ ID NO: 182658 - DNA, 25 bp, Homo sapien
tcttggttcataattgcgtctttca

SEQ ID NO: 182659 - DNA, 25 bp, Homo sapien
aattgcgtctttcatcttctcggag

SEQ ID NO: 182660 - DNA, 25 bp, Homo sapien
gttcataattgcgtctttcatcttc

SEQ ID NO: 182661 - DNA, 25 bp, Homo sapien
tgctcagggagtctggtggacccgc

SEQ ID NO: 182662 - DNA, 25 bp, Homo sapien
tggtggacccgctgagagtaggcgc

SEQ ID NO: 182663 - DNA, 25 bp, Homo sapien
ccgctgagagtaggcgcacgcacgt

SEQ ID NO: 182664 - DNA, 25 bp, Homo sapien
taggatgatgctcagggagtctggt

SEQ ID NO: 182665 - DNA, 25 bp, Homo sapien
tgctgtggttgaaggggagtaagga

SEQ ID NO: 182666 - DNA, 25 bp, Homo sapien
ctttcgtgagccacgctgctgtggt

SEQ ID NO: 182667 - DNA, 25 bp, Homo sapien
tgaaggggagtaaggaaaatcgcca

SEQ ID NO: 182668 - DNA, 25 bp, Homo sapien
cgctgctgtggttgaaggggagtaa

SEQ ID NO: 182669 - DNA, 25 bp, Homo sapien
aagctgtaagaaacacgggcaggag

SEQ ID NO: 182670 - DNA, 25 bp, Homo sapien
caggagagatgtgttgtccagggag

SEQ ID NO: 182671 - DNA, 25 bp, Homo sapien
tgaaggctgagcagtatacaagatg

SEQ ID NO: 182672 - DNA, 25 bp, Homo sapien
tgagcagtatacaagatgaagctgt

SEQ ID NO: 182673 - DNA, 25 bp, Homo sapien
tatcacatccacaaggtactggaca

SEQ ID NO: 182674 - DNA, 25 bp, Homo sapien
cacatccacaaggtactggacaaga

SEQ ID NO: 182675 - DNA, 25 bp, Homo sapien
ggacaagaagcatctcatgtgccgc

SEQ ID NO: 182676 - DNA, 25 bp, Homo sapien
ggttttatcacatccacaaggtact

SEQ ID NO: 182677 - DNA, 25 bp, Homo sapien
catgattctactgtctgaaagctgg

SEQ ID NO: 182678 - DNA, 25 bp, Homo sapien
catgatgttggtcccagtgtagggc

SEQ ID NO: 182679 - DNA, 25 bp, Homo sapien
tactctggtgatgcaattgaaataa

SEQ ID NO: 182680 - DNA, 25 bp, Homo sapien
aagctagtgttacagttctgggaac

SEQ ID NO: 182681 - DNA, 25 bp, Homo sapien
tatggttgaagacctctggcagccc

SEQ ID NO: 182682 - DNA, 25 bp, Homo sapien
gcttaagttacgtggagacgctatg

SEQ ID NO: 182683 - DNA, 25 bp, Homo sapien
gagctttcagccaacagtcagacca

SEQ ID NO: 182684 - DNA, 25 bp, Homo sapien
tcagtattatgagaggccaaaaagg

SEQ ID NO: 182685 - DNA, 25 bp, Homo sapien
caataagataccaataataagcagc

SEQ ID NO: 182686 - DNA, 25 bp, Homo sapien
gccagggttcaaaccttggctctac

SEQ ID NO: 182687 - DNA, 25 bp, Homo sapien
aaagcataaaaccagaatgccaggg

SEQ ID NO: 182688 - DNA, 25 bp, Homo sapien
taatgaacttctctagacctcagct

SEQ ID NO: 182689 - DNA, 25 bp, Homo sapien
ggacctcgacctctcctctatggta

SEQ ID NO: 182690 - DNA, 25 bp, Homo sapien
gacctcgacctctcctctatggtat

SEQ ID NO: 182691 - DNA, 25 bp, Homo sapien
aggacctcgacctctcctctatggt

SEQ ID NO: 182692 - DNA, 25 bp, Homo sapien
tcagcttcggttgatgtcgatggaa

SEQ ID NO: 182693 - DNA, 25 bp, Homo sapien
gcttctacttccactacttttacag

SEQ ID NO: 182694 - DNA, 25 bp, Homo sapien
acttttacttctcactagttctcct

SEQ ID NO: 182695 - DNA, 25 bp, Homo sapien
tagttctccttgacattctgaaatc

SEQ ID NO: 182696 - DNA, 25 bp, Homo sapien
ctttgactcttgtttagcctgtatc

SEQ ID NO: 182697 - DNA, 25 bp, Homo sapien
cacttgatctttgatagccgaaatt

SEQ ID NO: 182698 - DNA, 25 bp, Homo sapien
aatttatcccacttgatctttgata

SEQ ID NO: 182699 - DNA, 25 bp, Homo sapien
tgatctttgatagccgaaattattt

SEQ ID NO: 182700 - DNA, 25 bp, Homo sapien
tatcccacttgatctttgatagccg

SEQ ID NO: 182701 - DNA, 25 bp, Homo sapien
ctaggggacagagtgagacccaggt

SEQ ID NO: 182702 - DNA, 25 bp, Homo sapien
cctaggggacagagtgagacccagg

SEQ ID NO: 182703 - DNA, 25 bp, Homo sapien
taggggacagagtgagacccaggtt

SEQ ID NO: 182704 - DNA, 25 bp, Homo sapien
tcagggttacacgtagcaggtgttt

SEQ ID NO: 182705 - DNA, 25 bp, Homo sapien
ttacacgtagcaggtgttttgaact

SEQ ID NO: 182706 - DNA, 25 bp, Homo sapien
ataaatttcagggttacacgtagca

SEQ ID NO: 182707 - DNA, 25 bp, Homo sapien
aatttcagggttacacgtagcaggt

SEQ ID NO: 182708 - DNA, 25 bp, Homo sapien
cccagaaaagttcaacgtcaagata

SEQ ID NO: 182709 - DNA, 25 bp, Homo sapien
aagacctgaactctgcgcagcaagg

SEQ ID NO: 182710 - DNA, 25 bp, Homo sapien
actctgcgcagcaagggagcctgag

SEQ ID NO: 182711 - DNA, 25 bp, Homo sapien
cgtcaagataaattccccattggcc

SEQ ID NO: 182712 - DNA, 25 bp, Homo sapien
cttccagttcctaggacaagactca

SEQ ID NO: 182713 - DNA, 25 bp, Homo sapien
aacgtcccgctaggagctgcagctg

SEQ ID NO: 182714 - DNA, 25 bp, Homo sapien
ccaaggctgcggattttgaaatgct

SEQ ID NO: 182715 - DNA, 25 bp, Homo sapien
gacaagtggcttgtgtatgacccaa

SEQ ID NO: 182716 - DNA, 25 bp, Homo sapien
taatgtcgggacaaagcttctccca

SEQ ID NO: 182717 - DNA, 25 bp, Homo sapien
ccatgcacattttgctgaagatcac

SEQ ID NO: 182718 - DNA, 25 bp, Homo sapien
tcttttggctgcgtacgtacttggc

SEQ ID NO: 182719 - DNA, 25 bp, Homo sapien
tgaagatcacgggacttttcttttg

SEQ ID NO: 182720 - DNA, 25 bp, Homo sapien
ctgccacaggatctctggaaatacc

SEQ ID NO: 182721 - DNA, 25 bp, Homo sapien
cctggatgcctctgtatgggatctc

SEQ ID NO: 182722 - DNA, 25 bp, Homo sapien
tcactcccaaacgtcacaaggtcag

SEQ ID NO: 182723 - DNA, 25 bp, Homo sapien
tatagacgagttggctccagcgagg

SEQ ID NO: 182724 - DNA, 25 bp, Homo sapien
gaggcacaatgcacaatttgtacag

SEQ ID NO: 182725 - DNA, 25 bp, Homo sapien
tgtttaaaaccagcacagattacaa

SEQ ID NO: 182726 - DNA, 25 bp, Homo sapien
tgtgtttaaaaccagcacagattac

SEQ ID NO: 182727 - DNA, 25 bp, Homo sapien
cagacctgattgagttaatataata

SEQ ID NO: 182728 - DNA, 25 bp, Homo sapien
caagaatccggttacaccgaatcat

SEQ ID NO: 182729 - DNA, 25 bp, Homo sapien
ccaagaatccggttacaccgaatca

SEQ ID NO: 182730 - DNA, 25 bp, Homo sapien
ccggccctgcgagaaatccagagct

SEQ ID NO: 182731 - DNA, 25 bp, Homo sapien
cggccctgcgagaaatccagagctt

SEQ ID NO: 182732 - DNA, 25 bp, Homo sapien
tcttctctggggctacatcctccgt

SEQ ID NO: 182733 - DNA, 25 bp, Homo sapien
tgtggtatgtttcgtgcccatgtgg

SEQ ID NO: 182734 - DNA, 25 bp, Homo sapien
tacatcctccgtaaaatgtggtatg

SEQ ID NO: 182735 - DNA, 25 bp, Homo sapien
ggaaaaggtgcctttcatttatgct

SEQ ID NO: 182736 - DNA, 25 bp, Homo sapien
tataggtaaaccttgcaaatatgta

SEQ ID NO: 182737 - DNA, 25 bp, Homo sapien
tgtaacctgtgttgcgcaaatgccg

SEQ ID NO: 182738 - DNA, 25 bp, Homo sapien
aaatttcttgattgtgatactgtgg

SEQ ID NO: 182739 - DNA, 25 bp, Homo sapien
gcaaatgccgcataaatttgagtga

SEQ ID NO: 182740 - DNA, 25 bp, Homo sapien
agttaaagctctttgctccagagcc

SEQ ID NO: 182741 - DNA, 25 bp, Homo sapien
cagttaaagctctttgctccagagc

SEQ ID NO: 182742 - DNA, 25 bp, Homo sapien
gttaaagctctttgctccagagcca

SEQ ID NO: 182743 - DNA, 25 bp, Homo sapien
ttgcacactaacatagccaaccttc

SEQ ID NO: 182744 - DNA, 25 bp, Homo sapien
tatttgcacactaacatagccaacc

SEQ ID NO: 182745 - DNA, 25 bp, Homo sapien
ctatttgcacactaacatagccaac

SEQ ID NO: 182746 - DNA, 25 bp, Homo sapien
tttgcacactaacatagccaacctt

SEQ ID NO: 182747 - DNA, 25 bp, Homo sapien
cggtcggatttagccgggctgctcc

SEQ ID NO: 182748 - DNA, 25 bp, Homo sapien
gggctgctccgggtcgggtgaggca

SEQ ID NO: 182749 - DNA, 25 bp, Homo sapien
cactgggtgcgtgtgggagtcttct

SEQ ID NO: 182750 - DNA, 25 bp, Homo sapien
ctccgggtcgggtgaggcactgggt

SEQ ID NO: 182751 - DNA, 25 bp, Homo sapien
tgaacaccgttctgggcttgacttt

SEQ ID NO: 182752 - DNA, 25 bp, Homo sapien
ctgctgggaatatcccagttcctgg

SEQ ID NO: 182753 - DNA, 25 bp, Homo sapien
caaataattgattcttaatgcacac

SEQ ID NO: 182754 - DNA, 25 bp, Homo sapien
ctagggaaatgaacaccgttctggg

SEQ ID NO: 182755 - DNA, 25 bp, Homo sapien
ctcgagagcctctctgtcccagagt

SEQ ID NO: 182756 - DNA, 25 bp, Homo sapien
gctcgagagcctctctgtcccagag

SEQ ID NO: 182757 - DNA, 25 bp, Homo sapien
tcgagagcctctctgtcccagagtg

SEQ ID NO: 182758 - DNA, 25 bp, Homo sapien
cgagagcctctctgtcccagagtgg

SEQ ID NO: 182759 - DNA, 25 bp, Homo sapien
gctcggcccgaagcgaatttgggac

SEQ ID NO: 182760 - DNA, 25 bp, Homo sapien
tcgtcgcggtgtcctattaattagc

SEQ ID NO: 182761 - DNA, 25 bp, Homo sapien
acttgaagtcgttgtggcagggacc

SEQ ID NO: 182762 - DNA, 25 bp, Homo sapien
ttaattagcttttcccggcgcctca

SEQ ID NO: 182763 - DNA, 25 bp, Homo sapien
gatgaacgggacttatagctaaggc

SEQ ID NO: 182764 - DNA, 25 bp, Homo sapien
tagcgacgacgtggtccttgtagga

SEQ ID NO: 182765 - DNA, 25 bp, Homo sapien
gattccagagcatcggatgaacggg

SEQ ID NO: 182766 - DNA, 25 bp, Homo sapien
gtctttttacgcacgcagcaactcg

SEQ ID NO: 182767 - DNA, 25 bp, Homo sapien
tgacttgaattgctgtccctcgttc

SEQ ID NO: 182768 - DNA, 25 bp, Homo sapien
ttgctgtccctcgttccaagccttt

SEQ ID NO: 182769 - DNA, 25 bp, Homo sapien
ttgaattgctgtccctcgttccaag

SEQ ID NO: 182770 - DNA, 25 bp, Homo sapien
gaattgctgtccctcgttccaagcc

SEQ ID NO: 182771 - DNA, 25 bp, Homo sapien
aatcgttttaatgagtgtgcaaagc

SEQ ID NO: 182772 - DNA, 25 bp, Homo sapien
acccgaaaacactcgacaggtcgtg

SEQ ID NO: 182773 - DNA, 25 bp, Homo sapien
taatgagtgtgcaaagcgtgcgacg

SEQ ID NO: 182774 - DNA, 25 bp, Homo sapien
gacaggtcgtgaataatcgttttaa

SEQ ID NO: 182775 - DNA, 25 bp, Homo sapien
caaagtgatgtcagtaccatttcca

SEQ ID NO: 182776 - DNA, 25 bp, Homo sapien
tccattgcctttcggaaatccacag

SEQ ID NO: 182777 - DNA, 25 bp, Homo sapien
aatccacagatctgacacgcgggag

SEQ ID NO: 182778 - DNA, 25 bp, Homo sapien
ccaaatccgattgttaaagtgcaaa

SEQ ID NO: 182779 - DNA, 25 bp, Homo sapien
cttgtatccaaacaactggactggt

SEQ ID NO: 182780 - DNA, 25 bp, Homo sapien
tatagctcactaaaggcagatgtca

SEQ ID NO: 182781 - DNA, 25 bp, Homo sapien
tggaatttgtagacctgtaagggct

SEQ ID NO: 182782 - DNA, 25 bp, Homo sapien
gcagatgtcaggttacttgtatcca

SEQ ID NO: 182783 - DNA, 25 bp, Homo sapien
caacaggctctcgtttgcagtcgcg

SEQ ID NO: 182784 - DNA, 25 bp, Homo sapien
gatctgcaagagtctattggcccta

SEQ ID NO: 182785 - DNA, 25 bp, Homo sapien
tctgccggaaattggaaatcgtgct

SEQ ID NO: 182786 - DNA, 25 bp, Homo sapien
agttgttagggtccgcagttctgcc

SEQ ID NO: 182787 - DNA, 25 bp, Homo sapien
tgagaagcctcgtgcggcttgagtt

SEQ ID NO: 182788 - DNA, 25 bp, Homo sapien
ttgagtttagagtcacgccctgccc

SEQ ID NO: 182789 - DNA, 25 bp, Homo sapien
ctcacgtcagggttacagccacatt

SEQ ID NO: 182790 - DNA, 25 bp, Homo sapien
gccacatttaggaacctcttcggaa

SEQ ID NO: 182791 - DNA, 25 bp, Homo sapien
tacatcagtagaaggtattctcttt

SEQ ID NO: 182792 - DNA, 25 bp, Homo sapien
catcagtagaaggtattctctttag

SEQ ID NO: 182793 - DNA, 25 bp, Homo sapien
ttgcctttataccaattaccattgc

SEQ ID NO: 182794 - DNA, 25 bp, Homo sapien
atcagtagaaggtattctctttagt

SEQ ID NO: 182795 - DNA, 25 bp, Homo sapien
ctgtttgccttgtccataccttatt

SEQ ID NO: 182796 - DNA, 25 bp, Homo sapien
ttctctggatctgagctttgataca

SEQ ID NO: 182797 - DNA, 25 bp, Homo sapien
ttatttctctggatctgagctttga

SEQ ID NO: 182798 - DNA, 25 bp, Homo sapien
tacgcagtctaatgcttgttttgtt

SEQ ID NO: 182799 - DNA, 25 bp, Homo sapien
aacattaccttcatgaaggaaaact

SEQ ID NO: 182800 - DNA, 25 bp, Homo sapien
gctgtcaaaattggaaaacctgctg

SEQ ID NO: 182801 - DNA, 25 bp, Homo sapien
ggtaaagtatgttgacttagacaaa

SEQ ID NO: 182802 - DNA, 25 bp, Homo sapien
agagctgtcaaaattggaaaacctg

SEQ ID NO: 182803 - DNA, 25 bp, Homo sapien
tcagattcaaataccggtttctaga

SEQ ID NO: 182804 - DNA, 25 bp, Homo sapien
aattatccaattagaggaagtaggg

SEQ ID NO: 182805 - DNA, 25 bp, Homo sapien
tagggcctcttaaagaaacgcctga

SEQ ID NO: 182806 - DNA, 25 bp, Homo sapien
ccggtttctagaattatccaattag

SEQ ID NO: 182807 - DNA, 25 bp, Homo sapien
gatcccttggtccagatgttgtcca

SEQ ID NO: 182808 - DNA, 25 bp, Homo sapien
tcccctcatgcagctaataggcatt

SEQ ID NO: 182809 - DNA, 25 bp, Homo sapien
ttctggttactgtttcccctcatgc

SEQ ID NO: 182810 - DNA, 25 bp, Homo sapien
tgtccagtcctctactttctggtta

SEQ ID NO: 182811 - DNA, 25 bp, Homo sapien
tactgtttcgtacaaatccccagat

SEQ ID NO: 182812 - DNA, 25 bp, Homo sapien
tcaaacagtatggattcaggaccgc

SEQ ID NO: 182813 - DNA, 25 bp, Homo sapien
agaaaagtattccatctgatgaacg

SEQ ID NO: 182814 - DNA, 25 bp, Homo sapien
tctgatgaacgtaggtcatactgtt

SEQ ID NO: 182815 - DNA, 25 bp, Homo sapien
taaaaagtaagaatggtcactatgc

SEQ ID NO: 182816 - DNA, 25 bp, Homo sapien
tgaaatctactccaatacaaattcg

SEQ ID NO: 182817 - DNA, 25 bp, Homo sapien
taagaatggtcactatgccacttca

SEQ ID NO: 182818 - DNA, 25 bp, Homo sapien
ctatcatgacaataatgaaatctac

SEQ ID NO: 182819 - DNA, 25 bp, Homo sapien
cttattttggtcctctccgtcaggc

SEQ ID NO: 182820 - DNA, 25 bp, Homo sapien
acttatgtttaaatcactgcaggca

SEQ ID NO: 182821 - DNA, 25 bp, Homo sapien
tccgtcaggcctagggagacttacg

SEQ ID NO: 182822 - DNA, 25 bp, Homo sapien
tatttttgtggatagagctcctttc

SEQ ID NO: 182823 - DNA, 25 bp, Homo sapien
ctgacatccggaacttctgctgtga

SEQ ID NO: 182824 - DNA, 25 bp, Homo sapien
tcccattctggatagtagtgatgat

SEQ ID NO: 182825 - DNA, 25 bp, Homo sapien
gaaactgtgatggtgaccattttct

SEQ ID NO: 182826 - DNA, 25 bp, Homo sapien
tgacaatgttgatagaagcccaaca

SEQ ID NO: 182827 - DNA, 25 bp, Homo sapien
catctagtatctctggtaggtaatc

SEQ ID NO: 182828 - DNA, 25 bp, Homo sapien
tctagtatctctggtaggtaatcca

SEQ ID NO: 182829 - DNA, 25 bp, Homo sapien
ggttaaaatctggtacaggctccag

SEQ ID NO: 182830 - DNA, 25 bp, Homo sapien
cagaaccagcatccaagtgatgatg

SEQ ID NO: 182831 - DNA, 25 bp, Homo sapien
tcctaccctggtaaacacaatctca

SEQ ID NO: 182832 - DNA, 25 bp, Homo sapien
cttactaggtaagtctaatttgcta

SEQ ID NO: 182833 - DNA, 25 bp, Homo sapien
tttcttgcttactttcagtgctttc

SEQ ID NO: 182834 - DNA, 25 bp, Homo sapien
tgtggcaatatgaccagtgaaaaac

SEQ ID NO: 182835 - DNA, 25 bp, Homo sapien
cacagggtgagtctttcataaaagc

SEQ ID NO: 182836 - DNA, 25 bp, Homo sapien
cacagtatggttcaaagaggtataa

SEQ ID NO: 182837 - DNA, 25 bp, Homo sapien
tcctgcagttcggtggcacagtatg

SEQ ID NO: 182838 - DNA, 25 bp, Homo sapien
aaggaagtcacagggtgagtctttc

SEQ ID NO: 182839 - DNA, 25 bp, Homo sapien
aacagcatggggtagtgcaaactgg

SEQ ID NO: 182840 - DNA, 25 bp, Homo sapien
gatcaatcccaataccagtaaatgg

SEQ ID NO: 182841 - DNA, 25 bp, Homo sapien
gctttttcatgccaatctgcagctt

SEQ ID NO: 182842 - DNA, 25 bp, Homo sapien
gggcaattgtcgacatgctttttca

SEQ ID NO: 182843 - DNA, 25 bp, Homo sapien
ataaatggcatagttagacacatta

SEQ ID NO: 182844 - DNA, 25 bp, Homo sapien
atggcatagttagacacattatttt

SEQ ID NO: 182845 - DNA, 25 bp, Homo sapien
tgtatattgcacataacaatacaag

SEQ ID NO: 182846 - DNA, 25 bp, Homo sapien
tattgcacataacaatacaagatgc

SEQ ID NO: 182847 - DNA, 25 bp, Homo sapien
caaagaatttaatctgtaactaact

SEQ ID NO: 182848 - DNA, 25 bp, Homo sapien
caactgagataaatcaccagctttg

SEQ ID NO: 182849 - DNA, 25 bp, Homo sapien
aatcaactgagataaatcaccagct

SEQ ID NO: 182850 - DNA, 25 bp, Homo sapien
ctgagataaatcaccagctttggac

SEQ ID NO: 182851 - DNA, 25 bp, Homo sapien
ccgaaatacaacaatacttaaaatg

SEQ ID NO: 182852 - DNA, 25 bp, Homo sapien
cgaaatacaacaatacttaaaatga

SEQ ID NO: 182853 - DNA, 25 bp, Homo sapien
ccaaaggtggcatctacgatatcat

SEQ ID NO: 182854 - DNA, 25 bp, Homo sapien
tcataaggggaagattctggtaccc

SEQ ID NO: 182855 - DNA, 25 bp, Homo sapien
tggtaccctgtagaagttccttcca

SEQ ID NO: 182856 - DNA, 25 bp, Homo sapien
aggggaagattctggtaccctgtag

SEQ ID NO: 182857 - DNA, 25 bp, Homo sapien
tatattctcattacaggagaaaatg

SEQ ID NO: 182858 - DNA, 25 bp, Homo sapien
tcatatattctcattacaggagaaa

SEQ ID NO: 182859 - DNA, 25 bp, Homo sapien
catatattctcattacaggagaaaa

SEQ ID NO: 182860 - DNA, 25 bp, Homo sapien
atatattctcattacaggagaaaat

SEQ ID NO: 182861 - DNA, 25 bp, Homo sapien
gagcatgcatggcagtgccaattct

SEQ ID NO: 182862 - DNA, 25 bp, Homo sapien
ggtaataacattagctcaaagagca

SEQ ID NO: 182863 - DNA, 25 bp, Homo sapien
taacctgaacaaattgctggacaga

SEQ ID NO: 182864 - DNA, 25 bp, Homo sapien
gctggacagaggatatggtaataac

SEQ ID NO: 182865 - DNA, 25 bp, Homo sapien
gtgtacagtctgcatatgtgtcgaa

SEQ ID NO: 182866 - DNA, 25 bp, Homo sapien
gattggcaattcctactgtgtacag

SEQ ID NO: 182867 - DNA, 25 bp, Homo sapien
tatgtgtcgaataacaactgcagcc

SEQ ID NO: 182868 - DNA, 25 bp, Homo sapien
cagatctggctgtttgattggcaat

SEQ ID NO: 182869 - DNA, 25 bp, Homo sapien
cactccttgccttccttgtggtata

SEQ ID NO: 182870 - DNA, 25 bp, Homo sapien
ccttccttgtggtatagggttcatg

SEQ ID NO: 182871 - DNA, 25 bp, Homo sapien
ttgccttccttgtggtatagggttc

SEQ ID NO: 182872 - DNA, 25 bp, Homo sapien
tggtatagggttcatggaggaagtg

SEQ ID NO: 182873 - DNA, 25 bp, Homo sapien
ctccatctccaatatacagagtgtg

SEQ ID NO: 182874 - DNA, 25 bp, Homo sapien
taggtgtttgtgcagttgatttccc

SEQ ID NO: 182875 - DNA, 25 bp, Homo sapien
ccaatatacagagtgtgagtctcca

SEQ ID NO: 182876 - DNA, 25 bp, Homo sapien
ccaaattagcatcagagtgtaggtg

SEQ ID NO: 182877 - DNA, 25 bp, Homo sapien
tcagattttgctcatatgtgccgga

SEQ ID NO: 182878 - DNA, 25 bp, Homo sapien
cagattttgctcatatgtgccggat

SEQ ID NO: 182879 - DNA, 25 bp, Homo sapien
tgccagcactgatagattcttcccc

SEQ ID NO: 182880 - DNA, 25 bp, Homo sapien
gatcttcccactaggtagatatgta

SEQ ID NO: 182881 - DNA, 25 bp, Homo sapien
tattaggttcctcagtgacttaggc

SEQ ID NO: 182882 - DNA, 25 bp, Homo sapien
cacacattctgagagccaggaatca

SEQ ID NO: 182883 - DNA, 25 bp, Homo sapien
tagtaggtgatacgaccatgggagc

SEQ ID NO: 182884 - DNA, 25 bp, Homo sapien
tcagagtgatgcaaagtcattagcc

SEQ ID NO: 182885 - DNA, 25 bp, Homo sapien
catgggagcaagacgtcagagtgat

SEQ ID NO: 182886 - DNA, 25 bp, Homo sapien
aacaagtagtgagatcagggccagt

SEQ ID NO: 182887 - DNA, 25 bp, Homo sapien
tgtagcctttaaagcccagcttaaa

SEQ ID NO: 182888 - DNA, 25 bp, Homo sapien
tcactctttacttctaatgtgcttt

SEQ ID NO: 182889 - DNA, 25 bp, Homo sapien
atttgatgtagcctttaaagcccag

SEQ ID NO: 182890 - DNA, 25 bp, Homo sapien
taatgtgctttcctcacaattccat

SEQ ID NO: 182891 - DNA, 25 bp, Homo sapien
ctatttgtccatatttgtcaaccat

SEQ ID NO: 182892 - DNA, 25 bp, Homo sapien
catactgttccaatgtttgtgtatg

SEQ ID NO: 182893 - DNA, 25 bp, Homo sapien
atactgttccaatgtttgtgtatgt

SEQ ID NO: 182894 - DNA, 25 bp, Homo sapien
tactgttccaatgtttgtgtatgtg

SEQ ID NO: 182895 - DNA, 25 bp, Homo sapien
ccatactgttccaatgtttgtgtat

SEQ ID NO: 182896 - DNA, 25 bp, Homo sapien
tggcctaatgcaccaactaagtgct

SEQ ID NO: 182897 - DNA, 25 bp, Homo sapien
gatggaaggtcattaacagggcact

SEQ ID NO: 182898 - DNA, 25 bp, Homo sapien
ggcacttgagcagataggaattaca

SEQ ID NO: 182899 - DNA, 25 bp, Homo sapien
caattgagacgttgaaacatcctaa

SEQ ID NO: 182900 - DNA, 25 bp, Homo sapien
ccagtccaaagttcctggaggcttt

SEQ ID NO: 182901 - DNA, 25 bp, Homo sapien
aggaatctagagagagtctgcctaa

SEQ ID NO: 182902 - DNA, 25 bp, Homo sapien
gaatctagagagagtctgcctaatt

SEQ ID NO: 182903 - DNA, 25 bp, Homo sapien
tgcgctgcaatgggctccctccagt

SEQ ID NO: 182904 - DNA, 25 bp, Homo sapien
ctactctggtatgaaattcagtgct

SEQ ID NO: 182905 - DNA, 25 bp, Homo sapien
gcatgggttaggatcagggcagaaa

SEQ ID NO: 182906 - DNA, 25 bp, Homo sapien
gaagttgatgctaaatggagaacag

SEQ ID NO: 182907 - DNA, 25 bp, Homo sapien
tgacagctccaaagaagcatgggtt

SEQ ID NO: 182908 - DNA, 25 bp, Homo sapien
tatattcaatattaacattaagaac

SEQ ID NO: 182909 - DNA, 25 bp, Homo sapien
acattaagaacattgaagagtattg

SEQ ID NO: 182910 - DNA, 25 bp, Homo sapien
tattaacattaagaacattgaagag

SEQ ID NO: 182911 - DNA, 25 bp, Homo sapien
taagaacattgaagagtattgccat

SEQ ID NO: 182912 - DNA, 25 bp, Homo sapien
tttgaccagagccctatagcctata

SEQ ID NO: 182913 - DNA, 25 bp, Homo sapien
gaccagagccctatagcctatagtc

SEQ ID NO: 182914 - DNA, 25 bp, Homo sapien
gagccctatagcctatagtctcaat

SEQ ID NO: 182915 - DNA, 25 bp, Homo sapien
cagagccctatagcctatagtctca

SEQ ID NO: 182916 - DNA, 25 bp, Homo sapien
ggtcagtcatgctcttgaaggaggc

SEQ ID NO: 182917 - DNA, 25 bp, Homo sapien
ccatacattaccagaggcagaggat

SEQ ID NO: 182918 - DNA, 25 bp, Homo sapien
gaggcatactgggagccatacatta

SEQ ID NO: 182919 - DNA, 25 bp, Homo sapien
ttgctcatactagtaattgggtcag

SEQ ID NO: 182920 - DNA, 25 bp, Homo sapien
actgagcgtccctaattgtacagcg

SEQ ID NO: 182921 - DNA, 25 bp, Homo sapien
taattgtacagcgaaggtacaggct

SEQ ID NO: 182922 - DNA, 25 bp, Homo sapien
tgcctcatctgactgagcgtcccta

SEQ ID NO: 182923 - DNA, 25 bp, Homo sapien
tacaggcttggaaggcatgaaaatg

SEQ ID NO: 182924 - DNA, 25 bp, Homo sapien
agtacgtcagtggttttattatgat

SEQ ID NO: 182925 - DNA, 25 bp, Homo sapien
gtgtcccacaccgaatgtaaataag

SEQ ID NO: 182926 - DNA, 25 bp, Homo sapien
aagctgtcttcgcattctgccgaag

SEQ ID NO: 182927 - DNA, 25 bp, Homo sapien
tggatacttccctgtgggtgtgtcc

SEQ ID NO: 182928 - DNA, 25 bp, Homo sapien
tgctcttttcctggtatactcccag

SEQ ID NO: 182929 - DNA, 25 bp, Homo sapien
taaatggtcaccctgaacactggtg

SEQ ID NO: 182930 - DNA, 25 bp, Homo sapien
tgtcacccaaactgttagaaaccat

SEQ ID NO: 182931 - DNA, 25 bp, Homo sapien
ttttactcctactgatgactctaag

SEQ ID NO: 182932 - DNA, 25 bp, Homo sapien
tgatgactctaagctgtgcattaca

SEQ ID NO: 182933 - DNA, 25 bp, Homo sapien
tattgagcccttactgtttcaggag

SEQ ID NO: 182934 - DNA, 25 bp, Homo sapien
gaattgtccaacaggctctaaatga

SEQ ID NO: 182935 - DNA, 25 bp, Homo sapien
cagtaagagacagaggtacagttcc

SEQ ID NO: 182936 - DNA, 25 bp, Homo sapien
aattatttgcctacaccaagtccag

SEQ ID NO: 182937 - DNA, 25 bp, Homo sapien
gcacaatgaacccattggttcccat

SEQ ID NO: 182938 - DNA, 25 bp, Homo sapien
ccatcatctccgtggcatatcttct

SEQ ID NO: 182939 - DNA, 25 bp, Homo sapien
ttagttttccgtgagcacaatgaac

SEQ ID NO: 182940 - DNA, 25 bp, Homo sapien
catctccgtggcatatcttctttcc

SEQ ID NO: 182941 - DNA, 25 bp, Homo sapien
caggcatattccgactgttcagaca

SEQ ID NO: 182942 - DNA, 25 bp, Homo sapien
catctcagacctctttccaccaccc

SEQ ID NO: 182943 - DNA, 25 bp, Homo sapien
ttcctccctattctccaggcatatt

SEQ ID NO: 182944 - DNA, 25 bp, Homo sapien
tattctccaggcatattccgactgt

SEQ ID NO: 182945 - DNA, 25 bp, Homo sapien
agattgacattgactccagaatgcc

SEQ ID NO: 182946 - DNA, 25 bp, Homo sapien
gcccagagtattcagttcaacataa

SEQ ID NO: 182947 - DNA, 25 bp, Homo sapien
cagagactgactaaaatgggcccaa

SEQ ID NO: 182948 - DNA, 25 bp, Homo sapien
tgccaaagtactactacttcaccat

SEQ ID NO: 182949 - DNA, 25 bp, Homo sapien
agtcttgctcaatatccacacatgg

SEQ ID NO: 182950 - DNA, 25 bp, Homo sapien
tgctcaatatccacacatgggttac

SEQ ID NO: 182951 - DNA, 25 bp, Homo sapien
tcttgctcaatatccacacatgggt

SEQ ID NO: 182952 - DNA, 25 bp, Homo sapien
tcaaaagtcttgctcaatatccaca

SEQ ID NO: 182953 - DNA, 25 bp, Homo sapien
tgttagagatggagctttcctcggt

SEQ ID NO: 182954 - DNA, 25 bp, Homo sapien
gctttcctcggtatgctgggcagca

SEQ ID NO: 182955 - DNA, 25 bp, Homo sapien
gatggagctttcctcggtatgctgg

SEQ ID NO: 182956 - DNA, 25 bp, Homo sapien
ctattgttagagatggagctttcct

SEQ ID NO: 182957 - DNA, 25 bp, Homo sapien
ggtagaatgaccgtctgactgatga

SEQ ID NO: 182958 - DNA, 25 bp, Homo sapien
ccgtctgactgatgaactggaaaga

SEQ ID NO: 182959 - DNA, 25 bp, Homo sapien
actggaaagaattagccattcgctg

SEQ ID NO: 182960 - DNA, 25 bp, Homo sapien
tagccattcgctgagccaccatatc

SEQ ID NO: 182961 - DNA, 25 bp, Homo sapien
gctctgagaaacactttgtcatgag

SEQ ID NO: 182962 - DNA, 25 bp, Homo sapien
gagctccaggaatctgccgacttac

SEQ ID NO: 182963 - DNA, 25 bp, Homo sapien
ctagacatctcaacctctgctctga

SEQ ID NO: 182964 - DNA, 25 bp, Homo sapien
gacatctcaacctctgctctgagaa

SEQ ID NO: 182965 - DNA, 25 bp, Homo sapien
gctccactaaaatgatgaagtttat

SEQ ID NO: 182966 - DNA, 25 bp, Homo sapien
ttgctgaagattattgagaaatcca

SEQ ID NO: 182967 - DNA, 25 bp, Homo sapien
gaaatccataacatctggatgtggg

SEQ ID NO: 182968 - DNA, 25 bp, Homo sapien
gatgtgggggagaagctccactaaa

SEQ ID NO: 182969 - DNA, 25 bp, Homo sapien
acaccattttgtgcccactcagtct

SEQ ID NO: 182970 - DNA, 25 bp, Homo sapien
ttatgcaactctttaatactaaaag

SEQ ID NO: 182971 - DNA, 25 bp, Homo sapien
caccattttgtgcccactcagtctt

SEQ ID NO: 182972 - DNA, 25 bp, Homo sapien
ggttgaaatcccacaggatgtttgg

SEQ ID NO: 182973 - DNA, 25 bp, Homo sapien
aattttgatggttgaaatcccacag

SEQ ID NO: 182974 - DNA, 25 bp, Homo sapien
gttgaaatcccacaggatgtttggg

SEQ ID NO: 182975 - DNA, 25 bp, Homo sapien
ttccaattttgatggttgaaatccc

SEQ ID NO: 182976 - DNA, 25 bp, Homo sapien
gaaatctctgtagccagatgttgat

SEQ ID NO: 182977 - DNA, 25 bp, Homo sapien
ccagatgttgattgtgtacacattg

SEQ ID NO: 182978 - DNA, 25 bp, Homo sapien
tctgtagccagatgttgattgtgta

SEQ ID NO: 182979 - DNA, 25 bp, Homo sapien
ttttgtgttgcttgcataaacatta

SEQ ID NO: 182980 - DNA, 25 bp, Homo sapien
gaatctgacgcttgtatcagctctg

SEQ ID NO: 182981 - DNA, 25 bp, Homo sapien
catgctcctgcgaggctcttgacag

SEQ ID NO: 182982 - DNA, 25 bp, Homo sapien
caaaattacagtctgaggtgatgca

SEQ ID NO: 182983 - DNA, 25 bp, Homo sapien
tagagcgcttatgctccagggagat

SEQ ID NO: 182984 - DNA, 25 bp, Homo sapien
tcacggagaacttgagcagctcttc

SEQ ID NO: 182985 - DNA, 25 bp, Homo sapien
cagcacagtatcaagttggggcttt

SEQ ID NO: 182986 - DNA, 25 bp, Homo sapien
ttgagcatcacggagaacttgagca

SEQ ID NO: 182987 - DNA, 25 bp, Homo sapien
tctgtctacattgagcatcacggag

SEQ ID NO: 182988 - DNA, 25 bp, Homo sapien
tggcagtaaaggcagtgattagata

SEQ ID NO: 182989 - DNA, 25 bp, Homo sapien
atgtgatttgtattggctttgaaac

SEQ ID NO: 182990 - DNA, 25 bp, Homo sapien
aatgtgatttgtattggctttgaaa

SEQ ID NO: 182991 - DNA, 25 bp, Homo sapien
taaaggcagtgattagatagaaagc

SEQ ID NO: 182992 - DNA, 25 bp, Homo sapien
cagccgttcttctgtttgcattagc

SEQ ID NO: 182993 - DNA, 25 bp, Homo sapien
tcaggctccatcgacctgtcagagc

SEQ ID NO: 182994 - DNA, 25 bp, Homo sapien
gcattagctgttcttgctcaggctc

SEQ ID NO: 182995 - DNA, 25 bp, Homo sapien
acagtgattgactgccccggcagat

SEQ ID NO: 182996 - DNA, 25 bp, Homo sapien
caatgggagcagtcccgtgtcttcc

SEQ ID NO: 182997 - DNA, 25 bp, Homo sapien
tcatgcaatgggagcagtcccgtgt

SEQ ID NO: 182998 - DNA, 25 bp, Homo sapien
gcagtcccgtgtcttcccttcagtg

SEQ ID NO: 182999 - DNA, 25 bp, Homo sapien
ggagcagtcccgtgtcttcccttca

SEQ ID NO: 183000 - DNA, 25 bp, Homo sapien
tatagatagatttagagtgatgtag

SEQ ID NO: 183001 - DNA, 25 bp, Homo sapien
catctttaggtgtgatatagataga

SEQ ID NO: 183002 - DNA, 25 bp, Homo sapien
agagtgatgtagttagcaagcctca

SEQ ID NO: 183003 - DNA, 25 bp, Homo sapien
gctttaacatctttaggtgtgatat

SEQ ID NO: 183004 - DNA, 25 bp, Homo sapien
tccaagtctgcgatatgaacgggac

SEQ ID NO: 183005 - DNA, 25 bp, Homo sapien
tgatcatcagccagggtcaagtgtg

SEQ ID NO: 183006 - DNA, 25 bp, Homo sapien
tccgtgatacgaagcaaatcggcag

SEQ ID NO: 183007 - DNA, 25 bp, Homo sapien
tgatgccaagcaagcagtccgtgat

SEQ ID NO: 183008 - DNA, 25 bp, Homo sapien
gaggcattcagtcgagtctccagaa

SEQ ID NO: 183009 - DNA, 25 bp, Homo sapien
cctcagcgaaataagagatgcggat

SEQ ID NO: 183010 - DNA, 25 bp, Homo sapien
tatttcaaaagcacgagtgaggcat

SEQ ID NO: 183011 - DNA, 25 bp, Homo sapien
tgccacgagtaaagtgaggtgctca

SEQ ID NO: 183012 - DNA, 25 bp, Homo sapien
tgcgtacactggtacctggcttaaa

SEQ ID NO: 183013 - DNA, 25 bp, Homo sapien
tgtatgcgtacactggtacctggct

SEQ ID NO: 183014 - DNA, 25 bp, Homo sapien
cgtacactggtacctggcttaaagt

SEQ ID NO: 183015 - DNA, 25 bp, Homo sapien
caatatgtatgcgtacactggtacc

SEQ ID NO: 183016 - DNA, 25 bp, Homo sapien
tctgtaatcccccaataaaggcact

SEQ ID NO: 183017 - DNA, 25 bp, Homo sapien
caataaaggcactgaacccaacttc

SEQ ID NO: 183018 - DNA, 25 bp, Homo sapien
taatcccccaataaaggcactgaac

SEQ ID NO: 183019 - DNA, 25 bp, Homo sapien
cccaataaaggcactgaacccaact

SEQ ID NO: 183020 - DNA, 25 bp, Homo sapien
ccactgcatttcttacccatttttg

SEQ ID NO: 183021 - DNA, 25 bp, Homo sapien
gattaagactttatgggtgctagag

SEQ ID NO: 183022 - DNA, 25 bp, Homo sapien
ggtgctagagtaagttagccttaca

SEQ ID NO: 183023 - DNA, 25 bp, Homo sapien
gccttacaatttccaagtgaagcag

SEQ ID NO: 183024 - DNA, 25 bp, Homo sapien
ccagacatatcgataaactcattga

SEQ ID NO: 183025 - DNA, 25 bp, Homo sapien
tgactcaatcagatcatatggtgag

SEQ ID NO: 183026 - DNA, 25 bp, Homo sapien
gtcactggactatagaaaaaaggat

SEQ ID NO: 183027 - DNA, 25 bp, Homo sapien
aaaaaggatcagtagccatttgacc

SEQ ID NO: 183028 - DNA, 25 bp, Homo sapien
gcacctttcatgcatcacagctttc

SEQ ID NO: 183029 - DNA, 25 bp, Homo sapien
agcacctttcatgcatcacagcttt

SEQ ID NO: 183030 - DNA, 25 bp, Homo sapien
cacctttcatgcatcacagctttca

SEQ ID NO: 183031 - DNA, 25 bp, Homo sapien
ttgtttccatcataaataatcttcc

SEQ ID NO: 183032 - DNA, 25 bp, Homo sapien
cttccactttctcatacactctttc

SEQ ID NO: 183033 - DNA, 25 bp, Homo sapien
tcataaataatcttccactttctca

SEQ ID NO: 183034 - DNA, 25 bp, Homo sapien
tccactttctcatacactctttcat

SEQ ID NO: 183035 - DNA, 25 bp, Homo sapien
tgcttgaactgggacatcttctcct

SEQ ID NO: 183036 - DNA, 25 bp, Homo sapien
tttgaagacagcagatcgtaggact

SEQ ID NO: 183037 - DNA, 25 bp, Homo sapien
tgaattacaccattgacatttatgg

SEQ ID NO: 183038 - DNA, 25 bp, Homo sapien
gattcagaccaggaattataccatc

SEQ ID NO: 183039 - DNA, 25 bp, Homo sapien
taaggctacagtggaaaaccatgtt

SEQ ID NO: 183040 - DNA, 25 bp, Homo sapien
cattttttccaaaggccgtcactga

SEQ ID NO: 183041 - DNA, 25 bp, Homo sapien
cactgatagattgttctgcttgcca

SEQ ID NO: 183042 - DNA, 25 bp, Homo sapien
taaacataagtatccatagatgggc

SEQ ID NO: 183043 - DNA, 25 bp, Homo sapien
aaaatggaagttttggcagcactga

SEQ ID NO: 183044 - DNA, 25 bp, Homo sapien
ccaggcaggataaaacttcgggatg

SEQ ID NO: 183045 - DNA, 25 bp, Homo sapien
taggtgcaatttcaagctaagcagt

SEQ ID NO: 183046 - DNA, 25 bp, Homo sapien
tataacgtaccaacgatgtgcaaac

SEQ ID NO: 183047 - DNA, 25 bp, Homo sapien
tatatacttagctcctgattcaggc

SEQ ID NO: 183048 - DNA, 25 bp, Homo sapien
cacatctcataaccgagatctatat

SEQ ID NO: 183049 - DNA, 25 bp, Homo sapien
cgtggcagtcttatgtgggtttgtc

SEQ ID NO: 183050 - DNA, 25 bp, Homo sapien
tatattctgtgtgctcgtggcagtc

SEQ ID NO: 183051 - DNA, 25 bp, Homo sapien
caaatttattccttcgtaatccaga

SEQ ID NO: 183052 - DNA, 25 bp, Homo sapien
gcctggatgtagtagtttgttagag

SEQ ID NO: 183053 - DNA, 25 bp, Homo sapien
ctttgaggcctggatgtagtagttt

SEQ ID NO: 183054 - DNA, 25 bp, Homo sapien
tattccttcgtaatccagatcattt

SEQ ID NO: 183055 - DNA, 25 bp, Homo sapien
tcaactatagccagaccatagggtt

SEQ ID NO: 183056 - DNA, 25 bp, Homo sapien
tatagccagaccatagggtttatgt

SEQ ID NO: 183057 - DNA, 25 bp, Homo sapien
cagaccatagggtttatgtaaaaat

SEQ ID NO: 183058 - DNA, 25 bp, Homo sapien
caataatcaactatagccagaccat

SEQ ID NO: 183059 - DNA, 25 bp, Homo sapien
ccacagtctcaaaaaggctcatgtc

SEQ ID NO: 183060 - DNA, 25 bp, Homo sapien
tgtcccttgagattagtgtgtaggc

SEQ ID NO: 183061 - DNA, 25 bp, Homo sapien
gataaggtttctttactgagaaaga

SEQ ID NO: 183062 - DNA, 25 bp, Homo sapien
taaatttgtcccttgagattagtgt

SEQ ID NO: 183063 - DNA, 25 bp, Homo sapien
caggattagataaggtttctttact

SEQ ID NO: 183064 - DNA, 25 bp, Homo sapien
gtttatagttaataatgttgttcat

SEQ ID NO: 183065 - DNA, 25 bp, Homo sapien
ctgtttatagttaataatgttgttc

SEQ ID NO: 183066 - DNA, 25 bp, Homo sapien
tgtttatagttaataatgttgttca

SEQ ID NO: 183067 - DNA, 25 bp, Homo sapien
ccatctgtgtaggaccacatgccag

SEQ ID NO: 183068 - DNA, 25 bp, Homo sapien
tttcttgaattaaaggacgcaatgt

SEQ ID NO: 183069 - DNA, 25 bp, Homo sapien
gacgcaatgtaggtaaagatattcc

SEQ ID NO: 183070 - DNA, 25 bp, Homo sapien
cttttgattggtaagggacagtgca

SEQ ID NO: 183071 - DNA, 25 bp, Homo sapien
tatttggcgtcccatcttcgctccg

SEQ ID NO: 183072 - DNA, 25 bp, Homo sapien
atcttcgctccgctctggctttggg

SEQ ID NO: 183073 - DNA, 25 bp, Homo sapien
tcactggcagatttatttggcgtcc

SEQ ID NO: 183074 - DNA, 25 bp, Homo sapien
cctttagcgtaatcactggcagatt

SEQ ID NO: 183075 - DNA, 25 bp, Homo sapien
atgcaggaagatgagttcaggaata

SEQ ID NO: 183076 - DNA, 25 bp, Homo sapien
gaagatgagttcaggaatatacctg

SEQ ID NO: 183077 - DNA, 25 bp, Homo sapien
aagatgagttcaggaatatacctgc

SEQ ID NO: 183078 - DNA, 25 bp, Homo sapien
taactatatttgttccagtccagcc

SEQ ID NO: 183079 - DNA, 25 bp, Homo sapien
aaaagaaagtatgcatccccacggt

SEQ ID NO: 183080 - DNA, 25 bp, Homo sapien
taaaaagccacatacaccaggcaaa

SEQ ID NO: 183081 - DNA, 25 bp, Homo sapien
tcttcaaacaattcaaagttggcca

SEQ ID NO: 183082 - DNA, 25 bp, Homo sapien
tcccacaatgggtctgcggagagta

SEQ ID NO: 183083 - DNA, 25 bp, Homo sapien
caaaccatgcaatatgacttgggct

SEQ ID NO: 183084 - DNA, 25 bp, Homo sapien
gcggagagtagcataagcatcacct

SEQ ID NO: 183085 - DNA, 25 bp, Homo sapien
gattccccaagtgtgattctaaacc

SEQ ID NO: 183086 - DNA, 25 bp, Homo sapien
taatacatttggacataataacgag

SEQ ID NO: 183087 - DNA, 25 bp, Homo sapien
tattctatctctatgttgatcatga

SEQ ID NO: 183088 - DNA, 25 bp, Homo sapien
tgttgatcatgacaaaagatatgtt

SEQ ID NO: 183089 - DNA, 25 bp, Homo sapien
tacatttggacataataacgagaac

SEQ ID NO: 183090 - DNA, 25 bp, Homo sapien
catcttcccgttgccgaatagcacg

SEQ ID NO: 183091 - DNA, 25 bp, Homo sapien
tcgtgctgtacaggcgcagttggct

SEQ ID NO: 183092 - DNA, 25 bp, Homo sapien
cggaggatattcttgtcgcagtgac

SEQ ID NO: 183093 - DNA, 25 bp, Homo sapien
gaccctgatgccaaattgcggagga

SEQ ID NO: 183094 - DNA, 25 bp, Homo sapien
ctgtgcagagtgttattctggcagc

SEQ ID NO: 183095 - DNA, 25 bp, Homo sapien
gttattctggcagcatcggagttgt

SEQ ID NO: 183096 - DNA, 25 bp, Homo sapien
gagtgttattctggcagcatcggag

SEQ ID NO: 183097 - DNA, 25 bp, Homo sapien
tgcagagtgttattctggcagcatc

SEQ ID NO: 183098 - DNA, 25 bp, Homo sapien
cctgatcttttctgtttacaccacc

SEQ ID NO: 183099 - DNA, 25 bp, Homo sapien
ctgatcttttctgtttacaccacca

SEQ ID NO: 183100 - DNA, 25 bp, Homo sapien
tgatcttttctgtttacaccaccac

SEQ ID NO: 183101 - DNA, 25 bp, Homo sapien
gtgaaaagctttggcctctcctata

SEQ ID NO: 183102 - DNA, 25 bp, Homo sapien
gagtgaaaagctttggcctctccta

SEQ ID NO: 183103 - DNA, 25 bp, Homo sapien
agagtgaaaagctttggcctctcct

SEQ ID NO: 183104 - DNA, 25 bp, Homo sapien
gaaaagctttggcctctcctataga

SEQ ID NO: 183105 - DNA, 25 bp, Homo sapien
gggtgtcaaaatgcgaacattaact

SEQ ID NO: 183106 - DNA, 25 bp, Homo sapien
gatatgggtgtcaaaatgcgaacat

SEQ ID NO: 183107 - DNA, 25 bp, Homo sapien
atctttgcctgatgtgttgaatggg

SEQ ID NO: 183108 - DNA, 25 bp, Homo sapien
caaaatgcgaacattaactttattc

SEQ ID NO: 183109 - DNA, 25 bp, Homo sapien
ttgtgcttttggtaaggacggatct

SEQ ID NO: 183110 - DNA, 25 bp, Homo sapien
aataaattagacagatttgtcttgt

SEQ ID NO: 183111 - DNA, 25 bp, Homo sapien
cttgttttatgagcaagatcctgtt

SEQ ID NO: 183112 - DNA, 25 bp, Homo sapien
cttttggtaaggacggatctggcgc

SEQ ID NO: 183113 - DNA, 25 bp, Homo sapien
ctttgtgtactgcccgccctgcatg

SEQ ID NO: 183114 - DNA, 25 bp, Homo sapien
tgtgtactgcccgccctgcatgtgt

SEQ ID NO: 183115 - DNA, 25 bp, Homo sapien
tttgtgtactgcccgccctgcatgt

SEQ ID NO: 183116 - DNA, 25 bp, Homo sapien
gtactgcccgccctgcatgtgtctg

SEQ ID NO: 183117 - DNA, 25 bp, Homo sapien
tgcgcgtctttctcagattacgcct

SEQ ID NO: 183118 - DNA, 25 bp, Homo sapien
ggttttcacagttataacaatgcct

SEQ ID NO: 183119 - DNA, 25 bp, Homo sapien
tataacaatgcctgcgcgtctttct

SEQ ID NO: 183120 - DNA, 25 bp, Homo sapien
tcagattacgccttgttttcagccc

SEQ ID NO: 183121 - DNA, 25 bp, Homo sapien
gcattctgctccactacttaaagcg

SEQ ID NO: 183122 - DNA, 25 bp, Homo sapien
aaataagggtgaagagccattgtct

SEQ ID NO: 183123 - DNA, 25 bp, Homo sapien
gctccactacttaaagcgtaaaata

SEQ ID NO: 183124 - DNA, 25 bp, Homo sapien
gccattgtctaatgcagcctttttc

SEQ ID NO: 183125 - DNA, 25 bp, Homo sapien
ccgatgccacatgttcctgtggaat

SEQ ID NO: 183126 - DNA, 25 bp, Homo sapien
accgatgccacatgttcctgtggaa

SEQ ID NO: 183127 - DNA, 25 bp, Homo sapien
aaaactgattgtactgctgtcaaac

SEQ ID NO: 183128 - DNA, 25 bp, Homo sapien
tcactgccacgtacattaggccctt

SEQ ID NO: 183129 - DNA, 25 bp, Homo sapien
tttcagcagggttaaaacagggcca

SEQ ID NO: 183130 - DNA, 25 bp, Homo sapien
ttctgcctaattgccatcactgcca

SEQ ID NO: 183131 - DNA, 25 bp, Homo sapien
attcatgtgtcattagtgaacgaag

SEQ ID NO: 183132 - DNA, 25 bp, Homo sapien
tgtgtcattagtgaacgaagattga

SEQ ID NO: 183133 - DNA, 25 bp, Homo sapien
tagtgaacgaagattgacaagaaat

SEQ ID NO: 183134 - DNA, 25 bp, Homo sapien
tcacagatttgaccttcaaccccaa

SEQ ID NO: 183135 - DNA, 25 bp, Homo sapien
gccactacatttagactatgagaca

SEQ ID NO: 183136 - DNA, 25 bp, Homo sapien
tgccactacatttagactatgagac

SEQ ID NO: 183137 - DNA, 25 bp, Homo sapien
cactacatttagactatgagacatg

SEQ ID NO: 183138 - DNA, 25 bp, Homo sapien
gcttgccactacatttagactatga

SEQ ID NO: 183139 - DNA, 25 bp, Homo sapien
caaggggaacttcgcgaacaaagag

SEQ ID NO: 183140 - DNA, 25 bp, Homo sapien
tgcacagattttggagacctccaat

SEQ ID NO: 183141 - DNA, 25 bp, Homo sapien
ggagacctccaatttgtagagccat

SEQ ID NO: 183142 - DNA, 25 bp, Homo sapien
ttttattgcacagattttggagacc

SEQ ID NO: 183143 - DNA, 25 bp, Homo sapien
aaatgtgccaatacacagttccagt

SEQ ID NO: 183144 - DNA, 25 bp, Homo sapien
tagaaaatgtgccaatacacagttc

SEQ ID NO: 183145 - DNA, 25 bp, Homo sapien
gaaaatgtgccaatacacagttcca

SEQ ID NO: 183146 - DNA, 25 bp, Homo sapien
aaaatgtgccaatacacagttccag

SEQ ID NO: 183147 - DNA, 25 bp, Homo sapien
agcaatgaaatatcttgagttgagg

SEQ ID NO: 183148 - DNA, 25 bp, Homo sapien
gcaatgaaatatcttgagttgaggg

SEQ ID NO: 183149 - DNA, 25 bp, Homo sapien
aagcaatgaaatatcttgagttgag

SEQ ID NO: 183150 - DNA, 25 bp, Homo sapien
caatgaaatatcttgagttgagggc

SEQ ID NO: 183151 - DNA, 25 bp, Homo sapien
cttcaccttgtgcacttcctgacat

SEQ ID NO: 183152 - DNA, 25 bp, Homo sapien
tcttcaccttgtgcacttcctgaca

SEQ ID NO: 183153 - DNA, 25 bp, Homo sapien
cagcgcatgcttccggcaccagtgt

SEQ ID NO: 183154 - DNA, 25 bp, Homo sapien
gcatgcttccggcaccagtgtcttt

SEQ ID NO: 183155 - DNA, 25 bp, Homo sapien
ttgggagaggtgtgaaaaagatttc

SEQ ID NO: 183156 - DNA, 25 bp, Homo sapien
tccggcaccagtgtctttgggagag

SEQ ID NO: 183157 - DNA, 25 bp, Homo sapien
cactggctgcttggcatatcccttt

SEQ ID NO: 183158 - DNA, 25 bp, Homo sapien
ggctgcttggcatatccctttcctc

SEQ ID NO: 183159 - DNA, 25 bp, Homo sapien
ctgcttggcatatccctttcctcca

SEQ ID NO: 183160 - DNA, 25 bp, Homo sapien
tggctgcttggcatatccctttcct

SEQ ID NO: 183161 - DNA, 25 bp, Homo sapien
cttgatcacactgtttgttttcaca

SEQ ID NO: 183162 - DNA, 25 bp, Homo sapien
tatcttgatcacactgtttgttttc

SEQ ID NO: 183163 - DNA, 25 bp, Homo sapien
ctttatcttgatcacactgtttgtt

SEQ ID NO: 183164 - DNA, 25 bp, Homo sapien
ggcctttatcttgatcacactgttt

SEQ ID NO: 183165 - DNA, 25 bp, Homo sapien
ctctctgtcgatccaccaggctgag

SEQ ID NO: 183166 - DNA, 25 bp, Homo sapien
ctacttcaagtcttggagtttcagg

SEQ ID NO: 183167 - DNA, 25 bp, Homo sapien
aacaaaagcctgttggtacccagag

SEQ ID NO: 183168 - DNA, 25 bp, Homo sapien
ttgacaggtgctctttgctaaacat

SEQ ID NO: 183169 - DNA, 25 bp, Homo sapien
tgtagctagtataccacgaaagtag

SEQ ID NO: 183170 - DNA, 25 bp, Homo sapien
tctggagtttccgtcttagagcgaa

SEQ ID NO: 183171 - DNA, 25 bp, Homo sapien
aagtagattgctcgtgaatgttgcg

SEQ ID NO: 183172 - DNA, 25 bp, Homo sapien
tggcacatctcatgcctgcgctggg

SEQ ID NO: 183173 - DNA, 25 bp, Homo sapien
caggatcacactcatcccttgtaga

SEQ ID NO: 183174 - DNA, 25 bp, Homo sapien
gaaatgggtattgtggcagtagtct

SEQ ID NO: 183175 - DNA, 25 bp, Homo sapien
ttgaataggcctgaaattgaaatgg

SEQ ID NO: 183176 - DNA, 25 bp, Homo sapien
aaagtggtaaccctgactctcgcca

SEQ ID NO: 183177 - DNA, 25 bp, Homo sapien
tacagcgctatggtgctccaaaggg

SEQ ID NO: 183178 - DNA, 25 bp, Homo sapien
aagggacatccaaccgcctgagaaa

SEQ ID NO: 183179 - DNA, 25 bp, Homo sapien
tttatcttgcaaggtttgagagtac

SEQ ID NO: 183180 - DNA, 25 bp, Homo sapien
gcaaggtttgagagtacagcgctat

SEQ ID NO: 183181 - DNA, 25 bp, Homo sapien
gacaagaatattttttattattgaa

SEQ ID NO: 183182 - DNA, 25 bp, Homo sapien
ccaggcaggcaaaggattcaaaact

SEQ ID NO: 183183 - DNA, 25 bp, Homo sapien
tgggacacaccaaacagaactactt

SEQ ID NO: 183184 - DNA, 25 bp, Homo sapien
gagtttaaatatactgaggcacacc

SEQ ID NO: 183185 - DNA, 25 bp, Homo sapien
taagagcactaggtcttgcacagct

SEQ ID NO: 183186 - DNA, 25 bp, Homo sapien
agtggagacaggtttaatgcattaa

SEQ ID NO: 183187 - DNA, 25 bp, Homo sapien
caacacagttggtcacacaaaatac

SEQ ID NO: 183188 - DNA, 25 bp, Homo sapien
ggcaactcagatacatcaacagtgc

SEQ ID NO: 183189 - DNA, 25 bp, Homo sapien
cacaataacaagtttcgtgtttcag

SEQ ID NO: 183190 - DNA, 25 bp, Homo sapien
gaaaataatggcagttctgcaaggc

SEQ ID NO: 183191 - DNA, 25 bp, Homo sapien
agaaaataatggcagttctgcaagg

SEQ ID NO: 183192 - DNA, 25 bp, Homo sapien
gtgttttgacagattataggagatg

SEQ ID NO: 183193 - DNA, 25 bp, Homo sapien
tccagctctcgcaaatctaaccagg

SEQ ID NO: 183194 - DNA, 25 bp, Homo sapien
tgatgtagcgctccccgattttgca

SEQ ID NO: 183195 - DNA, 25 bp, Homo sapien
gtggctagcacttggattgatcagg

SEQ ID NO: 183196 - DNA, 25 bp, Homo sapien
gcaaatctaaccaggtctgatagtc

SEQ ID NO: 183197 - DNA, 25 bp, Homo sapien
tggctcaaggtcttatccacactgt

SEQ ID NO: 183198 - DNA, 25 bp, Homo sapien
tacttgcagcaaattgttgataaga

SEQ ID NO: 183199 - DNA, 25 bp, Homo sapien
tgtagccaagggtggctcaaggtct

SEQ ID NO: 183200 - DNA, 25 bp, Homo sapien
cactgtagcgctttctcatttttac

SEQ ID NO: 183201 - DNA, 25 bp, Homo sapien
gaaatctgccaacctaataggaagc

SEQ ID NO: 183202 - DNA, 25 bp, Homo sapien
tatggacctgaagatacagactgtc

SEQ ID NO: 183203 - DNA, 25 bp, Homo sapien
tgttacaagtatttgcctgccctga

SEQ ID NO: 183204 - DNA, 25 bp, Homo sapien
tcaccaagtcttgaataggcagctt

SEQ ID NO: 183205 - DNA, 25 bp, Homo sapien
gatttactcactggtgagtaaagtg

SEQ ID NO: 183206 - DNA, 25 bp, Homo sapien
ttactcactggtgagtaaagtgcac

SEQ ID NO: 183207 - DNA, 25 bp, Homo sapien
tcactggtgagtaaagtgcaccttc

SEQ ID NO: 183208 - DNA, 25 bp, Homo sapien
actcactggtgagtaaagtgcacct

SEQ ID NO: 183209 - DNA, 25 bp, Homo sapien
ttggcttgcttcatgctgatgggaa

SEQ ID NO: 183210 - DNA, 25 bp, Homo sapien
agtgtagtgcttagtacttctctcc

SEQ ID NO: 183211 - DNA, 25 bp, Homo sapien
gcttagtacttctctccctttggct

SEQ ID NO: 183212 - DNA, 25 bp, Homo sapien
caccacctgtcacagtgtagtgctt

SEQ ID NO: 183213 - DNA, 25 bp, Homo sapien
caaacaaggccactggaaatcatcg

SEQ ID NO: 183214 - DNA, 25 bp, Homo sapien
aagacctttagagactcgagtcggc

SEQ ID NO: 183215 - DNA, 25 bp, Homo sapien
aatcatcgtctcactcactccggag

SEQ ID NO: 183216 - DNA, 25 bp, Homo sapien
tcagcaacactaactgggacgctcc

SEQ ID NO: 183217 - DNA, 25 bp, Homo sapien
ggatggtagagcatcacaaccttac

SEQ ID NO: 183218 - DNA, 25 bp, Homo sapien
tgtttaaacacacccatacagcagc

SEQ ID NO: 183219 - DNA, 25 bp, Homo sapien
tcattttaatgaactaggcatatgg

SEQ ID NO: 183220 - DNA, 25 bp, Homo sapien
catgttcatactggacttggtttca

SEQ ID NO: 183221 - DNA, 25 bp, Homo sapien
caacttaagtgtttagcgttctgga

SEQ ID NO: 183222 - DNA, 25 bp, Homo sapien
taccatgtggtaatggtgctgggct

SEQ ID NO: 183223 - DNA, 25 bp, Homo sapien
gccattctatgccttgagataccgt

SEQ ID NO: 183224 - DNA, 25 bp, Homo sapien
tattgtatagttgaggattgagacc

SEQ ID NO: 183225 - DNA, 25 bp, Homo sapien
cactattttcatggcaatctgtaac

SEQ ID NO: 183226 - DNA, 25 bp, Homo sapien
tctcactattttcatggcaatctgt

SEQ ID NO: 183227 - DNA, 25 bp, Homo sapien
atctttattatacacgactttgtta

SEQ ID NO: 183228 - DNA, 25 bp, Homo sapien
cacgactttgttatacaactttttg

SEQ ID NO: 183229 - DNA, 25 bp, Homo sapien
taacccagtaaggtaggaattagca

SEQ ID NO: 183230 - DNA, 25 bp, Homo sapien
cagtaaggtaggaattagcatcacc

SEQ ID NO: 183231 - DNA, 25 bp, Homo sapien
cccagtaaggtaggaattagcatca

SEQ ID NO: 183232 - DNA, 25 bp, Homo sapien
attagcatcaccatatcagaaaaga

SEQ ID NO: 183233 - DNA, 25 bp, Homo sapien
ttcaaatcataccttattttgcaca

SEQ ID NO: 183234 - DNA, 25 bp, Homo sapien
caaatcataccttattttgcacaca

SEQ ID NO: 183235 - DNA, 25 bp, Homo sapien
tttttataaaggacatctgttaatg

SEQ ID NO: 183236 - DNA, 25 bp, Homo sapien
ttataaaggacatctgttaatgctt

SEQ ID NO: 183237 - DNA, 25 bp, Homo sapien
cagtgcaatgactactcaagcaccc

SEQ ID NO: 183238 - DNA, 25 bp, Homo sapien
gtattatattgtatcaagtcaacat

SEQ ID NO: 183239 - DNA, 25 bp, Homo sapien
gtgcaatgactactcaagcacccca

SEQ ID NO: 183240 - DNA, 25 bp, Homo sapien
gcagtgcaatgactactcaagcacc

SEQ ID NO: 183241 - DNA, 25 bp, Homo sapien
tggagtcctaactggtaaagtccaa

SEQ ID NO: 183242 - DNA, 25 bp, Homo sapien
catctgagctggtctccatatcact

SEQ ID NO: 183243 - DNA, 25 bp, Homo sapien
ggaaaagtgagggttctatctccca

SEQ ID NO: 183244 - DNA, 25 bp, Homo sapien
gcaagagtgagccataaggaggtac

SEQ ID NO: 183245 - DNA, 25 bp, Homo sapien
acaattaaaggaaatatattatcat

SEQ ID NO: 183246 - DNA, 25 bp, Homo sapien
caattaaaggaaatatattatcatt

SEQ ID NO: 183247 - DNA, 25 bp, Homo sapien
taacaattaaaggaaatatattatc

SEQ ID NO: 183248 - DNA, 25 bp, Homo sapien
aacaattaaaggaaatatattatca

SEQ ID NO: 183249 - DNA, 25 bp, Homo sapien
tatcatttttgaatggaagatatta

SEQ ID NO: 183250 - DNA, 25 bp, Homo sapien
atcatttttgaatggaagatattac

SEQ ID NO: 183251 - DNA, 25 bp, Homo sapien
ttagattattatcatttttgaatgg

SEQ ID NO: 183252 - DNA, 25 bp, Homo sapien
gattattatcatttttgaatggaag

SEQ ID NO: 183253 - DNA, 25 bp, Homo sapien
ttcattaaatgggaatgtgccgctt

SEQ ID NO: 183254 - DNA, 25 bp, Homo sapien
tccttccagggatttggtggataca

SEQ ID NO: 183255 - DNA, 25 bp, Homo sapien
taaatgggaatgtgccgcttaggct

SEQ ID NO: 183256 - DNA, 25 bp, Homo sapien
gaatttggtcgtgtatgtcttcatc

SEQ ID NO: 183257 - DNA, 25 bp, Homo sapien
agagagcgattgtagcccttgttcc

SEQ ID NO: 183258 - DNA, 25 bp, Homo sapien
tccaatgatccgggcaaaaccaaaa

SEQ ID NO: 183259 - DNA, 25 bp, Homo sapien
tgaccccaacagaccacatgtctag

SEQ ID NO: 183260 - DNA, 25 bp, Homo sapien
gaccacatgtctagagagcgattgt

SEQ ID NO: 183261 - DNA, 25 bp, Homo sapien
ggctttttgctgagagaggctttta

SEQ ID NO: 183262 - DNA, 25 bp, Homo sapien
tggctttttgctgagagaggctttt

SEQ ID NO: 183263 - DNA, 25 bp, Homo sapien
ctttttgctgagagaggcttttata

SEQ ID NO: 183264 - DNA, 25 bp, Homo sapien
tttttgctgagagaggcttttatac

SEQ ID NO: 183265 - DNA, 25 bp, Homo sapien
ttttaaaatgaaggtgccgcaaagc

SEQ ID NO: 183266 - DNA, 25 bp, Homo sapien
gaaggtgccgcaaagccacgagtat

SEQ ID NO: 183267 - DNA, 25 bp, Homo sapien
gaggtcacagtgaacgatattttta

SEQ ID NO: 183268 - DNA, 25 bp, Homo sapien
cagctgaggctagcaacacattttc

SEQ ID NO: 183269 - DNA, 25 bp, Homo sapien
tatgtgctctggcaacctgcccttt

SEQ ID NO: 183270 - DNA, 25 bp, Homo sapien
cttcgttatgtgctctggcaacctg

SEQ ID NO: 183271 - DNA, 25 bp, Homo sapien
tttcacttgacaagatcatttccag

SEQ ID NO: 183272 - DNA, 25 bp, Homo sapien
caacctgcccttttcacttgacaag

SEQ ID NO: 183273 - DNA, 25 bp, Homo sapien
tttacaacaccagggtgatgaaggt

SEQ ID NO: 183274 - DNA, 25 bp, Homo sapien
actccaaatttacaacaccagggtg

SEQ ID NO: 183275 - DNA, 25 bp, Homo sapien
tctttcaggcgtctcaaacatacac

SEQ ID NO: 183276 - DNA, 25 bp, Homo sapien
ttcaggcgtctcaaacatacactcc

SEQ ID NO: 183277 - DNA, 25 bp, Homo sapien
tctggatgcatctactttttcacac

SEQ ID NO: 183278 - DNA, 25 bp, Homo sapien
taaagtgaacgctataaagacatcc

SEQ ID NO: 183279 - DNA, 25 bp, Homo sapien
gaaaggtggactcctttttctcaga

SEQ ID NO: 183280 - DNA, 25 bp, Homo sapien
gacatccatgtatctgccaatctgg

SEQ ID NO: 183281 - DNA, 25 bp, Homo sapien
tcgcagtcattcttcgtttcataca

SEQ ID NO: 183282 - DNA, 25 bp, Homo sapien
ctcgcagtcattcttcgtttcatac

SEQ ID NO: 183283 - DNA, 25 bp, Homo sapien
cgcagtcattcttcgtttcatacat

SEQ ID NO: 183284 - DNA, 25 bp, Homo sapien
gaagggcttcacaggtactgtcgaa

SEQ ID NO: 183285 - DNA, 25 bp, Homo sapien
gtttatacggcccaaaggctcagca

SEQ ID NO: 183286 - DNA, 25 bp, Homo sapien
tacacaaggaggtacaaagcttcag

SEQ ID NO: 183287 - DNA, 25 bp, Homo sapien
gaatcttcccaggttttgccaatgc

SEQ ID NO: 183288 - DNA, 25 bp, Homo sapien
acagaaaattagaaccccaatatct

SEQ ID NO: 183289 - DNA, 25 bp, Homo sapien
cgtgagccatctcggccggccttat

SEQ ID NO: 183290 - DNA, 25 bp, Homo sapien
gaaagccaattaaaaggcctagaca

SEQ ID NO: 183291 - DNA, 25 bp, Homo sapien
tctacctctcgagtcagtagctgat

SEQ ID NO: 183292 - DNA, 25 bp, Homo sapien
gaataaatatctcctgtacgcatgc

SEQ ID NO: 183293 - DNA, 25 bp, Homo sapien
ttccttcagaagaccacagtgcgtg

SEQ ID NO: 183294 - DNA, 25 bp, Homo sapien
tactagagtttcagatgtcatctgc

SEQ ID NO: 183295 - DNA, 25 bp, Homo sapien
caagggccaggttaggaaagatgtc

SEQ ID NO: 183296 - DNA, 25 bp, Homo sapien
aattgcaacctcattacgaagctgg

SEQ ID NO: 183297 - DNA, 25 bp, Homo sapien
ctgtagaattgcaacctcattacga

SEQ ID NO: 183298 - DNA, 25 bp, Homo sapien
aacctcattacgaagctggctttct

SEQ ID NO: 183299 - DNA, 25 bp, Homo sapien
tgttggaaatcgtaatttgtcaatg

SEQ ID NO: 183300 - DNA, 25 bp, Homo sapien
taaacaattccaaactgtccagaac

SEQ ID NO: 183301 - DNA, 25 bp, Homo sapien
aactgtccagaacccagtacttcat

SEQ ID NO: 183302 - DNA, 25 bp, Homo sapien
ctccataaacaattccaaactgtcc

SEQ ID NO: 183303 - DNA, 25 bp, Homo sapien
ctgtccagaacccagtacttcatca

SEQ ID NO: 183304 - DNA, 25 bp, Homo sapien
cattttcttgaatctggcaatttga

SEQ ID NO: 183305 - DNA, 25 bp, Homo sapien
gcaatttgatactgaaatactcaca

SEQ ID NO: 183306 - DNA, 25 bp, Homo sapien
acattttcttgaatctggcaatttg

SEQ ID NO: 183307 - DNA, 25 bp, Homo sapien
ttttcttgaatctggcaatttgata

SEQ ID NO: 183308 - DNA, 25 bp, Homo sapien
tctgttcttaggaagggcagggcac

SEQ ID NO: 183309 - DNA, 25 bp, Homo sapien
cattctacaataaactaagtcatcc

SEQ ID NO: 183310 - DNA, 25 bp, Homo sapien
gcagggcacatgtttactaagcaag

SEQ ID NO: 183311 - DNA, 25 bp, Homo sapien
taggcacatgatgagctttgggctg

SEQ ID NO: 183312 - DNA, 25 bp, Homo sapien
catttgccgtagtgatttcgaaaca

SEQ ID NO: 183313 - DNA, 25 bp, Homo sapien
tttcgaaacaatgaggattggcccc

SEQ ID NO: 183314 - DNA, 25 bp, Homo sapien
gattggccccattaggaattaaagc

SEQ ID NO: 183315 - DNA, 25 bp, Homo sapien
ccaacgccactggtgagaacactgt

SEQ ID NO: 183316 - DNA, 25 bp, Homo sapien
agagggtaatacatttgctatccaa

SEQ ID NO: 183317 - DNA, 25 bp, Homo sapien
ccaatctccaatagtgccgtttccg

SEQ ID NO: 183318 - DNA, 25 bp, Homo sapien
gtgtcattctgaaagagggtaatac

SEQ ID NO: 183319 - DNA, 25 bp, Homo sapien
tgctatccaatctccaatagtgccg

SEQ ID NO: 183320 - DNA, 25 bp, Homo sapien
ggtgtagtggaccatccatccttct

SEQ ID NO: 183321 - DNA, 25 bp, Homo sapien
cttgctggtgtagtggaccatccat

SEQ ID NO: 183322 - DNA, 25 bp, Homo sapien
tcgtgtgtttgacagactgcactac

SEQ ID NO: 183323 - DNA, 25 bp, Homo sapien
cctcatgagtgggatattgttgctt

SEQ ID NO: 183324 - DNA, 25 bp, Homo sapien
tgttggcgtcctcgtggtctgggtc

SEQ ID NO: 183325 - DNA, 25 bp, Homo sapien
ttgcatctcgccactgtcgttctgg

SEQ ID NO: 183326 - DNA, 25 bp, Homo sapien
catatcatccatgagcccactgttc

SEQ ID NO: 183327 - DNA, 25 bp, Homo sapien
cgttctggcactctgccattgccat

SEQ ID NO: 183328 - DNA, 25 bp, Homo sapien
gaccacatcagactctgccccaggg

SEQ ID NO: 183329 - DNA, 25 bp, Homo sapien
ttttcacccatgaagataagcctgg

SEQ ID NO: 183330 - DNA, 25 bp, Homo sapien
tcacccatgaagataagcctggaat

SEQ ID NO: 183331 - DNA, 25 bp, Homo sapien
aaaattattttcacccatgaagata

SEQ ID NO: 183332 - DNA, 25 bp, Homo sapien
ttattttcacccatgaagataagcc

SEQ ID NO: 183333 - DNA, 25 bp, Homo sapien
cctgagcctgaacaaagtcaacacc

SEQ ID NO: 183334 - DNA, 25 bp, Homo sapien
gacgatcgccaagctttcaattttg

SEQ ID NO: 183335 - DNA, 25 bp, Homo sapien
cttcttcttttaggtacagtatata

SEQ ID NO: 183336 - DNA, 25 bp, Homo sapien
caccacatgccacagaaagtgggac

SEQ ID NO: 183337 - DNA, 25 bp, Homo sapien
tgaaagggtctttgactgttatcaa

SEQ ID NO: 183338 - DNA, 25 bp, Homo sapien
catgaaagggtctttgactgttatc

SEQ ID NO: 183339 - DNA, 25 bp, Homo sapien
gatcatgaaagggtctttgactgtt

SEQ ID NO: 183340 - DNA, 25 bp, Homo sapien
aagatcatgaaagggtctttgactg

SEQ ID NO: 183341 - DNA, 25 bp, Homo sapien
ttaatggtcacttcgccaaggcagt

SEQ ID NO: 183342 - DNA, 25 bp, Homo sapien
tccattaatggtcacttcgccaagg

SEQ ID NO: 183343 - DNA, 25 bp, Homo sapien
tcggtgcacaacgtttatggcagtt

SEQ ID NO: 183344 - DNA, 25 bp, Homo sapien
cagttgtttggtactttcggtgcac

SEQ ID NO: 183345 - DNA, 25 bp, Homo sapien
tcttgcagtactggcacactgtggg

SEQ ID NO: 183346 - DNA, 25 bp, Homo sapien
tctctcgaccaataaacgactctga

SEQ ID NO: 183347 - DNA, 25 bp, Homo sapien
tgtgtgcggcactttaactttagac

SEQ ID NO: 183348 - DNA, 25 bp, Homo sapien
tcttgtcaaggtgaattggtcgtcc

SEQ ID NO: 183349 - DNA, 25 bp, Homo sapien
tcagtgcatggctacacaaaaatag

SEQ ID NO: 183350 - DNA, 25 bp, Homo sapien
aatagataccactaaaaactgggct

SEQ ID NO: 183351 - DNA, 25 bp, Homo sapien
agtatcagaataccatgtctaaggg

SEQ ID NO: 183352 - DNA, 25 bp, Homo sapien
ggcatatttgttcataactccctga

SEQ ID NO: 183353 - DNA, 25 bp, Homo sapien
gcctgagagttgcacgggattttca

SEQ ID NO: 183354 - DNA, 25 bp, Homo sapien
gagagttgcacgggattttcagagc

SEQ ID NO: 183355 - DNA, 25 bp, Homo sapien
tgcctgagagttgcacgggattttc

SEQ ID NO: 183356 - DNA, 25 bp, Homo sapien
ctgagagttgcacgggattttcaga

SEQ ID NO: 183357 - DNA, 25 bp, Homo sapien
tatactcctggtttacactgtaaaa

SEQ ID NO: 183358 - DNA, 25 bp, Homo sapien
catcattgtaatatccatcgggaga

SEQ ID NO: 183359 - DNA, 25 bp, Homo sapien
gaaatttagtacctgccttctccaa

SEQ ID NO: 183360 - DNA, 25 bp, Homo sapien
tccaagagggatctattcaacctaa

SEQ ID NO: 183361 - DNA, 25 bp, Homo sapien
tcatgtaaatggggaagtgggtaaa

SEQ ID NO: 183362 - DNA, 25 bp, Homo sapien
gaagtgggtaaacaggaagccatac

SEQ ID NO: 183363 - DNA, 25 bp, Homo sapien
ccccacagatttctcatgtaaatgg

SEQ ID NO: 183364 - DNA, 25 bp, Homo sapien
tcaccccacagatttctcatgtaaa

SEQ ID NO: 183365 - DNA, 25 bp, Homo sapien
gcctcacaccgctgcaattgttggg

SEQ ID NO: 183366 - DNA, 25 bp, Homo sapien
cccagtgagggaaacgtttgagagc

SEQ ID NO: 183367 - DNA, 25 bp, Homo sapien
gtttgagagccttctccgcctcaca

SEQ ID NO: 183368 - DNA, 25 bp, Homo sapien
tagagagttcagcagatgatgtgcg

SEQ ID NO: 183369 - DNA, 25 bp, Homo sapien
agaccttgacgtaccagcccccaca

SEQ ID NO: 183370 - DNA, 25 bp, Homo sapien
catttaagaccttgacgtaccagcc

SEQ ID NO: 183371 - DNA, 25 bp, Homo sapien
accttgacgtaccagcccccacagc

SEQ ID NO: 183372 - DNA, 25 bp, Homo sapien
cacatttaagaccttgacgtaccag

SEQ ID NO: 183373 - DNA, 25 bp, Homo sapien
tatgaatgaacaaagagagcgtggg

SEQ ID NO: 183374 - DNA, 25 bp, Homo sapien
ttctccacagtgatcacagaaagct

SEQ ID NO: 183375 - DNA, 25 bp, Homo sapien
cacagaaagctggagctctgtatga

SEQ ID NO: 183376 - DNA, 25 bp, Homo sapien
acaaagagagcgtggggacgaatct

SEQ ID NO: 183377 - DNA, 25 bp, Homo sapien
gttgaaaagtaagttgaataggcac

SEQ ID NO: 183378 - DNA, 25 bp, Homo sapien
caatgggctatctgttagtctgtca

SEQ ID NO: 183379 - DNA, 25 bp, Homo sapien
tcataagcagttagcacccttgact

SEQ ID NO: 183380 - DNA, 25 bp, Homo sapien
gataatcacttagcacaggaaaaca

SEQ ID NO: 183381 - DNA, 25 bp, Homo sapien
tagttgagtgtatgcatgccacctc

SEQ ID NO: 183382 - DNA, 25 bp, Homo sapien
ctgcaaaagactgccctcttctctt

SEQ ID NO: 183383 - DNA, 25 bp, Homo sapien
aaagactgccctcttctcttttcca

SEQ ID NO: 183384 - DNA, 25 bp, Homo sapien
caaaagactgccctcttctcttttc

SEQ ID NO: 183385 - DNA, 25 bp, Homo sapien
aagactgccctcttctcttttccat

SEQ ID NO: 183386 - DNA, 25 bp, Homo sapien
tacttttcatagaaacagatgctta

SEQ ID NO: 183387 - DNA, 25 bp, Homo sapien
gtacttttcatagaaacagatgctt

SEQ ID NO: 183388 - DNA, 25 bp, Homo sapien
acttttcatagaaacagatgcttac

SEQ ID NO: 183389 - DNA, 25 bp, Homo sapien
tgtacttttcatagaaacagatgct

SEQ ID NO: 183390 - DNA, 25 bp, Homo sapien
gaagaaacagttcaacaattgctga

SEQ ID NO: 183391 - DNA, 25 bp, Homo sapien
ctgaatccaattcagcgctgttggc

SEQ ID NO: 183392 - DNA, 25 bp, Homo sapien
tgtgtgcaggaattgtcccggctgt

SEQ ID NO: 183393 - DNA, 25 bp, Homo sapien
agggtatacccactccagaagaaga

SEQ ID NO: 183394 - DNA, 25 bp, Homo sapien
aagtgccagtgggatatccaagtgg

SEQ ID NO: 183395 - DNA, 25 bp, Homo sapien
gatgggttctgttctagatatgttc

SEQ ID NO: 183396 - DNA, 25 bp, Homo sapien
accaactggtaccactaatgatgag

SEQ ID NO: 183397 - DNA, 25 bp, Homo sapien
gtgggatatccaagtggaaaaagtc

SEQ ID NO: 183398 - DNA, 25 bp, Homo sapien
taactcagaatttctaacagtaaga

SEQ ID NO: 183399 - DNA, 25 bp, Homo sapien
aaagtcttcaaaaacgcacatataa

SEQ ID NO: 183400 - DNA, 25 bp, Homo sapien
aatttctaacagtaagacagattct

SEQ ID NO: 183401 - DNA, 25 bp, Homo sapien
tcttcaaaaacgcacatataatatc

SEQ ID NO: 183402 - DNA, 25 bp, Homo sapien
tgcttaagagtctaatgttaaaacc

SEQ ID NO: 183403 - DNA, 25 bp, Homo sapien
tagttactacaaccactctgacaca

SEQ ID NO: 183404 - DNA, 25 bp, Homo sapien
ccagagatatctaaataccagcatt

SEQ ID NO: 183405 - DNA, 25 bp, Homo sapien
cacaccacttagaaatccagagata

SEQ ID NO: 183406 - DNA, 25 bp, Homo sapien
tctttcatacatctggttgtcccca

SEQ ID NO: 183407 - DNA, 25 bp, Homo sapien
atccaaactatgtagaacaccaggc

SEQ ID NO: 183408 - DNA, 25 bp, Homo sapien
acatccaaactatgtagaacaccag

SEQ ID NO: 183409 - DNA, 25 bp, Homo sapien
acccacatccaaactatgtagaaca

SEQ ID NO: 183410 - DNA, 25 bp, Homo sapien
gtaatactgaaagccagataactct

SEQ ID NO: 183411 - DNA, 25 bp, Homo sapien
ccattaaatcttactgtgtagacag

SEQ ID NO: 183412 - DNA, 25 bp, Homo sapien
ggccattctcttagtcgctttttag

SEQ ID NO: 183413 - DNA, 25 bp, Homo sapien
gcacctgttggatgattccattgga

SEQ ID NO: 183414 - DNA, 25 bp, Homo sapien
tgctgctgacacgtagaagaagcct

SEQ ID NO: 183415 - DNA, 25 bp, Homo sapien
cagattcgcgtggttaagtatagcc

SEQ ID NO: 183416 - DNA, 25 bp, Homo sapien
taatgtaagtgcctcctggacacag

SEQ ID NO: 183417 - DNA, 25 bp, Homo sapien
tccataatatgggaggacctcgtcc

SEQ ID NO: 183418 - DNA, 25 bp, Homo sapien
ttggcttacctcatagctactggac

SEQ ID NO: 183419 - DNA, 25 bp, Homo sapien
gagcagaggcaaatgtagccatttc

SEQ ID NO: 183420 - DNA, 25 bp, Homo sapien
acatggcatgacctgaccttctcta

SEQ ID NO: 183421 - DNA, 25 bp, Homo sapien
gagttaactagcgtcacatggcatg

SEQ ID NO: 183422 - DNA, 25 bp, Homo sapien
tcaaaggcttcttagccctggtgct

SEQ ID NO: 183423 - DNA, 25 bp, Homo sapien
agccctgacagctaatttagcttca

SEQ ID NO: 183424 - DNA, 25 bp, Homo sapien
atttagcttcactgttggtgagttt

SEQ ID NO: 183425 - DNA, 25 bp, Homo sapien
cacattctgtacaattgcagccctg

SEQ ID NO: 183426 - DNA, 25 bp, Homo sapien
tcaagagacgtgattggagcagtac

SEQ ID NO: 183427 - DNA, 25 bp, Homo sapien
ggaggaagccttaagtcaagagacg

SEQ ID NO: 183428 - DNA, 25 bp, Homo sapien
ctgtccaaatgattcaaggtgctga

SEQ ID NO: 183429 - DNA, 25 bp, Homo sapien
catctgtatgttgctagaggctgag

SEQ ID NO: 183430 - DNA, 25 bp, Homo sapien
ttttcagaggtagggtcatggcgaa

SEQ ID NO: 183431 - DNA, 25 bp, Homo sapien
tcatggcgaaaaagcaggatcttat

SEQ ID NO: 183432 - DNA, 25 bp, Homo sapien
ctggatatcactggccgctttcacc

SEQ ID NO: 183433 - DNA, 25 bp, Homo sapien
agatcgccttcctggatatcactgg

SEQ ID NO: 183434 - DNA, 25 bp, Homo sapien
ttcttagtcttagaattaggggcta

SEQ ID NO: 183435 - DNA, 25 bp, Homo sapien
taggggctaaattcacatgaatcat

SEQ ID NO: 183436 - DNA, 25 bp, Homo sapien
tatatgtgtaaattagatgccagat

SEQ ID NO: 183437 - DNA, 25 bp, Homo sapien
tttttatatgtgtaaattagatgcc

SEQ ID NO: 183438 - DNA, 25 bp, Homo sapien
cctcctgcttttttatatgtgtaaa

SEQ ID NO: 183439 - DNA, 25 bp, Homo sapien
tatgtgtaaattagatgccagatat

SEQ ID NO: 183440 - DNA, 25 bp, Homo sapien
tgctggcatggattcagtggaattc

SEQ ID NO: 183441 - DNA, 25 bp, Homo sapien
tctgactgtgctacaaatgatcctt

SEQ ID NO: 183442 - DNA, 25 bp, Homo sapien
tggttccaaggacaaaaatctcatt

SEQ ID NO: 183443 - DNA, 25 bp, Homo sapien
gacagtgcatctgatttaaaggatc

SEQ ID NO: 183444 - DNA, 25 bp, Homo sapien
aagcagcacacttccccagtgtgga

SEQ ID NO: 183445 - DNA, 25 bp, Homo sapien
caggtctctgagggcctaattctca

SEQ ID NO: 183446 - DNA, 25 bp, Homo sapien
acttccccagtgtggaacctccagg

SEQ ID NO: 183447 - DNA, 25 bp, Homo sapien
cagtgtggaacctccaggtctctga

SEQ ID NO: 183448 - DNA, 25 bp, Homo sapien
ccctggttgatacggctttgtgtac

SEQ ID NO: 183449 - DNA, 25 bp, Homo sapien
tacggctttgtgtaccaagatagtc

SEQ ID NO: 183450 - DNA, 25 bp, Homo sapien
tgtgtaccaagatagtccctcaaga

SEQ ID NO: 183451 - DNA, 25 bp, Homo sapien
taccaagatagtccctcaagagaca

SEQ ID NO: 183452 - DNA, 25 bp, Homo sapien
tcatccaccagatcatgttgacatt

SEQ ID NO: 183453 - DNA, 25 bp, Homo sapien
gatatggagggtgtaatgtgtacca

SEQ ID NO: 183454 - DNA, 25 bp, Homo sapien
caggacatccttcatatctggggtt

SEQ ID NO: 183455 - DNA, 25 bp, Homo sapien
cagagccagtagggataaagggaat

SEQ ID NO: 183456 - DNA, 25 bp, Homo sapien
aggtttgtgctaccaccctcggcta

SEQ ID NO: 183457 - DNA, 25 bp, Homo sapien
ggtttgtgctaccaccctcggctaa

SEQ ID NO: 183458 - DNA, 25 bp, Homo sapien
catgagactagtgagccttgagact

SEQ ID NO: 183459 - DNA, 25 bp, Homo sapien
gcaatattccttttctagacctggg

SEQ ID NO: 183460 - DNA, 25 bp, Homo sapien
gaagagaagagcaacgacgaagaga

SEQ ID NO: 183461 - DNA, 25 bp, Homo sapien
gagctgcactgagttaaattccaag

SEQ ID NO: 183462 - DNA, 25 bp, Homo sapien
ttacaactgttataccctcacgcag

SEQ ID NO: 183463 - DNA, 25 bp, Homo sapien
tttccagtgctaacagtgagatgct

SEQ ID NO: 183464 - DNA, 25 bp, Homo sapien
tattattatagctactcttgcacac

SEQ ID NO: 183465 - DNA, 25 bp, Homo sapien
gagatgctgaagtccctagctagta

SEQ ID NO: 183466 - DNA, 25 bp, Homo sapien
tgactctatcagcattagtggtgtc

SEQ ID NO: 183467 - DNA, 25 bp, Homo sapien
ctggtatccaggcacctaggtggtg

SEQ ID NO: 183468 - DNA, 25 bp, Homo sapien
tttacacccctagacaccatgcatg

SEQ ID NO: 183469 - DNA, 25 bp, Homo sapien
taggtggtgcctataagtgaatgcc

SEQ ID NO: 183470 - DNA, 25 bp, Homo sapien
caagtgagtcacaggcctctaggaa

SEQ ID NO: 183471 - DNA, 25 bp, Homo sapien
gaatgagatccccaacaataactgc

SEQ ID NO: 183472 - DNA, 25 bp, Homo sapien
ctaatgctctggataggtcaagtaa

SEQ ID NO: 183473 - DNA, 25 bp, Homo sapien
aaaggtcactgttgaacctgaccag

SEQ ID NO: 183474 - DNA, 25 bp, Homo sapien
caagtggtgcccataaagtggaaca

SEQ ID NO: 183475 - DNA, 25 bp, Homo sapien
caagggtgccactatcagttggtgc

SEQ ID NO: 183476 - DNA, 25 bp, Homo sapien
cagttggtgcagacccttcgtcctc

SEQ ID NO: 183477 - DNA, 25 bp, Homo sapien
gcccagctaccatgacttacaagtg

SEQ ID NO: 183478 - DNA, 25 bp, Homo sapien
gctgtcacacaggttttattccatt

SEQ ID NO: 183479 - DNA, 25 bp, Homo sapien
tgcagttacctccactactgaagtc

SEQ ID NO: 183480 - DNA, 25 bp, Homo sapien
caggtgcattgtcaacgaaaaacaa

SEQ ID NO: 183481 - DNA, 25 bp, Homo sapien
ccattagcagctatgaaaacattta

SEQ ID NO: 183482 - DNA, 25 bp, Homo sapien
tatcagggaatagagaggcctaaac

SEQ ID NO: 183483 - DNA, 25 bp, Homo sapien
ccctatcagtactaaggctgttttg

SEQ ID NO: 183484 - DNA, 25 bp, Homo sapien
ttgacccttagaagtcattgtagag

SEQ ID NO: 183485 - DNA, 25 bp, Homo sapien
ccctaacaagggagtcagcctctgc

SEQ ID NO: 183486 - DNA, 25 bp, Homo sapien
gcatgtgctccaactgcagtctgca

SEQ ID NO: 183487 - DNA, 25 bp, Homo sapien
aaggtatatgcaaaaccctctccac

SEQ ID NO: 183488 - DNA, 25 bp, Homo sapien
tcagcttaggctcggatcccaggct

SEQ ID NO: 183489 - DNA, 25 bp, Homo sapien
ccaactgcagtctgcacagctgact

SEQ ID NO: 183490 - DNA, 25 bp, Homo sapien
catctggaaagctaacatctcataa

SEQ ID NO: 183491 - DNA, 25 bp, Homo sapien
gacaataagggtaatctgaaatttg

SEQ ID NO: 183492 - DNA, 25 bp, Homo sapien
aaagcacattgttcgagcatctgga

SEQ ID NO: 183493 - DNA, 25 bp, Homo sapien
tcctcccaaacatatgattagacaa

SEQ ID NO: 183494 - DNA, 25 bp, Homo sapien
gcctcgttgaaatctggtcacctcc

SEQ ID NO: 183495 - DNA, 25 bp, Homo sapien
agtttccactgaccagcctcgttga

SEQ ID NO: 183496 - DNA, 25 bp, Homo sapien
tgctccttctcatcgaaagattcct

SEQ ID NO: 183497 - DNA, 25 bp, Homo sapien
ccaggaccccttttcatagttcaag

SEQ ID NO: 183498 - DNA, 25 bp, Homo sapien
caaagaatattgcatccgatacctc

SEQ ID NO: 183499 - DNA, 25 bp, Homo sapien
actagaacatatgcatctggatgaa

SEQ ID NO: 183500 - DNA, 25 bp, Homo sapien
ggtataaaggaagttgaatgggcca

SEQ ID NO: 183501 - DNA, 25 bp, Homo sapien
tccgatacctcacatcacaaagggt

SEQ ID NO: 183502 - DNA, 25 bp, Homo sapien
tcccctggagatcgaaatgagccat

SEQ ID NO: 183503 - DNA, 25 bp, Homo sapien
caagcattttcttttggcggcttca

SEQ ID NO: 183504 - DNA, 25 bp, Homo sapien
cattacagacatttaggtaggtccc

SEQ ID NO: 183505 - DNA, 25 bp, Homo sapien
tatgaggaaaatcccactcccctgg

SEQ ID NO: 183506 - DNA, 25 bp, Homo sapien
tgagcacgtctcaatgtacccacca

SEQ ID NO: 183507 - DNA, 25 bp, Homo sapien
caatatgtatattcttgagcacgtc

SEQ ID NO: 183508 - DNA, 25 bp, Homo sapien
ggagctgcacacagttgcatcttgt

SEQ ID NO: 183509 - DNA, 25 bp, Homo sapien
tgcaaactgtcagtaagatcagaat

SEQ ID NO: 183510 - DNA, 25 bp, Homo sapien
ggaatactctccacggaaagtagga

SEQ ID NO: 183511 - DNA, 25 bp, Homo sapien
gactgtcatactcctacacagggag

SEQ ID NO: 183512 - DNA, 25 bp, Homo sapien
ccttccctttggtaagtgtgagcaa

SEQ ID NO: 183513 - DNA, 25 bp, Homo sapien
catgaatcgctcatctgcccaggat

SEQ ID NO: 183514 - DNA, 25 bp, Homo sapien
aagggaatcctcaattcttcatcta

SEQ ID NO: 183515 - DNA, 25 bp, Homo sapien
tatattcttgagcaagggaatcctc

SEQ ID NO: 183516 - DNA, 25 bp, Homo sapien
tattcttgagcaagggaatcctcaa

SEQ ID NO: 183517 - DNA, 25 bp, Homo sapien
tgtatattcttgagcaagggaatcc

SEQ ID NO: 183518 - DNA, 25 bp, Homo sapien
catgaatgattgacgtgcaccaagg

SEQ ID NO: 183519 - DNA, 25 bp, Homo sapien
tcaaatataatatccacccagcggg

SEQ ID NO: 183520 - DNA, 25 bp, Homo sapien
tatgttaacgggcaacaaggctcca

SEQ ID NO: 183521 - DNA, 25 bp, Homo sapien
gagaagccctcctcaaggttgactg

SEQ ID NO: 183522 - DNA, 25 bp, Homo sapien
ttcaccaccactgattcaaagtcat

SEQ ID NO: 183523 - DNA, 25 bp, Homo sapien
caaagattaactgacaccattcccc

SEQ ID NO: 183524 - DNA, 25 bp, Homo sapien
tcaggtgccataagtctcagaagcc

SEQ ID NO: 183525 - DNA, 25 bp, Homo sapien
tattcctgagtgatctagcgtggcc

SEQ ID NO: 183526 - DNA, 25 bp, Homo sapien
tcctgcaccaggaatgcgctggtcc

SEQ ID NO: 183527 - DNA, 25 bp, Homo sapien
tcattccgggggcactctggtgcag

SEQ ID NO: 183528 - DNA, 25 bp, Homo sapien
gcgcggcgaggaaagggcaagatac

SEQ ID NO: 183529 - DNA, 25 bp, Homo sapien
accaggaatgcgctggtccagggtc

SEQ ID NO: 183530 - DNA, 25 bp, Homo sapien
ggctggcagcggtgcggcgacttac

SEQ ID NO: 183531 - DNA, 25 bp, Homo sapien
aaagttggcgcggagagggccagcc

SEQ ID NO: 183532 - DNA, 25 bp, Homo sapien
cggactggagagaaatcggtgaata

SEQ ID NO: 183533 - DNA, 25 bp, Homo sapien
cagcgcctcgggttgcaggcgtcca

SEQ ID NO: 183534 - DNA, 25 bp, Homo sapien
aatggagcaagccatctcgcggacg

SEQ ID NO: 183535 - DNA, 25 bp, Homo sapien
ggctcacggctcaggccgatctgca

SEQ ID NO: 183536 - DNA, 25 bp, Homo sapien
ctgtagtccccggacgagtcctgca

SEQ ID NO: 183537 - DNA, 25 bp, Homo sapien
gatctgcagatggaacgagatgccc

SEQ ID NO: 183538 - DNA, 25 bp, Homo sapien
gcggccgcaggaccggaggggcgct

SEQ ID NO: 183539 - DNA, 25 bp, Homo sapien
ctgggcggccgcaggaccggagggg

SEQ ID NO: 183540 - DNA, 25 bp, Homo sapien
gccgcaggaccggaggggcgctcat

SEQ ID NO: 183541 - DNA, 25 bp, Homo sapien
ggcggccgcaggaccggaggggcgc

SEQ ID NO: 183542 - DNA, 25 bp, Homo sapien
tccgagagcccagacggaaaataaa

SEQ ID NO: 183543 - DNA, 25 bp, Homo sapien
ccaggagcttctttctccgagagcc

SEQ ID NO: 183544 - DNA, 25 bp, Homo sapien
gaaagttttgcagccgctgagccag

SEQ ID NO: 183545 - DNA, 25 bp, Homo sapien
agcaggaaagttttgcagccgctga

SEQ ID NO: 183546 - DNA, 25 bp, Homo sapien
gtaggaagccactccacagaaaggg

SEQ ID NO: 183547 - DNA, 25 bp, Homo sapien
ttgtcgctctgacgcgcccttacag

SEQ ID NO: 183548 - DNA, 25 bp, Homo sapien
tcggagggtcaagggaggatgggtc

SEQ ID NO: 183549 - DNA, 25 bp, Homo sapien
tgtctctaccctttttgtcgctctg

SEQ ID NO: 183550 - DNA, 25 bp, Homo sapien
tcacttgagattcaagagcgctgaa

SEQ ID NO: 183551 - DNA, 25 bp, Homo sapien
gattcaagagcgctgaagacattca

SEQ ID NO: 183552 - DNA, 25 bp, Homo sapien
cacttgagattcaagagcgctgaag

SEQ ID NO: 183553 - DNA, 25 bp, Homo sapien
attcaagagcgctgaagacattcat

SEQ ID NO: 183554 - DNA, 25 bp, Homo sapien
ttcagttgccacctagaagtttcct

SEQ ID NO: 183555 - DNA, 25 bp, Homo sapien
gttgattcagttgccacctagaagt

SEQ ID NO: 183556 - DNA, 25 bp, Homo sapien
gaactgtacatcttaaattgataac

SEQ ID NO: 183557 - DNA, 25 bp, Homo sapien
tgtacatcttaaattgataactcat

SEQ ID NO: 183558 - DNA, 25 bp, Homo sapien
gctggcatcagcctggtgtccctct

SEQ ID NO: 183559 - DNA, 25 bp, Homo sapien
ggattcctcgtcactcagcagggca

SEQ ID NO: 183560 - DNA, 25 bp, Homo sapien
gaaagaaatgccagtcaggggctta

SEQ ID NO: 183561 - DNA, 25 bp, Homo sapien
gtggacctctagtaaactgcagcaa

SEQ ID NO: 183562 - DNA, 25 bp, Homo sapien
tgtgaaactggatgctctcatctcc

SEQ ID NO: 183563 - DNA, 25 bp, Homo sapien
tagtgatgtgaaactggatgctctc

SEQ ID NO: 183564 - DNA, 25 bp, Homo sapien
taattggctaattatattggttagt

SEQ ID NO: 183565 - DNA, 25 bp, Homo sapien
tcagtagtgatgtgaaactggatgc

SEQ ID NO: 183566 - DNA, 25 bp, Homo sapien
tcaggggtgaattaagagactgtgt

SEQ ID NO: 183567 - DNA, 25 bp, Homo sapien
tcttatctgccacggtaggcctgtt

SEQ ID NO: 183568 - DNA, 25 bp, Homo sapien
tctgccacggtaggcctgtttccca

SEQ ID NO: 183569 - DNA, 25 bp, Homo sapien
tcaacgtttcttatctgccacggta

SEQ ID NO: 183570 - DNA, 25 bp, Homo sapien
tgttttgctttttccattactgctt

SEQ ID NO: 183571 - DNA, 25 bp, Homo sapien
ttttgctttttccattactgcttta

SEQ ID NO: 183572 - DNA, 25 bp, Homo sapien
ctgttttgctttttccattactgct

SEQ ID NO: 183573 - DNA, 25 bp, Homo sapien
tgctttttccattactgctttaaaa

SEQ ID NO: 183574 - DNA, 25 bp, Homo sapien
tcctcttacgggccttgtcctctgc

SEQ ID NO: 183575 - DNA, 25 bp, Homo sapien
tatatcttctatgttggttgtgact

SEQ ID NO: 183576 - DNA, 25 bp, Homo sapien
tccaggcctcctcttacgggccttg

SEQ ID NO: 183577 - DNA, 25 bp, Homo sapien
tcctctgcatttttacatcgcttca

SEQ ID NO: 183578 - DNA, 25 bp, Homo sapien
taataaagacctggcccaatttcag

SEQ ID NO: 183579 - DNA, 25 bp, Homo sapien
tagggcaggtctgaaagcaaaggcc

SEQ ID NO: 183580 - DNA, 25 bp, Homo sapien
tatggtaccattatcctgtccctgg

SEQ ID NO: 183581 - DNA, 25 bp, Homo sapien
catagtgtaatcactatggtaccat

SEQ ID NO: 183582 - DNA, 25 bp, Homo sapien
tgttgtgaggctgttagcagctgct

SEQ ID NO: 183583 - DNA, 25 bp, Homo sapien
aaatcatataatgccagcccaggaa

SEQ ID NO: 183584 - DNA, 25 bp, Homo sapien
cccaggaaagtaattactgagctgt

SEQ ID NO: 183585 - DNA, 25 bp, Homo sapien
agtgtgttgccctggtaggaagcct

SEQ ID NO: 183586 - DNA, 25 bp, Homo sapien
tacaaagtgtgagaacaagcagact

SEQ ID NO: 183587 - DNA, 25 bp, Homo sapien
taaggaggtctgttactggcagaac

SEQ ID NO: 183588 - DNA, 25 bp, Homo sapien
cacagtggtgccaagaaacaataca

SEQ ID NO: 183589 - DNA, 25 bp, Homo sapien
cagactgagtcacgatccattgcag

SEQ ID NO: 183590 - DNA, 25 bp, Homo sapien
cattccggttgacatagactataga

SEQ ID NO: 183591 - DNA, 25 bp, Homo sapien
ccagaatgggagtgctcttgttaat

SEQ ID NO: 183592 - DNA, 25 bp, Homo sapien
tggatctggctgtcagaaatctcca

SEQ ID NO: 183593 - DNA, 25 bp, Homo sapien
aattcttccgcatgctgattgtgca

SEQ ID NO: 183594 - DNA, 25 bp, Homo sapien
agcaaacttcaaactggaaacatga

SEQ ID NO: 183595 - DNA, 25 bp, Homo sapien
caaacttcaaactggaaacatgatt

SEQ ID NO: 183596 - DNA, 25 bp, Homo sapien
gcaaacttcaaactggaaacatgat

SEQ ID NO: 183597 - DNA, 25 bp, Homo sapien
tcccgcagtgtcctgtctgtttgtc

SEQ ID NO: 183598 - DNA, 25 bp, Homo sapien
ggaggattgagtgatatcacacaga

SEQ ID NO: 183599 - DNA, 25 bp, Homo sapien
cacagagaaccactgtttcccgcag

SEQ ID NO: 183600 - DNA, 25 bp, Homo sapien
ctgcccaggaggattgagtgatatc

SEQ ID NO: 183601 - DNA, 25 bp, Homo sapien
gcagatgtaagcttgtcaatctcaa

SEQ ID NO: 183602 - DNA, 25 bp, Homo sapien
tagagctgctcaagactgataaata

SEQ ID NO: 183603 - DNA, 25 bp, Homo sapien
gacaatctttaaagctttgcagatg

SEQ ID NO: 183604 - DNA, 25 bp, Homo sapien
gtttctccctttggaaatagagctg

SEQ ID NO: 183605 - DNA, 25 bp, Homo sapien
ttcagattctgttaaggttgttttc

SEQ ID NO: 183606 - DNA, 25 bp, Homo sapien
gaccctttaacaggcatggcaaaaa

SEQ ID NO: 183607 - DNA, 25 bp, Homo sapien
cagaccacacaagctcttacaggtt

SEQ ID NO: 183608 - DNA, 25 bp, Homo sapien
tggcattgagccaaaccagaccaca

SEQ ID NO: 183609 - DNA, 25 bp, Homo sapien
tcatcagggcactaggctgggccat

SEQ ID NO: 183610 - DNA, 25 bp, Homo sapien
ctcatcagggcactaggctgggcca

SEQ ID NO: 183611 - DNA, 25 bp, Homo sapien
tcagcctttctcatcagggcactag

SEQ ID NO: 183612 - DNA, 25 bp, Homo sapien
cctttctcatcagggcactaggctg

SEQ ID NO: 183613 - DNA, 25 bp, Homo sapien
cctggtcctcattaggctatcttcc

SEQ ID NO: 183614 - DNA, 25 bp, Homo sapien
tggtcctcattaggctatcttcctt

SEQ ID NO: 183615 - DNA, 25 bp, Homo sapien
aatgtgctgcaaatctgcctggtcc

SEQ ID NO: 183616 - DNA, 25 bp, Homo sapien
tcttcctccaaatgtgctgcaaatc

SEQ ID NO: 183617 - DNA, 25 bp, Homo sapien
cagacacaatgacccctgaatcttg

SEQ ID NO: 183618 - DNA, 25 bp, Homo sapien
aatgacccctgaatcttgccccaag

SEQ ID NO: 183619 - DNA, 25 bp, Homo sapien
gaatctcgaatacagataacagaca

SEQ ID NO: 183620 - DNA, 25 bp, Homo sapien
tcaattccaggtcacatcttgtcca

SEQ ID NO: 183621 - DNA, 25 bp, Homo sapien
tctatatccaacagttctagagaat

SEQ ID NO: 183622 - DNA, 25 bp, Homo sapien
ctctatatccaacagttctagagaa

SEQ ID NO: 183623 - DNA, 25 bp, Homo sapien
atatccaacagttctagagaatttc

SEQ ID NO: 183624 - DNA, 25 bp, Homo sapien
ctatatccaacagttctagagaatt

SEQ ID NO: 183625 - DNA, 25 bp, Homo sapien
gttgggctccctgatcaaatctgac

SEQ ID NO: 183626 - DNA, 25 bp, Homo sapien
catgtggtcaagtgttgggctccct

SEQ ID NO: 183627 - DNA, 25 bp, Homo sapien
tgttgggctccctgatcaaatctga

SEQ ID NO: 183628 - DNA, 25 bp, Homo sapien
tcatgtggtcaagtgttgggctccc

SEQ ID NO: 183629 - DNA, 25 bp, Homo sapien
tgcaaacacagttggtctgacacca

SEQ ID NO: 183630 - DNA, 25 bp, Homo sapien
gctgcattgtatctttgcaaacaca

SEQ ID NO: 183631 - DNA, 25 bp, Homo sapien
tctccgaagtcgttggattttgcca

SEQ ID NO: 183632 - DNA, 25 bp, Homo sapien
gcattgggcctagcactatgagcca

SEQ ID NO: 183633 - DNA, 25 bp, Homo sapien
tgttcttgttcctgatggtcatcac

SEQ ID NO: 183634 - DNA, 25 bp, Homo sapien
gttcttgttcctgatggtcatcaca

SEQ ID NO: 183635 - DNA, 25 bp, Homo sapien
atcagattcatcattgattatgatc

SEQ ID NO: 183636 - DNA, 25 bp, Homo sapien
acatcagattcatcattgattatga

SEQ ID NO: 183637 - DNA, 25 bp, Homo sapien
tccagtgttaattcaaacgtccaaa

SEQ ID NO: 183638 - DNA, 25 bp, Homo sapien
tgtccctagtccctctcaaattaca

SEQ ID NO: 183639 - DNA, 25 bp, Homo sapien
gccatgaggcatccactcccatgat

SEQ ID NO: 183640 - DNA, 25 bp, Homo sapien
gaactaactccctattgtaaagaca

SEQ ID NO: 183641 - DNA, 25 bp, Homo sapien
tacaggccccatgcacattcaaatt

SEQ ID NO: 183642 - DNA, 25 bp, Homo sapien
ttgcataaacattgccattccaaaa

SEQ ID NO: 183643 - DNA, 25 bp, Homo sapien
ggtatgaacattgcataaacattgc

SEQ ID NO: 183644 - DNA, 25 bp, Homo sapien
ggccccatgcacattcaaattccaa

SEQ ID NO: 183645 - DNA, 25 bp, Homo sapien
tgattgtttcctcaaagacataaac

SEQ ID NO: 183646 - DNA, 25 bp, Homo sapien
ttgttgagttttcccccatgtcagt

SEQ ID NO: 183647 - DNA, 25 bp, Homo sapien
catgtcagtccagtttcataaatga

SEQ ID NO: 183648 - DNA, 25 bp, Homo sapien
cataaatgattgtttcctcaaagac

SEQ ID NO: 183649 - DNA, 25 bp, Homo sapien
gatgccgatagaggccatgctcctc

SEQ ID NO: 183650 - DNA, 25 bp, Homo sapien
aacctgagctgtttcggctccctga

SEQ ID NO: 183651 - DNA, 25 bp, Homo sapien
ggctccctgatgctagctaaccaca

SEQ ID NO: 183652 - DNA, 25 bp, Homo sapien
catttgatgcaaggcaacctgagct

SEQ ID NO: 183653 - DNA, 25 bp, Homo sapien
gatgagaccaggccaatttcttctt

SEQ ID NO: 183654 - DNA, 25 bp, Homo sapien
tccatttaaccttccacccagaatg

SEQ ID NO: 183655 - DNA, 25 bp, Homo sapien
ccagaatgcactgctcctctttgct

SEQ ID NO: 183656 - DNA, 25 bp, Homo sapien
tttcttcttctactgtttgttccat

SEQ ID NO: 183657 - DNA, 25 bp, Homo sapien
aaatatactatagttccctaggcca

SEQ ID NO: 183658 - DNA, 25 bp, Homo sapien
tgggtctttaatggtgcccagcaaa

SEQ ID NO: 183659 - DNA, 25 bp, Homo sapien
tgtaggtgaactacccatgctccta

SEQ ID NO: 183660 - DNA, 25 bp, Homo sapien
tgtttgaccaaatcacaagcctaga

SEQ ID NO: 183661 - DNA, 25 bp, Homo sapien
ttcagaggcaaggtgatcacaggaa

SEQ ID NO: 183662 - DNA, 25 bp, Homo sapien
acaaccattgcaagacctgggagaa

SEQ ID NO: 183663 - DNA, 25 bp, Homo sapien
gatcacaggaaagctgtagcacatg

SEQ ID NO: 183664 - DNA, 25 bp, Homo sapien
cattgcaagacctgggagaatgaat

SEQ ID NO: 183665 - DNA, 25 bp, Homo sapien
aatccttttcttcagcaggattctg

SEQ ID NO: 183666 - DNA, 25 bp, Homo sapien
tccttttcttcagcaggattctgca

SEQ ID NO: 183667 - DNA, 25 bp, Homo sapien
ccttttcttcagcaggattctgcaa

SEQ ID NO: 183668 - DNA, 25 bp, Homo sapien
ttaatccttttcttcagcaggattc

SEQ ID NO: 183669 - DNA, 25 bp, Homo sapien
tggtgcatggttagttgtgcttccc

SEQ ID NO: 183670 - DNA, 25 bp, Homo sapien
cttctttggtgcatggttagttgtg

SEQ ID NO: 183671 - DNA, 25 bp, Homo sapien
ggcccttgcaattagatacaatcat

SEQ ID NO: 183672 - DNA, 25 bp, Homo sapien
tgcatggttagttgtgcttcccagg

SEQ ID NO: 183673 - DNA, 25 bp, Homo sapien
tacaataaaactggtgtcacctcca

SEQ ID NO: 183674 - DNA, 25 bp, Homo sapien
ttattcctacaataaaactggtgtc

SEQ ID NO: 183675 - DNA, 25 bp, Homo sapien
tcaaggcagtttagaatggttgtgc

SEQ ID NO: 183676 - DNA, 25 bp, Homo sapien
ttcagagagttcaatggagcatgta

SEQ ID NO: 183677 - DNA, 25 bp, Homo sapien
tctcttcttaattaggcccacagat

SEQ ID NO: 183678 - DNA, 25 bp, Homo sapien
actgaagtagtttagcctgagttgc

SEQ ID NO: 183679 - DNA, 25 bp, Homo sapien
gatctggtgccttagagattctctt

SEQ ID NO: 183680 - DNA, 25 bp, Homo sapien
tgagttgctaagagatctggtgcct

SEQ ID NO: 183681 - DNA, 25 bp, Homo sapien
aggaaacatagagggcaggaaagac

SEQ ID NO: 183682 - DNA, 25 bp, Homo sapien
ttcgaatttgagattcaaaaaggtc

SEQ ID NO: 183683 - DNA, 25 bp, Homo sapien
acccctacgggctcatttgaagaga

SEQ ID NO: 183684 - DNA, 25 bp, Homo sapien
ttgaagagaggcttttgtcatctgt

SEQ ID NO: 183685 - DNA, 25 bp, Homo sapien
gatctcttagtctcttgtccttgag

SEQ ID NO: 183686 - DNA, 25 bp, Homo sapien
cctagaataagccatgcagctcttg

SEQ ID NO: 183687 - DNA, 25 bp, Homo sapien
gatctctggtctcttatgattgact

SEQ ID NO: 183688 - DNA, 25 bp, Homo sapien
ctgagcagaaagctccaacacttgg

SEQ ID NO: 183689 - DNA, 25 bp, Homo sapien
gcaatctaagatggataacatctgt

SEQ ID NO: 183690 - DNA, 25 bp, Homo sapien
ggtcgcactttcagggaaatctgga

SEQ ID NO: 183691 - DNA, 25 bp, Homo sapien
gatcctcctcagtggtcgcactttc

SEQ ID NO: 183692 - DNA, 25 bp, Homo sapien
ctgatggcaatctaagatggataac

SEQ ID NO: 183693 - DNA, 25 bp, Homo sapien
gagtcagaaatgagatggcccatgg

SEQ ID NO: 183694 - DNA, 25 bp, Homo sapien
caagcattgacggattggaagccat

SEQ ID NO: 183695 - DNA, 25 bp, Homo sapien
tagacaaatgtcttccccgagccag

SEQ ID NO: 183696 - DNA, 25 bp, Homo sapien
gagccagcgatcctttccgtagtaa

SEQ ID NO: 183697 - DNA, 25 bp, Homo sapien
tcttctccggttttgttgattcctg

SEQ ID NO: 183698 - DNA, 25 bp, Homo sapien
tgtctcccactttccagtacccaac

SEQ ID NO: 183699 - DNA, 25 bp, Homo sapien
gctgctccacatattgtctcccact

SEQ ID NO: 183700 - DNA, 25 bp, Homo sapien
agcagctgctccacatattgtctcc

SEQ ID NO: 183701 - DNA, 25 bp, Homo sapien
cagctgctccacatattgtctccca

SEQ ID NO: 183702 - DNA, 25 bp, Homo sapien
caatgactatgattgcagttggatg

SEQ ID NO: 183703 - DNA, 25 bp, Homo sapien
taattatttccatccgccaatgact

SEQ ID NO: 183704 - DNA, 25 bp, Homo sapien
gatacgaaatatgaatataatctag

SEQ ID NO: 183705 - DNA, 25 bp, Homo sapien
tacctgtcgctgtgggtgtattaaa

SEQ ID NO: 183706 - DNA, 25 bp, Homo sapien
cagctaaataaccagacctttcagg

SEQ ID NO: 183707 - DNA, 25 bp, Homo sapien
ctaaataaccagacctttcaggagt

SEQ ID NO: 183708 - DNA, 25 bp, Homo sapien
gctaaataaccagacctttcaggag

SEQ ID NO: 183709 - DNA, 25 bp, Homo sapien
cattgtgaagattagagcaggaagg

SEQ ID NO: 183710 - DNA, 25 bp, Homo sapien
ggtagacagccctgggagctaacct

SEQ ID NO: 183711 - DNA, 25 bp, Homo sapien
gtttaggctcctcagacaatgcatg

SEQ ID NO: 183712 - DNA, 25 bp, Homo sapien
agattagagcaggaaggtagacagc

SEQ ID NO: 183713 - DNA, 25 bp, Homo sapien
cactaatgtatgtgtagaactatag

SEQ ID NO: 183714 - DNA, 25 bp, Homo sapien
actatagttaatagccttgggcgga

SEQ ID NO: 183715 - DNA, 25 bp, Homo sapien
tagttaatagccttgggcggacaaa

SEQ ID NO: 183716 - DNA, 25 bp, Homo sapien
ttgtcactaatgtatgtgtagaact

SEQ ID NO: 183717 - DNA, 25 bp, Homo sapien
cagccccattaaatatcacgccaaa

SEQ ID NO: 183718 - DNA, 25 bp, Homo sapien
ccaagacgagggctgctttgccatt

SEQ ID NO: 183719 - DNA, 25 bp, Homo sapien
tcttccacattctgaggtgttcctt

SEQ ID NO: 183720 - DNA, 25 bp, Homo sapien
tatcacgccaaatggattggaagtg

SEQ ID NO: 183721 - DNA, 25 bp, Homo sapien
gcgcttccacactggcattcaggat

SEQ ID NO: 183722 - DNA, 25 bp, Homo sapien
tgcgcttccacactggcattcagga

SEQ ID NO: 183723 - DNA, 25 bp, Homo sapien
ctgcgcttccacactggcattcagg

SEQ ID NO: 183724 - DNA, 25 bp, Homo sapien
gctgctgccatgcaaactagacagt

SEQ ID NO: 183725 - DNA, 25 bp, Homo sapien
tttcctaggatctggcacttccaca

SEQ ID NO: 183726 - DNA, 25 bp, Homo sapien
ggcaagccgctctctctaaatccaa

SEQ ID NO: 183727 - DNA, 25 bp, Homo sapien
ttgaggcaaataacaatgccgaggc

SEQ ID NO: 183728 - DNA, 25 bp, Homo sapien
aaatagcctacagtgcagctcagta

SEQ ID NO: 183729 - DNA, 25 bp, Homo sapien
tgcctcggccgcctggaaaatagcc

SEQ ID NO: 183730 - DNA, 25 bp, Homo sapien
tggaaaatagcctacagtgcagctc

SEQ ID NO: 183731 - DNA, 25 bp, Homo sapien
gccgcctggaaaatagcctacagtg

SEQ ID NO: 183732 - DNA, 25 bp, Homo sapien
tctttcaagaggctcaaagcattct

SEQ ID NO: 183733 - DNA, 25 bp, Homo sapien
ctttcaagaggctcaaagcattctc

SEQ ID NO: 183734 - DNA, 25 bp, Homo sapien
tctcttccaattggtaaaggcacct

SEQ ID NO: 183735 - DNA, 25 bp, Homo sapien
ttcaagaggctcaaagcattctctt

SEQ ID NO: 183736 - DNA, 25 bp, Homo sapien
gactgtgttagtggcaatcttatta

SEQ ID NO: 183737 - DNA, 25 bp, Homo sapien
taaagaccgtcatggatctaaggca

SEQ ID NO: 183738 - DNA, 25 bp, Homo sapien
gaaatgatctcgctgattctggcaa

SEQ ID NO: 183739 - DNA, 25 bp, Homo sapien
tgactgtatcctccattaaagaccg

SEQ ID NO: 183740 - DNA, 25 bp, Homo sapien
gctggcaggtctcaacttgtaagca

SEQ ID NO: 183741 - DNA, 25 bp, Homo sapien
tgctggcaggtctcaacttgtaagc

SEQ ID NO: 183742 - DNA, 25 bp, Homo sapien
gcaggtctcaacttgtaagcacaag

SEQ ID NO: 183743 - DNA, 25 bp, Homo sapien
tggcaggtctcaacttgtaagcaca

SEQ ID NO: 183744 - DNA, 25 bp, Homo sapien
caggaagcctggctgggaaacttac

SEQ ID NO: 183745 - DNA, 25 bp, Homo sapien
ccacaagctgtacaggaagcctggc

SEQ ID NO: 183746 - DNA, 25 bp, Homo sapien
gtacaggaagcctggctgggaaact

SEQ ID NO: 183747 - DNA, 25 bp, Homo sapien
cacaagctgtacaggaagcctggct

SEQ ID NO: 183748 - DNA, 25 bp, Homo sapien
agcaagcacatcttatcatggtgga

SEQ ID NO: 183749 - DNA, 25 bp, Homo sapien
caagcacatcttatcatggtggagc

SEQ ID NO: 183750 - DNA, 25 bp, Homo sapien
gcacatcttatcatggtggagcagg

SEQ ID NO: 183751 - DNA, 25 bp, Homo sapien
gatcaagtcggaaagtgaaggggaa

SEQ ID NO: 183752 - DNA, 25 bp, Homo sapien
tgtgctggttgctcacagctgagtg

SEQ ID NO: 183753 - DNA, 25 bp, Homo sapien
cagctgagtgttctgctgcagtcca

SEQ ID NO: 183754 - DNA, 25 bp, Homo sapien
catccaaccctggtagagctcagga

SEQ ID NO: 183755 - DNA, 25 bp, Homo sapien
gagggtgctcccgaaatgtccatgg

SEQ ID NO: 183756 - DNA, 25 bp, Homo sapien
gtagccaaaaaactcctcagcatcc

SEQ ID NO: 183757 - DNA, 25 bp, Homo sapien
ctgcccgtagccaaaaaactcctca

SEQ ID NO: 183758 - DNA, 25 bp, Homo sapien
tcagcatcccagaggtggctgatac

SEQ ID NO: 183759 - DNA, 25 bp, Homo sapien
ccgtagccaaaaaactcctcagcat

SEQ ID NO: 183760 - DNA, 25 bp, Homo sapien
catgagtataaagactccctaaggt

SEQ ID NO: 183761 - DNA, 25 bp, Homo sapien
tcaacgtgcaagtaagatgccagag

SEQ ID NO: 183762 - DNA, 25 bp, Homo sapien
taatgttaggaagccagtgactctt

SEQ ID NO: 183763 - DNA, 25 bp, Homo sapien
gatgccagagttggattgattgctg

SEQ ID NO: 183764 - DNA, 25 bp, Homo sapien
aacatctggaaccagcatcagggct

SEQ ID NO: 183765 - DNA, 25 bp, Homo sapien
catctggaaccagcatcagggcttc

SEQ ID NO: 183766 - DNA, 25 bp, Homo sapien
acatctggaaccagcatcagggctt

SEQ ID NO: 183767 - DNA, 25 bp, Homo sapien
caacatctggaaccagcatcagggc

SEQ ID NO: 183768 - DNA, 25 bp, Homo sapien
tcccctcagcaccagtagcatccac

SEQ ID NO: 183769 - DNA, 25 bp, Homo sapien
tttccagtcccctcagcaccagtag

SEQ ID NO: 183770 - DNA, 25 bp, Homo sapien
ccagtcccctcagcaccagtagcat

SEQ ID NO: 183771 - DNA, 25 bp, Homo sapien
agtcccctcagcaccagtagcatcc

SEQ ID NO: 183772 - DNA, 25 bp, Homo sapien
aattcacagaagaaagtcagacatc

SEQ ID NO: 183773 - DNA, 25 bp, Homo sapien
atctctgtatgaaaggagcatgaac

SEQ ID NO: 183774 - DNA, 25 bp, Homo sapien
ctatccccggacatattttctgtgc

SEQ ID NO: 183775 - DNA, 25 bp, Homo sapien
tctgtgcatgctctcatgtgataat

SEQ ID NO: 183776 - DNA, 25 bp, Homo sapien
ctatgtgccatgttctcctttattc

SEQ ID NO: 183777 - DNA, 25 bp, Homo sapien
aggtctcaatgcaggattgacggta

SEQ ID NO: 183778 - DNA, 25 bp, Homo sapien
atgcaggattgacggtagtcacacg

SEQ ID NO: 183779 - DNA, 25 bp, Homo sapien
tctcaatgcaggattgacggtagtc

SEQ ID NO: 183780 - DNA, 25 bp, Homo sapien
tcaatgcaggattgacggtagtcac

SEQ ID NO: 183781 - DNA, 25 bp, Homo sapien
gcaaagtgaatcatgatgtctgtct

SEQ ID NO: 183782 - DNA, 25 bp, Homo sapien
aaagtgaatcatgatgtctgtcttc

SEQ ID NO: 183783 - DNA, 25 bp, Homo sapien
ccacagcaaagtgaatcatgatgtc

SEQ ID NO: 183784 - DNA, 25 bp, Homo sapien
cagcaaagtgaatcatgatgtctgt

SEQ ID NO: 183785 - DNA, 25 bp, Homo sapien
gcaccatatgcccaacagaagagca

SEQ ID NO: 183786 - DNA, 25 bp, Homo sapien
tgtcttctatcaaccagagcagtca

SEQ ID NO: 183787 - DNA, 25 bp, Homo sapien
tctgtataccagaacctgctgtaca

SEQ ID NO: 183788 - DNA, 25 bp, Homo sapien
gagaccaaaaactaggacactgtgt

SEQ ID NO: 183789 - DNA, 25 bp, Homo sapien
cacactctatacagatcaggctcaa

SEQ ID NO: 183790 - DNA, 25 bp, Homo sapien
aagacctaccgacagctgctcattt

SEQ ID NO: 183791 - DNA, 25 bp, Homo sapien
tcaggctcaaggaggcgtttgtttt

SEQ ID NO: 183792 - DNA, 25 bp, Homo sapien
cacatgtcaacaagacctaccgaca

SEQ ID NO: 183793 - DNA, 25 bp, Homo sapien
ttatccaacgaactcagacccatca

SEQ ID NO: 183794 - DNA, 25 bp, Homo sapien
cccggtaggactcaggtagttctgc

SEQ ID NO: 183795 - DNA, 25 bp, Homo sapien
gacaaaatgcttccggatgcaaggg

SEQ ID NO: 183796 - DNA, 25 bp, Homo sapien
gaaacagttctctgactagtccttg

SEQ ID NO: 183797 - DNA, 25 bp, Homo sapien
ccttctgctatatttgggtccctgt

SEQ ID NO: 183798 - DNA, 25 bp, Homo sapien
gcagacttttattagagcagggatc

SEQ ID NO: 183799 - DNA, 25 bp, Homo sapien
tctttgtagtttgactctgcttcca

SEQ ID NO: 183800 - DNA, 25 bp, Homo sapien
cctgtgactaaaaggaggacctact

SEQ ID NO: 183801 - DNA, 25 bp, Homo sapien
tcaccactttgtagcgggaagctct

SEQ ID NO: 183802 - DNA, 25 bp, Homo sapien
tgaagcgcaggatgttcaccacttt

SEQ ID NO: 183803 - DNA, 25 bp, Homo sapien
actttgtagcgggaagctcttcctg

SEQ ID NO: 183804 - DNA, 25 bp, Homo sapien
gaagcgcaggatgttcaccactttg

SEQ ID NO: 183805 - DNA, 25 bp, Homo sapien
ttttgctctttaagaggagacttac

SEQ ID NO: 183806 - DNA, 25 bp, Homo sapien
tgccgtgggacttctctacaagaga

SEQ ID NO: 183807 - DNA, 25 bp, Homo sapien
tctacaagagactctttttgctctt

SEQ ID NO: 183808 - DNA, 25 bp, Homo sapien
tgtaaccttcataaccagagatttt

SEQ ID NO: 183809 - DNA, 25 bp, Homo sapien
cccaatgagcattgtcccgcatgtg

SEQ ID NO: 183810 - DNA, 25 bp, Homo sapien
atgagcattgtcccgcatgtgcaca

SEQ ID NO: 183811 - DNA, 25 bp, Homo sapien
aatgagcattgtcccgcatgtgcac

SEQ ID NO: 183812 - DNA, 25 bp, Homo sapien
caatgagcattgtcccgcatgtgca

SEQ ID NO: 183813 - DNA, 25 bp, Homo sapien
gacagttcattgatgatagctccct

SEQ ID NO: 183814 - DNA, 25 bp, Homo sapien
gagggcatagtaatttcctccatta

SEQ ID NO: 183815 - DNA, 25 bp, Homo sapien
cctctgctgttgaggggacagttca

SEQ ID NO: 183816 - DNA, 25 bp, Homo sapien
ttcattgatgatagctcccttgtgc

SEQ ID NO: 183817 - DNA, 25 bp, Homo sapien
gaaaccctataatccacatcccatt

SEQ ID NO: 183818 - DNA, 25 bp, Homo sapien
tgatttcagtgtgcgagtcagagaa

SEQ ID NO: 183819 - DNA, 25 bp, Homo sapien
tgttatctgaaaccctataatccac

SEQ ID NO: 183820 - DNA, 25 bp, Homo sapien
ctttttcaataggttggatgatttc

SEQ ID NO: 183821 - DNA, 25 bp, Homo sapien
ttggccacctttgacttagacacag

SEQ ID NO: 183822 - DNA, 25 bp, Homo sapien
cagctcgtatttagaggatgcctca

SEQ ID NO: 183823 - DNA, 25 bp, Homo sapien
tactatacaaaaggtggagcacatg

SEQ ID NO: 183824 - DNA, 25 bp, Homo sapien
cattcggttgcctcattgtaagtac

SEQ ID NO: 183825 - DNA, 25 bp, Homo sapien
taaatggaactacaacctgaaactg

SEQ ID NO: 183826 - DNA, 25 bp, Homo sapien
tagagtttagggtccaatttcttga

SEQ ID NO: 183827 - DNA, 25 bp, Homo sapien
cattggagaaaattagtgcttctcc

SEQ ID NO: 183828 - DNA, 25 bp, Homo sapien
ctcaaacaggttaaagcattggaga

SEQ ID NO: 183829 - DNA, 25 bp, Homo sapien
tgaatgtgcattttctaggaccaag

SEQ ID NO: 183830 - DNA, 25 bp, Homo sapien
gattcaggttacacagtcccagtaa

SEQ ID NO: 183831 - DNA, 25 bp, Homo sapien
catctgtgcgtgacttgctccaacc

SEQ ID NO: 183832 - DNA, 25 bp, Homo sapien
tccataggaagatacattgagagca

SEQ ID NO: 183833 - DNA, 25 bp, Homo sapien
gagtgagtgttactggggagtagga

SEQ ID NO: 183834 - DNA, 25 bp, Homo sapien
aaaggattattgagtgggaagtgct

SEQ ID NO: 183835 - DNA, 25 bp, Homo sapien
gtgggaagtgctcaagatgagtgag

SEQ ID NO: 183836 - DNA, 25 bp, Homo sapien
tgtcagtgaaatggcatctacagcc

SEQ ID NO: 183837 - DNA, 25 bp, Homo sapien
tagctatacacgatccatggtggtt

SEQ ID NO: 183838 - DNA, 25 bp, Homo sapien
tacaaaaggtgtcaaactttcattc

SEQ ID NO: 183839 - DNA, 25 bp, Homo sapien
ttgttacatagctatacacgatcca

SEQ ID NO: 183840 - DNA, 25 bp, Homo sapien
atatctgcaaggcttatctgtatta

SEQ ID NO: 183841 - DNA, 25 bp, Homo sapien
cttggttggagcaagattccctggg

SEQ ID NO: 183842 - DNA, 25 bp, Homo sapien
gctcttggttggagcaagattccct

SEQ ID NO: 183843 - DNA, 25 bp, Homo sapien
gattccctggggcataaagtatatt

SEQ ID NO: 183844 - DNA, 25 bp, Homo sapien
tccctggggcataaagtatattgaa

SEQ ID NO: 183845 - DNA, 25 bp, Homo sapien
ggaaaaattcaagaaccatctgctc

SEQ ID NO: 183846 - DNA, 25 bp, Homo sapien
gcattccaaaactaaaagactcagg

SEQ ID NO: 183847 - DNA, 25 bp, Homo sapien
tggcctccatagaggccaccagcat

SEQ ID NO: 183848 - DNA, 25 bp, Homo sapien
accagcatcgaagcccatgaaggca

SEQ ID NO: 183849 - DNA, 25 bp, Homo sapien
aaagaaggaatctatgagcccgaat

SEQ ID NO: 183850 - DNA, 25 bp, Homo sapien
gaggagtggtcatggtttaacctta

SEQ ID NO: 183851 - DNA, 25 bp, Homo sapien
aggaatctatgagcccgaatctcca

SEQ ID NO: 183852 - DNA, 25 bp, Homo sapien
gcctcgaggagtggtcatggtttaa

SEQ ID NO: 183853 - DNA, 25 bp, Homo sapien
tacacaattcaagttctcatcgtcg

SEQ ID NO: 183854 - DNA, 25 bp, Homo sapien
attcaagttctcatcgtcgtattgg

SEQ ID NO: 183855 - DNA, 25 bp, Homo sapien
tctcatcgtcgtattggtaaaacaa

SEQ ID NO: 183856 - DNA, 25 bp, Homo sapien
catcgtcgtattggtaaaacaaata

SEQ ID NO: 183857 - DNA, 25 bp, Homo sapien
aagactggaacatcctttggtgtcc

SEQ ID NO: 183858 - DNA, 25 bp, Homo sapien
ccaagactggaacatcctttggtgt

SEQ ID NO: 183859 - DNA, 25 bp, Homo sapien
ctggaacatcctttggtgtccagaa

SEQ ID NO: 183860 - DNA, 25 bp, Homo sapien
aaaaccaagactggaacatcctttg

SEQ ID NO: 183861 - DNA, 25 bp, Homo sapien
cattgtttctgaacgaagagtgact

SEQ ID NO: 183862 - DNA, 25 bp, Homo sapien
ctaagatatgtggatgctgatggga

SEQ ID NO: 183863 - DNA, 25 bp, Homo sapien
gcttgctgatttggtttggtcttca

SEQ ID NO: 183864 - DNA, 25 bp, Homo sapien
tacactgagaatatgttataacagc

SEQ ID NO: 183865 - DNA, 25 bp, Homo sapien
tccttttattaagtgtaagatttga

SEQ ID NO: 183866 - DNA, 25 bp, Homo sapien
gggataaaacactatggctctgcta

SEQ ID NO: 183867 - DNA, 25 bp, Homo sapien
ggaaaccaatgggaatctcagcaag

SEQ ID NO: 183868 - DNA, 25 bp, Homo sapien
tggaggagactcattactggcctgg

SEQ ID NO: 183869 - DNA, 25 bp, Homo sapien
taaatatatacatcgcctactgcca

SEQ ID NO: 183870 - DNA, 25 bp, Homo sapien
tcctgctacaagagttcatgtcccc

SEQ ID NO: 183871 - DNA, 25 bp, Homo sapien
gcctccagatcagcagggtagctga

SEQ ID NO: 183872 - DNA, 25 bp, Homo sapien
aaggcctccagatcagcagggtagc

SEQ ID NO: 183873 - DNA, 25 bp, Homo sapien
caagagttcatgtccccaaaggcct

SEQ ID NO: 183874 - DNA, 25 bp, Homo sapien
aggaaaaacagagcttagaccatct

SEQ ID NO: 183875 - DNA, 25 bp, Homo sapien
ttgctgttctgtaggaaaaacagag

SEQ ID NO: 183876 - DNA, 25 bp, Homo sapien
ggaaaaacagagcttagaccatctt

SEQ ID NO: 183877 - DNA, 25 bp, Homo sapien
gctgttctgtaggaaaaacagagct

SEQ ID NO: 183878 - DNA, 25 bp, Homo sapien
cagcaaaaattctcagccagacttt

SEQ ID NO: 183879 - DNA, 25 bp, Homo sapien
aatgaggaggtagggaaagaagcag

SEQ ID NO: 183880 - DNA, 25 bp, Homo sapien
gccagactttgaacaggaagcttta

SEQ ID NO: 183881 - DNA, 25 bp, Homo sapien
tgaggaggtagggaaagaagcagca

SEQ ID NO: 183882 - DNA, 25 bp, Homo sapien
aaagaaggttgacacagagatccag

SEQ ID NO: 183883 - DNA, 25 bp, Homo sapien
taaaagaaggttgacacagagatcc

SEQ ID NO: 183884 - DNA, 25 bp, Homo sapien
aaaagaaggttgacacagagatcca

SEQ ID NO: 183885 - DNA, 25 bp, Homo sapien
aataaaagaaggttgacacagagat

SEQ ID NO: 183886 - DNA, 25 bp, Homo sapien
cacaaaagtattaagcacggaaatt

SEQ ID NO: 183887 - DNA, 25 bp, Homo sapien
tcgaacatccaaataacgacagatg

SEQ ID NO: 183888 - DNA, 25 bp, Homo sapien
cgacagatgtctgacaccaaaaaca

SEQ ID NO: 183889 - DNA, 25 bp, Homo sapien
gttcagttccaagtcctatcacaaa

SEQ ID NO: 183890 - DNA, 25 bp, Homo sapien
gatctatgcccgctgtcatgagtgc

SEQ ID NO: 183891 - DNA, 25 bp, Homo sapien
tatgcccgctgtcatgagtgcccca

SEQ ID NO: 183892 - DNA, 25 bp, Homo sapien
gggtgctcgccgatctatgcccgct

SEQ ID NO: 183893 - DNA, 25 bp, Homo sapien
tcgccgatctatgcccgctgtcatg

SEQ ID NO: 183894 - DNA, 25 bp, Homo sapien
catagccgtaatctgatgcactctc

SEQ ID NO: 183895 - DNA, 25 bp, Homo sapien
tcctggttgtgggtagcctagggct

SEQ ID NO: 183896 - DNA, 25 bp, Homo sapien
tgtcagagaggccttgttcccacat

SEQ ID NO: 183897 - DNA, 25 bp, Homo sapien
tccccagtggtattcctggttgtgg

SEQ ID NO: 183898 - DNA, 25 bp, Homo sapien
tccccaggataatggagatgacacc

SEQ ID NO: 183899 - DNA, 25 bp, Homo sapien
ccaggataatggagatgacaccgtc

SEQ ID NO: 183900 - DNA, 25 bp, Homo sapien
tagttttccccaggataatggagat

SEQ ID NO: 183901 - DNA, 25 bp, Homo sapien
ttagttttccccaggataatggaga

SEQ ID NO: 183902 - DNA, 25 bp, Homo sapien
tccttctagtatgcctgacttttgc

SEQ ID NO: 183903 - DNA, 25 bp, Homo sapien
aacggtccattattcactaaatcag

SEQ ID NO: 183904 - DNA, 25 bp, Homo sapien
catctttacttaacggtccattatt

SEQ ID NO: 183905 - DNA, 25 bp, Homo sapien
agagcttccttctagtatgcctgac

SEQ ID NO: 183906 - DNA, 25 bp, Homo sapien
tattgggtagaactcctgtccatag

SEQ ID NO: 183907 - DNA, 25 bp, Homo sapien
tgatctgtttcgtcgaccatggcac

SEQ ID NO: 183908 - DNA, 25 bp, Homo sapien
tcctgaaggagattaagatggctgt

SEQ ID NO: 183909 - DNA, 25 bp, Homo sapien
cacatattccgtgaagaaggctgct

SEQ ID NO: 183910 - DNA, 25 bp, Homo sapien
ggtgcagaccttttcagtaaatgtt

SEQ ID NO: 183911 - DNA, 25 bp, Homo sapien
tccaaagagtgacagaacaaagctc

SEQ ID NO: 183912 - DNA, 25 bp, Homo sapien
aacataagtgcattgtcttctggcc

SEQ ID NO: 183913 - DNA, 25 bp, Homo sapien
aacgcagtgctgatccaaagagtga

SEQ ID NO: 183914 - DNA, 25 bp, Homo sapien
cagaagcttaagacgttttggatca

SEQ ID NO: 183915 - DNA, 25 bp, Homo sapien
taataatctcgtaaagtgagccctt

SEQ ID NO: 183916 - DNA, 25 bp, Homo sapien
gatcaaagacatactgtggtcctcg

SEQ ID NO: 183917 - DNA, 25 bp, Homo sapien
gtttcaataatctcacgggacaata

SEQ ID NO: 183918 - DNA, 25 bp, Homo sapien
cctcaagagcaaataggcggaaaca

SEQ ID NO: 183919 - DNA, 25 bp, Homo sapien
tggaaaaaagaggatcccctcaaga

SEQ ID NO: 183920 - DNA, 25 bp, Homo sapien
gaggatcccctcaagagcaaatagg

SEQ ID NO: 183921 - DNA, 25 bp, Homo sapien
agagcaaataggcggaaacaatgac

SEQ ID NO: 183922 - DNA, 25 bp, Homo sapien
cccgcgcccggagtttttctgagct

SEQ ID NO: 183923 - DNA, 25 bp, Homo sapien
gtttttctgagctcctaaataggga

SEQ ID NO: 183924 - DNA, 25 bp, Homo sapien
tagggagagagacccgacaaaacaa

SEQ ID NO: 183925 - DNA, 25 bp, Homo sapien
tcctaaatagggagagagacccgac

SEQ ID NO: 183926 - DNA, 25 bp, Homo sapien
acagccagcgcctccgcgggtccca

SEQ ID NO: 183927 - DNA, 25 bp, Homo sapien
gaaggcgacacagccaggttagcac

SEQ ID NO: 183928 - DNA, 25 bp, Homo sapien
aggttagcaccgagcagcagcgcag

SEQ ID NO: 183929 - DNA, 25 bp, Homo sapien
agcagcgcaggagcgccagaagggc

SEQ ID NO: 183930 - DNA, 25 bp, Homo sapien
tcagtgttgaggattcggaggccct

SEQ ID NO: 183931 - DNA, 25 bp, Homo sapien
gaagacgcagaacgttccagagaga

SEQ ID NO: 183932 - DNA, 25 bp, Homo sapien
gaatttgaatcctgtgggccgttga

SEQ ID NO: 183933 - DNA, 25 bp, Homo sapien
tttgctggaccagcgctctcgacgg

SEQ ID NO: 183934 - DNA, 25 bp, Homo sapien
gaggatggcattgaacagtctgcat

SEQ ID NO: 183935 - DNA, 25 bp, Homo sapien
tgttcaacaatgctgattcctgcac

SEQ ID NO: 183936 - DNA, 25 bp, Homo sapien
gaaggatttgttcaacaatgctgat

SEQ ID NO: 183937 - DNA, 25 bp, Homo sapien
aacaatgctgattcctgcacttcag

SEQ ID NO: 183938 - DNA, 25 bp, Homo sapien
tagacatttcagtgacagtacattc

SEQ ID NO: 183939 - DNA, 25 bp, Homo sapien
gccacataatcattctatggatata

SEQ ID NO: 183940 - DNA, 25 bp, Homo sapien
ttggttacatagctagtggaattgc

SEQ ID NO: 183941 - DNA, 25 bp, Homo sapien
tatgtctgacttccctcatttaata

SEQ ID NO: 183942 - DNA, 25 bp, Homo sapien
ccattatctgtttgcaaactggaga

SEQ ID NO: 183943 - DNA, 25 bp, Homo sapien
gacccaggaaagtcccgcagtgtag

SEQ ID NO: 183944 - DNA, 25 bp, Homo sapien
aacagctgatggtataggttccagt

SEQ ID NO: 183945 - DNA, 25 bp, Homo sapien
atgattatgtagtgtgaacagtccc

SEQ ID NO: 183946 - DNA, 25 bp, Homo sapien
tgagagcttaggatttcttgggtca

SEQ ID NO: 183947 - DNA, 25 bp, Homo sapien
ttttttaacataggcttgcatgagc

SEQ ID NO: 183948 - DNA, 25 bp, Homo sapien
cagttattatgcagaaggttttcca

SEQ ID NO: 183949 - DNA, 25 bp, Homo sapien
gcatgagcctaaacatcagccagag

SEQ ID NO: 183950 - DNA, 25 bp, Homo sapien
tgtatagagcagaatactgggagcc

SEQ ID NO: 183951 - DNA, 25 bp, Homo sapien
tggatacggctcttttctacaacag

SEQ ID NO: 183952 - DNA, 25 bp, Homo sapien
tgtgcatttgaggtacagtgtactg

SEQ ID NO: 183953 - DNA, 25 bp, Homo sapien
catctagcactgttccttttggacc

SEQ ID NO: 183954 - DNA, 25 bp, Homo sapien
cctgttggaaacaagtgtaataact

SEQ ID NO: 183955 - DNA, 25 bp, Homo sapien
ttgcaactggttgcagttccattcc

SEQ ID NO: 183956 - DNA, 25 bp, Homo sapien
gaagaaagttctcattacattggac

SEQ ID NO: 183957 - DNA, 25 bp, Homo sapien
gaacaaactagttagcttcttgacc

SEQ ID NO: 183958 - DNA, 25 bp, Homo sapien
gaaaaacccattctaatgtcaccac

SEQ ID NO: 183959 - DNA, 25 bp, Homo sapien
cctatgtttggtattctgtatgtct

SEQ ID NO: 183960 - DNA, 25 bp, Homo sapien
tcaagttggttgtatgctaaggtaa

SEQ ID NO: 183961 - DNA, 25 bp, Homo sapien
aagttgacgccatagcattatacag

SEQ ID NO: 183962 - DNA, 25 bp, Homo sapien
tattgaggccattgcaagttcttcc

SEQ ID NO: 183963 - DNA, 25 bp, Homo sapien
aatctatgctttcagccagacagta

SEQ ID NO: 183964 - DNA, 25 bp, Homo sapien
ttcctgaacatttcccgcgatttca

SEQ ID NO: 183965 - DNA, 25 bp, Homo sapien
gccagacagtacacaggcaacagca

SEQ ID NO: 183966 - DNA, 25 bp, Homo sapien
gcaacgtgaaccttttataactaga

SEQ ID NO: 183967 - DNA, 25 bp, Homo sapien
gcctcttgcataaactatacttgct

SEQ ID NO: 183968 - DNA, 25 bp, Homo sapien
ctagagcagaaagatttttagcctc

SEQ ID NO: 183969 - DNA, 25 bp, Homo sapien
taagctccagagtattccctaattt

SEQ ID NO: 183970 - DNA, 25 bp, Homo sapien
aaatgcagtactttatgggcttgcc

SEQ ID NO: 183971 - DNA, 25 bp, Homo sapien
taatcaccatagtgggctatctgtg

SEQ ID NO: 183972 - DNA, 25 bp, Homo sapien
gggcttgcctagtagaacatttgga

SEQ ID NO: 183973 - DNA, 25 bp, Homo sapien
gaaccattgtaagtcagggagtgtc

SEQ ID NO: 183974 - DNA, 25 bp, Homo sapien
cacctcaatatgaaaattctggcat

SEQ ID NO: 183975 - DNA, 25 bp, Homo sapien
acctcaatatgaaaattctggcatt

SEQ ID NO: 183976 - DNA, 25 bp, Homo sapien
ccttgttggcaatgctagcttttca

SEQ ID NO: 183977 - DNA, 25 bp, Homo sapien
tctgattaggtgatgatgtctgtac

SEQ ID NO: 183978 - DNA, 25 bp, Homo sapien
ttttcactagtgttccttctgagga

SEQ ID NO: 183979 - DNA, 25 bp, Homo sapien
caccaaattaactgatgccctctgt

SEQ ID NO: 183980 - DNA, 25 bp, Homo sapien
gattagttactatgagaatctgaag

SEQ ID NO: 183981 - DNA, 25 bp, Homo sapien
tgtatcagaaagttcacagtggatg

SEQ ID NO: 183982 - DNA, 25 bp, Homo sapien
gaatatccttcaactccttactgtg

SEQ ID NO: 183983 - DNA, 25 bp, Homo sapien
caaaagatagctcttcagtgagtgg

SEQ ID NO: 183984 - DNA, 25 bp, Homo sapien
gcattactggtgctacccacctgga

SEQ ID NO: 183985 - DNA, 25 bp, Homo sapien
ggatatccaaatacagccctgaaag

SEQ ID NO: 183986 - DNA, 25 bp, Homo sapien
tagtgacatataccaaccatagatg

SEQ ID NO: 183987 - DNA, 25 bp, Homo sapien
tgcatatagtggcaaacccaccggt

SEQ ID NO: 183988 - DNA, 25 bp, Homo sapien
tccagggtttggcagcatgtgtgtt

SEQ ID NO: 183989 - DNA, 25 bp, Homo sapien
ggtttttccagggtttggcagcatg

SEQ ID NO: 183990 - DNA, 25 bp, Homo sapien
gctcctgactggtgacctgttttga

SEQ ID NO: 183991 - DNA, 25 bp, Homo sapien
atcaatgttgggttctcctagtagg

SEQ ID NO: 183992 - DNA, 25 bp, Homo sapien
cactgggatagtagcagggtgtgag

SEQ ID NO: 183993 - DNA, 25 bp, Homo sapien
gtgtccacactgggatagtagcagg

SEQ ID NO: 183994 - DNA, 25 bp, Homo sapien
ccacactgggatagtagcagggtgt

SEQ ID NO: 183995 - DNA, 25 bp, Homo sapien
tgtccacactgggatagtagcaggg

SEQ ID NO: 183996 - DNA, 25 bp, Homo sapien
tggcccctacccatgtgaaaaggtg

SEQ ID NO: 183997 - DNA, 25 bp, Homo sapien
tcaggtcttcatatattgtggcagc

SEQ ID NO: 183998 - DNA, 25 bp, Homo sapien
gagagcttatgcttatacctcaggt

SEQ ID NO: 183999 - DNA, 25 bp, Homo sapien
ctgggtgcattgtaagggtagtcac

SEQ ID NO: 184000 - DNA, 25 bp, Homo sapien
tgggaggctgcgatgctagtggtgg

SEQ ID NO: 184001 - DNA, 25 bp, Homo sapien
tggctgggtcgcaattttgggaggc

SEQ ID NO: 184002 - DNA, 25 bp, Homo sapien
tgctagtggtggctgggtcgcaatt

SEQ ID NO: 184003 - DNA, 25 bp, Homo sapien
gacccccagcggcaccccagcttgg

SEQ ID NO: 184004 - DNA, 25 bp, Homo sapien
ttaaagtctccaacacaatgctgta

SEQ ID NO: 184005 - DNA, 25 bp, Homo sapien
aagtctccaacacaatgctgtatgt

SEQ ID NO: 184006 - DNA, 25 bp, Homo sapien
caatgctgtatgttgcaattgtttc

SEQ ID NO: 184007 - DNA, 25 bp, Homo sapien
gctgtatgttgcaattgtttctttt

SEQ ID NO: 184008 - DNA, 25 bp, Homo sapien
cactgttagaagtaaatcccaatag

SEQ ID NO: 184009 - DNA, 25 bp, Homo sapien
tgtttttgaacttactacctcagag

SEQ ID NO: 184010 - DNA, 25 bp, Homo sapien
taacataccactttgacataggcag

SEQ ID NO: 184011 - DNA, 25 bp, Homo sapien
tcagagtcacatggtatatatcccc

SEQ ID NO: 184012 - DNA, 25 bp, Homo sapien
gacaaatactcaggcttacctaagc

SEQ ID NO: 184013 - DNA, 25 bp, Homo sapien
tactgtccacgacaaattgctagga

SEQ ID NO: 184014 - DNA, 25 bp, Homo sapien
ctcagagaaatccatgttaaagctc

SEQ ID NO: 184015 - DNA, 25 bp, Homo sapien
tatcctcgagtaaagagtctctaga

SEQ ID NO: 184016 - DNA, 25 bp, Homo sapien
aaatctgcacccagttactctttag

SEQ ID NO: 184017 - DNA, 25 bp, Homo sapien
ttatcttttgttggtattacttgga

SEQ ID NO: 184018 - DNA, 25 bp, Homo sapien
tggtttagactcactcttaagtgaa

SEQ ID NO: 184019 - DNA, 25 bp, Homo sapien
gtttagactcactcttaagtgaaca

SEQ ID NO: 184020 - DNA, 25 bp, Homo sapien
ctttctaccatcctataggttttct

SEQ ID NO: 184021 - DNA, 25 bp, Homo sapien
tgcatagtttgcacaaactttctac

SEQ ID NO: 184022 - DNA, 25 bp, Homo sapien
catccagctataccaagataaggtg

SEQ ID NO: 184023 - DNA, 25 bp, Homo sapien
catggacgactaagaaaaccttgat

SEQ ID NO: 184024 - DNA, 25 bp, Homo sapien
taatgtttccagtaggagtttgccc

SEQ ID NO: 184025 - DNA, 25 bp, Homo sapien
gccgaaaccaaagccatccagctat

SEQ ID NO: 184026 - DNA, 25 bp, Homo sapien
tccagaactgaaagccttttctttg

SEQ ID NO: 184027 - DNA, 25 bp, Homo sapien
agaactgaaagccttttctttggct

SEQ ID NO: 184028 - DNA, 25 bp, Homo sapien
gccttttctttggcttttaatgatc

SEQ ID NO: 184029 - DNA, 25 bp, Homo sapien
ccttccagaactgaaagccttttct

SEQ ID NO: 184030 - DNA, 25 bp, Homo sapien
ggtctaacagtcatctggagttccc

SEQ ID NO: 184031 - DNA, 25 bp, Homo sapien
gataaaatgtggcagtgataacact

SEQ ID NO: 184032 - DNA, 25 bp, Homo sapien
taacacttgaggagatgatacctaa

SEQ ID NO: 184033 - DNA, 25 bp, Homo sapien
tagacacctcctagcagaataaaaa

SEQ ID NO: 184034 - DNA, 25 bp, Homo sapien
acgacagttacacagactaggagca

SEQ ID NO: 184035 - DNA, 25 bp, Homo sapien
accagccggctcaggatgttcaaca

SEQ ID NO: 184036 - DNA, 25 bp, Homo sapien
tgtgcaacgacagttacacagacta

SEQ ID NO: 184037 - DNA, 25 bp, Homo sapien
gccggctcaggatgttcaacaacat

SEQ ID NO: 184038 - DNA, 25 bp, Homo sapien
ggaccacattgtacactgagctgct

SEQ ID NO: 184039 - DNA, 25 bp, Homo sapien
tgatatacgtcacctagcgtcagcc

SEQ ID NO: 184040 - DNA, 25 bp, Homo sapien
tagaggcattaagcagcggaccaca

SEQ ID NO: 184041 - DNA, 25 bp, Homo sapien
caccgccaccggtctagaaaggaag

SEQ ID NO: 184042 - DNA, 25 bp, Homo sapien
tggttcctcaatttcttagatatga

SEQ ID NO: 184043 - DNA, 25 bp, Homo sapien
atggttcctcaatttcttagatatg

SEQ ID NO: 184044 - DNA, 25 bp, Homo sapien
ggtgtcaggtgtttggccgtttcca

SEQ ID NO: 184045 - DNA, 25 bp, Homo sapien
gaactgtaacaatacccggcgctag

SEQ ID NO: 184046 - DNA, 25 bp, Homo sapien
cctggtatgggaaaaacgattgctg

SEQ ID NO: 184047 - DNA, 25 bp, Homo sapien
caggaggcaattaaaacaggtacgg

SEQ ID NO: 184048 - DNA, 25 bp, Homo sapien
tgtgtggaaggtgcgcttggttttc

SEQ ID NO: 184049 - DNA, 25 bp, Homo sapien
gccatgtgtggaaggtgcgcttggt

SEQ ID NO: 184050 - DNA, 25 bp, Homo sapien
catgtgtggaaggtgcgcttggttt

SEQ ID NO: 184051 - DNA, 25 bp, Homo sapien
tgtggaaggtgcgcttggttttctc

SEQ ID NO: 184052 - DNA, 25 bp, Homo sapien
tcatcttggtgaggaccgaacaaac

SEQ ID NO: 184053 - DNA, 25 bp, Homo sapien
tggtgaggaccgaacaaaccactct

SEQ ID NO: 184054 - DNA, 25 bp, Homo sapien
ctctatatggtaacctccatgctgc

SEQ ID NO: 184055 - DNA, 25 bp, Homo sapien
ggaccgaacaaaccactctatatgg

SEQ ID NO: 184056 - DNA, 25 bp, Homo sapien
agcatgtgaggacacgctagaacag

SEQ ID NO: 184057 - DNA, 25 bp, Homo sapien
gagaaggagacggatcagcatgtga

SEQ ID NO: 184058 - DNA, 25 bp, Homo sapien
ggagacggatcagcatgtgaggaca

SEQ ID NO: 184059 - DNA, 25 bp, Homo sapien
aggacacgctagaacagtgtgcccc

SEQ ID NO: 184060 - DNA, 25 bp, Homo sapien
gcaagtcagttgatgtggccctgct

SEQ ID NO: 184061 - DNA, 25 bp, Homo sapien
cacagcaagtcagttgatgtggccc

SEQ ID NO: 184062 - DNA, 25 bp, Homo sapien
acagcaagtcagttgatgtggccct

SEQ ID NO: 184063 - DNA, 25 bp, Homo sapien
agcaagtcagttgatgtggccctgc

SEQ ID NO: 184064 - DNA, 25 bp, Homo sapien
tgagggcttgatcctcagacatcct

SEQ ID NO: 184065 - DNA, 25 bp, Homo sapien
gactgacccttgtgctaattctgca

SEQ ID NO: 184066 - DNA, 25 bp, Homo sapien
tgacccttgtgctaattctgcagcc

SEQ ID NO: 184067 - DNA, 25 bp, Homo sapien
caaagacatccaggtgactgaccct

SEQ ID NO: 184068 - DNA, 25 bp, Homo sapien
gatgtgagaatcaagacgtagttct

SEQ ID NO: 184069 - DNA, 25 bp, Homo sapien
ctgggtactccagatgtgagaatca

SEQ ID NO: 184070 - DNA, 25 bp, Homo sapien
cctgggtactccagatgtgagaatc

SEQ ID NO: 184071 - DNA, 25 bp, Homo sapien
agaatcaagacgtagttcttccctc

SEQ ID NO: 184072 - DNA, 25 bp, Homo sapien
tcacctcttctcagtagttcgtggt

SEQ ID NO: 184073 - DNA, 25 bp, Homo sapien
tcagtagttcgtggttcttataaac

SEQ ID NO: 184074 - DNA, 25 bp, Homo sapien
aattcacctcttctcagtagttcgt

SEQ ID NO: 184075 - DNA, 25 bp, Homo sapien
tcttctcagtagttcgtggttctta

SEQ ID NO: 184076 - DNA, 25 bp, Homo sapien
agttgagaagttcggttctcaggcc

SEQ ID NO: 184077 - DNA, 25 bp, Homo sapien
taggaactctttccacgagagcacc

SEQ ID NO: 184078 - DNA, 25 bp, Homo sapien
acactcgttgagacgccggcacggg

SEQ ID NO: 184079 - DNA, 25 bp, Homo sapien
ttctcaggccgcgtggacctgacag

SEQ ID NO: 184080 - DNA, 25 bp, Homo sapien
tagggactggcgccgcgtccaggtg

SEQ ID NO: 184081 - DNA, 25 bp, Homo sapien
gactggcgccgcgtccaggtggccg

SEQ ID NO: 184082 - DNA, 25 bp, Homo sapien
gggactggcgccgcgtccaggtggc

SEQ ID NO: 184083 - DNA, 25 bp, Homo sapien
ctagggactggcgccgcgtccaggt

SEQ ID NO: 184084 - DNA, 25 bp, Homo sapien
ggagctggaagtcgccgccgggccc

SEQ ID NO: 184085 - DNA, 25 bp, Homo sapien
gagctggaagtcgccgccgggcccc

SEQ ID NO: 184086 - DNA, 25 bp, Homo sapien
aaactgattctttgttaggttgaca

SEQ ID NO: 184087 - DNA, 25 bp, Homo sapien
tctgtccttcgggagttgtagaatg

SEQ ID NO: 184088 - DNA, 25 bp, Homo sapien
gcatccgctgcttgataaatctcac

SEQ ID NO: 184089 - DNA, 25 bp, Homo sapien
cttgttacttgttgccaagagcttg

SEQ ID NO: 184090 - DNA, 25 bp, Homo sapien
taaggcatgtaatgttgcttatttt

SEQ ID NO: 184091 - DNA, 25 bp, Homo sapien
aggcatgtaatgttgcttattttac

SEQ ID NO: 184092 - DNA, 25 bp, Homo sapien
ttaaggcatgtaatgttgcttattt

SEQ ID NO: 184093 - DNA, 25 bp, Homo sapien
aaggcatgtaatgttgcttatttta

SEQ ID NO: 184094 - DNA, 25 bp, Homo sapien
gatgttttgtttgccataaaggaag

SEQ ID NO: 184095 - DNA, 25 bp, Homo sapien
cataaaggaagtaggtttcagaggg

SEQ ID NO: 184096 - DNA, 25 bp, Homo sapien
ttcttccactcagtgaacatcccaa

SEQ ID NO: 184097 - DNA, 25 bp, Homo sapien
tcagagggggtaattccaatacagg

SEQ ID NO: 184098 - DNA, 25 bp, Homo sapien
aatttaggaaaagccttgaagcata

SEQ ID NO: 184099 - DNA, 25 bp, Homo sapien
caaatttaggaaaagccttgaagca

SEQ ID NO: 184100 - DNA, 25 bp, Homo sapien
atttaggaaaagccttgaagcatac

SEQ ID NO: 184101 - DNA, 25 bp, Homo sapien
tcaaatttaggaaaagccttgaagc

SEQ ID NO: 184102 - DNA, 25 bp, Homo sapien
cattggtgccaagatagctgctgta

SEQ ID NO: 184103 - DNA, 25 bp, Homo sapien
tgtggccaagcctatccctgaagaa

SEQ ID NO: 184104 - DNA, 25 bp, Homo sapien
catcgaggaagcaggcattgtggcc

SEQ ID NO: 184105 - DNA, 25 bp, Homo sapien
tacttatgatcagcgcacggagttc

SEQ ID NO: 184106 - DNA, 25 bp, Homo sapien
tattaccctaaatgtacagttgtac

SEQ ID NO: 184107 - DNA, 25 bp, Homo sapien
gggtgaatccaactaatgtattatt

SEQ ID NO: 184108 - DNA, 25 bp, Homo sapien
cagttgtactaaaagccttctagta

SEQ ID NO: 184109 - DNA, 25 bp, Homo sapien
actaaagtgaatggaaatagaatac

SEQ ID NO: 184110 - DNA, 25 bp, Homo sapien
gccaacctcatacggaaaattttca

SEQ ID NO: 184111 - DNA, 25 bp, Homo sapien
ttaatggattgtgactctgactcca

SEQ ID NO: 184112 - DNA, 25 bp, Homo sapien
gcaggccaacctcatacggaaaatt

SEQ ID NO: 184113 - DNA, 25 bp, Homo sapien
gctttaatggattgtgactctgact

SEQ ID NO: 184114 - DNA, 25 bp, Homo sapien
cctgaaagatatggcttctaaaccg

SEQ ID NO: 184115 - DNA, 25 bp, Homo sapien
cttctctgttggtgtggcttgggca

SEQ ID NO: 184116 - DNA, 25 bp, Homo sapien
ttctaaaccgaaggagtctcatgct

SEQ ID NO: 184117 - DNA, 25 bp, Homo sapien
catcagaggcatttgtagagatttc

SEQ ID NO: 184118 - DNA, 25 bp, Homo sapien
ctgggttggaataggtgctagaaac

SEQ ID NO: 184119 - DNA, 25 bp, Homo sapien
tacgtcaatgtttatgcattccaat

SEQ ID NO: 184120 - DNA, 25 bp, Homo sapien
aatacaaccaaaggagatagaacaa

SEQ ID NO: 184121 - DNA, 25 bp, Homo sapien
taatacattccaaaatacgtcaatg

SEQ ID NO: 184122 - DNA, 25 bp, Homo sapien
ttgcagcgtgccgagatcgcaccat

SEQ ID NO: 184123 - DNA, 25 bp, Homo sapien
tgcagcgtgccgagatcgcaccatt

SEQ ID NO: 184124 - DNA, 25 bp, Homo sapien
taatagtgttagtgatctactctta

SEQ ID NO: 184125 - DNA, 25 bp, Homo sapien
aagtattgcactttattattcaaca

SEQ ID NO: 184126 - DNA, 25 bp, Homo sapien
tttcctagtttaattatggagaata

SEQ ID NO: 184127 - DNA, 25 bp, Homo sapien
cctagtttaattatggagaataaag

SEQ ID NO: 184128 - DNA, 25 bp, Homo sapien
aaaactcatcaaaactcgcaaactg

SEQ ID NO: 184129 - DNA, 25 bp, Homo sapien
tgctgattcatagtttgtaaaacaa

SEQ ID NO: 184130 - DNA, 25 bp, Homo sapien
ttcaacagctgtatgtttgctatgt

SEQ ID NO: 184131 - DNA, 25 bp, Homo sapien
caaactgatcagaaaagtttctcgg

SEQ ID NO: 184132 - DNA, 25 bp, Homo sapien
tacaggccacaaatactggagtcct

SEQ ID NO: 184133 - DNA, 25 bp, Homo sapien
acagggcaacgggtcagtgagatct

SEQ ID NO: 184134 - DNA, 25 bp, Homo sapien
gatcagactccacattggcttaaag

SEQ ID NO: 184135 - DNA, 25 bp, Homo sapien
caatttgtgcctgccccagatagcc

SEQ ID NO: 184136 - DNA, 25 bp, Homo sapien
gctatatatgcttttgacgagtgga

SEQ ID NO: 184137 - DNA, 25 bp, Homo sapien
gagctgttatttcttgcacacatgt

SEQ ID NO: 184138 - DNA, 25 bp, Homo sapien
tcagctcctgcactagctatatatg

SEQ ID NO: 184139 - DNA, 25 bp, Homo sapien
gtggaaagcaacatcataaattgat

SEQ ID NO: 184140 - DNA, 25 bp, Homo sapien
caagtgagctaccatagaatggatc

SEQ ID NO: 184141 - DNA, 25 bp, Homo sapien
tactgctagacttgtaacagcatcc

SEQ ID NO: 184142 - DNA, 25 bp, Homo sapien
tgtaacagcatccaagtgagctacc

SEQ ID NO: 184143 - DNA, 25 bp, Homo sapien
aatagattccattaggatctactgc

SEQ ID NO: 184144 - DNA, 25 bp, Homo sapien
tgtgggatgacttactactctgttg

SEQ ID NO: 184145 - DNA, 25 bp, Homo sapien
tgacttactactctgttgatatgat

SEQ ID NO: 184146 - DNA, 25 bp, Homo sapien
caggaagtgtgggatgacttactac

SEQ ID NO: 184147 - DNA, 25 bp, Homo sapien
gggatgacttactactctgttgata

SEQ ID NO: 184148 - DNA, 25 bp, Homo sapien
taaagtcaactgatgtaggtattcc

SEQ ID NO: 184149 - DNA, 25 bp, Homo sapien
cagaatctacctgtgatgaaagtat

SEQ ID NO: 184150 - DNA, 25 bp, Homo sapien
cactaccagtgttgaaagaggttac

SEQ ID NO: 184151 - DNA, 25 bp, Homo sapien
taccatatgagctggatcacagcct

SEQ ID NO: 184152 - DNA, 25 bp, Homo sapien
tgtggattccataacctaacagtgc

SEQ ID NO: 184153 - DNA, 25 bp, Homo sapien
tctgtatgaccaactaaagtgccag

SEQ ID NO: 184154 - DNA, 25 bp, Homo sapien
aagcaagaccccaaactgcatctgt

SEQ ID NO: 184155 - DNA, 25 bp, Homo sapien
gccactataagcaagaccccaaact

SEQ ID NO: 184156 - DNA, 25 bp, Homo sapien
actgttctccattagaactaatagc

SEQ ID NO: 184157 - DNA, 25 bp, Homo sapien
atatgtatcatatggatctacactg

SEQ ID NO: 184158 - DNA, 25 bp, Homo sapien
ggactcggcatattccaccactgga

SEQ ID NO: 184159 - DNA, 25 bp, Homo sapien
cactggatggttgcatcaataccac

SEQ ID NO: 184160 - DNA, 25 bp, Homo sapien
gaagaaactcaaatctccattcccc

SEQ ID NO: 184161 - DNA, 25 bp, Homo sapien
ccccaacctctgaatttatgtaata

SEQ ID NO: 184162 - DNA, 25 bp, Homo sapien
ttcccccaacctctgaatttatgta

SEQ ID NO: 184163 - DNA, 25 bp, Homo sapien
aattactgataaattctaagaagaa

SEQ ID NO: 184164 - DNA, 25 bp, Homo sapien
aggtttgaggaccgataaataatat

SEQ ID NO: 184165 - DNA, 25 bp, Homo sapien
gcctgaatggtactattatattcat

SEQ ID NO: 184166 - DNA, 25 bp, Homo sapien
ggcctgaatggtactattatattca

SEQ ID NO: 184167 - DNA, 25 bp, Homo sapien
tcagcctccgaaaatcctcagatta

SEQ ID NO: 184168 - DNA, 25 bp, Homo sapien
gtgtagataggctctacatctaaag

SEQ ID NO: 184169 - DNA, 25 bp, Homo sapien
agataggctctacatctaaagaggc

SEQ ID NO: 184170 - DNA, 25 bp, Homo sapien
gataggctctacatctaaagaggca

SEQ ID NO: 184171 - DNA, 25 bp, Homo sapien
gtagataggctctacatctaaagag

SEQ ID NO: 184172 - DNA, 25 bp, Homo sapien
taggggaagagaaggcaattaaata

SEQ ID NO: 184173 - DNA, 25 bp, Homo sapien
catcaaaatggctacgtagtgtata

SEQ ID NO: 184174 - DNA, 25 bp, Homo sapien
tcagggtatggtcctcagaagcagt

SEQ ID NO: 184175 - DNA, 25 bp, Homo sapien
tgaaaagctaatgcccgtactccat

SEQ ID NO: 184176 - DNA, 25 bp, Homo sapien
taaccagcacaggttctacaggatg

SEQ ID NO: 184177 - DNA, 25 bp, Homo sapien
ccatgtctttcgaaaggcatcttta

SEQ ID NO: 184178 - DNA, 25 bp, Homo sapien
ttccatgtctttcgaaaggcatctt

SEQ ID NO: 184179 - DNA, 25 bp, Homo sapien
catgtctttcgaaaggcatctttat

SEQ ID NO: 184180 - DNA, 25 bp, Homo sapien
tccatgtctttcgaaaggcatcttt

SEQ ID NO: 184181 - DNA, 25 bp, Homo sapien
aaagtagtaaactggaaggcatgtg

SEQ ID NO: 184182 - DNA, 25 bp, Homo sapien
aaaagtagtaaactggaaggcatgt

SEQ ID NO: 184183 - DNA, 25 bp, Homo sapien
taaaagtagtaaactggaaggcatg

SEQ ID NO: 184184 - DNA, 25 bp, Homo sapien
tcataactatagtctgcatcatttg

SEQ ID NO: 184185 - DNA, 25 bp, Homo sapien
tccaaggcccagtacacttaacaaa

SEQ ID NO: 184186 - DNA, 25 bp, Homo sapien
ccagatggaaacgttattggttcag

SEQ ID NO: 184187 - DNA, 25 bp, Homo sapien
tttgttaccgtcaagtctgcaaggt

SEQ ID NO: 184188 - DNA, 25 bp, Homo sapien
cctcaaggacctcaaagtagtcata

SEQ ID NO: 184189 - DNA, 25 bp, Homo sapien
ctttctaaagaagtactaggcatcc

SEQ ID NO: 184190 - DNA, 25 bp, Homo sapien
taggcatcctagtccctgataaaaa

SEQ ID NO: 184191 - DNA, 25 bp, Homo sapien
gaagctagggcacaaaagctttgtc

SEQ ID NO: 184192 - DNA, 25 bp, Homo sapien
caaatagggctctaaaatgcagctc

SEQ ID NO: 184193 - DNA, 25 bp, Homo sapien
catgagcaaatttaaaagggacaca

SEQ ID NO: 184194 - DNA, 25 bp, Homo sapien
tatgctacaggaaacacaacaggtg

SEQ ID NO: 184195 - DNA, 25 bp, Homo sapien
taaactcaggttgagcttcacttag

SEQ ID NO: 184196 - DNA, 25 bp, Homo sapien
tgtggcatatggtaatcacagcagc

SEQ ID NO: 184197 - DNA, 25 bp, Homo sapien
tgtacctattgcaagctattctgct

SEQ ID NO: 184198 - DNA, 25 bp, Homo sapien
cacagcagctactcatctgtttgcc

SEQ ID NO: 184199 - DNA, 25 bp, Homo sapien
gtttgcccttatttccctgcagagg

SEQ ID NO: 184200 - DNA, 25 bp, Homo sapien
actatgcctgccctagtttttaatt

SEQ ID NO: 184201 - DNA, 25 bp, Homo sapien
tagtataacgggtctataaaataca

SEQ ID NO: 184202 - DNA, 25 bp, Homo sapien
tcaagtaagataacaatactagtat

SEQ ID NO: 184203 - DNA, 25 bp, Homo sapien
gataacaatactagtataacgggtc

SEQ ID NO: 184204 - DNA, 25 bp, Homo sapien
atcagtcattctagtagaggctgac

SEQ ID NO: 184205 - DNA, 25 bp, Homo sapien
catgatcagtcattctagtagaggc

SEQ ID NO: 184206 - DNA, 25 bp, Homo sapien
gcaccttcatgatcagtcattctag

SEQ ID NO: 184207 - DNA, 25 bp, Homo sapien
tgctcttgcaccttcatgatcagtc

SEQ ID NO: 184208 - DNA, 25 bp, Homo sapien
ggatgtggggcagctcatcatctcc

SEQ ID NO: 184209 - DNA, 25 bp, Homo sapien
gggcagctcatcatctcccagatca

SEQ ID NO: 184210 - DNA, 25 bp, Homo sapien
gactgattaatgattcctgaaggga

SEQ ID NO: 184211 - DNA, 25 bp, Homo sapien
catgtcgtagagttttgtcctgttg

SEQ ID NO: 184212 - DNA, 25 bp, Homo sapien
tcaacattaatggaagaatccgact

SEQ ID NO: 184213 - DNA, 25 bp, Homo sapien
tcaaaagcttctgtaccattgtgga

SEQ ID NO: 184214 - DNA, 25 bp, Homo sapien
aagtcagcactgtcataagccataa

SEQ ID NO: 184215 - DNA, 25 bp, Homo sapien
aagtccaaggtcaaacattatgacg

SEQ ID NO: 184216 - DNA, 25 bp, Homo sapien
catgtgcttcatgatctgatcctat

SEQ ID NO: 184217 - DNA, 25 bp, Homo sapien
tatcctcacccattctcagaaaggt

SEQ ID NO: 184218 - DNA, 25 bp, Homo sapien
taatgatccacaatacaaactccct

SEQ ID NO: 184219 - DNA, 25 bp, Homo sapien
cttcactcagaaaccacaagtagca

SEQ ID NO: 184220 - DNA, 25 bp, Homo sapien
cacctacctcttaacaaatacaaag

SEQ ID NO: 184221 - DNA, 25 bp, Homo sapien
ctatgaatacaacccacctacctct

SEQ ID NO: 184222 - DNA, 25 bp, Homo sapien
aaacttttctactactatgaataca

SEQ ID NO: 184223 - DNA, 25 bp, Homo sapien
ctagcctggtattgagctcctgggg

SEQ ID NO: 184224 - DNA, 25 bp, Homo sapien
gcaagtgtggtaaagtgttaacatt

SEQ ID NO: 184225 - DNA, 25 bp, Homo sapien
agcaagtgtggtaaagtgttaacat

SEQ ID NO: 184226 - DNA, 25 bp, Homo sapien
ttgatcaataacacatcctaaatta

SEQ ID NO: 184227 - DNA, 25 bp, Homo sapien
acttgatcaataacacatcctaaat

SEQ ID NO: 184228 - DNA, 25 bp, Homo sapien
cttgatcaataacacatcctaaatt

SEQ ID NO: 184229 - DNA, 25 bp, Homo sapien
tccttcttgtactgttccttcagtt

SEQ ID NO: 184230 - DNA, 25 bp, Homo sapien
aaaaaaatcagcagttggcaatgca

SEQ ID NO: 184231 - DNA, 25 bp, Homo sapien
aaaaaatcagcagttggcaatgcaa

SEQ ID NO: 184232 - DNA, 25 bp, Homo sapien
cagcagttggcaatgcaagctgttg

SEQ ID NO: 184233 - DNA, 25 bp, Homo sapien
caggatcgtcagttaggtcagcagc

SEQ ID NO: 184234 - DNA, 25 bp, Homo sapien
tatcaggatcgtcagttaggtcagc

SEQ ID NO: 184235 - DNA, 25 bp, Homo sapien
cctcagtatcaggatcgtcagttag

SEQ ID NO: 184236 - DNA, 25 bp, Homo sapien
gatcgtcagttaggtcagcagctaa

SEQ ID NO: 184237 - DNA, 25 bp, Homo sapien
ggaagtattcccattgcaacttcag

SEQ ID NO: 184238 - DNA, 25 bp, Homo sapien
gtattcccattgcaacttcagttaa

SEQ ID NO: 184239 - DNA, 25 bp, Homo sapien
cagggtggaagtattcccattgcaa

SEQ ID NO: 184240 - DNA, 25 bp, Homo sapien
ggtggaagtattcccattgcaactt

SEQ ID NO: 184241 - DNA, 25 bp, Homo sapien
ttctaagaaattgaacgtctcaaga

SEQ ID NO: 184242 - DNA, 25 bp, Homo sapien
tcatcactgtcatcggcattttcta

SEQ ID NO: 184243 - DNA, 25 bp, Homo sapien
cgtctcaagaacatcaccagaggac

SEQ ID NO: 184244 - DNA, 25 bp, Homo sapien
tattcatccgatgtttgtcttttcc

SEQ ID NO: 184245 - DNA, 25 bp, Homo sapien
gcttaggagattcacctccattcag

SEQ ID NO: 184246 - DNA, 25 bp, Homo sapien
gctgagaccgtacatctaatattgt

SEQ ID NO: 184247 - DNA, 25 bp, Homo sapien
ggttctgaattagatagtccaagta

SEQ ID NO: 184248 - DNA, 25 bp, Homo sapien
caagtaatgaccttacccgctgaga

SEQ ID NO: 184249 - DNA, 25 bp, Homo sapien
gcttccacgttaactggctattctg

SEQ ID NO: 184250 - DNA, 25 bp, Homo sapien
tccacgttaactggctattctgagg

SEQ ID NO: 184251 - DNA, 25 bp, Homo sapien
ttaactggctattctgaggtgctgt

SEQ ID NO: 184252 - DNA, 25 bp, Homo sapien
tgccttgcttccacgttaactggct

SEQ ID NO: 184253 - DNA, 25 bp, Homo sapien
cagttccgtgccatattttaatttg

SEQ ID NO: 184254 - DNA, 25 bp, Homo sapien
ggttcagttccgtgccatattttaa

SEQ ID NO: 184255 - DNA, 25 bp, Homo sapien
accttggttcagttccgtgccatat

SEQ ID NO: 184256 - DNA, 25 bp, Homo sapien
ccttggttcagttccgtgccatatt

SEQ ID NO: 184257 - DNA, 25 bp, Homo sapien
ttaatgcatactctaacatctttat

SEQ ID NO: 184258 - DNA, 25 bp, Homo sapien
catctttattcttcttactaagtcc

SEQ ID NO: 184259 - DNA, 25 bp, Homo sapien
acatctttattcttcttactaagtc

SEQ ID NO: 184260 - DNA, 25 bp, Homo sapien
gttttaatgcatactctaacatctt

SEQ ID NO: 184261 - DNA, 25 bp, Homo sapien
gatgcatttatttacattttccctt

SEQ ID NO: 184262 - DNA, 25 bp, Homo sapien
aagatgcatttatttacattttccc

SEQ ID NO: 184263 - DNA, 25 bp, Homo sapien
tgcatttatttacattttcccttaa

SEQ ID NO: 184264 - DNA, 25 bp, Homo sapien
aaagatgcatttatttacattttcc

SEQ ID NO: 184265 - DNA, 25 bp, Homo sapien
gatgcaatgtaagcaatgcgcaggg

SEQ ID NO: 184266 - DNA, 25 bp, Homo sapien
caccatgctcagacaagtcttaata

SEQ ID NO: 184267 - DNA, 25 bp, Homo sapien
taaaaagacagatatcaaagtttct

SEQ ID NO: 184268 - DNA, 25 bp, Homo sapien
cacaggacataccaaaacttagagg

SEQ ID NO: 184269 - DNA, 25 bp, Homo sapien
gagcaaggatagactgccccaaaca

SEQ ID NO: 184270 - DNA, 25 bp, Homo sapien
tcattttactaaagggacagctccc

SEQ ID NO: 184271 - DNA, 25 bp, Homo sapien
taaaccaatgcaatcctatacaggc

SEQ ID NO: 184272 - DNA, 25 bp, Homo sapien
gacagaccctattggactccttaaa

SEQ ID NO: 184273 - DNA, 25 bp, Homo sapien
tacacatgtaccctttaatctataa

SEQ ID NO: 184274 - DNA, 25 bp, Homo sapien
gcagtggtgccgatcatagtacctg

SEQ ID NO: 184275 - DNA, 25 bp, Homo sapien
tatattcttactatccagaacactg

SEQ ID NO: 184276 - DNA, 25 bp, Homo sapien
tgccgatcatagtacctgttgggta

SEQ ID NO: 184277 - DNA, 25 bp, Homo sapien
aaaggatgtctgatttggcccacag

SEQ ID NO: 184278 - DNA, 25 bp, Homo sapien
aattccctttaacagctcatgtaga

SEQ ID NO: 184279 - DNA, 25 bp, Homo sapien
tactaggttgcgtctaggaagggaa

SEQ ID NO: 184280 - DNA, 25 bp, Homo sapien
cctaaacacagtctctataatacat

SEQ ID NO: 184281 - DNA, 25 bp, Homo sapien
ctttgctgttagttaagccacctaa

SEQ ID NO: 184282 - DNA, 25 bp, Homo sapien
agttaagccacctaattttgagaag

SEQ ID NO: 184283 - DNA, 25 bp, Homo sapien
actacgctgttgcatgaacccaaga

SEQ ID NO: 184284 - DNA, 25 bp, Homo sapien
aagaattaaaactacgctgttgcat

SEQ ID NO: 184285 - DNA, 25 bp, Homo sapien
tatggtacaagaaggcatacagtcc

SEQ ID NO: 184286 - DNA, 25 bp, Homo sapien
caaagaaagggcaagagtaacgtag

SEQ ID NO: 184287 - DNA, 25 bp, Homo sapien
taacgtagaggcatggcagccggaa

SEQ ID NO: 184288 - DNA, 25 bp, Homo sapien
tagactctgaggatataaagaacag

SEQ ID NO: 184289 - DNA, 25 bp, Homo sapien
accgtgaacttcctctatcttcaca

SEQ ID NO: 184290 - DNA, 25 bp, Homo sapien
gtgaacttcctctatcttcacagca

SEQ ID NO: 184291 - DNA, 25 bp, Homo sapien
ccgtgaacttcctctatcttcacag

SEQ ID NO: 184292 - DNA, 25 bp, Homo sapien
cgtgaacttcctctatcttcacagc

SEQ ID NO: 184293 - DNA, 25 bp, Homo sapien
ctatgacttttaagagatggcatgt

SEQ ID NO: 184294 - DNA, 25 bp, Homo sapien
ccggccaaagggcactatgactttt

SEQ ID NO: 184295 - DNA, 25 bp, Homo sapien
gagatggcatgtacttgatatgcaa

SEQ ID NO: 184296 - DNA, 25 bp, Homo sapien
ggcatgtacttgatatgcaaaaggg

SEQ ID NO: 184297 - DNA, 25 bp, Homo sapien
gttcaactctgtatcacacagagtt

SEQ ID NO: 184298 - DNA, 25 bp, Homo sapien
tgttcaactctgtatcacacagagt

SEQ ID NO: 184299 - DNA, 25 bp, Homo sapien
tcaactctgtatcacacagagttcc

SEQ ID NO: 184300 - DNA, 25 bp, Homo sapien
ttcaactctgtatcacacagagttc

SEQ ID NO: 184301 - DNA, 25 bp, Homo sapien
tcacggcaagctccacctctcggga

SEQ ID NO: 184302 - DNA, 25 bp, Homo sapien
acggcaagctccacctctcgggatc

SEQ ID NO: 184303 - DNA, 25 bp, Homo sapien
gtttcccatgttggtcagactggtc

SEQ ID NO: 184304 - DNA, 25 bp, Homo sapien
ggcaagctccacctctcgggatcaa

SEQ ID NO: 184305 - DNA, 25 bp, Homo sapien
agtcatcaggaaaacgtttccaaag

SEQ ID NO: 184306 - DNA, 25 bp, Homo sapien
tgataacccacagtcatcaggaaaa

SEQ ID NO: 184307 - DNA, 25 bp, Homo sapien
aaacgtttccaaagctgtgaatcat

SEQ ID NO: 184308 - DNA, 25 bp, Homo sapien
ctgataacccacagtcatcaggaaa

SEQ ID NO: 184309 - DNA, 25 bp, Homo sapien
tgaccacatactgtacaccaaaaat

SEQ ID NO: 184310 - DNA, 25 bp, Homo sapien
aatagggaatcccagaaacagtctg

SEQ ID NO: 184311 - DNA, 25 bp, Homo sapien
ttatctgacacaggtctaaaacaat

SEQ ID NO: 184312 - DNA, 25 bp, Homo sapien
gaaaggtatggtaatccgcatgttg

SEQ ID NO: 184313 - DNA, 25 bp, Homo sapien
tcacaagggtgaacatcagacagaa

SEQ ID NO: 184314 - DNA, 25 bp, Homo sapien
gtacagctcagaaaacatagctggg

SEQ ID NO: 184315 - DNA, 25 bp, Homo sapien
gatgacttgaagaaatctgacacca

SEQ ID NO: 184316 - DNA, 25 bp, Homo sapien
gaattcagcaggtatagaatatcct

SEQ ID NO: 184317 - DNA, 25 bp, Homo sapien
catagtgacacacacctatagtctc

SEQ ID NO: 184318 - DNA, 25 bp, Homo sapien
tgggcatagtgacacacacctatag

SEQ ID NO: 184319 - DNA, 25 bp, Homo sapien
cctgggaaacagaaagagaccctct

SEQ ID NO: 184320 - DNA, 25 bp, Homo sapien
tgggaaacagaaagagaccctctct

SEQ ID NO: 184321 - DNA, 25 bp, Homo sapien
tgacagtttctaaacaatcagtaaa

SEQ ID NO: 184322 - DNA, 25 bp, Homo sapien
tagaagtggctaaacataaacacaa

SEQ ID NO: 184323 - DNA, 25 bp, Homo sapien
taaaatcttagtaagtaataaagca

SEQ ID NO: 184324 - DNA, 25 bp, Homo sapien
aagaagccaggtgctgatatcatgc

SEQ ID NO: 184325 - DNA, 25 bp, Homo sapien
aaagacaaactagtctataaattca

SEQ ID NO: 184326 - DNA, 25 bp, Homo sapien
agacaaactagtctataaattcatt

SEQ ID NO: 184327 - DNA, 25 bp, Homo sapien
gacaaactagtctataaattcatta

SEQ ID NO: 184328 - DNA, 25 bp, Homo sapien
aagacaaactagtctataaattcat

SEQ ID NO: 184329 - DNA, 25 bp, Homo sapien
gcatggtggcagatgtctgcaatcc

SEQ ID NO: 184330 - DNA, 25 bp, Homo sapien
cctagccgacatggcgaaaccttgt

SEQ ID NO: 184331 - DNA, 25 bp, Homo sapien
gacatggcgaaaccttgtctttcct

SEQ ID NO: 184332 - DNA, 25 bp, Homo sapien
atggtggcagatgtctgcaatccta

SEQ ID NO: 184333 - DNA, 25 bp, Homo sapien
gagcctccaaagctaggaatacagg

SEQ ID NO: 184334 - DNA, 25 bp, Homo sapien
caggatcatggtgagtataagactt

SEQ ID NO: 184335 - DNA, 25 bp, Homo sapien
tagtcgattactaacttggcagtgg

SEQ ID NO: 184336 - DNA, 25 bp, Homo sapien
gagtcttttaccaggctgaagagca

SEQ ID NO: 184337 - DNA, 25 bp, Homo sapien
tccttgaagggtattctgtgtccag

SEQ ID NO: 184338 - DNA, 25 bp, Homo sapien
tacttatagccaggccttggaaagc

SEQ ID NO: 184339 - DNA, 25 bp, Homo sapien
tgtccagtagccttaccaggaaggc

SEQ ID NO: 184340 - DNA, 25 bp, Homo sapien
cacaggtatgagttgcgtttcccca

SEQ ID NO: 184341 - DNA, 25 bp, Homo sapien
caagagtggtaacatgactacaggc

SEQ ID NO: 184342 - DNA, 25 bp, Homo sapien
gagctaagacagtataacataatgg

SEQ ID NO: 184343 - DNA, 25 bp, Homo sapien
gctggtctggaatagtaatttgcaa

SEQ ID NO: 184344 - DNA, 25 bp, Homo sapien
aacaggaatactcacctcatgaggt

SEQ ID NO: 184345 - DNA, 25 bp, Homo sapien
aaaacactgctgctgctgttaagga

SEQ ID NO: 184346 - DNA, 25 bp, Homo sapien
aacactgctgctgctgttaaggaga

SEQ ID NO: 184347 - DNA, 25 bp, Homo sapien
acactgctgctgctgttaaggagac

SEQ ID NO: 184348 - DNA, 25 bp, Homo sapien
ttaaaacactgctgctgctgttaag

SEQ ID NO: 184349 - DNA, 25 bp, Homo sapien
cataaatacagcatcgatcgtctgg

SEQ ID NO: 184350 - DNA, 25 bp, Homo sapien
aatctcttcagtcgtttcataaata

SEQ ID NO: 184351 - DNA, 25 bp, Homo sapien
gcatcgatcgtctggtttggttttt

SEQ ID NO: 184352 - DNA, 25 bp, Homo sapien
cagtcgtttcataaatacagcatcg

SEQ ID NO: 184353 - DNA, 25 bp, Homo sapien
ccaggaaaagccgttgagaggacca

SEQ ID NO: 184354 - DNA, 25 bp, Homo sapien
taaaacttcacaggtcagtcccaag

SEQ ID NO: 184355 - DNA, 25 bp, Homo sapien
gagaggaccatcacaacctgagcag

SEQ ID NO: 184356 - DNA, 25 bp, Homo sapien
gccagatacgccaaatcggaaaggg

SEQ ID NO: 184357 - DNA, 25 bp, Homo sapien
cactcgtgctggatgtagtgcagta

SEQ ID NO: 184358 - DNA, 25 bp, Homo sapien
atagtgtactgctgcggccgggaca

SEQ ID NO: 184359 - DNA, 25 bp, Homo sapien
gatgtagtgcagtatccccgggata

SEQ ID NO: 184360 - DNA, 25 bp, Homo sapien
atctcgaaccgagcccactcgtgct

SEQ ID NO: 184361 - DNA, 25 bp, Homo sapien
cggggcgcagggcgagacgccgaca

SEQ ID NO: 184362 - DNA, 25 bp, Homo sapien
tgtgtggggccccggccggggcgca

SEQ ID NO: 184363 - DNA, 25 bp, Homo sapien
ggggcgcagggcgagacgccgacag

SEQ ID NO: 184364 - DNA, 25 bp, Homo sapien
ggccggggcgcagggcgagacgccg

SEQ ID NO: 184365 - DNA, 25 bp, Homo sapien
ggccggagagggtggccccgcgctg

SEQ ID NO: 184366 - DNA, 25 bp, Homo sapien
gccggagagggtggccccgcgctgg

SEQ ID NO: 184367 - DNA, 25 bp, Homo sapien
cgccattacaatccctcctccatct

SEQ ID NO: 184368 - DNA, 25 bp, Homo sapien
tcgttgctgtgtgcctgccgtgggt

SEQ ID NO: 184369 - DNA, 25 bp, Homo sapien
gaaggggtcgttgctgtgtgcctgc

SEQ ID NO: 184370 - DNA, 25 bp, Homo sapien
gccggctgccgccattacaatccct

SEQ ID NO: 184371 - DNA, 25 bp, Homo sapien
ggccgaccgcatcccgtctcggatt

SEQ ID NO: 184372 - DNA, 25 bp, Homo sapien
ggctggtcgctctggccgaccgcat

SEQ ID NO: 184373 - DNA, 25 bp, Homo sapien
cggctttctgagctggttgttaacc

SEQ ID NO: 184374 - DNA, 25 bp, Homo sapien
accgcatcccgtctcggattcctga

SEQ ID NO: 184375 - DNA, 25 bp, Homo sapien
gaagcttgggtctgcttgcgactag

SEQ ID NO: 184376 - DNA, 25 bp, Homo sapien
tatgtacagtaatgggaagcttggg

SEQ ID NO: 184377 - DNA, 25 bp, Homo sapien
ttgagaataagattccccttgcagg

SEQ ID NO: 184378 - DNA, 25 bp, Homo sapien
tagggaatagatagcaacaacagca

SEQ ID NO: 184379 - DNA, 25 bp, Homo sapien
gcaaagtgccgcacttcagcccagg

SEQ ID NO: 184380 - DNA, 25 bp, Homo sapien
ggccgagaaaggcaaagtgccgcac

SEQ ID NO: 184381 - DNA, 25 bp, Homo sapien
tttgtgaggccgagaaaggcaaagt

SEQ ID NO: 184382 - DNA, 25 bp, Homo sapien
gaaaggcaaagtgccgcacttcagc

SEQ ID NO: 184383 - DNA, 25 bp, Homo sapien
tatcttggagaaggcgacattttca

SEQ ID NO: 184384 - DNA, 25 bp, Homo sapien
aaacaattgggcagttgctcaaggg

SEQ ID NO: 184385 - DNA, 25 bp, Homo sapien
gccatttttcacgtagccacctgtg

SEQ ID NO: 184386 - DNA, 25 bp, Homo sapien
gcttgatccccgaactaattcatgg

SEQ ID NO: 184387 - DNA, 25 bp, Homo sapien
cattctcaaatgacttcttagaact

SEQ ID NO: 184388 - DNA, 25 bp, Homo sapien
tctcaaatgacttcttagaactacc

SEQ ID NO: 184389 - DNA, 25 bp, Homo sapien
tcaaatgacttcttagaactaccca

SEQ ID NO: 184390 - DNA, 25 bp, Homo sapien
caaatgacttcttagaactacccat

SEQ ID NO: 184391 - DNA, 25 bp, Homo sapien
tctctgtacaggtaggcatgaaatg

SEQ ID NO: 184392 - DNA, 25 bp, Homo sapien
taggcgaaagtatgtacagtagtcc

SEQ ID NO: 184393 - DNA, 25 bp, Homo sapien
ttatccactgtttcgcattctgtgg

SEQ ID NO: 184394 - DNA, 25 bp, Homo sapien
tatgcttttgctaccccgttaacag

SEQ ID NO: 184395 - DNA, 25 bp, Homo sapien
tggagaccccggtagatgtctcaga

SEQ ID NO: 184396 - DNA, 25 bp, Homo sapien
gagaccccggtagatgtctcagaac

SEQ ID NO: 184397 - DNA, 25 bp, Homo sapien
gtggagaccccggtagatgtctcag

SEQ ID NO: 184398 - DNA, 25 bp, Homo sapien
ggagaccccggtagatgtctcagaa

SEQ ID NO: 184399 - DNA, 25 bp, Homo sapien
gtgttcttacaggctgtgtcgccat

SEQ ID NO: 184400 - DNA, 25 bp, Homo sapien
atgtgttcttacaggctgtgtcgcc

SEQ ID NO: 184401 - DNA, 25 bp, Homo sapien
tgtgttcttacaggctgtgtcgcca

SEQ ID NO: 184402 - DNA, 25 bp, Homo sapien
tgaacactgaagatctgagaagctg

SEQ ID NO: 184403 - DNA, 25 bp, Homo sapien
tttggaacagtcaagtgggaccacc

SEQ ID NO: 184404 - DNA, 25 bp, Homo sapien
cttaaaagccagcaaaacagggatc

SEQ ID NO: 184405 - DNA, 25 bp, Homo sapien
tacttgctggctgggtagttacagg

SEQ ID NO: 184406 - DNA, 25 bp, Homo sapien
ttgtagcagctagcaggcgctctct

SEQ ID NO: 184407 - DNA, 25 bp, Homo sapien
tgatctcctcggaagaatattcagg

SEQ ID NO: 184408 - DNA, 25 bp, Homo sapien
tgtattgactgatggatagcttgca

SEQ ID NO: 184409 - DNA, 25 bp, Homo sapien
gatagcttgcatcagtagcatcaac

SEQ ID NO: 184410 - DNA, 25 bp, Homo sapien
agcctgggatgcaggttagccagtc

SEQ ID NO: 184411 - DNA, 25 bp, Homo sapien
gcctgggatgcaggttagccagtcc

SEQ ID NO: 184412 - DNA, 25 bp, Homo sapien
gggtagagttgaacaaccagtggta

SEQ ID NO: 184413 - DNA, 25 bp, Homo sapien
gacatgccacataaaaccctcacaa

SEQ ID NO: 184414 - DNA, 25 bp, Homo sapien
atcagaagacatgccacataaaacc

SEQ ID NO: 184415 - DNA, 25 bp, Homo sapien
cagtggtaaactgcaagaatgcttt

SEQ ID NO: 184416 - DNA, 25 bp, Homo sapien
aaaatatagttatattgagttgact

SEQ ID NO: 184417 - DNA, 25 bp, Homo sapien
gaacaaaaatatagttatattgagt

SEQ ID NO: 184418 - DNA, 25 bp, Homo sapien
tatagttatattgagttgactgcag

SEQ ID NO: 184419 - DNA, 25 bp, Homo sapien
tagttatattgagttgactgcagat

SEQ ID NO: 184420 - DNA, 25 bp, Homo sapien
ctgtcacgtgtataacccagcttag

SEQ ID NO: 184421 - DNA, 25 bp, Homo sapien
ggttcagtgtaattgataatatcct

SEQ ID NO: 184422 - DNA, 25 bp, Homo sapien
tataacccagcttaggttcagtgta

SEQ ID NO: 184423 - DNA, 25 bp, Homo sapien
cgtgtataacccagcttaggttcag

SEQ ID NO: 184424 - DNA, 25 bp, Homo sapien
agtcaaacatcaaatccacatattc

SEQ ID NO: 184425 - DNA, 25 bp, Homo sapien
gtcaaacatcaaatccacatattct

SEQ ID NO: 184426 - DNA, 25 bp, Homo sapien
tgtttctgaatacccgtatgcatac

SEQ ID NO: 184427 - DNA, 25 bp, Homo sapien
ctgaatacccgtatgcatacaaaag

SEQ ID NO: 184428 - DNA, 25 bp, Homo sapien
ccacttggcttgagatccacagctg

SEQ ID NO: 184429 - DNA, 25 bp, Homo sapien
atgctaagtggaggcccagaacctg

SEQ ID NO: 184430 - DNA, 25 bp, Homo sapien
taggtaagtccacaagtctattgtc

SEQ ID NO: 184431 - DNA, 25 bp, Homo sapien
tcttcaaagcttcctaccgagagtg

SEQ ID NO: 184432 - DNA, 25 bp, Homo sapien
aatttggcgcctcttgatagcaagg

SEQ ID NO: 184433 - DNA, 25 bp, Homo sapien
gctgtgaacagtccacatgacctct

SEQ ID NO: 184434 - DNA, 25 bp, Homo sapien
ctgtgaacagtccacatgacctctg

SEQ ID NO: 184435 - DNA, 25 bp, Homo sapien
gtgaacagtccacatgacctctgca

SEQ ID NO: 184436 - DNA, 25 bp, Homo sapien
tgtgaacagtccacatgacctctgc

SEQ ID NO: 184437 - DNA, 25 bp, Homo sapien
tctaatgtgggtcccaagccagttc

SEQ ID NO: 184438 - DNA, 25 bp, Homo sapien
taatgtgggtcccaagccagttcct

SEQ ID NO: 184439 - DNA, 25 bp, Homo sapien
atgtgggtcccaagccagttccttc

SEQ ID NO: 184440 - DNA, 25 bp, Homo sapien
actctaatgtgggtcccaagccagt

SEQ ID NO: 184441 - DNA, 25 bp, Homo sapien
ggtagaagccctcaagcagaacaag

SEQ ID NO: 184442 - DNA, 25 bp, Homo sapien
gaagatacacattgggctggttccc

SEQ ID NO: 184443 - DNA, 25 bp, Homo sapien
cactttgccacctcaagagtggaga

SEQ ID NO: 184444 - DNA, 25 bp, Homo sapien
taacccctaaggaggtggactgaca

SEQ ID NO: 184445 - DNA, 25 bp, Homo sapien
ggttctcgttcgctccacagtggct

SEQ ID NO: 184446 - DNA, 25 bp, Homo sapien
cagtggcttcacgtcggttctgtaa

SEQ ID NO: 184447 - DNA, 25 bp, Homo sapien
gggtcatctcgcctaacactgcttg

SEQ ID NO: 184448 - DNA, 25 bp, Homo sapien
tcatgcttgagacgaccaactcgaa

SEQ ID NO: 184449 - DNA, 25 bp, Homo sapien
tgcccaggctggtcttgaatttctg

SEQ ID NO: 184450 - DNA, 25 bp, Homo sapien
ccaggctggtcttgaatttctggcc

SEQ ID NO: 184451 - DNA, 25 bp, Homo sapien
cccactgcaacctccctatcccggg

SEQ ID NO: 184452 - DNA, 25 bp, Homo sapien
gatgggggttctgccatgttgccca

SEQ ID NO: 184453 - DNA, 25 bp, Homo sapien
tctcacatctttcagcaagaaatac

SEQ ID NO: 184454 - DNA, 25 bp, Homo sapien
ccattttctaaccaattgagtaatt

SEQ ID NO: 184455 - DNA, 25 bp, Homo sapien
tcttcaaagtagtacaaatatttcg

SEQ ID NO: 184456 - DNA, 25 bp, Homo sapien
tgattagagggactatcttcaaagt

SEQ ID NO: 184457 - DNA, 25 bp, Homo sapien
gaaaacatctatcgggtatctctcc

SEQ ID NO: 184458 - DNA, 25 bp, Homo sapien
cctttggattagtcattttggcgaa

SEQ ID NO: 184459 - DNA, 25 bp, Homo sapien
caacaatgccattagccacgcgtgg

SEQ ID NO: 184460 - DNA, 25 bp, Homo sapien
ttcccttggttttcacacagcgcgc

SEQ ID NO: 184461 - DNA, 25 bp, Homo sapien
ggcgccaaatgctgtacatgtgaaa

SEQ ID NO: 184462 - DNA, 25 bp, Homo sapien
aataaagctgtctagtttcaaatgg

SEQ ID NO: 184463 - DNA, 25 bp, Homo sapien
ggttaattgttcacaccagtctggc

SEQ ID NO: 184464 - DNA, 25 bp, Homo sapien
agagccccacttgccagtgccaatg

SEQ ID NO: 184465 - DNA, 25 bp, Homo sapien
tgtaatttttttgctagtgaattca

SEQ ID NO: 184466 - DNA, 25 bp, Homo sapien
ctcaatctgctgtaatatttttgtt

SEQ ID NO: 184467 - DNA, 25 bp, Homo sapien
aatctgctgtaatatttttgttgta

SEQ ID NO: 184468 - DNA, 25 bp, Homo sapien
gtaatttttttgctagtgaattcat

SEQ ID NO: 184469 - DNA, 25 bp, Homo sapien
aagtaaactgaagctgttcatcacc

SEQ ID NO: 184470 - DNA, 25 bp, Homo sapien
gaaaagtaaactgaagctgttcatc

SEQ ID NO: 184471 - DNA, 25 bp, Homo sapien
gtggaaaagtaaactgaagctgttc

SEQ ID NO: 184472 - DNA, 25 bp, Homo sapien
ctggtggaaaagtaaactgaagctg

SEQ ID NO: 184473 - DNA, 25 bp, Homo sapien
gaaggacatcttctactccacaaga

SEQ ID NO: 184474 - DNA, 25 bp, Homo sapien
tatagaatacgcagaagctgaagga

SEQ ID NO: 184475 - DNA, 25 bp, Homo sapien
tgggatattcttgaataagggtcac

SEQ ID NO: 184476 - DNA, 25 bp, Homo sapien
gggtcacttgcaactatatatagaa

SEQ ID NO: 184477 - DNA, 25 bp, Homo sapien
ccatggtcaaagtctgcattcagat

SEQ ID NO: 184478 - DNA, 25 bp, Homo sapien
aaaacaaagcacgaagccatttgca

SEQ ID NO: 184479 - DNA, 25 bp, Homo sapien
cattcagatccaatgctaccagcca

SEQ ID NO: 184480 - DNA, 25 bp, Homo sapien
tgttccttaagaagcttccaaagct

SEQ ID NO: 184481 - DNA, 25 bp, Homo sapien
cagttaatttccagtggcgcaggaa

SEQ ID NO: 184482 - DNA, 25 bp, Homo sapien
ctgcaggtaggttatcaagtcattc

SEQ ID NO: 184483 - DNA, 25 bp, Homo sapien
tgctccacatgctctatagaccagc

SEQ ID NO: 184484 - DNA, 25 bp, Homo sapien
tcatcagtgccaaggtactgctcca

SEQ ID NO: 184485 - DNA, 25 bp, Homo sapien
cacttggtctaatctaaagaattcc

SEQ ID NO: 184486 - DNA, 25 bp, Homo sapien
tattcccttcaacgttcaactgcaa

SEQ ID NO: 184487 - DNA, 25 bp, Homo sapien
ctttaagatcatgcacttggtctaa

SEQ ID NO: 184488 - DNA, 25 bp, Homo sapien
agtctatgatatttcacatgcatta

SEQ ID NO: 184489 - DNA, 25 bp, Homo sapien
cttttctttatcagaatccttcatt

SEQ ID NO: 184490 - DNA, 25 bp, Homo sapien
cattttccttttctttatcagaatc

SEQ ID NO: 184491 - DNA, 25 bp, Homo sapien
ttccttttctttatcagaatccttc

SEQ ID NO: 184492 - DNA, 25 bp, Homo sapien
ccattttccttttctttatcagaat

SEQ ID NO: 184493 - DNA, 25 bp, Homo sapien
caaagtgagagctaatcgaggtgac

SEQ ID NO: 184494 - DNA, 25 bp, Homo sapien
cttcacgagtcgttccaagacctgt

SEQ ID NO: 184495 - DNA, 25 bp, Homo sapien
tgagtggtaattcaacttcacgagt

SEQ ID NO: 184496 - DNA, 25 bp, Homo sapien
caagacctgttactttcaaagtgag

SEQ ID NO: 184497 - DNA, 25 bp, Homo sapien
cgaccaggtctaggatcaaaagcag

SEQ ID NO: 184498 - DNA, 25 bp, Homo sapien
tatttctagatcagttgtctgctgg

SEQ ID NO: 184499 - DNA, 25 bp, Homo sapien
tgtctgctggacattagtacgacca

SEQ ID NO: 184500 - DNA, 25 bp, Homo sapien
tctctttagcacataatcatcatcc

SEQ ID NO: 184501 - DNA, 25 bp, Homo sapien
taacagcatgatgcgttacatcaga

SEQ ID NO: 184502 - DNA, 25 bp, Homo sapien
atcagagcgggagccagctcgacgt

SEQ ID NO: 184503 - DNA, 25 bp, Homo sapien
cgacgttgcagggatgggcgtctca

SEQ ID NO: 184504 - DNA, 25 bp, Homo sapien
ccagcaggtacctgtggtagctgcg

SEQ ID NO: 184505 - DNA, 25 bp, Homo sapien
cactggctaagttcatacacacaca

SEQ ID NO: 184506 - DNA, 25 bp, Homo sapien
tgcactgggtaagttcatacactgt

SEQ ID NO: 184507 - DNA, 25 bp, Homo sapien
actggctaagttcgtgtgtgtgcgc

SEQ ID NO: 184508 - DNA, 25 bp, Homo sapien
aaaaacagatggaccctgcttgcaa

SEQ ID NO: 184509 - DNA, 25 bp, Homo sapien
ctggcacggcagctatcaaggaaat

SEQ ID NO: 184510 - DNA, 25 bp, Homo sapien
tcagccaatagagtactggcacggc

SEQ ID NO: 184511 - DNA, 25 bp, Homo sapien
aggtaagtcctcatcatcatcgagc

SEQ ID NO: 184512 - DNA, 25 bp, Homo sapien
ctcctcgtattcttggtcctcctga

SEQ ID NO: 184513 - DNA, 25 bp, Homo sapien
actacggaataatgtatgtggcatc

SEQ ID NO: 184514 - DNA, 25 bp, Homo sapien
gttctgccaccacatacaagatgag

SEQ ID NO: 184515 - DNA, 25 bp, Homo sapien
tatctagcacataaggaagttcaaa

SEQ ID NO: 184516 - DNA, 25 bp, Homo sapien
gcttagatatgtgacctggtaggtt

SEQ ID NO: 184517 - DNA, 25 bp, Homo sapien
tccttccttcttataatctcttgcc

SEQ ID NO: 184518 - DNA, 25 bp, Homo sapien
gactgggtcaaattacattgtcctg

SEQ ID NO: 184519 - DNA, 25 bp, Homo sapien
ttataatctcttgccttcgatggag

SEQ ID NO: 184520 - DNA, 25 bp, Homo sapien
aagatgctgacaaactgttcttcat

SEQ ID NO: 184521 - DNA, 25 bp, Homo sapien
aggactaaagggattataacagaag

SEQ ID NO: 184522 - DNA, 25 bp, Homo sapien
gaggactaaagggattataacagaa

SEQ ID NO: 184523 - DNA, 25 bp, Homo sapien
catgaaaatgggctatacacaaaat

SEQ ID NO: 184524 - DNA, 25 bp, Homo sapien
gcacagggccaccatgagaaataat

SEQ ID NO: 184525 - DNA, 25 bp, Homo sapien
aatgactctcttaaaactatggaac

SEQ ID NO: 184526 - DNA, 25 bp, Homo sapien
cctatgcagttaggactgcaggagt

SEQ ID NO: 184527 - DNA, 25 bp, Homo sapien
tatagaaacccatgcaacatatgtg

SEQ ID NO: 184528 - DNA, 25 bp, Homo sapien
gctggcggaaaaggatataatcctt

SEQ ID NO: 184529 - DNA, 25 bp, Homo sapien
gatgtacatcaaagctggttgtctg

SEQ ID NO: 184530 - DNA, 25 bp, Homo sapien
tacagttcaagaaagctcattcata

SEQ ID NO: 184531 - DNA, 25 bp, Homo sapien
actggggccttgaacttcagggctc

SEQ ID NO: 184532 - DNA, 25 bp, Homo sapien
gccttctcagtagcatgacatcaca

SEQ ID NO: 184533 - DNA, 25 bp, Homo sapien
ctggggccttgaacttcagggctca

SEQ ID NO: 184534 - DNA, 25 bp, Homo sapien
cagtagcatgacatcacacctggct

SEQ ID NO: 184535 - DNA, 25 bp, Homo sapien
gtgcctggcccgaagatttcatatt

SEQ ID NO: 184536 - DNA, 25 bp, Homo sapien
aaaatatcaggagaaaacataataa

SEQ ID NO: 184537 - DNA, 25 bp, Homo sapien
catcattatgaaagtatctaaatac

SEQ ID NO: 184538 - DNA, 25 bp, Homo sapien
cattatgaaagtatctaaatacttt

SEQ ID NO: 184539 - DNA, 25 bp, Homo sapien
atataaggaatattctgcttcctga

SEQ ID NO: 184540 - DNA, 25 bp, Homo sapien
tataaggaatattctgcttcctgac

SEQ ID NO: 184541 - DNA, 25 bp, Homo sapien
catataaggaatattctgcttcctg

SEQ ID NO: 184542 - DNA, 25 bp, Homo sapien
tgttacttaaagattgaccaactga

SEQ ID NO: 184543 - DNA, 25 bp, Homo sapien
cattgctgctgctagtaacactgga

SEQ ID NO: 184544 - DNA, 25 bp, Homo sapien
taccaggtgtggtcaaattagggaa

SEQ ID NO: 184545 - DNA, 25 bp, Homo sapien
catagtcactgttgatgtagtacca

SEQ ID NO: 184546 - DNA, 25 bp, Homo sapien
gaacaagagaccctattttgcatcc

SEQ ID NO: 184547 - DNA, 25 bp, Homo sapien
ccctccaagtggaaaaagcatcgga

SEQ ID NO: 184548 - DNA, 25 bp, Homo sapien
gatctagttaaaaactgcagccaga

SEQ ID NO: 184549 - DNA, 25 bp, Homo sapien
taaagagtgaggtcataaaacacac

SEQ ID NO: 184550 - DNA, 25 bp, Homo sapien
ggatattgcactagactccccagga

SEQ ID NO: 184551 - DNA, 25 bp, Homo sapien
tacacttgcactagagctcataggg

SEQ ID NO: 184552 - DNA, 25 bp, Homo sapien
caacaattggttcatggacatcagc

SEQ ID NO: 184553 - DNA, 25 bp, Homo sapien
tacgaacagaactatcagggcctaa

SEQ ID NO: 184554 - DNA, 25 bp, Homo sapien
gcccatacggtaagagtttgagcca

SEQ ID NO: 184555 - DNA, 25 bp, Homo sapien
agcatcccaggtgacatcaatccag

SEQ ID NO: 184556 - DNA, 25 bp, Homo sapien
aaattttccttctgcgcccatacgg

SEQ ID NO: 184557 - DNA, 25 bp, Homo sapien
tgggtgatgccactgtatcagggtc

SEQ ID NO: 184558 - DNA, 25 bp, Homo sapien
tgataacacgagctcctggaaccat

SEQ ID NO: 184559 - DNA, 25 bp, Homo sapien
ggaacgtactagacgtctctgccgt

SEQ ID NO: 184560 - DNA, 25 bp, Homo sapien
tgatctcgccatttccaatccaggc

SEQ ID NO: 184561 - DNA, 25 bp, Homo sapien
tgtatttcagaacctgggaacgtac

SEQ ID NO: 184562 - DNA, 25 bp, Homo sapien
tcatcctttggtggatcaagaggcc

SEQ ID NO: 184563 - DNA, 25 bp, Homo sapien
gtgccataaagttcgaatccagata

SEQ ID NO: 184564 - DNA, 25 bp, Homo sapien
gaggtagtgtgtttgtccactggca

SEQ ID NO: 184565 - DNA, 25 bp, Homo sapien
ggatcaagaggccaagttgcagttg

SEQ ID NO: 184566 - DNA, 25 bp, Homo sapien
tgcagtcatcaacatgggtatacaa

SEQ ID NO: 184567 - DNA, 25 bp, Homo sapien
ctgcagtcatcaacatgggtataca

SEQ ID NO: 184568 - DNA, 25 bp, Homo sapien
gagacccagatctatggcaaaccag

SEQ ID NO: 184569 - DNA, 25 bp, Homo sapien
ctaagcggccataaggtagatttct

SEQ ID NO: 184570 - DNA, 25 bp, Homo sapien
gttactactacaagtccataggcag

SEQ ID NO: 184571 - DNA, 25 bp, Homo sapien
cataaccacgagcatgacgaagtgt

SEQ ID NO: 184572 - DNA, 25 bp, Homo sapien
aaacaaatgaagatcggtcaaaatc

SEQ ID NO: 184573 - DNA, 25 bp, Homo sapien
gctggtgccgaaatataaaattttg

SEQ ID NO: 184574 - DNA, 25 bp, Homo sapien
tgaagatcggtcaaaatcataccac

SEQ ID NO: 184575 - DNA, 25 bp, Homo sapien
tttcatcaaaatcatgctggtgccg

SEQ ID NO: 184576 - DNA, 25 bp, Homo sapien
tgccagtcctgtcaatcaatgcagt

SEQ ID NO: 184577 - DNA, 25 bp, Homo sapien
caggtgcacgttccaaccgaaatcg

SEQ ID NO: 184578 - DNA, 25 bp, Homo sapien
gattcaactgtagccaaaggttcca

SEQ ID NO: 184579 - DNA, 25 bp, Homo sapien
tcaatgcagtttcaccaggtgcacg

SEQ ID NO: 184580 - DNA, 25 bp, Homo sapien
cataatagaactatgaacaaatgtc

SEQ ID NO: 184581 - DNA, 25 bp, Homo sapien
caaaatactctggaaaacgtcttgg

SEQ ID NO: 184582 - DNA, 25 bp, Homo sapien
tacacaaaaacgatcaaaatactct

SEQ ID NO: 184583 - DNA, 25 bp, Homo sapien
ggtttctgtctcagaattgtaaaaa

SEQ ID NO: 184584 - DNA, 25 bp, Homo sapien
gatgggagtcttgttcctgttgccc

SEQ ID NO: 184585 - DNA, 25 bp, Homo sapien
tcttgttcctgttgcccaggctaga

SEQ ID NO: 184586 - DNA, 25 bp, Homo sapien
agtcttgttcctgttgcccaggcta

SEQ ID NO: 184587 - DNA, 25 bp, Homo sapien
ggagtcttgttcctgttgcccaggc

SEQ ID NO: 184588 - DNA, 25 bp, Homo sapien
tagctaattagcttactccgctaga

SEQ ID NO: 184589 - DNA, 25 bp, Homo sapien
tattctacaggataagcatccctaa

SEQ ID NO: 184590 - DNA, 25 bp, Homo sapien
gagctagacccagtcttgaaaagaa

SEQ ID NO: 184591 - DNA, 25 bp, Homo sapien
tataactcacaattttccaggtaag

SEQ ID NO: 184592 - DNA, 25 bp, Homo sapien
ggatcctggtgtatcatacaaatgg

SEQ ID NO: 184593 - DNA, 25 bp, Homo sapien
ttcgaattaacgcaactgctggtcg

SEQ ID NO: 184594 - DNA, 25 bp, Homo sapien
ctggaggttatatgtggatcctggt

SEQ ID NO: 184595 - DNA, 25 bp, Homo sapien
caaatggagaggtagacgttcaata

SEQ ID NO: 184596 - DNA, 25 bp, Homo sapien
tttctaccagttgactacaatcttg

SEQ ID NO: 184597 - DNA, 25 bp, Homo sapien
taccagttgactacaatcttgtttc

SEQ ID NO: 184598 - DNA, 25 bp, Homo sapien
ttattctttctaccagttgactaca

SEQ ID NO: 184599 - DNA, 25 bp, Homo sapien
cagttgactacaatcttgtttcata

SEQ ID NO: 184600 - DNA, 25 bp, Homo sapien
ttgtttaacacagtaagaagtgctt

SEQ ID NO: 184601 - DNA, 25 bp, Homo sapien
gctgtcttcattaaatctctccaag

SEQ ID NO: 184602 - DNA, 25 bp, Homo sapien
tacaattaggttttctaaagctgtc

SEQ ID NO: 184603 - DNA, 25 bp, Homo sapien
accaagccactgctacacatttcat

SEQ ID NO: 184604 - DNA, 25 bp, Homo sapien
gctttcaacagctttaaaatggtca

SEQ ID NO: 184605 - DNA, 25 bp, Homo sapien
tgttaccactactccacgaggcatg

SEQ ID NO: 184606 - DNA, 25 bp, Homo sapien
gatgactctaactgagttgctatgt

SEQ ID NO: 184607 - DNA, 25 bp, Homo sapien
tgctatgtttctgagtgttaccact

SEQ ID NO: 184608 - DNA, 25 bp, Homo sapien
tgtttctaagcacaaggagactgtg

SEQ ID NO: 184609 - DNA, 25 bp, Homo sapien
ccagcagaattcaaaaaggtgacac

SEQ ID NO: 184610 - DNA, 25 bp, Homo sapien
taaggtgcccaatatgcatgttccc

SEQ ID NO: 184611 - DNA, 25 bp, Homo sapien
gagactgtgacgtaccttgcaagaa

SEQ ID NO: 184612 - DNA, 25 bp, Homo sapien
tcttttgccagtccagccagtcaca

SEQ ID NO: 184613 - DNA, 25 bp, Homo sapien
tgcctcttttgccagtccagccagt

SEQ ID NO: 184614 - DNA, 25 bp, Homo sapien
tttgccagtccagccagtcacaaat

SEQ ID NO: 184615 - DNA, 25 bp, Homo sapien
gccagtccagccagtcacaaattct

SEQ ID NO: 184616 - DNA, 25 bp, Homo sapien
tcagtgaccaatttcctacagtaag

SEQ ID NO: 184617 - DNA, 25 bp, Homo sapien
ccttctttcaaacatgtcagtgacc

SEQ ID NO: 184618 - DNA, 25 bp, Homo sapien
tagatggctttacttggcctcgagc

SEQ ID NO: 184619 - DNA, 25 bp, Homo sapien
tgtagcttgctgaccatctgaatta

SEQ ID NO: 184620 - DNA, 25 bp, Homo sapien
tccggactaccacttgaatacatgg

SEQ ID NO: 184621 - DNA, 25 bp, Homo sapien
taatgattgaccagtctctccaatg

SEQ ID NO: 184622 - DNA, 25 bp, Homo sapien
actgtcagatccaccttccggacta

SEQ ID NO: 184623 - DNA, 25 bp, Homo sapien
tgaaccatccattactgccattaga

SEQ ID NO: 184624 - DNA, 25 bp, Homo sapien
tctttagcatcttcctgtggttcat

SEQ ID NO: 184625 - DNA, 25 bp, Homo sapien
gcaattctttagcatcttcctgtgg

SEQ ID NO: 184626 - DNA, 25 bp, Homo sapien
ttgttgcaattctttagcatcttcc

SEQ ID NO: 184627 - DNA, 25 bp, Homo sapien
ttagcatcttcctgtggttcatctt

SEQ ID NO: 184628 - DNA, 25 bp, Homo sapien
caacctctataaagataatagagac

SEQ ID NO: 184629 - DNA, 25 bp, Homo sapien
cctctataaagataatagagacagt

SEQ ID NO: 184630 - DNA, 25 bp, Homo sapien
tatctacaacctctataaagataat

SEQ ID NO: 184631 - DNA, 25 bp, Homo sapien
tctacaacctctataaagataatag

SEQ ID NO: 184632 - DNA, 25 bp, Homo sapien
tctaaatacgtccatcataaacaac

SEQ ID NO: 184633 - DNA, 25 bp, Homo sapien
taaagaacagtcaatgcaggactat

SEQ ID NO: 184634 - DNA, 25 bp, Homo sapien
tgaaagcaaacaaagcgagtctctt

SEQ ID NO: 184635 - DNA, 25 bp, Homo sapien
tatagacaagatatacgaaaaatgt

SEQ ID NO: 184636 - DNA, 25 bp, Homo sapien
tggccaaaacccaatattctttaca

SEQ ID NO: 184637 - DNA, 25 bp, Homo sapien
tcacatttacaatatccagtagcaa

SEQ ID NO: 184638 - DNA, 25 bp, Homo sapien
taggctaggctcgaattcgtgggct

SEQ ID NO: 184639 - DNA, 25 bp, Homo sapien
tgccaccatgcaatgacaattttgt

SEQ ID NO: 184640 - DNA, 25 bp, Homo sapien
caagtctggctagctgatccaaaaa

SEQ ID NO: 184641 - DNA, 25 bp, Homo sapien
tctcatcatcagaggaaggacctgc

SEQ ID NO: 184642 - DNA, 25 bp, Homo sapien
ctttatctactaaatcccttatgat

SEQ ID NO: 184643 - DNA, 25 bp, Homo sapien
acgttgacactttgctaattacacc

SEQ ID NO: 184644 - DNA, 25 bp, Homo sapien
tgcaaagccagcaagtggccatcat

SEQ ID NO: 184645 - DNA, 25 bp, Homo sapien
caaagccagcaagtggccatcatca

SEQ ID NO: 184646 - DNA, 25 bp, Homo sapien
aagccagcaagtggccatcatcatc

SEQ ID NO: 184647 - DNA, 25 bp, Homo sapien
ctgcaaagccagcaagtggccatca

SEQ ID NO: 184648 - DNA, 25 bp, Homo sapien
gtaggcaaattgtgaccaacatcag

SEQ ID NO: 184649 - DNA, 25 bp, Homo sapien
tcatttttcgaattagagcaagact

SEQ ID NO: 184650 - DNA, 25 bp, Homo sapien
agtgatttccactagtattgtaggc

SEQ ID NO: 184651 - DNA, 25 bp, Homo sapien
ctcttgatccaggacagttgcagtg

SEQ ID NO: 184652 - DNA, 25 bp, Homo sapien
cgcacaccgccacgctcagcttttt

SEQ ID NO: 184653 - DNA, 25 bp, Homo sapien
gcacaccgccacgctcagctttttg

SEQ ID NO: 184654 - DNA, 25 bp, Homo sapien
gtcagtctactaagatcaccaagct

SEQ ID NO: 184655 - DNA, 25 bp, Homo sapien
catctcactttgtcatctagactgg

SEQ ID NO: 184656 - DNA, 25 bp, Homo sapien
ccttcagtacagagggattcttgga

SEQ ID NO: 184657 - DNA, 25 bp, Homo sapien
tacaagtgaagatactgagcgatag

SEQ ID NO: 184658 - DNA, 25 bp, Homo sapien
accttttcaagtatatgggtgccat

SEQ ID NO: 184659 - DNA, 25 bp, Homo sapien
tatatgggtgccatttccggatctc

SEQ ID NO: 184660 - DNA, 25 bp, Homo sapien
gaaatgtttgtgcaaacactggcaa

SEQ ID NO: 184661 - DNA, 25 bp, Homo sapien
tcaagtatatgggtgccatttccgg

SEQ ID NO: 184662 - DNA, 25 bp, Homo sapien
gatttgcaccatgccgtaacagagt

SEQ ID NO: 184663 - DNA, 25 bp, Homo sapien
tcactatggcccctttctcgagctt

SEQ ID NO: 184664 - DNA, 25 bp, Homo sapien
catctctcagatctggatttgcacc

SEQ ID NO: 184665 - DNA, 25 bp, Homo sapien
cctttctcgagctttatctaatgga

SEQ ID NO: 184666 - DNA, 25 bp, Homo sapien
tgacctctattaacatctgcacctc

SEQ ID NO: 184667 - DNA, 25 bp, Homo sapien
ttgacctctattaacatctgcacct

SEQ ID NO: 184668 - DNA, 25 bp, Homo sapien
tttgacctctattaacatctgcacc

SEQ ID NO: 184669 - DNA, 25 bp, Homo sapien
ctttgacctctattaacatctgcac

SEQ ID NO: 184670 - DNA, 25 bp, Homo sapien
tagagtctgacctacatcatccata

SEQ ID NO: 184671 - DNA, 25 bp, Homo sapien
gagtctgacctacatcatccataaa

SEQ ID NO: 184672 - DNA, 25 bp, Homo sapien
ggcccagtttaatagagtctgacct

SEQ ID NO: 184673 - DNA, 25 bp, Homo sapien
aaagcagaggcccagtttaatagag

SEQ ID NO: 184674 - DNA, 25 bp, Homo sapien
gagaatatcgaaggggtgccacttt

SEQ ID NO: 184675 - DNA, 25 bp, Homo sapien
ttgttatctggatttctaagagtac

SEQ ID NO: 184676 - DNA, 25 bp, Homo sapien
cataattatgcacagggatagggga

SEQ ID NO: 184677 - DNA, 25 bp, Homo sapien
tactgtccgaaaactagaaactgcc

SEQ ID NO: 184678 - DNA, 25 bp, Homo sapien
gaactatctaatctccggagtcctg

SEQ ID NO: 184679 - DNA, 25 bp, Homo sapien
tagatccagcactagactttggcaa

SEQ ID NO: 184680 - DNA, 25 bp, Homo sapien
gaaggtcaaccaaacgcatagtatc

SEQ ID NO: 184681 - DNA, 25 bp, Homo sapien
tataagctgccgatgtgagcgctcc

SEQ ID NO: 184682 - DNA, 25 bp, Homo sapien
ctctgcaaagtgttgagagcagact

SEQ ID NO: 184683 - DNA, 25 bp, Homo sapien
atgtgttactaccggagagcctctg

SEQ ID NO: 184684 - DNA, 25 bp, Homo sapien
cctctgcaaagtgttgagagcagac

SEQ ID NO: 184685 - DNA, 25 bp, Homo sapien
tgtgttactaccggagagcctctgc

SEQ ID NO: 184686 - DNA, 25 bp, Homo sapien
ccacgacgggtaaatcggtcagcca

SEQ ID NO: 184687 - DNA, 25 bp, Homo sapien
cagcagcagccattcgagataacag

SEQ ID NO: 184688 - DNA, 25 bp, Homo sapien
gctaatggagctgggtcaacaccac

SEQ ID NO: 184689 - DNA, 25 bp, Homo sapien
tgcaaagcatcgcagagctccatct

SEQ ID NO: 184690 - DNA, 25 bp, Homo sapien
gctttaataaactagacagagattc

SEQ ID NO: 184691 - DNA, 25 bp, Homo sapien
aaagactgctcctgactcacgagta

SEQ ID NO: 184692 - DNA, 25 bp, Homo sapien
tatgaactagatgtccactgtcacg

SEQ ID NO: 184693 - DNA, 25 bp, Homo sapien
tcacgaatgaaggtaagcacacaat

SEQ ID NO: 184694 - DNA, 25 bp, Homo sapien
tttcagtctctaagtgatgtttaaa

SEQ ID NO: 184695 - DNA, 25 bp, Homo sapien
taagtaatgagccaataagtaatac

SEQ ID NO: 184696 - DNA, 25 bp, Homo sapien
ctgagaggtctgagaaaaataagta

SEQ ID NO: 184697 - DNA, 25 bp, Homo sapien
gtttaaatgagccaatactcatccc

SEQ ID NO: 184698 - DNA, 25 bp, Homo sapien
acaatccttcgggtacattccgcag

SEQ ID NO: 184699 - DNA, 25 bp, Homo sapien
caggtagtatgttatggcacgggct

SEQ ID NO: 184700 - DNA, 25 bp, Homo sapien
cattccgcagatacatccaggtagt

SEQ ID NO: 184701 - DNA, 25 bp, Homo sapien
ggcacgggctgtcacctctaataca

SEQ ID NO: 184702 - DNA, 25 bp, Homo sapien
agtccattcaccattctattaccta

SEQ ID NO: 184703 - DNA, 25 bp, Homo sapien
caccattctattacctattaccaaa

SEQ ID NO: 184704 - DNA, 25 bp, Homo sapien
cagtaccctgaggataaaatccaaa

SEQ ID NO: 184705 - DNA, 25 bp, Homo sapien
tcccagctaccggatgggggttaga

SEQ ID NO: 184706 - DNA, 25 bp, Homo sapien
tctcagaggctaatgaacacaacag

SEQ ID NO: 184707 - DNA, 25 bp, Homo sapien
tggaggttactggtacactacccca

SEQ ID NO: 184708 - DNA, 25 bp, Homo sapien
aaaatctggctatagaatgaaaagc

SEQ ID NO: 184709 - DNA, 25 bp, Homo sapien
cctcactagtttcaagaaggaacca

SEQ ID NO: 184710 - DNA, 25 bp, Homo sapien
tacttattactggagttcaaaactg

SEQ ID NO: 184711 - DNA, 25 bp, Homo sapien
caagagttacaactgaaagttattc

SEQ ID NO: 184712 - DNA, 25 bp, Homo sapien
tctactaattaccttaaaatagcat

SEQ ID NO: 184713 - DNA, 25 bp, Homo sapien
taaaaacgaaacacatgttcaacac

SEQ ID NO: 184714 - DNA, 25 bp, Homo sapien
tacagtaacccaaaggaacatgatg

SEQ ID NO: 184715 - DNA, 25 bp, Homo sapien
tgtcactacagtaacccaaaggaac

SEQ ID NO: 184716 - DNA, 25 bp, Homo sapien
actacagtaacccaaaggaacatga

SEQ ID NO: 184717 - DNA, 25 bp, Homo sapien
tcactacagtaacccaaaggaacat

SEQ ID NO: 184718 - DNA, 25 bp, Homo sapien
tagccattccagcaatgtatctggg

SEQ ID NO: 184719 - DNA, 25 bp, Homo sapien
ggctattagttgcatgtccctttca

SEQ ID NO: 184720 - DNA, 25 bp, Homo sapien
acgttgtcagacatcaaaagcagca

SEQ ID NO: 184721 - DNA, 25 bp, Homo sapien
tttcaaaacaacgatccacgttgtc

SEQ ID NO: 184722 - DNA, 25 bp, Homo sapien
taaattccgggactgaacagcttgg

SEQ ID NO: 184723 - DNA, 25 bp, Homo sapien
tttcatagtgtcctcctagcaatta

SEQ ID NO: 184724 - DNA, 25 bp, Homo sapien
aattccgggactgaacagcttgggc

SEQ ID NO: 184725 - DNA, 25 bp, Homo sapien
taagtacgtttggacgtaagagtgc

SEQ ID NO: 184726 - DNA, 25 bp, Homo sapien
ctgtgtctacgaggaagggaagttc

SEQ ID NO: 184727 - DNA, 25 bp, Homo sapien
ctcaagggcaaaaggagccggcctg

SEQ ID NO: 184728 - DNA, 25 bp, Homo sapien
agcaagccttcgtgcccgagaggag

SEQ ID NO: 184729 - DNA, 25 bp, Homo sapien
cctggcagcgaacccttctcaaggg

SEQ ID NO: 184730 - DNA, 25 bp, Homo sapien
tcggcgccggggtctcgctttccgc

SEQ ID NO: 184731 - DNA, 25 bp, Homo sapien
ttccgacggtccgaggcgctcccgc

SEQ ID NO: 184732 - DNA, 25 bp, Homo sapien
cgcagggcccttccgacggtccgag

SEQ ID NO: 184733 - DNA, 25 bp, Homo sapien
tcgctttccgccactcgccgggcgt

SEQ ID NO: 184734 - DNA, 25 bp, Homo sapien
ccgcggccctagagttcccaagaag

SEQ ID NO: 184735 - DNA, 25 bp, Homo sapien
caagaagccgcaggccgcgcaggtc

SEQ ID NO: 184736 - DNA, 25 bp, Homo sapien
gcttgtcgttccaaaccgctccgat

SEQ ID NO: 184737 - DNA, 25 bp, Homo sapien
caggcggcacaggaaaagccgcgcc

SEQ ID NO: 184738 - DNA, 25 bp, Homo sapien
aggttctcgcgtgcggcagcagcca

SEQ ID NO: 184739 - DNA, 25 bp, Homo sapien
agccagcggacgtccagtccccagc

SEQ ID NO: 184740 - DNA, 25 bp, Homo sapien
aagcgagaggttctcgcgtgcggca

SEQ ID NO: 184741 - DNA, 25 bp, Homo sapien
ctggtgacagggaagcgagaggttc

SEQ ID NO: 184742 - DNA, 25 bp, Homo sapien
ggcccagtccatcgcgaaccgggag

SEQ ID NO: 184743 - DNA, 25 bp, Homo sapien
gggaggcccagtccatcgcgaaccg

SEQ ID NO: 184744 - DNA, 25 bp, Homo sapien
tgcaactcagaggcccgcgcggtgc

SEQ ID NO: 184745 - DNA, 25 bp, Homo sapien
gcgcggtgctgcgggcgacggcggc

SEQ ID NO: 184746 - DNA, 25 bp, Homo sapien
gtattttggaaatgacaaatttgta

SEQ ID NO: 184747 - DNA, 25 bp, Homo sapien
agtattttggaaatgacaaatttgt

SEQ ID NO: 184748 - DNA, 25 bp, Homo sapien
cagtattttggaaatgacaaatttg

SEQ ID NO: 184749 - DNA, 25 bp, Homo sapien
tattttggaaatgacaaatttgtac

SEQ ID NO: 184750 - DNA, 25 bp, Homo sapien
gcaggtaatggtccgtttaggtatc

SEQ ID NO: 184751 - DNA, 25 bp, Homo sapien
tatccgcgcatgtcccgttgtcgca

SEQ ID NO: 184752 - DNA, 25 bp, Homo sapien
tcccgttgtcgcaggtaatggtccg

SEQ ID NO: 184753 - DNA, 25 bp, Homo sapien
tcagatagctatccgcgcatgtccc

SEQ ID NO: 184754 - DNA, 25 bp, Homo sapien
tctgagtctcctctatcataccgct

SEQ ID NO: 184755 - DNA, 25 bp, Homo sapien
gagtctcctctatcataccgcttat

SEQ ID NO: 184756 - DNA, 25 bp, Homo sapien
tctatcataccgcttattaggtgat

SEQ ID NO: 184757 - DNA, 25 bp, Homo sapien
cataccgcttattaggtgatattgt

SEQ ID NO: 184758 - DNA, 25 bp, Homo sapien
attaaatctcagataatgagtcaca

SEQ ID NO: 184759 - DNA, 25 bp, Homo sapien
ttaaatctcagataatgagtcacag

SEQ ID NO: 184760 - DNA, 25 bp, Homo sapien
gtgaattaaatctcagataatgagt

SEQ ID NO: 184761 - DNA, 25 bp, Homo sapien
gaattaaatctcagataatgagtca

SEQ ID NO: 184762 - DNA, 25 bp, Homo sapien
tgactgaggctccacattggcgaag

SEQ ID NO: 184763 - DNA, 25 bp, Homo sapien
cacagaggtacgaagagggtccctc

SEQ ID NO: 184764 - DNA, 25 bp, Homo sapien
gaagcaacaggctgccttttgactg

SEQ ID NO: 184765 - DNA, 25 bp, Homo sapien
taggaaaagcatatggacaggcaca

SEQ ID NO: 184766 - DNA, 25 bp, Homo sapien
taagagtaagtctcccacactccgg

SEQ ID NO: 184767 - DNA, 25 bp, Homo sapien
ctgagctgggctcgttgaaatggca

SEQ ID NO: 184768 - DNA, 25 bp, Homo sapien
cacactccggtgtaagtcatttctg

SEQ ID NO: 184769 - DNA, 25 bp, Homo sapien
catgtgccgccatgacagtgcttct

SEQ ID NO: 184770 - DNA, 25 bp, Homo sapien
tctccgagagcatacacagcatgcc

SEQ ID NO: 184771 - DNA, 25 bp, Homo sapien
tcagctgatctcttcctgtgagatg

SEQ ID NO: 184772 - DNA, 25 bp, Homo sapien
ctgtgagatgttaggaatgaggtcc

SEQ ID NO: 184773 - DNA, 25 bp, Homo sapien
tgcagcatcccatgtgagtcacagg

SEQ ID NO: 184774 - DNA, 25 bp, Homo sapien
ggtaaaactgtggatcttgtgccag

SEQ ID NO: 184775 - DNA, 25 bp, Homo sapien
tcactggtaaaactgtggatcttgt

SEQ ID NO: 184776 - DNA, 25 bp, Homo sapien
tcacatggcacagaactttcactgg

SEQ ID NO: 184777 - DNA, 25 bp, Homo sapien
gtactgagaagtttcacatggcaca

SEQ ID NO: 184778 - DNA, 25 bp, Homo sapien
ccttaccttagtgtcgtgattcaga

SEQ ID NO: 184779 - DNA, 25 bp, Homo sapien
caggagttcgaggatctagtgcaca

SEQ ID NO: 184780 - DNA, 25 bp, Homo sapien
tcacagatcacacctctgaatagcc

SEQ ID NO: 184781 - DNA, 25 bp, Homo sapien
gtacatttgtcacaagtgttgaacc

SEQ ID NO: 184782 - DNA, 25 bp, Homo sapien
agcaagccaccgtttccagtacctt

SEQ ID NO: 184783 - DNA, 25 bp, Homo sapien
aagcaagccaccgtttccagtacct

SEQ ID NO: 184784 - DNA, 25 bp, Homo sapien
ctttccttccatcaaagtgtaccat

SEQ ID NO: 184785 - DNA, 25 bp, Homo sapien
cctcaaatccaagagggacttccaa

SEQ ID NO: 184786 - DNA, 25 bp, Homo sapien
tcctgtaccagtgcaattcaatagc

SEQ ID NO: 184787 - DNA, 25 bp, Homo sapien
gaacaacctagttcagcatttgcct

SEQ ID NO: 184788 - DNA, 25 bp, Homo sapien
ccttggcaaagaagttatgagtcct

SEQ ID NO: 184789 - DNA, 25 bp, Homo sapien
aattactgacgttcatataagcacc

SEQ ID NO: 184790 - DNA, 25 bp, Homo sapien
tatacactcaatgcctagagacact

SEQ ID NO: 184791 - DNA, 25 bp, Homo sapien
cagatgaggaagcagttaaattggt

SEQ ID NO: 184792 - DNA, 25 bp, Homo sapien
tggagacacacatctgtagttcctg

SEQ ID NO: 184793 - DNA, 25 bp, Homo sapien
gatatttaagccaggcctaaaagga

SEQ ID NO: 184794 - DNA, 25 bp, Homo sapien
tgacacagtgcttgattcacacagt

SEQ ID NO: 184795 - DNA, 25 bp, Homo sapien
gacatgcttctatcacttcggtttg

SEQ ID NO: 184796 - DNA, 25 bp, Homo sapien
aactagacctctaagggcacttgtg

SEQ ID NO: 184797 - DNA, 25 bp, Homo sapien
gagtaagactcaatttctgaaccca

SEQ ID NO: 184798 - DNA, 25 bp, Homo sapien
aattggatgcttgagttttttccag

SEQ ID NO: 184799 - DNA, 25 bp, Homo sapien
tttccaggactcttagtatatttag

SEQ ID NO: 184800 - DNA, 25 bp, Homo sapien
ccaggactcttagtatatttagatg

SEQ ID NO: 184801 - DNA, 25 bp, Homo sapien
ggaaactggtctttaattggatgct

SEQ ID NO: 184802 - DNA, 25 bp, Homo sapien
tttgtagagcaaagtcatgtaaatt

SEQ ID NO: 184803 - DNA, 25 bp, Homo sapien
tgaggtccaatttgcatgagatttt

SEQ ID NO: 184804 - DNA, 25 bp, Homo sapien
tcctgattgccctttatagcagcct

SEQ ID NO: 184805 - DNA, 25 bp, Homo sapien
caaggcgggcttttagggctggaga

SEQ ID NO: 184806 - DNA, 25 bp, Homo sapien
cagtaaccagtgtttctaagacctt

SEQ ID NO: 184807 - DNA, 25 bp, Homo sapien
tggaagatctcaagctcagcagtgt

SEQ ID NO: 184808 - DNA, 25 bp, Homo sapien
gcagtttttccatgatacaggatgc

SEQ ID NO: 184809 - DNA, 25 bp, Homo sapien
taagacctttatgccttcttggaag

SEQ ID NO: 184810 - DNA, 25 bp, Homo sapien
aaagatggaatgtaggagctggtag

SEQ ID NO: 184811 - DNA, 25 bp, Homo sapien
gaatgtaggagctggtaggtcttga

SEQ ID NO: 184812 - DNA, 25 bp, Homo sapien
ggagctggtaggtcttgatttgtac

SEQ ID NO: 184813 - DNA, 25 bp, Homo sapien
ctgaaagatggaatgtaggagctgg

SEQ ID NO: 184814 - DNA, 25 bp, Homo sapien
gagtgtttcaaggaacgtctggacc

SEQ ID NO: 184815 - DNA, 25 bp, Homo sapien
ccgacttggagactgctatacaaag

SEQ ID NO: 184816 - DNA, 25 bp, Homo sapien
caaatgtcatggtctgagtgtttca

SEQ ID NO: 184817 - DNA, 25 bp, Homo sapien
taatgtgtcatcaggcatcagagtc

SEQ ID NO: 184818 - DNA, 25 bp, Homo sapien
ggaaatgactatacatcaaagatat

SEQ ID NO: 184819 - DNA, 25 bp, Homo sapien
caacaggacagacgataaaaggaaa

SEQ ID NO: 184820 - DNA, 25 bp, Homo sapien
ggcaacaggacagacgataaaagga

SEQ ID NO: 184821 - DNA, 25 bp, Homo sapien
aaaggaaatgactatacatcaaaga

SEQ ID NO: 184822 - DNA, 25 bp, Homo sapien
ttagggctgaagaacaagactactg

SEQ ID NO: 184823 - DNA, 25 bp, Homo sapien
ccactataatatgctacaaagtatc

SEQ ID NO: 184824 - DNA, 25 bp, Homo sapien
gttccagtgctacatcaatcttaag

SEQ ID NO: 184825 - DNA, 25 bp, Homo sapien
cactatgctctacccttagggctga

SEQ ID NO: 184826 - DNA, 25 bp, Homo sapien
catcaagttcttggtgtgtttcatc

SEQ ID NO: 184827 - DNA, 25 bp, Homo sapien
tcaatacagcgcttctgaaggcatg

SEQ ID NO: 184828 - DNA, 25 bp, Homo sapien
ctgtgatagcagtaagtagactgac

SEQ ID NO: 184829 - DNA, 25 bp, Homo sapien
ggtagttacttctggactggtagac

SEQ ID NO: 184830 - DNA, 25 bp, Homo sapien
gacagcctatcctgggtgatcagag

SEQ ID NO: 184831 - DNA, 25 bp, Homo sapien
gctgactatactcaagaggcacagt

SEQ ID NO: 184832 - DNA, 25 bp, Homo sapien
gaaagccttgaggagataatacctg

SEQ ID NO: 184833 - DNA, 25 bp, Homo sapien
aatgaacgctgactaagaaccctgg

SEQ ID NO: 184834 - DNA, 25 bp, Homo sapien
tagcaacttgaaactgcaacagagt

SEQ ID NO: 184835 - DNA, 25 bp, Homo sapien
ggcagaaagcttgattacagagagt

SEQ ID NO: 184836 - DNA, 25 bp, Homo sapien
caagataaagttctcctgggttcct

SEQ ID NO: 184837 - DNA, 25 bp, Homo sapien
ccaagtcacacaattagtaaggcag

SEQ ID NO: 184838 - DNA, 25 bp, Homo sapien
tatgtgccaccagaatcggctgatt

SEQ ID NO: 184839 - DNA, 25 bp, Homo sapien
gtagctgagacagcattgggtagct

SEQ ID NO: 184840 - DNA, 25 bp, Homo sapien
gtatgtgccaccagaatcggctgat

SEQ ID NO: 184841 - DNA, 25 bp, Homo sapien
tctgaggaccccgattgtgaggtac

SEQ ID NO: 184842 - DNA, 25 bp, Homo sapien
tgcaactgtcgaagataactggccc

SEQ ID NO: 184843 - DNA, 25 bp, Homo sapien
gagcctgtagggaagctgcaactgt

SEQ ID NO: 184844 - DNA, 25 bp, Homo sapien
gaaggtcagtccaagcagtacggct

SEQ ID NO: 184845 - DNA, 25 bp, Homo sapien
tcatttcagatcaagtaacgacacg

SEQ ID NO: 184846 - DNA, 25 bp, Homo sapien
aggcctgcagttgaaccatgaagaa

SEQ ID NO: 184847 - DNA, 25 bp, Homo sapien
tacaagctacagacctacatatgga

SEQ ID NO: 184848 - DNA, 25 bp, Homo sapien
tacacataatgcctctgtaggacag

SEQ ID NO: 184849 - DNA, 25 bp, Homo sapien
tcggaaaggataaccaatgcagctg

SEQ ID NO: 184850 - DNA, 25 bp, Homo sapien
tctgggagctgtctaactagaatgc

SEQ ID NO: 184851 - DNA, 25 bp, Homo sapien
tgcaaagaccaaagactttccaggc

SEQ ID NO: 184852 - DNA, 25 bp, Homo sapien
cacactgcaggaagttcggaaagga

SEQ ID NO: 184853 - DNA, 25 bp, Homo sapien
aattactcgatgtagaacattcagc

SEQ ID NO: 184854 - DNA, 25 bp, Homo sapien
tgaagccaactgaatggaaggtgat

SEQ ID NO: 184855 - DNA, 25 bp, Homo sapien
taatctgccttaccacttcaagtga

SEQ ID NO: 184856 - DNA, 25 bp, Homo sapien
aggtgattctctggttaaaattact

SEQ ID NO: 184857 - DNA, 25 bp, Homo sapien
gcatctgaacgtaaggaacatagaa

SEQ ID NO: 184858 - DNA, 25 bp, Homo sapien
ggtacatctagaagtgcttgcaatg

SEQ ID NO: 184859 - DNA, 25 bp, Homo sapien
caatttttgatctgggccaaggtac

SEQ ID NO: 184860 - DNA, 25 bp, Homo sapien
tgctttccatggttgcatctgaacg

SEQ ID NO: 184861 - DNA, 25 bp, Homo sapien
ggcctggagagattagatgctcctt

SEQ ID NO: 184862 - DNA, 25 bp, Homo sapien
gactttatggtagccccagatgatg

SEQ ID NO: 184863 - DNA, 25 bp, Homo sapien
tgaaccctgacacatggaagttggt

SEQ ID NO: 184864 - DNA, 25 bp, Homo sapien
aaacccgtgcttgtaagccacaatg

SEQ ID NO: 184865 - DNA, 25 bp, Homo sapien
ctgtagcatggaggataagtgccca

SEQ ID NO: 184866 - DNA, 25 bp, Homo sapien
gtgcccaggagttgtaataatgcaa

SEQ ID NO: 184867 - DNA, 25 bp, Homo sapien
aggataagtgcccaggagttgtaat

SEQ ID NO: 184868 - DNA, 25 bp, Homo sapien
tagcatggaggataagtgcccagga

SEQ ID NO: 184869 - DNA, 25 bp, Homo sapien
tcagtcagttccctataccctaagg

SEQ ID NO: 184870 - DNA, 25 bp, Homo sapien
caactgataggtcatagggctgatc

SEQ ID NO: 184871 - DNA, 25 bp, Homo sapien
tttatcagcacagattagttctgcc

SEQ ID NO: 184872 - DNA, 25 bp, Homo sapien
catttaccgacttccaagatgaaca

SEQ ID NO: 184873 - DNA, 25 bp, Homo sapien
tcagcaggaagttgggaggcaaatt

SEQ ID NO: 184874 - DNA, 25 bp, Homo sapien
ttcagcaggaagttgggaggcaaat

SEQ ID NO: 184875 - DNA, 25 bp, Homo sapien
cttcagcaggaagttgggaggcaaa

SEQ ID NO: 184876 - DNA, 25 bp, Homo sapien
ccagagtctgcttagtgtgccaaga

SEQ ID NO: 184877 - DNA, 25 bp, Homo sapien
cagtccatctgatgaacatgatcca

SEQ ID NO: 184878 - DNA, 25 bp, Homo sapien
tcctgaagtgcagcaagccagagtc

SEQ ID NO: 184879 - DNA, 25 bp, Homo sapien
tttctgataccgtcttctaaacagg

SEQ ID NO: 184880 - DNA, 25 bp, Homo sapien
gtgatatcaagaaggcctgtctgtg

SEQ ID NO: 184881 - DNA, 25 bp, Homo sapien
actgtgatatcaagaaggcctgtct

SEQ ID NO: 184882 - DNA, 25 bp, Homo sapien
ctggacttgaaatgcactgtgatat

SEQ ID NO: 184883 - DNA, 25 bp, Homo sapien
ggcctgtctgtgtaactacacacag

SEQ ID NO: 184884 - DNA, 25 bp, Homo sapien
aaaaatactatcttcaatgagatgc

SEQ ID NO: 184885 - DNA, 25 bp, Homo sapien
ggtagaaagagtcaaaaatactatc

SEQ ID NO: 184886 - DNA, 25 bp, Homo sapien
caaaaatactatcttcaatgagatg

SEQ ID NO: 184887 - DNA, 25 bp, Homo sapien
gtcaaaaatactatcttcaatgaga

SEQ ID NO: 184888 - DNA, 25 bp, Homo sapien
ctctgcccaggctttaagcacagct

SEQ ID NO: 184889 - DNA, 25 bp, Homo sapien
tacaactccacttgctatccaggca

SEQ ID NO: 184890 - DNA, 25 bp, Homo sapien
ccagcctgtattttagttaacgatg

SEQ ID NO: 184891 - DNA, 25 bp, Homo sapien
ttcggagatcattaaggtcacttac

SEQ ID NO: 184892 - DNA, 25 bp, Homo sapien
aacaagcaactgatgaactcttcgg

SEQ ID NO: 184893 - DNA, 25 bp, Homo sapien
ctctgaagtgaaggctggtctaagc

SEQ ID NO: 184894 - DNA, 25 bp, Homo sapien
tgtctctgaagtgaaggctggtcta

SEQ ID NO: 184895 - DNA, 25 bp, Homo sapien
aaggctggtctaagcgctgctccta

SEQ ID NO: 184896 - DNA, 25 bp, Homo sapien
aagtgaaggctggtctaagcgctgc

SEQ ID NO: 184897 - DNA, 25 bp, Homo sapien
aatggcgcggagttgcagctgcagg

SEQ ID NO: 184898 - DNA, 25 bp, Homo sapien
aggaatggcgcggagttgcagctgc

SEQ ID NO: 184899 - DNA, 25 bp, Homo sapien
cagcaccaggaatggcgcggagttg

SEQ ID NO: 184900 - DNA, 25 bp, Homo sapien
agcaccaggaatggcgcggagttgc

SEQ ID NO: 184901 - DNA, 25 bp, Homo sapien
gcttcctggcatagacaataatcaa

SEQ ID NO: 184902 - DNA, 25 bp, Homo sapien
cttcctggcatagacaataatcaag

SEQ ID NO: 184903 - DNA, 25 bp, Homo sapien
agtaataccccggtggtctgcattt

SEQ ID NO: 184904 - DNA, 25 bp, Homo sapien
tgatctgtggcagccataaaagcca

SEQ ID NO: 184905 - DNA, 25 bp, Homo sapien
cgccgaataacaactaacagcattt

SEQ ID NO: 184906 - DNA, 25 bp, Homo sapien
taaaagccatgcgaattaagtcagc

SEQ ID NO: 184907 - DNA, 25 bp, Homo sapien
ggaacagttgcaaatcgccgaataa

SEQ ID NO: 184908 - DNA, 25 bp, Homo sapien
cattggttaattatcctacagacac

SEQ ID NO: 184909 - DNA, 25 bp, Homo sapien
ttcagcagcaaagactctagtagcc

SEQ ID NO: 184910 - DNA, 25 bp, Homo sapien
tggtcaggactgaggcatcatcccc

SEQ ID NO: 184911 - DNA, 25 bp, Homo sapien
tttcatcacgtctggtggtcaggac

SEQ ID NO: 184912 - DNA, 25 bp, Homo sapien
tttattaaaggagaacatatgtaat

SEQ ID NO: 184913 - DNA, 25 bp, Homo sapien
tattaaaggagaacatatgtaatta

SEQ ID NO: 184914 - DNA, 25 bp, Homo sapien
cttttattaaaggagaacatatgta

SEQ ID NO: 184915 - DNA, 25 bp, Homo sapien
ttaaaggagaacatatgtaattata

SEQ ID NO: 184916 - DNA, 25 bp, Homo sapien
tagatggatgtacttaaggagactc

SEQ ID NO: 184917 - DNA, 25 bp, Homo sapien
tatcaatcccctgcaagtagatgga

SEQ ID NO: 184918 - DNA, 25 bp, Homo sapien
gactcaaaattctcgggtgtgggtg

SEQ ID NO: 184919 - DNA, 25 bp, Homo sapien
taacactggagccttgcatggattt

SEQ ID NO: 184920 - DNA, 25 bp, Homo sapien
tagaaatacaatcttcatttgaaga

SEQ ID NO: 184921 - DNA, 25 bp, Homo sapien
gagcaggcttaagtattggatttat

SEQ ID NO: 184922 - DNA, 25 bp, Homo sapien
acaatcagacagtcagaatccagct

SEQ ID NO: 184923 - DNA, 25 bp, Homo sapien
gttttatataggaaagtcatctaag

SEQ ID NO: 184924 - DNA, 25 bp, Homo sapien
tattttaactgataatgtccaatac

SEQ ID NO: 184925 - DNA, 25 bp, Homo sapien
ttttaactgataatgtccaatactt

SEQ ID NO: 184926 - DNA, 25 bp, Homo sapien
tattattttaactgataatgtccaa

SEQ ID NO: 184927 - DNA, 25 bp, Homo sapien
ttctcagtggtaaacaattttatgt

SEQ ID NO: 184928 - DNA, 25 bp, Homo sapien
ccatagatgtaagcatataatttaa

SEQ ID NO: 184929 - DNA, 25 bp, Homo sapien
gctgatgcagcaagtacatctttac

SEQ ID NO: 184930 - DNA, 25 bp, Homo sapien
tacatctttacaaagctttaaccac

SEQ ID NO: 184931 - DNA, 25 bp, Homo sapien
gagtttttccactgccatagatgta

SEQ ID NO: 184932 - DNA, 25 bp, Homo sapien
aaggccaacttctctgatgttagca

SEQ ID NO: 184933 - DNA, 25 bp, Homo sapien
aggccaacttctctgatgttagcat

SEQ ID NO: 184934 - DNA, 25 bp, Homo sapien
caaggccaacttctctgatgttagc

SEQ ID NO: 184935 - DNA, 25 bp, Homo sapien
ttaatgtcctgagaataaaactgtt

SEQ ID NO: 184936 - DNA, 25 bp, Homo sapien
ctacaagtacatgccgccacaactt

SEQ ID NO: 184937 - DNA, 25 bp, Homo sapien
gtacatgccgccacaacttgggcca

SEQ ID NO: 184938 - DNA, 25 bp, Homo sapien
tgggccagctccctaaacattttaa

SEQ ID NO: 184939 - DNA, 25 bp, Homo sapien
tccttagcaagcataacagcatgtt

SEQ ID NO: 184940 - DNA, 25 bp, Homo sapien
cttagcaagcataacagcatgttct

SEQ ID NO: 184941 - DNA, 25 bp, Homo sapien
tatccttagcaagcataacagcatg

SEQ ID NO: 184942 - DNA, 25 bp, Homo sapien
tgctatccttagcaagcataacagc

SEQ ID NO: 184943 - DNA, 25 bp, Homo sapien
ttgtacaagctgacgtaagcaagcc

SEQ ID NO: 184944 - DNA, 25 bp, Homo sapien
tacaagctgacgtaagcaagccagt

SEQ ID NO: 184945 - DNA, 25 bp, Homo sapien
tctcagtaacaagtaggggctacaa

SEQ ID NO: 184946 - DNA, 25 bp, Homo sapien
agctgacgtaagcaagccagtactg

SEQ ID NO: 184947 - DNA, 25 bp, Homo sapien
acacagaattatccaacaagatctc

SEQ ID NO: 184948 - DNA, 25 bp, Homo sapien
aacacagaattatccaacaagatct

SEQ ID NO: 184949 - DNA, 25 bp, Homo sapien
caacacagaattatccaacaagatc

SEQ ID NO: 184950 - DNA, 25 bp, Homo sapien
tgcattactgcacaacccagtagac

SEQ ID NO: 184951 - DNA, 25 bp, Homo sapien
caagttgacatgtcgtggagcaaac

SEQ ID NO: 184952 - DNA, 25 bp, Homo sapien
ggctagacaagttgacatgtcgtgg

SEQ ID NO: 184953 - DNA, 25 bp, Homo sapien
tatcttgcattactgcacaacccag

SEQ ID NO: 184954 - DNA, 25 bp, Homo sapien
taataagggcattcaaacagcgacc

SEQ ID NO: 184955 - DNA, 25 bp, Homo sapien
aacagcgaccaaggctttggtgaac

SEQ ID NO: 184956 - DNA, 25 bp, Homo sapien
tgtagctctggacctaacgtggtaa

SEQ ID NO: 184957 - DNA, 25 bp, Homo sapien
aagagaaagggtaggttccacatgc

SEQ ID NO: 184958 - DNA, 25 bp, Homo sapien
caggagaagtgctgtcctgcgccaa

SEQ ID NO: 184959 - DNA, 25 bp, Homo sapien
caagaatttaggtgttgagaagaac

SEQ ID NO: 184960 - DNA, 25 bp, Homo sapien
cgccaaagtataaaggattccaata

SEQ ID NO: 184961 - DNA, 25 bp, Homo sapien
ttccaatacaagaatttaggtgttg

SEQ ID NO: 184962 - DNA, 25 bp, Homo sapien
gaccccaaggccaatgagtgtcctg

SEQ ID NO: 184963 - DNA, 25 bp, Homo sapien
aaggccaatgagtgtcctgttctgg

SEQ ID NO: 184964 - DNA, 25 bp, Homo sapien
caatgagtgtcctgttctggtaacc

SEQ ID NO: 184965 - DNA, 25 bp, Homo sapien
ccaaggccaatgagtgtcctgttct

SEQ ID NO: 184966 - DNA, 25 bp, Homo sapien
gtaaccgaaaggcatcttgcaaagg

SEQ ID NO: 184967 - DNA, 25 bp, Homo sapien
tgtacactgtcacttaggcaaaact

SEQ ID NO: 184968 - DNA, 25 bp, Homo sapien
aaataaacggtaatcactgcaaaag

SEQ ID NO: 184969 - DNA, 25 bp, Homo sapien
gattagtttagtatgagcagtttca

SEQ ID NO: 184970 - DNA, 25 bp, Homo sapien
gctaatctagcccatgactctgcag

SEQ ID NO: 184971 - DNA, 25 bp, Homo sapien
gctaatccagcagtaaaagctccat

SEQ ID NO: 184972 - DNA, 25 bp, Homo sapien
tctggacctaaacatcccttggagc

SEQ ID NO: 184973 - DNA, 25 bp, Homo sapien
aaagctccatcatctaccacttggg

SEQ ID NO: 184974 - DNA, 25 bp, Homo sapien
aagaaacaacatgtaactgaaccac

SEQ ID NO: 184975 - DNA, 25 bp, Homo sapien
ccttttgtgtgctttatactgtcca

SEQ ID NO: 184976 - DNA, 25 bp, Homo sapien
ctgaaccacttgctgacgagctcct

SEQ ID NO: 184977 - DNA, 25 bp, Homo sapien
gacgagctccttttgtgtgctttat

SEQ ID NO: 184978 - DNA, 25 bp, Homo sapien
acttcaaggttaattgtatttatcg

SEQ ID NO: 184979 - DNA, 25 bp, Homo sapien
aaaatggtggaacactaagaatact

SEQ ID NO: 184980 - DNA, 25 bp, Homo sapien
tcgaggctatgtgtacatcataagg

SEQ ID NO: 184981 - DNA, 25 bp, Homo sapien
aagagccgccattaacattttgaca

SEQ ID NO: 184982 - DNA, 25 bp, Homo sapien
acatgagcgcatacaaccccaaaga

SEQ ID NO: 184983 - DNA, 25 bp, Homo sapien
taagggtcatattcaagacttccgc

SEQ ID NO: 184984 - DNA, 25 bp, Homo sapien
taagggcttaggcactgaatctccc

SEQ ID NO: 184985 - DNA, 25 bp, Homo sapien
gcttggatgcagaactaataactga

SEQ ID NO: 184986 - DNA, 25 bp, Homo sapien
ttcaataaatctatggtcagtctct

SEQ ID NO: 184987 - DNA, 25 bp, Homo sapien
gaatatcaggggcagtcaagtcagc

SEQ ID NO: 184988 - DNA, 25 bp, Homo sapien
aaatctatggtcagtctcttgtagg

SEQ ID NO: 184989 - DNA, 25 bp, Homo sapien
tgtaggaaaggacttagtatcaaaa

SEQ ID NO: 184990 - DNA, 25 bp, Homo sapien
tttgtctataaaccactgacggtgt

SEQ ID NO: 184991 - DNA, 25 bp, Homo sapien
aaagtctttgtctataaaccactga

SEQ ID NO: 184992 - DNA, 25 bp, Homo sapien
cttcataggtctcaggaggtaataa

SEQ ID NO: 184993 - DNA, 25 bp, Homo sapien
tctataaaccactgacggtgttttc

SEQ ID NO: 184994 - DNA, 25 bp, Homo sapien
gaagaaggcacagagttcctcccct

SEQ ID NO: 184995 - DNA, 25 bp, Homo sapien
ccaatagagagcacaggcatagatc

SEQ ID NO: 184996 - DNA, 25 bp, Homo sapien
tcaaaagtgcatgaagggccaaaat

SEQ ID NO: 184997 - DNA, 25 bp, Homo sapien
tgttcaggtcgtgaaggcaaagccc

SEQ ID NO: 184998 - DNA, 25 bp, Homo sapien
tgcatagctgaaaaggttaagaggc

SEQ ID NO: 184999 - DNA, 25 bp, Homo sapien
tataactaactgattgccttcctcc

SEQ ID NO: 185000 - DNA, 25 bp, Homo sapien
tctttcaagatcctagcctaaaaaa

SEQ ID NO: 185001 - DNA, 25 bp, Homo sapien
ggcaactatcaaatctaaacagtcg

SEQ ID NO: 185002 - DNA, 25 bp, Homo sapien
caccacagtgggaaacaaagctctt

SEQ ID NO: 185003 - DNA, 25 bp, Homo sapien
aagacgctgagttacttcctcagta

SEQ ID NO: 185004 - DNA, 25 bp, Homo sapien
tacttcctcagtaagaagatcacca

SEQ ID NO: 185005 - DNA, 25 bp, Homo sapien
cagtgggaaacaaagctcttgatag

SEQ ID NO: 185006 - DNA, 25 bp, Homo sapien
cctgccatgtaaacgaatctcctcg

SEQ ID NO: 185007 - DNA, 25 bp, Homo sapien
taaacgaatctcctcggctcttttc

SEQ ID NO: 185008 - DNA, 25 bp, Homo sapien
accagctcgtccttccagggtcacc

SEQ ID NO: 185009 - DNA, 25 bp, Homo sapien
ggtcacctgccatgtaaacgaatct

SEQ ID NO: 185010 - DNA, 25 bp, Homo sapien
gcagaactcgagcaaggtgatggct

SEQ ID NO: 185011 - DNA, 25 bp, Homo sapien
aggtgatggctaacaactgcaggac

SEQ ID NO: 185012 - DNA, 25 bp, Homo sapien
cagcagaactcgagcaaggtgatgg

SEQ ID NO: 185013 - DNA, 25 bp, Homo sapien
caaggtgatggctaacaactgcagg

SEQ ID NO: 185014 - DNA, 25 bp, Homo sapien
tgcgctgagctgaaaggcgactgtt

SEQ ID NO: 185015 - DNA, 25 bp, Homo sapien
gctgagctgaaaggcgactgttttg

SEQ ID NO: 185016 - DNA, 25 bp, Homo sapien
gctgaaaggcgactgttttgagcag

SEQ ID NO: 185017 - DNA, 25 bp, Homo sapien
gcttgtgtgcgctgagctgaaaggc

SEQ ID NO: 185018 - DNA, 25 bp, Homo sapien
ttcaaggcaacgatccaagagtggt

SEQ ID NO: 185019 - DNA, 25 bp, Homo sapien
caagctgctgctagtcgaacagaaa

SEQ ID NO: 185020 - DNA, 25 bp, Homo sapien
ttatgtccagtaagccgttcaaggc

SEQ ID NO: 185021 - DNA, 25 bp, Homo sapien
cacggcaatgcagtgtaaacaccaa

SEQ ID NO: 185022 - DNA, 25 bp, Homo sapien
aagcacaaaccagcatatgttggct

SEQ ID NO: 185023 - DNA, 25 bp, Homo sapien
ctgtacttgaatcctgtagcaaagg

SEQ ID NO: 185024 - DNA, 25 bp, Homo sapien
tcctgtagcaaaggtgccgctgtgg

SEQ ID NO: 185025 - DNA, 25 bp, Homo sapien
ccagcatatgttggctagcggctac

SEQ ID NO: 185026 - DNA, 25 bp, Homo sapien
cgggtttccaaattaccatcactca

SEQ ID NO: 185027 - DNA, 25 bp, Homo sapien
gggtttccaaattaccatcactcat

SEQ ID NO: 185028 - DNA, 25 bp, Homo sapien
gctcctcctagtgttgaaacaaata

SEQ ID NO: 185029 - DNA, 25 bp, Homo sapien
tgacggtgacgcaaggcttaggata

SEQ ID NO: 185030 - DNA, 25 bp, Homo sapien
gaagaccacctatagtagttcgaag

SEQ ID NO: 185031 - DNA, 25 bp, Homo sapien
aatgaaacacaacggcgacagcaga

SEQ ID NO: 185032 - DNA, 25 bp, Homo sapien
taagagttagactgagatactgatt

SEQ ID NO: 185033 - DNA, 25 bp, Homo sapien
ccagtaagagttagactgagatact

SEQ ID NO: 185034 - DNA, 25 bp, Homo sapien
taggccagtaagagttagactgaga

SEQ ID NO: 185035 - DNA, 25 bp, Homo sapien
ttataggccagtaagagttagactg

SEQ ID NO: 185036 - DNA, 25 bp, Homo sapien
ccactggctcgaaggaatcctgaac

SEQ ID NO: 185037 - DNA, 25 bp, Homo sapien
ctgaactcccacgtagaaaccctgt

SEQ ID NO: 185038 - DNA, 25 bp, Homo sapien
tgagtaactccaactcgaacatccc

SEQ ID NO: 185039 - DNA, 25 bp, Homo sapien
gatactctgcgaatgctttgacgtg

SEQ ID NO: 185040 - DNA, 25 bp, Homo sapien
cctattgccttgtgacattccaaca

SEQ ID NO: 185041 - DNA, 25 bp, Homo sapien
tatacagtcacgtactacataagga

SEQ ID NO: 185042 - DNA, 25 bp, Homo sapien
ggtgatgttcacgtaaacaacccta

SEQ ID NO: 185043 - DNA, 25 bp, Homo sapien
catatatgacggtggtcctgtaaga

SEQ ID NO: 185044 - DNA, 25 bp, Homo sapien
cagctttagctaatattatgcctag

SEQ ID NO: 185045 - DNA, 25 bp, Homo sapien
ccaggtccgtactccacataaagat

SEQ ID NO: 185046 - DNA, 25 bp, Homo sapien
tatgcctagtaactttgaaacagaa

SEQ ID NO: 185047 - DNA, 25 bp, Homo sapien
cagaaatccgcacatcataattgga

SEQ ID NO: 185048 - DNA, 25 bp, Homo sapien
acatccctgtgacaaggtgcagcgg

SEQ ID NO: 185049 - DNA, 25 bp, Homo sapien
gcggcagctcctagtccattcaata

SEQ ID NO: 185050 - DNA, 25 bp, Homo sapien
gcacaacgaacagccatggatctat

SEQ ID NO: 185051 - DNA, 25 bp, Homo sapien
tatctgtcaagcaggatctagcagc

SEQ ID NO: 185052 - DNA, 25 bp, Homo sapien
cagtaaaggtgttacccagtattct

SEQ ID NO: 185053 - DNA, 25 bp, Homo sapien
agtattctacccaacttcttgtaca

SEQ ID NO: 185054 - DNA, 25 bp, Homo sapien
aatattccccactgtatcagtaaag

SEQ ID NO: 185055 - DNA, 25 bp, Homo sapien
agaatattccccactgtatcagtaa

SEQ ID NO: 185056 - DNA, 25 bp, Homo sapien
aggaacccaaacataccacagcagc

SEQ ID NO: 185057 - DNA, 25 bp, Homo sapien
taaatcctatagagaaactaagctg

SEQ ID NO: 185058 - DNA, 25 bp, Homo sapien
ggtgataaaatgaactaaatcctat

SEQ ID NO: 185059 - DNA, 25 bp, Homo sapien
ttctttttaggatcttagcaaatac

SEQ ID NO: 185060 - DNA, 25 bp, Homo sapien
tcaaatctagacttcaaatacgtct

SEQ ID NO: 185061 - DNA, 25 bp, Homo sapien
gcttcatgaacggagaatgtgtctc

SEQ ID NO: 185062 - DNA, 25 bp, Homo sapien
gagaatcatctttgctacgaataag

SEQ ID NO: 185063 - DNA, 25 bp, Homo sapien
gagctgttcaacaagagtcttctgt

SEQ ID NO: 185064 - DNA, 25 bp, Homo sapien
tagattcttagcaagcagtttgcgg

SEQ ID NO: 185065 - DNA, 25 bp, Homo sapien
gcagtaagctatgagctaattccat

SEQ ID NO: 185066 - DNA, 25 bp, Homo sapien
tccaagtatctcaaccactcaaaaa

SEQ ID NO: 185067 - DNA, 25 bp, Homo sapien
cacctagttgattgtatgcttcttc

SEQ ID NO: 185068 - DNA, 25 bp, Homo sapien
ttcttcattcagcagtaagctatga

SEQ ID NO: 185069 - DNA, 25 bp, Homo sapien
aatcctcccagctgatcacagttct

SEQ ID NO: 185070 - DNA, 25 bp, Homo sapien
tctcgttaaactttggtcaatatac

SEQ ID NO: 185071 - DNA, 25 bp, Homo sapien
gctgatcacagttcttctcgttaaa

SEQ ID NO: 185072 - DNA, 25 bp, Homo sapien
tggtcaatatacctaacaataaaaa

SEQ ID NO: 185073 - DNA, 25 bp, Homo sapien
cattcgcactaccaatgtgataagc

SEQ ID NO: 185074 - DNA, 25 bp, Homo sapien
agagctccacattcgcactaccaat

SEQ ID NO: 185075 - DNA, 25 bp, Homo sapien
ctaccaatgtgataagcaagggcat

SEQ ID NO: 185076 - DNA, 25 bp, Homo sapien
gagctccacattcgcactaccaatg

SEQ ID NO: 185077 - DNA, 25 bp, Homo sapien
cggaagcgtaaaagaaagtgttctg

SEQ ID NO: 185078 - DNA, 25 bp, Homo sapien
gctaagaaatttgtccgaggctgaa

SEQ ID NO: 185079 - DNA, 25 bp, Homo sapien
cagtaggaaccaactctaagatgtc

SEQ ID NO: 185080 - DNA, 25 bp, Homo sapien
actgtgtgtagcaattctccttcca

SEQ ID NO: 185081 - DNA, 25 bp, Homo sapien
ccagagacatcagctttcagagagc

SEQ ID NO: 185082 - DNA, 25 bp, Homo sapien
ccagtactttgaggctttttgttag

SEQ ID NO: 185083 - DNA, 25 bp, Homo sapien
tgttagtgttatgtcttccagagac

SEQ ID NO: 185084 - DNA, 25 bp, Homo sapien
ttttatgtctccagtactttgaggc

SEQ ID NO: 185085 - DNA, 25 bp, Homo sapien
tagtccaggaggaagaacggaccac

SEQ ID NO: 185086 - DNA, 25 bp, Homo sapien
gaagccagactttcccgtagtccag

SEQ ID NO: 185087 - DNA, 25 bp, Homo sapien
cgctgtttatcagccgaccctgtgc

SEQ ID NO: 185088 - DNA, 25 bp, Homo sapien
ctgttgtgcacaggtgaagccagac

SEQ ID NO: 185089 - DNA, 25 bp, Homo sapien
acagcggccctggtgcgttctcctt

SEQ ID NO: 185090 - DNA, 25 bp, Homo sapien
tcatacagcggccctggtgcgttct

SEQ ID NO: 185091 - DNA, 25 bp, Homo sapien
gaggtgtccccgctccctggatccc

SEQ ID NO: 185092 - DNA, 25 bp, Homo sapien
cgctccctggatccccgactgcctg

SEQ ID NO: 185093 - DNA, 25 bp, Homo sapien
tcagctgagcgtgcgtcccggtcca

SEQ ID NO: 185094 - DNA, 25 bp, Homo sapien
cggtccagcaacgttaccggctgct

SEQ ID NO: 185095 - DNA, 25 bp, Homo sapien
ctagcagagtctggaattgccggcg

SEQ ID NO: 185096 - DNA, 25 bp, Homo sapien
ttaccggctgctctgctaaccctag

SEQ ID NO: 185097 - DNA, 25 bp, Homo sapien
gccggaaagctctcagcggcgagca

SEQ ID NO: 185098 - DNA, 25 bp, Homo sapien
gcaccgcgggagctagcgattggga

SEQ ID NO: 185099 - DNA, 25 bp, Homo sapien
atcgagcgcccactctggcaggcgt

SEQ ID NO: 185100 - DNA, 25 bp, Homo sapien
caggcgtgactgcttcaccgtcgaa

SEQ ID NO: 185101 - DNA, 25 bp, Homo sapien
gagccctgattccttatagcggaga

SEQ ID NO: 185102 - DNA, 25 bp, Homo sapien
ttgaacaaccctgctatgtgtgagc

SEQ ID NO: 185103 - DNA, 25 bp, Homo sapien
tgtaatcatttattcaggagccctg

SEQ ID NO: 185104 - DNA, 25 bp, Homo sapien
tattgagatatccatagcccaggct

SEQ ID NO: 185105 - DNA, 25 bp, Homo sapien
cctggagattgcctctggctactgc

SEQ ID NO: 185106 - DNA, 25 bp, Homo sapien
taagatgctgtaacctggagtggga

SEQ ID NO: 185107 - DNA, 25 bp, Homo sapien
agtgttaagatgctgtaacctggag

SEQ ID NO: 185108 - DNA, 25 bp, Homo sapien
ctctggctactgctttaatatagtt

SEQ ID NO: 185109 - DNA, 25 bp, Homo sapien
taatggaatctgtagcagactttaa

SEQ ID NO: 185110 - DNA, 25 bp, Homo sapien
acagcaggttctgcataatggaatc

SEQ ID NO: 185111 - DNA, 25 bp, Homo sapien
gcaggttctgcataatggaatctgt

SEQ ID NO: 185112 - DNA, 25 bp, Homo sapien
atctgtagcagactttaagaagtgg

SEQ ID NO: 185113 - DNA, 25 bp, Homo sapien
catggtggtgtgcacttatagtccc

SEQ ID NO: 185114 - DNA, 25 bp, Homo sapien
agctactcgggaggctgaggcagga

SEQ ID NO: 185115 - DNA, 25 bp, Homo sapien
tccagcctgggtgacagaacgagac

SEQ ID NO: 185116 - DNA, 25 bp, Homo sapien
gaattgcttgaagctgggaggcaga

SEQ ID NO: 185117 - DNA, 25 bp, Homo sapien
gaacaatagctagaaattgaattac

SEQ ID NO: 185118 - DNA, 25 bp, Homo sapien
tatgaacaatagctagaaattgaat

SEQ ID NO: 185119 - DNA, 25 bp, Homo sapien
agtatgaacaatagctagaaattga

SEQ ID NO: 185120 - DNA, 25 bp, Homo sapien
cagtatgaacaatagctagaaattg

SEQ ID NO: 185121 - DNA, 25 bp, Homo sapien
aatcagtggagccagagtcgtagat

SEQ ID NO: 185122 - DNA, 25 bp, Homo sapien
ccatgtaatatggttaaggtaatca

SEQ ID NO: 185123 - DNA, 25 bp, Homo sapien
tatggttaaggtaatcagtggagcc

SEQ ID NO: 185124 - DNA, 25 bp, Homo sapien
taaggtaatcagtggagccagagtc

SEQ ID NO: 185125 - DNA, 25 bp, Homo sapien
gatgttctgctggttctatattagg

SEQ ID NO: 185126 - DNA, 25 bp, Homo sapien
caggcccttactctcgtctactccc

SEQ ID NO: 185127 - DNA, 25 bp, Homo sapien
gttcttgctcctagtaattccatgt

SEQ ID NO: 185128 - DNA, 25 bp, Homo sapien
tagcctttccttaacaatcctttga

SEQ ID NO: 185129 - DNA, 25 bp, Homo sapien
taaaagcactagtcttcttgaattc

SEQ ID NO: 185130 - DNA, 25 bp, Homo sapien
tatgagatcagttgtttcagctaca

SEQ ID NO: 185131 - DNA, 25 bp, Homo sapien
tctgccaatctctgaatgtgaatca

SEQ ID NO: 185132 - DNA, 25 bp, Homo sapien
aatacattgcatctcttctgccaat

SEQ ID NO: 185133 - DNA, 25 bp, Homo sapien
tgaaacatgctttaatcttaggaaa

SEQ ID NO: 185134 - DNA, 25 bp, Homo sapien
gaatccagaggtttctaaattggca

SEQ ID NO: 185135 - DNA, 25 bp, Homo sapien
gaaagtactcaagctattacaacca

SEQ ID NO: 185136 - DNA, 25 bp, Homo sapien
tcttttctaaaacaagtggcatgaa

SEQ ID NO: 185137 - DNA, 25 bp, Homo sapien
tctttgagcaccttgggccagaaga

SEQ ID NO: 185138 - DNA, 25 bp, Homo sapien
ttgaagattctttgagcaccttggg

SEQ ID NO: 185139 - DNA, 25 bp, Homo sapien
tttccacagcgctatcctcatcata

SEQ ID NO: 185140 - DNA, 25 bp, Homo sapien
tcctcatcatacatatactgtgaag

SEQ ID NO: 185141 - DNA, 25 bp, Homo sapien
gacacaacggaaatttcagcagcta

SEQ ID NO: 185142 - DNA, 25 bp, Homo sapien
tttaagcatcttaggaacacagacc

SEQ ID NO: 185143 - DNA, 25 bp, Homo sapien
cactgtcgtagctcagactgcccta

SEQ ID NO: 185144 - DNA, 25 bp, Homo sapien
gacactggctccatatcatcaagca

SEQ ID NO: 185145 - DNA, 25 bp, Homo sapien
tataacacacaataacccttctata

SEQ ID NO: 185146 - DNA, 25 bp, Homo sapien
aatgtccctggaaagtaatataaca

SEQ ID NO: 185147 - DNA, 25 bp, Homo sapien
gtccctggaaagtaatataacacac

SEQ ID NO: 185148 - DNA, 25 bp, Homo sapien
aatataacacacaataacccttcta

SEQ ID NO: 185149 - DNA, 25 bp, Homo sapien
caccacatttggccctatattacat

SEQ ID NO: 185150 - DNA, 25 bp, Homo sapien
acatttggccctatattacattttc

SEQ ID NO: 185151 - DNA, 25 bp, Homo sapien
catttggccctatattacattttca

SEQ ID NO: 185152 - DNA, 25 bp, Homo sapien
ccacatttggccctatattacattt

SEQ ID NO: 185153 - DNA, 25 bp, Homo sapien
tacatgctacacaaatttgatggta

SEQ ID NO: 185154 - DNA, 25 bp, Homo sapien
tttccttaatgactatgaagtgaat

SEQ ID NO: 185155 - DNA, 25 bp, Homo sapien
taggtgacttggcaaagtcatccaa

SEQ ID NO: 185156 - DNA, 25 bp, Homo sapien
tgaaacccaagattttcctgtctaa

SEQ ID NO: 185157 - DNA, 25 bp, Homo sapien
tccaattagcaggtgcagagttata

SEQ ID NO: 185158 - DNA, 25 bp, Homo sapien
tcaattaagtgtgtgaatggtccgt

SEQ ID NO: 185159 - DNA, 25 bp, Homo sapien
tgtgtgaatggtccgttggtgtcca

SEQ ID NO: 185160 - DNA, 25 bp, Homo sapien
tggtccgttggtgtccagctttaac

SEQ ID NO: 185161 - DNA, 25 bp, Homo sapien
ttaagtgtgtgaatggtccgttggt

SEQ ID NO: 185162 - DNA, 25 bp, Homo sapien
aggtagatccaatatagagacatgc

SEQ ID NO: 185163 - DNA, 25 bp, Homo sapien
gtgccatgttccactacaaccctag

SEQ ID NO: 185164 - DNA, 25 bp, Homo sapien
tagtcttcctccaagggtagcttga

SEQ ID NO: 185165 - DNA, 25 bp, Homo sapien
aataagaatgttgccaggtagatcc

SEQ ID NO: 185166 - DNA, 25 bp, Homo sapien
tatatacagtgtcatctactgcctc

SEQ ID NO: 185167 - DNA, 25 bp, Homo sapien
taaacttgagttgtccaggtttgat

SEQ ID NO: 185168 - DNA, 25 bp, Homo sapien
cacacatggctaatgcaaattcttc

SEQ ID NO: 185169 - DNA, 25 bp, Homo sapien
gagacccacatcttgtatatacagt

SEQ ID NO: 185170 - DNA, 25 bp, Homo sapien
aaagcacacgtagatcaccagtcct

SEQ ID NO: 185171 - DNA, 25 bp, Homo sapien
cgtagatcaccagtcctctttggac

SEQ ID NO: 185172 - DNA, 25 bp, Homo sapien
tttatcagctcccttgaaaaagcac

SEQ ID NO: 185173 - DNA, 25 bp, Homo sapien
tcccttgaaaaagcacacgtagatc

SEQ ID NO: 185174 - DNA, 25 bp, Homo sapien
gacagcaaagttctaaatgaatgaa

SEQ ID NO: 185175 - DNA, 25 bp, Homo sapien
tctgtgacagcaaagttctaaatga

SEQ ID NO: 185176 - DNA, 25 bp, Homo sapien
acaaaaacattagtctgtgacagca

SEQ ID NO: 185177 - DNA, 25 bp, Homo sapien
caggaacaaaaacattagtctgtga

SEQ ID NO: 185178 - DNA, 25 bp, Homo sapien
cagcatagaccacgagctgcaaggg

SEQ ID NO: 185179 - DNA, 25 bp, Homo sapien
ggcctgaagttcaccgaactcagtt

SEQ ID NO: 185180 - DNA, 25 bp, Homo sapien
ggtctgagacagtaaggcctgaagt

SEQ ID NO: 185181 - DNA, 25 bp, Homo sapien
aagttcaccgaactcagtttcaaat

SEQ ID NO: 185182 - DNA, 25 bp, Homo sapien
tcttcctctcgggtgctacaactgg

SEQ ID NO: 185183 - DNA, 25 bp, Homo sapien
gacacgctcttcctctcgggtgcta

SEQ ID NO: 185184 - DNA, 25 bp, Homo sapien
ccaagaagggagacacgctcttcct

SEQ ID NO: 185185 - DNA, 25 bp, Homo sapien
tctcgggtgctacaactggcgctgg

SEQ ID NO: 185186 - DNA, 25 bp, Homo sapien
acgccggaggataacgagagctgcc

SEQ ID NO: 185187 - DNA, 25 bp, Homo sapien
accgccggtctcagagggagacaca

SEQ ID NO: 185188 - DNA, 25 bp, Homo sapien
gagtcaccgagacaacgcggaaaaa

SEQ ID NO: 185189 - DNA, 25 bp, Homo sapien
tggaccgaaaagacaagcgcagcca

SEQ ID NO: 185190 - DNA, 25 bp, Homo sapien
catcggctgggcgaatttgcagccg

SEQ ID NO: 185191 - DNA, 25 bp, Homo sapien
gcgacgtccccatcggctgggcgaa

SEQ ID NO: 185192 - DNA, 25 bp, Homo sapien
tgaggaatccggctaccctcagcca

SEQ ID NO: 185193 - DNA, 25 bp, Homo sapien
cgggcctgaggaatccggctaccct

SEQ ID NO: 185194 - DNA, 25 bp, Homo sapien
gctggcccctccctcgacgcgctgg

SEQ ID NO: 185195 - DNA, 25 bp, Homo sapien
tactaggccatgtgtcgctggcccc

SEQ ID NO: 185196 - DNA, 25 bp, Homo sapien
gttactaggccatgtgtcgctggcc

SEQ ID NO: 185197 - DNA, 25 bp, Homo sapien
actaggccatgtgtcgctggcccct

SEQ ID NO: 185198 - DNA, 25 bp, Homo sapien
ctgatgtctttgattttaactgttg

SEQ ID NO: 185199 - DNA, 25 bp, Homo sapien
tttctgatgtctttgattttaactg

SEQ ID NO: 185200 - DNA, 25 bp, Homo sapien
gccatccaaaaattttctgatgtct

SEQ ID NO: 185201 - DNA, 25 bp, Homo sapien
atgtctttgattttaactgttgtgg

SEQ ID NO: 185202 - DNA, 25 bp, Homo sapien
aatttgaaacaagctcaatgtcatt

SEQ ID NO: 185203 - DNA, 25 bp, Homo sapien
gtcatttccttcaaggattaattca

SEQ ID NO: 185204 - DNA, 25 bp, Homo sapien
gattaattcatctttctgggcttga

SEQ ID NO: 185205 - DNA, 25 bp, Homo sapien
tgaaacaagctcaatgtcatttcct

SEQ ID NO: 185206 - DNA, 25 bp, Homo sapien
ctgaacaaacaacatttatcctcat

SEQ ID NO: 185207 - DNA, 25 bp, Homo sapien
caaacaacatttatcctcattcgaa

SEQ ID NO: 185208 - DNA, 25 bp, Homo sapien
acaacatttatcctcattcgaaccc

SEQ ID NO: 185209 - DNA, 25 bp, Homo sapien
aacaaacaacatttatcctcattcg

SEQ ID NO: 185210 - DNA, 25 bp, Homo sapien
cccagaatacgatattgatgaggaa

SEQ ID NO: 185211 - DNA, 25 bp, Homo sapien
cagaatacgatattgatgaggaagt

SEQ ID NO: 185212 - DNA, 25 bp, Homo sapien
gaatacgatattgatgaggaagtga

SEQ ID NO: 185213 - DNA, 25 bp, Homo sapien
ctcccagaatacgatattgatgagg

SEQ ID NO: 185214 - DNA, 25 bp, Homo sapien
gaagcccacagtagcacccttgatc

SEQ ID NO: 185215 - DNA, 25 bp, Homo sapien
gcccacagtagcacccttgatcatg

SEQ ID NO: 185216 - DNA, 25 bp, Homo sapien
caaatagtgtgaagggtagccagtt

SEQ ID NO: 185217 - DNA, 25 bp, Homo sapien
tgactacaaatagtgtgaagggtag

SEQ ID NO: 185218 - DNA, 25 bp, Homo sapien
acattggtgtgattgaagtccttct

SEQ ID NO: 185219 - DNA, 25 bp, Homo sapien
attggtgtgattgaagtccttctgc

SEQ ID NO: 185220 - DNA, 25 bp, Homo sapien
gagactgagttctacattggtgtga

SEQ ID NO: 185221 - DNA, 25 bp, Homo sapien
agtccttctgcagggttcttttggg

SEQ ID NO: 185222 - DNA, 25 bp, Homo sapien
ttctggaatgttgactgtctgattg

SEQ ID NO: 185223 - DNA, 25 bp, Homo sapien
ggaatgttgactgtctgattgctga

SEQ ID NO: 185224 - DNA, 25 bp, Homo sapien
aatgttgactgtctgattgctgaga

SEQ ID NO: 185225 - DNA, 25 bp, Homo sapien
cttcagagtgatatcaacattttct

SEQ ID NO: 185226 - DNA, 25 bp, Homo sapien
gtatacgccgcaaagagagaatgtc

SEQ ID NO: 185227 - DNA, 25 bp, Homo sapien
atacgccgcaaagagagaatgtctc

SEQ ID NO: 185228 - DNA, 25 bp, Homo sapien
cagtatacgccgcaaagagagaatg

SEQ ID NO: 185229 - DNA, 25 bp, Homo sapien
tctgacagtatacgccgcaaagaga

SEQ ID NO: 185230 - DNA, 25 bp, Homo sapien
actgagtccaggagtatcggtcctg

SEQ ID NO: 185231 - DNA, 25 bp, Homo sapien
gtccaggagtatcggtcctgtggaa

SEQ ID NO: 185232 - DNA, 25 bp, Homo sapien
ggagtatcggtcctgtggaagtccc

SEQ ID NO: 185233 - DNA, 25 bp, Homo sapien
ctgtggaagtccctccacatgaaaa

SEQ ID NO: 185234 - DNA, 25 bp, Homo sapien
agaatctagaatttaaatttaggct

SEQ ID NO: 185235 - DNA, 25 bp, Homo sapien
agaatttaaatttaggcttctgagt

SEQ ID NO: 185236 - DNA, 25 bp, Homo sapien
atctagaatttaaatttaggcttct

SEQ ID NO: 185237 - DNA, 25 bp, Homo sapien
tagaatttaaatttaggcttctgag

SEQ ID NO: 185238 - DNA, 25 bp, Homo sapien
tatatggtagggcatccaacacaca

SEQ ID NO: 185239 - DNA, 25 bp, Homo sapien
tcgtagtgagaagtaagccctggtg

SEQ ID NO: 185240 - DNA, 25 bp, Homo sapien
catcataactttgaagggcttgctg

SEQ ID NO: 185241 - DNA, 25 bp, Homo sapien
tcaaacagagcaagaatggacttct

SEQ ID NO: 185242 - DNA, 25 bp, Homo sapien
ttgctttcccagttagtagacacag

SEQ ID NO: 185243 - DNA, 25 bp, Homo sapien
tgctggctactctttcataacaaaa

SEQ ID NO: 185244 - DNA, 25 bp, Homo sapien
gacacagcatagttattttggcaag

SEQ ID NO: 185245 - DNA, 25 bp, Homo sapien
caagaagcggctgatgaaacaggcc

SEQ ID NO: 185246 - DNA, 25 bp, Homo sapien
tcctttacggtcatgatgtgtctct

SEQ ID NO: 185247 - DNA, 25 bp, Homo sapien
tttcctttacggtcatgatgtgtct

SEQ ID NO: 185248 - DNA, 25 bp, Homo sapien
ctttcctttacggtcatgatgtgtc

SEQ ID NO: 185249 - DNA, 25 bp, Homo sapien
ttcctttacggtcatgatgtgtctc

SEQ ID NO: 185250 - DNA, 25 bp, Homo sapien
gactcccaggacaatgctggaagcc

SEQ ID NO: 185251 - DNA, 25 bp, Homo sapien
cagactcccaggacaatgctggaag

SEQ ID NO: 185252 - DNA, 25 bp, Homo sapien
gaaaatcaaataggggatgctgagg

SEQ ID NO: 185253 - DNA, 25 bp, Homo sapien
gagggcagcggctgaaatccagact

SEQ ID NO: 185254 - DNA, 25 bp, Homo sapien
taacgatcaagaccgatggccgaaa

SEQ ID NO: 185255 - DNA, 25 bp, Homo sapien
tcttagcacccatagatagaggcca

SEQ ID NO: 185256 - DNA, 25 bp, Homo sapien
caaggcagttccaaagttccagtga

SEQ ID NO: 185257 - DNA, 25 bp, Homo sapien
gaagaaaacagaggtgaacatcccc

SEQ ID NO: 185258 - DNA, 25 bp, Homo sapien
acaatgcaggtgtcactccagtgct

SEQ ID NO: 185259 - DNA, 25 bp, Homo sapien
cagtgctttctagcctggctgaagt

SEQ ID NO: 185260 - DNA, 25 bp, Homo sapien
tgctttctagcctggctgaagtcac

SEQ ID NO: 185261 - DNA, 25 bp, Homo sapien
ctccatattccagcatagtgacagt

SEQ ID NO: 185262 - DNA, 25 bp, Homo sapien
ctggacaggattcccagaactgcag

SEQ ID NO: 185263 - DNA, 25 bp, Homo sapien
catgtctggacaggattcccagaac

SEQ ID NO: 185264 - DNA, 25 bp, Homo sapien
tgtctggacaggattcccagaactg

SEQ ID NO: 185265 - DNA, 25 bp, Homo sapien
tctggacaggattcccagaactgca

SEQ ID NO: 185266 - DNA, 25 bp, Homo sapien
ggcctagatcttgaaagtacttgga

SEQ ID NO: 185267 - DNA, 25 bp, Homo sapien
ggtgaggctgggaagttggcctaga

SEQ ID NO: 185268 - DNA, 25 bp, Homo sapien
tcttgaaagtacttggattcaggat

SEQ ID NO: 185269 - DNA, 25 bp, Homo sapien
tgggaagttggcctagatcttgaaa

SEQ ID NO: 185270 - DNA, 25 bp, Homo sapien
cttccaatggatacttggagtccta

SEQ ID NO: 185271 - DNA, 25 bp, Homo sapien
tggatacttggagtcctaagtaggg

SEQ ID NO: 185272 - DNA, 25 bp, Homo sapien
taggggctatatgcagctgaaaaca

SEQ ID NO: 185273 - DNA, 25 bp, Homo sapien
taagtaggggctatatgcagctgaa

SEQ ID NO: 185274 - DNA, 25 bp, Homo sapien
tctgggatagaactataagggtcac

SEQ ID NO: 185275 - DNA, 25 bp, Homo sapien
taagggtcacaggtacatgagcttt

SEQ ID NO: 185276 - DNA, 25 bp, Homo sapien
gacagtggatgggacagcatagaaa

SEQ ID NO: 185277 - DNA, 25 bp, Homo sapien
tgttcggacaacacaagtaaaggac

SEQ ID NO: 185278 - DNA, 25 bp, Homo sapien
tctggtgcccatacaatactccttc

SEQ ID NO: 185279 - DNA, 25 bp, Homo sapien
tccttgccaacagtcgtgattttat

SEQ ID NO: 185280 - DNA, 25 bp, Homo sapien
ctgaaccgaagaaagtgtagtgaaa

SEQ ID NO: 185281 - DNA, 25 bp, Homo sapien
taaatcctgatttgtctaagtcaat

SEQ ID NO: 185282 - DNA, 25 bp, Homo sapien
gcttccaatctcacatggttgctgg

SEQ ID NO: 185283 - DNA, 25 bp, Homo sapien
tattggctgtcctttgctacatggg

SEQ ID NO: 185284 - DNA, 25 bp, Homo sapien
ttggactgagggcatcagctttctg

SEQ ID NO: 185285 - DNA, 25 bp, Homo sapien
tctctcacaagactgcacggaagaa

SEQ ID NO: 185286 - DNA, 25 bp, Homo sapien
tcttctgtgatcctgctctgtctcc

SEQ ID NO: 185287 - DNA, 25 bp, Homo sapien
ttcttcttctgtgatcctgctctgt

SEQ ID NO: 185288 - DNA, 25 bp, Homo sapien
aaatgagaaagccttccatcagacc

SEQ ID NO: 185289 - DNA, 25 bp, Homo sapien
cagtgctgtcagctgtgaaatgaga

SEQ ID NO: 185290 - DNA, 25 bp, Homo sapien
tcctctatggtaacatgatctctta

SEQ ID NO: 185291 - DNA, 25 bp, Homo sapien
actgaaaagttatgaaccagtgcag

SEQ ID NO: 185292 - DNA, 25 bp, Homo sapien
cctcattatgaactggaaccaggaa

SEQ ID NO: 185293 - DNA, 25 bp, Homo sapien
taggaagtccggttgaacctcatta

SEQ ID NO: 185294 - DNA, 25 bp, Homo sapien
gaagcttcccctgattgaattgagt

SEQ ID NO: 185295 - DNA, 25 bp, Homo sapien
gactctcactgtagatcacacggga

SEQ ID NO: 185296 - DNA, 25 bp, Homo sapien
gaattatgtcggtctcaatgctgaa

SEQ ID NO: 185297 - DNA, 25 bp, Homo sapien
tcagggaactgtcagcaacacaagc

SEQ ID NO: 185298 - DNA, 25 bp, Homo sapien
taagctgggtcaagtctctttaaac

SEQ ID NO: 185299 - DNA, 25 bp, Homo sapien
gtaagtcttctgtctacctcgggac

SEQ ID NO: 185300 - DNA, 25 bp, Homo sapien
atcatgcagattgggttcctgagcc

SEQ ID NO: 185301 - DNA, 25 bp, Homo sapien
tgtagctggctataaacaagatcat

SEQ ID NO: 185302 - DNA, 25 bp, Homo sapien
gaagagaaagccgagcgttgctccg

SEQ ID NO: 185303 - DNA, 25 bp, Homo sapien
gccacccgcgacagtttcccagcag

SEQ ID NO: 185304 - DNA, 25 bp, Homo sapien
agaaagccgagcgttgctccgtgac

SEQ ID NO: 185305 - DNA, 25 bp, Homo sapien
aaagccgagcgttgctccgtgacgt

SEQ ID NO: 185306 - DNA, 25 bp, Homo sapien
cgttccgcgtcatggggatttggca

SEQ ID NO: 185307 - DNA, 25 bp, Homo sapien
ccccgcttgggggaagccgagcgat

SEQ ID NO: 185308 - DNA, 25 bp, Homo sapien
gcgatggtttgtgggcgccaggtcc

SEQ ID NO: 185309 - DNA, 25 bp, Homo sapien
gcagcgttccgcgtcatggggattt

SEQ ID NO: 185310 - DNA, 25 bp, Homo sapien
catctgtcccgaaaagctggcccat

SEQ ID NO: 185311 - DNA, 25 bp, Homo sapien
cagcgaacgattcggtaggtgttta

SEQ ID NO: 185312 - DNA, 25 bp, Homo sapien
cgattcggtaggtgtttattaatag

SEQ ID NO: 185313 - DNA, 25 bp, Homo sapien
tgcactagcagcgaacgattcggta

SEQ ID NO: 185314 - DNA, 25 bp, Homo sapien
gaatcttgcacttgcactagcagcg

SEQ ID NO: 185315 - DNA, 25 bp, Homo sapien
ggtaacttatctggaggcttttcac

SEQ ID NO: 185316 - DNA, 25 bp, Homo sapien
tgctccaggctctctatatggcttg

SEQ ID NO: 185317 - DNA, 25 bp, Homo sapien
ctcacaagtttggtagctgccctga

SEQ ID NO: 185318 - DNA, 25 bp, Homo sapien
tccttattcctagcacatggtcttg

SEQ ID NO: 185319 - DNA, 25 bp, Homo sapien
ccttcaggtcttggattggatgtca

SEQ ID NO: 185320 - DNA, 25 bp, Homo sapien
ttggcactgctcctttacactggct

SEQ ID NO: 185321 - DNA, 25 bp, Homo sapien
tagttcttaagggttggattctgcc

SEQ ID NO: 185322 - DNA, 25 bp, Homo sapien
ggactgcgtcttaaatcatctgcca

SEQ ID NO: 185323 - DNA, 25 bp, Homo sapien
cacattcaccctgatcttcagatag

SEQ ID NO: 185324 - DNA, 25 bp, Homo sapien
caccctgatcttcagataggtaaaa

SEQ ID NO: 185325 - DNA, 25 bp, Homo sapien
ttcaccctgatcttcagataggtaa

SEQ ID NO: 185326 - DNA, 25 bp, Homo sapien
cattcaccctgatcttcagataggt

SEQ ID NO: 185327 - DNA, 25 bp, Homo sapien
gatacaagtgaaccgagatggagga

SEQ ID NO: 185328 - DNA, 25 bp, Homo sapien
gcttaaggattagtgctggtttgca

SEQ ID NO: 185329 - DNA, 25 bp, Homo sapien
ctgcccttatggagcttatagtaaa

SEQ ID NO: 185330 - DNA, 25 bp, Homo sapien
tctacagaataacagatggaggttt

SEQ ID NO: 185331 - DNA, 25 bp, Homo sapien
aatttgggctataagtacatttaag

SEQ ID NO: 185332 - DNA, 25 bp, Homo sapien
tatggcagatcattgagcattttct

SEQ ID NO: 185333 - DNA, 25 bp, Homo sapien
ggagcatctcttaccatcatgcaat

SEQ ID NO: 185334 - DNA, 25 bp, Homo sapien
aattcaagagtaaccaatatggcag

SEQ ID NO: 185335 - DNA, 25 bp, Homo sapien
gttttactgaagctataatcttaaa

SEQ ID NO: 185336 - DNA, 25 bp, Homo sapien
ttttactgaagctataatcttaaat

SEQ ID NO: 185337 - DNA, 25 bp, Homo sapien
tgtttgcaaattggctgccagtaaa

SEQ ID NO: 185338 - DNA, 25 bp, Homo sapien
tgccagtaaataggctttcgggtaa

SEQ ID NO: 185339 - DNA, 25 bp, Homo sapien
tgtgacatcgtttttctcgtacttc

SEQ ID NO: 185340 - DNA, 25 bp, Homo sapien
ctcgtacttcttttctttggaccat

SEQ ID NO: 185341 - DNA, 25 bp, Homo sapien
gtcattctgtggtttgtgacatcgt

SEQ ID NO: 185342 - DNA, 25 bp, Homo sapien
tctgtggtttgtgacatcgtttttc

SEQ ID NO: 185343 - DNA, 25 bp, Homo sapien
attttccgtatcatccttctgcagg

SEQ ID NO: 185344 - DNA, 25 bp, Homo sapien
aattttccgtatcatccttctgcag

SEQ ID NO: 185345 - DNA, 25 bp, Homo sapien
ttcagtttaggtgctgccaaagtga

SEQ ID NO: 185346 - DNA, 25 bp, Homo sapien
tccaatttcagtttaggtgctgcca

SEQ ID NO: 185347 - DNA, 25 bp, Homo sapien
gcattgtatcataattaaatcaggg

SEQ ID NO: 185348 - DNA, 25 bp, Homo sapien
gctgcttctgcctaccctcagtggg

SEQ ID NO: 185349 - DNA, 25 bp, Homo sapien
ttccctctaaccagttccggtgaga

SEQ ID NO: 185350 - DNA, 25 bp, Homo sapien
tgggctcaattgactctcgaacttc

SEQ ID NO: 185351 - DNA, 25 bp, Homo sapien
taatttacacctccatcaccagtgt

SEQ ID NO: 185352 - DNA, 25 bp, Homo sapien
ggaattgccatatgctttccagaat

SEQ ID NO: 185353 - DNA, 25 bp, Homo sapien
tgggtatttaagttgatttaatgtc

SEQ ID NO: 185354 - DNA, 25 bp, Homo sapien
agaatggttgagctaatttacacct

SEQ ID NO: 185355 - DNA, 25 bp, Homo sapien
tttagtatatgtgctgctgaagtga

SEQ ID NO: 185356 - DNA, 25 bp, Homo sapien
gtatatgtgctgctgaagtgagcac

SEQ ID NO: 185357 - DNA, 25 bp, Homo sapien
ctaattttccctgtatcatttcaat

SEQ ID NO: 185358 - DNA, 25 bp, Homo sapien
catgctaattttccctgtatcattt

SEQ ID NO: 185359 - DNA, 25 bp, Homo sapien
cttgttggctacacatatgtcttct

SEQ ID NO: 185360 - DNA, 25 bp, Homo sapien
gctgttgacatcttcgtcatgaaat

SEQ ID NO: 185361 - DNA, 25 bp, Homo sapien
atcttccagggttttgatagttctg

SEQ ID NO: 185362 - DNA, 25 bp, Homo sapien
tacatatcatataaagaagggatcc

SEQ ID NO: 185363 - DNA, 25 bp, Homo sapien
taaggtccatgtcatagcgcaaacc

SEQ ID NO: 185364 - DNA, 25 bp, Homo sapien
catttaaggtccatgtcatagcgca

SEQ ID NO: 185365 - DNA, 25 bp, Homo sapien
tcatttaaggtccatgtcatagcgc

SEQ ID NO: 185366 - DNA, 25 bp, Homo sapien
tttaaggtccatgtcatagcgcaaa

SEQ ID NO: 185367 - DNA, 25 bp, Homo sapien
catagtttttcgtctttgagttctt

SEQ ID NO: 185368 - DNA, 25 bp, Homo sapien
attaaggccattatatgtcagattc

SEQ ID NO: 185369 - DNA, 25 bp, Homo sapien
cattatatgtcagattccttgactg

SEQ ID NO: 185370 - DNA, 25 bp, Homo sapien
ggccattatatgtcagattccttga

SEQ ID NO: 185371 - DNA, 25 bp, Homo sapien
tataggtgaactcatgtcccggggg

SEQ ID NO: 185372 - DNA, 25 bp, Homo sapien
tatataggtgaactcatgtcccggg

SEQ ID NO: 185373 - DNA, 25 bp, Homo sapien
gttatataggtgaactcatgtcccg

SEQ ID NO: 185374 - DNA, 25 bp, Homo sapien
ataggtgaactcatgtcccgggggt

SEQ ID NO: 185375 - DNA, 25 bp, Homo sapien
aattgttcatggctagtgtatgtct

SEQ ID NO: 185376 - DNA, 25 bp, Homo sapien
tcttcaattgttcatggctagtgta

SEQ ID NO: 185377 - DNA, 25 bp, Homo sapien
acttggtatctttagtgatattctt

SEQ ID NO: 185378 - DNA, 25 bp, Homo sapien
catggctagtgtatgtcttggcttt

SEQ ID NO: 185379 - DNA, 25 bp, Homo sapien
tcagaattgcagttcagcttctcca

SEQ ID NO: 185380 - DNA, 25 bp, Homo sapien
ccatccctgtatcagaattgcagtt

SEQ ID NO: 185381 - DNA, 25 bp, Homo sapien
cagaattgcagttcagcttctccat

SEQ ID NO: 185382 - DNA, 25 bp, Homo sapien
tccctgtatcagaattgcagttcag

SEQ ID NO: 185383 - DNA, 25 bp, Homo sapien
ccctgactgggaattgaacctagga

SEQ ID NO: 185384 - DNA, 25 bp, Homo sapien
gaattgaacctaggatgcagcaatg

SEQ ID NO: 185385 - DNA, 25 bp, Homo sapien
gaaagcacaaagtcttagccactag

SEQ ID NO: 185386 - DNA, 25 bp, Homo sapien
aaagtcttagccactagaccacagg

SEQ ID NO: 185387 - DNA, 25 bp, Homo sapien
tcatcctggtaccaagcattgcttt

SEQ ID NO: 185388 - DNA, 25 bp, Homo sapien
catcctggtaccaagcattgctttc

SEQ ID NO: 185389 - DNA, 25 bp, Homo sapien
tgtgaagatgaagagttcatcctgg

SEQ ID NO: 185390 - DNA, 25 bp, Homo sapien
ccaaaacacccattgagacttgtga

SEQ ID NO: 185391 - DNA, 25 bp, Homo sapien
ctttttaggtctcttggggcttgct

SEQ ID NO: 185392 - DNA, 25 bp, Homo sapien
taggtgctgtgattgtctccacgcc

SEQ ID NO: 185393 - DNA, 25 bp, Homo sapien
gccccaggacatcgcattgatggat

SEQ ID NO: 185394 - DNA, 25 bp, Homo sapien
gatgtttcgcagagtccacgtgccc

SEQ ID NO: 185395 - DNA, 25 bp, Homo sapien
ttgatggatgcacacaagggtgctg

SEQ ID NO: 185396 - DNA, 25 bp, Homo sapien
tcttctcccttgccagttagcacag

SEQ ID NO: 185397 - DNA, 25 bp, Homo sapien
ttctcccttgccagttagcacagtg

SEQ ID NO: 185398 - DNA, 25 bp, Homo sapien
tgctgtgggtattggcaagctgagg

SEQ ID NO: 185399 - DNA, 25 bp, Homo sapien
tgtgggtattggcaagctgaggaac

SEQ ID NO: 185400 - DNA, 25 bp, Homo sapien
aatttattcaagatgtctaggaagc

SEQ ID NO: 185401 - DNA, 25 bp, Homo sapien
tttgtgtgtcgtggaaacagggtct

SEQ ID NO: 185402 - DNA, 25 bp, Homo sapien
caaagtggtatatgtgtgggacgtt

SEQ ID NO: 185403 - DNA, 25 bp, Homo sapien
ccagactttcagttatacatcctta

SEQ ID NO: 185404 - DNA, 25 bp, Homo sapien
gcctggtactgacattaagaggacc

SEQ ID NO: 185405 - DNA, 25 bp, Homo sapien
cattaagaggacctttggaaatcag

SEQ ID NO: 185406 - DNA, 25 bp, Homo sapien
gaaatcagcaatgtggtgatggaac

SEQ ID NO: 185407 - DNA, 25 bp, Homo sapien
tcctggaaatttgcctggtactgac

SEQ ID NO: 185408 - DNA, 25 bp, Homo sapien
ggcagcaacttataattccagagaa

SEQ ID NO: 185409 - DNA, 25 bp, Homo sapien
caaactatgggtacaggcagcaact

SEQ ID NO: 185410 - DNA, 25 bp, Homo sapien
aattgggcgtggctgtgagaaacat

SEQ ID NO: 185411 - DNA, 25 bp, Homo sapien
tatcgatgtcagtatcccagttgtg

SEQ ID NO: 185412 - DNA, 25 bp, Homo sapien
tcagatattctttgtgtatttattg

SEQ ID NO: 185413 - DNA, 25 bp, Homo sapien
cagatattctttgtgtatttattgt

SEQ ID NO: 185414 - DNA, 25 bp, Homo sapien
ttatgacaaaatggggattgaagat

SEQ ID NO: 185415 - DNA, 25 bp, Homo sapien
tatgacaaaatggggattgaagatc

SEQ ID NO: 185416 - DNA, 25 bp, Homo sapien
ccaagaaaccggcagtcataagttc

SEQ ID NO: 185417 - DNA, 25 bp, Homo sapien
tcttgactctgagtatgaattatag

SEQ ID NO: 185418 - DNA, 25 bp, Homo sapien
accagctgtctctgtaaggttacca

SEQ ID NO: 185419 - DNA, 25 bp, Homo sapien
gaattatagaaaccatatgtaggaa

SEQ ID NO: 185420 - DNA, 25 bp, Homo sapien
gagtgtcgttcagtaacaaaaccag

SEQ ID NO: 185421 - DNA, 25 bp, Homo sapien
ggaagaaccgctagtaaatcatcac

SEQ ID NO: 185422 - DNA, 25 bp, Homo sapien
accaggaagaaccgctagtaaatca

SEQ ID NO: 185423 - DNA, 25 bp, Homo sapien
ggagtgtcgttcagtaacaaaacca

SEQ ID NO: 185424 - DNA, 25 bp, Homo sapien
cctttgtcaagttgctagcgttcaa

SEQ ID NO: 185425 - DNA, 25 bp, Homo sapien
gcgttcaagattgttgcctgaaaca

SEQ ID NO: 185426 - DNA, 25 bp, Homo sapien
gaagtccaggtttgatgtgttctgt

SEQ ID NO: 185427 - DNA, 25 bp, Homo sapien
tgtggccctcgagttggaagtccag

SEQ ID NO: 185428 - DNA, 25 bp, Homo sapien
tgaactcagcatgccagctttgacc

SEQ ID NO: 185429 - DNA, 25 bp, Homo sapien
gcatgccagctttgaccttcatact

SEQ ID NO: 185430 - DNA, 25 bp, Homo sapien
aatttgaactcagcatgccagcttt

SEQ ID NO: 185431 - DNA, 25 bp, Homo sapien
actcagcatgccagctttgaccttc

SEQ ID NO: 185432 - DNA, 25 bp, Homo sapien
ctcagggtggaagacggtggcagtg

SEQ ID NO: 185433 - DNA, 25 bp, Homo sapien
tatctgcggcttggctggataacat

SEQ ID NO: 185434 - DNA, 25 bp, Homo sapien
gcattcaattcctgtatctgcggct

SEQ ID NO: 185435 - DNA, 25 bp, Homo sapien
aattcctgtatctgcggcttggctg

SEQ ID NO: 185436 - DNA, 25 bp, Homo sapien
tcaaagaatgtgctggtggtccatc

SEQ ID NO: 185437 - DNA, 25 bp, Homo sapien
tggggaattgttcccatctcctgac

SEQ ID NO: 185438 - DNA, 25 bp, Homo sapien
gttagacatcatagtctttggtggg

SEQ ID NO: 185439 - DNA, 25 bp, Homo sapien
catctggctttctggttagacatca

SEQ ID NO: 185440 - DNA, 25 bp, Homo sapien
aatgaggaggggttcagagcagctt

SEQ ID NO: 185441 - DNA, 25 bp, Homo sapien
tcagaatgaggaggggttcagagca

SEQ ID NO: 185442 - DNA, 25 bp, Homo sapien
ggaggggttcagagcagcttttctt

SEQ ID NO: 185443 - DNA, 25 bp, Homo sapien
aggggttcagagcagcttttcttac

SEQ ID NO: 185444 - DNA, 25 bp, Homo sapien
cctcagtttggtctgaactctccat

SEQ ID NO: 185445 - DNA, 25 bp, Homo sapien
gctccattttgattgcactccagca

SEQ ID NO: 185446 - DNA, 25 bp, Homo sapien
tctgctccattttgattgcactcca

SEQ ID NO: 185447 - DNA, 25 bp, Homo sapien
tgctccattttgattgcactccagc

SEQ ID NO: 185448 - DNA, 25 bp, Homo sapien
attctgctccattttgattgcactc

SEQ ID NO: 185449 - DNA, 25 bp, Homo sapien
ttttctgttctcaggttcataagtc

SEQ ID NO: 185450 - DNA, 25 bp, Homo sapien
tcaggttcataagtcacagtcccca

SEQ ID NO: 185451 - DNA, 25 bp, Homo sapien
tctcaggttcataagtcacagtccc

SEQ ID NO: 185452 - DNA, 25 bp, Homo sapien
tgttctcaggttcataagtcacagt

SEQ ID NO: 185453 - DNA, 25 bp, Homo sapien
ccattactcccaagatccaaataaa

SEQ ID NO: 185454 - DNA, 25 bp, Homo sapien
catttatcttccattactcccaaga

SEQ ID NO: 185455 - DNA, 25 bp, Homo sapien
tcttccattactcccaagatccaaa

SEQ ID NO: 185456 - DNA, 25 bp, Homo sapien
gtgcacacatttatcttccattact

SEQ ID NO: 185457 - DNA, 25 bp, Homo sapien
ttcctggagttagaagggtcttcag

SEQ ID NO: 185458 - DNA, 25 bp, Homo sapien
tgtaagtccagagacagtcttgtct

SEQ ID NO: 185459 - DNA, 25 bp, Homo sapien
tccctatggtccgtggactgaggag

SEQ ID NO: 185460 - DNA, 25 bp, Homo sapien
tgagaagatgactccaccttagggc

SEQ ID NO: 185461 - DNA, 25 bp, Homo sapien
ctgcacatgaccacagttactgtcc

SEQ ID NO: 185462 - DNA, 25 bp, Homo sapien
accacagttactgtcctcatttaga

SEQ ID NO: 185463 - DNA, 25 bp, Homo sapien
catgaccacagttactgtcctcatt

SEQ ID NO: 185464 - DNA, 25 bp, Homo sapien
cacatgaccacagttactgtcctca

SEQ ID NO: 185465 - DNA, 25 bp, Homo sapien
atttgtgtattgtgttcccataaga

SEQ ID NO: 185466 - DNA, 25 bp, Homo sapien
gtattgtgttcccataagattgtga

SEQ ID NO: 185467 - DNA, 25 bp, Homo sapien
tgtgtattgtgttcccataagattg

SEQ ID NO: 185468 - DNA, 25 bp, Homo sapien
gtgtattgtgttcccataagattgt

SEQ ID NO: 185469 - DNA, 25 bp, Homo sapien
ccctgcaagtactctgcttaaagcc

SEQ ID NO: 185470 - DNA, 25 bp, Homo sapien
tcttctactccattaatgtccctgc

SEQ ID NO: 185471 - DNA, 25 bp, Homo sapien
taggcctttgtacttgtttgtagaa

SEQ ID NO: 185472 - DNA, 25 bp, Homo sapien
gcttaaagcctagctttttgtaggc

SEQ ID NO: 185473 - DNA, 25 bp, Homo sapien
catcttcagtgtatgtagacatgag

SEQ ID NO: 185474 - DNA, 25 bp, Homo sapien
gaggaaggtcatcttcagtgtatgt

SEQ ID NO: 185475 - DNA, 25 bp, Homo sapien
tatgtagacatgagctgccggatat

SEQ ID NO: 185476 - DNA, 25 bp, Homo sapien
tcagtgtatgtagacatgagctgcc

SEQ ID NO: 185477 - DNA, 25 bp, Homo sapien
tccaagattgccaagaacactctgg

SEQ ID NO: 185478 - DNA, 25 bp, Homo sapien
aaaactgagcagtccaagtggtctg

SEQ ID NO: 185479 - DNA, 25 bp, Homo sapien
taagtcccagttctaaaagcaagcg

SEQ ID NO: 185480 - DNA, 25 bp, Homo sapien
cactctggtcttcattcattccaaa

SEQ ID NO: 185481 - DNA, 25 bp, Homo sapien
gctcgtcaggatgctgaatccacat

SEQ ID NO: 185482 - DNA, 25 bp, Homo sapien
gcatttgttagacatgccaggcctg

SEQ ID NO: 185483 - DNA, 25 bp, Homo sapien
taattgcatgcagcttcaggtcctt

SEQ ID NO: 185484 - DNA, 25 bp, Homo sapien
tgccaggcctggaattggtgtcagc

SEQ ID NO: 185485 - DNA, 25 bp, Homo sapien
gatgagcaccttgttgtgcgttcct

SEQ ID NO: 185486 - DNA, 25 bp, Homo sapien
gagcaccttgttgtgcgttcctccg

SEQ ID NO: 185487 - DNA, 25 bp, Homo sapien
tgagcaccttgttgtgcgttcctcc

SEQ ID NO: 185488 - DNA, 25 bp, Homo sapien
gggatgagcaccttgttgtgcgttc

SEQ ID NO: 185489 - DNA, 25 bp, Homo sapien
tgggctgacggaaatggtttgcagc

SEQ ID NO: 185490 - DNA, 25 bp, Homo sapien
ggctgacggaaatggtttgcagcca

SEQ ID NO: 185491 - DNA, 25 bp, Homo sapien
ctgggctgacggaaatggtttgcag

SEQ ID NO: 185492 - DNA, 25 bp, Homo sapien
ctgacggaaatggtttgcagccaga

SEQ ID NO: 185493 - DNA, 25 bp, Homo sapien
gccacgcggtctggcatttagtcct

SEQ ID NO: 185494 - DNA, 25 bp, Homo sapien
tacgccacgcggtctggcatttagt

SEQ ID NO: 185495 - DNA, 25 bp, Homo sapien
cgcggtctggcatttagtcctcaga

SEQ ID NO: 185496 - DNA, 25 bp, Homo sapien
ctgctacgccacgcggtctggcatt

SEQ ID NO: 185497 - DNA, 25 bp, Homo sapien
ccgagtcaatgagaacaaggtgtgc

SEQ ID NO: 185498 - DNA, 25 bp, Homo sapien
tagtctgcacgtctccgagttgccc

SEQ ID NO: 185499 - DNA, 25 bp, Homo sapien
gtgggcagccattgactccgagtca

SEQ ID NO: 185500 - DNA, 25 bp, Homo sapien
gcatatgctgctgggaccgactgca

SEQ ID NO: 185501 - DNA, 25 bp, Homo sapien
gggtgtggctgtttcacttcctgtt

SEQ ID NO: 185502 - DNA, 25 bp, Homo sapien
agggtgtggctgtttcacttcctgt

SEQ ID NO: 185503 - DNA, 25 bp, Homo sapien
cctgacttcaccatctatagagatg

SEQ ID NO: 185504 - DNA, 25 bp, Homo sapien
tgttccctcatgtctgtgcatctga

SEQ ID NO: 185505 - DNA, 25 bp, Homo sapien
gcagggcttgttccctcatgtctgt

SEQ ID NO: 185506 - DNA, 25 bp, Homo sapien
ttcagcgccgggtttttgttggaga

SEQ ID NO: 185507 - DNA, 25 bp, Homo sapien
tgccccttggcggaaaggcaaggta

SEQ ID NO: 185508 - DNA, 25 bp, Homo sapien
gaagccggaactcagagagataatg

SEQ ID NO: 185509 - DNA, 25 bp, Homo sapien
ttcggtgccccttggcggaaaggca

SEQ ID NO: 185510 - DNA, 25 bp, Homo sapien
atggagactgatgaagccggaactc

SEQ ID NO: 185511 - DNA, 25 bp, Homo sapien
tcagggctggcgataatgaatgcag

SEQ ID NO: 185512 - DNA, 25 bp, Homo sapien
tatgcatgggactttgtgaaatgag

SEQ ID NO: 185513 - DNA, 25 bp, Homo sapien
aatgaggccttccttgtagaacaac

SEQ ID NO: 185514 - DNA, 25 bp, Homo sapien
agaagctccactatgcatgggactt

SEQ ID NO: 185515 - DNA, 25 bp, Homo sapien
tcatttctggtaagagccatttctg

SEQ ID NO: 185516 - DNA, 25 bp, Homo sapien
tggtaagagccatttctggtcaccc

SEQ ID NO: 185517 - DNA, 25 bp, Homo sapien
atttctggtaagagccatttctggt

SEQ ID NO: 185518 - DNA, 25 bp, Homo sapien
gtaagagccatttctggtcacccac

SEQ ID NO: 185519 - DNA, 25 bp, Homo sapien
gcctgaagtactttggcgatgtcca

SEQ ID NO: 185520 - DNA, 25 bp, Homo sapien
ttgctaaatagtgccagagcgtggg

SEQ ID NO: 185521 - DNA, 25 bp, Homo sapien
gacccatgcagttgctaaatagtgc

SEQ ID NO: 185522 - DNA, 25 bp, Homo sapien
gggaaatgcctgaagtactttggcg

SEQ ID NO: 185523 - DNA, 25 bp, Homo sapien
tagagaaggcttaagccatctgttc

SEQ ID NO: 185524 - DNA, 25 bp, Homo sapien
agagaaggcttaagccatctgttct

SEQ ID NO: 185525 - DNA, 25 bp, Homo sapien
ttaagtccacttgagtagcagtcat

SEQ ID NO: 185526 - DNA, 25 bp, Homo sapien
gaggggttaagtccacttgagtagc

SEQ ID NO: 185527 - DNA, 25 bp, Homo sapien
gggttaagtccacttgagtagcagt

SEQ ID NO: 185528 - DNA, 25 bp, Homo sapien
cttgaggggttaagtccacttgagt

SEQ ID NO: 185529 - DNA, 25 bp, Homo sapien
gagggcaacagccaggaacatcatc

SEQ ID NO: 185530 - DNA, 25 bp, Homo sapien
gtgtgcttagctcaggatcccccac

SEQ ID NO: 185531 - DNA, 25 bp, Homo sapien
ttagctcaggatcccccactataca

SEQ ID NO: 185532 - DNA, 25 bp, Homo sapien
agggcaacagccaggaacatcatca

SEQ ID NO: 185533 - DNA, 25 bp, Homo sapien
agacaccaatgaagtaggtcgttcc

SEQ ID NO: 185534 - DNA, 25 bp, Homo sapien
cagacaccaatgaagtaggtcgttc

SEQ ID NO: 185535 - DNA, 25 bp, Homo sapien
caccaatgaagtaggtcgttcctta

SEQ ID NO: 185536 - DNA, 25 bp, Homo sapien
gacaccaatgaagtaggtcgttcct

SEQ ID NO: 185537 - DNA, 25 bp, Homo sapien
tgaaacctatccctcacgtgcaggg

SEQ ID NO: 185538 - DNA, 25 bp, Homo sapien
agatgccagtgggatcaaatgaaac

SEQ ID NO: 185539 - DNA, 25 bp, Homo sapien
tgcagggtgtaatccatgcaaacca

SEQ ID NO: 185540 - DNA, 25 bp, Homo sapien
ccatgcaaaccaaacgttcctggaa

SEQ ID NO: 185541 - DNA, 25 bp, Homo sapien
tttgttacatggagcaggatatgct

SEQ ID NO: 185542 - DNA, 25 bp, Homo sapien
tggcagggagtctttgttacatgga

SEQ ID NO: 185543 - DNA, 25 bp, Homo sapien
gcaggatatgcttctcaggtgtttc

SEQ ID NO: 185544 - DNA, 25 bp, Homo sapien
ggagtctttgttacatggagcagga

SEQ ID NO: 185545 - DNA, 25 bp, Homo sapien
tttagtcctgggtcttgtgtgggcc

SEQ ID NO: 185546 - DNA, 25 bp, Homo sapien
ttagtcctgggtcttgtgtgggccc

SEQ ID NO: 185547 - DNA, 25 bp, Homo sapien
gcggtagcacgtggaatattaaaaa

SEQ ID NO: 185548 - DNA, 25 bp, Homo sapien
ttgtgtgggccctgcggtagcacgt

SEQ ID NO: 185549 - DNA, 25 bp, Homo sapien
agagagggagtttcatcaccgtatt

SEQ ID NO: 185550 - DNA, 25 bp, Homo sapien
gagagggagtttcatcaccgtattg

SEQ ID NO: 185551 - DNA, 25 bp, Homo sapien
taatgagaaggtgcctacacagggc

SEQ ID NO: 185552 - DNA, 25 bp, Homo sapien
ggtaaagctttgtatcctaggtgct

SEQ ID NO: 185553 - DNA, 25 bp, Homo sapien
tggaaagtaagagagccacatccgc

SEQ ID NO: 185554 - DNA, 25 bp, Homo sapien
taggcatctgcttgttggaaagtaa

SEQ ID NO: 185555 - DNA, 25 bp, Homo sapien
tatcagacaggctaaagtattggtc

SEQ ID NO: 185556 - DNA, 25 bp, Homo sapien
catatgttcctgattgagactacag

SEQ ID NO: 185557 - DNA, 25 bp, Homo sapien
aattctgtcatgagtggtaaggccc

SEQ ID NO: 185558 - DNA, 25 bp, Homo sapien
ggttgttctccaaaagcctgtcttg

SEQ ID NO: 185559 - DNA, 25 bp, Homo sapien
tgtccgatatttgtgcgcgcgcatg

SEQ ID NO: 185560 - DNA, 25 bp, Homo sapien
tctagataagaagagtagttgattt

SEQ ID NO: 185561 - DNA, 25 bp, Homo sapien
tagttgatttgagagggcttgttaa

SEQ ID NO: 185562 - DNA, 25 bp, Homo sapien
tgtgtgtgtaaataagttacctatt

SEQ ID NO: 185563 - DNA, 25 bp, Homo sapien
caagggagtggctcgaataaagcat

SEQ ID NO: 185564 - DNA, 25 bp, Homo sapien
taaggtatctttagggtgtacactc

SEQ ID NO: 185565 - DNA, 25 bp, Homo sapien
aaaacatgcgttggaatgcatcaac

SEQ ID NO: 185566 - DNA, 25 bp, Homo sapien
ttttgatggttggaccacccaccaa

SEQ ID NO: 185567 - DNA, 25 bp, Homo sapien
gcaaaggcagtggtttctaccgtcc

SEQ ID NO: 185568 - DNA, 25 bp, Homo sapien
aaatgtacttctggttggcagcagc

SEQ ID NO: 185569 - DNA, 25 bp, Homo sapien
tgtgcaaggcagattccgatgacct

SEQ ID NO: 185570 - DNA, 25 bp, Homo sapien
tgacctcgggaaagtcacaggacct

SEQ ID NO: 185571 - DNA, 25 bp, Homo sapien
cctaaagttaggctggtagtggcgt

SEQ ID NO: 185572 - DNA, 25 bp, Homo sapien
aaaagccaggtggacgacagttcct

SEQ ID NO: 185573 - DNA, 25 bp, Homo sapien
ttaaggcagtataataaaagccagg

SEQ ID NO: 185574 - DNA, 25 bp, Homo sapien
tggacgacagttcctaaagttaggc

SEQ ID NO: 185575 - DNA, 25 bp, Homo sapien
ttctcgatccacgtcttggcttctc

SEQ ID NO: 185576 - DNA, 25 bp, Homo sapien
ttggcttctcgctccactttcacag

SEQ ID NO: 185577 - DNA, 25 bp, Homo sapien
gctccactttcacagaacgtactga

SEQ ID NO: 185578 - DNA, 25 bp, Homo sapien
ctttcacagaacgtactgaatcagg

SEQ ID NO: 185579 - DNA, 25 bp, Homo sapien
ctgggtgagtgtggcaccgggtcct

SEQ ID NO: 185580 - DNA, 25 bp, Homo sapien
ggactcctcttctcgctcctgtgga

SEQ ID NO: 185581 - DNA, 25 bp, Homo sapien
tcctgtggagtttcgtcttctgggt

SEQ ID NO: 185582 - DNA, 25 bp, Homo sapien
cgtgccgagccgacggagaaatgga

SEQ ID NO: 185583 - DNA, 25 bp, Homo sapien
gagcttgggcgcatgttttcctccc

SEQ ID NO: 185584 - DNA, 25 bp, Homo sapien
agccagaaaactggctgcgcacaca

SEQ ID NO: 185585 - DNA, 25 bp, Homo sapien
catgttcctgcgaacgagcttgggc

SEQ ID NO: 185586 - DNA, 25 bp, Homo sapien
tgtagttggcgagcgatcctcagcc

SEQ ID NO: 185587 - DNA, 25 bp, Homo sapien
tcttgagttacgaccagaaaccgga

SEQ ID NO: 185588 - DNA, 25 bp, Homo sapien
tccgggcagtaaggcagtagcttcc

SEQ ID NO: 185589 - DNA, 25 bp, Homo sapien
ttggaaccgcgagcacaatatctgg

SEQ ID NO: 185590 - DNA, 25 bp, Homo sapien
tatcgagaagcattcggtgcccatg

SEQ ID NO: 185591 - DNA, 25 bp, Homo sapien
gaggagcagaatacggagaaagagg

SEQ ID NO: 185592 - DNA, 25 bp, Homo sapien
agcagaatacggagaaagagggaag

SEQ ID NO: 185593 - DNA, 25 bp, Homo sapien
tactcacgccaatgggtaaaaggga

SEQ ID NO: 185594 - DNA, 25 bp, Homo sapien
cagaatacggagaaagagggaagct

SEQ ID NO: 185595 - DNA, 25 bp, Homo sapien
gagcctggcgctgcgctcggttttc

SEQ ID NO: 185596 - DNA, 25 bp, Homo sapien
cagctgcagcgttagggatacgttc

SEQ ID NO: 185597 - DNA, 25 bp, Homo sapien
tacgttcggcgtgaagggcagagag

SEQ ID NO: 185598 - DNA, 25 bp, Homo sapien
ccgctgccggttgtaaccagttgaa

SEQ ID NO: 185599 - DNA, 25 bp, Homo sapien
tgctgttaacgagttccacctggaa

SEQ ID NO: 185600 - DNA, 25 bp, Homo sapien
gattcgcggaaacacagtctcggtt

SEQ ID NO: 185601 - DNA, 25 bp, Homo sapien
tcctatgggctgactgcgactgggt

SEQ ID NO: 185602 - DNA, 25 bp, Homo sapien
gagaagttgcactgcgcatccagag

SEQ ID NO: 185603 - DNA, 25 bp, Homo sapien
cttggcttctgatatggcataattt

SEQ ID NO: 185604 - DNA, 25 bp, Homo sapien
tggcttctgatatggcataatttgt

SEQ ID NO: 185605 - DNA, 25 bp, Homo sapien
ttctgatatggcataatttgttcat

SEQ ID NO: 185606 - DNA, 25 bp, Homo sapien
ctgatatggcataatttgttcattt

SEQ ID NO: 185607 - DNA, 25 bp, Homo sapien
gatggccttgcccaagaactagcaa

SEQ ID NO: 185608 - DNA, 25 bp, Homo sapien
tatgaacttgatcttcggccggttg

SEQ ID NO: 185609 - DNA, 25 bp, Homo sapien
gactgccgcctttaaaccacatggg

SEQ ID NO: 185610 - DNA, 25 bp, Homo sapien
cttttacagttggatcatggccgct

SEQ ID NO: 185611 - DNA, 25 bp, Homo sapien
catttgtaaataacacccaaggaga

SEQ ID NO: 185612 - DNA, 25 bp, Homo sapien
tcagataactatgcggaacccattg

SEQ ID NO: 185613 - DNA, 25 bp, Homo sapien
aatccaagaaagcagacttcccggg

SEQ ID NO: 185614 - DNA, 25 bp, Homo sapien
ctttggcacatcctgaagatatgga

SEQ ID NO: 185615 - DNA, 25 bp, Homo sapien
gaaactctcaatgggatgtgcacag

SEQ ID NO: 185616 - DNA, 25 bp, Homo sapien
gaatcgttgctataccctgctctag

SEQ ID NO: 185617 - DNA, 25 bp, Homo sapien
tagagtcatctgtaggaatcgttgc

SEQ ID NO: 185618 - DNA, 25 bp, Homo sapien
ttttccctctaatgctacattgaag

SEQ ID NO: 185619 - DNA, 25 bp, Homo sapien
aagcaactcatctattgggccagaa

SEQ ID NO: 185620 - DNA, 25 bp, Homo sapien
tttttatgtctagactcacctggtc

SEQ ID NO: 185621 - DNA, 25 bp, Homo sapien
tgctagtcagcaaacactaatgcaa

SEQ ID NO: 185622 - DNA, 25 bp, Homo sapien
gggccagaaccaggaagtgttctct

SEQ ID NO: 185623 - DNA, 25 bp, Homo sapien
aaatactttgggtactgacagactc

SEQ ID NO: 185624 - DNA, 25 bp, Homo sapien
tcctttgatgttggtaccagaatta

SEQ ID NO: 185625 - DNA, 25 bp, Homo sapien
aaattttcagaataggtggcacagg

SEQ ID NO: 185626 - DNA, 25 bp, Homo sapien
tactataagtgactgctgcttttgg

SEQ ID NO: 185627 - DNA, 25 bp, Homo sapien
taatgttcatctgcgtttagtacca

SEQ ID NO: 185628 - DNA, 25 bp, Homo sapien
cagtttaactattggcatgtctggc

SEQ ID NO: 185629 - DNA, 25 bp, Homo sapien
ttaacttcagaaccaagatgttggc

SEQ ID NO: 185630 - DNA, 25 bp, Homo sapien
tgttggcatgaaccaggctgctgtt

SEQ ID NO: 185631 - DNA, 25 bp, Homo sapien
tactgcaggtaaccgcaatctaagt

SEQ ID NO: 185632 - DNA, 25 bp, Homo sapien
caaaagggaacaattggaatgagaa

SEQ ID NO: 185633 - DNA, 25 bp, Homo sapien
ggtactggaatctaattaatatctc

SEQ ID NO: 185634 - DNA, 25 bp, Homo sapien
caatctaagttagccaaaaagcagc

SEQ ID NO: 185635 - DNA, 25 bp, Homo sapien
ttggctcagcaataccagaaactcg

SEQ ID NO: 185636 - DNA, 25 bp, Homo sapien
catagggttagcaataattcctgtg

SEQ ID NO: 185637 - DNA, 25 bp, Homo sapien
caacaggaatgtcgtttttgcctaa

SEQ ID NO: 185638 - DNA, 25 bp, Homo sapien
cagaaactcgtatatgatttcacac

SEQ ID NO: 185639 - DNA, 25 bp, Homo sapien
cttagaatgtagtgccgacggctcc

SEQ ID NO: 185640 - DNA, 25 bp, Homo sapien
gaatcgttgcaaggactctcccgga

SEQ ID NO: 185641 - DNA, 25 bp, Homo sapien
tggagtccaccgcaacttagaatgt

SEQ ID NO: 185642 - DNA, 25 bp, Homo sapien
gccggagatagtcacgcagatgcca

SEQ ID NO: 185643 - DNA, 25 bp, Homo sapien
ccaggtcgtacctggccgcgatgac

SEQ ID NO: 185644 - DNA, 25 bp, Homo sapien
atcacaaggctcgtatgtttggtgc

SEQ ID NO: 185645 - DNA, 25 bp, Homo sapien
catgcaacggaactcatcacaaggc

SEQ ID NO: 185646 - DNA, 25 bp, Homo sapien
gccgcgatgacctgtcaggtttacc

SEQ ID NO: 185647 - DNA, 25 bp, Homo sapien
tcacatggcacggactgatgcccca

SEQ ID NO: 185648 - DNA, 25 bp, Homo sapien
tcttctcttagctcacatggcacgg

SEQ ID NO: 185649 - DNA, 25 bp, Homo sapien
taacaccctcttctcttagctcaca

SEQ ID NO: 185650 - DNA, 25 bp, Homo sapien
tcttagctcacatggcacggactga

SEQ ID NO: 185651 - DNA, 25 bp, Homo sapien
gagagcaatacaaatttctgcttca

SEQ ID NO: 185652 - DNA, 25 bp, Homo sapien
ttgagagcaatacaaatttctgctt

SEQ ID NO: 185653 - DNA, 25 bp, Homo sapien
ccggttgctgggaattctatttgtg

SEQ ID NO: 185654 - DNA, 25 bp, Homo sapien
tctggataaaactccggttgctggg

SEQ ID NO: 185655 - DNA, 25 bp, Homo sapien
cagtcgtttggccttagaaagaaca

SEQ ID NO: 185656 - DNA, 25 bp, Homo sapien
tacttaaagcttgtttagagggcca

SEQ ID NO: 185657 - DNA, 25 bp, Homo sapien
gatgagtaatgaccttgatacacat

SEQ ID NO: 185658 - DNA, 25 bp, Homo sapien
gctgcagttaggtgtactacttaaa

SEQ ID NO: 185659 - DNA, 25 bp, Homo sapien
tttgtcagtctgtagagaggaagct

SEQ ID NO: 185660 - DNA, 25 bp, Homo sapien
cttggctggctttagagggctgcaa

SEQ ID NO: 185661 - DNA, 25 bp, Homo sapien
ggaacaccgtaggaggagatttcta

SEQ ID NO: 185662 - DNA, 25 bp, Homo sapien
caactggatccacgagccagagcct

SEQ ID NO: 185663 - DNA, 25 bp, Homo sapien
ttctgcatatctcttattgtatgag

SEQ ID NO: 185664 - DNA, 25 bp, Homo sapien
tatctcttattgtatgaggtgtttc

SEQ ID NO: 185665 - DNA, 25 bp, Homo sapien
gcatatctcttattgtatgaggtgt

SEQ ID NO: 185666 - DNA, 25 bp, Homo sapien
ctcttattgtatgaggtgtttctca

SEQ ID NO: 185667 - DNA, 25 bp, Homo sapien
tcattgcagatgtatgttcggtaaa

SEQ ID NO: 185668 - DNA, 25 bp, Homo sapien
tggttgatggcaaaattcattgcag

SEQ ID NO: 185669 - DNA, 25 bp, Homo sapien
gggagagcacctatatccattccat

SEQ ID NO: 185670 - DNA, 25 bp, Homo sapien
gagtaacactacaaactgtactggg

SEQ ID NO: 185671 - DNA, 25 bp, Homo sapien
tctgaaaatgggagattccttgtgg

SEQ ID NO: 185672 - DNA, 25 bp, Homo sapien
gattagggtcccactgatagaaaat

SEQ ID NO: 185673 - DNA, 25 bp, Homo sapien
aaggcttgcaggcttgaacatccct

SEQ ID NO: 185674 - DNA, 25 bp, Homo sapien
gcttgaacatccctttcagattagg

SEQ ID NO: 185675 - DNA, 25 bp, Homo sapien
cagattagggtcccactgatagaaa

SEQ ID NO: 185676 - DNA, 25 bp, Homo sapien
ttctataactgagggtgttggttcc

SEQ ID NO: 185677 - DNA, 25 bp, Homo sapien
tccagtgcctctcgagtatattcta

SEQ ID NO: 185678 - DNA, 25 bp, Homo sapien
agcttcacttgggtacgatgtatcc

SEQ ID NO: 185679 - DNA, 25 bp, Homo sapien
gtgttggttccagttctgatgtttc

SEQ ID NO: 185680 - DNA, 25 bp, Homo sapien
ttgttgtatccgattctgcctgaca

SEQ ID NO: 185681 - DNA, 25 bp, Homo sapien
actcaagtatttctcgcctgttatg

SEQ ID NO: 185682 - DNA, 25 bp, Homo sapien
gatgattgtgaaaatcagtgataaa

SEQ ID NO: 185683 - DNA, 25 bp, Homo sapien
tgcctgacagtatttgccacttgat

SEQ ID NO: 185684 - DNA, 25 bp, Homo sapien
tccagtcgggctacagcaactgggt

SEQ ID NO: 185685 - DNA, 25 bp, Homo sapien
ttttcctgtttccagtcgggctaca

SEQ ID NO: 185686 - DNA, 25 bp, Homo sapien
ttctgaggaactgtgctgagggctt

SEQ ID NO: 185687 - DNA, 25 bp, Homo sapien
tgtgcagagagtggcccatctagaa

SEQ ID NO: 185688 - DNA, 25 bp, Homo sapien
tctagtgaaaatgaatgacctgatg

SEQ ID NO: 185689 - DNA, 25 bp, Homo sapien
gtgaaaatgaatgacctgatgagac

SEQ ID NO: 185690 - DNA, 25 bp, Homo sapien
tagtgaaaatgaatgacctgatgag

SEQ ID NO: 185691 - DNA, 25 bp, Homo sapien
ttctagtgaaaatgaatgacctgat

SEQ ID NO: 185692 - DNA, 25 bp, Homo sapien
ggtcaacaatcctcagttgtaactt

SEQ ID NO: 185693 - DNA, 25 bp, Homo sapien
tcaacaatcctcagttgtaacttcc

SEQ ID NO: 185694 - DNA, 25 bp, Homo sapien
gtcaacaatcctcagttgtaacttc

SEQ ID NO: 185695 - DNA, 25 bp, Homo sapien
tagtgtggtggaatgaggataatgt

SEQ ID NO: 185696 - DNA, 25 bp, Homo sapien
tgtggtggaatgaggataatgtttc

SEQ ID NO: 185697 - DNA, 25 bp, Homo sapien
acacaaaaataatagtgtggtggaa

SEQ ID NO: 185698 - DNA, 25 bp, Homo sapien
tggtggaatgaggataatgtttctt

SEQ ID NO: 185699 - DNA, 25 bp, Homo sapien
ggcctgattttgcacccctttggat

SEQ ID NO: 185700 - DNA, 25 bp, Homo sapien
agttctggatggaatgtgaccttcc

SEQ ID NO: 185701 - DNA, 25 bp, Homo sapien
gactcccatgggcaagacttagatt

SEQ ID NO: 185702 - DNA, 25 bp, Homo sapien
tttggtctagagtaaatggttggcc

SEQ ID NO: 185703 - DNA, 25 bp, Homo sapien
gaggaatcacctgtaaaggctcaga

SEQ ID NO: 185704 - DNA, 25 bp, Homo sapien
tttcaggtaaagacaccaccggcca

SEQ ID NO: 185705 - DNA, 25 bp, Homo sapien
tacgtgatctccagtaggtagggac

SEQ ID NO: 185706 - DNA, 25 bp, Homo sapien
catataagagaaacctgaccgaggc

SEQ ID NO: 185707 - DNA, 25 bp, Homo sapien
tctttttgaccgagtcctgatttac

SEQ ID NO: 185708 - DNA, 25 bp, Homo sapien
tccatcggctggagttggttcttca

SEQ ID NO: 185709 - DNA, 25 bp, Homo sapien
tgtcaaaagaaaggaggctactatt

SEQ ID NO: 185710 - DNA, 25 bp, Homo sapien
caccacttgaggctgttcatcttct

SEQ ID NO: 185711 - DNA, 25 bp, Homo sapien
tgccataaagcctgatctggtgact

SEQ ID NO: 185712 - DNA, 25 bp, Homo sapien
tcttttgccataaagcctgatctgg

SEQ ID NO: 185713 - DNA, 25 bp, Homo sapien
gcctgatctggtgactgaaatttcc

SEQ ID NO: 185714 - DNA, 25 bp, Homo sapien
taaagcctgatctggtgactgaaat

SEQ ID NO: 185715 - DNA, 25 bp, Homo sapien
tactttgagctgttgttatcttcag

SEQ ID NO: 185716 - DNA, 25 bp, Homo sapien
catgttgaagagggcaaaaagattt

SEQ ID NO: 185717 - DNA, 25 bp, Homo sapien
gaagagggcaaaaagatttgagata

SEQ ID NO: 185718 - DNA, 25 bp, Homo sapien
ctcatgttgaagagggcaaaaagat

SEQ ID NO: 185719 - DNA, 25 bp, Homo sapien
ttgaagagggcaaaaagatttgaga

SEQ ID NO: 185720 - DNA, 25 bp, Homo sapien
ttcattagctaagaaggaattaggg

SEQ ID NO: 185721 - DNA, 25 bp, Homo sapien
tggatccttccagttcattagctaa

SEQ ID NO: 185722 - DNA, 25 bp, Homo sapien
tctcgagtgttgctctgatctggtc

SEQ ID NO: 185723 - DNA, 25 bp, Homo sapien
gaggcctctctgtatgccccagggg

SEQ ID NO: 185724 - DNA, 25 bp, Homo sapien
catctgttccttcgttggcccaata

SEQ ID NO: 185725 - DNA, 25 bp, Homo sapien
ttccatctgttccttcgttggccca

SEQ ID NO: 185726 - DNA, 25 bp, Homo sapien
tctgttccttcgttggcccaatatt

SEQ ID NO: 185727 - DNA, 25 bp, Homo sapien
tgttccttcgttggcccaatattcc

SEQ ID NO: 185728 - DNA, 25 bp, Homo sapien
tgtatctgtccccaaccatactgct

SEQ ID NO: 185729 - DNA, 25 bp, Homo sapien
tccagttccagcactttctgatgct

SEQ ID NO: 185730 - DNA, 25 bp, Homo sapien
tttctgatgctgagtgaagagatga

SEQ ID NO: 185731 - DNA, 25 bp, Homo sapien
tactgctttgtcagtcctccagttc

SEQ ID NO: 185732 - DNA, 25 bp, Homo sapien
agcttcaatgttcatcaacctgagt

SEQ ID NO: 185733 - DNA, 25 bp, Homo sapien
caagtactccatacaggatttagca

SEQ ID NO: 185734 - DNA, 25 bp, Homo sapien
tactccatacaggatttagcacagc

SEQ ID NO: 185735 - DNA, 25 bp, Homo sapien
tgggccacaagtactccatacagga

SEQ ID NO: 185736 - DNA, 25 bp, Homo sapien
caggatttagcacagctcagcagct

SEQ ID NO: 185737 - DNA, 25 bp, Homo sapien
gattaggtccccacccttatgactg

SEQ ID NO: 185738 - DNA, 25 bp, Homo sapien
tgtaaggatgccagtcccatcggat

SEQ ID NO: 185739 - DNA, 25 bp, Homo sapien
gaggactctattcctgacttgtgga

SEQ ID NO: 185740 - DNA, 25 bp, Homo sapien
catggccatttcgagggtgtttctc

SEQ ID NO: 185741 - DNA, 25 bp, Homo sapien
cccttgctgaaaggcataaggtagg

SEQ ID NO: 185742 - DNA, 25 bp, Homo sapien
cagcccttgctgaaaggcataaggt

SEQ ID NO: 185743 - DNA, 25 bp, Homo sapien
ggtgactggtgatctgccagagaaa

SEQ ID NO: 185744 - DNA, 25 bp, Homo sapien
agctcctgtgacccaacctgtttca

SEQ ID NO: 185745 - DNA, 25 bp, Homo sapien
gcttccttagcttccaactgagtgg

SEQ ID NO: 185746 - DNA, 25 bp, Homo sapien
actagtctagttagcatctttccca

SEQ ID NO: 185747 - DNA, 25 bp, Homo sapien
gctgctttgcagatatcagtggttg

SEQ ID NO: 185748 - DNA, 25 bp, Homo sapien
ttgtggatggccgacggtgatacct

SEQ ID NO: 185749 - DNA, 25 bp, Homo sapien
tcgtctttgccaatggaaattttgc

SEQ ID NO: 185750 - DNA, 25 bp, Homo sapien
ctgggcttgttgaggttttcgtctt

SEQ ID NO: 185751 - DNA, 25 bp, Homo sapien
gcttgttgaggttttcgtctttgcc

SEQ ID NO: 185752 - DNA, 25 bp, Homo sapien
gaggttttcgtctttgccaatggaa

SEQ ID NO: 185753 - DNA, 25 bp, Homo sapien
gactcagtgaaggtattgcagacac

SEQ ID NO: 185754 - DNA, 25 bp, Homo sapien
gattaccacaagactccagagaaga

SEQ ID NO: 185755 - DNA, 25 bp, Homo sapien
aactctctgagtaggctggtgccaa

SEQ ID NO: 185756 - DNA, 25 bp, Homo sapien
cgttcagttgagcttcagaagactc

SEQ ID NO: 185757 - DNA, 25 bp, Homo sapien
ttctacttccgtttcattggtgagt

SEQ ID NO: 185758 - DNA, 25 bp, Homo sapien
ctacttccgtttcattggtgagtgc

SEQ ID NO: 185759 - DNA, 25 bp, Homo sapien
cttccgtttcattggtgagtgccat

SEQ ID NO: 185760 - DNA, 25 bp, Homo sapien
tacttccgtttcattggtgagtgcc

SEQ ID NO: 185761 - DNA, 25 bp, Homo sapien
ggtggtgtgttgtgcccctctagat

SEQ ID NO: 185762 - DNA, 25 bp, Homo sapien
caggccaaaggaagggtcagtagaa

SEQ ID NO: 185763 - DNA, 25 bp, Homo sapien
tgcaggccaaaggaagggtcagtag

SEQ ID NO: 185764 - DNA, 25 bp, Homo sapien
aagttgagggtggtgtgttgtgccc

SEQ ID NO: 185765 - DNA, 25 bp, Homo sapien
tgatgaccaggtgaaagctgggttt

SEQ ID NO: 185766 - DNA, 25 bp, Homo sapien
ctgatgaccaggtgaaagctgggtt

SEQ ID NO: 185767 - DNA, 25 bp, Homo sapien
tgaccaggtgaaagctgggtttatt

SEQ ID NO: 185768 - DNA, 25 bp, Homo sapien
gatgaccaggtgaaagctgggttta

SEQ ID NO: 185769 - DNA, 25 bp, Homo sapien
catagcaacagcagtctttcccata

SEQ ID NO: 185770 - DNA, 25 bp, Homo sapien
tcttacagggcttccgtattgtctc

SEQ ID NO: 185771 - DNA, 25 bp, Homo sapien
tagcacatcccagttgccatagcaa

SEQ ID NO: 185772 - DNA, 25 bp, Homo sapien
ctaaattttgcatatcgtctgtttc

SEQ ID NO: 185773 - DNA, 25 bp, Homo sapien
ttcagtttcttcatggcaaggaaca

SEQ ID NO: 185774 - DNA, 25 bp, Homo sapien
caaatgctgaataagcatttgacat

SEQ ID NO: 185775 - DNA, 25 bp, Homo sapien
tttcagtttcttcatggcaaggaac

SEQ ID NO: 185776 - DNA, 25 bp, Homo sapien
tggcaaggaacaaatgctgaataag

SEQ ID NO: 185777 - DNA, 25 bp, Homo sapien
atgcttgctactctcagtcctttaa

SEQ ID NO: 185778 - DNA, 25 bp, Homo sapien
gcttgctactctcagtcctttaagc

SEQ ID NO: 185779 - DNA, 25 bp, Homo sapien
tgcttgctactctcagtcctttaag

SEQ ID NO: 185780 - DNA, 25 bp, Homo sapien
cttgctactctcagtcctttaagct

SEQ ID NO: 185781 - DNA, 25 bp, Homo sapien
tgtctgcatgaggtacaggaatgag

SEQ ID NO: 185782 - DNA, 25 bp, Homo sapien
tctgcatgaggtacaggaatgagag

SEQ ID NO: 185783 - DNA, 25 bp, Homo sapien
tgcatgaggtacaggaatgagaggc

SEQ ID NO: 185784 - DNA, 25 bp, Homo sapien
gtgtctgcatgaggtacaggaatga

SEQ ID NO: 185785 - DNA, 25 bp, Homo sapien
ttcctcataagccaccagccatatt

SEQ ID NO: 185786 - DNA, 25 bp, Homo sapien
taagccaccagccatatttttctct

SEQ ID NO: 185787 - DNA, 25 bp, Homo sapien
ggctttaagatttggtgaagataaa

SEQ ID NO: 185788 - DNA, 25 bp, Homo sapien
tgaattcctgagttggctttaagat

SEQ ID NO: 185789 - DNA, 25 bp, Homo sapien
gacatgtttgggcatgtctgctgaa

SEQ ID NO: 185790 - DNA, 25 bp, Homo sapien
tctgtgatgagttggtggtctgtcc

SEQ ID NO: 185791 - DNA, 25 bp, Homo sapien
tagccagtagcatctgagcttgaat

SEQ ID NO: 185792 - DNA, 25 bp, Homo sapien
ggtggtctgtcccatcagtgtattg

SEQ ID NO: 185793 - DNA, 25 bp, Homo sapien
tatgtcataaaaagccctccacagg

SEQ ID NO: 185794 - DNA, 25 bp, Homo sapien
gcaccggacatatgcctctagtaaa

SEQ ID NO: 185795 - DNA, 25 bp, Homo sapien
tcatctatcaagatgggcccaagtg

SEQ ID NO: 185796 - DNA, 25 bp, Homo sapien
tatgccttctgcttgcactacttgc

SEQ ID NO: 185797 - DNA, 25 bp, Homo sapien
gagaaactaggtcgaggaactgttg

SEQ ID NO: 185798 - DNA, 25 bp, Homo sapien
catgtaacgtaattggacctcttta

SEQ ID NO: 185799 - DNA, 25 bp, Homo sapien
ctttagtggagaaactaggtcgagg

SEQ ID NO: 185800 - DNA, 25 bp, Homo sapien
cgtaattggacctctttagtggaga

SEQ ID NO: 185801 - DNA, 25 bp, Homo sapien
agcttttgatcatcgagtgagaaca

SEQ ID NO: 185802 - DNA, 25 bp, Homo sapien
tggaggaagaccatgccccctactt

SEQ ID NO: 185803 - DNA, 25 bp, Homo sapien
actgagcagcttttgatcatcgagt

SEQ ID NO: 185804 - DNA, 25 bp, Homo sapien
gagcagcttttgatcatcgagtgag

SEQ ID NO: 185805 - DNA, 25 bp, Homo sapien
ctttattagtcctgccccttaggag

SEQ ID NO: 185806 - DNA, 25 bp, Homo sapien
ctgtcctgtttgcagttagtccacc

SEQ ID NO: 185807 - DNA, 25 bp, Homo sapien
cttgcccactggtcaaacccttctt

SEQ ID NO: 185808 - DNA, 25 bp, Homo sapien
gaggtaaaccctctcatcgtctctc

SEQ ID NO: 185809 - DNA, 25 bp, Homo sapien
gagtagcatcaccttcacacagaag

SEQ ID NO: 185810 - DNA, 25 bp, Homo sapien
gacagggtcaaagttctgaaacacc

SEQ ID NO: 185811 - DNA, 25 bp, Homo sapien
gaaacacctgccatctgtcaagagg

SEQ ID NO: 185812 - DNA, 25 bp, Homo sapien
caagaggagaccagaaagactgtcc

SEQ ID NO: 185813 - DNA, 25 bp, Homo sapien
tcctgggtgggggtccagaagatca

SEQ ID NO: 185814 - DNA, 25 bp, Homo sapien
cttcttgtgctgaatcatttcctgg

SEQ ID NO: 185815 - DNA, 25 bp, Homo sapien
gagttagagctgtcttcttgtgctg

SEQ ID NO: 185816 - DNA, 25 bp, Homo sapien
gggggtccagaagatcagatgagcc

SEQ ID NO: 185817 - DNA, 25 bp, Homo sapien
gcacaagctcaaactgtactaggac

SEQ ID NO: 185818 - DNA, 25 bp, Homo sapien
tagatcactagttccatgagatgct

SEQ ID NO: 185819 - DNA, 25 bp, Homo sapien
cacttacttaagattggtcaattta

SEQ ID NO: 185820 - DNA, 25 bp, Homo sapien
tcaaactgtactaggacttccaaag

SEQ ID NO: 185821 - DNA, 25 bp, Homo sapien
ctcaagaaacggtcatcatctgttc

SEQ ID NO: 185822 - DNA, 25 bp, Homo sapien
ttaactcaagaaacggtcatcatct

SEQ ID NO: 185823 - DNA, 25 bp, Homo sapien
aagaaacggtcatcatctgttccaa

SEQ ID NO: 185824 - DNA, 25 bp, Homo sapien
taactcaagaaacggtcatcatctg

SEQ ID NO: 185825 - DNA, 25 bp, Homo sapien
tcatgatgctgtcgctggtcttgct

SEQ ID NO: 185826 - DNA, 25 bp, Homo sapien
gtcatgatgctgtcgctggtcttgc

SEQ ID NO: 185827 - DNA, 25 bp, Homo sapien
ctgtcatgatgctgtcgctggtctt

SEQ ID NO: 185828 - DNA, 25 bp, Homo sapien
tgatgctgtcgctggtcttgcttgg

SEQ ID NO: 185829 - DNA, 25 bp, Homo sapien
cagggtcagacaagggcttcttggc

SEQ ID NO: 185830 - DNA, 25 bp, Homo sapien
tcttggctttaccactctttgcatt

SEQ ID NO: 185831 - DNA, 25 bp, Homo sapien
cttggctttaccactctttgcattt

SEQ ID NO: 185832 - DNA, 25 bp, Homo sapien
aggcagggtcagacaagggcttctt

SEQ ID NO: 185833 - DNA, 25 bp, Homo sapien
aagaggttctgcagatcaagaggtt

SEQ ID NO: 185834 - DNA, 25 bp, Homo sapien
ggagtacacattggataccacctca

SEQ ID NO: 185835 - DNA, 25 bp, Homo sapien
agtaatttagctgtcatccagtgtc

SEQ ID NO: 185836 - DNA, 25 bp, Homo sapien
tccagtgtcttgtcacattacagga

SEQ ID NO: 185837 - DNA, 25 bp, Homo sapien
aatctcttgaaaggaggcagctact

SEQ ID NO: 185838 - DNA, 25 bp, Homo sapien
tctcatttctacatgtgggactgca

SEQ ID NO: 185839 - DNA, 25 bp, Homo sapien
tatgctgtaacacttcaaaattgtg

SEQ ID NO: 185840 - DNA, 25 bp, Homo sapien
tctggcaaccctagctaattaataa

SEQ ID NO: 185841 - DNA, 25 bp, Homo sapien
tgaagccttgcctgacaacccaagc

SEQ ID NO: 185842 - DNA, 25 bp, Homo sapien
aattgtactgatgtggcgtgaggca

SEQ ID NO: 185843 - DNA, 25 bp, Homo sapien
tagctgggctaaggtgaacaaattg

SEQ ID NO: 185844 - DNA, 25 bp, Homo sapien
gcgtgaggcacactatctggtcaga

SEQ ID NO: 185845 - DNA, 25 bp, Homo sapien
cactgcgctcggctggttggttgat

SEQ ID NO: 185846 - DNA, 25 bp, Homo sapien
tcttgggagagggaccatagctgtc

SEQ ID NO: 185847 - DNA, 25 bp, Homo sapien
gaagagggttttctcacatagaacc

SEQ ID NO: 185848 - DNA, 25 bp, Homo sapien
taggtcccgagatgttgataatact

SEQ ID NO: 185849 - DNA, 25 bp, Homo sapien
ctctgttcccatttttaactgttgt

SEQ ID NO: 185850 - DNA, 25 bp, Homo sapien
atcttcctacgtccacatgtcacag

SEQ ID NO: 185851 - DNA, 25 bp, Homo sapien
tcttcctacgtccacatgtcacagg

SEQ ID NO: 185852 - DNA, 25 bp, Homo sapien
catttatgtgccttcctcatcttcc

SEQ ID NO: 185853 - DNA, 25 bp, Homo sapien
ccaagtgcctccatttatgtgcctt

SEQ ID NO: 185854 - DNA, 25 bp, Homo sapien
cagagaaaagtcatattcttcaggc

SEQ ID NO: 185855 - DNA, 25 bp, Homo sapien
taggaaactcagtcagaggacctcg

SEQ ID NO: 185856 - DNA, 25 bp, Homo sapien
ctgagattcatttgcgtttggctgc

SEQ ID NO: 185857 - DNA, 25 bp, Homo sapien
cctcgagtatccaaatcagtgtctg

SEQ ID NO: 185858 - DNA, 25 bp, Homo sapien
taattgaatgcaatcccaactgctc

SEQ ID NO: 185859 - DNA, 25 bp, Homo sapien
tagcttaatctgtttcttggcccca

SEQ ID NO: 185860 - DNA, 25 bp, Homo sapien
tgtagcttaatctgtttcttggccc

SEQ ID NO: 185861 - DNA, 25 bp, Homo sapien
cttgtagcttaatctgtttcttggc

SEQ ID NO: 185862 - DNA, 25 bp, Homo sapien
gtagcttaatctgtttcttggcccc

SEQ ID NO: 185863 - DNA, 25 bp, Homo sapien
aattgtatcactgctgtcgttaggg

SEQ ID NO: 185864 - DNA, 25 bp, Homo sapien
tgtatcactgctgtcgttagggctc

SEQ ID NO: 185865 - DNA, 25 bp, Homo sapien
attgtatcactgctgtcgttagggc

SEQ ID NO: 185866 - DNA, 25 bp, Homo sapien
tatcactgctgtcgttagggctcac

SEQ ID NO: 185867 - DNA, 25 bp, Homo sapien
atcagcaactgaacaaagaaggcac

SEQ ID NO: 185868 - DNA, 25 bp, Homo sapien
tcctttcccactggatctgtcagct

SEQ ID NO: 185869 - DNA, 25 bp, Homo sapien
aagaaggcacagtcctttcccactg

SEQ ID NO: 185870 - DNA, 25 bp, Homo sapien
gcacagtcctttcccactggatctg

SEQ ID NO: 185871 - DNA, 25 bp, Homo sapien
tggggaaagtaatcagggagccatt

SEQ ID NO: 185872 - DNA, 25 bp, Homo sapien
cacagataacgcagcgtgttaagca

SEQ ID NO: 185873 - DNA, 25 bp, Homo sapien
tgtgctaaggaagcacagataacgc

SEQ ID NO: 185874 - DNA, 25 bp, Homo sapien
acattgcttctagactggagtttgg

SEQ ID NO: 185875 - DNA, 25 bp, Homo sapien
ggagtttggctaataagacactgga

SEQ ID NO: 185876 - DNA, 25 bp, Homo sapien
tgtgtgatggtgtaggccctgtggg

SEQ ID NO: 185877 - DNA, 25 bp, Homo sapien
aggatttcctgggtgccttgagttg

SEQ ID NO: 185878 - DNA, 25 bp, Homo sapien
gccttgagttgtgagaggagaaaac

SEQ ID NO: 185879 - DNA, 25 bp, Homo sapien
ttcctgggtgccttgagttgtgaga

SEQ ID NO: 185880 - DNA, 25 bp, Homo sapien
tgtccaacctgttccggcgccggct

SEQ ID NO: 185881 - DNA, 25 bp, Homo sapien
agttaatggctcctaggatagagga

SEQ ID NO: 185882 - DNA, 25 bp, Homo sapien
tgttgaggttatggtctgttaacag

SEQ ID NO: 185883 - DNA, 25 bp, Homo sapien
gagatgcctgctagatgcaaggaga

SEQ ID NO: 185884 - DNA, 25 bp, Homo sapien
tgcctggttggcctagctcagccca

SEQ ID NO: 185885 - DNA, 25 bp, Homo sapien
ggctaagcctctttttaccagctct

SEQ ID NO: 185886 - DNA, 25 bp, Homo sapien
caggggctaagcctctttttaccag

SEQ ID NO: 185887 - DNA, 25 bp, Homo sapien
gcgaacatcagtgggataaggtaaa

SEQ ID NO: 185888 - DNA, 25 bp, Homo sapien
aattgcaaattcgaagaagcagctt

SEQ ID NO: 185889 - DNA, 25 bp, Homo sapien
ttgaattgcaaattcgaagaagcag

SEQ ID NO: 185890 - DNA, 25 bp, Homo sapien
ttgcaaattcgaagaagcagcttca

SEQ ID NO: 185891 - DNA, 25 bp, Homo sapien
attgcaaattcgaagaagcagcttc

SEQ ID NO: 185892 - DNA, 25 bp, Homo sapien
ccaattgatctagtaagggcttagc

SEQ ID NO: 185893 - DNA, 25 bp, Homo sapien
agtccaattgatctagtaagggctt

SEQ ID NO: 185894 - DNA, 25 bp, Homo sapien
caattgatctagtaagggcttagct

SEQ ID NO: 185895 - DNA, 25 bp, Homo sapien
ttgatctagtaagggcttagcttaa

SEQ ID NO: 185896 - DNA, 25 bp, Homo sapien
cagctgatgaaaaaccaaatcgact

SEQ ID NO: 185897 - DNA, 25 bp, Homo sapien
cttgagttacaagatctgggctttc

SEQ ID NO: 185898 - DNA, 25 bp, Homo sapien
ttcaacctgttggttggtggtggag

SEQ ID NO: 185899 - DNA, 25 bp, Homo sapien
aaaccaaatcgacttgagttacaag

SEQ ID NO: 185900 - DNA, 25 bp, Homo sapien
cataggtgccaatggttgaagttgt

SEQ ID NO: 185901 - DNA, 25 bp, Homo sapien
tatatgggatgcataggtgccaatg

SEQ ID NO: 185902 - DNA, 25 bp, Homo sapien
ggatgcataggtgccaatggttgaa

SEQ ID NO: 185903 - DNA, 25 bp, Homo sapien
tgccaatggttgaagttgtgttcat

SEQ ID NO: 185904 - DNA, 25 bp, Homo sapien
tcagcggacaaagaattcagtgtgg

SEQ ID NO: 185905 - DNA, 25 bp, Homo sapien
cagcggacaaagaattcagtgtggc

SEQ ID NO: 185906 - DNA, 25 bp, Homo sapien
tctgtgataacaccgagggctcctt

SEQ ID NO: 185907 - DNA, 25 bp, Homo sapien
ctgtgataacaccgagggctccttg

SEQ ID NO: 185908 - DNA, 25 bp, Homo sapien
ttctgtgataacaccgagggctcct

SEQ ID NO: 185909 - DNA, 25 bp, Homo sapien
agttaaatagtggtgggatgggcat

SEQ ID NO: 185910 - DNA, 25 bp, Homo sapien
ggattttcactagacattcacaaga

SEQ ID NO: 185911 - DNA, 25 bp, Homo sapien
gttaatttacttgtagacatttgga

SEQ ID NO: 185912 - DNA, 25 bp, Homo sapien
caagatggtttctgtctgtagttaa

SEQ ID NO: 185913 - DNA, 25 bp, Homo sapien
gtctgttgcttgaagagaagaccca

SEQ ID NO: 185914 - DNA, 25 bp, Homo sapien
gagattggcaatttgaggcaccttg

SEQ ID NO: 185915 - DNA, 25 bp, Homo sapien
tttgaggcaccttggcagaatgttg

SEQ ID NO: 185916 - DNA, 25 bp, Homo sapien
gcaccttggcagaatgttgatccat

SEQ ID NO: 185917 - DNA, 25 bp, Homo sapien
ggagattggcaatttgaggcacctt

SEQ ID NO: 185918 - DNA, 25 bp, Homo sapien
gtagatataggtgattaagaagtaa

SEQ ID NO: 185919 - DNA, 25 bp, Homo sapien
gaaaacacaatatgaggcaaagggc

SEQ ID NO: 185920 - DNA, 25 bp, Homo sapien
aaaaaacagacttaatgaaggagtg

SEQ ID NO: 185921 - DNA, 25 bp, Homo sapien
caaagggcagtagttgaaagtaaag

SEQ ID NO: 185922 - DNA, 25 bp, Homo sapien
aatcagtttagggttggagtctagg

SEQ ID NO: 185923 - DNA, 25 bp, Homo sapien
caatgatgttgtcaatcagtttagg

SEQ ID NO: 185924 - DNA, 25 bp, Homo sapien
aaacctcaatgatgttgtcaatcag

SEQ ID NO: 185925 - DNA, 25 bp, Homo sapien
gaccaacagaaacctcaatgatgtt

SEQ ID NO: 185926 - DNA, 25 bp, Homo sapien
tccacaattccattttctctttttc

SEQ ID NO: 185927 - DNA, 25 bp, Homo sapien
caattccattttctctttttctcat

SEQ ID NO: 185928 - DNA, 25 bp, Homo sapien
cactctccacaattccattttctct

SEQ ID NO: 185929 - DNA, 25 bp, Homo sapien
cacaattccattttctctttttctc

SEQ ID NO: 185930 - DNA, 25 bp, Homo sapien
ctctgtaatcaatctgtccacttca

SEQ ID NO: 185931 - DNA, 25 bp, Homo sapien
agagactctctgtaatcaatctgtc

SEQ ID NO: 185932 - DNA, 25 bp, Homo sapien
gactctctgtaatcaatctgtccac

SEQ ID NO: 185933 - DNA, 25 bp, Homo sapien
tcagagactctctgtaatcaatctg

SEQ ID NO: 185934 - DNA, 25 bp, Homo sapien
ttgttccttttaagattgatgcctg

SEQ ID NO: 185935 - DNA, 25 bp, Homo sapien
tgttccttttaagattgatgcctgc

SEQ ID NO: 185936 - DNA, 25 bp, Homo sapien
ctttgttgttccttttaagattgat

SEQ ID NO: 185937 - DNA, 25 bp, Homo sapien
tgttgttccttttaagattgatgcc

SEQ ID NO: 185938 - DNA, 25 bp, Homo sapien
ttatactcatttggcctgcagaggc

SEQ ID NO: 185939 - DNA, 25 bp, Homo sapien
actagattggaggtcccgccgggca

SEQ ID NO: 185940 - DNA, 25 bp, Homo sapien
agggaccatctcactgcaggttcca

SEQ ID NO: 185941 - DNA, 25 bp, Homo sapien
gaggccaacacttgtttagctttgc

SEQ ID NO: 185942 - DNA, 25 bp, Homo sapien
tcacactgaccacttttttgatcac

SEQ ID NO: 185943 - DNA, 25 bp, Homo sapien
acactgaccacttttttgatcacac

SEQ ID NO: 185944 - DNA, 25 bp, Homo sapien
ttcacactgaccacttttttgatca

SEQ ID NO: 185945 - DNA, 25 bp, Homo sapien
cacactgaccacttttttgatcaca

SEQ ID NO: 185946 - DNA, 25 bp, Homo sapien
ctcttctgagaggtgtatacacatg

SEQ ID NO: 185947 - DNA, 25 bp, Homo sapien
aactttctgggcaccactacccagc

SEQ ID NO: 185948 - DNA, 25 bp, Homo sapien
gcaactttctgggcaccactaccca

SEQ ID NO: 185949 - DNA, 25 bp, Homo sapien
cttctgagaggtgtatacacatgtt

SEQ ID NO: 185950 - DNA, 25 bp, Homo sapien
tgactgccccgactgtgttagtcat

SEQ ID NO: 185951 - DNA, 25 bp, Homo sapien
ttcatatctttgtctcctaacaagc

SEQ ID NO: 185952 - DNA, 25 bp, Homo sapien
ttgtctcctaacaagcactgagcag

SEQ ID NO: 185953 - DNA, 25 bp, Homo sapien
tatctttgtctcctaacaagcactg

SEQ ID NO: 185954 - DNA, 25 bp, Homo sapien
tgtagtcagcagatattcttctggc

SEQ ID NO: 185955 - DNA, 25 bp, Homo sapien
taaaatcacaactatcttaccacca

SEQ ID NO: 185956 - DNA, 25 bp, Homo sapien
gacaaggttggctaacattctgatg

SEQ ID NO: 185957 - DNA, 25 bp, Homo sapien
cttaccaccaaatgacaaggttggc

SEQ ID NO: 185958 - DNA, 25 bp, Homo sapien
tgcactgatttagcatgcctagcag

SEQ ID NO: 185959 - DNA, 25 bp, Homo sapien
gaactagcaacagtaaagatgtcca

SEQ ID NO: 185960 - DNA, 25 bp, Homo sapien
tccctagggaaccttcaatgaatgt

SEQ ID NO: 185961 - DNA, 25 bp, Homo sapien
aaacatgtgttatcttccctaggga

SEQ ID NO: 185962 - DNA, 25 bp, Homo sapien
taaagcagcctgttcatgttgcact

SEQ ID NO: 185963 - DNA, 25 bp, Homo sapien
tctttggcgatgagatactgttgtg

SEQ ID NO: 185964 - DNA, 25 bp, Homo sapien
aagtcattcttgccccactgaaggt

SEQ ID NO: 185965 - DNA, 25 bp, Homo sapien
tcacgtaaagaatgagtaaagcagc

SEQ ID NO: 185966 - DNA, 25 bp, Homo sapien
gaaggtaacatgtgctgtgcaaatg

SEQ ID NO: 185967 - DNA, 25 bp, Homo sapien
ccataattctatggctagtctccag

SEQ ID NO: 185968 - DNA, 25 bp, Homo sapien
atatttagatacatacgggtatgat

SEQ ID NO: 185969 - DNA, 25 bp, Homo sapien
aaatcagacaatagatgtaggtgaa

SEQ ID NO: 185970 - DNA, 25 bp, Homo sapien
ttgcctgcaatcatccagtaatccg

SEQ ID NO: 185971 - DNA, 25 bp, Homo sapien
tagtcacatgtgattcaccttctct

SEQ ID NO: 185972 - DNA, 25 bp, Homo sapien
gcaatcatccagtaatccgtcagaa

SEQ ID NO: 185973 - DNA, 25 bp, Homo sapien
taatccgtcagaaaatttagtcaca

SEQ ID NO: 185974 - DNA, 25 bp, Homo sapien
tcaaacttagattctgcttctacca

SEQ ID NO: 185975 - DNA, 25 bp, Homo sapien
gatattatatcaataccttttccat

SEQ ID NO: 185976 - DNA, 25 bp, Homo sapien
gtttctgacttgcaattagatgata

SEQ ID NO: 185977 - DNA, 25 bp, Homo sapien
tctgtttctgacttgcaattagatg

SEQ ID NO: 185978 - DNA, 25 bp, Homo sapien
cagtccaattgtggcagtagaagga

SEQ ID NO: 185979 - DNA, 25 bp, Homo sapien
tgattaataagcactctgttaactg

SEQ ID NO: 185980 - DNA, 25 bp, Homo sapien
agtgatgtttgtggatataatcatc

SEQ ID NO: 185981 - DNA, 25 bp, Homo sapien
cagtagaaggagattagtaattcag

SEQ ID NO: 185982 - DNA, 25 bp, Homo sapien
taattacccaggtgtctagggagga

SEQ ID NO: 185983 - DNA, 25 bp, Homo sapien
gcagtccctctgtcgtgaaatcaag

SEQ ID NO: 185984 - DNA, 25 bp, Homo sapien
tcttgaaagaaggtgggaagccatt

SEQ ID NO: 185985 - DNA, 25 bp, Homo sapien
tcttttggatgaccgggagacttgc

SEQ ID NO: 185986 - DNA, 25 bp, Homo sapien
caaaaatgtgtattgccttctagga

SEQ ID NO: 185987 - DNA, 25 bp, Homo sapien
tagggactctagcataggaatcaga

SEQ ID NO: 185988 - DNA, 25 bp, Homo sapien
tctcaagagcccgtgtaagagccca

SEQ ID NO: 185989 - DNA, 25 bp, Homo sapien
taagagcccaggacaagaacttcta

SEQ ID NO: 185990 - DNA, 25 bp, Homo sapien
gttgcctagcacttgaacaaaacgg

SEQ ID NO: 185991 - DNA, 25 bp, Homo sapien
ggtttaacaacagacaagactctga

SEQ ID NO: 185992 - DNA, 25 bp, Homo sapien
caccgagtatggctggaaaatctgc

SEQ ID NO: 185993 - DNA, 25 bp, Homo sapien
gaaatcattgacatggcttcgacag

SEQ ID NO: 185994 - DNA, 25 bp, Homo sapien
tttaataagacagctattgatcgat

SEQ ID NO: 185995 - DNA, 25 bp, Homo sapien
taagacagctattgatcgataattc

SEQ ID NO: 185996 - DNA, 25 bp, Homo sapien
tgatcgataattccaagatgatgat

SEQ ID NO: 185997 - DNA, 25 bp, Homo sapien
gctattgatcgataattccaagatg

SEQ ID NO: 185998 - DNA, 25 bp, Homo sapien
tccataagctgcttcaaaacaagtc

SEQ ID NO: 185999 - DNA, 25 bp, Homo sapien
gagagtaactgcaattccataagct

SEQ ID NO: 186000 - DNA, 25 bp, Homo sapien
tattagaaccgattgtactgctggc

SEQ ID NO: 186001 - DNA, 25 bp, Homo sapien
ggctctgccaacctccgcagaaggg

SEQ ID NO: 186002 - DNA, 25 bp, Homo sapien
atgaaatgtaaatgatgagcagctc

SEQ ID NO: 186003 - DNA, 25 bp, Homo sapien
caggtcaggcccacaatagtatggt

SEQ ID NO: 186004 - DNA, 25 bp, Homo sapien
gccctttagtttgagagttgccaca

SEQ ID NO: 186005 - DNA, 25 bp, Homo sapien
cttctatataacaatggccctttag

SEQ ID NO: 186006 - DNA, 25 bp, Homo sapien
aataataggatgacatgggcaggtc

SEQ ID NO: 186007 - DNA, 25 bp, Homo sapien
cgaggtgtaaagttccagcatttca

SEQ ID NO: 186008 - DNA, 25 bp, Homo sapien
tgacttttctcaggtctaggtccat

SEQ ID NO: 186009 - DNA, 25 bp, Homo sapien
ggtgtaaagttccagcatttcatct

SEQ ID NO: 186010 - DNA, 25 bp, Homo sapien
ctcgaggtgtaaagttccagcattt

SEQ ID NO: 186011 - DNA, 25 bp, Homo sapien
ggagatacaggccttgtcactttgg

SEQ ID NO: 186012 - DNA, 25 bp, Homo sapien
ggccaagccattgcaatatcccagt

SEQ ID NO: 186013 - DNA, 25 bp, Homo sapien
tcccagttggattcctctaatgtcc

SEQ ID NO: 186014 - DNA, 25 bp, Homo sapien
gcacttgccatggagatacaggcct

SEQ ID NO: 186015 - DNA, 25 bp, Homo sapien
tgggtgatcatgcagattttcagca

SEQ ID NO: 186016 - DNA, 25 bp, Homo sapien
gttgctgattgggtgatcatgcaga

SEQ ID NO: 186017 - DNA, 25 bp, Homo sapien
aacttgtcagtagttgctgattggg

SEQ ID NO: 186018 - DNA, 25 bp, Homo sapien
ggcatccccaaacttgtcagtagtt

SEQ ID NO: 186019 - DNA, 25 bp, Homo sapien
gttcgtgtatcctctggttctgcaa

SEQ ID NO: 186020 - DNA, 25 bp, Homo sapien
caagttcctggaaatgttcgtgtat

SEQ ID NO: 186021 - DNA, 25 bp, Homo sapien
cattttcctttgctcgttcagaaca

SEQ ID NO: 186022 - DNA, 25 bp, Homo sapien
gaacatctgatgttacaagttcctg

SEQ ID NO: 186023 - DNA, 25 bp, Homo sapien
gactgttattcaccgtgattactgg

SEQ ID NO: 186024 - DNA, 25 bp, Homo sapien
cccctacgactgttattcaccgtga

SEQ ID NO: 186025 - DNA, 25 bp, Homo sapien
tattcaccgtgattactggcatttc

SEQ ID NO: 186026 - DNA, 25 bp, Homo sapien
acttcacccctacgactgttattca

SEQ ID NO: 186027 - DNA, 25 bp, Homo sapien
taatctgtaaaagctcccctgctag

SEQ ID NO: 186028 - DNA, 25 bp, Homo sapien
cagagtattaaccagattacaggtc

SEQ ID NO: 186029 - DNA, 25 bp, Homo sapien
gctcccctgctagtgccctgtttga

SEQ ID NO: 186030 - DNA, 25 bp, Homo sapien
tggatcacaatgataccctgttttg

SEQ ID NO: 186031 - DNA, 25 bp, Homo sapien
ttttatggcttcagtacacacagtg

SEQ ID NO: 186032 - DNA, 25 bp, Homo sapien
ttcctcaattatggtggcactaaag

SEQ ID NO: 186033 - DNA, 25 bp, Homo sapien
gctccaacttcctcaattatggtgg

SEQ ID NO: 186034 - DNA, 25 bp, Homo sapien
actaaagcctccacctttctctata

SEQ ID NO: 186035 - DNA, 25 bp, Homo sapien
agtccactgacccatgaacacgagg

SEQ ID NO: 186036 - DNA, 25 bp, Homo sapien
gatacgcattcgagaggaagacccg

SEQ ID NO: 186037 - DNA, 25 bp, Homo sapien
gcttgataacagaatgtttcataca

SEQ ID NO: 186038 - DNA, 25 bp, Homo sapien
tgctaaaaatgcctccaggccagtc

SEQ ID NO: 186039 - DNA, 25 bp, Homo sapien
gtgggaatggttagtgagtacaaat

SEQ ID NO: 186040 - DNA, 25 bp, Homo sapien
tacaccgactatacccgcagaaata

SEQ ID NO: 186041 - DNA, 25 bp, Homo sapien
tacaacagagtgattatagtcaaca

SEQ ID NO: 186042 - DNA, 25 bp, Homo sapien
aaagactatgactggattgtttgta

SEQ ID NO: 186043 - DNA, 25 bp, Homo sapien
tcctggtattatctgccgtccaaag

SEQ ID NO: 186044 - DNA, 25 bp, Homo sapien
gacgaagcagtttcatatctcctgg

SEQ ID NO: 186045 - DNA, 25 bp, Homo sapien
aggcgcctccggaaactgacttggg

SEQ ID NO: 186046 - DNA, 25 bp, Homo sapien
aggaaaatggaaacgcagctgcgcc

SEQ ID NO: 186047 - DNA, 25 bp, Homo sapien
gaagccctgcatcccgaaggaggct

SEQ ID NO: 186048 - DNA, 25 bp, Homo sapien
tccaggctcgccagccggaagaaag

SEQ ID NO: 186049 - DNA, 25 bp, Homo sapien
cccacccactagtcgagttggaatg

SEQ ID NO: 186050 - DNA, 25 bp, Homo sapien
caagtcgtcacttaaaaaggctcac

SEQ ID NO: 186051 - DNA, 25 bp, Homo sapien
ttgcaccggccaagtcctcgccaag

SEQ ID NO: 186052 - DNA, 25 bp, Homo sapien
gctgccggtcattcccttgcaccgg

SEQ ID NO: 186053 - DNA, 25 bp, Homo sapien
cctccgctgccggtcattcccttgc

SEQ ID NO: 186054 - DNA, 25 bp, Homo sapien
ggtcattcccttgcaccggccaagt

SEQ ID NO: 186055 - DNA, 25 bp, Homo sapien
gcggcgcagccggagcagccagtga

SEQ ID NO: 186056 - DNA, 25 bp, Homo sapien
cggagcagccagtgagagcaacatc

SEQ ID NO: 186057 - DNA, 25 bp, Homo sapien
cagccggagcagccagtgagagcaa

SEQ ID NO: 186058 - DNA, 25 bp, Homo sapien
tcagctgggctcgcgcggcgcagcc

SEQ ID NO: 186059 - DNA, 25 bp, Homo sapien
tgaaaagcactccagtgcgctggcg

SEQ ID NO: 186060 - DNA, 25 bp, Homo sapien
tgcgctggcgaagtgaaatcatcct

SEQ ID NO: 186061 - DNA, 25 bp, Homo sapien
taccagcagcggtgagtagtcccgc

SEQ ID NO: 186062 - DNA, 25 bp, Homo sapien
agttgcagcgaagtctgagacgccg

SEQ ID NO: 186063 - DNA, 25 bp, Homo sapien
tggaagatttcagggacctccggga

SEQ ID NO: 186064 - DNA, 25 bp, Homo sapien
tatctggcggtcactttaactagga

SEQ ID NO: 186065 - DNA, 25 bp, Homo sapien
cctccgggaacttgagctaacttat

SEQ ID NO: 186066 - DNA, 25 bp, Homo sapien
taactaggaagtgcaggcaatggtc

SEQ ID NO: 186067 - DNA, 25 bp, Homo sapien
cagatgctccggctttgggaacgct

SEQ ID NO: 186068 - DNA, 25 bp, Homo sapien
taggccttgctgaactgtcaaaccg

SEQ ID NO: 186069 - DNA, 25 bp, Homo sapien
caggtaacaggattctagcccgggc

SEQ ID NO: 186070 - DNA, 25 bp, Homo sapien
tctgtatgtgagtttaaacgcgcgg

SEQ ID NO: 186071 - DNA, 25 bp, Homo sapien
ggtaaatgtcatgaattgggttaaa

SEQ ID NO: 186072 - DNA, 25 bp, Homo sapien
gcttgtctcccataccacgcatata

SEQ ID NO: 186073 - DNA, 25 bp, Homo sapien
tacgtagtgtcaaccaaaattggaa

SEQ ID NO: 186074 - DNA, 25 bp, Homo sapien
attggaaatacctgtggctcatgct

SEQ ID NO: 186075 - DNA, 25 bp, Homo sapien
gcgtcttctgtcctgtggtccatca

SEQ ID NO: 186076 - DNA, 25 bp, Homo sapien
gcatctatttcatacgaggtcacaa

SEQ ID NO: 186077 - DNA, 25 bp, Homo sapien
tcacaaagactttcagtaggccctg

SEQ ID NO: 186078 - DNA, 25 bp, Homo sapien
agcagtcagtgaatgggcttcagga

SEQ ID NO: 186079 - DNA, 25 bp, Homo sapien
caatagtgtgcatatcatgtgatat

SEQ ID NO: 186080 - DNA, 25 bp, Homo sapien
catcatcaatagtgtgcatatcatg

SEQ ID NO: 186081 - DNA, 25 bp, Homo sapien
agtaacgtgttgtgataaattgctc

SEQ ID NO: 186082 - DNA, 25 bp, Homo sapien
tcagtaacgtgttgtgataaattgc

SEQ ID NO: 186083 - DNA, 25 bp, Homo sapien
tctgtgtttgctgtaataggcccca

SEQ ID NO: 186084 - DNA, 25 bp, Homo sapien
tttaaatggctgctatccagtggct

SEQ ID NO: 186085 - DNA, 25 bp, Homo sapien
taatggatcaggctgttccaaagca

SEQ ID NO: 186086 - DNA, 25 bp, Homo sapien
tattccctgtataattgatgccgag

SEQ ID NO: 186087 - DNA, 25 bp, Homo sapien
aaataatccaagagacagaggcagt

SEQ ID NO: 186088 - DNA, 25 bp, Homo sapien
ggacaaataatccaagagacagagg

SEQ ID NO: 186089 - DNA, 25 bp, Homo sapien
cctggacaaataatccaagagacag

SEQ ID NO: 186090 - DNA, 25 bp, Homo sapien
tcccctggacaaataatccaagaga

SEQ ID NO: 186091 - DNA, 25 bp, Homo sapien
catatttatgcaaactgtgcggaac

SEQ ID NO: 186092 - DNA, 25 bp, Homo sapien
tgtgcggaactctcaacctcctgat

SEQ ID NO: 186093 - DNA, 25 bp, Homo sapien
taactagcaaatttgatagccagga

SEQ ID NO: 186094 - DNA, 25 bp, Homo sapien
gggtaggtgttatagccactttata

SEQ ID NO: 186095 - DNA, 25 bp, Homo sapien
tctagtaacggtgactcagtggccc

SEQ ID NO: 186096 - DNA, 25 bp, Homo sapien
cttctagtaacggtgactcagtggc

SEQ ID NO: 186097 - DNA, 25 bp, Homo sapien
ctagtaacggtgactcagtggccca

SEQ ID NO: 186098 - DNA, 25 bp, Homo sapien
tcagtggcccaaaagtggatataaa

SEQ ID NO: 186099 - DNA, 25 bp, Homo sapien
tgccacctgaatcaagtcacggaac

SEQ ID NO: 186100 - DNA, 25 bp, Homo sapien
tgacagccggaagaagatttaatgc

SEQ ID NO: 186101 - DNA, 25 bp, Homo sapien
tcatggagtagcatcaaggacctct

SEQ ID NO: 186102 - DNA, 25 bp, Homo sapien
ggaaactgagtttggcagtactaat

SEQ ID NO: 186103 - DNA, 25 bp, Homo sapien
ctgtgtgcctcttgaaccgtctgtg

SEQ ID NO: 186104 - DNA, 25 bp, Homo sapien
cagctgtggttttggatgtgttgca

SEQ ID NO: 186105 - DNA, 25 bp, Homo sapien
ggcgccgctgtgaggattctgaact

SEQ ID NO: 186106 - DNA, 25 bp, Homo sapien
gaactctccgtgcaggagaacactg

SEQ ID NO: 186107 - DNA, 25 bp, Homo sapien
tggtaaaacgcagcattgatgtctt

SEQ ID NO: 186108 - DNA, 25 bp, Homo sapien
cctttggtaaaacgcagcattgatg

SEQ ID NO: 186109 - DNA, 25 bp, Homo sapien
aaacgcagcattgatgtctttagct

SEQ ID NO: 186110 - DNA, 25 bp, Homo sapien
ggccctttggtaaaacgcagcattg

SEQ ID NO: 186111 - DNA, 25 bp, Homo sapien
gggaacccacctcatgcattagcat

SEQ ID NO: 186112 - DNA, 25 bp, Homo sapien
acagagttgatactagggcactgcc

SEQ ID NO: 186113 - DNA, 25 bp, Homo sapien
tggagctgttagatttgactgccct

SEQ ID NO: 186114 - DNA, 25 bp, Homo sapien
tgcaccgtgtatcgggaaaagccac

SEQ ID NO: 186115 - DNA, 25 bp, Homo sapien
tgtaagatgtgactggcggctgggc

SEQ ID NO: 186116 - DNA, 25 bp, Homo sapien
tattcacccagatcagactcaatgt

SEQ ID NO: 186117 - DNA, 25 bp, Homo sapien
tctggacaacaagatactcatatgc

SEQ ID NO: 186118 - DNA, 25 bp, Homo sapien
cagctgtcactctggacaacaagat

SEQ ID NO: 186119 - DNA, 25 bp, Homo sapien
caatgtcaaaacaggcgaaaataca

SEQ ID NO: 186120 - DNA, 25 bp, Homo sapien
caatatggaagttgccggtgctctt

SEQ ID NO: 186121 - DNA, 25 bp, Homo sapien
ggacgcctttacaatatggaagttg

SEQ ID NO: 186122 - DNA, 25 bp, Homo sapien
tttacaatatggaagttgccggtgc

SEQ ID NO: 186123 - DNA, 25 bp, Homo sapien
gaagttgccggtgctctttggtcat

SEQ ID NO: 186124 - DNA, 25 bp, Homo sapien
tagccaactgtaggacttgcccgct

SEQ ID NO: 186125 - DNA, 25 bp, Homo sapien
caggtgtaattgttaaggcgtcatc

SEQ ID NO: 186126 - DNA, 25 bp, Homo sapien
tcaactgggctgttcagagatggat

SEQ ID NO: 186127 - DNA, 25 bp, Homo sapien
ccattctttgcttgccactagacaa

SEQ ID NO: 186128 - DNA, 25 bp, Homo sapien
tagttctgtaagctgaatcgcattc

SEQ ID NO: 186129 - DNA, 25 bp, Homo sapien
cgacggccttgcttgtgttttcatc

SEQ ID NO: 186130 - DNA, 25 bp, Homo sapien
tcccgacggccttgcttgtgttttc

SEQ ID NO: 186131 - DNA, 25 bp, Homo sapien
tcatccctaattgggtttagttctg

SEQ ID NO: 186132 - DNA, 25 bp, Homo sapien
tatgttgaaatctttgtgagtcttc

SEQ ID NO: 186133 - DNA, 25 bp, Homo sapien
gaagtatgttgaaatctttgtgagt

SEQ ID NO: 186134 - DNA, 25 bp, Homo sapien
agtatgttgaaatctttgtgagtct

SEQ ID NO: 186135 - DNA, 25 bp, Homo sapien
cagaagtatgttgaaatctttgtga

SEQ ID NO: 186136 - DNA, 25 bp, Homo sapien
ggagctatctgagcttgggagggaa

SEQ ID NO: 186137 - DNA, 25 bp, Homo sapien
tggggaacggtgacaggaggtgagg

SEQ ID NO: 186138 - DNA, 25 bp, Homo sapien
ggcaaattgcaaaggacacaggcag

SEQ ID NO: 186139 - DNA, 25 bp, Homo sapien
gcatttctggtgtggcaaattgcaa

SEQ ID NO: 186140 - DNA, 25 bp, Homo sapien
gctttggtgggccttcaacttgtgt

SEQ ID NO: 186141 - DNA, 25 bp, Homo sapien
gggccttcaacttgtgttgagggaa

SEQ ID NO: 186142 - DNA, 25 bp, Homo sapien
tggtgggccttcaacttgtgttgag

SEQ ID NO: 186143 - DNA, 25 bp, Homo sapien
ttcaacttgtgttgagggaatattc

SEQ ID NO: 186144 - DNA, 25 bp, Homo sapien
tgagtgacatcacaggaaagcgtgt

SEQ ID NO: 186145 - DNA, 25 bp, Homo sapien
cattctaacatgatcaggagatgcc

SEQ ID NO: 186146 - DNA, 25 bp, Homo sapien
gcaaaacctgggcatcgcctggtta

SEQ ID NO: 186147 - DNA, 25 bp, Homo sapien
cattgttgcgtgaagtgtgagtgac

SEQ ID NO: 186148 - DNA, 25 bp, Homo sapien
cttgcattgctgtaggagtggttcc

SEQ ID NO: 186149 - DNA, 25 bp, Homo sapien
tttagcttgccaccttgcattgctg

SEQ ID NO: 186150 - DNA, 25 bp, Homo sapien
cacttctaattttagcttgccacct

SEQ ID NO: 186151 - DNA, 25 bp, Homo sapien
cattgctgtaggagtggttcccaca

SEQ ID NO: 186152 - DNA, 25 bp, Homo sapien
cacaatgacaggatcaggttcacac

SEQ ID NO: 186153 - DNA, 25 bp, Homo sapien
ggaacaaccactactaaccactgca

SEQ ID NO: 186154 - DNA, 25 bp, Homo sapien
agtctggcaaattggattaaaagtc

SEQ ID NO: 186155 - DNA, 25 bp, Homo sapien
gattaaaagtcaaggcccatcagtg

SEQ ID NO: 186156 - DNA, 25 bp, Homo sapien
taaagccttacacaaaggcgtgggc

SEQ ID NO: 186157 - DNA, 25 bp, Homo sapien
taatcctaataagctgcctggtgcg

SEQ ID NO: 186158 - DNA, 25 bp, Homo sapien
gcctggtgcgatgaacgccttttct

SEQ ID NO: 186159 - DNA, 25 bp, Homo sapien
taactgataggcctgacattctgtg

SEQ ID NO: 186160 - DNA, 25 bp, Homo sapien
cagaactagagaagggtgacaagcc

SEQ ID NO: 186161 - DNA, 25 bp, Homo sapien
tcctcctcgcagaactagagaaggg

SEQ ID NO: 186162 - DNA, 25 bp, Homo sapien
ctgcaatgaaagaggactgtcctcc

SEQ ID NO: 186163 - DNA, 25 bp, Homo sapien
gaaagaggactgtcctcctcgcaga

SEQ ID NO: 186164 - DNA, 25 bp, Homo sapien
cagatgattctagtccatcaaagaa

SEQ ID NO: 186165 - DNA, 25 bp, Homo sapien
acatgatatagtgtccaaggaaggg

SEQ ID NO: 186166 - DNA, 25 bp, Homo sapien
aatttcttggattgtggtccaaaag

SEQ ID NO: 186167 - DNA, 25 bp, Homo sapien
gccacgggcattccagatgattcta

SEQ ID NO: 186168 - DNA, 25 bp, Homo sapien
cattatacttaacaccgtgaatctc

SEQ ID NO: 186169 - DNA, 25 bp, Homo sapien
attatacttaacaccgtgaatctct

SEQ ID NO: 186170 - DNA, 25 bp, Homo sapien
tccctgtagttggtgtagagttccc

SEQ ID NO: 186171 - DNA, 25 bp, Homo sapien
tagagttccctagtgggactcagaa

SEQ ID NO: 186172 - DNA, 25 bp, Homo sapien
ggactcagaaggcaccaaggatgct

SEQ ID NO: 186173 - DNA, 25 bp, Homo sapien
gatagctctcaaagctgactgcccc

SEQ ID NO: 186174 - DNA, 25 bp, Homo sapien
gtctgtggcactatcactgcaccat

SEQ ID NO: 186175 - DNA, 25 bp, Homo sapien
ctgtctgtggcactatcactgcacc

SEQ ID NO: 186176 - DNA, 25 bp, Homo sapien
tgtctgtggcactatcactgcacca

SEQ ID NO: 186177 - DNA, 25 bp, Homo sapien
tctgtggcactatcactgcaccatt

SEQ ID NO: 186178 - DNA, 25 bp, Homo sapien
cactcgggaactgaagatgttcttt

SEQ ID NO: 186179 - DNA, 25 bp, Homo sapien
agccactcgggaactgaagatgttc

SEQ ID NO: 186180 - DNA, 25 bp, Homo sapien
gccactcgggaactgaagatgttct

SEQ ID NO: 186181 - DNA, 25 bp, Homo sapien
agagccactcgggaactgaagatgt

SEQ ID NO: 186182 - DNA, 25 bp, Homo sapien
ccttttggacccagtttcatgtctt

SEQ ID NO: 186183 - DNA, 25 bp, Homo sapien
aggatattgtgttctgccctatcgg

SEQ ID NO: 186184 - DNA, 25 bp, Homo sapien
gccaaaagttcacagaagagagcat

SEQ ID NO: 186185 - DNA, 25 bp, Homo sapien
ctttggcagctgaatgcaaaggata

SEQ ID NO: 186186 - DNA, 25 bp, Homo sapien
tcgacttacaattagctatctgaaa

SEQ ID NO: 186187 - DNA, 25 bp, Homo sapien
caaggcatccatcattcgacttaca

SEQ ID NO: 186188 - DNA, 25 bp, Homo sapien
cattaccagccagctcgacaaggca

SEQ ID NO: 186189 - DNA, 25 bp, Homo sapien
tatgaattggccaagttgttgcctc

SEQ ID NO: 186190 - DNA, 25 bp, Homo sapien
tggaaacgactttgcaattcagcgt

SEQ ID NO: 186191 - DNA, 25 bp, Homo sapien
tcttggcagtcatggctaccaaagt

SEQ ID NO: 186192 - DNA, 25 bp, Homo sapien
tcagcgttagcatatctaaggcaag

SEQ ID NO: 186193 - DNA, 25 bp, Homo sapien
ccatcatcagacgttttaggtgaga

SEQ ID NO: 186194 - DNA, 25 bp, Homo sapien
ttttacatcacatgggagcgctcag

SEQ ID NO: 186195 - DNA, 25 bp, Homo sapien
cagggagaagtgcatattcttaagc

SEQ ID NO: 186196 - DNA, 25 bp, Homo sapien
cacttgtcatgtaagggtcttcagg

SEQ ID NO: 186197 - DNA, 25 bp, Homo sapien
cagcagttctatcgtgcatgatgca

SEQ ID NO: 186198 - DNA, 25 bp, Homo sapien
ggctggaaatccaagatcaaggtac

SEQ ID NO: 186199 - DNA, 25 bp, Homo sapien
aggctggaaatccaagatcaaggta

SEQ ID NO: 186200 - DNA, 25 bp, Homo sapien
ggtgtgcatccccaagtctgactaa

SEQ ID NO: 186201 - DNA, 25 bp, Homo sapien
cagccccagggttcaaagtgagaaa

SEQ ID NO: 186202 - DNA, 25 bp, Homo sapien
taatcagcaggttctgtacacccag

SEQ ID NO: 186203 - DNA, 25 bp, Homo sapien
gagagagttagcatctatttgattc

SEQ ID NO: 186204 - DNA, 25 bp, Homo sapien
attatccatctgacatgtgtgcatg

SEQ ID NO: 186205 - DNA, 25 bp, Homo sapien
gtgtgttacttgcacagcagctgtc

SEQ ID NO: 186206 - DNA, 25 bp, Homo sapien
gtgttacttgcacagcagctgtcta

SEQ ID NO: 186207 - DNA, 25 bp, Homo sapien
catctgacatgtgtgcatggagctt

SEQ ID NO: 186208 - DNA, 25 bp, Homo sapien
tgttccagggaaagctagcacagaa

SEQ ID NO: 186209 - DNA, 25 bp, Homo sapien
tctggaggtcttgataaaacattgc

SEQ ID NO: 186210 - DNA, 25 bp, Homo sapien
tcctcctgtgggctaagaacttgtc

SEQ ID NO: 186211 - DNA, 25 bp, Homo sapien
gatgctacctttggcattggcctag

SEQ ID NO: 186212 - DNA, 25 bp, Homo sapien
gtgtcagtattagtctgaaacatca

SEQ ID NO: 186213 - DNA, 25 bp, Homo sapien
cctatacatgttgggtgtcttttgc

SEQ ID NO: 186214 - DNA, 25 bp, Homo sapien
tactatttggaaaatctaactttca

SEQ ID NO: 186215 - DNA, 25 bp, Homo sapien
tgggtgtcttttgcactaggcctac

SEQ ID NO: 186216 - DNA, 25 bp, Homo sapien
ctttgctctcagattcattatagac

SEQ ID NO: 186217 - DNA, 25 bp, Homo sapien
taaaggcaacataactttgtatcag

SEQ ID NO: 186218 - DNA, 25 bp, Homo sapien
caggattgtgtatgttgctggcaag

SEQ ID NO: 186219 - DNA, 25 bp, Homo sapien
ttgtttagtctggacactgccacgt

SEQ ID NO: 186220 - DNA, 25 bp, Homo sapien
tgctggcaaggtctgtagtctgtct

SEQ ID NO: 186221 - DNA, 25 bp, Homo sapien
gttgcaattcgttgtctacgtttac

SEQ ID NO: 186222 - DNA, 25 bp, Homo sapien
gaagcacgttgcaattcgttgtcta

SEQ ID NO: 186223 - DNA, 25 bp, Homo sapien
ttgaagcacgttgcaattcgttgtc

SEQ ID NO: 186224 - DNA, 25 bp, Homo sapien
cacgttgcaattcgttgtctacgtt

SEQ ID NO: 186225 - DNA, 25 bp, Homo sapien
ctctcagtaactggtcatatttctt

SEQ ID NO: 186226 - DNA, 25 bp, Homo sapien
ttcttgaggtaatatggaaaagagc

SEQ ID NO: 186227 - DNA, 25 bp, Homo sapien
ctggtccccacttccattattcttc

SEQ ID NO: 186228 - DNA, 25 bp, Homo sapien
actgcactttgtagcctggtcccca

SEQ ID NO: 186229 - DNA, 25 bp, Homo sapien
cagtcgctgtacatttcttccacaa

SEQ ID NO: 186230 - DNA, 25 bp, Homo sapien
taattatagcagtgggatattcatg

SEQ ID NO: 186231 - DNA, 25 bp, Homo sapien
cagtgggatattcatgacctttgtc

SEQ ID NO: 186232 - DNA, 25 bp, Homo sapien
tacttagtttggctacagatttagt

SEQ ID NO: 186233 - DNA, 25 bp, Homo sapien
catactctgagggaaggttctccca

SEQ ID NO: 186234 - DNA, 25 bp, Homo sapien
gctgatccaagcacaagctttataa

SEQ ID NO: 186235 - DNA, 25 bp, Homo sapien
gcataaatgatatagctaaacaccc

SEQ ID NO: 186236 - DNA, 25 bp, Homo sapien
agagtcatctcagttgcataaatga

SEQ ID NO: 186237 - DNA, 25 bp, Homo sapien
tgttctgagatgaactgtgtctgca

SEQ ID NO: 186238 - DNA, 25 bp, Homo sapien
gaccacatcaccattagatcttcgg

SEQ ID NO: 186239 - DNA, 25 bp, Homo sapien
tgtgtctgcaacagttggtagcacc

SEQ ID NO: 186240 - DNA, 25 bp, Homo sapien
tggtagcacctacacactgtgtgca

SEQ ID NO: 186241 - DNA, 25 bp, Homo sapien
tacatcgaaagtagggttaatttga

SEQ ID NO: 186242 - DNA, 25 bp, Homo sapien
ctacatcgaaagtagggttaatttg

SEQ ID NO: 186243 - DNA, 25 bp, Homo sapien
gcttgcaaagcgtccagttctgtgc

SEQ ID NO: 186244 - DNA, 25 bp, Homo sapien
tgtcttttagctgaaatgcttgcaa

SEQ ID NO: 186245 - DNA, 25 bp, Homo sapien
gctttgtgcctatgcctttgagatg

SEQ ID NO: 186246 - DNA, 25 bp, Homo sapien
tgctggtgtagtaattaaactgtct

SEQ ID NO: 186247 - DNA, 25 bp, Homo sapien
agaaagttatatcgcattatgtgaa

SEQ ID NO: 186248 - DNA, 25 bp, Homo sapien
cttctagaaagttatatcgcattat

SEQ ID NO: 186249 - DNA, 25 bp, Homo sapien
ctagaaagttatatcgcattatgtg

SEQ ID NO: 186250 - DNA, 25 bp, Homo sapien
aaagttatatcgcattatgtgaaca

SEQ ID NO: 186251 - DNA, 25 bp, Homo sapien
gtttcttatagccttctccactata

SEQ ID NO: 186252 - DNA, 25 bp, Homo sapien
tagccttctccactatagttagagg

SEQ ID NO: 186253 - DNA, 25 bp, Homo sapien
gattgacttgctctgacaatgtggt

SEQ ID NO: 186254 - DNA, 25 bp, Homo sapien
cactatagttagaggattgacttgc

SEQ ID NO: 186255 - DNA, 25 bp, Homo sapien
agactgtccactattagcctgaagg

SEQ ID NO: 186256 - DNA, 25 bp, Homo sapien
ctgccaagactgtccactattagcc

SEQ ID NO: 186257 - DNA, 25 bp, Homo sapien
tgtccactattagcctgaaggttta

SEQ ID NO: 186258 - DNA, 25 bp, Homo sapien
cactattagcctgaaggtttatgta

SEQ ID NO: 186259 - DNA, 25 bp, Homo sapien
cccacagcattttgccggtctaatt

SEQ ID NO: 186260 - DNA, 25 bp, Homo sapien
cataagtggagaatgctgccccaca

SEQ ID NO: 186261 - DNA, 25 bp, Homo sapien
gaggcttggcgtagggctgcataag

SEQ ID NO: 186262 - DNA, 25 bp, Homo sapien
tgccccacagcattttgccggtcta

SEQ ID NO: 186263 - DNA, 25 bp, Homo sapien
acagtaaaacacaggctacccgttg

SEQ ID NO: 186264 - DNA, 25 bp, Homo sapien
cccgttgcaccaaccaataaaacat

SEQ ID NO: 186265 - DNA, 25 bp, Homo sapien
ttcaaaagcatccgtttgaaaaagc

SEQ ID NO: 186266 - DNA, 25 bp, Homo sapien
gaaaaagcattgcagttaacagtaa

SEQ ID NO: 186267 - DNA, 25 bp, Homo sapien
gggccagatcttttagcgtcttgcc

SEQ ID NO: 186268 - DNA, 25 bp, Homo sapien
aaccgatgaggtgtgcttttgctga

SEQ ID NO: 186269 - DNA, 25 bp, Homo sapien
tcttgccttccaatgtgatgctgtg

SEQ ID NO: 186270 - DNA, 25 bp, Homo sapien
cgggatcttgcagtgaaatttgaac

SEQ ID NO: 186271 - DNA, 25 bp, Homo sapien
tatttgatcatgtatgctgcagtgc

SEQ ID NO: 186272 - DNA, 25 bp, Homo sapien
aattactgaaagacgaagactctcg

SEQ ID NO: 186273 - DNA, 25 bp, Homo sapien
gacgaagactctcggtttcttccaa

SEQ ID NO: 186274 - DNA, 25 bp, Homo sapien
gcaatacaagacataacatattctg

SEQ ID NO: 186275 - DNA, 25 bp, Homo sapien
tgaagcatgcaaagtgtactccact

SEQ ID NO: 186276 - DNA, 25 bp, Homo sapien
ctttgtgcttcagatgaagtgtgaa

SEQ ID NO: 186277 - DNA, 25 bp, Homo sapien
aagtgacactgcaaagcaagtgtgg

SEQ ID NO: 186278 - DNA, 25 bp, Homo sapien
tgctgcttgaagcatgcaaagtgta

SEQ ID NO: 186279 - DNA, 25 bp, Homo sapien
tgaggggtggagtctccttttgtag

SEQ ID NO: 186280 - DNA, 25 bp, Homo sapien
cctggctcagattggggacctgagt

SEQ ID NO: 186281 - DNA, 25 bp, Homo sapien
gtagaggaaggtggactcccagcct

SEQ ID NO: 186282 - DNA, 25 bp, Homo sapien
ttagggaccgtatcagctgtaagcc

SEQ ID NO: 186283 - DNA, 25 bp, Homo sapien
gcttagaaataggattgagggccag

SEQ ID NO: 186284 - DNA, 25 bp, Homo sapien
ctactgaaggttcacccttcctctg

SEQ ID NO: 186285 - DNA, 25 bp, Homo sapien
cgttgttggaacactacccctcatg

SEQ ID NO: 186286 - DNA, 25 bp, Homo sapien
gttggaacactacccctcatgtagc

SEQ ID NO: 186287 - DNA, 25 bp, Homo sapien
gttgttggaacactacccctcatgt

SEQ ID NO: 186288 - DNA, 25 bp, Homo sapien
tccgttgttggaacactacccctca

SEQ ID NO: 186289 - DNA, 25 bp, Homo sapien
attgctgtctgctctgcgacttggg

SEQ ID NO: 186290 - DNA, 25 bp, Homo sapien
gctctgcgacttgggtcccgctgca

SEQ ID NO: 186291 - DNA, 25 bp, Homo sapien
tgcgacttgggtcccgctgcaacat

SEQ ID NO: 186292 - DNA, 25 bp, Homo sapien
tgtctgctctgcgacttgggtcccg

SEQ ID NO: 186293 - DNA, 25 bp, Homo sapien
cgttggtatgatccagtttgttttc

SEQ ID NO: 186294 - DNA, 25 bp, Homo sapien
ttggtatgatccagtttgttttcac

SEQ ID NO: 186295 - DNA, 25 bp, Homo sapien
tatgatccagtttgttttcaccttt

SEQ ID NO: 186296 - DNA, 25 bp, Homo sapien
ggtatgatccagtttgttttcacct

SEQ ID NO: 186297 - DNA, 25 bp, Homo sapien
cactgagagttaatgctgtatccca

SEQ ID NO: 186298 - DNA, 25 bp, Homo sapien
taaagaatagctaggatggaacagt

SEQ ID NO: 186299 - DNA, 25 bp, Homo sapien
tatcccagcggtttattgaatcaca

SEQ ID NO: 186300 - DNA, 25 bp, Homo sapien
tattcaagttctgacacactgagag

SEQ ID NO: 186301 - DNA, 25 bp, Homo sapien
ggtcgtgagcatctcctccgacatg

SEQ ID NO: 186302 - DNA, 25 bp, Homo sapien
tcgtgagcatctcctccgacatgct

SEQ ID NO: 186303 - DNA, 25 bp, Homo sapien
tcaggtcgtgagcatctcctccgac

SEQ ID NO: 186304 - DNA, 25 bp, Homo sapien
gagcatctcctccgacatgctcatg

SEQ ID NO: 186305 - DNA, 25 bp, Homo sapien
acgtagcattaagaagcagacagtg

SEQ ID NO: 186306 - DNA, 25 bp, Homo sapien
caacgtagcattaagaagcagacag

SEQ ID NO: 186307 - DNA, 25 bp, Homo sapien
ttacaacgtagcattaagaagcaga

SEQ ID NO: 186308 - DNA, 25 bp, Homo sapien
agaagcagacagtgaccgcaggcac

SEQ ID NO: 186309 - DNA, 25 bp, Homo sapien
tgcccctgagcttttgtaacgccgg

SEQ ID NO: 186310 - DNA, 25 bp, Homo sapien
ttgtaacgccggatctgccatttaa

SEQ ID NO: 186311 - DNA, 25 bp, Homo sapien
taggaatgacagttgccaaaatggc

SEQ ID NO: 186312 - DNA, 25 bp, Homo sapien
gcagtctgccagtggagcatttgca

SEQ ID NO: 186313 - DNA, 25 bp, Homo sapien
ttcaaagccctggatgttacagctc

SEQ ID NO: 186314 - DNA, 25 bp, Homo sapien
gtgtccatgattttcaaagccctgg

SEQ ID NO: 186315 - DNA, 25 bp, Homo sapien
ccatgattttcaaagccctggatgt

SEQ ID NO: 186316 - DNA, 25 bp, Homo sapien
gattttcaaagccctggatgttaca

SEQ ID NO: 186317 - DNA, 25 bp, Homo sapien
gatactatgccaagacgaaatgctc

SEQ ID NO: 186318 - DNA, 25 bp, Homo sapien
gattccctgacctatagtgatacta

SEQ ID NO: 186319 - DNA, 25 bp, Homo sapien
gggccacgctgtagaataagttaac

SEQ ID NO: 186320 - DNA, 25 bp, Homo sapien
tgtctgtccatatgtgtgctcttgg

SEQ ID NO: 186321 - DNA, 25 bp, Homo sapien
catcggtggccacagaatgtgtgtg

SEQ ID NO: 186322 - DNA, 25 bp, Homo sapien
ctttgcatctgttcctggagcaatg

SEQ ID NO: 186323 - DNA, 25 bp, Homo sapien
tgtgtgtggtcctgtttgcagttca

SEQ ID NO: 186324 - DNA, 25 bp, Homo sapien
cagtgtaaagctgttaagtgtgccc

SEQ ID NO: 186325 - DNA, 25 bp, Homo sapien
tgctttgcattgaaattccgcaaat

SEQ ID NO: 186326 - DNA, 25 bp, Homo sapien
cgcaaataacatctttgctgctggt

SEQ ID NO: 186327 - DNA, 25 bp, Homo sapien
cagttcagcttttatgccaacatct

SEQ ID NO: 186328 - DNA, 25 bp, Homo sapien
ggtggtctcttgctcagtaattgaa

SEQ ID NO: 186329 - DNA, 25 bp, Homo sapien
tgttccccagtgttaggcttaagta

SEQ ID NO: 186330 - DNA, 25 bp, Homo sapien
taagtaaaataatgtcggcattcat

SEQ ID NO: 186331 - DNA, 25 bp, Homo sapien
gacaagggatatctcaaacctggaa

SEQ ID NO: 186332 - DNA, 25 bp, Homo sapien
acaagggatatctcaaacctggaat

SEQ ID NO: 186333 - DNA, 25 bp, Homo sapien
ccaggaaggtccctgtttctcaaga

SEQ ID NO: 186334 - DNA, 25 bp, Homo sapien
aggtccctgtttctcaagagttctt

SEQ ID NO: 186335 - DNA, 25 bp, Homo sapien
cagtaggagcctgtcttccaggaag

SEQ ID NO: 186336 - DNA, 25 bp, Homo sapien
tcagtaggagcctgtcttccaggaa

SEQ ID NO: 186337 - DNA, 25 bp, Homo sapien
tcattgcccgtgagcccttccaacc

SEQ ID NO: 186338 - DNA, 25 bp, Homo sapien
ttgaggacggaggtcagaagcatgt

SEQ ID NO: 186339 - DNA, 25 bp, Homo sapien
tccaaccacgagtgggcatccatca

SEQ ID NO: 186340 - DNA, 25 bp, Homo sapien
ggaaccaaacgagtacaaaagctca

SEQ ID NO: 186341 - DNA, 25 bp, Homo sapien
aaagggagcgaggatgctagtggca

SEQ ID NO: 186342 - DNA, 25 bp, Homo sapien
ttcccgtcctgatgggaatatgagc

SEQ ID NO: 186343 - DNA, 25 bp, Homo sapien
ctagtggcataactggagggagtac

SEQ ID NO: 186344 - DNA, 25 bp, Homo sapien
cctgtgttggatccctgctcaaagg

SEQ ID NO: 186345 - DNA, 25 bp, Homo sapien
ggcgtctcccacttcggtacagaaa

SEQ ID NO: 186346 - DNA, 25 bp, Homo sapien
tgtacagtctctgggcggaattgtt

SEQ ID NO: 186347 - DNA, 25 bp, Homo sapien
tcttctctagcaggagaagggcgtc

SEQ ID NO: 186348 - DNA, 25 bp, Homo sapien
ggtacagaaatctcacactccgcgt

SEQ ID NO: 186349 - DNA, 25 bp, Homo sapien
gcccagatggggtcgacgacaaaca

SEQ ID NO: 186350 - DNA, 25 bp, Homo sapien
gatggggtcgacgacaaacatgaca

SEQ ID NO: 186351 - DNA, 25 bp, Homo sapien
ccagatggggtcgacgacaaacatg

SEQ ID NO: 186352 - DNA, 25 bp, Homo sapien
tgcccagatggggtcgacgacaaac

SEQ ID NO: 186353 - DNA, 25 bp, Homo sapien
ctgtctgcactcaggcttttgctgg

SEQ ID NO: 186354 - DNA, 25 bp, Homo sapien
ttttgctggttccccgcttctgcct

SEQ ID NO: 186355 - DNA, 25 bp, Homo sapien
cccgcttctgcctctttataaatgc

SEQ ID NO: 186356 - DNA, 25 bp, Homo sapien
taggacatggctgccgctttatcca

SEQ ID NO: 186357 - DNA, 25 bp, Homo sapien
tttgtcctcccatggcttctaatcc

SEQ ID NO: 186358 - DNA, 25 bp, Homo sapien
gtcctcccatggcttctaatcccac

SEQ ID NO: 186359 - DNA, 25 bp, Homo sapien
cccattttgtcctcccatggcttct

SEQ ID NO: 186360 - DNA, 25 bp, Homo sapien
cattttgtcctcccatggcttctaa

SEQ ID NO: 186361 - DNA, 25 bp, Homo sapien
gtgctaatgacttgcagccaaatcc

SEQ ID NO: 186362 - DNA, 25 bp, Homo sapien
gctaatgacttgcagccaaatcctc

SEQ ID NO: 186363 - DNA, 25 bp, Homo sapien
taatgacttgcagccaaatcctcat

SEQ ID NO: 186364 - DNA, 25 bp, Homo sapien
tgtgtgctaatgacttgcagccaaa

SEQ ID NO: 186365 - DNA, 25 bp, Homo sapien
gtgaggaaagctaattgagattctt

SEQ ID NO: 186366 - DNA, 25 bp, Homo sapien
gagattcttcaagggaatccctttc

SEQ ID NO: 186367 - DNA, 25 bp, Homo sapien
atggaaagactcattaagcattcca

SEQ ID NO: 186368 - DNA, 25 bp, Homo sapien
tccttttcttctatgccatggaaag

SEQ ID NO: 186369 - DNA, 25 bp, Homo sapien
gcccccttagatggaggattcagag

SEQ ID NO: 186370 - DNA, 25 bp, Homo sapien
gaacagatccttgcccccttagatg

SEQ ID NO: 186371 - DNA, 25 bp, Homo sapien
tcagaggggagctatcaggggttac

SEQ ID NO: 186372 - DNA, 25 bp, Homo sapien
agtgtgggaacagatccttgccccc

SEQ ID NO: 186373 - DNA, 25 bp, Homo sapien
taagactacatttgcccgtgatgcc

SEQ ID NO: 186374 - DNA, 25 bp, Homo sapien
tactacctgccgaactttaagacta

SEQ ID NO: 186375 - DNA, 25 bp, Homo sapien
aagcctgcctttttgccaggcgttc

SEQ ID NO: 186376 - DNA, 25 bp, Homo sapien
gcgttcctgagatactacctgccga

SEQ ID NO: 186377 - DNA, 25 bp, Homo sapien
tgttcaacaatatcgcaatgttcag

SEQ ID NO: 186378 - DNA, 25 bp, Homo sapien
tgttcagtaaggatgagatggcttc

SEQ ID NO: 186379 - DNA, 25 bp, Homo sapien
cgttttgtttcagaagggtccatgg

SEQ ID NO: 186380 - DNA, 25 bp, Homo sapien
tctggttggtccataaagactggaa

SEQ ID NO: 186381 - DNA, 25 bp, Homo sapien
gctaactttgatttgcagaataaac

SEQ ID NO: 186382 - DNA, 25 bp, Homo sapien
cttgctaactttgatttgcagaata

SEQ ID NO: 186383 - DNA, 25 bp, Homo sapien
tgctaactttgatttgcagaataaa

SEQ ID NO: 186384 - DNA, 25 bp, Homo sapien
taactttgatttgcagaataaacat

SEQ ID NO: 186385 - DNA, 25 bp, Homo sapien
tatgatcaggcagaatttgtttggg

SEQ ID NO: 186386 - DNA, 25 bp, Homo sapien
cagtgatttcattatgatcaggcag

SEQ ID NO: 186387 - DNA, 25 bp, Homo sapien
tgctgacataaagattgtttgcaag

SEQ ID NO: 186388 - DNA, 25 bp, Homo sapien
gccttctcttagcatagtcagaaat

SEQ ID NO: 186389 - DNA, 25 bp, Homo sapien
ccagattactgtgttcttcttggct

SEQ ID NO: 186390 - DNA, 25 bp, Homo sapien
agagtagcccttggtggtagcagac

SEQ ID NO: 186391 - DNA, 25 bp, Homo sapien
tcttggctttagagtagcccttggt

SEQ ID NO: 186392 - DNA, 25 bp, Homo sapien
catcacatttttgttaccggcatca

SEQ ID NO: 186393 - DNA, 25 bp, Homo sapien
gaggagcctcgttgaattcccatga

SEQ ID NO: 186394 - DNA, 25 bp, Homo sapien
ggtaactgctacaggaattgtcagg

SEQ ID NO: 186395 - DNA, 25 bp, Homo sapien
catgaggctgggtaactgctacagg

SEQ ID NO: 186396 - DNA, 25 bp, Homo sapien
ttgtcaggtcggagcagctctttcc

SEQ ID NO: 186397 - DNA, 25 bp, Homo sapien
tgagacttgccatttccatagccgg

SEQ ID NO: 186398 - DNA, 25 bp, Homo sapien
ggacatgcgcttttgtttaataaag

SEQ ID NO: 186399 - DNA, 25 bp, Homo sapien
ggaaaatgacatggctcagccctgt

SEQ ID NO: 186400 - DNA, 25 bp, Homo sapien
gccggtgggctgtattgaatcagac

SEQ ID NO: 186401 - DNA, 25 bp, Homo sapien
cagaacattcagctgtagggccagg

SEQ ID NO: 186402 - DNA, 25 bp, Homo sapien
tctgctcgggttatgtcactagtca

SEQ ID NO: 186403 - DNA, 25 bp, Homo sapien
tgacatccagatgccagtgctttgg

SEQ ID NO: 186404 - DNA, 25 bp, Homo sapien
catatgggtcctgcatctgctcggg

SEQ ID NO: 186405 - DNA, 25 bp, Homo sapien
tcagctggccgccaccagttacatg

SEQ ID NO: 186406 - DNA, 25 bp, Homo sapien
ccttggagcgcttgctccatttctt

SEQ ID NO: 186407 - DNA, 25 bp, Homo sapien
gctggccgccaccagttacatgtat

SEQ ID NO: 186408 - DNA, 25 bp, Homo sapien
catttcttaggtccggagcctcctg

SEQ ID NO: 186409 - DNA, 25 bp, Homo sapien
catttttgaatctttgcgactatag

SEQ ID NO: 186410 - DNA, 25 bp, Homo sapien
tttgaatctttgcgactatagtcaa

SEQ ID NO: 186411 - DNA, 25 bp, Homo sapien
atttttgaatctttgcgactatagt

SEQ ID NO: 186412 - DNA, 25 bp, Homo sapien
ttttgaatctttgcgactatagtca

SEQ ID NO: 186413 - DNA, 25 bp, Homo sapien
tactttgttccctcagtgatgctga

SEQ ID NO: 186414 - DNA, 25 bp, Homo sapien
gatgaaatcgcctgctgtcttgacc

SEQ ID NO: 186415 - DNA, 25 bp, Homo sapien
tgtctatggtaatgtgatgccctga

SEQ ID NO: 186416 - DNA, 25 bp, Homo sapien
cctgatggatgggaaaggttttgtc

SEQ ID NO: 186417 - DNA, 25 bp, Homo sapien
agatgtccctgaaagtatgcaggct

SEQ ID NO: 186418 - DNA, 25 bp, Homo sapien
ggagtgcttgcctcttccggtagaa

SEQ ID NO: 186419 - DNA, 25 bp, Homo sapien
gtagaacaaggtaaggcagatgtcc

SEQ ID NO: 186420 - DNA, 25 bp, Homo sapien
ttaaggaacatggagtgcttgcctc

SEQ ID NO: 186421 - DNA, 25 bp, Homo sapien
cttgaaataatgtgaccactgagaa

SEQ ID NO: 186422 - DNA, 25 bp, Homo sapien
caggaggtgcttctctaactcggat

SEQ ID NO: 186423 - DNA, 25 bp, Homo sapien
ttggatctggacaaactctagccct

SEQ ID NO: 186424 - DNA, 25 bp, Homo sapien
tgaatggtgtgagggacatcatctg

SEQ ID NO: 186425 - DNA, 25 bp, Homo sapien
tctgttattctggctctggacttgg

SEQ ID NO: 186426 - DNA, 25 bp, Homo sapien
ttctgttattctggctctggacttg

SEQ ID NO: 186427 - DNA, 25 bp, Homo sapien
cttctgttattctggctctggactt

SEQ ID NO: 186428 - DNA, 25 bp, Homo sapien
cataggtcggatgcttcatagcctc

SEQ ID NO: 186429 - DNA, 25 bp, Homo sapien
tcaagaaatgcttacagcataggtc

SEQ ID NO: 186430 - DNA, 25 bp, Homo sapien
tccaataattctctcacgtaggtgg

SEQ ID NO: 186431 - DNA, 25 bp, Homo sapien
tcggatgcttcatagcctccaataa

SEQ ID NO: 186432 - DNA, 25 bp, Homo sapien
ctgccgaagttgggtcctttccagt

SEQ ID NO: 186433 - DNA, 25 bp, Homo sapien
tctccaggtgggttgagtatttcat

SEQ ID NO: 186434 - DNA, 25 bp, Homo sapien
gaagttcttgtctaaggactggaag

SEQ ID NO: 186435 - DNA, 25 bp, Homo sapien
agcactggcagcgtgaggattgcta

SEQ ID NO: 186436 - DNA, 25 bp, Homo sapien
gaggattgctagtgtgagcaggcag

SEQ ID NO: 186437 - DNA, 25 bp, Homo sapien
ttatctttgagcgtgtggggcatcg

SEQ ID NO: 186438 - DNA, 25 bp, Homo sapien
gaatttgccattccaactctgtgat

SEQ ID NO: 186439 - DNA, 25 bp, Homo sapien
taacagcctgatccgacatggaccc

SEQ ID NO: 186440 - DNA, 25 bp, Homo sapien
tggtattgcatgacacagggtgtcg

SEQ ID NO: 186441 - DNA, 25 bp, Homo sapien
gggtgtcgttattgtgaatttgcca

SEQ ID NO: 186442 - DNA, 25 bp, Homo sapien
gacaaatgctgcttgtcgcagcaga

SEQ ID NO: 186443 - DNA, 25 bp, Homo sapien
taacacatgaggacagtcagacaaa

SEQ ID NO: 186444 - DNA, 25 bp, Homo sapien
catgaggacagtcagacaaaatgaa

SEQ ID NO: 186445 - DNA, 25 bp, Homo sapien
agccactaataataacacatgagga

SEQ ID NO: 186446 - DNA, 25 bp, Homo sapien
tatacggtgctgtgttttggaacat

SEQ ID NO: 186447 - DNA, 25 bp, Homo sapien
cacagctagacattcacgatgggag

SEQ ID NO: 186448 - DNA, 25 bp, Homo sapien
gactaaggaacagtgagatgcccac

SEQ ID NO: 186449 - DNA, 25 bp, Homo sapien
tatgttccccagtatctagtgccgg

SEQ ID NO: 186450 - DNA, 25 bp, Homo sapien
tcagcatattcccacacatgagata

SEQ ID NO: 186451 - DNA, 25 bp, Homo sapien
gataatcgtactaaatgaacattca

SEQ ID NO: 186452 - DNA, 25 bp, Homo sapien
atgagataatcgtactaaatgaaca

SEQ ID NO: 186453 - DNA, 25 bp, Homo sapien
gatatgcaattatcacacacatttc

SEQ ID NO: 186454 - DNA, 25 bp, Homo sapien
cagtgccatgatcatcttcatcatc

SEQ ID NO: 186455 - DNA, 25 bp, Homo sapien
tcaccatggtcatagtgtgaggcat

SEQ ID NO: 186456 - DNA, 25 bp, Homo sapien
gaggcatgaacttgacctacgttcc

SEQ ID NO: 186457 - DNA, 25 bp, Homo sapien
ctcagagccgagtttctatttggaa

SEQ ID NO: 186458 - DNA, 25 bp, Homo sapien
ctatttggaattgtggccataccca

SEQ ID NO: 186459 - DNA, 25 bp, Homo sapien
aaatgtccgtacagatgtgaatgaa

SEQ ID NO: 186460 - DNA, 25 bp, Homo sapien
caaggatgaaacgttgccgaaaact

SEQ ID NO: 186461 - DNA, 25 bp, Homo sapien
gaaaaatagcagcatacaagcatct

SEQ ID NO: 186462 - DNA, 25 bp, Homo sapien
atcaaagtgcccctgagacaaggat

SEQ ID NO: 186463 - DNA, 25 bp, Homo sapien
atgccagccaggtccaagagaaacc

SEQ ID NO: 186464 - DNA, 25 bp, Homo sapien
cagatgccagccaggtccaagagaa

SEQ ID NO: 186465 - DNA, 25 bp, Homo sapien
gccagccaggtccaagagaaacccc

SEQ ID NO: 186466 - DNA, 25 bp, Homo sapien
cagccaggtccaagagaaaccccaa

SEQ ID NO: 186467 - DNA, 25 bp, Homo sapien
gataataaagaggaaaccctgatat

SEQ ID NO: 186468 - DNA, 25 bp, Homo sapien
ctgataataaagaggaaaccctgat

SEQ ID NO: 186469 - DNA, 25 bp, Homo sapien
taataaagaggaaaccctgatatgt

SEQ ID NO: 186470 - DNA, 25 bp, Homo sapien
tgataataaagaggaaaccctgata

SEQ ID NO: 186471 - DNA, 25 bp, Homo sapien
gaggacaagttctcattggatatac

SEQ ID NO: 186472 - DNA, 25 bp, Homo sapien
agttctcattggatatacttcttac

SEQ ID NO: 186473 - DNA, 25 bp, Homo sapien
tattacatggtgaggacaagttctc

SEQ ID NO: 186474 - DNA, 25 bp, Homo sapien
catggtgaggacaagttctcattgg

SEQ ID NO: 186475 - DNA, 25 bp, Homo sapien
tgttgctaaagcatctaacgtgatg

SEQ ID NO: 186476 - DNA, 25 bp, Homo sapien
cgtgatgtttctcggttctacagca

SEQ ID NO: 186477 - DNA, 25 bp, Homo sapien
ccgtgtggtaggttctgctgatgca

SEQ ID NO: 186478 - DNA, 25 bp, Homo sapien
cacaatttcatgtaaaggacagctg

SEQ ID NO: 186479 - DNA, 25 bp, Homo sapien
tgtgacacaagttgtacagagcatg

SEQ ID NO: 186480 - DNA, 25 bp, Homo sapien
gctgtgacacaagttgtacagagca

SEQ ID NO: 186481 - DNA, 25 bp, Homo sapien
gcagctgtgacacaagttgtacaga

SEQ ID NO: 186482 - DNA, 25 bp, Homo sapien
tgacacaagttgtacagagcatgct

SEQ ID NO: 186483 - DNA, 25 bp, Homo sapien
attgttctttgatttatggtcatag

SEQ ID NO: 186484 - DNA, 25 bp, Homo sapien
tgttctttgatttatggtcataggc

SEQ ID NO: 186485 - DNA, 25 bp, Homo sapien
gttctttgatttatggtcataggct

SEQ ID NO: 186486 - DNA, 25 bp, Homo sapien
ttgttctttgatttatggtcatagg

SEQ ID NO: 186487 - DNA, 25 bp, Homo sapien
ctgtttggcgaggagctgggagctg

SEQ ID NO: 186488 - DNA, 25 bp, Homo sapien
tttggcgaggagctgggagctgttt

SEQ ID NO: 186489 - DNA, 25 bp, Homo sapien
tggcgaggagctgggagctgtttgt

SEQ ID NO: 186490 - DNA, 25 bp, Homo sapien
tgtttggcgaggagctgggagctgt

SEQ ID NO: 186491 - DNA, 25 bp, Homo sapien
cttcctgtatgatgccaagtgcaaa

SEQ ID NO: 186492 - DNA, 25 bp, Homo sapien
agtgcaaagccctttgttcagagaa

SEQ ID NO: 186493 - DNA, 25 bp, Homo sapien
acacctgtgacccaaggggcctggc

SEQ ID NO: 186494 - DNA, 25 bp, Homo sapien
gagaactgcctggtcctgatggaaa

SEQ ID NO: 186495 - DNA, 25 bp, Homo sapien
cagtctctttcacgagagctctgcg

SEQ ID NO: 186496 - DNA, 25 bp, Homo sapien
tagccagttatacgctgtcctccag

SEQ ID NO: 186497 - DNA, 25 bp, Homo sapien
tctctttcacgagagctctgcgcat

SEQ ID NO: 186498 - DNA, 25 bp, Homo sapien
ctttgtgtgatagaattgcacgtag

SEQ ID NO: 186499 - DNA, 25 bp, Homo sapien
ggctgccaatctcattaaagtctct

SEQ ID NO: 186500 - DNA, 25 bp, Homo sapien
ggagttccttagacacaataacttg

SEQ ID NO: 186501 - DNA, 25 bp, Homo sapien
taccctgagccttaatctcatggcc

SEQ ID NO: 186502 - DNA, 25 bp, Homo sapien
tttttgatatcctggctgaggtcca

SEQ ID NO: 186503 - DNA, 25 bp, Homo sapien
gaacctcgagcttgttcagagatgg

SEQ ID NO: 186504 - DNA, 25 bp, Homo sapien
tgccgttcattaatctagaacctcg

SEQ ID NO: 186505 - DNA, 25 bp, Homo sapien
ctcagtgccttgttaatgccgttca

SEQ ID NO: 186506 - DNA, 25 bp, Homo sapien
tgttcagagatggttagatattcca

SEQ ID NO: 186507 - DNA, 25 bp, Homo sapien
tgctttcccgctatttccaactgtt

SEQ ID NO: 186508 - DNA, 25 bp, Homo sapien
tcctctgcgcaactccagtctttgt

SEQ ID NO: 186509 - DNA, 25 bp, Homo sapien
ttctcgcagtgaggcacaggaaaaa

SEQ ID NO: 186510 - DNA, 25 bp, Homo sapien
tccaactgtttatctctggcagcct

SEQ ID NO: 186511 - DNA, 25 bp, Homo sapien
ttatgaaacggtagctttagggtca

SEQ ID NO: 186512 - DNA, 25 bp, Homo sapien
tatgaaacggtagctttagggtcag

SEQ ID NO: 186513 - DNA, 25 bp, Homo sapien
atgaaacggtagctttagggtcaga

SEQ ID NO: 186514 - DNA, 25 bp, Homo sapien
tttctagagaacttcctccaaatag

SEQ ID NO: 186515 - DNA, 25 bp, Homo sapien
tctgcttacccctgttatgaagtag

SEQ ID NO: 186516 - DNA, 25 bp, Homo sapien
ggttcgtttctacacctctgcttac

SEQ ID NO: 186517 - DNA, 25 bp, Homo sapien
agagaacttcctccaaataggttcg

SEQ ID NO: 186518 - DNA, 25 bp, Homo sapien
agttccatgcttcatcatacatgag

SEQ ID NO: 186519 - DNA, 25 bp, Homo sapien
tacatgaggacccaattatatgtag

SEQ ID NO: 186520 - DNA, 25 bp, Homo sapien
gttccatgcttcatcatacatgagg

SEQ ID NO: 186521 - DNA, 25 bp, Homo sapien
aattatatgtagcatggactgagca

SEQ ID NO: 186522 - DNA, 25 bp, Homo sapien
tttccagtgcgagctggagcagtgc

SEQ ID NO: 186523 - DNA, 25 bp, Homo sapien
tctctgctaatgacagctgtggata

SEQ ID NO: 186524 - DNA, 25 bp, Homo sapien
atgctcctccataacggtcttgcaa

SEQ ID NO: 186525 - DNA, 25 bp, Homo sapien
gtttgttctctgctaatgacagctg

SEQ ID NO: 186526 - DNA, 25 bp, Homo sapien
gaaatccattcaacacccgagaaaa

SEQ ID NO: 186527 - DNA, 25 bp, Homo sapien
aagaaatccattcaacacccgagaa

SEQ ID NO: 186528 - DNA, 25 bp, Homo sapien
cattcaacacccgagaaaagttttg

SEQ ID NO: 186529 - DNA, 25 bp, Homo sapien
aaatccattcaacacccgagaaaag

SEQ ID NO: 186530 - DNA, 25 bp, Homo sapien
ttaccaagacgattgtgatgcccaa

SEQ ID NO: 186531 - DNA, 25 bp, Homo sapien
gataagggccatccagttattcctg

SEQ ID NO: 186532 - DNA, 25 bp, Homo sapien
caagtgaggttatctgagtcacaga

SEQ ID NO: 186533 - DNA, 25 bp, Homo sapien
gcccaaattggttgcgttgcttccc

SEQ ID NO: 186534 - DNA, 25 bp, Homo sapien
ggtacacaaaagatgtgccttctga

SEQ ID NO: 186535 - DNA, 25 bp, Homo sapien
taagggtattgtaggttagcagcac

SEQ ID NO: 186536 - DNA, 25 bp, Homo sapien
gtagcatcgaaatcccttgtaaaag

SEQ ID NO: 186537 - DNA, 25 bp, Homo sapien
tattgagacatcttcccaactgagt

SEQ ID NO: 186538 - DNA, 25 bp, Homo sapien
cttgctgcatttctggacgggttac

SEQ ID NO: 186539 - DNA, 25 bp, Homo sapien
atctagccctttggaagcctcttgc

SEQ ID NO: 186540 - DNA, 25 bp, Homo sapien
tggctggaatatccattatgatcca

SEQ ID NO: 186541 - DNA, 25 bp, Homo sapien
ttatgatccatcttacctatttgat

SEQ ID NO: 186542 - DNA, 25 bp, Homo sapien
cttgtgatgtcgtttacagcaagag

SEQ ID NO: 186543 - DNA, 25 bp, Homo sapien
tgtcgtttacagcaagagcccacat

SEQ ID NO: 186544 - DNA, 25 bp, Homo sapien
tgtgatgtcgtttacagcaagagcc

SEQ ID NO: 186545 - DNA, 25 bp, Homo sapien
tgatgtcgtttacagcaagagccca

SEQ ID NO: 186546 - DNA, 25 bp, Homo sapien
gcagaatttagtgtaaacagatcag

SEQ ID NO: 186547 - DNA, 25 bp, Homo sapien
cataacaaacacaggctagtttgca

SEQ ID NO: 186548 - DNA, 25 bp, Homo sapien
tcacataacaaacacaggctagttt

SEQ ID NO: 186549 - DNA, 25 bp, Homo sapien
cagaatttagtgtaaacagatcagc

SEQ ID NO: 186550 - DNA, 25 bp, Homo sapien
caagttcgaaaagactgatggcatc

SEQ ID NO: 186551 - DNA, 25 bp, Homo sapien
caaaagatacgaatggaaatgtcac

SEQ ID NO: 186552 - DNA, 25 bp, Homo sapien
caggtattataaaagactggcagag

SEQ ID NO: 186553 - DNA, 25 bp, Homo sapien
tattacatcgtataaggcaaaggat

SEQ ID NO: 186554 - DNA, 25 bp, Homo sapien
gggatgtgcatacctgcccactcac

SEQ ID NO: 186555 - DNA, 25 bp, Homo sapien
cactgtagtggattggtttagcttt

SEQ ID NO: 186556 - DNA, 25 bp, Homo sapien
ttaccagctaaaccacagactgtgg

SEQ ID NO: 186557 - DNA, 25 bp, Homo sapien
tctgctgtagtttccaatttaccag

SEQ ID NO: 186558 - DNA, 25 bp, Homo sapien
cagccagcagccttgaagtcactca

SEQ ID NO: 186559 - DNA, 25 bp, Homo sapien
cactgtgaccactgcttgccaagca

SEQ ID NO: 186560 - DNA, 25 bp, Homo sapien
tcacagacactgtgaccactgcttg

SEQ ID NO: 186561 - DNA, 25 bp, Homo sapien
ttgccaagcatgaggcagccagcag

SEQ ID NO: 186562 - DNA, 25 bp, Homo sapien
ggtagacagaactggacttgggaaa

SEQ ID NO: 186563 - DNA, 25 bp, Homo sapien
tgatgatgaacgtgcaggccagtgc

SEQ ID NO: 186564 - DNA, 25 bp, Homo sapien
gcctcagtgcgtgggtgttatttga

SEQ ID NO: 186565 - DNA, 25 bp, Homo sapien
gatgaaaggctttagcatcaggtgt

SEQ ID NO: 186566 - DNA, 25 bp, Homo sapien
tcttcatagacaacttcattcccat

SEQ ID NO: 186567 - DNA, 25 bp, Homo sapien
ttcttcatagacaacttcattccca

SEQ ID NO: 186568 - DNA, 25 bp, Homo sapien
cttcttcatagacaacttcattccc

SEQ ID NO: 186569 - DNA, 25 bp, Homo sapien
caaagtctggtggtcttttgactgc

SEQ ID NO: 186570 - DNA, 25 bp, Homo sapien
catgttttccaaatcgagcactcca

SEQ ID NO: 186571 - DNA, 25 bp, Homo sapien
tccaaatcgagcactccacgcgttt

SEQ ID NO: 186572 - DNA, 25 bp, Homo sapien
ccaactcatgggaatttcttcaaag

SEQ ID NO: 186573 - DNA, 25 bp, Homo sapien
ccttgaggcaaaaggagcctgtgct

SEQ ID NO: 186574 - DNA, 25 bp, Homo sapien
gcaatgaatatttgtgctctagaat

SEQ ID NO: 186575 - DNA, 25 bp, Homo sapien
cacagcagatgtagcattgcaatga

SEQ ID NO: 186576 - DNA, 25 bp, Homo sapien
gctctagaataactattggaatcct

SEQ ID NO: 186577 - DNA, 25 bp, Homo sapien
gcagaccctggccaaaatgtgccat

SEQ ID NO: 186578 - DNA, 25 bp, Homo sapien
caaaatgtgccattgccttcttctc

SEQ ID NO: 186579 - DNA, 25 bp, Homo sapien
cagtagtcggcatcttgacttatcc

SEQ ID NO: 186580 - DNA, 25 bp, Homo sapien
tagtcggcatcttgacttatccagg

SEQ ID NO: 186581 - DNA, 25 bp, Homo sapien
gcattcagagctgttcatgacagct

SEQ ID NO: 186582 - DNA, 25 bp, Homo sapien
tggcattcagagctgttcatgacag

SEQ ID NO: 186583 - DNA, 25 bp, Homo sapien
ctgatgatggcattcagagctgttc

SEQ ID NO: 186584 - DNA, 25 bp, Homo sapien
atgatggcattcagagctgttcatg

SEQ ID NO: 186585 - DNA, 25 bp, Homo sapien
gactgcatgctgtccgagtgcttga

SEQ ID NO: 186586 - DNA, 25 bp, Homo sapien
tgtgcatgtcaaggttcctcccggc

SEQ ID NO: 186587 - DNA, 25 bp, Homo sapien
ttgaaaagcaaatagcgacctggtg

SEQ ID NO: 186588 - DNA, 25 bp, Homo sapien
taatctcagcaatcccacgggtgac

SEQ ID NO: 186589 - DNA, 25 bp, Homo sapien
ttgatagaatccacagggcttcttc

SEQ ID NO: 186590 - DNA, 25 bp, Homo sapien
gcttcttcaggaccgttggtgtttg

SEQ ID NO: 186591 - DNA, 25 bp, Homo sapien
tccacagggtaataatcgacaattt

SEQ ID NO: 186592 - DNA, 25 bp, Homo sapien
tgtgctatttggctttgaatcccag

SEQ ID NO: 186593 - DNA, 25 bp, Homo sapien
ttccttgcttttgacaagatttgct

SEQ ID NO: 186594 - DNA, 25 bp, Homo sapien
ttctgagtgaacaagacgtgcttcc

SEQ ID NO: 186595 - DNA, 25 bp, Homo sapien
gtctcatgcgacaaaaacccaacac

SEQ ID NO: 186596 - DNA, 25 bp, Homo sapien
cagtctcatgcgacaaaaacccaac

SEQ ID NO: 186597 - DNA, 25 bp, Homo sapien
ggatggttgtagcaccagattccct

SEQ ID NO: 186598 - DNA, 25 bp, Homo sapien
cagattccctttgcatttggcgtca

SEQ ID NO: 186599 - DNA, 25 bp, Homo sapien
tcagttccaccacgattctcagaga

SEQ ID NO: 186600 - DNA, 25 bp, Homo sapien
tatagtaccatatgaactcgtagag

SEQ ID NO: 186601 - DNA, 25 bp, Homo sapien
ttatctttagcagccaggtacagcc

SEQ ID NO: 186602 - DNA, 25 bp, Homo sapien
tttagcagccaggtacagcccatca

SEQ ID NO: 186603 - DNA, 25 bp, Homo sapien
gcagccaggtacagcccatcacgga

SEQ ID NO: 186604 - DNA, 25 bp, Homo sapien
gttttatctttagcagccaggtaca

SEQ ID NO: 186605 - DNA, 25 bp, Homo sapien
ccggggcaatgcagaaccaggtgtg

SEQ ID NO: 186606 - DNA, 25 bp, Homo sapien
tagtttctgagatccttcacaacgg

SEQ ID NO: 186607 - DNA, 25 bp, Homo sapien
tttatatttgtgaccgctttgtagc

SEQ ID NO: 186608 - DNA, 25 bp, Homo sapien
gagtcccagccaaaggtgttgaata

SEQ ID NO: 186609 - DNA, 25 bp, Homo sapien
ttgatgaacacaagcgaaaacatgt

SEQ ID NO: 186610 - DNA, 25 bp, Homo sapien
ctataaagcagatgcactttgcaaa

SEQ ID NO: 186611 - DNA, 25 bp, Homo sapien
gcaaattagaagtggaatccaaggt

SEQ ID NO: 186612 - DNA, 25 bp, Homo sapien
agcagatgcactttgcaaattagaa

SEQ ID NO: 186613 - DNA, 25 bp, Homo sapien
tgcaaattagaagtggaatccaagg

SEQ ID NO: 186614 - DNA, 25 bp, Homo sapien
gatccaaatatccttcggcagtcat

SEQ ID NO: 186615 - DNA, 25 bp, Homo sapien
aagcaggtgtgatatgaacatattg

SEQ ID NO: 186616 - DNA, 25 bp, Homo sapien
cagtcatattctgggttggcaccac

SEQ ID NO: 186617 - DNA, 25 bp, Homo sapien
atgtctccttcttttgccactgatg

SEQ ID NO: 186618 - DNA, 25 bp, Homo sapien
gagtcaaagcattgcttaataagag

SEQ ID NO: 186619 - DNA, 25 bp, Homo sapien
ttagtcagcgttggatgagtagccc

SEQ ID NO: 186620 - DNA, 25 bp, Homo sapien
tacattttgtgtgctcagctcatac

SEQ ID NO: 186621 - DNA, 25 bp, Homo sapien
cataccagtgaccttgagtcaaagc

SEQ ID NO: 186622 - DNA, 25 bp, Homo sapien
gctgaccttacactagtttttacac

SEQ ID NO: 186623 - DNA, 25 bp, Homo sapien
ggagctgaccttacactagttttta

SEQ ID NO: 186624 - DNA, 25 bp, Homo sapien
tagatggagctgaccttacactagt

SEQ ID NO: 186625 - DNA, 25 bp, Homo sapien
atgtagatggagctgaccttacact

SEQ ID NO: 186626 - DNA, 25 bp, Homo sapien
gaaatgatgaaagagtcctgtgcac

SEQ ID NO: 186627 - DNA, 25 bp, Homo sapien
ccttgacttagtctcgctgcctgtt

SEQ ID NO: 186628 - DNA, 25 bp, Homo sapien
cactgatgctctttagttctcagcc

SEQ ID NO: 186629 - DNA, 25 bp, Homo sapien
ggatccatgggaccccagttccaga

SEQ ID NO: 186630 - DNA, 25 bp, Homo sapien
gagtacccctgctctgtaaaatatt

SEQ ID NO: 186631 - DNA, 25 bp, Homo sapien
agagagttgcgggatttttcagcct

SEQ ID NO: 186632 - DNA, 25 bp, Homo sapien
cttcacagaaggaccgactgcctct

SEQ ID NO: 186633 - DNA, 25 bp, Homo sapien
gaccgactgcctcttggcagtttgg

SEQ ID NO: 186634 - DNA, 25 bp, Homo sapien
tttcagctgagctggccggcactgg

SEQ ID NO: 186635 - DNA, 25 bp, Homo sapien
ccacctagaggtgatcagctgagaa

SEQ ID NO: 186636 - DNA, 25 bp, Homo sapien
aagtattgtagccatgagtttcagc

SEQ ID NO: 186637 - DNA, 25 bp, Homo sapien
tcattactgccttgaattggaattt

SEQ ID NO: 186638 - DNA, 25 bp, Homo sapien
ggtcccctgtgcaccataataaata

SEQ ID NO: 186639 - DNA, 25 bp, Homo sapien
taaactaatgatctggttaaggtcc

SEQ ID NO: 186640 - DNA, 25 bp, Homo sapien
gaagtcgtattttatgcctagttgg

SEQ ID NO: 186641 - DNA, 25 bp, Homo sapien
taggtattgtactcatgggaagtcg

SEQ ID NO: 186642 - DNA, 25 bp, Homo sapien
tccattcacatttgcgctcaaagtg

SEQ ID NO: 186643 - DNA, 25 bp, Homo sapien
gacactgtgttcacctctccagtca

SEQ ID NO: 186644 - DNA, 25 bp, Homo sapien
tgttgtcttttctaccctccacagg

SEQ ID NO: 186645 - DNA, 25 bp, Homo sapien
cagtcacatcgacgtccaagcagat

SEQ ID NO: 186646 - DNA, 25 bp, Homo sapien
atggcagttttagagttagtgatga

SEQ ID NO: 186647 - DNA, 25 bp, Homo sapien
gtgccagcaacactatttttcatgg

SEQ ID NO: 186648 - DNA, 25 bp, Homo sapien
cagcaacactatttttcatggcatt

SEQ ID NO: 186649 - DNA, 25 bp, Homo sapien
tttttctcccaacataccagctgtg

SEQ ID NO: 186650 - DNA, 25 bp, Homo sapien
tgtggtgatttatgatggttttgaa

SEQ ID NO: 186651 - DNA, 25 bp, Homo sapien
tgtaaactggcaattgggtatagac

SEQ ID NO: 186652 - DNA, 25 bp, Homo sapien
tatgtcttgttgaggcaaagctgtc

SEQ ID NO: 186653 - DNA, 25 bp, Homo sapien
cgaagatatccatttatctcatata

SEQ ID NO: 186654 - DNA, 25 bp, Homo sapien
tcaggatctttctggcagtgctttc

SEQ ID NO: 186655 - DNA, 25 bp, Homo sapien
tgtcaggatctttctggcagtgctt

SEQ ID NO: 186656 - DNA, 25 bp, Homo sapien
gtcaggatctttctggcagtgcttt

SEQ ID NO: 186657 - DNA, 25 bp, Homo sapien
tttgtgaagttccaagaaccttggc

SEQ ID NO: 186658 - DNA, 25 bp, Homo sapien
ggaggattcctcatataacgtacaa

SEQ ID NO: 186659 - DNA, 25 bp, Homo sapien
taagatccatgggaatccacactgg

SEQ ID NO: 186660 - DNA, 25 bp, Homo sapien
cacactgggtcacagcattgttgag

SEQ ID NO: 186661 - DNA, 25 bp, Homo sapien
cacgcacataactttgcacagtttc

SEQ ID NO: 186662 - DNA, 25 bp, Homo sapien
ttcaaggtaggcagctgattctctc

SEQ ID NO: 186663 - DNA, 25 bp, Homo sapien
ggtttttcacgcacataactttgca

SEQ ID NO: 186664 - DNA, 25 bp, Homo sapien
tcctgaaggtttttcacgcacataa

SEQ ID NO: 186665 - DNA, 25 bp, Homo sapien
cattgtatgatccttacttctcctt

SEQ ID NO: 186666 - DNA, 25 bp, Homo sapien
tgatctttccgtgctgtgagttccg

SEQ ID NO: 186667 - DNA, 25 bp, Homo sapien
ggagctgggctttaccccaaatcag

SEQ ID NO: 186668 - DNA, 25 bp, Homo sapien
tagctgattctatgttggtgacatg

SEQ ID NO: 186669 - DNA, 25 bp, Homo sapien
tgcagaatctactccacaaaggagc

SEQ ID NO: 186670 - DNA, 25 bp, Homo sapien
tgaggaagttgaagccacgtaactg

SEQ ID NO: 186671 - DNA, 25 bp, Homo sapien
agcaattatttacagtggtaatgga

SEQ ID NO: 186672 - DNA, 25 bp, Homo sapien
actgttagagcaagcatttcaaagc

SEQ ID NO: 186673 - DNA, 25 bp, Homo sapien
cagaactagaaatgtccagcctcaa

SEQ ID NO: 186674 - DNA, 25 bp, Homo sapien
caaggcccatctaatgtaatacatc

SEQ ID NO: 186675 - DNA, 25 bp, Homo sapien
atacaccaaagccttggcgtagcat

SEQ ID NO: 186676 - DNA, 25 bp, Homo sapien
gtgtccaaggcccatctaatgtaat

SEQ ID NO: 186677 - DNA, 25 bp, Homo sapien
ggttttgttctactcagacttgtgt

SEQ ID NO: 186678 - DNA, 25 bp, Homo sapien
aagctctcggagtttgccatttgag

SEQ ID NO: 186679 - DNA, 25 bp, Homo sapien
tctgtgggttaagcagtaagctctc

SEQ ID NO: 186680 - DNA, 25 bp, Homo sapien
ccatttgagagctcctttgtgagtt

SEQ ID NO: 186681 - DNA, 25 bp, Homo sapien
tttttggtctttgctgtcactggtt

SEQ ID NO: 186682 - DNA, 25 bp, Homo sapien
cctttgtttgtggtctttggtgcct

SEQ ID NO: 186683 - DNA, 25 bp, Homo sapien
tttgtttgtggtctttggtgcctgt

SEQ ID NO: 186684 - DNA, 25 bp, Homo sapien
tggtgcctgtgagctagcagggcag

SEQ ID NO: 186685 - DNA, 25 bp, Homo sapien
tgcctttgtttgtggtctttggtgc

SEQ ID NO: 186686 - DNA, 25 bp, Homo sapien
tctaattgaaagactgtaaattcaa

SEQ ID NO: 186687 - DNA, 25 bp, Homo sapien
ttctaattgaaagactgtaaattca

SEQ ID NO: 186688 - DNA, 25 bp, Homo sapien
tatgtcccgaatgtttttaaggcca

SEQ ID NO: 186689 - DNA, 25 bp, Homo sapien
gctgcatggctaacccattggttgt

SEQ ID NO: 186690 - DNA, 25 bp, Homo sapien
ggaaacagtagagtacttgcctgaa

SEQ ID NO: 186691 - DNA, 25 bp, Homo sapien
gctattatacttacgctatgtcccg

SEQ ID NO: 186692 - DNA, 25 bp, Homo sapien
tggacgtgtcccactggagggatct

SEQ ID NO: 186693 - DNA, 25 bp, Homo sapien
gccagattccgtgcagtttctccag

SEQ ID NO: 186694 - DNA, 25 bp, Homo sapien
ggagggatctgctcatgaaacacaa

SEQ ID NO: 186695 - DNA, 25 bp, Homo sapien
tctgtgtcggccaacactgggccag

SEQ ID NO: 186696 - DNA, 25 bp, Homo sapien
cttgggacccatgggaaacactgcc

SEQ ID NO: 186697 - DNA, 25 bp, Homo sapien
ttcttgggacccatgggaaacactg

SEQ ID NO: 186698 - DNA, 25 bp, Homo sapien
gggacccatgggaaacactgcccat

SEQ ID NO: 186699 - DNA, 25 bp, Homo sapien
tgggacccatgggaaacactgccca

SEQ ID NO: 186700 - DNA, 25 bp, Homo sapien
cataaagcatgatgccctgaagcat

SEQ ID NO: 186701 - DNA, 25 bp, Homo sapien
gccctgaagcatattagatctgttt

SEQ ID NO: 186702 - DNA, 25 bp, Homo sapien
tgcataaagcatgatgccctgaagc

SEQ ID NO: 186703 - DNA, 25 bp, Homo sapien
gaagcatattagatctgtttatctc

SEQ ID NO: 186704 - DNA, 25 bp, Homo sapien
ttgtcaatatgtatccaggctcctg

SEQ ID NO: 186705 - DNA, 25 bp, Homo sapien
tgtgggatacagatcagtaactgaa

SEQ ID NO: 186706 - DNA, 25 bp, Homo sapien
tttacagggcttgtcttctattttc

SEQ ID NO: 186707 - DNA, 25 bp, Homo sapien
aggctcctgtgggatacagatcagt

SEQ ID NO: 186708 - DNA, 25 bp, Homo sapien
gatcagctcctgctacaagatgtag

SEQ ID NO: 186709 - DNA, 25 bp, Homo sapien
gactttgtgtgacaggttaggcatt

SEQ ID NO: 186710 - DNA, 25 bp, Homo sapien
ccacattagtgtgttagtgaacagg

SEQ ID NO: 186711 - DNA, 25 bp, Homo sapien
gcctttctcaagcacattactgtca

SEQ ID NO: 186712 - DNA, 25 bp, Homo sapien
actttcccgttgcttagtagttgtg

SEQ ID NO: 186713 - DNA, 25 bp, Homo sapien
gaaacacccactggtagcagcttga

SEQ ID NO: 186714 - DNA, 25 bp, Homo sapien
gcagcttgactctgacactgtgtat

SEQ ID NO: 186715 - DNA, 25 bp, Homo sapien
caaaggcgatctttacgatactcag

SEQ ID NO: 186716 - DNA, 25 bp, Homo sapien
ttcagcccagtgagaactaggtggc

SEQ ID NO: 186717 - DNA, 25 bp, Homo sapien
tttcagcccagtgagaactaggtgg

SEQ ID NO: 186718 - DNA, 25 bp, Homo sapien
tctgccttctttaccgcctcctgcc

SEQ ID NO: 186719 - DNA, 25 bp, Homo sapien
gtttcagcccagtgagaactaggtg

SEQ ID NO: 186720 - DNA, 25 bp, Homo sapien
tctttctgggttgccctgtctcctt

SEQ ID NO: 186721 - DNA, 25 bp, Homo sapien
cagaagtaggaagtcatatggaatt

SEQ ID NO: 186722 - DNA, 25 bp, Homo sapien
atcagaaaccagtctctttctgggt

SEQ ID NO: 186723 - DNA, 25 bp, Homo sapien
gtcctcagaagtaggaagtcatatg

SEQ ID NO: 186724 - DNA, 25 bp, Homo sapien
aactgctataaattaagtctaacct

SEQ ID NO: 186725 - DNA, 25 bp, Homo sapien
tgtgaaaggaacaacagtagattgg

SEQ ID NO: 186726 - DNA, 25 bp, Homo sapien
gaggaccagtgccaataaatgtgaa

SEQ ID NO: 186727 - DNA, 25 bp, Homo sapien
gttagttcaagtctctgaggaccag

SEQ ID NO: 186728 - DNA, 25 bp, Homo sapien
actgcacggctgactgacagttctg

SEQ ID NO: 186729 - DNA, 25 bp, Homo sapien
tagtaaaatagaactgcacggctga

SEQ ID NO: 186730 - DNA, 25 bp, Homo sapien
aagttttgatctctctgcttttgat

SEQ ID NO: 186731 - DNA, 25 bp, Homo sapien
gacagttctgatctaaagcatttac

SEQ ID NO: 186732 - DNA, 25 bp, Homo sapien
aggtaaattgattactactgctctt

SEQ ID NO: 186733 - DNA, 25 bp, Homo sapien
gctcttagcacccatcagtcattta

SEQ ID NO: 186734 - DNA, 25 bp, Homo sapien
tatttttagtgaactcaaggattgc

SEQ ID NO: 186735 - DNA, 25 bp, Homo sapien
tttttagtgaactcaaggattgcac

SEQ ID NO: 186736 - DNA, 25 bp, Homo sapien
caaacgcggtgtgcacatcaaatca

SEQ ID NO: 186737 - DNA, 25 bp, Homo sapien
tcaggatataaggtaagccggttcc

SEQ ID NO: 186738 - DNA, 25 bp, Homo sapien
tgaaatctactctgaccaaacgcgg

SEQ ID NO: 186739 - DNA, 25 bp, Homo sapien
tgagcgttcctttttcatccgaatg

SEQ ID NO: 186740 - DNA, 25 bp, Homo sapien
tgatcttgaggagcccataggattc

SEQ ID NO: 186741 - DNA, 25 bp, Homo sapien
taatgaatacatgtgatcttgagga

SEQ ID NO: 186742 - DNA, 25 bp, Homo sapien
cactaaaaaccccaatatagtgtct

SEQ ID NO: 186743 - DNA, 25 bp, Homo sapien
cagctgctttaggtccatataatga

SEQ ID NO: 186744 - DNA, 25 bp, Homo sapien
taatgtgagttgctgttgcagtgtc

SEQ ID NO: 186745 - DNA, 25 bp, Homo sapien
aggaaagtcgccctctctccagtga

SEQ ID NO: 186746 - DNA, 25 bp, Homo sapien
aatgtgagttgctgttgcagtgtct

SEQ ID NO: 186747 - DNA, 25 bp, Homo sapien
agtcgccctctctccagtgaagttt

SEQ ID NO: 186748 - DNA, 25 bp, Homo sapien
caagagaaattaccgagaattagaa

SEQ ID NO: 186749 - DNA, 25 bp, Homo sapien
tctcattctgcaagagaaattaccg

SEQ ID NO: 186750 - DNA, 25 bp, Homo sapien
tacaaaatatggttgcacacagcaa

SEQ ID NO: 186751 - DNA, 25 bp, Homo sapien
gagacatgtattatcactctcattc

SEQ ID NO: 186752 - DNA, 25 bp, Homo sapien
aacagagtccttgatccagagagca

SEQ ID NO: 186753 - DNA, 25 bp, Homo sapien
catgtggtcaatactgattgtgtac

SEQ ID NO: 186754 - DNA, 25 bp, Homo sapien
gacaaagatggataaaacagagtcc

SEQ ID NO: 186755 - DNA, 25 bp, Homo sapien
tctagagttaggcaggcacacaaag

SEQ ID NO: 186756 - DNA, 25 bp, Homo sapien
catttgtgcggcagggcatttatta

SEQ ID NO: 186757 - DNA, 25 bp, Homo sapien
taactgcatttgtgcggcagggcat

SEQ ID NO: 186758 - DNA, 25 bp, Homo sapien
tgtaactgcatttgtgcggcagggc

SEQ ID NO: 186759 - DNA, 25 bp, Homo sapien
tgctataaattccatcactgatttt

SEQ ID NO: 186760 - DNA, 25 bp, Homo sapien
gagggagaccatggcttcaatggaa

SEQ ID NO: 186761 - DNA, 25 bp, Homo sapien
tatggcggtagcatggtcagaggga

SEQ ID NO: 186762 - DNA, 25 bp, Homo sapien
tattttatgacagtccgggaatctg

SEQ ID NO: 186763 - DNA, 25 bp, Homo sapien
gacagtccgggaatctgcatcctca

SEQ ID NO: 186764 - DNA, 25 bp, Homo sapien
gaatttccagaaagacagaggtaca

SEQ ID NO: 186765 - DNA, 25 bp, Homo sapien
acagaggtacaaacaggtaatccat

SEQ ID NO: 186766 - DNA, 25 bp, Homo sapien
gaaagacagaggtacaaacaggtaa

SEQ ID NO: 186767 - DNA, 25 bp, Homo sapien
tccagaaagacagaggtacaaacag

SEQ ID NO: 186768 - DNA, 25 bp, Homo sapien
aatctgcactagaacagtctttgtg

SEQ ID NO: 186769 - DNA, 25 bp, Homo sapien
tctgcactagaacagtctttgtgcc

SEQ ID NO: 186770 - DNA, 25 bp, Homo sapien
gcaatctgcactagaacagtctttg

SEQ ID NO: 186771 - DNA, 25 bp, Homo sapien
tgcagcaatctgcactagaacagtc

SEQ ID NO: 186772 - DNA, 25 bp, Homo sapien
ggaccacctctcctgttgcatcctc

SEQ ID NO: 186773 - DNA, 25 bp, Homo sapien
tacatagctgatgacagcattccag

SEQ ID NO: 186774 - DNA, 25 bp, Homo sapien
ccctggaggaggtctgcattgtcac

SEQ ID NO: 186775 - DNA, 25 bp, Homo sapien
cattccaggaccacctctcctgttg

SEQ ID NO: 186776 - DNA, 25 bp, Homo sapien
ggcttatgacaaagcctatagtttt

SEQ ID NO: 186777 - DNA, 25 bp, Homo sapien
ctgtggcttatgacaaagcctatag

SEQ ID NO: 186778 - DNA, 25 bp, Homo sapien
gacaaagcctatagttttagttgta

SEQ ID NO: 186779 - DNA, 25 bp, Homo sapien
tatgacaaagcctatagttttagtt

SEQ ID NO: 186780 - DNA, 25 bp, Homo sapien
catttagtctattgtcgtcatcgtc

SEQ ID NO: 186781 - DNA, 25 bp, Homo sapien
caggtcccattgccaatttccattg

SEQ ID NO: 186782 - DNA, 25 bp, Homo sapien
gccaatttccattgattgtactgcc

SEQ ID NO: 186783 - DNA, 25 bp, Homo sapien
caatttccattgattgtactgccat

SEQ ID NO: 186784 - DNA, 25 bp, Homo sapien
aatttccattgattgtactgccatc

SEQ ID NO: 186785 - DNA, 25 bp, Homo sapien
gaaggatggtactctcccagtgagg

SEQ ID NO: 186786 - DNA, 25 bp, Homo sapien
cagccaaatcatgggtctcgtggtt

SEQ ID NO: 186787 - DNA, 25 bp, Homo sapien
gactgccatatgttcgtcactcgag

SEQ ID NO: 186788 - DNA, 25 bp, Homo sapien
tctcgtggttgttgcgcatgccttg

SEQ ID NO: 186789 - DNA, 25 bp, Homo sapien
tatcgtagggaagagatgctaccac

SEQ ID NO: 186790 - DNA, 25 bp, Homo sapien
gaataaccccggctggtgtcagcaa

SEQ ID NO: 186791 - DNA, 25 bp, Homo sapien
catccatgctgaagacgtggagggc

SEQ ID NO: 186792 - DNA, 25 bp, Homo sapien
gatctgacccctgtagatatcgtag

SEQ ID NO: 186793 - DNA, 25 bp, Homo sapien
agaacttttggtggggcatatcgac

SEQ ID NO: 186794 - DNA, 25 bp, Homo sapien
cttttggtggggcatatcgactaga

SEQ ID NO: 186795 - DNA, 25 bp, Homo sapien
gtggggcatatcgactagaatgcac

SEQ ID NO: 186796 - DNA, 25 bp, Homo sapien
gcttcctagaacttttggtggggca

SEQ ID NO: 186797 - DNA, 25 bp, Homo sapien
ggtgaatggcgccacagatgcgtcc

SEQ ID NO: 186798 - DNA, 25 bp, Homo sapien
tggcgccacagatgcgtcctcctat

SEQ ID NO: 186799 - DNA, 25 bp, Homo sapien
actgacgaaggtacctccaggaggg

SEQ ID NO: 186800 - DNA, 25 bp, Homo sapien
gttctccgcggccactgacgaaggt

SEQ ID NO: 186801 - DNA, 25 bp, Homo sapien
tatcaagtaactcacgtggtgctta

SEQ ID NO: 186802 - DNA, 25 bp, Homo sapien
tcaaactggcaccaaggtggctttt

SEQ ID NO: 186803 - DNA, 25 bp, Homo sapien
tcttcttgagctgattaggaccaca

SEQ ID NO: 186804 - DNA, 25 bp, Homo sapien
caacagccactggattgaagagaat

SEQ ID NO: 186805 - DNA, 25 bp, Homo sapien
gtacctggtgtggaatttcatggca

SEQ ID NO: 186806 - DNA, 25 bp, Homo sapien
cagtgccaccatagctattaatgcc

SEQ ID NO: 186807 - DNA, 25 bp, Homo sapien
tattatcttttgacagtacctggtg

SEQ ID NO: 186808 - DNA, 25 bp, Homo sapien
tagccgacatgttgtgaatattatc

SEQ ID NO: 186809 - DNA, 25 bp, Homo sapien
caagacgcccatggagatgctctac

SEQ ID NO: 186810 - DNA, 25 bp, Homo sapien
aacgcgcacgctgttaacttcgtgg

SEQ ID NO: 186811 - DNA, 25 bp, Homo sapien
ttgcaggcgggcaacgtcgtgctcc

SEQ ID NO: 186812 - DNA, 25 bp, Homo sapien
tcaacatgtcaggaccgttcggcgg

SEQ ID NO: 186813 - DNA, 25 bp, Homo sapien
aaagccctcattaacgtttgctgca

SEQ ID NO: 186814 - DNA, 25 bp, Homo sapien
tgctggaaaactcaatcaaactgat

SEQ ID NO: 186815 - DNA, 25 bp, Homo sapien
tcctggtctggagtccgttgctgca

SEQ ID NO: 186816 - DNA, 25 bp, Homo sapien
ttggttagttaagacaaagccctca

SEQ ID NO: 186817 - DNA, 25 bp, Homo sapien
cagtgtggtgtcaaacactccaaat

SEQ ID NO: 186818 - DNA, 25 bp, Homo sapien
tcagtgtggtgtcaaacactccaaa

SEQ ID NO: 186819 - DNA, 25 bp, Homo sapien
aatgactgtcaagtataaattcttc

SEQ ID NO: 186820 - DNA, 25 bp, Homo sapien
actgtcaagtataaattcttcttcc

SEQ ID NO: 186821 - DNA, 25 bp, Homo sapien
gatttcatgagttgggcccaaaccg

SEQ ID NO: 186822 - DNA, 25 bp, Homo sapien
gaaggccgatggagaaatttacaga

SEQ ID NO: 186823 - DNA, 25 bp, Homo sapien
tatcactgtgttgagtagattcctc

SEQ ID NO: 186824 - DNA, 25 bp, Homo sapien
ggaatgcacctatcagctacaaaga

SEQ ID NO: 186825 - DNA, 25 bp, Homo sapien
tttcttgtacaaatatatgaaaact

SEQ ID NO: 186826 - DNA, 25 bp, Homo sapien
tatatgaaaacttttatgaggagac

SEQ ID NO: 186827 - DNA, 25 bp, Homo sapien
actatttcttgtacaaatatatgaa

SEQ ID NO: 186828 - DNA, 25 bp, Homo sapien
gaaaacttttatgaggagactggtg

SEQ ID NO: 186829 - DNA, 25 bp, Homo sapien
tgttttgtgtgaagctaaccggacc

SEQ ID NO: 186830 - DNA, 25 bp, Homo sapien
gcagtgttaccaactctacgatata

SEQ ID NO: 186831 - DNA, 25 bp, Homo sapien
ttaaaacgttacaaagcgacagcta

SEQ ID NO: 186832 - DNA, 25 bp, Homo sapien
taaccggacctaacttcctgagtgc

SEQ ID NO: 186833 - DNA, 25 bp, Homo sapien
gcttgtgtactgatgaggctgacaa

SEQ ID NO: 186834 - DNA, 25 bp, Homo sapien
cttaattttttcatccgcaggtgcc

SEQ ID NO: 186835 - DNA, 25 bp, Homo sapien
tatcaaagctgaacaatgggcctgc

SEQ ID NO: 186836 - DNA, 25 bp, Homo sapien
ccatcctgactaatgaatgctggta

SEQ ID NO: 186837 - DNA, 25 bp, Homo sapien
gccataacactttgcttctggacat

SEQ ID NO: 186838 - DNA, 25 bp, Homo sapien
agccataacactttgcttctggaca

SEQ ID NO: 186839 - DNA, 25 bp, Homo sapien
agcgagctctctcaccggtctctgt

SEQ ID NO: 186840 - DNA, 25 bp, Homo sapien
tgaactccttacacaagcgagctct

SEQ ID NO: 186841 - DNA, 25 bp, Homo sapien
gggcttgccatgaactccttacaca

SEQ ID NO: 186842 - DNA, 25 bp, Homo sapien
taaatccgtaacacagcggggcttg

SEQ ID NO: 186843 - DNA, 25 bp, Homo sapien
tattatcttcagaagccagccaaat

SEQ ID NO: 186844 - DNA, 25 bp, Homo sapien
agaagccagccaaatatcttccctc

SEQ ID NO: 186845 - DNA, 25 bp, Homo sapien
taatacaatattatcttcagaagcc

SEQ ID NO: 186846 - DNA, 25 bp, Homo sapien
ttctccctgcctacagagaggctgc

SEQ ID NO: 186847 - DNA, 25 bp, Homo sapien
tccttccacatttgctgggctgcat

SEQ ID NO: 186848 - DNA, 25 bp, Homo sapien
tgggctgcatctgttcaggggggtc

SEQ ID NO: 186849 - DNA, 25 bp, Homo sapien
ggctgcatctgttcaggggggtcat

SEQ ID NO: 186850 - DNA, 25 bp, Homo sapien
aagccctccttccacatttgctggg

SEQ ID NO: 186851 - DNA, 25 bp, Homo sapien
tctgtggggttccatgcaatgctgc

SEQ ID NO: 186852 - DNA, 25 bp, Homo sapien
tgcctaaggctcttgtctggactct

SEQ ID NO: 186853 - DNA, 25 bp, Homo sapien
gctccttccccaagacaataatatg

SEQ ID NO: 186854 - DNA, 25 bp, Homo sapien
tcttccagccatgcatgctccttcc

SEQ ID NO: 186855 - DNA, 25 bp, Homo sapien
agactgggagggctaagaagatagc

SEQ ID NO: 186856 - DNA, 25 bp, Homo sapien
gactgggagggctaagaagatagcc

SEQ ID NO: 186857 - DNA, 25 bp, Homo sapien
actgggagggctaagaagatagccc

SEQ ID NO: 186858 - DNA, 25 bp, Homo sapien
ctgggagggctaagaagatagccct

SEQ ID NO: 186859 - DNA, 25 bp, Homo sapien
cagtggcccacggcttgttgggttc

SEQ ID NO: 186860 - DNA, 25 bp, Homo sapien
ttaggtgcagcagcctctacattcc

SEQ ID NO: 186861 - DNA, 25 bp, Homo sapien
cggcttgttgggttcgtctgtatca

SEQ ID NO: 186862 - DNA, 25 bp, Homo sapien
ggtgcagcagcctctacattcctgt

SEQ ID NO: 186863 - DNA, 25 bp, Homo sapien
gtatcctctggctcgcgtgctgttg

SEQ ID NO: 186864 - DNA, 25 bp, Homo sapien
atcctctggctcgcgtgctgttggc

SEQ ID NO: 186865 - DNA, 25 bp, Homo sapien
tcctctggctcgcgtgctgttggct

SEQ ID NO: 186866 - DNA, 25 bp, Homo sapien
tatcctctggctcgcgtgctgttgg

SEQ ID NO: 186867 - DNA, 25 bp, Homo sapien
aaacaaagtgtgagttatcccatca

SEQ ID NO: 186868 - DNA, 25 bp, Homo sapien
tgagttatcccatcagataggccat

SEQ ID NO: 186869 - DNA, 25 bp, Homo sapien
caaagtgtgagttatcccatcagat

SEQ ID NO: 186870 - DNA, 25 bp, Homo sapien
agtgtgagttatcccatcagatagg

SEQ ID NO: 186871 - DNA, 25 bp, Homo sapien
gctcaacattcaggcaacagtaata

SEQ ID NO: 186872 - DNA, 25 bp, Homo sapien
gtggctcaacattcaggcaacagta

SEQ ID NO: 186873 - DNA, 25 bp, Homo sapien
cattctgtggctcaacattcaggca

SEQ ID NO: 186874 - DNA, 25 bp, Homo sapien
tgtggctcaacattcaggcaacagt

SEQ ID NO: 186875 - DNA, 25 bp, Homo sapien
gatgtaaatgtctgctctgatctca

SEQ ID NO: 186876 - DNA, 25 bp, Homo sapien
acttccacctgctgatgtaaatgtc

SEQ ID NO: 186877 - DNA, 25 bp, Homo sapien
tccacctgctgatgtaaatgtctgc

SEQ ID NO: 186878 - DNA, 25 bp, Homo sapien
cctgctgatgtaaatgtctgctctg

SEQ ID NO: 186879 - DNA, 25 bp, Homo sapien
agtgggttggatagaagaccaagcc

SEQ ID NO: 186880 - DNA, 25 bp, Homo sapien
aaacagcctatggttgatatggaga

SEQ ID NO: 186881 - DNA, 25 bp, Homo sapien
tggtttgtgttccaactgcttcacc

SEQ ID NO: 186882 - DNA, 25 bp, Homo sapien
tcttgcaccagttagccaactcgtg

SEQ ID NO: 186883 - DNA, 25 bp, Homo sapien
catagccgccatagtgattcttctg

SEQ ID NO: 186884 - DNA, 25 bp, Homo sapien
taagagctctgacggaggtgcacag

SEQ ID NO: 186885 - DNA, 25 bp, Homo sapien
cactgatttgtggaaggaggtcaaa

SEQ ID NO: 186886 - DNA, 25 bp, Homo sapien
gattcttctgatgaatgtgagccaa

SEQ ID NO: 186887 - DNA, 25 bp, Homo sapien
gtgacataatggtgaggtaggctct

SEQ ID NO: 186888 - DNA, 25 bp, Homo sapien
taatatttcattgccgggaatataa

SEQ ID NO: 186889 - DNA, 25 bp, Homo sapien
cttaatatttcattgccgggaatat

SEQ ID NO: 186890 - DNA, 25 bp, Homo sapien
ggtgaggtaggctcttaatatttca

SEQ ID NO: 186891 - DNA, 25 bp, Homo sapien
tcttcattgtgcttacactccagag

SEQ ID NO: 186892 - DNA, 25 bp, Homo sapien
cactccagagaaaggatacaagaca

SEQ ID NO: 186893 - DNA, 25 bp, Homo sapien
attaccgtacaacaaaatagagcag

SEQ ID NO: 186894 - DNA, 25 bp, Homo sapien
tactgagcccttactatgttcccgg

SEQ ID NO: 186895 - DNA, 25 bp, Homo sapien
ataccaagttattgaggcagtgcga

SEQ ID NO: 186896 - DNA, 25 bp, Homo sapien
gtgcttactgcaggagtagaagctt

SEQ ID NO: 186897 - DNA, 25 bp, Homo sapien
tgaggcagtgcgatctgtgcttact

SEQ ID NO: 186898 - DNA, 25 bp, Homo sapien
catgattctggtcatactgccaacc

SEQ ID NO: 186899 - DNA, 25 bp, Homo sapien
ctagagagccaagtgagctgaagaa

SEQ ID NO: 186900 - DNA, 25 bp, Homo sapien
agagagccaagtgagctgaagaaag

SEQ ID NO: 186901 - DNA, 25 bp, Homo sapien
gagagccaagtgagctgaagaaaga

SEQ ID NO: 186902 - DNA, 25 bp, Homo sapien
tagagagccaagtgagctgaagaaa

SEQ ID NO: 186903 - DNA, 25 bp, Homo sapien
tattgtatatcagtagacctagctc

SEQ ID NO: 186904 - DNA, 25 bp, Homo sapien
gctctttccacagttatcagtggtt

SEQ ID NO: 186905 - DNA, 25 bp, Homo sapien
aatgtctagttttttagcttctggg

SEQ ID NO: 186906 - DNA, 25 bp, Homo sapien
taaagggtgagctcattaaaaagga

SEQ ID NO: 186907 - DNA, 25 bp, Homo sapien
gaaaaaaggagtgtctgccccatgg

SEQ ID NO: 186908 - DNA, 25 bp, Homo sapien
tctatcaggtaaaccgctggccgag

SEQ ID NO: 186909 - DNA, 25 bp, Homo sapien
taaattgttcactatgacagcagcc

SEQ ID NO: 186910 - DNA, 25 bp, Homo sapien
cagccctggattaagaacatctgga

SEQ ID NO: 186911 - DNA, 25 bp, Homo sapien
cttcagtgagggcagattcagtttt

SEQ ID NO: 186912 - DNA, 25 bp, Homo sapien
ttcagtgagggcagattcagttttc

SEQ ID NO: 186913 - DNA, 25 bp, Homo sapien
tcagtgagggcagattcagttttcc

SEQ ID NO: 186914 - DNA, 25 bp, Homo sapien
tcaaaagtcacagaaaattatcaaa

SEQ ID NO: 186915 - DNA, 25 bp, Homo sapien
tcacagaaaattatcaaacacatac

SEQ ID NO: 186916 - DNA, 25 bp, Homo sapien
aaagtcacagaaaattatcaaacac

SEQ ID NO: 186917 - DNA, 25 bp, Homo sapien
agtcacagaaaattatcaaacacat

SEQ ID NO: 186918 - DNA, 25 bp, Homo sapien
gcatcaaagtaccagacagtcatag

SEQ ID NO: 186919 - DNA, 25 bp, Homo sapien
gctgcacttcgtgtgggttcctacg

SEQ ID NO: 186920 - DNA, 25 bp, Homo sapien
atatccgcaggatcccaccatgtag

SEQ ID NO: 186921 - DNA, 25 bp, Homo sapien
tggttgcgtaagagggctgcacttc

SEQ ID NO: 186922 - DNA, 25 bp, Homo sapien
tcctacgatctgaccagaagaacag

SEQ ID NO: 186923 - DNA, 25 bp, Homo sapien
gatgcaggtgatgcagcgaccatca

SEQ ID NO: 186924 - DNA, 25 bp, Homo sapien
gggttgtccacgtggcgaacataac

SEQ ID NO: 186925 - DNA, 25 bp, Homo sapien
tgatgcagcgaccatcaccgttggg

SEQ ID NO: 186926 - DNA, 25 bp, Homo sapien
cgaacataacctgttccatttcccg

SEQ ID NO: 186927 - DNA, 25 bp, Homo sapien
agtgagcagggcatccccatgatca

SEQ ID NO: 186928 - DNA, 25 bp, Homo sapien
gccttgactgtggccagtgagcagg

SEQ ID NO: 186929 - DNA, 25 bp, Homo sapien
ccagtgagcagggcatccccatgat

SEQ ID NO: 186930 - DNA, 25 bp, Homo sapien
gcagggcatccccatgatcacatac

SEQ ID NO: 186931 - DNA, 25 bp, Homo sapien
tgtaggggccccatttggtaattca

SEQ ID NO: 186932 - DNA, 25 bp, Homo sapien
gctgatgtaggggccccatttggta

SEQ ID NO: 186933 - DNA, 25 bp, Homo sapien
tgccttcatcaaggcaccctgctga

SEQ ID NO: 186934 - DNA, 25 bp, Homo sapien
ttcatcaaggcaccctgctgatgta

SEQ ID NO: 186935 - DNA, 25 bp, Homo sapien
gaagattcagaataccagacaaata

SEQ ID NO: 186936 - DNA, 25 bp, Homo sapien
aagattcagaataccagacaaatac

SEQ ID NO: 186937 - DNA, 25 bp, Homo sapien
ctgcagggtccacataggcctcaaa

SEQ ID NO: 186938 - DNA, 25 bp, Homo sapien
ccaaaggccagacattcacctccat

SEQ ID NO: 186939 - DNA, 25 bp, Homo sapien
cctcaaatgcagttgtcttgccaaa

SEQ ID NO: 186940 - DNA, 25 bp, Homo sapien
tcaaatgcagttgtcttgccaaagg

SEQ ID NO: 186941 - DNA, 25 bp, Homo sapien
tgaatttctaactcaggaggtctgg

SEQ ID NO: 186942 - DNA, 25 bp, Homo sapien
aactgtaggaagatacgccaccatc

SEQ ID NO: 186943 - DNA, 25 bp, Homo sapien
ttagcatgtatgagatcacctggag

SEQ ID NO: 186944 - DNA, 25 bp, Homo sapien
ctctgactttcttgttaacagggaa

SEQ ID NO: 186945 - DNA, 25 bp, Homo sapien
gaagacttcagggaacaggcactag

SEQ ID NO: 186946 - DNA, 25 bp, Homo sapien
acacggtggacagcataaacagccc

SEQ ID NO: 186947 - DNA, 25 bp, Homo sapien
tggattgagccacgacagagttctg

SEQ ID NO: 186948 - DNA, 25 bp, Homo sapien
taaatccatgtactgggcagcctgg

SEQ ID NO: 186949 - DNA, 25 bp, Homo sapien
gacacatagcactgaatctgagccc

SEQ ID NO: 186950 - DNA, 25 bp, Homo sapien
tctggattcagctacccactgggca

SEQ ID NO: 186951 - DNA, 25 bp, Homo sapien
aaacactagagaaaagcgacacccg

SEQ ID NO: 186952 - DNA, 25 bp, Homo sapien
caaagctgaactccttagtctggca

SEQ ID NO: 186953 - DNA, 25 bp, Homo sapien
tgatctgtgaatgaattaaatcgat

SEQ ID NO: 186954 - DNA, 25 bp, Homo sapien
aaatcgatatccctttattatccac

SEQ ID NO: 186955 - DNA, 25 bp, Homo sapien
gaatgaattaaatcgatatcccttt

SEQ ID NO: 186956 - DNA, 25 bp, Homo sapien
tcgatatccctttattatccacttc

SEQ ID NO: 186957 - DNA, 25 bp, Homo sapien
gaagccgtctgctcttccaggtaga

SEQ ID NO: 186958 - DNA, 25 bp, Homo sapien
tgtgacaaaccagccaaagtaaacc

SEQ ID NO: 186959 - DNA, 25 bp, Homo sapien
aattcacgatcaccttctgacaggg

SEQ ID NO: 186960 - DNA, 25 bp, Homo sapien
gcatttggttctaattggccaggga

SEQ ID NO: 186961 - DNA, 25 bp, Homo sapien
ttgtacggcaaactgtgactcccca

SEQ ID NO: 186962 - DNA, 25 bp, Homo sapien
tacttgggtgcattaataacgatgc

SEQ ID NO: 186963 - DNA, 25 bp, Homo sapien
tcaaagacgagtgactaatccacca

SEQ ID NO: 186964 - DNA, 25 bp, Homo sapien
cctacagagttcagctcacgcggaa

SEQ ID NO: 186965 - DNA, 25 bp, Homo sapien
cctgctatgtgaacaaaaacccggt

SEQ ID NO: 186966 - DNA, 25 bp, Homo sapien
taatggacatgcaccaacatcgcgg

SEQ ID NO: 186967 - DNA, 25 bp, Homo sapien
caagataaattaccacccagggagt

SEQ ID NO: 186968 - DNA, 25 bp, Homo sapien
gaaagactgagaaagcctatcccaa

SEQ ID NO: 186969 - DNA, 25 bp, Homo sapien
aacgttgactttcgctcagaggagc

SEQ ID NO: 186970 - DNA, 25 bp, Homo sapien
cgcttacggccctgggaagtcgaca

SEQ ID NO: 186971 - DNA, 25 bp, Homo sapien
gaagcagcgagtagagacaaaccag

SEQ ID NO: 186972 - DNA, 25 bp, Homo sapien
gacatacaacggactccgagtgcct

SEQ ID NO: 186973 - DNA, 25 bp, Homo sapien
cggcagggcgccgagcgcgtcctac

SEQ ID NO: 186974 - DNA, 25 bp, Homo sapien
tgcggcagggcgccgagcgcgtcct

SEQ ID NO: 186975 - DNA, 25 bp, Homo sapien
ctgcggcagggcgccgagcgcgtcc

SEQ ID NO: 186976 - DNA, 25 bp, Homo sapien
gcggcagggcgccgagcgcgtccta

SEQ ID NO: 186977 - DNA, 25 bp, Homo sapien
ttgacgtagtatttgcccagccggc

SEQ ID NO: 186978 - DNA, 25 bp, Homo sapien
tcgccccgcaggtgtcgcttggaga

SEQ ID NO: 186979 - DNA, 25 bp, Homo sapien
agtgcagctgcttgacgcgctccag

SEQ ID NO: 186980 - DNA, 25 bp, Homo sapien
gttgtccaggtagcagaagcccacc

SEQ ID NO: 186981 - DNA, 25 bp, Homo sapien
agagagggaacgatctacacgagcg

SEQ ID NO: 186982 - DNA, 25 bp, Homo sapien
acgatctacacgagcgcgaagccga

SEQ ID NO: 186983 - DNA, 25 bp, Homo sapien
ctacacgagcgcgaagccgaggcgc

SEQ ID NO: 186984 - DNA, 25 bp, Homo sapien
ctcgcccgcagaatcgaggtccggg

SEQ ID NO: 186985 - DNA, 25 bp, Homo sapien
ggctgccacggtacccgagccgctg

SEQ ID NO: 186986 - DNA, 25 bp, Homo sapien
tgcagcgtcggggacaagggaaagt

SEQ ID NO: 186987 - DNA, 25 bp, Homo sapien
cgctgcagcgtcggggacaagggaa

SEQ ID NO: 186988 - DNA, 25 bp, Homo sapien
tgcggctgccacggtacccgagccg

SEQ ID NO: 186989 - DNA, 25 bp, Homo sapien
agtgcggcgcaaggagtcggagggc

SEQ ID NO: 186990 - DNA, 25 bp, Homo sapien
ccttcgggaaccagcgggagtggtg

SEQ ID NO: 186991 - DNA, 25 bp, Homo sapien
gtggtgcggagctccacgacccgtt

SEQ ID NO: 186992 - DNA, 25 bp, Homo sapien
cgtttccggactggcccggcgagca

SEQ ID NO: 186993 - DNA, 25 bp, Homo sapien
gaagccaccactgccgcgactgcgg

SEQ ID NO: 186994 - DNA, 25 bp, Homo sapien
gggaagccaccactgccgcgactgc

SEQ ID NO: 186995 - DNA, 25 bp, Homo sapien
ccaccactgccgcgactgcggccag

SEQ ID NO: 186996 - DNA, 25 bp, Homo sapien
accactgccgcgactgcggccagac

SEQ ID NO: 186997 - DNA, 25 bp, Homo sapien
tccgggagacgctgaggtccggccc

SEQ ID NO: 186998 - DNA, 25 bp, Homo sapien
ggagacgctgaggtccggcccttaa

SEQ ID NO: 186999 - DNA, 25 bp, Homo sapien
ttaagccggccgactccgcgcgtca

SEQ ID NO: 187000 - DNA, 25 bp, Homo sapien
agacgctgaggtccggcccttaagc

SEQ ID NO: 187001 - DNA, 25 bp, Homo sapien
gccccgctgccagtcacccccgcct

SEQ ID NO: 187002 - DNA, 25 bp, Homo sapien
cccgctgccagtcacccccgcctgc

SEQ ID NO: 187003 - DNA, 25 bp, Homo sapien
cgctgccagtcacccccgcctgctc

SEQ ID NO: 187004 - DNA, 25 bp, Homo sapien
ccgccccgctgccagtcacccccgc

SEQ ID NO: 187005 - DNA, 25 bp, Homo sapien
gttgtttgtgaccaggggagcggct

SEQ ID NO: 187006 - DNA, 25 bp, Homo sapien
aatttttagaatgcgctggatttgc

SEQ ID NO: 187007 - DNA, 25 bp, Homo sapien
gagcggctggaaagcagactgaatt

SEQ ID NO: 187008 - DNA, 25 bp, Homo sapien
cttagttgtttgtgaccaggggagc

SEQ ID NO: 187009 - DNA, 25 bp, Homo sapien
ttttgcataaaatcacataacaaac

SEQ ID NO: 187010 - DNA, 25 bp, Homo sapien
ttgcataaaatcacataacaaactt

SEQ ID NO: 187011 - DNA, 25 bp, Homo sapien
gcataaaatcacataacaaacttga

SEQ ID NO: 187012 - DNA, 25 bp, Homo sapien
attgttttgcataaaatcacataac

SEQ ID NO: 187013 - DNA, 25 bp, Homo sapien
ggaagcaaatttctacagctttttc

SEQ ID NO: 187014 - DNA, 25 bp, Homo sapien
tggaagcaaatttctacagcttttt

SEQ ID NO: 187015 - DNA, 25 bp, Homo sapien
tgagcaggaggtacccctccttggg

SEQ ID NO: 187016 - DNA, 25 bp, Homo sapien
ctttgagcaggaggtacccctcctt

SEQ ID NO: 187017 - DNA, 25 bp, Homo sapien
ttgagcaggaggtacccctccttgg

SEQ ID NO: 187018 - DNA, 25 bp, Homo sapien
tttgagcaggaggtacccctccttg

SEQ ID NO: 187019 - DNA, 25 bp, Homo sapien
gaatgtagaccctggttggcattgg

SEQ ID NO: 187020 - DNA, 25 bp, Homo sapien
cagcctgaatgtagaccctggttgg

SEQ ID NO: 187021 - DNA, 25 bp, Homo sapien
acagcctgaatgtagaccctggttg

SEQ ID NO: 187022 - DNA, 25 bp, Homo sapien
cctgaatgtagaccctggttggcat

SEQ ID NO: 187023 - DNA, 25 bp, Homo sapien
cagcacgtagacaagtttcagcctc

SEQ ID NO: 187024 - DNA, 25 bp, Homo sapien
ttctcagcacgtagacaagtttcag

SEQ ID NO: 187025 - DNA, 25 bp, Homo sapien
cagttcttgtttctcagcacgtaga

SEQ ID NO: 187026 - DNA, 25 bp, Homo sapien
tcttgtttctcagcacgtagacaag

SEQ ID NO: 187027 - DNA, 25 bp, Homo sapien
agaaacggttctcgagatccccagg

SEQ ID NO: 187028 - DNA, 25 bp, Homo sapien
acagaaacggttctcgagatcccca

SEQ ID NO: 187029 - DNA, 25 bp, Homo sapien
ctacagaaacggttctcgagatccc

SEQ ID NO: 187030 - DNA, 25 bp, Homo sapien
tacagaaacggttctcgagatcccc

SEQ ID NO: 187031 - DNA, 25 bp, Homo sapien
tcagtggctgaaggtcgctggcacc

SEQ ID NO: 187032 - DNA, 25 bp, Homo sapien
aggtagctgatcccaatctttcctg

SEQ ID NO: 187033 - DNA, 25 bp, Homo sapien
ttcttcccttcctcaacagtatatg

SEQ ID NO: 187034 - DNA, 25 bp, Homo sapien
caccgttgctgtgaggccctctttc

SEQ ID NO: 187035 - DNA, 25 bp, Homo sapien
caggaaccttctttgaccaggagtt

SEQ ID NO: 187036 - DNA, 25 bp, Homo sapien
gacacaggaaccttctttgaccagg

SEQ ID NO: 187037 - DNA, 25 bp, Homo sapien
cacaggaaccttctttgaccaggag

SEQ ID NO: 187038 - DNA, 25 bp, Homo sapien
ctgacacaggaaccttctttgacca

SEQ ID NO: 187039 - DNA, 25 bp, Homo sapien
cattgttagcatgttctaattccag

SEQ ID NO: 187040 - DNA, 25 bp, Homo sapien
gagtagtactaaccaaccataggac

SEQ ID NO: 187041 - DNA, 25 bp, Homo sapien
gctaattttcgggaacaatccagga

SEQ ID NO: 187042 - DNA, 25 bp, Homo sapien
tctaaaagactctgccattgttagc

SEQ ID NO: 187043 - DNA, 25 bp, Homo sapien
ttaagtcctcactgactgttgacca

SEQ ID NO: 187044 - DNA, 25 bp, Homo sapien
tcccagaaggcaacaatcaaggtgt

SEQ ID NO: 187045 - DNA, 25 bp, Homo sapien
caccaacatttattgtctcccagtt

SEQ ID NO: 187046 - DNA, 25 bp, Homo sapien
tgtggctattggcagccttaagtcc

SEQ ID NO: 187047 - DNA, 25 bp, Homo sapien
ttgccataatatataccaatgcaga

SEQ ID NO: 187048 - DNA, 25 bp, Homo sapien
atacaaacttgccataatatatacc

SEQ ID NO: 187049 - DNA, 25 bp, Homo sapien
gaataattcaagaaatcggtcaaga

SEQ ID NO: 187050 - DNA, 25 bp, Homo sapien
gaaatcggtcaagaagaacttatta

SEQ ID NO: 187051 - DNA, 25 bp, Homo sapien
taactctgagaagttagattctgaa

SEQ ID NO: 187052 - DNA, 25 bp, Homo sapien
gataaagatagtttgagttaaaatg

SEQ ID NO: 187053 - DNA, 25 bp, Homo sapien
cagctgagaattcttttaagtaatg

SEQ ID NO: 187054 - DNA, 25 bp, Homo sapien
ggaataagacacaatactgtgatgg

SEQ ID NO: 187055 - DNA, 25 bp, Homo sapien
tcataggaatggcagagtcacatgc

SEQ ID NO: 187056 - DNA, 25 bp, Homo sapien
ccctggctcagtagtagtcatagga

SEQ ID NO: 187057 - DNA, 25 bp, Homo sapien
ggcagtctcttgtagagcctctgca

SEQ ID NO: 187058 - DNA, 25 bp, Homo sapien
tatggtgccctgctattgggcagtc

SEQ ID NO: 187059 - DNA, 25 bp, Homo sapien
taagattgttggataaagaagcccc

SEQ ID NO: 187060 - DNA, 25 bp, Homo sapien
ctgaagatgtgcacgcatgagcgct

SEQ ID NO: 187061 - DNA, 25 bp, Homo sapien
tgccttggacatagagcctaataag

SEQ ID NO: 187062 - DNA, 25 bp, Homo sapien
tagctacgtgctaggcaaggacatg

SEQ ID NO: 187063 - DNA, 25 bp, Homo sapien
tctcattgcatacatctacaatttc

SEQ ID NO: 187064 - DNA, 25 bp, Homo sapien
gttgagttgtgaaggagctaaatgc

SEQ ID NO: 187065 - DNA, 25 bp, Homo sapien
gaatcacaaagacacttccgtactt

SEQ ID NO: 187066 - DNA, 25 bp, Homo sapien
tatcctcgatttctcctgtcctctt

SEQ ID NO: 187067 - DNA, 25 bp, Homo sapien
ttctgatggcattcccagtagctcc

SEQ ID NO: 187068 - DNA, 25 bp, Homo sapien
cagtagctccttccagtgaacgtta

SEQ ID NO: 187069 - DNA, 25 bp, Homo sapien
ccagtagctccttccagtgaacgtt

SEQ ID NO: 187070 - DNA, 25 bp, Homo sapien
agtagctccttccagtgaacgttag

SEQ ID NO: 187071 - DNA, 25 bp, Homo sapien
ctatcacatgtatgaaacgcagcgc

SEQ ID NO: 187072 - DNA, 25 bp, Homo sapien
tgtatgaaacgcagcgcgtcagcac

SEQ ID NO: 187073 - DNA, 25 bp, Homo sapien
cagcgcgtcagcacctgaatgttct

SEQ ID NO: 187074 - DNA, 25 bp, Homo sapien
agcgcgtcagcacctgaatgttctg

SEQ ID NO: 187075 - DNA, 25 bp, Homo sapien
gatgctcagcattactcacccttgg

SEQ ID NO: 187076 - DNA, 25 bp, Homo sapien
cgtgtgataatctcctaaaagcctg

SEQ ID NO: 187077 - DNA, 25 bp, Homo sapien
tgggaactggatatggtggacacct

SEQ ID NO: 187078 - DNA, 25 bp, Homo sapien
tatgggacgaaacccagaggccaga

SEQ ID NO: 187079 - DNA, 25 bp, Homo sapien
caggtcatctgtacaccgtaagtgt

SEQ ID NO: 187080 - DNA, 25 bp, Homo sapien
tccaggttaacacaagacactagtc

SEQ ID NO: 187081 - DNA, 25 bp, Homo sapien
tccttcccggtcagcatgttctttc

SEQ ID NO: 187082 - DNA, 25 bp, Homo sapien
ggacctaaagttttctggcacacca

SEQ ID NO: 187083 - DNA, 25 bp, Homo sapien
ggtgggtgctacagccacaacatgc

SEQ ID NO: 187084 - DNA, 25 bp, Homo sapien
tgtcgggccatctgtcctgaatgct

SEQ ID NO: 187085 - DNA, 25 bp, Homo sapien
atgcttctcatagttgccttccagg

SEQ ID NO: 187086 - DNA, 25 bp, Homo sapien
aaggacacttgtgcaacagcatttg

SEQ ID NO: 187087 - DNA, 25 bp, Homo sapien
tctccactccgatacccactctctc

SEQ ID NO: 187088 - DNA, 25 bp, Homo sapien
gcaaccctgacaagtggctaagtgg

SEQ ID NO: 187089 - DNA, 25 bp, Homo sapien
agatttctgtccatggcacccaagg

SEQ ID NO: 187090 - DNA, 25 bp, Homo sapien
gctgactccatagaaactgtgctct

SEQ ID NO: 187091 - DNA, 25 bp, Homo sapien
gaatgggagacaccgctaaaacagg

SEQ ID NO: 187092 - DNA, 25 bp, Homo sapien
aactcgagggaatgaaaattctagg

SEQ ID NO: 187093 - DNA, 25 bp, Homo sapien
gtctcccagggaactcgagggaatg

SEQ ID NO: 187094 - DNA, 25 bp, Homo sapien
tcgaagctctgtgtcggtctcccag

SEQ ID NO: 187095 - DNA, 25 bp, Homo sapien
tctgagagctttccccagttcacca

SEQ ID NO: 187096 - DNA, 25 bp, Homo sapien
tccaaacccgatcaaagaggtatgc

SEQ ID NO: 187097 - DNA, 25 bp, Homo sapien
ttttgaacaaaaacggcaatggctc

SEQ ID NO: 187098 - DNA, 25 bp, Homo sapien
tttgcacatgctcttgacacctggt

SEQ ID NO: 187099 - DNA, 25 bp, Homo sapien
tatgttcagccctcatttgcacatg

SEQ ID NO: 187100 - DNA, 25 bp, Homo sapien
gttcactctgcgtgctatctccatt

SEQ ID NO: 187101 - DNA, 25 bp, Homo sapien
tgccggggatggtcaagctttcctt

SEQ ID NO: 187102 - DNA, 25 bp, Homo sapien
gctctgagctcatcttggacctttg

SEQ ID NO: 187103 - DNA, 25 bp, Homo sapien
ggacctttgttcactctgcgtgcta

SEQ ID NO: 187104 - DNA, 25 bp, Homo sapien
ttggtgctccgctgcaggtcatcaa

SEQ ID NO: 187105 - DNA, 25 bp, Homo sapien
ccatgagttgtgcttagcagagcaa

SEQ ID NO: 187106 - DNA, 25 bp, Homo sapien
gacaaacaatcacgcccatgagttg

SEQ ID NO: 187107 - DNA, 25 bp, Homo sapien
agagcaatgtaggatgccctcggct

SEQ ID NO: 187108 - DNA, 25 bp, Homo sapien
taagtgtagcctgtactatcggagt

SEQ ID NO: 187109 - DNA, 25 bp, Homo sapien
catgtgccagcggaacccagattta

SEQ ID NO: 187110 - DNA, 25 bp, Homo sapien
tgtctcgtgactttgtttacttccc

SEQ ID NO: 187111 - DNA, 25 bp, Homo sapien
ttgcatagctcaccgccaaattttt

SEQ ID NO: 187112 - DNA, 25 bp, Homo sapien
agatggctttggacataacaacacc

SEQ ID NO: 187113 - DNA, 25 bp, Homo sapien
tccattctcaggctgcgcatggcaa

SEQ ID NO: 187114 - DNA, 25 bp, Homo sapien
tcaggctgcgcatggcaagatggct

SEQ ID NO: 187115 - DNA, 25 bp, Homo sapien
tgcgcatggcaagatggctttggac

SEQ ID NO: 187116 - DNA, 25 bp, Homo sapien
tacacactctctgggaatacgtggc

SEQ ID NO: 187117 - DNA, 25 bp, Homo sapien
tacgtggctcatcaagtggcttcag

SEQ ID NO: 187118 - DNA, 25 bp, Homo sapien
caaagcttggtctctcggatgtcat

SEQ ID NO: 187119 - DNA, 25 bp, Homo sapien
tagtctccaacgagtacaggtcttg

SEQ ID NO: 187120 - DNA, 25 bp, Homo sapien
gcatagtctcacacacacagagcac

SEQ ID NO: 187121 - DNA, 25 bp, Homo sapien
catagtctcacacacacagagcaca

SEQ ID NO: 187122 - DNA, 25 bp, Homo sapien
agtctcacacacacagagcacatac

SEQ ID NO: 187123 - DNA, 25 bp, Homo sapien
acctgcatagtctcacacacacaga

SEQ ID NO: 187124 - DNA, 25 bp, Homo sapien
tggctgcatttccagacagccaaag

SEQ ID NO: 187125 - DNA, 25 bp, Homo sapien
aagcccctgcccagtattagccatg

SEQ ID NO: 187126 - DNA, 25 bp, Homo sapien
aattgccagcaaccggtgcctcagt

SEQ ID NO: 187127 - DNA, 25 bp, Homo sapien
cagagagacaaatggcccaattgcc

SEQ ID NO: 187128 - DNA, 25 bp, Homo sapien
gctctaacactggcccaaggggcaa

SEQ ID NO: 187129 - DNA, 25 bp, Homo sapien
taacactggcccaaggggcaaccat

SEQ ID NO: 187130 - DNA, 25 bp, Homo sapien
tggcccaaggggcaaccattcctga

SEQ ID NO: 187131 - DNA, 25 bp, Homo sapien
caaggggcaaccattcctgagaatc

SEQ ID NO: 187132 - DNA, 25 bp, Homo sapien
ttaacagggcagttttcgaaagctc

SEQ ID NO: 187133 - DNA, 25 bp, Homo sapien
tgttccatggatcccttcaggtgct

SEQ ID NO: 187134 - DNA, 25 bp, Homo sapien
ggacactactctggctttgtgactg

SEQ ID NO: 187135 - DNA, 25 bp, Homo sapien
gctctcctagaagcagattgaaggg

SEQ ID NO: 187136 - DNA, 25 bp, Homo sapien
tatatcaaagagaattgtcgtaata

SEQ ID NO: 187137 - DNA, 25 bp, Homo sapien
gagctacctggtagtatgaatggtg

SEQ ID NO: 187138 - DNA, 25 bp, Homo sapien
taagtcccactgatgttcctgccct

SEQ ID NO: 187139 - DNA, 25 bp, Homo sapien
taataaagaaggtcagggataggtg

SEQ ID NO: 187140 - DNA, 25 bp, Homo sapien
gtgcacgatcattccaattatcaca

SEQ ID NO: 187141 - DNA, 25 bp, Homo sapien
caggaatgttaagtgcacgatcatt

SEQ ID NO: 187142 - DNA, 25 bp, Homo sapien
cacagcaatacaggggatcataagg

SEQ ID NO: 187143 - DNA, 25 bp, Homo sapien
tgtttgctgtccaattacgtggagc

SEQ ID NO: 187144 - DNA, 25 bp, Homo sapien
cttttgttcacgtaaagtctgatgc

SEQ ID NO: 187145 - DNA, 25 bp, Homo sapien
caaatcaacaccagaaaccactcat

SEQ ID NO: 187146 - DNA, 25 bp, Homo sapien
tattggaatggattcaagaccttcc

SEQ ID NO: 187147 - DNA, 25 bp, Homo sapien
gataaccatgccttacactcacagt

SEQ ID NO: 187148 - DNA, 25 bp, Homo sapien
agaaaccactcatccaataaaggct

SEQ ID NO: 187149 - DNA, 25 bp, Homo sapien
gttctcatacaccctctcctctgtg

SEQ ID NO: 187150 - DNA, 25 bp, Homo sapien
ttctcatacaccctctcctctgtga

SEQ ID NO: 187151 - DNA, 25 bp, Homo sapien
tcctctgtgagcaaaatgctgtctg

SEQ ID NO: 187152 - DNA, 25 bp, Homo sapien
ctctgtgagcaaaatgctgtctgat

SEQ ID NO: 187153 - DNA, 25 bp, Homo sapien
ttcccgtaaaaggatgtgaagcaca

SEQ ID NO: 187154 - DNA, 25 bp, Homo sapien
gagatggaaggtcgtgtacttcccg

SEQ ID NO: 187155 - DNA, 25 bp, Homo sapien
tggtccaagccaagacatgacgtgc

SEQ ID NO: 187156 - DNA, 25 bp, Homo sapien
cagtgctttagcaagggatggtcca

SEQ ID NO: 187157 - DNA, 25 bp, Homo sapien
tgaggagttgcggggcaggtaggac

SEQ ID NO: 187158 - DNA, 25 bp, Homo sapien
gaggctggcatctcttggaagttgt

SEQ ID NO: 187159 - DNA, 25 bp, Homo sapien
tcttggaagttgtactgcctccctg

SEQ ID NO: 187160 - DNA, 25 bp, Homo sapien
ccagggctgaggagttgcggggcag

SEQ ID NO: 187161 - DNA, 25 bp, Homo sapien
tccctggctagttggctgctttgca

SEQ ID NO: 187162 - DNA, 25 bp, Homo sapien
gctcctttgcccctaagtatgacag

SEQ ID NO: 187163 - DNA, 25 bp, Homo sapien
ttgaaacactgagcgaaatctgccg

SEQ ID NO: 187164 - DNA, 25 bp, Homo sapien
agcccctccgggtgtttctgtccag

SEQ ID NO: 187165 - DNA, 25 bp, Homo sapien
cactcccgtggtgagaatgtttaca

SEQ ID NO: 187166 - DNA, 25 bp, Homo sapien
tgtttacagaaacaggcgcgttgtc

SEQ ID NO: 187167 - DNA, 25 bp, Homo sapien
tatttttgcgcggatttcataaccc

SEQ ID NO: 187168 - DNA, 25 bp, Homo sapien
gtctagacatagttcacgcagccgg

SEQ ID NO: 187169 - DNA, 25 bp, Homo sapien
tctactgctagctcattgctcattc

SEQ ID NO: 187170 - DNA, 25 bp, Homo sapien
ctactgctagctcattgctcattcc

SEQ ID NO: 187171 - DNA, 25 bp, Homo sapien
tccccactgagaatagctgaacctc

SEQ ID NO: 187172 - DNA, 25 bp, Homo sapien
gagacagagtatgcgctggctccag

SEQ ID NO: 187173 - DNA, 25 bp, Homo sapien
tcatgaacttggtcacagatcctcc

SEQ ID NO: 187174 - DNA, 25 bp, Homo sapien
gctccagcttcgtgaagagcacttg

SEQ ID NO: 187175 - DNA, 25 bp, Homo sapien
tgcaaactgttggatcctcctgctc

SEQ ID NO: 187176 - DNA, 25 bp, Homo sapien
ttgcttgtcagacccaaaacccctg

SEQ ID NO: 187177 - DNA, 25 bp, Homo sapien
tgcactgtgctaccactatcccgtg

SEQ ID NO: 187178 - DNA, 25 bp, Homo sapien
tgcacttgctccacctgaagccttg

SEQ ID NO: 187179 - DNA, 25 bp, Homo sapien
gccacgccttttcttatgatcttga

SEQ ID NO: 187180 - DNA, 25 bp, Homo sapien
taggccacgccttttcttatgatct

SEQ ID NO: 187181 - DNA, 25 bp, Homo sapien
actaggccacgccttttcttatgat

SEQ ID NO: 187182 - DNA, 25 bp, Homo sapien
ctcactaggccacgccttttcttat

SEQ ID NO: 187183 - DNA, 25 bp, Homo sapien
tcagtcttccactatggcttcaaat

SEQ ID NO: 187184 - DNA, 25 bp, Homo sapien
tatctgtccattaagagtgtcctcg

SEQ ID NO: 187185 - DNA, 25 bp, Homo sapien
gtgcccaggccctgacacgttcagg

SEQ ID NO: 187186 - DNA, 25 bp, Homo sapien
agaaaggcaagtgtcgtgcccaggc

SEQ ID NO: 187187 - DNA, 25 bp, Homo sapien
cctttgctgtaccacatctagctgc

SEQ ID NO: 187188 - DNA, 25 bp, Homo sapien
catctagctgcattatttggcccac

SEQ ID NO: 187189 - DNA, 25 bp, Homo sapien
ccacatctagctgcattatttggcc

SEQ ID NO: 187190 - DNA, 25 bp, Homo sapien
tgcattatttggcccacaagatttt

SEQ ID NO: 187191 - DNA, 25 bp, Homo sapien
ggagcccacttgcacaagttgccca

SEQ ID NO: 187192 - DNA, 25 bp, Homo sapien
ttgcccacgtgagaggcagctcagt

SEQ ID NO: 187193 - DNA, 25 bp, Homo sapien
tgcctgctgtctggagcatcagcca

SEQ ID NO: 187194 - DNA, 25 bp, Homo sapien
gcagctcagtcccaagttgcctgct

SEQ ID NO: 187195 - DNA, 25 bp, Homo sapien
gctgaatttaatggatgcccaaggg

SEQ ID NO: 187196 - DNA, 25 bp, Homo sapien
gaggcatatgctctgcttggtacaa

SEQ ID NO: 187197 - DNA, 25 bp, Homo sapien
gcccaagggtattcatcatgcacgt

SEQ ID NO: 187198 - DNA, 25 bp, Homo sapien
agtaaatcaaatggaggacgaagca

SEQ ID NO: 187199 - DNA, 25 bp, Homo sapien
ttgccagaaagagtgaaggtaccaa

SEQ ID NO: 187200 - DNA, 25 bp, Homo sapien
ggttgccagaaagagtgaaggtacc

SEQ ID NO: 187201 - DNA, 25 bp, Homo sapien
tcacagggttgccagaaagagtgaa

SEQ ID NO: 187202 - DNA, 25 bp, Homo sapien
agggttgccagaaagagtgaaggta

SEQ ID NO: 187203 - DNA, 25 bp, Homo sapien
ggcccagattcaggtgccgggctaa

SEQ ID NO: 187204 - DNA, 25 bp, Homo sapien
ctaagcatatagacactggtgaagg

SEQ ID NO: 187205 - DNA, 25 bp, Homo sapien
ccagattcaggtgccgggctaagca

SEQ ID NO: 187206 - DNA, 25 bp, Homo sapien
caggtgccgggctaagcatatagac

SEQ ID NO: 187207 - DNA, 25 bp, Homo sapien
agagagcagggacttttcgacagga

SEQ ID NO: 187208 - DNA, 25 bp, Homo sapien
gcctgtcctcctgtacctgtagatg

SEQ ID NO: 187209 - DNA, 25 bp, Homo sapien
tcaaacctactagatgacagagggc

SEQ ID NO: 187210 - DNA, 25 bp, Homo sapien
ggagctgataccaccctagagctga

SEQ ID NO: 187211 - DNA, 25 bp, Homo sapien
gaaacgagtgggtgtatccagccca

SEQ ID NO: 187212 - DNA, 25 bp, Homo sapien
cattggaagtaccagcaagcttgac

SEQ ID NO: 187213 - DNA, 25 bp, Homo sapien
tttaggttgtggtcagaagccctgc

SEQ ID NO: 187214 - DNA, 25 bp, Homo sapien
caccaccgtctgttttttgatgagc

SEQ ID NO: 187215 - DNA, 25 bp, Homo sapien
tccatcgccccaaccaactcttcta

SEQ ID NO: 187216 - DNA, 25 bp, Homo sapien
ctccatcgccccaaccaactcttct

SEQ ID NO: 187217 - DNA, 25 bp, Homo sapien
ccatcgccccaaccaactcttctac

SEQ ID NO: 187218 - DNA, 25 bp, Homo sapien
tccatcgccccaaccaactcttcta

SEQ ID NO: 187219 - DNA, 25 bp, Homo sapien
tcgccccaaccaactcttctacctc

SEQ ID NO: 187220 - DNA, 25 bp, Homo sapien
atcgccccaaccaactcttctacct

SEQ ID NO: 187221 - DNA, 25 bp, Homo sapien
gccccaaccaactcttctacctcca

SEQ ID NO: 187222 - DNA, 25 bp, Homo sapien
gccccaaccaactcttctccctcca

SEQ ID NO: 187223 - DNA, 25 bp, Homo sapien
gaacaggcataaccaggcaattcca

SEQ ID NO: 187224 - DNA, 25 bp, Homo sapien
gccttttactgaacaggcataacca

SEQ ID NO: 187225 - DNA, 25 bp, Homo sapien
ctgaacaggcataaccaggcaattc

SEQ ID NO: 187226 - DNA, 25 bp, Homo sapien
ttttactgaacaggcataaccaggc

SEQ ID NO: 187227 - DNA, 25 bp, Homo sapien
gagtcttagagacaaccccgtcata

SEQ ID NO: 187228 - DNA, 25 bp, Homo sapien
tgtcagcaacaagtaggcaagtagg

SEQ ID NO: 187229 - DNA, 25 bp, Homo sapien
cataaacagtctttaggaaggctgg

SEQ ID NO: 187230 - DNA, 25 bp, Homo sapien
gacctgggcttcttagacataaacc

SEQ ID NO: 187231 - DNA, 25 bp, Homo sapien
tgtcctaaaccaaattaaccatcga

SEQ ID NO: 187232 - DNA, 25 bp, Homo sapien
tctgaactacactggttgcatgaga

SEQ ID NO: 187233 - DNA, 25 bp, Homo sapien
cacacatgccatccttataattcaa

SEQ ID NO: 187234 - DNA, 25 bp, Homo sapien
aaataacgccatgaaaaatattctt

SEQ ID NO: 187235 - DNA, 25 bp, Homo sapien
tgatctttgagggtgtcccctttaa

SEQ ID NO: 187236 - DNA, 25 bp, Homo sapien
ccttccgtggaagataaaatcatgc

SEQ ID NO: 187237 - DNA, 25 bp, Homo sapien
tgccagcctccttccgtggaagata

SEQ ID NO: 187238 - DNA, 25 bp, Homo sapien
tccgtggaagataaaatcatgcagg

SEQ ID NO: 187239 - DNA, 25 bp, Homo sapien
cttaattcaatggtcaggtgggagt

SEQ ID NO: 187240 - DNA, 25 bp, Homo sapien
atggtcaggtgggagtatacatgca

SEQ ID NO: 187241 - DNA, 25 bp, Homo sapien
taattcaatggtcaggtgggagtat

SEQ ID NO: 187242 - DNA, 25 bp, Homo sapien
ttcaatggtcaggtgggagtataca

SEQ ID NO: 187243 - DNA, 25 bp, Homo sapien
gagcagagcaggctctgagacgcca

SEQ ID NO: 187244 - DNA, 25 bp, Homo sapien
agcagagcaggctctgagacgccat

SEQ ID NO: 187245 - DNA, 25 bp, Homo sapien
agagcagagcaggctctgagacgcc

SEQ ID NO: 187246 - DNA, 25 bp, Homo sapien
gcttcctcttggtatcttatttttc

SEQ ID NO: 187247 - DNA, 25 bp, Homo sapien
tttgcttcctcttggtatcttattt

SEQ ID NO: 187248 - DNA, 25 bp, Homo sapien
tgtttgcttcctcttggtatcttat

SEQ ID NO: 187249 - DNA, 25 bp, Homo sapien
tgcttcctcttggtatcttattttt

SEQ ID NO: 187250 - DNA, 25 bp, Homo sapien
tctgtacctgttgtgtaaatatatt

SEQ ID NO: 187251 - DNA, 25 bp, Homo sapien
atgtgcacaacaatggtagtttgtc

SEQ ID NO: 187252 - DNA, 25 bp, Homo sapien
ttttcagatgaaatgtgcacaacaa

SEQ ID NO: 187253 - DNA, 25 bp, Homo sapien
tattagaacctataacaccaaagtc

SEQ ID NO: 187254 - DNA, 25 bp, Homo sapien
cacagcattactatccaacatctct

SEQ ID NO: 187255 - DNA, 25 bp, Homo sapien
tcacagcattactatccaacatctc

SEQ ID NO: 187256 - DNA, 25 bp, Homo sapien
gggcacagaaagcaagtgactgatc

SEQ ID NO: 187257 - DNA, 25 bp, Homo sapien
actgatctgggtaggaatgacaaac

SEQ ID NO: 187258 - DNA, 25 bp, Homo sapien
tcctctctgatgactgacagggcac

SEQ ID NO: 187259 - DNA, 25 bp, Homo sapien
aacacgttgccacccaatgcttctg

SEQ ID NO: 187260 - DNA, 25 bp, Homo sapien
tgacaccagatagctccagattcgg

SEQ ID NO: 187261 - DNA, 25 bp, Homo sapien
ttttgccgctgtactcaagaaaggg

SEQ ID NO: 187262 - DNA, 25 bp, Homo sapien
tatgagcacatagcatccttcgggt

SEQ ID NO: 187263 - DNA, 25 bp, Homo sapien
cctcagtggtagctgtaggcttaca

SEQ ID NO: 187264 - DNA, 25 bp, Homo sapien
agtcaacatcaatggtatcatattg

SEQ ID NO: 187265 - DNA, 25 bp, Homo sapien
ctaaaaagtcaacatcaatggtatc

SEQ ID NO: 187266 - DNA, 25 bp, Homo sapien
catcaatggtatcatattgaagaga

SEQ ID NO: 187267 - DNA, 25 bp, Homo sapien
aaaagtcaacatcaatggtatcata

SEQ ID NO: 187268 - DNA, 25 bp, Homo sapien
gacatattgagaccttaaggacagt

SEQ ID NO: 187269 - DNA, 25 bp, Homo sapien
agcttgagtatccacagcctccgca

SEQ ID NO: 187270 - DNA, 25 bp, Homo sapien
taaggacagtcggacttgcccaaag

SEQ ID NO: 187271 - DNA, 25 bp, Homo sapien
gcaagggatgctggagacatattga

SEQ ID NO: 187272 - DNA, 25 bp, Homo sapien
ggcagaagcaaaaacacgggtacaa

SEQ ID NO: 187273 - DNA, 25 bp, Homo sapien
gaagcaaaaacacgggtacaagcaa

SEQ ID NO: 187274 - DNA, 25 bp, Homo sapien
aaacacgggtacaagcaacttggca

SEQ ID NO: 187275 - DNA, 25 bp, Homo sapien
caaaaacacgggtacaagcaacttg

SEQ ID NO: 187276 - DNA, 25 bp, Homo sapien
taatgccgtttggtccagaaagagg

SEQ ID NO: 187277 - DNA, 25 bp, Homo sapien
cctgagcatagggaacataaagctt

SEQ ID NO: 187278 - DNA, 25 bp, Homo sapien
tcccacagggcaatgcaaagaccag

SEQ ID NO: 187279 - DNA, 25 bp, Homo sapien
gatgaaggttcgtagcaatgctctc

SEQ ID NO: 187280 - DNA, 25 bp, Homo sapien
ctttaattaagataggtatattggg

SEQ ID NO: 187281 - DNA, 25 bp, Homo sapien
accttccgcaaccatgacccagatc

SEQ ID NO: 187282 - DNA, 25 bp, Homo sapien
gacttgttgaaggctcaaataatca

SEQ ID NO: 187283 - DNA, 25 bp, Homo sapien
cccaaccttccgcaaccatgaccca

SEQ ID NO: 187284 - DNA, 25 bp, Homo sapien
cagacatttgcatcagacagtgagc

SEQ ID NO: 187285 - DNA, 25 bp, Homo sapien
gataggtcacctggatactcattga

SEQ ID NO: 187286 - DNA, 25 bp, Homo sapien
tcctcaagatttcctgtaagaccaa

SEQ ID NO: 187287 - DNA, 25 bp, Homo sapien
caaattgccggtttctgagtagagg

SEQ ID NO: 187288 - DNA, 25 bp, Homo sapien
agaggaatattagacatccacttgt

SEQ ID NO: 187289 - DNA, 25 bp, Homo sapien
cagaggaatattagacatccacttg

SEQ ID NO: 187290 - DNA, 25 bp, Homo sapien
ggaaaagatatactgctacatcagc

SEQ ID NO: 187291 - DNA, 25 bp, Homo sapien
gagataatatgactacagctcagat

SEQ ID NO: 187292 - DNA, 25 bp, Homo sapien
ccaaatttgggcattaatagaacaa

SEQ ID NO: 187293 - DNA, 25 bp, Homo sapien
tacttactgcttatctggtcctcca

SEQ ID NO: 187294 - DNA, 25 bp, Homo sapien
atgcagcacccattacaatcattaa

SEQ ID NO: 187295 - DNA, 25 bp, Homo sapien
taacaacaattcgtctcatcataac

SEQ ID NO: 187296 - DNA, 25 bp, Homo sapien
ttgttaatagtgaccctcggaggaa

SEQ ID NO: 187297 - DNA, 25 bp, Homo sapien
tgtctcaagaattatcaccaaagtt

SEQ ID NO: 187298 - DNA, 25 bp, Homo sapien
tatatccaggcagatgtatatgcca

SEQ ID NO: 187299 - DNA, 25 bp, Homo sapien
ggtcaagagtagaaatatatccagg

SEQ ID NO: 187300 - DNA, 25 bp, Homo sapien
tcattccaacttcgtagggtgggtc

SEQ ID NO: 187301 - DNA, 25 bp, Homo sapien
aagaacacaacacatgagtcaggat

SEQ ID NO: 187302 - DNA, 25 bp, Homo sapien
tcattgtacgatttcaaagtagtgc

SEQ ID NO: 187303 - DNA, 25 bp, Homo sapien
gtgtatagtgccatccccacaatgg

SEQ ID NO: 187304 - DNA, 25 bp, Homo sapien
tgcaatatcgccatgatgtgctggg

SEQ ID NO: 187305 - DNA, 25 bp, Homo sapien
gggcatgaagacgtatcctgtgtat

SEQ ID NO: 187306 - DNA, 25 bp, Homo sapien
tgattctcctgtcttagcctcctga

SEQ ID NO: 187307 - DNA, 25 bp, Homo sapien
cttgttacccaaggctggagtgtaa

SEQ ID NO: 187308 - DNA, 25 bp, Homo sapien
gcaacctctgccttctgggttcaag

SEQ ID NO: 187309 - DNA, 25 bp, Homo sapien
tgtaatggcacgatctcggctcact

SEQ ID NO: 187310 - DNA, 25 bp, Homo sapien
aaaggctgtttgaattgacactgtt

SEQ ID NO: 187311 - DNA, 25 bp, Homo sapien
tgatgtgagccggaagggcaccact

SEQ ID NO: 187312 - DNA, 25 bp, Homo sapien
ttattccttaaactgccgccttcta

SEQ ID NO: 187313 - DNA, 25 bp, Homo sapien
gctgcttctatatcattggcatata

SEQ ID NO: 187314 - DNA, 25 bp, Homo sapien
catttccctgtttttcactggctct

SEQ ID NO: 187315 - DNA, 25 bp, Homo sapien
atttccctgtttttcactggctctt

SEQ ID NO: 187316 - DNA, 25 bp, Homo sapien
ttccctgtttttcactggctctttc

SEQ ID NO: 187317 - DNA, 25 bp, Homo sapien
gacctcaggcaatccccccgcctcg

SEQ ID NO: 187318 - DNA, 25 bp, Homo sapien
gtttttggagacagtcttactctgt

SEQ ID NO: 187319 - DNA, 25 bp, Homo sapien
agtctttcagcggctgtttttttgt

SEQ ID NO: 187320 - DNA, 25 bp, Homo sapien
tactctgtcacccaggctggagtgc

SEQ ID NO: 187321 - DNA, 25 bp, Homo sapien
tgtgagccacctcgtgaggcctcag

SEQ ID NO: 187322 - DNA, 25 bp, Homo sapien
gtgagccacctcgtgaggcctcagc

SEQ ID NO: 187323 - DNA, 25 bp, Homo sapien
gtgtgagccacctcgtgaggcctca

SEQ ID NO: 187324 - DNA, 25 bp, Homo sapien
atctgtttatagttgccgtggactc

SEQ ID NO: 187325 - DNA, 25 bp, Homo sapien
ctttatcaaactcaactggctaagg

SEQ ID NO: 187326 - DNA, 25 bp, Homo sapien
gactctttatcttttccgcacacgg

SEQ ID NO: 187327 - DNA, 25 bp, Homo sapien
tgatccctacatgtggcgcagcttg

SEQ ID NO: 187328 - DNA, 25 bp, Homo sapien
agtaaaaccgccaagcttgtattat

SEQ ID NO: 187329 - DNA, 25 bp, Homo sapien
gcaaagtaaaaccgccaagcttgta

SEQ ID NO: 187330 - DNA, 25 bp, Homo sapien
ccgccaagcttgtattattatctca

SEQ ID NO: 187331 - DNA, 25 bp, Homo sapien
aaaccgccaagcttgtattattatc

SEQ ID NO: 187332 - DNA, 25 bp, Homo sapien
tggagttttcctctcattacccagc

SEQ ID NO: 187333 - DNA, 25 bp, Homo sapien
tttcctctcattacccagctggagt

SEQ ID NO: 187334 - DNA, 25 bp, Homo sapien
agttttcctctcattacccagctgg

SEQ ID NO: 187335 - DNA, 25 bp, Homo sapien
ttttcctctcattacccagctggag

SEQ ID NO: 187336 - DNA, 25 bp, Homo sapien
cagttttacacgcaaggtgtctaaa

SEQ ID NO: 187337 - DNA, 25 bp, Homo sapien
gcacaggggctcatgcctgtaatcc

SEQ ID NO: 187338 - DNA, 25 bp, Homo sapien
tggatcacctgaggtcaggagttgg

SEQ ID NO: 187339 - DNA, 25 bp, Homo sapien
tgcttctttaaaatttctaggccag

SEQ ID NO: 187340 - DNA, 25 bp, Homo sapien
caacactctgggaggccaaagcagg

SEQ ID NO: 187341 - DNA, 25 bp, Homo sapien
aaatgggtaggagaaacagtacagc

SEQ ID NO: 187342 - DNA, 25 bp, Homo sapien
taatttctagatcacctgacctggt

SEQ ID NO: 187343 - DNA, 25 bp, Homo sapien
taaagtacccttgacacactgtgag

SEQ ID NO: 187344 - DNA, 25 bp, Homo sapien
agtacagcactgtaggagacccagg

SEQ ID NO: 187345 - DNA, 25 bp, Homo sapien
aaatcaacagggtatggcggcgggc

SEQ ID NO: 187346 - DNA, 25 bp, Homo sapien
tcttttgtgttttcaaccataagga

SEQ ID NO: 187347 - DNA, 25 bp, Homo sapien
tgcataggaaactgctgacactggt

SEQ ID NO: 187348 - DNA, 25 bp, Homo sapien
caaccataaggatgtataatctatt

SEQ ID NO: 187349 - DNA, 25 bp, Homo sapien
gactccagctatctgcccaccgcgg

SEQ ID NO: 187350 - DNA, 25 bp, Homo sapien
caccaaagtagctggcgtacactac

SEQ ID NO: 187351 - DNA, 25 bp, Homo sapien
tagctggcgtacactactacacccg

SEQ ID NO: 187352 - DNA, 25 bp, Homo sapien
aaagtagctggcgtacactactaca

SEQ ID NO: 187353 - DNA, 25 bp, Homo sapien
cagattagttctgggtgaagcttac

SEQ ID NO: 187354 - DNA, 25 bp, Homo sapien
tttaagctgtagaaagtatgcctct

SEQ ID NO: 187355 - DNA, 25 bp, Homo sapien
tgttcaggacttctaactcagagac

SEQ ID NO: 187356 - DNA, 25 bp, Homo sapien
ctttccaaaagcctgtagctggcca

SEQ ID NO: 187357 - DNA, 25 bp, Homo sapien
cgatgtgctccactgttacatgatc

SEQ ID NO: 187358 - DNA, 25 bp, Homo sapien
tcaaaggcgtccaagccgggagcga

SEQ ID NO: 187359 - DNA, 25 bp, Homo sapien
cgtccaagccgggagcgatgtgctc

SEQ ID NO: 187360 - DNA, 25 bp, Homo sapien
ccgggagcgatgtgctccactgtta

SEQ ID NO: 187361 - DNA, 25 bp, Homo sapien
aacaccgtccgctcccagggctcca

SEQ ID NO: 187362 - DNA, 25 bp, Homo sapien
gaacaccgtccgctcccagggctcc

SEQ ID NO: 187363 - DNA, 25 bp, Homo sapien
cccagggctccagcatgtagagcgc

SEQ ID NO: 187364 - DNA, 25 bp, Homo sapien
gctccagcatgtagagcgccgtgac

SEQ ID NO: 187365 - DNA, 25 bp, Homo sapien
tggtagtagaaccaggacatctgct

SEQ ID NO: 187366 - DNA, 25 bp, Homo sapien
gcaggtactggtagtagaaccagga

SEQ ID NO: 187367 - DNA, 25 bp, Homo sapien
gtagtagaaccaggacatctgcttc

SEQ ID NO: 187368 - DNA, 25 bp, Homo sapien
tactggtagtagaaccaggacatct

SEQ ID NO: 187369 - DNA, 25 bp, Homo sapien
gcctcccgcgatgcagctcacacgt

SEQ ID NO: 187370 - DNA, 25 bp, Homo sapien
ggccgcccgctcacgtcctaaagcc

SEQ ID NO: 187371 - DNA, 25 bp, Homo sapien
cgcgatgcagctcacacgtcagtct

SEQ ID NO: 187372 - DNA, 25 bp, Homo sapien
gcagctcacacgtcagtctgtccgg

SEQ ID NO: 187373 - DNA, 25 bp, Homo sapien
cgtgatccgtgtaagaggagataag

SEQ ID NO: 187374 - DNA, 25 bp, Homo sapien
gcattaatcaagtcgtgatccgtgt

SEQ ID NO: 187375 - DNA, 25 bp, Homo sapien
gagacaagcattaatcaagtcgtga

SEQ ID NO: 187376 - DNA, 25 bp, Homo sapien
tcaagtcgtgatccgtgtaagagga

SEQ ID NO: 187377 - DNA, 25 bp, Homo sapien
gtaaccaccaagtgggtcaaggcca

SEQ ID NO: 187378 - DNA, 25 bp, Homo sapien
tctgcccacctcttagtggctgtag

SEQ ID NO: 187379 - DNA, 25 bp, Homo sapien
cagaagcgcgctgatctagtgggtt

SEQ ID NO: 187380 - DNA, 25 bp, Homo sapien
ccagaagcgcgctgatctagtgggt

SEQ ID NO: 187381 - DNA, 25 bp, Homo sapien
tggctatccctgtttattaaccgtg

SEQ ID NO: 187382 - DNA, 25 bp, Homo sapien
tgtttattaaccgtggatcatctcg

SEQ ID NO: 187383 - DNA, 25 bp, Homo sapien
cgtggatcatctcgtactttcagat

SEQ ID NO: 187384 - DNA, 25 bp, Homo sapien
tgctgccgctggctatccctgttta

SEQ ID NO: 187385 - DNA, 25 bp, Homo sapien
tgagaaaccaaggagcaatcgagga

SEQ ID NO: 187386 - DNA, 25 bp, Homo sapien
tcctggtagacgaggaaccctgatg

SEQ ID NO: 187387 - DNA, 25 bp, Homo sapien
gacagtctagatgccagtactttag

SEQ ID NO: 187388 - DNA, 25 bp, Homo sapien
gtgattttctagatgagcagctggc

SEQ ID NO: 187389 - DNA, 25 bp, Homo sapien
tcacccaccttccagaggcccagga

SEQ ID NO: 187390 - DNA, 25 bp, Homo sapien
acccaccttccagaggcccaggaca

SEQ ID NO: 187391 - DNA, 25 bp, Homo sapien
gtcacccaccttccagaggcccagg

SEQ ID NO: 187392 - DNA, 25 bp, Homo sapien
cacccaccttccagaggcccaggac

SEQ ID NO: 187393 - DNA, 25 bp, Homo sapien
tatgatttttcgtcatctcagtagg

SEQ ID NO: 187394 - DNA, 25 bp, Homo sapien
tgcctgagtgtatcttcctagaacc

SEQ ID NO: 187395 - DNA, 25 bp, Homo sapien
cacccttgttgtgcaatgagcttca

SEQ ID NO: 187396 - DNA, 25 bp, Homo sapien
ctcagtaggataggcaaggttcttc

SEQ ID NO: 187397 - DNA, 25 bp, Homo sapien
tgtgcattcattaagtttagaatac

SEQ ID NO: 187398 - DNA, 25 bp, Homo sapien
actggtaagtgtactccttttcaga

SEQ ID NO: 187399 - DNA, 25 bp, Homo sapien
agtacctactccatgcaattgtttg

SEQ ID NO: 187400 - DNA, 25 bp, Homo sapien
ggaggttgctttccctcaccataaa

SEQ ID NO: 187401 - DNA, 25 bp, Homo sapien
ccagtttaattacatcaaagctata

SEQ ID NO: 187402 - DNA, 25 bp, Homo sapien
gagtttccagtttaattacatcaaa

SEQ ID NO: 187403 - DNA, 25 bp, Homo sapien
ttaattacatcaaagctatatccaa

SEQ ID NO: 187404 - DNA, 25 bp, Homo sapien
gtttccagtttaattacatcaaagc

SEQ ID NO: 187405 - DNA, 25 bp, Homo sapien
tgagagatgtaagagatgaatgaag

SEQ ID NO: 187406 - DNA, 25 bp, Homo sapien
gaaggttgacaactattctccttta

SEQ ID NO: 187407 - DNA, 25 bp, Homo sapien
tatttgccttatatacagtattggg

SEQ ID NO: 187408 - DNA, 25 bp, Homo sapien
cagaacattttaattctacagagct

SEQ ID NO: 187409 - DNA, 25 bp, Homo sapien
taggaatggcttgctaaaacattga

SEQ ID NO: 187410 - DNA, 25 bp, Homo sapien
gaatggcttgctaaaacattgaaaa

SEQ ID NO: 187411 - DNA, 25 bp, Homo sapien
ggaatggcttgctaaaacattgaaa

SEQ ID NO: 187412 - DNA, 25 bp, Homo sapien
ttaggaatggcttgctaaaacattg

SEQ ID NO: 187413 - DNA, 25 bp, Homo sapien
ttcatccttgtcgtagactgccact

SEQ ID NO: 187414 - DNA, 25 bp, Homo sapien
acttcagtggaacattcagtgcaca

SEQ ID NO: 187415 - DNA, 25 bp, Homo sapien
gcatcttcccggttagacctcatct

SEQ ID NO: 187416 - DNA, 25 bp, Homo sapien
tgtctctgccttctcggcagcatct

SEQ ID NO: 187417 - DNA, 25 bp, Homo sapien
gaggctttatatcttagaacctcct

SEQ ID NO: 187418 - DNA, 25 bp, Homo sapien
caattcattacaaacattgctctat

SEQ ID NO: 187419 - DNA, 25 bp, Homo sapien
tctatattgagttttgtatgattca

SEQ ID NO: 187420 - DNA, 25 bp, Homo sapien
ggctttatatcttagaacctcctct

SEQ ID NO: 187421 - DNA, 25 bp, Homo sapien
gcccctttggatctattaatgttta

SEQ ID NO: 187422 - DNA, 25 bp, Homo sapien
ccagcccctttggatctattaatgt

SEQ ID NO: 187423 - DNA, 25 bp, Homo sapien
cagcccctttggatctattaatgtt

SEQ ID NO: 187424 - DNA, 25 bp, Homo sapien
agcccctttggatctattaatgttt

SEQ ID NO: 187425 - DNA, 25 bp, Homo sapien
cagaactttatcagaattcctgagt

SEQ ID NO: 187426 - DNA, 25 bp, Homo sapien
tcctgagtacctcaaaagtctgttt

SEQ ID NO: 187427 - DNA, 25 bp, Homo sapien
gaattcctgagtacctcaaaagtct

SEQ ID NO: 187428 - DNA, 25 bp, Homo sapien
gaactttatcagaattcctgagtac

SEQ ID NO: 187429 - DNA, 25 bp, Homo sapien
ctgtttctaatttaaacaaaatatg

SEQ ID NO: 187430 - DNA, 25 bp, Homo sapien
cagagtaagactctgacttcaaaaa

SEQ ID NO: 187431 - DNA, 25 bp, Homo sapien
tgtgtgtgtgtccttcatccattac

SEQ ID NO: 187432 - DNA, 25 bp, Homo sapien
ctaatttaaacaaaatatgtatgtg

SEQ ID NO: 187433 - DNA, 25 bp, Homo sapien
tgcaggcaggacaattcaagacagc

SEQ ID NO: 187434 - DNA, 25 bp, Homo sapien
caaggcaaagtgtggtcatgcaggc

SEQ ID NO: 187435 - DNA, 25 bp, Homo sapien
aattcaagacagcatcactatttgg

SEQ ID NO: 187436 - DNA, 25 bp, Homo sapien
atcaaggcaaagtgtggtcatgcag

SEQ ID NO: 187437 - DNA, 25 bp, Homo sapien
ctgttgttgacgtgatctctgtggt

SEQ ID NO: 187438 - DNA, 25 bp, Homo sapien
tgttgttgacgtgatctctgtggtc

SEQ ID NO: 187439 - DNA, 25 bp, Homo sapien
ctctgtgcatcaacccaggcctgat

SEQ ID NO: 187440 - DNA, 25 bp, Homo sapien
tctgtgcatcaacccaggcctgatc

SEQ ID NO: 187441 - DNA, 25 bp, Homo sapien
tcgtcatttgttggaatcttgtgtt

SEQ ID NO: 187442 - DNA, 25 bp, Homo sapien
catacagtaattcgtcatttgttgg

SEQ ID NO: 187443 - DNA, 25 bp, Homo sapien
tcatcgtagtaccttgtcggagctg

SEQ ID NO: 187444 - DNA, 25 bp, Homo sapien
ggagctgttgcaacttttccatttc

SEQ ID NO: 187445 - DNA, 25 bp, Homo sapien
tgtcggagctgttgcaacttttcca

SEQ ID NO: 187446 - DNA, 25 bp, Homo sapien
gaatcaaaatatatatcatcgtagt

SEQ ID NO: 187447 - DNA, 25 bp, Homo sapien
tcgtttttggtcaggagttccatgt

SEQ ID NO: 187448 - DNA, 25 bp, Homo sapien
gttcccagagaggataacttgtcct

SEQ ID NO: 187449 - DNA, 25 bp, Homo sapien
ttggtcaggagttccatgtaaaagc

SEQ ID NO: 187450 - DNA, 25 bp, Homo sapien
cactttctccggtaagacattctct

SEQ ID NO: 187451 - DNA, 25 bp, Homo sapien
tttaagtattacatggttacatttg

SEQ ID NO: 187452 - DNA, 25 bp, Homo sapien
tacatttgatgtacttatacattac

SEQ ID NO: 187453 - DNA, 25 bp, Homo sapien
tattacatggttacatttgatgtac

SEQ ID NO: 187454 - DNA, 25 bp, Homo sapien
taaactcccagcatctcactgtcca

SEQ ID NO: 187455 - DNA, 25 bp, Homo sapien
cacctcgggttccccagtagctgga

SEQ ID NO: 187456 - DNA, 25 bp, Homo sapien
ggcacataccaccattcccagctgt

SEQ ID NO: 187457 - DNA, 25 bp, Homo sapien
ccacctcgggttccccagtagctgg

SEQ ID NO: 187458 - DNA, 25 bp, Homo sapien
acataccaccattcccagctgtttt

SEQ ID NO: 187459 - DNA, 25 bp, Homo sapien
tactataagcctctggaagacaagg

SEQ ID NO: 187460 - DNA, 25 bp, Homo sapien
aatatctcggcaaaacagcttcaag

SEQ ID NO: 187461 - DNA, 25 bp, Homo sapien
tcagagcgagcatacaacagtccct

SEQ ID NO: 187462 - DNA, 25 bp, Homo sapien
tggaaatcccacgaaccttcttctg

SEQ ID NO: 187463 - DNA, 25 bp, Homo sapien
tcccgagccgctagggtctgcgtag

SEQ ID NO: 187464 - DNA, 25 bp, Homo sapien
gacaggtttcgatctcattgctttt

SEQ ID NO: 187465 - DNA, 25 bp, Homo sapien
aatggaggcgaccaaagccaggcct

SEQ ID NO: 187466 - DNA, 25 bp, Homo sapien
tggcttcgcacaagtaacaggcacg

SEQ ID NO: 187467 - DNA, 25 bp, Homo sapien
cgtagtcatccggaagccggttcat

SEQ ID NO: 187468 - DNA, 25 bp, Homo sapien
taggggtcgtagtcatccggaagcc

SEQ ID NO: 187469 - DNA, 25 bp, Homo sapien
cgctaggctcttcaaccgcgtaggg

SEQ ID NO: 187470 - DNA, 25 bp, Homo sapien
tcaaagccggctcctcgtcgctagg

SEQ ID NO: 187471 - DNA, 25 bp, Homo sapien
cgtctctgtttacactgcaagtcca

SEQ ID NO: 187472 - DNA, 25 bp, Homo sapien
agtccagtccctaaagcgcccctga

SEQ ID NO: 187473 - DNA, 25 bp, Homo sapien
tacaccgtccacaagcaatttgcag

SEQ ID NO: 187474 - DNA, 25 bp, Homo sapien
caatttgcagcgtctctgtttacac

SEQ ID NO: 187475 - DNA, 25 bp, Homo sapien
tgatgggcaccctcataagtgacag

SEQ ID NO: 187476 - DNA, 25 bp, Homo sapien
gcaggaatctagacgctgagggaca

SEQ ID NO: 187477 - DNA, 25 bp, Homo sapien
gacacacagcccgaaatccaataag

SEQ ID NO: 187478 - DNA, 25 bp, Homo sapien
ggtgaacatgctacatgcagcgtct

SEQ ID NO: 187479 - DNA, 25 bp, Homo sapien
caccagtggatgaatgctggaccga

SEQ ID NO: 187480 - DNA, 25 bp, Homo sapien
taagcccatgtgatgtccaccagtg

SEQ ID NO: 187481 - DNA, 25 bp, Homo sapien
tgagcgcccgttcttggtctaatcc

SEQ ID NO: 187482 - DNA, 25 bp, Homo sapien
ttctggatccaggtctaggcccttc

SEQ ID NO: 187483 - DNA, 25 bp, Homo sapien
ggcgtagaatgaaagcagccgtcca

SEQ ID NO: 187484 - DNA, 25 bp, Homo sapien
taggaatgcactctaaaaagtgggc

SEQ ID NO: 187485 - DNA, 25 bp, Homo sapien
cattattagggtgcttattgtagga

SEQ ID NO: 187486 - DNA, 25 bp, Homo sapien
cttggcccctggtttacattattag

SEQ ID NO: 187487 - DNA, 25 bp, Homo sapien
catgctgtatacactgtccacccat

SEQ ID NO: 187488 - DNA, 25 bp, Homo sapien
cagatcacaagaagattgaggttgg

SEQ ID NO: 187489 - DNA, 25 bp, Homo sapien
agctgtcttggttgtcaacataaca

SEQ ID NO: 187490 - DNA, 25 bp, Homo sapien
aacattgagtcatgcctctgtccag

SEQ ID NO: 187491 - DNA, 25 bp, Homo sapien
ccaggctattcaccaggcggcccct

SEQ ID NO: 187492 - DNA, 25 bp, Homo sapien
ggctattcaccaggcggcccctcct

SEQ ID NO: 187493 - DNA, 25 bp, Homo sapien
caggctattcaccaggcggcccctc

SEQ ID NO: 187494 - DNA, 25 bp, Homo sapien
ggccaggctattcaccaggcggccc

SEQ ID NO: 187495 - DNA, 25 bp, Homo sapien
ctttcttcaaaaagtggcttggcct

SEQ ID NO: 187496 - DNA, 25 bp, Homo sapien
gcctttttattctcctggagatgcc

SEQ ID NO: 187497 - DNA, 25 bp, Homo sapien
tccaggtaccaaggcggccgctaca

SEQ ID NO: 187498 - DNA, 25 bp, Homo sapien
ggtctcccggccatgattgttgctt

SEQ ID NO: 187499 - DNA, 25 bp, Homo sapien
catttgtatcccaagtccgcagttt

SEQ ID NO: 187500 - DNA, 25 bp, Homo sapien
tgccacatgccgttgtgcaaggtag

SEQ ID NO: 187501 - DNA, 25 bp, Homo sapien
gacgattccggtagacccagatggg

SEQ ID NO: 187502 - DNA, 25 bp, Homo sapien
gcgtagtcagccttcttccatggcg

SEQ ID NO: 187503 - DNA, 25 bp, Homo sapien
gaagatgctcaaggaaaacgatgtt

SEQ ID NO: 187504 - DNA, 25 bp, Homo sapien
ggaaaacgatgttctgtcaagctgc

SEQ ID NO: 187505 - DNA, 25 bp, Homo sapien
cagggaagatgctcaaggaaaacga

SEQ ID NO: 187506 - DNA, 25 bp, Homo sapien
acgatgttctgtcaagctgcttggg

SEQ ID NO: 187507 - DNA, 25 bp, Homo sapien
agaagagaaggggccgaaacttgct

SEQ ID NO: 187508 - DNA, 25 bp, Homo sapien
ttctgttgggctggcgagaagagaa

SEQ ID NO: 187509 - DNA, 25 bp, Homo sapien
gagaagagaaggggccgaaacttgc

SEQ ID NO: 187510 - DNA, 25 bp, Homo sapien
cgagaagagaaggggccgaaacttg

SEQ ID NO: 187511 - DNA, 25 bp, Homo sapien
cggcccagacgctagatcccttggg

SEQ ID NO: 187512 - DNA, 25 bp, Homo sapien
aaggtgagcccaaacccgagccctg

SEQ ID NO: 187513 - DNA, 25 bp, Homo sapien
gcggtggggccgcaaactctctttc

SEQ ID NO: 187514 - DNA, 25 bp, Homo sapien
ggggccgcaaactctctttcgctcg

SEQ ID NO: 187515 - DNA, 25 bp, Homo sapien
tacaaggccctcaagaacaggagac

SEQ ID NO: 187516 - DNA, 25 bp, Homo sapien
gcatgacagtgaaggccggactaca

SEQ ID NO: 187517 - DNA, 25 bp, Homo sapien
ttctggaaggactagaacggagtca

SEQ ID NO: 187518 - DNA, 25 bp, Homo sapien
aagcaggcgtgtcatgcatgacagt

SEQ ID NO: 187519 - DNA, 25 bp, Homo sapien
tggcctggagaaagcacgagatcgt

SEQ ID NO: 187520 - DNA, 25 bp, Homo sapien
taattggcgcgttactaaaggatcc

SEQ ID NO: 187521 - DNA, 25 bp, Homo sapien
cgttttcacgacaataccctggaga

SEQ ID NO: 187522 - DNA, 25 bp, Homo sapien
cgtgaaaacgaaagcgaactgccca

SEQ ID NO: 187523 - DNA, 25 bp, Homo sapien
catccggagtgcaatggataagcct

SEQ ID NO: 187524 - DNA, 25 bp, Homo sapien
gcaggggaaagcgcgaacgcagtcc

SEQ ID NO: 187525 - DNA, 25 bp, Homo sapien
agtgcaatggataagcctcgccctg

SEQ ID NO: 187526 - DNA, 25 bp, Homo sapien
cggagtgcaatggataagcctcgcc

SEQ ID NO: 187527 - DNA, 25 bp, Homo sapien
gcactcggatatcgcgcgcgggaca

SEQ ID NO: 187528 - DNA, 25 bp, Homo sapien
caccgttgccgctaggggaagacac

SEQ ID NO: 187529 - DNA, 25 bp, Homo sapien
tcgctccaccgttgccgctagggga

SEQ ID NO: 187530 - DNA, 25 bp, Homo sapien
aagacaccccgacagcactcggata

SEQ ID NO: 187531 - DNA, 25 bp, Homo sapien
ttgggcgcaagtgggcgcgcggccg

SEQ ID NO: 187532 - DNA, 25 bp, Homo sapien
tcgtccccggcgctccggtctctcc

SEQ ID NO: 187533 - DNA, 25 bp, Homo sapien
ccggggctggttgggcgcaagtggg

SEQ ID NO: 187534 - DNA, 25 bp, Homo sapien
gctggttgggcgcaagtgggcgcgc

SEQ ID NO: 187535 - DNA, 25 bp, Homo sapien
tggcaaacggttaagtgaaacactg

SEQ ID NO: 187536 - DNA, 25 bp, Homo sapien
gaccaccttggtaaatacagaatgg

SEQ ID NO: 187537 - DNA, 25 bp, Homo sapien
gaaacactgtatagcttctggccct

SEQ ID NO: 187538 - DNA, 25 bp, Homo sapien
accactggacggctgctttcattct

SEQ ID NO: 187539 - DNA, 25 bp, Homo sapien
gatgaagggcctagacctggatcca

SEQ ID NO: 187540 - DNA, 25 bp, Homo sapien
taaagagacgaaacgctgaccagct

SEQ ID NO: 187541 - DNA, 25 bp, Homo sapien
tgaatgaggcaagacaacatgcggc

SEQ ID NO: 187542 - DNA, 25 bp, Homo sapien
ggattagaccaagaacgggcgctca

SEQ ID NO: 187543 - DNA, 25 bp, Homo sapien
tccaaggggtgacaggcccaaatgc

SEQ ID NO: 187544 - DNA, 25 bp, Homo sapien
ggaacccatccaaggggtgacaggc

SEQ ID NO: 187545 - DNA, 25 bp, Homo sapien
gcctacggtctccaaatggtagaaa

SEQ ID NO: 187546 - DNA, 25 bp, Homo sapien
aggcccaaatgcctacggtctccaa

SEQ ID NO: 187547 - DNA, 25 bp, Homo sapien
ggactttgttcgagatgccatttca

SEQ ID NO: 187548 - DNA, 25 bp, Homo sapien
ttggtggactttgttcgagatgcca

SEQ ID NO: 187549 - DNA, 25 bp, Homo sapien
cagaggagcagttcattcttttgta

SEQ ID NO: 187550 - DNA, 25 bp, Homo sapien
taactgtcactaacctgcctctgtc

SEQ ID NO: 187551 - DNA, 25 bp, Homo sapien
ttccagagtgatacaatgaccatag

SEQ ID NO: 187552 - DNA, 25 bp, Homo sapien
tttccagagtgatacaatgaccata

SEQ ID NO: 187553 - DNA, 25 bp, Homo sapien
ctttttaacaggaaggcggagtgtg

SEQ ID NO: 187554 - DNA, 25 bp, Homo sapien
gacttctgagtatgacgagtgcacg

SEQ ID NO: 187555 - DNA, 25 bp, Homo sapien
gctttaccaggatacatgaatgaac

SEQ ID NO: 187556 - DNA, 25 bp, Homo sapien
acacagactggcatcgcctgggcgt

SEQ ID NO: 187557 - DNA, 25 bp, Homo sapien
ttatgtgtctccatttaacactgcc

SEQ ID NO: 187558 - DNA, 25 bp, Homo sapien
ggcagttctgcagcaactgtagatt

SEQ ID NO: 187559 - DNA, 25 bp, Homo sapien
agttctgcagcaactgtagattacc

SEQ ID NO: 187560 - DNA, 25 bp, Homo sapien
gtgtctccatttaacactgccaggc

SEQ ID NO: 187561 - DNA, 25 bp, Homo sapien
aacccctgatctacagcaaaacttt

SEQ ID NO: 187562 - DNA, 25 bp, Homo sapien
ctttcagagctgaccattggagacg

SEQ ID NO: 187563 - DNA, 25 bp, Homo sapien
tctattaactacaagaagaggctta

SEQ ID NO: 187564 - DNA, 25 bp, Homo sapien
ccattggagacgttatagatattat

SEQ ID NO: 187565 - DNA, 25 bp, Homo sapien
attaggtattagattctttcagagc

SEQ ID NO: 187566 - DNA, 25 bp, Homo sapien
ttttttctgaatgcagcaactcttc

SEQ ID NO: 187567 - DNA, 25 bp, Homo sapien
tctgccagttccactaaattttttc

SEQ ID NO: 187568 - DNA, 25 bp, Homo sapien
gcatgcttcagttctaactctgcca

SEQ ID NO: 187569 - DNA, 25 bp, Homo sapien
gcaactcttcttgtcttaaaatcta

SEQ ID NO: 187570 - DNA, 25 bp, Homo sapien
ttttcataatccactagtgacctag

SEQ ID NO: 187571 - DNA, 25 bp, Homo sapien
aatttctgacaacataattgttggg

SEQ ID NO: 187572 - DNA, 25 bp, Homo sapien
tgctcttgctttatccagtgcttta

SEQ ID NO: 187573 - DNA, 25 bp, Homo sapien
gaagtttcggcctgtagaacatctt

SEQ ID NO: 187574 - DNA, 25 bp, Homo sapien
tactgcatgtttccagtagtcacac

SEQ ID NO: 187575 - DNA, 25 bp, Homo sapien
atatactgcatgtttccagtagtca

SEQ ID NO: 187576 - DNA, 25 bp, Homo sapien
cagaatgcttcacaatagtatatat

SEQ ID NO: 187577 - DNA, 25 bp, Homo sapien
taaaacagaatgcttcacaatagta

SEQ ID NO: 187578 - DNA, 25 bp, Homo sapien
tgaggcaatttattaacccagcatg

SEQ ID NO: 187579 - DNA, 25 bp, Homo sapien
cgaatgaggcaatttattaacccag

SEQ ID NO: 187580 - DNA, 25 bp, Homo sapien
gaggcaatttattaacccagcatgg

SEQ ID NO: 187581 - DNA, 25 bp, Homo sapien
aatgaggcaatttattaacccagca

SEQ ID NO: 187582 - DNA, 25 bp, Homo sapien
aatgcttcttgttggcaactgccac

SEQ ID NO: 187583 - DNA, 25 bp, Homo sapien
ctaatgcttcttgttggcaactgcc

SEQ ID NO: 187584 - DNA, 25 bp, Homo sapien
taatgcttcttgttggcaactgcca

SEQ ID NO: 187585 - DNA, 25 bp, Homo sapien
ctctctgtccctgacgtgtcagttt

SEQ ID NO: 187586 - DNA, 25 bp, Homo sapien
ctgtccagcgattctgtccagatct

SEQ ID NO: 187587 - DNA, 25 bp, Homo sapien
cttggaggacccggtgggccacatt

SEQ ID NO: 187588 - DNA, 25 bp, Homo sapien
tccctgacgtgtcagtttgcggccc

SEQ ID NO: 187589 - DNA, 25 bp, Homo sapien
ggagcctcggctaaagtggccaggc

SEQ ID NO: 187590 - DNA, 25 bp, Homo sapien
ttggagcctcggctaaagtggccag

SEQ ID NO: 187591 - DNA, 25 bp, Homo sapien
gccaggcatgccgccacttctctga

SEQ ID NO: 187592 - DNA, 25 bp, Homo sapien
cttggagcctcggctaaagtggcca

SEQ ID NO: 187593 - DNA, 25 bp, Homo sapien
cccagaggtacaggtgccacgctgt

SEQ ID NO: 187594 - DNA, 25 bp, Homo sapien
cgctgtggaagcagctcgcgtgtac

SEQ ID NO: 187595 - DNA, 25 bp, Homo sapien
gcgtgtacaaccagttctcatcgta

SEQ ID NO: 187596 - DNA, 25 bp, Homo sapien
gccagcagcttgacggtgtccaccc

SEQ ID NO: 187597 - DNA, 25 bp, Homo sapien
tcacatcttttacagtaactccagg

SEQ ID NO: 187598 - DNA, 25 bp, Homo sapien
ctgctggttcacatcttttacagta

SEQ ID NO: 187599 - DNA, 25 bp, Homo sapien
tgctggttcacatcttttacagtaa

SEQ ID NO: 187600 - DNA, 25 bp, Homo sapien
catcttttacagtaactccaggcat

SEQ ID NO: 187601 - DNA, 25 bp, Homo sapien
ggtgtacagtgataccttgttgtag

SEQ ID NO: 187602 - DNA, 25 bp, Homo sapien
actgactggatcactggatagtata

SEQ ID NO: 187603 - DNA, 25 bp, Homo sapien
ggatagtatatttcgccttttaaga

SEQ ID NO: 187604 - DNA, 25 bp, Homo sapien
ataggattgggctatgttgccaggc

SEQ ID NO: 187605 - DNA, 25 bp, Homo sapien
tttcatcatgctagccaggctggtc

SEQ ID NO: 187606 - DNA, 25 bp, Homo sapien
gctagccaggctggtcttgaactcc

SEQ ID NO: 187607 - DNA, 25 bp, Homo sapien
acgtcaggtgatcctctggcctcgg

SEQ ID NO: 187608 - DNA, 25 bp, Homo sapien
tggcctcggcctccccaagtgttgg

SEQ ID NO: 187609 - DNA, 25 bp, Homo sapien
gcagcttgagattctcttaagtaat

SEQ ID NO: 187610 - DNA, 25 bp, Homo sapien
cagcagacactcgtgcttctatttt

SEQ ID NO: 187611 - DNA, 25 bp, Homo sapien
gatcagaaagtttgaggtcttcatc

SEQ ID NO: 187612 - DNA, 25 bp, Homo sapien
ggtcttcatcagcagacactcgtgc

SEQ ID NO: 187613 - DNA, 25 bp, Homo sapien
tttaatcaacaactacattctcctc

SEQ ID NO: 187614 - DNA, 25 bp, Homo sapien
gaaaaaattgaatatttaatcaaca

SEQ ID NO: 187615 - DNA, 25 bp, Homo sapien
atttaatcaacaactacattctcct

SEQ ID NO: 187616 - DNA, 25 bp, Homo sapien
aatcaacaactacattctcctctca

SEQ ID NO: 187617 - DNA, 25 bp, Homo sapien
tcactggcagtgccttgaaaggcag

SEQ ID NO: 187618 - DNA, 25 bp, Homo sapien
tcgaacagttctgaaactttgagaa

SEQ ID NO: 187619 - DNA, 25 bp, Homo sapien
tcttgttttatcgaacagttctgaa

SEQ ID NO: 187620 - DNA, 25 bp, Homo sapien
tgttttatcgaacagttctgaaact

SEQ ID NO: 187621 - DNA, 25 bp, Homo sapien
gaacagttctgaaactttgagaaaa

SEQ ID NO: 187622 - DNA, 25 bp, Homo sapien
tgccaaaaagcgtgacttttaaata

SEQ ID NO: 187623 - DNA, 25 bp, Homo sapien
gctttgccaaaaagcgtgactttta

SEQ ID NO: 187624 - DNA, 25 bp, Homo sapien
taagaacactctaacataaattcgg

SEQ ID NO: 187625 - DNA, 25 bp, Homo sapien
cataaattcggttcttccactctct

SEQ ID NO: 187626 - DNA, 25 bp, Homo sapien
gagtaaagtcgatttttatttctca

SEQ ID NO: 187627 - DNA, 25 bp, Homo sapien
tcttacacacaaatcagcccatttt

SEQ ID NO: 187628 - DNA, 25 bp, Homo sapien
taaagcatataatgaagaaccaatt

SEQ ID NO: 187629 - DNA, 25 bp, Homo sapien
agcatataatgaagaaccaattcta

SEQ ID NO: 187630 - DNA, 25 bp, Homo sapien
ttcctaaagcatataatgaagaacc

SEQ ID NO: 187631 - DNA, 25 bp, Homo sapien
gagttcctaaagcatataatgaaga

SEQ ID NO: 187632 - DNA, 25 bp, Homo sapien
tgttcgttcgtgctcaaagaaatca

SEQ ID NO: 187633 - DNA, 25 bp, Homo sapien
actcggttatgatactccaaaagaa

SEQ ID NO: 187634 - DNA, 25 bp, Homo sapien
tgtgggatcttgtcattctatcaga

SEQ ID NO: 187635 - DNA, 25 bp, Homo sapien
tccttaactcggttatgatactcca

SEQ ID NO: 187636 - DNA, 25 bp, Homo sapien
actcctgaaacgattactccatctg

SEQ ID NO: 187637 - DNA, 25 bp, Homo sapien
ctttactcctgaaacgattactcca

SEQ ID NO: 187638 - DNA, 25 bp, Homo sapien
ttactcctgaaacgattactccatc

SEQ ID NO: 187639 - DNA, 25 bp, Homo sapien
ctcctgaaacgattactccatctgc

SEQ ID NO: 187640 - DNA, 25 bp, Homo sapien
tcagctggtctacaagaaggcctag

SEQ ID NO: 187641 - DNA, 25 bp, Homo sapien
caggactcactctcaaagattcagg

SEQ ID NO: 187642 - DNA, 25 bp, Homo sapien
ttacaaatggaaagcagtgcctcct

SEQ ID NO: 187643 - DNA, 25 bp, Homo sapien
taaatggcaatctcaaaaggatcct

SEQ ID NO: 187644 - DNA, 25 bp, Homo sapien
tgaggttaacctgtacatgagcact

SEQ ID NO: 187645 - DNA, 25 bp, Homo sapien
ggtgtgacttactacaactggccca

SEQ ID NO: 187646 - DNA, 25 bp, Homo sapien
ctttaaagtgcaatcacctcggcca

SEQ ID NO: 187647 - DNA, 25 bp, Homo sapien
tgccagcactatgaacgaagaaatc

SEQ ID NO: 187648 - DNA, 25 bp, Homo sapien
ggatgtgctgccacacgacacagga

SEQ ID NO: 187649 - DNA, 25 bp, Homo sapien
gatgtgctgccacacgacacaggaa

SEQ ID NO: 187650 - DNA, 25 bp, Homo sapien
tgtgctgccacacgacacaggaaca

SEQ ID NO: 187651 - DNA, 25 bp, Homo sapien
atgtgctgccacacgacacaggaac

SEQ ID NO: 187652 - DNA, 25 bp, Homo sapien
tgagggtagtcattcagtgaagaca

SEQ ID NO: 187653 - DNA, 25 bp, Homo sapien
gaggtagcagtagaataaacccaag

SEQ ID NO: 187654 - DNA, 25 bp, Homo sapien
ttgatctctgtgagggtagtcattc

SEQ ID NO: 187655 - DNA, 25 bp, Homo sapien
caatgatgggagaagtttgatctct

SEQ ID NO: 187656 - DNA, 25 bp, Homo sapien
cctgtttcatctttgtgaattcttc

SEQ ID NO: 187657 - DNA, 25 bp, Homo sapien
tgtttcatctttgtgaattcttcct

SEQ ID NO: 187658 - DNA, 25 bp, Homo sapien
tccagttcctgtttcatctttgtga

SEQ ID NO: 187659 - DNA, 25 bp, Homo sapien
tctttgtgaattcttccttcgtcat

SEQ ID NO: 187660 - DNA, 25 bp, Homo sapien
tcaaaatcaggtcttggtggtgctg

SEQ ID NO: 187661 - DNA, 25 bp, Homo sapien
ttcccttgaagcatcaaaatcaggt

SEQ ID NO: 187662 - DNA, 25 bp, Homo sapien
catcaaaatcaggtcttggtggtgc

SEQ ID NO: 187663 - DNA, 25 bp, Homo sapien
ttgaagcatcaaaatcaggtcttgg

SEQ ID NO: 187664 - DNA, 25 bp, Homo sapien
tcctcatgttgccgaacaactgaaa

SEQ ID NO: 187665 - DNA, 25 bp, Homo sapien
cctcatgttgccgaacaactgaaaa

SEQ ID NO: 187666 - DNA, 25 bp, Homo sapien
attcctcatgttgccgaacaactga

SEQ ID NO: 187667 - DNA, 25 bp, Homo sapien
aattcctcatgttgccgaacaactg

SEQ ID NO: 187668 - DNA, 25 bp, Homo sapien
tgtaaagatagagattttcttgaat

SEQ ID NO: 187669 - DNA, 25 bp, Homo sapien
ttcttgaataaaaatcaaatttaca

SEQ ID NO: 187670 - DNA, 25 bp, Homo sapien
gtaaagatagagattttcttgaata

SEQ ID NO: 187671 - DNA, 25 bp, Homo sapien
ctgtaaagatagagattttcttgaa

SEQ ID NO: 187672 - DNA, 25 bp, Homo sapien
tcactttgaagatctacatttattg

SEQ ID NO: 187673 - DNA, 25 bp, Homo sapien
cactttgaagatctacatttattgc

SEQ ID NO: 187674 - DNA, 25 bp, Homo sapien
atcactttgaagatctacatttatt

SEQ ID NO: 187675 - DNA, 25 bp, Homo sapien
atctggctgggtgtagcagctcaca

SEQ ID NO: 187676 - DNA, 25 bp, Homo sapien
aaaaaacagaatctggctgggtgta

SEQ ID NO: 187677 - DNA, 25 bp, Homo sapien
ctgaggcgattggaacacttgagct

SEQ ID NO: 187678 - DNA, 25 bp, Homo sapien
attagcccagcctggtgggacacac

SEQ ID NO: 187679 - DNA, 25 bp, Homo sapien
taattacttagtaaaaggctgggca

SEQ ID NO: 187680 - DNA, 25 bp, Homo sapien
caggtaattctaatgcaagtatttc

SEQ ID NO: 187681 - DNA, 25 bp, Homo sapien
ccctaccctaagagattctgattta

SEQ ID NO: 187682 - DNA, 25 bp, Homo sapien
gtgtgacctcagactactaacttag

SEQ ID NO: 187683 - DNA, 25 bp, Homo sapien
gggctgaagagatcaaagtgtgacc

SEQ ID NO: 187684 - DNA, 25 bp, Homo sapien
gaaggtccgagaatgggttttcatg

SEQ ID NO: 187685 - DNA, 25 bp, Homo sapien
catggccccaaagtgtcgagggagg

SEQ ID NO: 187686 - DNA, 25 bp, Homo sapien
caagttcgagatgtccacaccgggt

SEQ ID NO: 187687 - DNA, 25 bp, Homo sapien
cacaccgggtgaaaattgagggtgc

SEQ ID NO: 187688 - DNA, 25 bp, Homo sapien
cttctgagaggaagtccgggccgtc

SEQ ID NO: 187689 - DNA, 25 bp, Homo sapien
ctcttctgagaggaagtccgggccg

SEQ ID NO: 187690 - DNA, 25 bp, Homo sapien
ctgagaggaagtccgggccgtcgtc

SEQ ID NO: 187691 - DNA, 25 bp, Homo sapien
tcctcttctgagaggaagtccgggc

SEQ ID NO: 187692 - DNA, 25 bp, Homo sapien
tagtgacaggctggcgcggtccccg

SEQ ID NO: 187693 - DNA, 25 bp, Homo sapien
caaagggagacattagtgacaggct

SEQ ID NO: 187694 - DNA, 25 bp, Homo sapien
acacaaagggagacattagtgacag

SEQ ID NO: 187695 - DNA, 25 bp, Homo sapien
cggcgcgccggggaaaaggatgaga

SEQ ID NO: 187696 - DNA, 25 bp, Homo sapien
gccggcgcaggcgcgcatctccctg

SEQ ID NO: 187697 - DNA, 25 bp, Homo sapien
gggccggcgcaggcgcgcatctccc

SEQ ID NO: 187698 - DNA, 25 bp, Homo sapien
ggccggcgcaggcgcgcatctccct

SEQ ID NO: 187699 - DNA, 25 bp, Homo sapien
cggcgcaggcgcgcatctccctgct

SEQ ID NO: 187700 - DNA, 25 bp, Homo sapien
gatttacccctatggctggacgcag

SEQ ID NO: 187701 - DNA, 25 bp, Homo sapien
ggactgatataaccatgactggctt

SEQ ID NO: 187702 - DNA, 25 bp, Homo sapien
gcttagagtctaagacttcgcccag

SEQ ID NO: 187703 - DNA, 25 bp, Homo sapien
cactcttaaacaatccctggcaagg

SEQ ID NO: 187704 - DNA, 25 bp, Homo sapien
actggagactgcctcaatctcttct

SEQ ID NO: 187705 - DNA, 25 bp, Homo sapien
tccttttggcgttctctggttctga

SEQ ID NO: 187706 - DNA, 25 bp, Homo sapien
tccagcaatgctaaagctccggtgc

SEQ ID NO: 187707 - DNA, 25 bp, Homo sapien
ccattttctcagaggatactctggg

SEQ ID NO: 187708 - DNA, 25 bp, Homo sapien
tcacccaccttccggaggcccagga

SEQ ID NO: 187709 - DNA, 25 bp, Homo sapien
caagtcttcactctgggcctattta

SEQ ID NO: 187710 - DNA, 25 bp, Homo sapien
gaaaagcaactattagcagaagctg

SEQ ID NO: 187711 - DNA, 25 bp, Homo sapien
tgaaagtcaaaaggaggctcatgct

SEQ ID NO: 187712 - DNA, 25 bp, Homo sapien
tggttttccaaatccacgagatgaa

SEQ ID NO: 187713 - DNA, 25 bp, Homo sapien
gccaaattgcattatgagaggaaat

SEQ ID NO: 187714 - DNA, 25 bp, Homo sapien
gatgattcctctacttctacatgga

SEQ ID NO: 187715 - DNA, 25 bp, Homo sapien
cagacttctttatgggctgaaagga

SEQ ID NO: 187716 - DNA, 25 bp, Homo sapien
gatattaccgttcccatactatggg

SEQ ID NO: 187717 - DNA, 25 bp, Homo sapien
gacctatgaagagcaaaatgagact

SEQ ID NO: 187718 - DNA, 25 bp, Homo sapien
tcttccaatgtacgaaaaaggcaca

SEQ ID NO: 187719 - DNA, 25 bp, Homo sapien
ctgagtggcaaacctaagagtcttc

SEQ ID NO: 187720 - DNA, 25 bp, Homo sapien
gatagccagtttgggacacatgcca

SEQ ID NO: 187721 - DNA, 25 bp, Homo sapien
gaagtataagtaaacacatctcaac

SEQ ID NO: 187722 - DNA, 25 bp, Homo sapien
tgaagtataagtaaacacatctcaa

SEQ ID NO: 187723 - DNA, 25 bp, Homo sapien
tctcataactttgcaagctagcagt

SEQ ID NO: 187724 - DNA, 25 bp, Homo sapien
ctcataactttgcaagctagcagta

SEQ ID NO: 187725 - DNA, 25 bp, Homo sapien
tagtatcagttttgtcaatctagca

SEQ ID NO: 187726 - DNA, 25 bp, Homo sapien
ggctctacgcacaaagatgtatttc

SEQ ID NO: 187727 - DNA, 25 bp, Homo sapien
tagcaccgtataccttttaaagcta

SEQ ID NO: 187728 - DNA, 25 bp, Homo sapien
tattttactaattagcaccgtatac

SEQ ID NO: 187729 - DNA, 25 bp, Homo sapien
tgctcagtgcaaaaagatcccaaac

SEQ ID NO: 187730 - DNA, 25 bp, Homo sapien
tgcataccagtagaatcaagtccag

SEQ ID NO: 187731 - DNA, 25 bp, Homo sapien
tccatggtgccaagtatcagttaca

SEQ ID NO: 187732 - DNA, 25 bp, Homo sapien
aaatgtccaggataactcacaggga

SEQ ID NO: 187733 - DNA, 25 bp, Homo sapien
atatgccacaatttttattgcaacg

SEQ ID NO: 187734 - DNA, 25 bp, Homo sapien
gcatagtgttatatccgtgctgcca

SEQ ID NO: 187735 - DNA, 25 bp, Homo sapien
aaaaagttgaccatctgaccagtgg

SEQ ID NO: 187736 - DNA, 25 bp, Homo sapien
tgctgcaagggaggcatataaccag

SEQ ID NO: 187737 - DNA, 25 bp, Homo sapien
tatctttagtgttgcaggactcaca

SEQ ID NO: 187738 - DNA, 25 bp, Homo sapien
caagccatttacttgccactcatgt

SEQ ID NO: 187739 - DNA, 25 bp, Homo sapien
tttctctccaagtgtcgaacggtcc

SEQ ID NO: 187740 - DNA, 25 bp, Homo sapien
gaacggtccttaatatcatccaagc

SEQ ID NO: 187741 - DNA, 25 bp, Homo sapien
ccatttacttgccactcatgtttaa

SEQ ID NO: 187742 - DNA, 25 bp, Homo sapien
tggcatctttagagctagcataaat

SEQ ID NO: 187743 - DNA, 25 bp, Homo sapien
ggcatctttagagctagcataaatc

SEQ ID NO: 187744 - DNA, 25 bp, Homo sapien
cattcagaggtagcaacttcacaaa

SEQ ID NO: 187745 - DNA, 25 bp, Homo sapien
tgtggcatcgtacaaagcatatcgg

SEQ ID NO: 187746 - DNA, 25 bp, Homo sapien
tagactcttttgtttcgtatgtggc

SEQ ID NO: 187747 - DNA, 25 bp, Homo sapien
aagcatatcggcaatcattcagagg

SEQ ID NO: 187748 - DNA, 25 bp, Homo sapien
tgtcatcgcttaaacagaagagaac

SEQ ID NO: 187749 - DNA, 25 bp, Homo sapien
gctttgcttcctctacaattatttg

SEQ ID NO: 187750 - DNA, 25 bp, Homo sapien
tttgatctcctcttgtgtagaagat

SEQ ID NO: 187751 - DNA, 25 bp, Homo sapien
tatttgtcttttgtcatcgcttaaa

SEQ ID NO: 187752 - DNA, 25 bp, Homo sapien
ttcatcattcactgtaactccagaa

SEQ ID NO: 187753 - DNA, 25 bp, Homo sapien
catcattcactgtaactccagaagc

SEQ ID NO: 187754 - DNA, 25 bp, Homo sapien
tcatcattcactgtaactccagaag

SEQ ID NO: 187755 - DNA, 25 bp, Homo sapien
agtcgtccaatcagatttgtcacat

SEQ ID NO: 187756 - DNA, 25 bp, Homo sapien
tcgtccaatcagatttgtcacattt

SEQ ID NO: 187757 - DNA, 25 bp, Homo sapien
gtaagtcgtccaatcagatttgtca

SEQ ID NO: 187758 - DNA, 25 bp, Homo sapien
taagtcgtccaatcagatttgtcac

SEQ ID NO: 187759 - DNA, 25 bp, Homo sapien
acgatacagcgaaggagtctaactc

SEQ ID NO: 187760 - DNA, 25 bp, Homo sapien
ctgcccattcatccttcttaaaggg

SEQ ID NO: 187761 - DNA, 25 bp, Homo sapien
tcagtagacgatacagcgaaggagt

SEQ ID NO: 187762 - DNA, 25 bp, Homo sapien
gacgtggaagcgaaagggacaaata

SEQ ID NO: 187763 - DNA, 25 bp, Homo sapien
ttattacaggccgtccagaccctga

SEQ ID NO: 187764 - DNA, 25 bp, Homo sapien
cagcgttcgcagcacgtaccaattt

SEQ ID NO: 187765 - DNA, 25 bp, Homo sapien
gaatcaagtgtaaactccaaaccgc

SEQ ID NO: 187766 - DNA, 25 bp, Homo sapien
gacactccaaaactaactgatcgag

SEQ ID NO: 187767 - DNA, 25 bp, Homo sapien
ccggagggcaggccggtcggctgga

SEQ ID NO: 187768 - DNA, 25 bp, Homo sapien
ggcagggcctgacggccggagggca

SEQ ID NO: 187769 - DNA, 25 bp, Homo sapien
agggcagggcctgacggccggaggg

SEQ ID NO: 187770 - DNA, 25 bp, Homo sapien
caggccggtcggctggagagcagcg

SEQ ID NO: 187771 - DNA, 25 bp, Homo sapien
tcaggttaaaatggcggcctcactc

SEQ ID NO: 187772 - DNA, 25 bp, Homo sapien
aaatcaggttaaaatggcggcctca

SEQ ID NO: 187773 - DNA, 25 bp, Homo sapien
gggcttttctcgcctcgccgcggcc

SEQ ID NO: 187774 - DNA, 25 bp, Homo sapien
ggcttttctcgcctcgccgcggcct

SEQ ID NO: 187775 - DNA, 25 bp, Homo sapien
tgccctcggctgtggctgcggcggc

SEQ ID NO: 187776 - DNA, 25 bp, Homo sapien
ctgcggcggcagctcgggcttcggc

SEQ ID NO: 187777 - DNA, 25 bp, Homo sapien
ggcggcagctcgggcttcggctctg

SEQ ID NO: 187778 - DNA, 25 bp, Homo sapien
gtgccctcggctgtggctgcggcgg

SEQ ID NO: 187779 - DNA, 25 bp, Homo sapien
gcgggcgagcgggtgggcagcggag

SEQ ID NO: 187780 - DNA, 25 bp, Homo sapien
gcagcggagagtgcggggcacgccg

SEQ ID NO: 187781 - DNA, 25 bp, Homo sapien
gggcgagcgggtgggcagcggagag

SEQ ID NO: 187782 - DNA, 25 bp, Homo sapien
tgggcagcggagagtgcggggcacg

SEQ ID NO: 187783 - DNA, 25 bp, Homo sapien
ccaggccggcccttctgtctcgcgg

SEQ ID NO: 187784 - DNA, 25 bp, Homo sapien
acgtgggcacgcctggtccccagcc

SEQ ID NO: 187785 - DNA, 25 bp, Homo sapien
cgtgggcacgcctggtccccagccg

SEQ ID NO: 187786 - DNA, 25 bp, Homo sapien
ggccggcccttctgtctcgcggccc

SEQ ID NO: 187787 - DNA, 25 bp, Homo sapien
gggcgacgcggtggtagcggagccc

SEQ ID NO: 187788 - DNA, 25 bp, Homo sapien
agagccgcctccagcccccgagcat

SEQ ID NO: 187789 - DNA, 25 bp, Homo sapien
gggggcgacgcggtggtagcggagc

SEQ ID NO: 187790 - DNA, 25 bp, Homo sapien
gacgcggtggtagcggagcccggga

SEQ ID NO: 187791 - DNA, 25 bp, Homo sapien
caccagttgtcaaatgattctttac

SEQ ID NO: 187792 - DNA, 25 bp, Homo sapien
gtgtcttggtggttccttaagagct

SEQ ID NO: 187793 - DNA, 25 bp, Homo sapien
aagagctttgatgattagggcagag

SEQ ID NO: 187794 - DNA, 25 bp, Homo sapien
cttaagagctttgatgattagggca

SEQ ID NO: 187795 - DNA, 25 bp, Homo sapien
atcctcaggcccttccagtcacccg

SEQ ID NO: 187796 - DNA, 25 bp, Homo sapien
cctcaggcccttccagtcacccgtt

SEQ ID NO: 187797 - DNA, 25 bp, Homo sapien
tcaggcccttccagtcacccgttgc

SEQ ID NO: 187798 - DNA, 25 bp, Homo sapien
aatcctcaggcccttccagtcaccc

SEQ ID NO: 187799 - DNA, 25 bp, Homo sapien
agtggcaccgacttcacctccggtg

SEQ ID NO: 187800 - DNA, 25 bp, Homo sapien
agaagtggcaccgacttcacctccg

SEQ ID NO: 187801 - DNA, 25 bp, Homo sapien
gaactttggcggcatggtggaggcg

SEQ ID NO: 187802 - DNA, 25 bp, Homo sapien
tcgttggggtcgaactttggcggca

SEQ ID NO: 187803 - DNA, 25 bp, Homo sapien
accaaagaaagttgcaccttggcct

SEQ ID NO: 187804 - DNA, 25 bp, Homo sapien
ggtgcggaatgaccaaagaaagttg

SEQ ID NO: 187805 - DNA, 25 bp, Homo sapien
ctggtgcggaatgaccaaagaaagt

SEQ ID NO: 187806 - DNA, 25 bp, Homo sapien
caaagaaagttgcaccttggcctcc

SEQ ID NO: 187807 - DNA, 25 bp, Homo sapien
caagatctctggacacatgaatgat

SEQ ID NO: 187808 - DNA, 25 bp, Homo sapien
taaacttggacttaatacctgcagc

SEQ ID NO: 187809 - DNA, 25 bp, Homo sapien
aaattgagaatatagtgcaggccac

SEQ ID NO: 187810 - DNA, 25 bp, Homo sapien
taaactgtgctatagcggaagactc

SEQ ID NO: 187811 - DNA, 25 bp, Homo sapien
tcgtgactttttcgcagccggtggt

SEQ ID NO: 187812 - DNA, 25 bp, Homo sapien
ttttcgcagccggtggtgtgctaac

SEQ ID NO: 187813 - DNA, 25 bp, Homo sapien
gactttttcgcagccggtggtgtgc

SEQ ID NO: 187814 - DNA, 25 bp, Homo sapien
tcagattcgtgactttttcgcagcc

SEQ ID NO: 187815 - DNA, 25 bp, Homo sapien
gagtccaagcttttgagcctgaata

SEQ ID NO: 187816 - DNA, 25 bp, Homo sapien
gttacgagggttgtattcaaagcag

SEQ ID NO: 187817 - DNA, 25 bp, Homo sapien
tggtccacattactgggtgtgacgt

SEQ ID NO: 187818 - DNA, 25 bp, Homo sapien
gcttgaagcctagttccagcttttg

SEQ ID NO: 187819 - DNA, 25 bp, Homo sapien
taatttatattcacacttattcact

SEQ ID NO: 187820 - DNA, 25 bp, Homo sapien
tatatttaaggcaatgggctttttg

SEQ ID NO: 187821 - DNA, 25 bp, Homo sapien
tcacacttattcactttttcacgaa

SEQ ID NO: 187822 - DNA, 25 bp, Homo sapien
tgatgatgtcatagtagtctgggac

SEQ ID NO: 187823 - DNA, 25 bp, Homo sapien
tgcctggccctaaactgttgagatt

SEQ ID NO: 187824 - DNA, 25 bp, Homo sapien
gtgcctggccctaaactgttgagat

SEQ ID NO: 187825 - DNA, 25 bp, Homo sapien
gcctggccctaaactgttgagatta

SEQ ID NO: 187826 - DNA, 25 bp, Homo sapien
aacaggtgttttgactacttcaaag

SEQ ID NO: 187827 - DNA, 25 bp, Homo sapien
cagataatatacaggaatacatttt

SEQ ID NO: 187828 - DNA, 25 bp, Homo sapien
aaaaaactagacagtgagtaacagg

SEQ ID NO: 187829 - DNA, 25 bp, Homo sapien
caaagttatcacgtggactaaatca

SEQ ID NO: 187830 - DNA, 25 bp, Homo sapien
aaaaggccagctgtcatcatgtcgt

SEQ ID NO: 187831 - DNA, 25 bp, Homo sapien
aaaaaggccagctgtcatcatgtcg

SEQ ID NO: 187832 - DNA, 25 bp, Homo sapien
aggccagctgtcatcatgtcgtacc

SEQ ID NO: 187833 - DNA, 25 bp, Homo sapien
aaaggccagctgtcatcatgtcgta

SEQ ID NO: 187834 - DNA, 25 bp, Homo sapien
ggccagaactccttcgacccagtgt

SEQ ID NO: 187835 - DNA, 25 bp, Homo sapien
atgaactcctccctgtcggccagaa

SEQ ID NO: 187836 - DNA, 25 bp, Homo sapien
cgacccagtgtcacaggcgatggct

SEQ ID NO: 187837 - DNA, 25 bp, Homo sapien
gaactccttcgacccagtgtcacag

SEQ ID NO: 187838 - DNA, 25 bp, Homo sapien
ttttggattcactctcttggagaga

SEQ ID NO: 187839 - DNA, 25 bp, Homo sapien
ttggattcactctcttggagagaaa

SEQ ID NO: 187840 - DNA, 25 bp, Homo sapien
tacagatcttgactgttcacttgac

SEQ ID NO: 187841 - DNA, 25 bp, Homo sapien
acagatcttgactgttcacttgact

SEQ ID NO: 187842 - DNA, 25 bp, Homo sapien
tttcctgcctctgcgttttctacga

SEQ ID NO: 187843 - DNA, 25 bp, Homo sapien
catgactgtggcgagtagaacgact

SEQ ID NO: 187844 - DNA, 25 bp, Homo sapien
tccacaaatacatctgcttgcagtg

SEQ ID NO: 187845 - DNA, 25 bp, Homo sapien
tacgaggactaagcaattccacaaa

SEQ ID NO: 187846 - DNA, 25 bp, Homo sapien
tgactccttgaagggtatcttccag

SEQ ID NO: 187847 - DNA, 25 bp, Homo sapien
aacagttgttttgggtgtgctctgc

SEQ ID NO: 187848 - DNA, 25 bp, Homo sapien
tgttgttggccacgacttgagaaag

SEQ ID NO: 187849 - DNA, 25 bp, Homo sapien
ttaactggcaatctaacttgtggtc

SEQ ID NO: 187850 - DNA, 25 bp, Homo sapien
tggttcctgaataccacgccaagaa

SEQ ID NO: 187851 - DNA, 25 bp, Homo sapien
cagtggctgccaatgaagtgggcct

SEQ ID NO: 187852 - DNA, 25 bp, Homo sapien
catatcttcttggtaacttcaggac

SEQ ID NO: 187853 - DNA, 25 bp, Homo sapien
cttttgctacaggagactaccactt

SEQ ID NO: 187854 - DNA, 25 bp, Homo sapien
tcttgttctacctcatactcttcct

SEQ ID NO: 187855 - DNA, 25 bp, Homo sapien
ttcttcatcgccatcaacttcatca

SEQ ID NO: 187856 - DNA, 25 bp, Homo sapien
cttcatcttgttctacctcatactc

SEQ ID NO: 187857 - DNA, 25 bp, Homo sapien
catcttgttctacctcatactcttc

SEQ ID NO: 187858 - DNA, 25 bp, Homo sapien
agagtcttctagaacgttgctttgg

SEQ ID NO: 187859 - DNA, 25 bp, Homo sapien
tctagaacgttgctttggtcgacat

SEQ ID NO: 187860 - DNA, 25 bp, Homo sapien
gatggtctctgtctagaggagagtc

SEQ ID NO: 187861 - DNA, 25 bp, Homo sapien
tctctgtctagaggagagtcttcta

SEQ ID NO: 187862 - DNA, 25 bp, Homo sapien
gaccatatcacgctacgatccaagg

SEQ ID NO: 187863 - DNA, 25 bp, Homo sapien
tctttcgacatatcttgcaacgcgc

SEQ ID NO: 187864 - DNA, 25 bp, Homo sapien
tgagctttggtcgaacacagtaggt

SEQ ID NO: 187865 - DNA, 25 bp, Homo sapien
tataagaacgcccactgtcactggc

SEQ ID NO: 187866 - DNA, 25 bp, Homo sapien
ctttgttctaataatgagatatcaa

SEQ ID NO: 187867 - DNA, 25 bp, Homo sapien
gtttaccagtatattcacatttcaa

SEQ ID NO: 187868 - DNA, 25 bp, Homo sapien
gattgcactatgaaaactttgttct

SEQ ID NO: 187869 - DNA, 25 bp, Homo sapien
ttcaaaactgctctgattgcactat

SEQ ID NO: 187870 - DNA, 25 bp, Homo sapien
ggccaactcaaaattacttataaca

SEQ ID NO: 187871 - DNA, 25 bp, Homo sapien
tgtgcctagctggtaatctttcttt

SEQ ID NO: 187872 - DNA, 25 bp, Homo sapien
gttctattagttaaaggccaactca

SEQ ID NO: 187873 - DNA, 25 bp, Homo sapien
gatgaaactcttcacaaaagactgt

SEQ ID NO: 187874 - DNA, 25 bp, Homo sapien
catttgttgatacagtacttggagt

SEQ ID NO: 187875 - DNA, 25 bp, Homo sapien
caagtggagctttcagaaaacgccg

SEQ ID NO: 187876 - DNA, 25 bp, Homo sapien
gctcactgattgtggtgtacttgca

SEQ ID NO: 187877 - DNA, 25 bp, Homo sapien
gataatgaaccacactgctcactga

SEQ ID NO: 187878 - DNA, 25 bp, Homo sapien
taatgctgatctccagatatgtcga

SEQ ID NO: 187879 - DNA, 25 bp, Homo sapien
agctcataccgtccactttctaatg

SEQ ID NO: 187880 - DNA, 25 bp, Homo sapien
tgtcttttactatgacctttgtttg

SEQ ID NO: 187881 - DNA, 25 bp, Homo sapien
tctcttctacgtcttcattcacagt

SEQ ID NO: 187882 - DNA, 25 bp, Homo sapien
aagatcttccccgactatatgttgg

SEQ ID NO: 187883 - DNA, 25 bp, Homo sapien
gcttttctgcacacatctgagatgg

SEQ ID NO: 187884 - DNA, 25 bp, Homo sapien
ctctcagccttagttcaagttgctt

SEQ ID NO: 187885 - DNA, 25 bp, Homo sapien
cttgatggctcctaatgttccttgg

SEQ ID NO: 187886 - DNA, 25 bp, Homo sapien
tatcgtctatacatgcggtcgcgac

SEQ ID NO: 187887 - DNA, 25 bp, Homo sapien
ctgtaaaagcaccaccgatttggct

SEQ ID NO: 187888 - DNA, 25 bp, Homo sapien
ttctcttcagaaaaacgggctagct

SEQ ID NO: 187889 - DNA, 25 bp, Homo sapien
tggcagctgcacagaatggtcacgt

SEQ ID NO: 187890 - DNA, 25 bp, Homo sapien
tgccttgtaaattctttaaatccat

SEQ ID NO: 187891 - DNA, 25 bp, Homo sapien
attctttaaatccattttgtcctct

SEQ ID NO: 187892 - DNA, 25 bp, Homo sapien
ttgccttgtaaattctttaaatcca

SEQ ID NO: 187893 - DNA, 25 bp, Homo sapien
cacaagaatgccctaaagaaatttc

SEQ ID NO: 187894 - DNA, 25 bp, Homo sapien
caagaatgccctaaagaaatttcag

SEQ ID NO: 187895 - DNA, 25 bp, Homo sapien
caaatacacaagaatgccctaaaga

SEQ ID NO: 187896 - DNA, 25 bp, Homo sapien
aatacacaagaatgccctaaagaaa

SEQ ID NO: 187897 - DNA, 25 bp, Homo sapien
tttgctctcaatgctagtatcaaaa

SEQ ID NO: 187898 - DNA, 25 bp, Homo sapien
cagtgaccatatcttgatctaattc

SEQ ID NO: 187899 - DNA, 25 bp, Homo sapien
tcttcagtgaccatatcttgatcta

SEQ ID NO: 187900 - DNA, 25 bp, Homo sapien
catatcttgatctaattccttttgc

SEQ ID NO: 187901 - DNA, 25 bp, Homo sapien
agtaccaggcattataggcttagga

SEQ ID NO: 187902 - DNA, 25 bp, Homo sapien
gaagtagtgaacaacatgacacagt

SEQ ID NO: 187903 - DNA, 25 bp, Homo sapien
tattgcttgcttatgaagtaccagg

SEQ ID NO: 187904 - DNA, 25 bp, Homo sapien
tgacacagttttggtcttgcagaga

SEQ ID NO: 187905 - DNA, 25 bp, Homo sapien
ccaatagatatatctgccgttgaat

SEQ ID NO: 187906 - DNA, 25 bp, Homo sapien
tatatctgccgttgaatttctttgc

SEQ ID NO: 187907 - DNA, 25 bp, Homo sapien
atagatatatctgccgttgaatttc

SEQ ID NO: 187908 - DNA, 25 bp, Homo sapien
tctgccgttgaatttctttgctcat

SEQ ID NO: 187909 - DNA, 25 bp, Homo sapien
ttaattcccggaactcctgctttgc

SEQ ID NO: 187910 - DNA, 25 bp, Homo sapien
aatcttcaataaaatccctagttga

SEQ ID NO: 187911 - DNA, 25 bp, Homo sapien
gctttgcctgtcgtaatatatcaac

SEQ ID NO: 187912 - DNA, 25 bp, Homo sapien
cctctcttttcgatgttgttctgct

SEQ ID NO: 187913 - DNA, 25 bp, Homo sapien
ctagggtcagtagctttccacagag

SEQ ID NO: 187914 - DNA, 25 bp, Homo sapien
agggtcagtagctttccacagagag

SEQ ID NO: 187915 - DNA, 25 bp, Homo sapien
cagagagcatggagtatcttcattt

SEQ ID NO: 187916 - DNA, 25 bp, Homo sapien
acagagagcatggagtatcttcatt

SEQ ID NO: 187917 - DNA, 25 bp, Homo sapien
gtgtcaaatcatacactgaggtgct

SEQ ID NO: 187918 - DNA, 25 bp, Homo sapien
tgtagcatcaaatcctcctcgtttt

SEQ ID NO: 187919 - DNA, 25 bp, Homo sapien
ggtgcttgacagtttcttcactaga

SEQ ID NO: 187920 - DNA, 25 bp, Homo sapien
ctgggattgctcaaacgaagctcca

SEQ ID NO: 187921 - DNA, 25 bp, Homo sapien
gctaagatgtgcagtctgaggattt

SEQ ID NO: 187922 - DNA, 25 bp, Homo sapien
aagctaagatgtgcagtctgaggat

SEQ ID NO: 187923 - DNA, 25 bp, Homo sapien
gaagctaagatgtgcagtctgagga

SEQ ID NO: 187924 - DNA, 25 bp, Homo sapien
ctgaagctaagatgtgcagtctgag

SEQ ID NO: 187925 - DNA, 25 bp, Homo sapien
ctgaaagagtgcagctatcaagatc

SEQ ID NO: 187926 - DNA, 25 bp, Homo sapien
gctatcaagatccaaacttttcaaa

SEQ ID NO: 187927 - DNA, 25 bp, Homo sapien
tgcagctatcaagatccaaactttt

SEQ ID NO: 187928 - DNA, 25 bp, Homo sapien
gagtgcagctatcaagatccaaact

SEQ ID NO: 187929 - DNA, 25 bp, Homo sapien
aaatactcagcaatgtaaatgtgcc

SEQ ID NO: 187930 - DNA, 25 bp, Homo sapien
ataaatactcagcaatgtaaatgtg

SEQ ID NO: 187931 - DNA, 25 bp, Homo sapien
taaatactcagcaatgtaaatgtgc

SEQ ID NO: 187932 - DNA, 25 bp, Homo sapien
ctgccaaagatgcaactgcagacag

SEQ ID NO: 187933 - DNA, 25 bp, Homo sapien
gctgccaaagatgcaactgcagaca

SEQ ID NO: 187934 - DNA, 25 bp, Homo sapien
taaaccaagcactacacactgacat

SEQ ID NO: 187935 - DNA, 25 bp, Homo sapien
aacagcaaacgccttaacattcgga

SEQ ID NO: 187936 - DNA, 25 bp, Homo sapien
aatgagacgcacataaacattcccc

SEQ ID NO: 187937 - DNA, 25 bp, Homo sapien
gaacaaacactaggtacaagcaata

SEQ ID NO: 187938 - DNA, 25 bp, Homo sapien
taaaggaatgactctggatcagcag

SEQ ID NO: 187939 - DNA, 25 bp, Homo sapien
taaaagatgctcctcctaaagtgag

SEQ ID NO: 187940 - DNA, 25 bp, Homo sapien
gcagctctgggatcgtatctgatta

SEQ ID NO: 187941 - DNA, 25 bp, Homo sapien
tgaacaacttgtagggtgccttggg

SEQ ID NO: 187942 - DNA, 25 bp, Homo sapien
ttcaagggattatggtgccttagct

SEQ ID NO: 187943 - DNA, 25 bp, Homo sapien
cactctgtcccaggatggcatgcag

SEQ ID NO: 187944 - DNA, 25 bp, Homo sapien
gggctataggctgcaccactacacc

SEQ ID NO: 187945 - DNA, 25 bp, Homo sapien
agggattatggtgccttagcttccc

SEQ ID NO: 187946 - DNA, 25 bp, Homo sapien
agttagttgctctttggctacttcc

SEQ ID NO: 187947 - DNA, 25 bp, Homo sapien
atcagttagttgctctttggctact

SEQ ID NO: 187948 - DNA, 25 bp, Homo sapien
ggtgtcagcatcagttagttgctct

SEQ ID NO: 187949 - DNA, 25 bp, Homo sapien
tttggtgtcagcatcagttagttgc

SEQ ID NO: 187950 - DNA, 25 bp, Homo sapien
ctggaagattgcagtcaggaagaaa

SEQ ID NO: 187951 - DNA, 25 bp, Homo sapien
tgaagatcaaaaagttccccaaatg

SEQ ID NO: 187952 - DNA, 25 bp, Homo sapien
tttcaggaggtagtctagttttcac

SEQ ID NO: 187953 - DNA, 25 bp, Homo sapien
agttttcactggtgttggttctgga

SEQ ID NO: 187954 - DNA, 25 bp, Homo sapien
gatcaaaaagttccccaaatgcatt

SEQ ID NO: 187955 - DNA, 25 bp, Homo sapien
tcacattccatatcttctctaggtt

SEQ ID NO: 187956 - DNA, 25 bp, Homo sapien
catcacattccatatcttctctagg

SEQ ID NO: 187957 - DNA, 25 bp, Homo sapien
ctgttttaagtattccacatacttt

SEQ ID NO: 187958 - DNA, 25 bp, Homo sapien
catactttcgcttttcttcacgtaa

SEQ ID NO: 187959 - DNA, 25 bp, Homo sapien
tttttcttcgcttctagggcatctg

SEQ ID NO: 187960 - DNA, 25 bp, Homo sapien
cttttttcttcgcttctagggcatc

SEQ ID NO: 187961 - DNA, 25 bp, Homo sapien
ttttttcttcgcttctagggcatct

SEQ ID NO: 187962 - DNA, 25 bp, Homo sapien
tcttttttcttcgcttctagggcat

SEQ ID NO: 187963 - DNA, 25 bp, Homo sapien
ttatgacaaactacagtactgggac

SEQ ID NO: 187964 - DNA, 25 bp, Homo sapien
taaaattcctacagggagccagcag

SEQ ID NO: 187965 - DNA, 25 bp, Homo sapien
tgaaagccctaatacccaaagtgtg

SEQ ID NO: 187966 - DNA, 25 bp, Homo sapien
tcattttgacaagatccccaagtga

SEQ ID NO: 187967 - DNA, 25 bp, Homo sapien
acttgcaagagtctgtttattagca

SEQ ID NO: 187968 - DNA, 25 bp, Homo sapien
aacttgcaagagtctgtttattagc

SEQ ID NO: 187969 - DNA, 25 bp, Homo sapien
tgcaagagtctgtttattagcaaca

SEQ ID NO: 187970 - DNA, 25 bp, Homo sapien
ataacttgcaagagtctgtttatta

SEQ ID NO: 187971 - DNA, 25 bp, Homo sapien
ggagacaaacatacttcttgattct

SEQ ID NO: 187972 - DNA, 25 bp, Homo sapien
tttcttcctctaggctatggatgtg

SEQ ID NO: 187973 - DNA, 25 bp, Homo sapien
gggagacaaacatacttcttgattc

SEQ ID NO: 187974 - DNA, 25 bp, Homo sapien
gagtttcttcctctaggctatggat

SEQ ID NO: 187975 - DNA, 25 bp, Homo sapien
gggaggtctccctcttcgtctgtta

SEQ ID NO: 187976 - DNA, 25 bp, Homo sapien
tctccctcttcgtctgttagcagga

SEQ ID NO: 187977 - DNA, 25 bp, Homo sapien
tatgtattcgtttgggaggtctccc

SEQ ID NO: 187978 - DNA, 25 bp, Homo sapien
atatgtattcgtttgggaggtctcc

SEQ ID NO: 187979 - DNA, 25 bp, Homo sapien
tgaagataaatgtgggtggatcatc

SEQ ID NO: 187980 - DNA, 25 bp, Homo sapien
ctgaagataaatgtgggtggatcat

SEQ ID NO: 187981 - DNA, 25 bp, Homo sapien
gtgggtggatcatcagggaagaaat

SEQ ID NO: 187982 - DNA, 25 bp, Homo sapien
ggtggatcatcagggaagaaataag

SEQ ID NO: 187983 - DNA, 25 bp, Homo sapien
attttatacgttgaaagagatgatg

SEQ ID NO: 187984 - DNA, 25 bp, Homo sapien
tgctattttatacgttgaaagagat

SEQ ID NO: 187985 - DNA, 25 bp, Homo sapien
ttttatacgttgaaagagatgatgc

SEQ ID NO: 187986 - DNA, 25 bp, Homo sapien
ctattttatacgttgaaagagatga

SEQ ID NO: 187987 - DNA, 25 bp, Homo sapien
cacgagaaaataggtgttttctccg

SEQ ID NO: 187988 - DNA, 25 bp, Homo sapien
aagctttagtttatcacgagaaaat

SEQ ID NO: 187989 - DNA, 25 bp, Homo sapien
gtggttcacagtgttgcttcagaaa

SEQ ID NO: 187990 - DNA, 25 bp, Homo sapien
tggttcacagtgttgcttcagaaaa

SEQ ID NO: 187991 - DNA, 25 bp, Homo sapien
gaatagtaagggatcaattgcatct

SEQ ID NO: 187992 - DNA, 25 bp, Homo sapien
ttgctttaacaatagcagactcatg

SEQ ID NO: 187993 - DNA, 25 bp, Homo sapien
tagtgggttgcactttatacttgaa

SEQ ID NO: 187994 - DNA, 25 bp, Homo sapien
taacaatagcagactcatgtaattc

SEQ ID NO: 187995 - DNA, 25 bp, Homo sapien
cagagaatttgtgattgtagatcaa

SEQ ID NO: 187996 - DNA, 25 bp, Homo sapien
ggactgtctatcaatttagttcaga

SEQ ID NO: 187997 - DNA, 25 bp, Homo sapien
ggaaaactagtgactgtctgagtca

SEQ ID NO: 187998 - DNA, 25 bp, Homo sapien
tctggctactaaaatcagatggaaa

SEQ ID NO: 187999 - DNA, 25 bp, Homo sapien
catcttagttgcttcaatgttttgg

SEQ ID NO: 188000 - DNA, 25 bp, Homo sapien
tgtttggtactataagaaactgcca

SEQ ID NO: 188001 - DNA, 25 bp, Homo sapien
gcatgcaattgctacatcatataaa

SEQ ID NO: 188002 - DNA, 25 bp, Homo sapien
ttttggaggttacagataatgctac

SEQ ID NO: 188003 - DNA, 25 bp, Homo sapien
cctcattgtcttaatattgagattt

SEQ ID NO: 188004 - DNA, 25 bp, Homo sapien
ctcattgtcttaatattgagattta

SEQ ID NO: 188005 - DNA, 25 bp, Homo sapien
tgggaatgcattgaacctacaaatt

SEQ ID NO: 188006 - DNA, 25 bp, Homo sapien
gacatcttgacaacactgcatatat

SEQ ID NO: 188007 - DNA, 25 bp, Homo sapien
tatcttgtagacataatgagccatg

SEQ ID NO: 188008 - DNA, 25 bp, Homo sapien
taaacctatagatcaagatgggaag

SEQ ID NO: 188009 - DNA, 25 bp, Homo sapien
tgttaacatgtccattagcaaaacc

SEQ ID NO: 188010 - DNA, 25 bp, Homo sapien
catcactatcactgatgataatagt

SEQ ID NO: 188011 - DNA, 25 bp, Homo sapien
caaaaccattttgatgtgatggagg

SEQ ID NO: 188012 - DNA, 25 bp, Homo sapien
gatggagggaggacttccaaaatcc

SEQ ID NO: 188013 - DNA, 25 bp, Homo sapien
cattgggctaaatctctattctctg

SEQ ID NO: 188014 - DNA, 25 bp, Homo sapien
ggttcaagattagatactttgctga

SEQ ID NO: 188015 - DNA, 25 bp, Homo sapien
gcagcctctacaactcttatgcaat

SEQ ID NO: 188016 - DNA, 25 bp, Homo sapien
gcacataaatacctaccattgggct

SEQ ID NO: 188017 - DNA, 25 bp, Homo sapien
taaccggcctcaatgtgaaaaatgc

SEQ ID NO: 188018 - DNA, 25 bp, Homo sapien
taagatagtcttgcctccttacagc

SEQ ID NO: 188019 - DNA, 25 bp, Homo sapien
cagcctattgacacaaacatgtaag

SEQ ID NO: 188020 - DNA, 25 bp, Homo sapien
aaagccaccacagatttgacaagtg

SEQ ID NO: 188021 - DNA, 25 bp, Homo sapien
agcattctttcatctgctagcaaaa

SEQ ID NO: 188022 - DNA, 25 bp, Homo sapien
agtgagccgatatccagactgggtg

SEQ ID NO: 188023 - DNA, 25 bp, Homo sapien
aaaattgtatcatcagccgggcatg

SEQ ID NO: 188024 - DNA, 25 bp, Homo sapien
tcctggtggagactcagctgactgc

SEQ ID NO: 188025 - DNA, 25 bp, Homo sapien
taaatactacaagcctcctaggcag

SEQ ID NO: 188026 - DNA, 25 bp, Homo sapien
cagatcgcacaaggccggttgaaga

SEQ ID NO: 188027 - DNA, 25 bp, Homo sapien
gaaactgatgcaaatccaattcggc

SEQ ID NO: 188028 - DNA, 25 bp, Homo sapien
aaagaagctttatccgtcctcagaa

SEQ ID NO: 188029 - DNA, 25 bp, Homo sapien
gctgtcagtatacccacctttagaa

SEQ ID NO: 188030 - DNA, 25 bp, Homo sapien
gtaagaagcaattatgaggccgggt

SEQ ID NO: 188031 - DNA, 25 bp, Homo sapien
agcccagtatctagcctgtaagaag

SEQ ID NO: 188032 - DNA, 25 bp, Homo sapien
cggtggctcatacctttagtcgcag

SEQ ID NO: 188033 - DNA, 25 bp, Homo sapien
taggctgcttagagcatcttaattc

SEQ ID NO: 188034 - DNA, 25 bp, Homo sapien
ccacagtttcttcgacaaaatatcg

SEQ ID NO: 188035 - DNA, 25 bp, Homo sapien
tatcgatccttgacatatgcaaaga

SEQ ID NO: 188036 - DNA, 25 bp, Homo sapien
cacaaatttcatgtaagcgcgaacg

SEQ ID NO: 188037 - DNA, 25 bp, Homo sapien
agtgcttcctgatacgtcagtccag

SEQ ID NO: 188038 - DNA, 25 bp, Homo sapien
tgcacagaatggttcgttcaaaaaa

SEQ ID NO: 188039 - DNA, 25 bp, Homo sapien
gttgcacagaatggttcgttcaaaa

SEQ ID NO: 188040 - DNA, 25 bp, Homo sapien
gcacagaatggttcgttcaaaaaag

SEQ ID NO: 188041 - DNA, 25 bp, Homo sapien
ctgttgcacagaatggttcgttcaa

SEQ ID NO: 188042 - DNA, 25 bp, Homo sapien
tgcaatttaaaggtacatcagtcaa

SEQ ID NO: 188043 - DNA, 25 bp, Homo sapien
tggtaactggtcaacttataacatt

SEQ ID NO: 188044 - DNA, 25 bp, Homo sapien
aaaccagactttgagttccatctgc

SEQ ID NO: 188045 - DNA, 25 bp, Homo sapien
cacagaactcaagggtttggtaact

SEQ ID NO: 188046 - DNA, 25 bp, Homo sapien
cctaaggaggcaggacatgctacca

SEQ ID NO: 188047 - DNA, 25 bp, Homo sapien
cacagtggccaatttaagggagaaa

SEQ ID NO: 188048 - DNA, 25 bp, Homo sapien
taccacagtggccaatttaagggag

SEQ ID NO: 188049 - DNA, 25 bp, Homo sapien
gaggcaggacatgctaccacagtgg

SEQ ID NO: 188050 - DNA, 25 bp, Homo sapien
aatacctagagcttaatcacttggg

SEQ ID NO: 188051 - DNA, 25 bp, Homo sapien
acacaaagatctaggcagccagttt

SEQ ID NO: 188052 - DNA, 25 bp, Homo sapien
cagtttaaattccaggcaatgcccc

SEQ ID NO: 188053 - DNA, 25 bp, Homo sapien
tctaagcagacagtacagagtggta

SEQ ID NO: 188054 - DNA, 25 bp, Homo sapien
gaaaaggtgcctccttacacgcgac

SEQ ID NO: 188055 - DNA, 25 bp, Homo sapien
cttggtttgcaagccacaaagggac

SEQ ID NO: 188056 - DNA, 25 bp, Homo sapien
taacgtgtaaccctttctgtggagc

SEQ ID NO: 188057 - DNA, 25 bp, Homo sapien
caagtctctacaggagcagagcgag

SEQ ID NO: 188058 - DNA, 25 bp, Homo sapien
tagaaaacttcctcgtcgggccgca

SEQ ID NO: 188059 - DNA, 25 bp, Homo sapien
aacggctttcggtgtagcagcggca

SEQ ID NO: 188060 - DNA, 25 bp, Homo sapien
gatctcgttggtgactttacagtag

SEQ ID NO: 188061 - DNA, 25 bp, Homo sapien
gtccgcgggcggcttctgtctcaca

SEQ ID NO: 188062 - DNA, 25 bp, Homo sapien
ctggaccctcggccgcccgcgccgg

SEQ ID NO: 188063 - DNA, 25 bp, Homo sapien
tggaccctcggccgcccgcgccggc

SEQ ID NO: 188064 - DNA, 25 bp, Homo sapien
ctcggccgcccgcgccggccccgct

SEQ ID NO: 188065 - DNA, 25 bp, Homo sapien
gttcctgccgctgcccgggtgtcga

SEQ ID NO: 188066 - DNA, 25 bp, Homo sapien
cgctgggagaagctcggctgccttt

SEQ ID NO: 188067 - DNA, 25 bp, Homo sapien
ttttgtgtgactgacgcgccgcggc

SEQ ID NO: 188068 - DNA, 25 bp, Homo sapien
gctaccggagccgagttcgttcctg

SEQ ID NO: 188069 - DNA, 25 bp, Homo sapien
gatcacgccgactgccacttgtcca

SEQ ID NO: 188070 - DNA, 25 bp, Homo sapien
gcgatcacgccgactgccacttgtc

SEQ ID NO: 188071 - DNA, 25 bp, Homo sapien
atcacgccgactgccacttgtccac

SEQ ID NO: 188072 - DNA, 25 bp, Homo sapien
ctgcgatcacgccgactgccacttg

SEQ ID NO: 188073 - DNA, 25 bp, Homo sapien
gaccgcctctctccggccccgccgc

SEQ ID NO: 188074 - DNA, 25 bp, Homo sapien
cgtcctcccaggggaccgcctctct

SEQ ID NO: 188075 - DNA, 25 bp, Homo sapien
ccgccgcgcccctggctgccgcttc

SEQ ID NO: 188076 - DNA, 25 bp, Homo sapien
tcccaggggaccgcctctctccggc

SEQ ID NO: 188077 - DNA, 25 bp, Homo sapien
ctgcccgactccgcgcggggaattg

SEQ ID NO: 188078 - DNA, 25 bp, Homo sapien
ccgactccgcgcggggaattgcgtc

SEQ ID NO: 188079 - DNA, 25 bp, Homo sapien
actccgcgcggggaattgcgtccca

SEQ ID NO: 188080 - DNA, 25 bp, Homo sapien
tgcccgactccgcgcggggaattgc

SEQ ID NO: 188081 - DNA, 25 bp, Homo sapien
tattggctactcgatgacttttaca

SEQ ID NO: 188082 - DNA, 25 bp, Homo sapien
gagagcctgggagaactacattatt

SEQ ID NO: 188083 - DNA, 25 bp, Homo sapien
gagcaacccctcgtgaagattcaga

SEQ ID NO: 188084 - DNA, 25 bp, Homo sapien
tctgatctactttcggctctgaagg

SEQ ID NO: 188085 - DNA, 25 bp, Homo sapien
gactcttgactacacgatgggaaaa

SEQ ID NO: 188086 - DNA, 25 bp, Homo sapien
agtaaagccttcaagtctggcacag

SEQ ID NO: 188087 - DNA, 25 bp, Homo sapien
gccaaaagatctagggaaagcgctg

SEQ ID NO: 188088 - DNA, 25 bp, Homo sapien
gattatcagccaaaagatctaggga

SEQ ID NO: 188089 - DNA, 25 bp, Homo sapien
gaggccagcctaatgaaaatttatt

SEQ ID NO: 188090 - DNA, 25 bp, Homo sapien
ccctgcctagacaccactttaaaat

SEQ ID NO: 188091 - DNA, 25 bp, Homo sapien
cttgggggaggccagcctaatgaaa

SEQ ID NO: 188092 - DNA, 25 bp, Homo sapien
gggaggccagcctaatgaaaattta

SEQ ID NO: 188093 - DNA, 25 bp, Homo sapien
tcagattccgatttgacagtcagcc

SEQ ID NO: 188094 - DNA, 25 bp, Homo sapien
aggcattgtcaatggggcagatcag

SEQ ID NO: 188095 - DNA, 25 bp, Homo sapien
gatcagattccgatttgacagtcag

SEQ ID NO: 188096 - DNA, 25 bp, Homo sapien
attgtcaatggggcagatcagattc

SEQ ID NO: 188097 - DNA, 25 bp, Homo sapien
cgtagggcaatctctctgtaagtag

SEQ ID NO: 188098 - DNA, 25 bp, Homo sapien
ttacacgtagggcaatctctctgta

SEQ ID NO: 188099 - DNA, 25 bp, Homo sapien
tgttacacgtagggcaatctctctg

SEQ ID NO: 188100 - DNA, 25 bp, Homo sapien
cacgtagggcaatctctctgtaagt

SEQ ID NO: 188101 - DNA, 25 bp, Homo sapien
cattttccagactacgaatatgcta

SEQ ID NO: 188102 - DNA, 25 bp, Homo sapien
tggtccacaagtagtttcatgcttt

SEQ ID NO: 188103 - DNA, 25 bp, Homo sapien
agtcattcaagcaaggtctaactgc

SEQ ID NO: 188104 - DNA, 25 bp, Homo sapien
aactgcatcataatctgctccacag

SEQ ID NO: 188105 - DNA, 25 bp, Homo sapien
cacagtttttgtcctacggcttaca

SEQ ID NO: 188106 - DNA, 25 bp, Homo sapien
ttaagaagtatgacgccaggagcag

SEQ ID NO: 188107 - DNA, 25 bp, Homo sapien
cagaagaacctgatggacagagaga

SEQ ID NO: 188108 - DNA, 25 bp, Homo sapien
gcactcctgcatagtacgatcacag

SEQ ID NO: 188109 - DNA, 25 bp, Homo sapien
gagtggatatggatgtcctatacct

SEQ ID NO: 188110 - DNA, 25 bp, Homo sapien
tacctaatcaatctccagctactgg

SEQ ID NO: 188111 - DNA, 25 bp, Homo sapien
ttttaaggcctttgtgacactgctg

SEQ ID NO: 188112 - DNA, 25 bp, Homo sapien
tgaggatttcctattctgatgggtg

SEQ ID NO: 188113 - DNA, 25 bp, Homo sapien
gattaattagtcataaaccactgca

SEQ ID NO: 188114 - DNA, 25 bp, Homo sapien
ttaattagtcataaaccactgcact

SEQ ID NO: 188115 - DNA, 25 bp, Homo sapien
gtgattaattagtcataaaccactg

SEQ ID NO: 188116 - DNA, 25 bp, Homo sapien
attaattagtcataaaccactgcac

SEQ ID NO: 188117 - DNA, 25 bp, Homo sapien
gagctaagatcgtgtcactaaactc

SEQ ID NO: 188118 - DNA, 25 bp, Homo sapien
ctaagatcgtgtcactaaactccag

SEQ ID NO: 188119 - DNA, 25 bp, Homo sapien
gctaagatcgtgtcactaaactcca

SEQ ID NO: 188120 - DNA, 25 bp, Homo sapien
ggagctaagatcgtgtcactaaact

SEQ ID NO: 188121 - DNA, 25 bp, Homo sapien
aaccttctgagatgcattgcataac

SEQ ID NO: 188122 - DNA, 25 bp, Homo sapien
acaaaccttctgagatgcattgcat

SEQ ID NO: 188123 - DNA, 25 bp, Homo sapien
cccacaaaccttctgagatgcattg

SEQ ID NO: 188124 - DNA, 25 bp, Homo sapien
ttccccacaaaccttctgagatgca

SEQ ID NO: 188125 - DNA, 25 bp, Homo sapien
cgtagtttcaattacctgtggtcaa

SEQ ID NO: 188126 - DNA, 25 bp, Homo sapien
tggtcaactgtaatctgaaaacagc

SEQ ID NO: 188127 - DNA, 25 bp, Homo sapien
gtaatgtctccttggtatcctacag

SEQ ID NO: 188128 - DNA, 25 bp, Homo sapien
taaagtgatctccacttagccatgg

SEQ ID NO: 188129 - DNA, 25 bp, Homo sapien
tggtgtacagatgtctgcatgaagc

SEQ ID NO: 188130 - DNA, 25 bp, Homo sapien
tattcatagcatcagcattttgcag

SEQ ID NO: 188131 - DNA, 25 bp, Homo sapien
tcatagcatcagcattttgcagaag

SEQ ID NO: 188132 - DNA, 25 bp, Homo sapien
gcagaagtaaatctggtgtacagat

SEQ ID NO: 188133 - DNA, 25 bp, Homo sapien
tatgtgaataggatataattacaac

SEQ ID NO: 188134 - DNA, 25 bp, Homo sapien
caatgcaaaagagatttgactaagt

SEQ ID NO: 188135 - DNA, 25 bp, Homo sapien
caatggcaaccaagaacagattgga

SEQ ID NO: 188136 - DNA, 25 bp, Homo sapien
tatttaagagaattcaatctgtttc

SEQ ID NO: 188137 - DNA, 25 bp, Homo sapien
cctgcaattggcgaaaagtctcctt

SEQ ID NO: 188138 - DNA, 25 bp, Homo sapien
ccatttcctgcaattggcgaaaagt

SEQ ID NO: 188139 - DNA, 25 bp, Homo sapien
gcaattggcgaaaagtctcctttca

SEQ ID NO: 188140 - DNA, 25 bp, Homo sapien
gaaaagtctcctttcaattctactc

SEQ ID NO: 188141 - DNA, 25 bp, Homo sapien
taaaggactatgctaggcctggagc

SEQ ID NO: 188142 - DNA, 25 bp, Homo sapien
caggcaaagctgttgctagcagaag

SEQ ID NO: 188143 - DNA, 25 bp, Homo sapien
tcccagagaattagaagagtgaaca

SEQ ID NO: 188144 - DNA, 25 bp, Homo sapien
ggagctgatgtcaaccaacaccttt

SEQ ID NO: 188145 - DNA, 25 bp, Homo sapien
accacaccctgctattttctgtatt

SEQ ID NO: 188146 - DNA, 25 bp, Homo sapien
gcgccaccacaccctgctattttct

SEQ ID NO: 188147 - DNA, 25 bp, Homo sapien
caccacaccctgctattttctgtat

SEQ ID NO: 188148 - DNA, 25 bp, Homo sapien
gccaccacaccctgctattttctgt

SEQ ID NO: 188149 - DNA, 25 bp, Homo sapien
gaatcaataagtcttcatcataaag

SEQ ID NO: 188150 - DNA, 25 bp, Homo sapien
caataagtcttcatcataaaggaat

SEQ ID NO: 188151 - DNA, 25 bp, Homo sapien
aatgaatcaataagtcttcatcata

SEQ ID NO: 188152 - DNA, 25 bp, Homo sapien
ggtgaactgtgggttccggctgctg

SEQ ID NO: 188153 - DNA, 25 bp, Homo sapien
gaatccctcctggtgtcggccagtc

SEQ ID NO: 188154 - DNA, 25 bp, Homo sapien
ctggaatccctcctggtgtcggcca

SEQ ID NO: 188155 - DNA, 25 bp, Homo sapien
gctggtttctgcagtacgatataat

SEQ ID NO: 188156 - DNA, 25 bp, Homo sapien
tttctgtatgctccctgcagtgtgg

SEQ ID NO: 188157 - DNA, 25 bp, Homo sapien
gtcaaatgacttccacacctctctg

SEQ ID NO: 188158 - DNA, 25 bp, Homo sapien
gggcccgactgctctgtcaaatgac

SEQ ID NO: 188159 - DNA, 25 bp, Homo sapien
gaacttgagtatctcatctattacc

SEQ ID NO: 188160 - DNA, 25 bp, Homo sapien
tgacgtgctgccttggcataaggaa

SEQ ID NO: 188161 - DNA, 25 bp, Homo sapien
taaaggaaggtgctaatcagctgcc

SEQ ID NO: 188162 - DNA, 25 bp, Homo sapien
cagcaaatgtgtggtaatactacgt

SEQ ID NO: 188163 - DNA, 25 bp, Homo sapien
ggaacatctcttaacacataaacag

SEQ ID NO: 188164 - DNA, 25 bp, Homo sapien
ttaattactagtgaggtggaacatc

SEQ ID NO: 188165 - DNA, 25 bp, Homo sapien
gaggcagagtttcgctctcattgcc

SEQ ID NO: 188166 - DNA, 25 bp, Homo sapien
tttgaggcagagtttcgctctcatt

SEQ ID NO: 188167 - DNA, 25 bp, Homo sapien
caggctggagtgtaatggcatcatc

SEQ ID NO: 188168 - DNA, 25 bp, Homo sapien
tcagctcaccacaacctccgcctct

SEQ ID NO: 188169 - DNA, 25 bp, Homo sapien
ggtttacctgtctgacactagtgct

SEQ ID NO: 188170 - DNA, 25 bp, Homo sapien
cactagtgctcattatttcctagcc

SEQ ID NO: 188171 - DNA, 25 bp, Homo sapien
tttcctagcctaagctgtacaaaga

SEQ ID NO: 188172 - DNA, 25 bp, Homo sapien
caaagaaacatctaggctcccacct

SEQ ID NO: 188173 - DNA, 25 bp, Homo sapien
cactcaaaatcgctcgaatcaggga

SEQ ID NO: 188174 - DNA, 25 bp, Homo sapien
atcccagccactcaaaatcgctcga

SEQ ID NO: 188175 - DNA, 25 bp, Homo sapien
caaaatcgctcgaatcagggaggtg

SEQ ID NO: 188176 - DNA, 25 bp, Homo sapien
cagccactcaaaatcgctcgaatca

SEQ ID NO: 188177 - DNA, 25 bp, Homo sapien
gcctgcctcgcagtgggaaatttta

SEQ ID NO: 188178 - DNA, 25 bp, Homo sapien
ccacagtgcgaagcggccgcagcat

SEQ ID NO: 188179 - DNA, 25 bp, Homo sapien
taccttgctggagcaagccgcgcag

SEQ ID NO: 188180 - DNA, 25 bp, Homo sapien
ttagttcgcatccactgtaacagcg

SEQ ID NO: 188181 - DNA, 25 bp, Homo sapien
tcagggccacggctttagcggtgtc

SEQ ID NO: 188182 - DNA, 25 bp, Homo sapien
tcgctaaggaattcccggcccctca

SEQ ID NO: 188183 - DNA, 25 bp, Homo sapien
tgtcttttgcggtaagtgtctgctt

SEQ ID NO: 188184 - DNA, 25 bp, Homo sapien
ttccgacggcgtggggcctcgctaa

SEQ ID NO: 188185 - DNA, 25 bp, Homo sapien
cctccgtggccaccggccatcgtta

SEQ ID NO: 188186 - DNA, 25 bp, Homo sapien
cgctgctcaggaggcgagagactcc

SEQ ID NO: 188187 - DNA, 25 bp, Homo sapien
ccccagcgctgctcaggaggcgaga

SEQ ID NO: 188188 - DNA, 25 bp, Homo sapien
cagccccagcgctgctcaggaggcg

SEQ ID NO: 188189 - DNA, 25 bp, Homo sapien
gtgccccttttgagttgtcttccga

SEQ ID NO: 188190 - DNA, 25 bp, Homo sapien
gtttctgtggctctttatctcgtct

SEQ ID NO: 188191 - DNA, 25 bp, Homo sapien
tatctcgtcttccatgagaagtttt

SEQ ID NO: 188192 - DNA, 25 bp, Homo sapien
ttttattaaagatgcgctgtgcccc

SEQ ID NO: 188193 - DNA, 25 bp, Homo sapien
taggcagttgcaggcctgagtcttc

SEQ ID NO: 188194 - DNA, 25 bp, Homo sapien
ctgagccaaataagatgtaggcagt

SEQ ID NO: 188195 - DNA, 25 bp, Homo sapien
gcagttgcaggcctgagtcttcgtt

SEQ ID NO: 188196 - DNA, 25 bp, Homo sapien
ccaaataagatgtaggcagttgcag

SEQ ID NO: 188197 - DNA, 25 bp, Homo sapien
atttcttgaaactttcccctgctgc

SEQ ID NO: 188198 - DNA, 25 bp, Homo sapien
tcttgaaactttcccctgctgcctt

SEQ ID NO: 188199 - DNA, 25 bp, Homo sapien
atccatttcttgaaactttcccctg

SEQ ID NO: 188200 - DNA, 25 bp, Homo sapien
catccatttcttgaaactttcccct

SEQ ID NO: 188201 - DNA, 25 bp, Homo sapien
tttaaaatgaaagatgatctgttta

SEQ ID NO: 188202 - DNA, 25 bp, Homo sapien
taaaatgaaagatgatctgtttatg

SEQ ID NO: 188203 - DNA, 25 bp, Homo sapien
catgcctggcttagtatagcttttt

SEQ ID NO: 188204 - DNA, 25 bp, Homo sapien
caaaaagttaactagtatggcttat

SEQ ID NO: 188205 - DNA, 25 bp, Homo sapien
cccatggtgtagatccagtctgaat

SEQ ID NO: 188206 - DNA, 25 bp, Homo sapien
tgtgtgccttgtcttaccagctagt

SEQ ID NO: 188207 - DNA, 25 bp, Homo sapien
ggctcaggccgttatggagacttaa

SEQ ID NO: 188208 - DNA, 25 bp, Homo sapien
gaaaagctgatgtccctgttagcag

SEQ ID NO: 188209 - DNA, 25 bp, Homo sapien
gatttcctgcgcccaggaagttgag

SEQ ID NO: 188210 - DNA, 25 bp, Homo sapien
gaggatttcctgcgcccaggaagtt

SEQ ID NO: 188211 - DNA, 25 bp, Homo sapien
ggatttcctgcgcccaggaagttga

SEQ ID NO: 188212 - DNA, 25 bp, Homo sapien
aggatttcctgcgcccaggaagttg

SEQ ID NO: 188213 - DNA, 25 bp, Homo sapien
ggaaatcattatatgtttgctttag

SEQ ID NO: 188214 - DNA, 25 bp, Homo sapien
taattatctcgaaggccaagcattg

SEQ ID NO: 188215 - DNA, 25 bp, Homo sapien
tcttctgttttcaccatcataacac

SEQ ID NO: 188216 - DNA, 25 bp, Homo sapien
tcataacacttaagttaaatcatga

SEQ ID NO: 188217 - DNA, 25 bp, Homo sapien
ttaccagctgcgtcactggagcaag

SEQ ID NO: 188218 - DNA, 25 bp, Homo sapien
tgtaggtggtggaatcagaatgcct

SEQ ID NO: 188219 - DNA, 25 bp, Homo sapien
caacatactcacctttggtgtggaa

SEQ ID NO: 188220 - DNA, 25 bp, Homo sapien
tttcttgccttgctaacacttactg

SEQ ID NO: 188221 - DNA, 25 bp, Homo sapien
tgggcctgctgttgctatgatgaaa

SEQ ID NO: 188222 - DNA, 25 bp, Homo sapien
tacgcacacgactttaagacacaga

SEQ ID NO: 188223 - DNA, 25 bp, Homo sapien
tcaagatggaagcttactactgccc

SEQ ID NO: 188224 - DNA, 25 bp, Homo sapien
cattgcgaaagacggaaaaaatctg

SEQ ID NO: 188225 - DNA, 25 bp, Homo sapien
tctttcgagggtattttggctggac

SEQ ID NO: 188226 - DNA, 25 bp, Homo sapien
ttttggctggactgtcacccacgtt

SEQ ID NO: 188227 - DNA, 25 bp, Homo sapien
gcagcacgagccgtacattttacat

SEQ ID NO: 188228 - DNA, 25 bp, Homo sapien
cacccacgtttggaatggaaagtgc

SEQ ID NO: 188229 - DNA, 25 bp, Homo sapien
ttgaagtacaacgacacagctgtct

SEQ ID NO: 188230 - DNA, 25 bp, Homo sapien
ctagcctttgaagtacaacgacaca

SEQ ID NO: 188231 - DNA, 25 bp, Homo sapien
gcctttgaagtacaacgacacagct

SEQ ID NO: 188232 - DNA, 25 bp, Homo sapien
ctttgaagtacaacgacacagctgt

SEQ ID NO: 188233 - DNA, 25 bp, Homo sapien
gaaatgacgtcacaggcggtgccag

SEQ ID NO: 188234 - DNA, 25 bp, Homo sapien
cacgagctctggatgcttgcttggc

SEQ ID NO: 188235 - DNA, 25 bp, Homo sapien
tgccaggcggggatccacgagctct

SEQ ID NO: 188236 - DNA, 25 bp, Homo sapien
tgcttgcttggccggaagcgacgcc

SEQ ID NO: 188237 - DNA, 25 bp, Homo sapien
tcaggccggcgagtccccttctcag

SEQ ID NO: 188238 - DNA, 25 bp, Homo sapien
gacagcctggctcggccagcgactg

SEQ ID NO: 188239 - DNA, 25 bp, Homo sapien
gcgggtgagtcccacttcccgacag

SEQ ID NO: 188240 - DNA, 25 bp, Homo sapien
ttctcagagacttggctaggcgcgg

SEQ ID NO: 188241 - DNA, 25 bp, Homo sapien
gtgtggaacgaggagaagccgtcgc

SEQ ID NO: 188242 - DNA, 25 bp, Homo sapien
attaccctctttctcaccagcgcca

SEQ ID NO: 188243 - DNA, 25 bp, Homo sapien
ccaggagccagtgggcggtgtggaa

SEQ ID NO: 188244 - DNA, 25 bp, Homo sapien
agcagccctgtggtggcgacgacga

SEQ ID NO: 188245 - DNA, 25 bp, Homo sapien
ctccttgccttctccgcgggccgct

SEQ ID NO: 188246 - DNA, 25 bp, Homo sapien
accagcttgtgggaaggagcgcccc

SEQ ID NO: 188247 - DNA, 25 bp, Homo sapien
cgaggctgacgtccggggagccgag

SEQ ID NO: 188248 - DNA, 25 bp, Homo sapien
ctcttttagcctgcgcggccgtcct

SEQ ID NO: 188249 - DNA, 25 bp, Homo sapien
ctcgggttcctggggtgatagtcca

SEQ ID NO: 188250 - DNA, 25 bp, Homo sapien
aggtgagggcggcttcaaccacttc

SEQ ID NO: 188251 - DNA, 25 bp, Homo sapien
cagtctcttctggtgcgagcgcctg

SEQ ID NO: 188252 - DNA, 25 bp, Homo sapien
tccttgcagtagctggaagccaggt

SEQ ID NO: 188253 - DNA, 25 bp, Homo sapien
tccttacagtaaccgctcgaggtgg

SEQ ID NO: 188254 - DNA, 25 bp, Homo sapien
gtaattattggatttctggttcaag

SEQ ID NO: 188255 - DNA, 25 bp, Homo sapien
tgtaattattggatttctggttcaa

SEQ ID NO: 188256 - DNA, 25 bp, Homo sapien
taattattggatttctggttcaagt

SEQ ID NO: 188257 - DNA, 25 bp, Homo sapien
aattattggatttctggttcaagtt

SEQ ID NO: 188258 - DNA, 25 bp, Homo sapien
tgacatcaggttatcttgccttggc

SEQ ID NO: 188259 - DNA, 25 bp, Homo sapien
ttaaacttgaggcaagaggacaatg

SEQ ID NO: 188260 - DNA, 25 bp, Homo sapien
ggagtttaaacttgaggcaagagga

SEQ ID NO: 188261 - DNA, 25 bp, Homo sapien
tcaccatctcccactatatatatag

SEQ ID NO: 188262 - DNA, 25 bp, Homo sapien
gtttaaacttgaggcaagaggacaa

SEQ ID NO: 188263 - DNA, 25 bp, Homo sapien
tgttggtctttcacgagaaccacct

SEQ ID NO: 188264 - DNA, 25 bp, Homo sapien
tgggcatttacgaatacaagtttcc

SEQ ID NO: 188265 - DNA, 25 bp, Homo sapien
ggcagaagtctaggttattgctagt

SEQ ID NO: 188266 - DNA, 25 bp, Homo sapien
ctctattaatttctgctcttgcctg

SEQ ID NO: 188267 - DNA, 25 bp, Homo sapien
agagaccaccctactgtgctccagc

SEQ ID NO: 188268 - DNA, 25 bp, Homo sapien
agtgagcagagaccaccctactgtg

SEQ ID NO: 188269 - DNA, 25 bp, Homo sapien
cagagaccaccctactgtgctccag

SEQ ID NO: 188270 - DNA, 25 bp, Homo sapien
gagcagagaccaccctactgtgctc

SEQ ID NO: 188271 - DNA, 25 bp, Homo sapien
caaagtattaaagccattgtctgat

SEQ ID NO: 188272 - DNA, 25 bp, Homo sapien
ttggccagactggtcaacaggagtt

SEQ ID NO: 188273 - DNA, 25 bp, Homo sapien
ccattgtctgataatatgaaaatcg

SEQ ID NO: 188274 - DNA, 25 bp, Homo sapien
acaggagttggccagactcctgacc

SEQ ID NO: 188275 - DNA, 25 bp, Homo sapien
atgtcaattttgaaatggagggaga

SEQ ID NO: 188276 - DNA, 25 bp, Homo sapien
atcaagcttcaaactcttaagtttt

SEQ ID NO: 188277 - DNA, 25 bp, Homo sapien
caattttgaaatggagggagacagt

SEQ ID NO: 188278 - DNA, 25 bp, Homo sapien
gtgaatgtcaattttgaaatggagg

SEQ ID NO: 188279 - DNA, 25 bp, Homo sapien
ggacatcctagagccttaatagtta

SEQ ID NO: 188280 - DNA, 25 bp, Homo sapien
gattttctcatgttatgccatgcat

SEQ ID NO: 188281 - DNA, 25 bp, Homo sapien
aatttcacactaaggatgcttcacc

SEQ ID NO: 188282 - DNA, 25 bp, Homo sapien
tccatagtcttagattaaaatgagg

SEQ ID NO: 188283 - DNA, 25 bp, Homo sapien
gaatgtgtggagtgtttcagaaatt

SEQ ID NO: 188284 - DNA, 25 bp, Homo sapien
aatagccttctaaacagcattaagt

SEQ ID NO: 188285 - DNA, 25 bp, Homo sapien
tctctaaatgtgtgtatagaacctt

SEQ ID NO: 188286 - DNA, 25 bp, Homo sapien
tataattaaatgtgggtgaggaaga

SEQ ID NO: 188287 - DNA, 25 bp, Homo sapien
tttctgaggattttgctttaaaggc

SEQ ID NO: 188288 - DNA, 25 bp, Homo sapien
catatcaagtgttttatttagacca

SEQ ID NO: 188289 - DNA, 25 bp, Homo sapien
ctttaaaggctttacatgcagcatt

SEQ ID NO: 188290 - DNA, 25 bp, Homo sapien
tctcataatataagacagtctagtc

SEQ ID NO: 188291 - DNA, 25 bp, Homo sapien
catgtatcatcaaggtctgcagagt

SEQ ID NO: 188292 - DNA, 25 bp, Homo sapien
tcaaggtctgcagagttttcactgt

SEQ ID NO: 188293 - DNA, 25 bp, Homo sapien
cagagttttcactgtcatttgcaac

SEQ ID NO: 188294 - DNA, 25 bp, Homo sapien
tcatgtatcatcaaggtctgcagag

SEQ ID NO: 188295 - DNA, 25 bp, Homo sapien
tccagaagccattcaaatcgattag

SEQ ID NO: 188296 - DNA, 25 bp, Homo sapien
agcctctctgttctcgtaagtccag

SEQ ID NO: 188297 - DNA, 25 bp, Homo sapien
gaatggtggttactgtgtctccttg

SEQ ID NO: 188298 - DNA, 25 bp, Homo sapien
gattactgttgattaaatcctgaag

SEQ ID NO: 188299 - DNA, 25 bp, Homo sapien
acacatagtgatccaaaattcaggg

SEQ ID NO: 188300 - DNA, 25 bp, Homo sapien
tatcacacatagtgatccaaaattc

SEQ ID NO: 188301 - DNA, 25 bp, Homo sapien
caatgaaatttgatccacttaattt

SEQ ID NO: 188302 - DNA, 25 bp, Homo sapien
atttctatcacacatagtgatccaa

SEQ ID NO: 188303 - DNA, 25 bp, Homo sapien
caggctgtttgaggtagcatactaa

SEQ ID NO: 188304 - DNA, 25 bp, Homo sapien
tactggaacatatagaagacctcct

SEQ ID NO: 188305 - DNA, 25 bp, Homo sapien
gctaaattctgctaaaacttactgg

SEQ ID NO: 188306 - DNA, 25 bp, Homo sapien
gactgccgtaggatatagactgtac

SEQ ID NO: 188307 - DNA, 25 bp, Homo sapien
ttgtccatggattttcattagttcc

SEQ ID NO: 188308 - DNA, 25 bp, Homo sapien
aatgaaacaggatcttgtccatgga

SEQ ID NO: 188309 - DNA, 25 bp, Homo sapien
ggattttcattagttcctgtatggc

SEQ ID NO: 188310 - DNA, 25 bp, Homo sapien
tgaaacaggatcttgtccatggatt

SEQ ID NO: 188311 - DNA, 25 bp, Homo sapien
tttctaatgcaaggacaaagtccaa

SEQ ID NO: 188312 - DNA, 25 bp, Homo sapien
tctgttttctaatgcaaggacaaag

SEQ ID NO: 188313 - DNA, 25 bp, Homo sapien
gacattcaggtatcctttgttctca

SEQ ID NO: 188314 - DNA, 25 bp, Homo sapien
caaagtccaagtaggtcttatagtc

SEQ ID NO: 188315 - DNA, 25 bp, Homo sapien
tctacacaggacagttttgaggaca

SEQ ID NO: 188316 - DNA, 25 bp, Homo sapien
ctacacaggacagttttgaggacat

SEQ ID NO: 188317 - DNA, 25 bp, Homo sapien
cccagccataggaattctatatata

SEQ ID NO: 188318 - DNA, 25 bp, Homo sapien
gcccagccataggaattctatatat

SEQ ID NO: 188319 - DNA, 25 bp, Homo sapien
ctccatcataagtgagacactcctg

SEQ ID NO: 188320 - DNA, 25 bp, Homo sapien
catgccattgtgatctttatcaaga

SEQ ID NO: 188321 - DNA, 25 bp, Homo sapien
tcctggaaaacacggtctaagaaga

SEQ ID NO: 188322 - DNA, 25 bp, Homo sapien
gagttcttctttactgagcatgcca

SEQ ID NO: 188323 - DNA, 25 bp, Homo sapien
ccttggacagttcctcatcccttag

SEQ ID NO: 188324 - DNA, 25 bp, Homo sapien
atcatctaggaagctgcatgctaaa

SEQ ID NO: 188325 - DNA, 25 bp, Homo sapien
catctaggaagctgcatgctaaaat

SEQ ID NO: 188326 - DNA, 25 bp, Homo sapien
tcatctaggaagctgcatgctaaaa

SEQ ID NO: 188327 - DNA, 25 bp, Homo sapien
atctaggaagctgcatgctaaaata

SEQ ID NO: 188328 - DNA, 25 bp, Homo sapien
tacatgtagttaagtctgggcaggt

SEQ ID NO: 188329 - DNA, 25 bp, Homo sapien
taattctgcagtatgtcacacagca

SEQ ID NO: 188330 - DNA, 25 bp, Homo sapien
taccaatccgatccttatagagaat

SEQ ID NO: 188331 - DNA, 25 bp, Homo sapien
ccaggcccatagctgaattttcaag

SEQ ID NO: 188332 - DNA, 25 bp, Homo sapien
atatcctcataatatctaagttaga

SEQ ID NO: 188333 - DNA, 25 bp, Homo sapien
tatctaagttagataagattttctt

SEQ ID NO: 188334 - DNA, 25 bp, Homo sapien
tctctagttattgagatttagatat

SEQ ID NO: 188335 - DNA, 25 bp, Homo sapien
ctctagttattgagatttagatata

SEQ ID NO: 188336 - DNA, 25 bp, Homo sapien
tccagaccatctaattgtggcaacg

SEQ ID NO: 188337 - DNA, 25 bp, Homo sapien
ggcaacgtagggataagttccaata

SEQ ID NO: 188338 - DNA, 25 bp, Homo sapien
taattgtggcaacgtagggataagt

SEQ ID NO: 188339 - DNA, 25 bp, Homo sapien
tagggataagttccaatatgtagtt

SEQ ID NO: 188340 - DNA, 25 bp, Homo sapien
cagcattaatactatattgataaag

SEQ ID NO: 188341 - DNA, 25 bp, Homo sapien
gatattgattaaaaagcctctcacc

SEQ ID NO: 188342 - DNA, 25 bp, Homo sapien
taaatgcatgactattttagtggta

SEQ ID NO: 188343 - DNA, 25 bp, Homo sapien
agtaacttgtattatcaacttctga

SEQ ID NO: 188344 - DNA, 25 bp, Homo sapien
cgattcttgtgtctcagcctgagta

SEQ ID NO: 188345 - DNA, 25 bp, Homo sapien
cttgtgtctcagcctgagtagccag

SEQ ID NO: 188346 - DNA, 25 bp, Homo sapien
gattacaggcacgtaccaccacgcc

SEQ ID NO: 188347 - DNA, 25 bp, Homo sapien
ttcttgtgtctcagcctgagtagcc

SEQ ID NO: 188348 - DNA, 25 bp, Homo sapien
gcctggccgtactttgagttcctta

SEQ ID NO: 188349 - DNA, 25 bp, Homo sapien
tatactacatcttcataaggctggc

SEQ ID NO: 188350 - DNA, 25 bp, Homo sapien
caaagtccttactgtggcccaaaag

SEQ ID NO: 188351 - DNA, 25 bp, Homo sapien
gactcagcttaaaacttccgatggt

SEQ ID NO: 188352 - DNA, 25 bp, Homo sapien
attgtgatttttaaggggcatcctt

SEQ ID NO: 188353 - DNA, 25 bp, Homo sapien
gcattttgacaacgttgcttttcct

SEQ ID NO: 188354 - DNA, 25 bp, Homo sapien
gagcattttgacaacgttgcttttc

SEQ ID NO: 188355 - DNA, 25 bp, Homo sapien
tgtgatttttaaggggcatccttgc

SEQ ID NO: 188356 - DNA, 25 bp, Homo sapien
ctgcccagcgacatcatataaactg

SEQ ID NO: 188357 - DNA, 25 bp, Homo sapien
aactgagtcctattcttgtttgatg

SEQ ID NO: 188358 - DNA, 25 bp, Homo sapien
ccgaaggtacccctgcccagcgaca

SEQ ID NO: 188359 - DNA, 25 bp, Homo sapien
cccagcgacatcatataaactgagt

SEQ ID NO: 188360 - DNA, 25 bp, Homo sapien
ttacagctttgggtttgaaactatc

SEQ ID NO: 188361 - DNA, 25 bp, Homo sapien
tatggcacttgtaggaatcataagt

SEQ ID NO: 188362 - DNA, 25 bp, Homo sapien
gctaacccaagtttatgtaacacat

SEQ ID NO: 188363 - DNA, 25 bp, Homo sapien
taagtccaagctgtttaattgatgc

SEQ ID NO: 188364 - DNA, 25 bp, Homo sapien
gcacagaccaaaaacctacttgatt

SEQ ID NO: 188365 - DNA, 25 bp, Homo sapien
caaaaacctacttgattcccagata

SEQ ID NO: 188366 - DNA, 25 bp, Homo sapien
ccaaaaacctacttgattcccagat

SEQ ID NO: 188367 - DNA, 25 bp, Homo sapien
aaagcacagaccaaaaacctacttg

SEQ ID NO: 188368 - DNA, 25 bp, Homo sapien
ggagtttagcaaagacttttgctgt

SEQ ID NO: 188369 - DNA, 25 bp, Homo sapien
tctcatgacataattaaagaactgc

SEQ ID NO: 188370 - DNA, 25 bp, Homo sapien
taattaaagaactgcatgatggaaa

SEQ ID NO: 188371 - DNA, 25 bp, Homo sapien
catatgaatctgtatgaaggagttt

SEQ ID NO: 188372 - DNA, 25 bp, Homo sapien
catgcctagcctaagtcataaatgt

SEQ ID NO: 188373 - DNA, 25 bp, Homo sapien
tagagactccttataattcaaaaac

SEQ ID NO: 188374 - DNA, 25 bp, Homo sapien
gaggcaggcacatcatgagtcaaga

SEQ ID NO: 188375 - DNA, 25 bp, Homo sapien
tgctttcgtctgtcttaaggctgaa

SEQ ID NO: 188376 - DNA, 25 bp, Homo sapien
cataccaatgtgattttttgactgt

SEQ ID NO: 188377 - DNA, 25 bp, Homo sapien
ttaataacttcataccaatgtgatt

SEQ ID NO: 188378 - DNA, 25 bp, Homo sapien
ccaatgtgattttttgactgtaaat

SEQ ID NO: 188379 - DNA, 25 bp, Homo sapien
agtagctacaggtgtacgcccccac

SEQ ID NO: 188380 - DNA, 25 bp, Homo sapien
ttgcactttgctccagccttttcac

SEQ ID NO: 188381 - DNA, 25 bp, Homo sapien
tgcactttgctccagccttttcacc

SEQ ID NO: 188382 - DNA, 25 bp, Homo sapien
gtaattgatcatcgcttcctctcca

SEQ ID NO: 188383 - DNA, 25 bp, Homo sapien
tcgtaattgatcatcgcttcctctc

SEQ ID NO: 188384 - DNA, 25 bp, Homo sapien
gttttcgtaattgatcatcgcttcc

SEQ ID NO: 188385 - DNA, 25 bp, Homo sapien
tgatcatcgcttcctctccaatcat

SEQ ID NO: 188386 - DNA, 25 bp, Homo sapien
tgtttgtccagcaaaaaccataagt

SEQ ID NO: 188387 - DNA, 25 bp, Homo sapien
ctggtgtttgtccagcaaaaaccat

SEQ ID NO: 188388 - DNA, 25 bp, Homo sapien
ggtgtttgtccagcaaaaaccataa

SEQ ID NO: 188389 - DNA, 25 bp, Homo sapien
gtgtttgtccagcaaaaaccataag

SEQ ID NO: 188390 - DNA, 25 bp, Homo sapien
tacatgacccatgcaaactcagcgg

SEQ ID NO: 188391 - DNA, 25 bp, Homo sapien
tccattaggcaccaagaaatcctgc

SEQ ID NO: 188392 - DNA, 25 bp, Homo sapien
gcttcagagcctatgtagtaccact

SEQ ID NO: 188393 - DNA, 25 bp, Homo sapien
taccactctgtagtacggactccat

SEQ ID NO: 188394 - DNA, 25 bp, Homo sapien
agctcttgattcctctcttaatttc

SEQ ID NO: 188395 - DNA, 25 bp, Homo sapien
ttcattatctaacagttctctgctt

SEQ ID NO: 188396 - DNA, 25 bp, Homo sapien
agacagctcttgattcctctcttaa

SEQ ID NO: 188397 - DNA, 25 bp, Homo sapien
tcattatctaacagttctctgcttt

SEQ ID NO: 188398 - DNA, 25 bp, Homo sapien
tgtaattcttcctgtccagcaaaaa

SEQ ID NO: 188399 - DNA, 25 bp, Homo sapien
ctgtaattcttcctgtccagcaaaa

SEQ ID NO: 188400 - DNA, 25 bp, Homo sapien
attcttcctgtccagcaaaaaccat

SEQ ID NO: 188401 - DNA, 25 bp, Homo sapien
taattcttcctgtccagcaaaaacc

SEQ ID NO: 188402 - DNA, 25 bp, Homo sapien
gataaaaccttggtcgctacagcct

SEQ ID NO: 188403 - DNA, 25 bp, Homo sapien
ttccaggaactaagatgccatccct

SEQ ID NO: 188404 - DNA, 25 bp, Homo sapien
tcagtcagcgcccttaaaatttaac

SEQ ID NO: 188405 - DNA, 25 bp, Homo sapien
gcctgctagctaaaagcttcatctg

SEQ ID NO: 188406 - DNA, 25 bp, Homo sapien
cctttccattcggagtaatattttg

SEQ ID NO: 188407 - DNA, 25 bp, Homo sapien
gaatggtcttatagaattcatttgt

SEQ ID NO: 188408 - DNA, 25 bp, Homo sapien
atggtcttatagaattcatttgtgt

SEQ ID NO: 188409 - DNA, 25 bp, Homo sapien
tttccattcggagtaatattttgta

SEQ ID NO: 188410 - DNA, 25 bp, Homo sapien
tcgctaggcgccgacgaagaacttc

SEQ ID NO: 188411 - DNA, 25 bp, Homo sapien
ttgggcgtcgctaggcgccgacgaa

SEQ ID NO: 188412 - DNA, 25 bp, Homo sapien
tggacaggtgttgggcgtcgctagg

SEQ ID NO: 188413 - DNA, 25 bp, Homo sapien
caggtgttgggcgtcgctaggcgcc

SEQ ID NO: 188414 - DNA, 25 bp, Homo sapien
atttgctgtttcctacctgctccac

SEQ ID NO: 188415 - DNA, 25 bp, Homo sapien
tcctacctgctccacccctaccagc

SEQ ID NO: 188416 - DNA, 25 bp, Homo sapien
tttcctacctgctccacccctacca

SEQ ID NO: 188417 - DNA, 25 bp, Homo sapien
ctgcatttgctgtttcctacctgct

SEQ ID NO: 188418 - DNA, 25 bp, Homo sapien
aaggccgtccaaccaccatcttgat

SEQ ID NO: 188419 - DNA, 25 bp, Homo sapien
ttaggaaggccgtccaaccaccatc

SEQ ID NO: 188420 - DNA, 25 bp, Homo sapien
catcttgatcgagggcggaagtctt

SEQ ID NO: 188421 - DNA, 25 bp, Homo sapien
ccaaccaccatcttgatcgagggcg

SEQ ID NO: 188422 - DNA, 25 bp, Homo sapien
tgccgcggagaataccgctaccacg

SEQ ID NO: 188423 - DNA, 25 bp, Homo sapien
acaattactgtcactgccgcggaga

SEQ ID NO: 188424 - DNA, 25 bp, Homo sapien
gcaaaaacaattactgtcactgccg

SEQ ID NO: 188425 - DNA, 25 bp, Homo sapien
gtcactgccgcggagaataccgcta

SEQ ID NO: 188426 - DNA, 25 bp, Homo sapien
tggttctccttcagaggcgacccaa

SEQ ID NO: 188427 - DNA, 25 bp, Homo sapien
tccttcagaggcgacccaagctcac

SEQ ID NO: 188428 - DNA, 25 bp, Homo sapien
gttctccttcagaggcgacccaagc

SEQ ID NO: 188429 - DNA, 25 bp, Homo sapien
ttctccttcagaggcgacccaagct

SEQ ID NO: 188430 - DNA, 25 bp, Homo sapien
ttatggccgcgttaagtctgagtgc

SEQ ID NO: 188431 - DNA, 25 bp, Homo sapien
aatgtagtagacacttcagcagccg

SEQ ID NO: 188432 - DNA, 25 bp, Homo sapien
tccggcttgagggaagcgccttctt

SEQ ID NO: 188433 - DNA, 25 bp, Homo sapien
tcattgcggatatctggaagccttc

SEQ ID NO: 188434 - DNA, 25 bp, Homo sapien
cgttcggtacgcagtctaggcagcg

SEQ ID NO: 188435 - DNA, 25 bp, Homo sapien
gtacgcagtctaggcagcgcccttc

SEQ ID NO: 188436 - DNA, 25 bp, Homo sapien
tcagcgttcggtacgcagtctaggc

SEQ ID NO: 188437 - DNA, 25 bp, Homo sapien
ttcggtacgcagtctaggcagcgcc

SEQ ID NO: 188438 - DNA, 25 bp, Homo sapien
tatgcagggtgagggcccctagact

SEQ ID NO: 188439 - DNA, 25 bp, Homo sapien
ttttgcggtctgtagagagctatgc

SEQ ID NO: 188440 - DNA, 25 bp, Homo sapien
tcctttcctgagtcgttggcgcagc

SEQ ID NO: 188441 - DNA, 25 bp, Homo sapien
taaaactgggcgttccgtcttgtgc

SEQ ID NO: 188442 - DNA, 25 bp, Homo sapien
agaggcaccagaggattcctgctct

SEQ ID NO: 188443 - DNA, 25 bp, Homo sapien
taagaggcaccagaggattcctgct

SEQ ID NO: 188444 - DNA, 25 bp, Homo sapien
tgtaagaggcaccagaggattcctg

SEQ ID NO: 188445 - DNA, 25 bp, Homo sapien
gtaagaggcaccagaggattcctgc

SEQ ID NO: 188446 - DNA, 25 bp, Homo sapien
agcagaaccttgatttgtctgtaag

SEQ ID NO: 188447 - DNA, 25 bp, Homo sapien
aaagttccacttcgactctgcaccg

SEQ ID NO: 188448 - DNA, 25 bp, Homo sapien
ctttaattttgccatagaagagggg

SEQ ID NO: 188449 - DNA, 25 bp, Homo sapien
tgcttttaagtagccccaaaagcag

SEQ ID NO: 188450 - DNA, 25 bp, Homo sapien
gtgagaagagtacattgtattacat

SEQ ID NO: 188451 - DNA, 25 bp, Homo sapien
tgagaagagtacattgtattacatt

SEQ ID NO: 188452 - DNA, 25 bp, Homo sapien
tagtgagaagagtacattgtattac

SEQ ID NO: 188453 - DNA, 25 bp, Homo sapien
agtgagaagagtacattgtattaca

SEQ ID NO: 188454 - DNA, 25 bp, Homo sapien
gtgtcacagaccttcatatagcctg

SEQ ID NO: 188455 - DNA, 25 bp, Homo sapien
ttctctccatcagtcctgattaggg

SEQ ID NO: 188456 - DNA, 25 bp, Homo sapien
tgtcagtgtcacagaccttcatata

SEQ ID NO: 188457 - DNA, 25 bp, Homo sapien
tagggtgttgatcgtggtcatgtca

SEQ ID NO: 188458 - DNA, 25 bp, Homo sapien
gaacttgatggcataatagtccagc

SEQ ID NO: 188459 - DNA, 25 bp, Homo sapien
ccagcttgtatatcctgcaggttct

SEQ ID NO: 188460 - DNA, 25 bp, Homo sapien
gttgggctactggaacataggtgac

SEQ ID NO: 188461 - DNA, 25 bp, Homo sapien
caggttctctactgaggatgtttgg

SEQ ID NO: 188462 - DNA, 25 bp, Homo sapien
ctggccttaaaagccttagctttgg

SEQ ID NO: 188463 - DNA, 25 bp, Homo sapien
gtgtgactggatgcctttcaacact

SEQ ID NO: 188464 - DNA, 25 bp, Homo sapien
tgtgtgtgtgactggatgcctttca

SEQ ID NO: 188465 - DNA, 25 bp, Homo sapien
tgccttgctggccttaaaagcctta

SEQ ID NO: 188466 - DNA, 25 bp, Homo sapien
ttacaatcagagaaacgtcagatga

SEQ ID NO: 188467 - DNA, 25 bp, Homo sapien
cattcaccattgtgttgatggtaca

SEQ ID NO: 188468 - DNA, 25 bp, Homo sapien
tggtacaaggcttctccacttacaa

SEQ ID NO: 188469 - DNA, 25 bp, Homo sapien
tgtgttgatggtacaaggcttctcc

SEQ ID NO: 188470 - DNA, 25 bp, Homo sapien
tgccattggagctcaacttcagagt

SEQ ID NO: 188471 - DNA, 25 bp, Homo sapien
caagttgggatattcgtaactatta

SEQ ID NO: 188472 - DNA, 25 bp, Homo sapien
aatacgtaactattgatcaatagtt

SEQ ID NO: 188473 - DNA, 25 bp, Homo sapien
cactgatgtccaagttgggatattc

SEQ ID NO: 188474 - DNA, 25 bp, Homo sapien
ttccagctccgtcttcttcatttta

SEQ ID NO: 188475 - DNA, 25 bp, Homo sapien
cgtcttcttcattttagctacatgc

SEQ ID NO: 188476 - DNA, 25 bp, Homo sapien
tgctccatttccagctccgtcttct

SEQ ID NO: 188477 - DNA, 25 bp, Homo sapien
ccatttccagctccgtcttcttcat

SEQ ID NO: 188478 - DNA, 25 bp, Homo sapien
ggagcagtgaagtataaacccggca

SEQ ID NO: 188479 - DNA, 25 bp, Homo sapien
caatgtagttgatgacgagctgcca

SEQ ID NO: 188480 - DNA, 25 bp, Homo sapien
tgccagaaggctcttagtaagccct

SEQ ID NO: 188481 - DNA, 25 bp, Homo sapien
gatttcccaccaccgtaagtgtgaa

SEQ ID NO: 188482 - DNA, 25 bp, Homo sapien
tactattttcatcactaataagtcg

SEQ ID NO: 188483 - DNA, 25 bp, Homo sapien
aagatttactattttcatcactaat

SEQ ID NO: 188484 - DNA, 25 bp, Homo sapien
tttcatcactaataagtcgctcttc

SEQ ID NO: 188485 - DNA, 25 bp, Homo sapien
atcactaataagtcgctcttcaagg

SEQ ID NO: 188486 - DNA, 25 bp, Homo sapien
gtccgctaagtgaaaagggctggat

SEQ ID NO: 188487 - DNA, 25 bp, Homo sapien
tgagtccgctaagtgaaaagggctg

SEQ ID NO: 188488 - DNA, 25 bp, Homo sapien
catgagtccgctaagtgaaaagggc

SEQ ID NO: 188489 - DNA, 25 bp, Homo sapien
agtccgctaagtgaaaagggctgga

SEQ ID NO: 188490 - DNA, 25 bp, Homo sapien
ctcatctgttgaggaaagagataac

SEQ ID NO: 188491 - DNA, 25 bp, Homo sapien
gcctctgttatatcaggaaaacccc

SEQ ID NO: 188492 - DNA, 25 bp, Homo sapien
tggaaacagccattcgtcttcaaat

SEQ ID NO: 188493 - DNA, 25 bp, Homo sapien
tattgggtttaagcttggaggataa

SEQ ID NO: 188494 - DNA, 25 bp, Homo sapien
tatatcagtacatgagatacatgct

SEQ ID NO: 188495 - DNA, 25 bp, Homo sapien
gctgaaatgttattgcctacacgct

SEQ ID NO: 188496 - DNA, 25 bp, Homo sapien
aattctgctttattaaaggcttact

SEQ ID NO: 188497 - DNA, 25 bp, Homo sapien
gatgccggagccctctgggcacatg

SEQ ID NO: 188498 - DNA, 25 bp, Homo sapien
cctgtgatcagatagggcacgccca

SEQ ID NO: 188499 - DNA, 25 bp, Homo sapien
agggcacgcccagccagtaaggttc

SEQ ID NO: 188500 - DNA, 25 bp, Homo sapien
catgctgtgaccttactcctgtcct

SEQ ID NO: 188501 - DNA, 25 bp, Homo sapien
tcctgtcctgtgatcagatagggca

SEQ ID NO: 188502 - DNA, 25 bp, Homo sapien
tgcgaccactggtgtttcccagtcc

SEQ ID NO: 188503 - DNA, 25 bp, Homo sapien
agtctgcgaccactggtgtttccca

SEQ ID NO: 188504 - DNA, 25 bp, Homo sapien
ccaggaatgcgactgcagcagagga

SEQ ID NO: 188505 - DNA, 25 bp, Homo sapien
gcctgccaggaatgcgactgcagca

SEQ ID NO: 188506 - DNA, 25 bp, Homo sapien
ggccgagccccttaggactctctgc

SEQ ID NO: 188507 - DNA, 25 bp, Homo sapien
gtgcatgtggccgagccccttagga

SEQ ID NO: 188508 - DNA, 25 bp, Homo sapien
gtggccgagccccttaggactctct

SEQ ID NO: 188509 - DNA, 25 bp, Homo sapien
gcatgtggccgagccccttaggact

SEQ ID NO: 188510 - DNA, 25 bp, Homo sapien
gtacatttaactcagtttagtggaa

SEQ ID NO: 188511 - DNA, 25 bp, Homo sapien
ttggtgatgcgagccacagacttgg

SEQ ID NO: 188512 - DNA, 25 bp, Homo sapien
cgagcttggtgatgcgagccacaga

SEQ ID NO: 188513 - DNA, 25 bp, Homo sapien
ccttttcgagcttggtgatgcgagc

SEQ ID NO: 188514 - DNA, 25 bp, Homo sapien
ttgatgggatccacttcatgtgcag

SEQ ID NO: 188515 - DNA, 25 bp, Homo sapien
acacaaggcaagcaggaagacaact

SEQ ID NO: 188516 - DNA, 25 bp, Homo sapien
tagtgatggcggatttcatcatatc

SEQ ID NO: 188517 - DNA, 25 bp, Homo sapien
cgagttaacctgtgtaaagttgaca

SEQ ID NO: 188518 - DNA, 25 bp, Homo sapien
ttggcctggacaaacagcctctgct

SEQ ID NO: 188519 - DNA, 25 bp, Homo sapien
cttcttggcctggacaaacagcctc

SEQ ID NO: 188520 - DNA, 25 bp, Homo sapien
ggcctggacaaacagcctctgcttc

SEQ ID NO: 188521 - DNA, 25 bp, Homo sapien
tttcttcttggcctggacaaacagc

SEQ ID NO: 188522 - DNA, 25 bp, Homo sapien
cctaatgacatcttgaactaaagtg

SEQ ID NO: 188523 - DNA, 25 bp, Homo sapien
acagcattgaaagaccaaccaaaag

SEQ ID NO: 188524 - DNA, 25 bp, Homo sapien
agaaacagcattgaaagaccaacca

SEQ ID NO: 188525 - DNA, 25 bp, Homo sapien
aaagacctaatgacatcttgaacta

SEQ ID NO: 188526 - DNA, 25 bp, Homo sapien
tccccaaagattggagcaaatagcc

SEQ ID NO: 188527 - DNA, 25 bp, Homo sapien
ctgtccccaaagattggagcaaata

SEQ ID NO: 188528 - DNA, 25 bp, Homo sapien
gagaaagagctactgtccccaaaga

SEQ ID NO: 188529 - DNA, 25 bp, Homo sapien
agaggagaaagagctactgtcccca

SEQ ID NO: 188530 - DNA, 25 bp, Homo sapien
aagcagaagtaagggagatgtgagg

SEQ ID NO: 188531 - DNA, 25 bp, Homo sapien
ctaaaaacttttcataagtcctcat

SEQ ID NO: 188532 - DNA, 25 bp, Homo sapien
atgtgagggcttggggatttctaaa

SEQ ID NO: 188533 - DNA, 25 bp, Homo sapien
ctgtgtcccatttctgccaagaaaa

SEQ ID NO: 188534 - DNA, 25 bp, Homo sapien
ttttctcatcttccatttctctcat

SEQ ID NO: 188535 - DNA, 25 bp, Homo sapien
ctggtgaaagtttccttttctcatc

SEQ ID NO: 188536 - DNA, 25 bp, Homo sapien
tccttttctcatcttccatttctct

SEQ ID NO: 188537 - DNA, 25 bp, Homo sapien
cctggtgaaagtttccttttctcat

SEQ ID NO: 188538 - DNA, 25 bp, Homo sapien
cccagtttggacttagaacagctgc

SEQ ID NO: 188539 - DNA, 25 bp, Homo sapien
ccagtttggacttagaacagctgct

SEQ ID NO: 188540 - DNA, 25 bp, Homo sapien
tcccagtttggacttagaacagctg

SEQ ID NO: 188541 - DNA, 25 bp, Homo sapien
gagactcgtggcacataccatatga

SEQ ID NO: 188542 - DNA, 25 bp, Homo sapien
tggtgcaaacaactggagactcgtg

SEQ ID NO: 188543 - DNA, 25 bp, Homo sapien
gaacttagtgtagagcaaaacctgc

SEQ ID NO: 188544 - DNA, 25 bp, Homo sapien
gggtaccctctaggttggcatcaga

SEQ ID NO: 188545 - DNA, 25 bp, Homo sapien
cccatttctggcatagtctcattct

SEQ ID NO: 188546 - DNA, 25 bp, Homo sapien
tctctgtatgttatgccctatccac

SEQ ID NO: 188547 - DNA, 25 bp, Homo sapien
tgttgtttcaaatgcctcctcccat

SEQ ID NO: 188548 - DNA, 25 bp, Homo sapien
gccttccaggcctaccaatagcaga

SEQ ID NO: 188549 - DNA, 25 bp, Homo sapien
caaatagtaggtggcttaatttcac

SEQ ID NO: 188550 - DNA, 25 bp, Homo sapien
tggcttaatttcaccgtagtggact

SEQ ID NO: 188551 - DNA, 25 bp, Homo sapien
ccgtagtggacttctatgcctttta

SEQ ID NO: 188552 - DNA, 25 bp, Homo sapien
tatgccttttaaagtgggtacagca

SEQ ID NO: 188553 - DNA, 25 bp, Homo sapien
ctgaagtcctaggtagccaaccata

SEQ ID NO: 188554 - DNA, 25 bp, Homo sapien
ctcctcctccaacactcatccagaa

SEQ ID NO: 188555 - DNA, 25 bp, Homo sapien
gaagtcctaggtagccaaccatagc

SEQ ID NO: 188556 - DNA, 25 bp, Homo sapien
taggtagccaaccatagctactggg

SEQ ID NO: 188557 - DNA, 25 bp, Homo sapien
tgcccggagcccgttggcacatatt

SEQ ID NO: 188558 - DNA, 25 bp, Homo sapien
catattcacgaagtcggcttccagg

SEQ ID NO: 188559 - DNA, 25 bp, Homo sapien
atggaattggcaaacgttttgtctt

SEQ ID NO: 188560 - DNA, 25 bp, Homo sapien
gttggcacatattcacgaagtcggc

SEQ ID NO: 188561 - DNA, 25 bp, Homo sapien
tgaaagatttcccagaggaattcat

SEQ ID NO: 188562 - DNA, 25 bp, Homo sapien
ctgaaagatttcccagaggaattca

SEQ ID NO: 188563 - DNA, 25 bp, Homo sapien
cgagaactctgactatgcaggcaaa

SEQ ID NO: 188564 - DNA, 25 bp, Homo sapien
tcaaaaggtcaagaggagttggtcc

SEQ ID NO: 188565 - DNA, 25 bp, Homo sapien
tacagtataccaggctctttcagag

SEQ ID NO: 188566 - DNA, 25 bp, Homo sapien
cagtaggaattacagtataccaggc

SEQ ID NO: 188567 - DNA, 25 bp, Homo sapien
caacactagctgctctaagccccat

SEQ ID NO: 188568 - DNA, 25 bp, Homo sapien
atccatgcaacactagctgctctaa

SEQ ID NO: 188569 - DNA, 25 bp, Homo sapien
atgcaacactagctgctctaagccc

SEQ ID NO: 188570 - DNA, 25 bp, Homo sapien
tccatgcaacactagctgctctaag

SEQ ID NO: 188571 - DNA, 25 bp, Homo sapien
gctggtaccccggaagcagtcgctg

SEQ ID NO: 188572 - DNA, 25 bp, Homo sapien
tcagagctcagtgctcgaactggct

SEQ ID NO: 188573 - DNA, 25 bp, Homo sapien
catgcaagagcggaagaaacgcggc

SEQ ID NO: 188574 - DNA, 25 bp, Homo sapien
cagagccgtgagttcggcatgcaag

SEQ ID NO: 188575 - DNA, 25 bp, Homo sapien
gttccagcgccggttttgaccgcca

SEQ ID NO: 188576 - DNA, 25 bp, Homo sapien
gcgccggttttgaccgccacattac

SEQ ID NO: 188577 - DNA, 25 bp, Homo sapien
aacatgtcccgtggttccagcgccg

SEQ ID NO: 188578 - DNA, 25 bp, Homo sapien
atgtcccgtggttccagcgccggtt

SEQ ID NO: 188579 - DNA, 25 bp, Homo sapien
tacagtacatagcataagcatcaac

SEQ ID NO: 188580 - DNA, 25 bp, Homo sapien
ccttcagttgcactaaaaaatgtcc

SEQ ID NO: 188581 - DNA, 25 bp, Homo sapien
tagaagtctagtagtaataggtcac

SEQ ID NO: 188582 - DNA, 25 bp, Homo sapien
caattgcttcctttcgaggcaaaca

SEQ ID NO: 188583 - DNA, 25 bp, Homo sapien
tgtaactttttagctgttcaccacc

SEQ ID NO: 188584 - DNA, 25 bp, Homo sapien
caacgtttttagacttggcatgtaa

SEQ ID NO: 188585 - DNA, 25 bp, Homo sapien
tattcactacttatagatcaacgtt

SEQ ID NO: 188586 - DNA, 25 bp, Homo sapien
tggcctcgaacagtcctatctcagg

SEQ ID NO: 188587 - DNA, 25 bp, Homo sapien
agaaatccaccctgaccgtaagttg

SEQ ID NO: 188588 - DNA, 25 bp, Homo sapien
tctcattcaaacaagatactactga

SEQ ID NO: 188589 - DNA, 25 bp, Homo sapien
taaaaggattagtatgatcttccat

SEQ ID NO: 188590 - DNA, 25 bp, Homo sapien
gaatgtggactccaagtcccactga

SEQ ID NO: 188591 - DNA, 25 bp, Homo sapien
caggttgttctaggattacccatcc

SEQ ID NO: 188592 - DNA, 25 bp, Homo sapien
tgaatttccacacccttagagcctt

SEQ ID NO: 188593 - DNA, 25 bp, Homo sapien
gaagtctggtgctgttgacctcatg

SEQ ID NO: 188594 - DNA, 25 bp, Homo sapien
gaaagtgctgccatcgtttcgaaag

SEQ ID NO: 188595 - DNA, 25 bp, Homo sapien
cagacaatccagcaacactgcgggt

SEQ ID NO: 188596 - DNA, 25 bp, Homo sapien
aggaccctgctgaacaggtcgtagc

SEQ ID NO: 188597 - DNA, 25 bp, Homo sapien
tgaacaggtcgtagccaacagctcc

SEQ ID NO: 188598 - DNA, 25 bp, Homo sapien
gcaacactgcgggtcggaggaccct

SEQ ID NO: 188599 - DNA, 25 bp, Homo sapien
accaaagccaggagacaagagccct

SEQ ID NO: 188600 - DNA, 25 bp, Homo sapien
tagcaccaaagccaggagacaagag

SEQ ID NO: 188601 - DNA, 25 bp, Homo sapien
ccaaagccaggagacaagagccctg

SEQ ID NO: 188602 - DNA, 25 bp, Homo sapien
gcaccaaagccaggagacaagagcc

SEQ ID NO: 188603 - DNA, 25 bp, Homo sapien
cccagggcttcctcaccccagtgtc

SEQ ID NO: 188604 - DNA, 25 bp, Homo sapien
ctcccagggcttcctcaccccagtg

SEQ ID NO: 188605 - DNA, 25 bp, Homo sapien
gcctcccagggcttcctcaccccag

SEQ ID NO: 188606 - DNA, 25 bp, Homo sapien
tgcacccagagcctgcctcccaggg

SEQ ID NO: 188607 - DNA, 25 bp, Homo sapien
gggttgggcgagtttcctgcaggtc

SEQ ID NO: 188608 - DNA, 25 bp, Homo sapien
tgacataggcctgggttgggcgagt

SEQ ID NO: 188609 - DNA, 25 bp, Homo sapien
cataggcctgggttgggcgagtttc

SEQ ID NO: 188610 - DNA, 25 bp, Homo sapien
ctgctgctgacataggcctgggttg

SEQ ID NO: 188611 - DNA, 25 bp, Homo sapien
ccctgtggctagtgccagggcccca

SEQ ID NO: 188612 - DNA, 25 bp, Homo sapien
cctgtggctagtgccagggccccac

SEQ ID NO: 188613 - DNA, 25 bp, Homo sapien
atctccagaggagaacgcaagtggg

SEQ ID NO: 188614 - DNA, 25 bp, Homo sapien
tgaatgctctgcagttgggtccccc

SEQ ID NO: 188615 - DNA, 25 bp, Homo sapien
tgctctgcagttgggtccccccagg

SEQ ID NO: 188616 - DNA, 25 bp, Homo sapien
caggccatctccagaggagaacgca

SEQ ID NO: 188617 - DNA, 25 bp, Homo sapien
gggctgggcctgtggacctgtctcc

SEQ ID NO: 188618 - DNA, 25 bp, Homo sapien
ggctgggcctgtggacctgtctccc

SEQ ID NO: 188619 - DNA, 25 bp, Homo sapien
ctggggctgggcctgtggacctgtc

SEQ ID NO: 188620 - DNA, 25 bp, Homo sapien
gtttagggctctggggctgggcctg

SEQ ID NO: 188621 - DNA, 25 bp, Homo sapien
cttctaaccttgtcccatagaaact

SEQ ID NO: 188622 - DNA, 25 bp, Homo sapien
catagaaactttcatgggatgcaag

SEQ ID NO: 188623 - DNA, 25 bp, Homo sapien
aggccacaggccagagctaggattg

SEQ ID NO: 188624 - DNA, 25 bp, Homo sapien
gcagcgcagccccttctaaccttgt

SEQ ID NO: 188625 - DNA, 25 bp, Homo sapien
gcatcacagcatcgcctgggtcata

SEQ ID NO: 188626 - DNA, 25 bp, Homo sapien
gctgcatttctcagtatccggtgga

SEQ ID NO: 188627 - DNA, 25 bp, Homo sapien
cagctctgtgcaacgtgtctacttc

SEQ ID NO: 188628 - DNA, 25 bp, Homo sapien
accagccgaggctagtggcagctct

SEQ ID NO: 188629 - DNA, 25 bp, Homo sapien
agcataggaagaccctaaggaagcc

SEQ ID NO: 188630 - DNA, 25 bp, Homo sapien
gaccctaaggaagccccagaagcag

SEQ ID NO: 188631 - DNA, 25 bp, Homo sapien
agaccctaaggaagccccagaagca

SEQ ID NO: 188632 - DNA, 25 bp, Homo sapien
ggttgacagcataggaagaccctaa

SEQ ID NO: 188633 - DNA, 25 bp, Homo sapien
gctggcagcttagagtaatcagccc

SEQ ID NO: 188634 - DNA, 25 bp, Homo sapien
ggcagcttagagtaatcagccccgc

SEQ ID NO: 188635 - DNA, 25 bp, Homo sapien
ttagagtaatcagccccgcctgctc

SEQ ID NO: 188636 - DNA, 25 bp, Homo sapien
agcttagagtaatcagccccgcctg

SEQ ID NO: 188637 - DNA, 25 bp, Homo sapien
tcctgcccacttatggctggtcctg

SEQ ID NO: 188638 - DNA, 25 bp, Homo sapien
ggcctccgctgtccctcataatgtg

SEQ ID NO: 188639 - DNA, 25 bp, Homo sapien
cagcggtttctgttgcaggagcctc

SEQ ID NO: 188640 - DNA, 25 bp, Homo sapien
ttttgaggaacctgcccgcccagga

SEQ ID NO: 188641 - DNA, 25 bp, Homo sapien
attgaggctgatagggatgaaaatc

SEQ ID NO: 188642 - DNA, 25 bp, Homo sapien
gaaaatcatctttcctttggtgaag

SEQ ID NO: 188643 - DNA, 25 bp, Homo sapien
ggctgatagggatgaaaatcatctt

SEQ ID NO: 188644 - DNA, 25 bp, Homo sapien
cacagattgaggctgatagggatga

SEQ ID NO: 188645 - DNA, 25 bp, Homo sapien
gttctatctttctggtggcacaaaa

SEQ ID NO: 188646 - DNA, 25 bp, Homo sapien
catgtggacagcctcagatatcagg

SEQ ID NO: 188647 - DNA, 25 bp, Homo sapien
ggctgagtcatagccaccctagagg

SEQ ID NO: 188648 - DNA, 25 bp, Homo sapien
acacatagtgggaggaaggcacagc

SEQ ID NO: 188649 - DNA, 25 bp, Homo sapien
tgtcagcattaggaggagatgcaca

SEQ ID NO: 188650 - DNA, 25 bp, Homo sapien
ggaaatgctcgttgtccatgtcagc

SEQ ID NO: 188651 - DNA, 25 bp, Homo sapien
gtccatgtcagcattaggaggagat

SEQ ID NO: 188652 - DNA, 25 bp, Homo sapien
agagagggaaatgctcgttgtccat

SEQ ID NO: 188653 - DNA, 25 bp, Homo sapien
gtcggcatcactgaccacagcaggt

SEQ ID NO: 188654 - DNA, 25 bp, Homo sapien
aaatgaggtggtcggcatcactgac

SEQ ID NO: 188655 - DNA, 25 bp, Homo sapien
gatgctgtcggcatcagcaaatgag

SEQ ID NO: 188656 - DNA, 25 bp, Homo sapien
gcatcagcaaatgaggtggtcggca

SEQ ID NO: 188657 - DNA, 25 bp, Homo sapien
caggccactggttagcagggcacaa

SEQ ID NO: 188658 - DNA, 25 bp, Homo sapien
caacgacattcacccaggcagatga

SEQ ID NO: 188659 - DNA, 25 bp, Homo sapien
tagcacattcagcttcccacgggct

SEQ ID NO: 188660 - DNA, 25 bp, Homo sapien
gagacagatgtctacctgccaacga

SEQ ID NO: 188661 - DNA, 25 bp, Homo sapien
caaaatcgggctctcatagaagtaa

SEQ ID NO: 188662 - DNA, 25 bp, Homo sapien
tccatctctgggcttgaggacaact

SEQ ID NO: 188663 - DNA, 25 bp, Homo sapien
cagcaatcctggaacaccactctgg

SEQ ID NO: 188664 - DNA, 25 bp, Homo sapien
gaggacaactttgagccccaaaatc

SEQ ID NO: 188665 - DNA, 25 bp, Homo sapien
aaaactcttatgtcattctcgttac

SEQ ID NO: 188666 - DNA, 25 bp, Homo sapien
agggagatgcgtggatctgccgcca

SEQ ID NO: 188667 - DNA, 25 bp, Homo sapien
cttctgttctctcatgccccttggt

SEQ ID NO: 188668 - DNA, 25 bp, Homo sapien
cgctcagacacggaaggtccaggga

SEQ ID NO: 188669 - DNA, 25 bp, Homo sapien
gtggaggctcccagatggacgctca

SEQ ID NO: 188670 - DNA, 25 bp, Homo sapien
gaagcctctgtccggtgccacatcc

SEQ ID NO: 188671 - DNA, 25 bp, Homo sapien
gttgcctccattggaagcctctgtc

SEQ ID NO: 188672 - DNA, 25 bp, Homo sapien
gctgttgcctccattggaagcctct

SEQ ID NO: 188673 - DNA, 25 bp, Homo sapien
ggaagcctctgtccggtgccacatc

SEQ ID NO: 188674 - DNA, 25 bp, Homo sapien
agaggaaattacacagcactctgtg

SEQ ID NO: 188675 - DNA, 25 bp, Homo sapien
gcttgtcggtggcaggccaaggcct

SEQ ID NO: 188676 - DNA, 25 bp, Homo sapien
acagaggaaattacacagcactctg

SEQ ID NO: 188677 - DNA, 25 bp, Homo sapien
agctggtggcttgtcggtggcaggc

SEQ ID NO: 188678 - DNA, 25 bp, Homo sapien
gacccctctgtgacagcgctgcatg

SEQ ID NO: 188679 - DNA, 25 bp, Homo sapien
ggggacagcgaggcctgtgcaaacc

SEQ ID NO: 188680 - DNA, 25 bp, Homo sapien
cagtcccgacccctctgtgacagcg

SEQ ID NO: 188681 - DNA, 25 bp, Homo sapien
gcagggtgcccacagtcccgacccc

SEQ ID NO: 188682 - DNA, 25 bp, Homo sapien
ggctgcagccagaagtccatccgca

SEQ ID NO: 188683 - DNA, 25 bp, Homo sapien
gctgcagccagaagtccatccgcag

SEQ ID NO: 188684 - DNA, 25 bp, Homo sapien
ccttgggctgcagccagaagtccat

SEQ ID NO: 188685 - DNA, 25 bp, Homo sapien
ggttccttgggctgcagccagaagt

SEQ ID NO: 188686 - DNA, 25 bp, Homo sapien
ctgatcccgtcaaaaaggcctccat

SEQ ID NO: 188687 - DNA, 25 bp, Homo sapien
ggatccgactgagaccaccgctgta

SEQ ID NO: 188688 - DNA, 25 bp, Homo sapien
gatcatatgtccatcatggatccga

SEQ ID NO: 188689 - DNA, 25 bp, Homo sapien
agctccacccgtggtagggcaggga

SEQ ID NO: 188690 - DNA, 25 bp, Homo sapien
caccgctgtaccaagccgggtgcgg

SEQ ID NO: 188691 - DNA, 25 bp, Homo sapien
aggtcggggctcactaggagatgct

SEQ ID NO: 188692 - DNA, 25 bp, Homo sapien
ggcggccggaggtcggggctcacta

SEQ ID NO: 188693 - DNA, 25 bp, Homo sapien
ctcactaggagatgctgccttttct

SEQ ID NO: 188694 - DNA, 25 bp, Homo sapien
gggctcactaggagatgctgccttt

SEQ ID NO: 188695 - DNA, 25 bp, Homo sapien
gtccacgcttggcactcatgttttt

SEQ ID NO: 188696 - DNA, 25 bp, Homo sapien
gtctagagagcagcaagaaacgcat

SEQ ID NO: 188697 - DNA, 25 bp, Homo sapien
ggagaaacaggaaacggtctcagac

SEQ ID NO: 188698 - DNA, 25 bp, Homo sapien
ttccaggtctagagagcagcaagaa

SEQ ID NO: 188699 - DNA, 25 bp, Homo sapien
tcctgttgtgtcctccaggtgtcca

SEQ ID NO: 188700 - DNA, 25 bp, Homo sapien
cctgttaccgtaatatgagtcagat

SEQ ID NO: 188701 - DNA, 25 bp, Homo sapien
tccagatgtacagcccgggttgggg

SEQ ID NO: 188702 - DNA, 25 bp, Homo sapien
cgtaatatgagtcagatgaatcctg

SEQ ID NO: 188703 - DNA, 25 bp, Homo sapien
ctgaagatgttggatgaggaggaga

SEQ ID NO: 188704 - DNA, 25 bp, Homo sapien
tcagcatgactgaagatgttggatg

SEQ ID NO: 188705 - DNA, 25 bp, Homo sapien
catgactgaagatgttggatgagga

SEQ ID NO: 188706 - DNA, 25 bp, Homo sapien
gaagatgttggatgaggaggagaga

SEQ ID NO: 188707 - DNA, 25 bp, Homo sapien
gaaaaaggagacaggcattgatgcc

SEQ ID NO: 188708 - DNA, 25 bp, Homo sapien
tcattgcaatcccatgagccaggtg

SEQ ID NO: 188709 - DNA, 25 bp, Homo sapien
gcggaacggatgctctgcaaaggcc

SEQ ID NO: 188710 - DNA, 25 bp, Homo sapien
tgttcacttcgtccctttgtgaggc

SEQ ID NO: 188711 - DNA, 25 bp, Homo sapien
agtctggggttctgtgatgccacag

SEQ ID NO: 188712 - DNA, 25 bp, Homo sapien
cagtgtgcggagtctggggttctgt

SEQ ID NO: 188713 - DNA, 25 bp, Homo sapien
gcggagtctggggttctgtgatgcc

SEQ ID NO: 188714 - DNA, 25 bp, Homo sapien
tgtgcggagtctggggttctgtgat

SEQ ID NO: 188715 - DNA, 25 bp, Homo sapien
gaagcgtcattacgtaggcctgatt

SEQ ID NO: 188716 - DNA, 25 bp, Homo sapien
tctttttggcttgtatggaagcgtc

SEQ ID NO: 188717 - DNA, 25 bp, Homo sapien
tgtggaatggggcacgcagattcca

SEQ ID NO: 188718 - DNA, 25 bp, Homo sapien
ggcctgattgattaaaccgtggcca

SEQ ID NO: 188719 - DNA, 25 bp, Homo sapien
aaaatgtaagcctttatttgcttat

SEQ ID NO: 188720 - DNA, 25 bp, Homo sapien
taaagctggctgagttggttgcttt

SEQ ID NO: 188721 - DNA, 25 bp, Homo sapien
aataaagctggctgagttggttgct

SEQ ID NO: 188722 - DNA, 25 bp, Homo sapien
tattttgcaaataaagctggctgag

SEQ ID NO: 188723 - DNA, 25 bp, Homo sapien
atcttttcagcaggcgggaaggtgt

SEQ ID NO: 188724 - DNA, 25 bp, Homo sapien
tcttttcagcaggcgggaaggtgta

SEQ ID NO: 188725 - DNA, 25 bp, Homo sapien
agccaggcatcctttgtacccactg

SEQ ID NO: 188726 - DNA, 25 bp, Homo sapien
ctccaggaagccagaatacagagtt

SEQ ID NO: 188727 - DNA, 25 bp, Homo sapien
ggaagccagaatacagagtttcttc

SEQ ID NO: 188728 - DNA, 25 bp, Homo sapien
gccagaatacagagtttcttctgtg

SEQ ID NO: 188729 - DNA, 25 bp, Homo sapien
caggaagccagaatacagagtttct

SEQ ID NO: 188730 - DNA, 25 bp, Homo sapien
gggttgtagatactaccattgttga

SEQ ID NO: 188731 - DNA, 25 bp, Homo sapien
agggttgtagatactaccattgttg

SEQ ID NO: 188732 - DNA, 25 bp, Homo sapien
tagtggtaatgcctaaagcctggaa

SEQ ID NO: 188733 - DNA, 25 bp, Homo sapien
attttagtggtaatgcctaaagcct

SEQ ID NO: 188734 - DNA, 25 bp, Homo sapien
tttagtggtaatgcctaaagcctgg

SEQ ID NO: 188735 - DNA, 25 bp, Homo sapien
ggagattttagtggtaatgcctaaa

SEQ ID NO: 188736 - DNA, 25 bp, Homo sapien
tattggccagcagcagatccctgac

SEQ ID NO: 188737 - DNA, 25 bp, Homo sapien
ccaatggcaccagcacgggtggcag

SEQ ID NO: 188738 - DNA, 25 bp, Homo sapien
acatgggccaatggcaccagcacgg

SEQ ID NO: 188739 - DNA, 25 bp, Homo sapien
cagtgttctgggctggtacagtgac

SEQ ID NO: 188740 - DNA, 25 bp, Homo sapien
attcccctgcagaggaggcaacagt

SEQ ID NO: 188741 - DNA, 25 bp, Homo sapien
cttgggtggccttgcgcatcatggg

SEQ ID NO: 188742 - DNA, 25 bp, Homo sapien
aagcccacattcccctgcagaggag

SEQ ID NO: 188743 - DNA, 25 bp, Homo sapien
tgggctgttttccagttgtccttgg

SEQ ID NO: 188744 - DNA, 25 bp, Homo sapien
ctgcccattggcaccacggccttcc

SEQ ID NO: 188745 - DNA, 25 bp, Homo sapien
ccacgcaggccaacacgatgtcact

SEQ ID NO: 188746 - DNA, 25 bp, Homo sapien
gcaggccaacacgatgtcacttcca

SEQ ID NO: 188747 - DNA, 25 bp, Homo sapien
acgcaggccaacacgatgtcacttc

SEQ ID NO: 188748 - DNA, 25 bp, Homo sapien
ggccacgcaggccaacacgatgtca

SEQ ID NO: 188749 - DNA, 25 bp, Homo sapien
catgacttgagaggactcccagagg

SEQ ID NO: 188750 - DNA, 25 bp, Homo sapien
ttccatgacttgagaggactcccag

SEQ ID NO: 188751 - DNA, 25 bp, Homo sapien
acttgagaggactcccagaggtcca

SEQ ID NO: 188752 - DNA, 25 bp, Homo sapien
aggactcccagaggtccagggcctt

SEQ ID NO: 188753 - DNA, 25 bp, Homo sapien
ctggtgggtcatgccccccagcctc

SEQ ID NO: 188754 - DNA, 25 bp, Homo sapien
tcccgtgggtcagggctgcgctgag

SEQ ID NO: 188755 - DNA, 25 bp, Homo sapien
agcctcaaggcagctcccgtgggtc

SEQ ID NO: 188756 - DNA, 25 bp, Homo sapien
ctgcgctgagcaggtgttggaggct

SEQ ID NO: 188757 - DNA, 25 bp, Homo sapien
cagaaattctggtgcgctccttcca

SEQ ID NO: 188758 - DNA, 25 bp, Homo sapien
cccaatctgaggagccgtgaaagcc

SEQ ID NO: 188759 - DNA, 25 bp, Homo sapien
cagaaagtcctttcggtgtgactga

SEQ ID NO: 188760 - DNA, 25 bp, Homo sapien
cctttcggtgtgactgacccaatct

SEQ ID NO: 188761 - DNA, 25 bp, Homo sapien
cttccctgtgtgtggagctggtccc

SEQ ID NO: 188762 - DNA, 25 bp, Homo sapien
ttccctgtgtgtggagctggtcccg

SEQ ID NO: 188763 - DNA, 25 bp, Homo sapien
tcttccctgtgtgtggagctggtcc

SEQ ID NO: 188764 - DNA, 25 bp, Homo sapien
tggaaggacttggtacacgtggccg

SEQ ID NO: 188765 - DNA, 25 bp, Homo sapien
acgtggccgctacaggaaatgtatc

SEQ ID NO: 188766 - DNA, 25 bp, Homo sapien
tacacgtggccgctacaggaaatgt

SEQ ID NO: 188767 - DNA, 25 bp, Homo sapien
cttggtacacgtggccgctacagga

SEQ ID NO: 188768 - DNA, 25 bp, Homo sapien
ggtcagtcactcgaagcacaataaa

SEQ ID NO: 188769 - DNA, 25 bp, Homo sapien
caaaatgagggctgatcctaccaca

SEQ ID NO: 188770 - DNA, 25 bp, Homo sapien
actgaacgcttaacactcctggctg

SEQ ID NO: 188771 - DNA, 25 bp, Homo sapien
ccacaataagacgttttgggccagg

SEQ ID NO: 188772 - DNA, 25 bp, Homo sapien
caaacacacagtcatcatagggcag

SEQ ID NO: 188773 - DNA, 25 bp, Homo sapien
tcataacgtcagacgctggcctcca

SEQ ID NO: 188774 - DNA, 25 bp, Homo sapien
tggcctccaaacacacagtcatcat

SEQ ID NO: 188775 - DNA, 25 bp, Homo sapien
aacgtcagacgctggcctccaaaca

SEQ ID NO: 188776 - DNA, 25 bp, Homo sapien
tagagcgccgaaggagttcacagac

SEQ ID NO: 188777 - DNA, 25 bp, Homo sapien
ccctctgataaggagcagctctagg

SEQ ID NO: 188778 - DNA, 25 bp, Homo sapien
gagctctgccaagctaccgggatgg

SEQ ID NO: 188779 - DNA, 25 bp, Homo sapien
gacacgttaagcttccggagcggag

SEQ ID NO: 188780 - DNA, 25 bp, Homo sapien
gctgctgtatccgggtgcttgggcg

SEQ ID NO: 188781 - DNA, 25 bp, Homo sapien
tgtatccgggtgcttgggcggcccc

SEQ ID NO: 188782 - DNA, 25 bp, Homo sapien
tcgtcctctgtgaactccgtgaact

SEQ ID NO: 188783 - DNA, 25 bp, Homo sapien
ctcgtcctctgtgaactccgtgaac

SEQ ID NO: 188784 - DNA, 25 bp, Homo sapien
cacacttcaacaggagtgacaccag

SEQ ID NO: 188785 - DNA, 25 bp, Homo sapien
tgacaccaggtcaggattttgcagg

SEQ ID NO: 188786 - DNA, 25 bp, Homo sapien
ttttgcaggtccactgcgaggtgaa

SEQ ID NO: 188787 - DNA, 25 bp, Homo sapien
cctggtaggtaactctgttgacatc

SEQ ID NO: 188788 - DNA, 25 bp, Homo sapien
cataagcacgaggagcctgactcag

SEQ ID NO: 188789 - DNA, 25 bp, Homo sapien
aaaggaatttgagatgcttatggct

SEQ ID NO: 188790 - DNA, 25 bp, Homo sapien
aaccaaaaggaatttgagatgctta

SEQ ID NO: 188791 - DNA, 25 bp, Homo sapien
tctgctcacaacataagcacgagga

SEQ ID NO: 188792 - DNA, 25 bp, Homo sapien
atcagcacccaaggacaccaaaagc

SEQ ID NO: 188793 - DNA, 25 bp, Homo sapien
gatagaggctaagtgtagacacgtg

SEQ ID NO: 188794 - DNA, 25 bp, Homo sapien
gccatggatagaggctaagtgtaga

SEQ ID NO: 188795 - DNA, 25 bp, Homo sapien
cccaggtagccatggatagaggcta

SEQ ID NO: 188796 - DNA, 25 bp, Homo sapien
gcatccaataggcactttgcacaca

SEQ ID NO: 188797 - DNA, 25 bp, Homo sapien
ttatggaacaagtagtcttatcttc

SEQ ID NO: 188798 - DNA, 25 bp, Homo sapien
tgttaggagtttaagctcttgcctg

SEQ ID NO: 188799 - DNA, 25 bp, Homo sapien
ggactccttaagttggcccacctgc

SEQ ID NO: 188800 - DNA, 25 bp, Homo sapien
gtctcggagctcaggatcacagcca

SEQ ID NO: 188801 - DNA, 25 bp, Homo sapien
ccctgctcacaggcaaggtgtaggg

SEQ ID NO: 188802 - DNA, 25 bp, Homo sapien
ggtatttcctcgaaagtctcggagc

SEQ ID NO: 188803 - DNA, 25 bp, Homo sapien
gactgagtcaggactcccacgctgg

SEQ ID NO: 188804 - DNA, 25 bp, Homo sapien
gctccaggtgggtcataaagacctc

SEQ ID NO: 188805 - DNA, 25 bp, Homo sapien
tgctacatcagctacgtcccagggt

SEQ ID NO: 188806 - DNA, 25 bp, Homo sapien
gaaagtaagccatggaccaaaccca

SEQ ID NO: 188807 - DNA, 25 bp, Homo sapien
ctacgaatgcaagagagaccagaga

SEQ ID NO: 188808 - DNA, 25 bp, Homo sapien
tgctgcaggttgttctggaagttga

SEQ ID NO: 188809 - DNA, 25 bp, Homo sapien
tccatggtcagtgccttttcttcat

SEQ ID NO: 188810 - DNA, 25 bp, Homo sapien
cttcacctggcggatcacttccatg

SEQ ID NO: 188811 - DNA, 25 bp, Homo sapien
gatcacttccatggtcagtgccttt

SEQ ID NO: 188812 - DNA, 25 bp, Homo sapien
cggcgcccgccagcggccagaaact

SEQ ID NO: 188813 - DNA, 25 bp, Homo sapien
gccagctcggaacgccctgtacttc

SEQ ID NO: 188814 - DNA, 25 bp, Homo sapien
tccgcgaggttattatgagctgagt

SEQ ID NO: 188815 - DNA, 25 bp, Homo sapien
tgtacttcccctcccggctgctcgg

SEQ ID NO: 188816 - DNA, 25 bp, Homo sapien
cgcccgcccggctgcatcgctggtc

SEQ ID NO: 188817 - DNA, 25 bp, Homo sapien
tgcatcgctggtcccccggctcggg

SEQ ID NO: 188818 - DNA, 25 bp, Homo sapien
ctccgagttgggccggtgccccgcg

SEQ ID NO: 188819 - DNA, 25 bp, Homo sapien
tgcagccctgcagcgttcggggcgg

SEQ ID NO: 188820 - DNA, 25 bp, Homo sapien
ttgaccatctgctcgtactcctcgt

SEQ ID NO: 188821 - DNA, 25 bp, Homo sapien
agtccccgtcctcggtgagctgctg

SEQ ID NO: 188822 - DNA, 25 bp, Homo sapien
ctgtcgtggcggtcgtccagtagcc

SEQ ID NO: 188823 - DNA, 25 bp, Homo sapien
cggctcgaggcggatctcctgcagc

SEQ ID NO: 188824 - DNA, 25 bp, Homo sapien
cgggacggcggcacggactgctgtg

SEQ ID NO: 188825 - DNA, 25 bp, Homo sapien
ggctgcgcgctgcttcctcgctggg

SEQ ID NO: 188826 - DNA, 25 bp, Homo sapien
cggcgccctataaacgctggctggg

SEQ ID NO: 188827 - DNA, 25 bp, Homo sapien
gaatttccaagccagtcagaccaga

SEQ ID NO: 188828 - DNA, 25 bp, Homo sapien
tgcgatgagccactagggtcacgga

SEQ ID NO: 188829 - DNA, 25 bp, Homo sapien
tgagctggggttcatcggagaaact

SEQ ID NO: 188830 - DNA, 25 bp, Homo sapien
aaagaagcctaaaccctgagctggg

SEQ ID NO: 188831 - DNA, 25 bp, Homo sapien
catcggagaaactccctgcgatgag

SEQ ID NO: 188832 - DNA, 25 bp, Homo sapien
gcgccgagtggctggaaagtccttc

SEQ ID NO: 188833 - DNA, 25 bp, Homo sapien
ggaactttttgatgagcgccgagtg

SEQ ID NO: 188834 - DNA, 25 bp, Homo sapien
agggaactttttgatgagcgccgag

SEQ ID NO: 188835 - DNA, 25 bp, Homo sapien
tgagcgccgagtggctggaaagtcc

SEQ ID NO: 188836 - DNA, 25 bp, Homo sapien
gacgccgacctgatgggcggtccct

SEQ ID NO: 188837 - DNA, 25 bp, Homo sapien
tcgatttgaattggggtcgtcggct

SEQ ID NO: 188838 - DNA, 25 bp, Homo sapien
gggtcgtcggctgctgagatcccaa

SEQ ID NO: 188839 - DNA, 25 bp, Homo sapien
tggggtttcccacgatcgatttgaa

SEQ ID NO: 188840 - DNA, 25 bp, Homo sapien
gaaaacgcaagagtggaaatgatgg

SEQ ID NO: 188841 - DNA, 25 bp, Homo sapien
cttttgaaaacgcaagagtggaaat

SEQ ID NO: 188842 - DNA, 25 bp, Homo sapien
tgatggctgggcgtagggatttgct

SEQ ID NO: 188843 - DNA, 25 bp, Homo sapien
gcgtagggatttgctttccccagac

SEQ ID NO: 188844 - DNA, 25 bp, Homo sapien
tgcagaaatataatttatgctctcc

SEQ ID NO: 188845 - DNA, 25 bp, Homo sapien
agaaatataatttatgctctccact

SEQ ID NO: 188846 - DNA, 25 bp, Homo sapien
ctccacctccaagcctgcaagccat

SEQ ID NO: 188847 - DNA, 25 bp, Homo sapien
tataatttatgctctccactccacc

SEQ ID NO: 188848 - DNA, 25 bp, Homo sapien
aaggagcatcgccagggcctggttt

SEQ ID NO: 188849 - DNA, 25 bp, Homo sapien
tgacaggacggccagtgatgctcca

SEQ ID NO: 188850 - DNA, 25 bp, Homo sapien
cccatgggaaaaggagcatcgccag

SEQ ID NO: 188851 - DNA, 25 bp, Homo sapien
gacgcagccgtaggaaatgacagga

SEQ ID NO: 188852 - DNA, 25 bp, Homo sapien
gtgccctaactgcatgcccatctgg

SEQ ID NO: 188853 - DNA, 25 bp, Homo sapien
gctggtgccctaactgcatgcccat

SEQ ID NO: 188854 - DNA, 25 bp, Homo sapien
tctgctggtgccctaactgcatgcc

SEQ ID NO: 188855 - DNA, 25 bp, Homo sapien
taactgcatgcccatctggctcttg

SEQ ID NO: 188856 - DNA, 25 bp, Homo sapien
cttcactgtccccacggtagtgcgg

SEQ ID NO: 188857 - DNA, 25 bp, Homo sapien
tcactgtccccacggtagtgcgggc

SEQ ID NO: 188858 - DNA, 25 bp, Homo sapien
ctgtccccacggtagtgcgggctga

SEQ ID NO: 188859 - DNA, 25 bp, Homo sapien
tccccacggtagtgcgggctgagtt

SEQ ID NO: 188860 - DNA, 25 bp, Homo sapien
tccaaagggagagaccaagtactcc

SEQ ID NO: 188861 - DNA, 25 bp, Homo sapien
gagagaccaagtactcccttagttg

SEQ ID NO: 188862 - DNA, 25 bp, Homo sapien
agttggttctttcatatggctagtt

SEQ ID NO: 188863 - DNA, 25 bp, Homo sapien
catatggctagttatgccactggta

SEQ ID NO: 188864 - DNA, 25 bp, Homo sapien
gaaacattagcgcccacctctatgg

SEQ ID NO: 188865 - DNA, 25 bp, Homo sapien
acattagcgcccacctctatggctt

SEQ ID NO: 188866 - DNA, 25 bp, Homo sapien
ttcagaaacattagcgcccacctct

SEQ ID NO: 188867 - DNA, 25 bp, Homo sapien
tcagaaacattagcgcccacctcta

SEQ ID NO: 188868 - DNA, 25 bp, Homo sapien
agagagtccttcctgcaatggctgc

SEQ ID NO: 188869 - DNA, 25 bp, Homo sapien
gatgtctcagatgttatgggtgcca

SEQ ID NO: 188870 - DNA, 25 bp, Homo sapien
gatcccagttggtagagatgtctca

SEQ ID NO: 188871 - DNA, 25 bp, Homo sapien
gtcttatgacgtgctctggcgagaa

SEQ ID NO: 188872 - DNA, 25 bp, Homo sapien
agcagtcttgactggatcagtttat

SEQ ID NO: 188873 - DNA, 25 bp, Homo sapien
gactggatcagtttattgtcctagg

SEQ ID NO: 188874 - DNA, 25 bp, Homo sapien
tcagaagcagtcttgactggatcag

SEQ ID NO: 188875 - DNA, 25 bp, Homo sapien
tcagtttattgtcctaggcttttcc

SEQ ID NO: 188876 - DNA, 25 bp, Homo sapien
gctggagagcccctgacaaaccact

SEQ ID NO: 188877 - DNA, 25 bp, Homo sapien
caatgtggtgaaacctcctttctac

SEQ ID NO: 188878 - DNA, 25 bp, Homo sapien
aaggctggaagagtcagccagtcta

SEQ ID NO: 188879 - DNA, 25 bp, Homo sapien
tgttaatttcaggactgggtgtggt

SEQ ID NO: 188880 - DNA, 25 bp, Homo sapien
tcgagcaccatggacggagtaattt

SEQ ID NO: 188881 - DNA, 25 bp, Homo sapien
tattgtctgtctttgtcgagcacca

SEQ ID NO: 188882 - DNA, 25 bp, Homo sapien
tacatgagtaacaagccaataggcc

SEQ ID NO: 188883 - DNA, 25 bp, Homo sapien
tcagctcagcttttgtgtgactatt

SEQ ID NO: 188884 - DNA, 25 bp, Homo sapien
taataatctggctggtaataaacct

SEQ ID NO: 188885 - DNA, 25 bp, Homo sapien
tagtagagacagatcctgtacaccc

SEQ ID NO: 188886 - DNA, 25 bp, Homo sapien
taaacctttgatggcctctgatcct

SEQ ID NO: 188887 - DNA, 25 bp, Homo sapien
tttgctacagcctaaaaaggaatcc

SEQ ID NO: 188888 - DNA, 25 bp, Homo sapien
ttgaaggctcagaaagcaatcctat

SEQ ID NO: 188889 - DNA, 25 bp, Homo sapien
cgatgtagagattgctacagaaacc

SEQ ID NO: 188890 - DNA, 25 bp, Homo sapien
gaaaacatcaatagccaatcctgct

SEQ ID NO: 188891 - DNA, 25 bp, Homo sapien
ctaactgtgggaagttttcaacaca

SEQ ID NO: 188892 - DNA, 25 bp, Homo sapien
tgaactttttattggcttcctgttc

SEQ ID NO: 188893 - DNA, 25 bp, Homo sapien
tcctgttccccaaagggtatcctgc

SEQ ID NO: 188894 - DNA, 25 bp, Homo sapien
ctctgaactttttattggcttcctg

SEQ ID NO: 188895 - DNA, 25 bp, Homo sapien
caaagggtatcctgcttctgctggc

SEQ ID NO: 188896 - DNA, 25 bp, Homo sapien
cagcttagctttgatgttcagcagg

SEQ ID NO: 188897 - DNA, 25 bp, Homo sapien
ctcagcctccagcttagctttgatg

SEQ ID NO: 188898 - DNA, 25 bp, Homo sapien
tcagtgtctcagaacttctgtgtca

SEQ ID NO: 188899 - DNA, 25 bp, Homo sapien
tatcctgcaggtggtggtcttgtgg

SEQ ID NO: 188900 - DNA, 25 bp, Homo sapien
catctacatgggtaacgtgtctcta

SEQ ID NO: 188901 - DNA, 25 bp, Homo sapien
tgcccgtgtgtgccagcaagatccc

SEQ ID NO: 188902 - DNA, 25 bp, Homo sapien
taacgtgtctctacctctctcaggc

SEQ ID NO: 188903 - DNA, 25 bp, Homo sapien
gagctgctccatctacatgggtaac

SEQ ID NO: 188904 - DNA, 25 bp, Homo sapien
ctgggaccagtagtctagctcccct

SEQ ID NO: 188905 - DNA, 25 bp, Homo sapien
agtagtctagctcccctcagttctt

SEQ ID NO: 188906 - DNA, 25 bp, Homo sapien
accagtagtctagctcccctcagtt

SEQ ID NO: 188907 - DNA, 25 bp, Homo sapien
ccctcagttcttttgagccagcttg

SEQ ID NO: 188908 - DNA, 25 bp, Homo sapien
tctccttgagaacctccatctctgt

SEQ ID NO: 188909 - DNA, 25 bp, Homo sapien
ttctccttgagaacctccatctctg

SEQ ID NO: 188910 - DNA, 25 bp, Homo sapien
agcagcttctccttgagaacctcca

SEQ ID NO: 188911 - DNA, 25 bp, Homo sapien
agcttctccttgagaacctccatct

SEQ ID NO: 188912 - DNA, 25 bp, Homo sapien
atctgcagaacgatgcaggcatggc

SEQ ID NO: 188913 - DNA, 25 bp, Homo sapien
gaccattctgtctcatagttgactc

SEQ ID NO: 188914 - DNA, 25 bp, Homo sapien
gcagaacgatgcaggcatggctcac

SEQ ID NO: 188915 - DNA, 25 bp, Homo sapien
tctgcagaacgatgcaggcatggct

SEQ ID NO: 188916 - DNA, 25 bp, Homo sapien
tagcttggcggcttgatagagccaa

SEQ ID NO: 188917 - DNA, 25 bp, Homo sapien
caagttgccccagaaactggtggag

SEQ ID NO: 188918 - DNA, 25 bp, Homo sapien
gcagggcgccatagcttggcggctt

SEQ ID NO: 188919 - DNA, 25 bp, Homo sapien
ggcagtaggccagggagtcgttcag

SEQ ID NO: 188920 - DNA, 25 bp, Homo sapien
gctgaggtccagaaggactggtttt

SEQ ID NO: 188921 - DNA, 25 bp, Homo sapien
ggtttttatctctctagagtgatat

SEQ ID NO: 188922 - DNA, 25 bp, Homo sapien
tgaggtccagaaggactggttttta

SEQ ID NO: 188923 - DNA, 25 bp, Homo sapien
ctctctagagtgatataagtgtgat

SEQ ID NO: 188924 - DNA, 25 bp, Homo sapien
tctttgtctgattgatcaagaactg

SEQ ID NO: 188925 - DNA, 25 bp, Homo sapien
ttttaatctcttttggagcataaag

SEQ ID NO: 188926 - DNA, 25 bp, Homo sapien
gcataaagtttgacgtcattcacca

SEQ ID NO: 188927 - DNA, 25 bp, Homo sapien
gattgatcaagaactgtctcttcaa

SEQ ID NO: 188928 - DNA, 25 bp, Homo sapien
gcagcttggacttccgcagctcagg

SEQ ID NO: 188929 - DNA, 25 bp, Homo sapien
gaataaatattgtagtcctagtttc

SEQ ID NO: 188930 - DNA, 25 bp, Homo sapien
ttctgcccagggaagatagatataa

SEQ ID NO: 188931 - DNA, 25 bp, Homo sapien
ttggacttccgcagctcaggtgatt

SEQ ID NO: 188932 - DNA, 25 bp, Homo sapien
gtcaatagtcttccttcgcctcaga

SEQ ID NO: 188933 - DNA, 25 bp, Homo sapien
catttaagactcactatgtgccatg

SEQ ID NO: 188934 - DNA, 25 bp, Homo sapien
taaatggtgtgcataatcactactg

SEQ ID NO: 188935 - DNA, 25 bp, Homo sapien
gtgccatgcattgtgataagtattt

SEQ ID NO: 188936 - DNA, 25 bp, Homo sapien
ttcccaaaagtgttcttcaactaga

SEQ ID NO: 188937 - DNA, 25 bp, Homo sapien
cccaaaagtgttcttcaactagaag

SEQ ID NO: 188938 - DNA, 25 bp, Homo sapien
tcccaaaagtgttcttcaactagaa

SEQ ID NO: 188939 - DNA, 25 bp, Homo sapien
ccaaaagtgttcttcaactagaagg

SEQ ID NO: 188940 - DNA, 25 bp, Homo sapien
ctggagaatgctacttatctgtaca

SEQ ID NO: 188941 - DNA, 25 bp, Homo sapien
gaatgctacttatctgtacagttct

SEQ ID NO: 188942 - DNA, 25 bp, Homo sapien
tagggccagatttcaaacagatggc

SEQ ID NO: 188943 - DNA, 25 bp, Homo sapien
gtcaactctcttctagggccagatt

SEQ ID NO: 188944 - DNA, 25 bp, Homo sapien
gctacgtaatcatctataacacggc

SEQ ID NO: 188945 - DNA, 25 bp, Homo sapien
ctgagctctttattgtacaagcaac

SEQ ID NO: 188946 - DNA, 25 bp, Homo sapien
gactatttgaattcctacttactag

SEQ ID NO: 188947 - DNA, 25 bp, Homo sapien
tactagaggcaatcccaacaacatt

SEQ ID NO: 188948 - DNA, 25 bp, Homo sapien
tcggatctggtagaaaatatctgac

SEQ ID NO: 188949 - DNA, 25 bp, Homo sapien
gagctattggaactatcggatctgg

SEQ ID NO: 188950 - DNA, 25 bp, Homo sapien
tcttacaaagtactatgcccctggg

SEQ ID NO: 188951 - DNA, 25 bp, Homo sapien
ttgttacaatgatttccagaaagga

SEQ ID NO: 188952 - DNA, 25 bp, Homo sapien
tgagttagaagtcacatataagctg

SEQ ID NO: 188953 - DNA, 25 bp, Homo sapien
ctaagtttaccaacactgctaaagg

SEQ ID NO: 188954 - DNA, 25 bp, Homo sapien
gacatgtcagaaatgaccaatttgg

SEQ ID NO: 188955 - DNA, 25 bp, Homo sapien
ttttcaaactgtgggtcctaatcca

SEQ ID NO: 188956 - DNA, 25 bp, Homo sapien
acaaatagattaggacccacagtat

SEQ ID NO: 188957 - DNA, 25 bp, Homo sapien
tagattaggacccacagtattattt

SEQ ID NO: 188958 - DNA, 25 bp, Homo sapien
aaaatatgagaatgcactgcaaaca

SEQ ID NO: 188959 - DNA, 25 bp, Homo sapien
taatttacaaatagattaggaccca

SEQ ID NO: 188960 - DNA, 25 bp, Homo sapien
gaatgcctataacatagtcaatgat

SEQ ID NO: 188961 - DNA, 25 bp, Homo sapien
cgtgtgtatgaagattagagattac

SEQ ID NO: 188962 - DNA, 25 bp, Homo sapien
tagagattacttaagcagaatgcct

SEQ ID NO: 188963 - DNA, 25 bp, Homo sapien
tgcgtgtgtatgaagattagagatt

SEQ ID NO: 188964 - DNA, 25 bp, Homo sapien
aagcacttaagagcgcagacgccca

SEQ ID NO: 188965 - DNA, 25 bp, Homo sapien
tctactccatgctaaacaggccggt

SEQ ID NO: 188966 - DNA, 25 bp, Homo sapien
gcccttctgcggagatgaactctcg

SEQ ID NO: 188967 - DNA, 25 bp, Homo sapien
gagaaaccactttatgcgaggacag

SEQ ID NO: 188968 - DNA, 25 bp, Homo sapien
gaaaggagaacagccgaatagagcg

SEQ ID NO: 188969 - DNA, 25 bp, Homo sapien
cctgagtgcgacaaggtgttcagct

SEQ ID NO: 188970 - DNA, 25 bp, Homo sapien
catcgtgcgcgtagagtaccgctgc

SEQ ID NO: 188971 - DNA, 25 bp, Homo sapien
gaatagagcggactgcggatcagca

SEQ ID NO: 188972 - DNA, 25 bp, Homo sapien
gaaacaccaggatctagcagccaat

SEQ ID NO: 188973 - DNA, 25 bp, Homo sapien
tataacatggcatcacctgcacagc

SEQ ID NO: 188974 - DNA, 25 bp, Homo sapien
ctagagggtggaatgtataccaacc

SEQ ID NO: 188975 - DNA, 25 bp, Homo sapien
taccaacctggacctgcaagttcag

SEQ ID NO: 188976 - DNA, 25 bp, Homo sapien
gtgtattaacaggtacatcttttgc

SEQ ID NO: 188977 - DNA, 25 bp, Homo sapien
cataattatctaggaaggtaaaggg

SEQ ID NO: 188978 - DNA, 25 bp, Homo sapien
tttggctcacagttaaccatgaaat

SEQ ID NO: 188979 - DNA, 25 bp, Homo sapien
tatggcagcttggattgtgggaaaa

SEQ ID NO: 188980 - DNA, 25 bp, Homo sapien
tgctaaggtggctactgctgatcac

SEQ ID NO: 188981 - DNA, 25 bp, Homo sapien
ggaagaaacatgcatgttatggcag

SEQ ID NO: 188982 - DNA, 25 bp, Homo sapien
acatgcatgttatggcagacatgaa

SEQ ID NO: 188983 - DNA, 25 bp, Homo sapien
gctaaggtggctactgctgatcact

SEQ ID NO: 188984 - DNA, 25 bp, Homo sapien
tggacatgcggcttttgctagttcg

SEQ ID NO: 188985 - DNA, 25 bp, Homo sapien
gaacgacgcagcttcatggacatgc

SEQ ID NO: 188986 - DNA, 25 bp, Homo sapien
ttgctagttcgaggagacattggag

SEQ ID NO: 188987 - DNA, 25 bp, Homo sapien
ctgagccagaggaacgacgcagctt

SEQ ID NO: 188988 - DNA, 25 bp, Homo sapien
cactgggtagaatctctgggtagga

SEQ ID NO: 188989 - DNA, 25 bp, Homo sapien
ctgtgggagtttcactgggtagaat

SEQ ID NO: 188990 - DNA, 25 bp, Homo sapien
tgggagtttcactgggtagaatctc

SEQ ID NO: 188991 - DNA, 25 bp, Homo sapien
gtttcactgggtagaatctctgggt

SEQ ID NO: 188992 - DNA, 25 bp, Homo sapien
tatctctaggattcagggtacaacc

SEQ ID NO: 188993 - DNA, 25 bp, Homo sapien
gatctttcgagggaaaaagcaagcc

SEQ ID NO: 188994 - DNA, 25 bp, Homo sapien
tacatgctaggtatttaaagacggc

SEQ ID NO: 188995 - DNA, 25 bp, Homo sapien
tatgcagcaatactacagaaccttg

SEQ ID NO: 188996 - DNA, 25 bp, Homo sapien
gggtgaagatcctattgagatgtct

SEQ ID NO: 188997 - DNA, 25 bp, Homo sapien
tatgctagcactttcatatctatga

SEQ ID NO: 188998 - DNA, 25 bp, Homo sapien
caaactaggaaataattatgctagc

SEQ ID NO: 188999 - DNA, 25 bp, Homo sapien
tgtcttaagcaattaagaatatgtc

SEQ ID NO: 189000 - DNA, 25 bp, Homo sapien
tctaattgaaataagactggccttc

SEQ ID NO: 189001 - DNA, 25 bp, Homo sapien
tgggagaatatgaatccatgacccc

SEQ ID NO: 189002 - DNA, 25 bp, Homo sapien
atcattcccggccatcacgagaggc

SEQ ID NO: 189003 - DNA, 25 bp, Homo sapien
tggttcatagcagacccatactgga

SEQ ID NO: 189004 - DNA, 25 bp, Homo sapien
caatgttttctagcggaggttttgg

SEQ ID NO: 189005 - DNA, 25 bp, Homo sapien
ccaatgttttctagcggaggttttg

SEQ ID NO: 189006 - DNA, 25 bp, Homo sapien
tggccaatgttttctagcggaggtt

SEQ ID NO: 189007 - DNA, 25 bp, Homo sapien
gatggccaatgttttctagcggagg

SEQ ID NO: 189008 - DNA, 25 bp, Homo sapien
caatgcattagggtgatggttcaca

SEQ ID NO: 189009 - DNA, 25 bp, Homo sapien
ttatgaaatataattgggcatgcaa

SEQ ID NO: 189010 - DNA, 25 bp, Homo sapien
tgggcatgcaatgcattagggtgat

SEQ ID NO: 189011 - DNA, 25 bp, Homo sapien
tataattgggcatgcaatgcattag

SEQ ID NO: 189012 - DNA, 25 bp, Homo sapien
ggtagccacagccacattaagttta

SEQ ID NO: 189013 - DNA, 25 bp, Homo sapien
tcactgtactgttggcatgttatcc

SEQ ID NO: 189014 - DNA, 25 bp, Homo sapien
gcggcttccacattagacagtgcag

SEQ ID NO: 189015 - DNA, 25 bp, Homo sapien
tccatcaccatagaaggagggcttt

SEQ ID NO: 189016 - DNA, 25 bp, Homo sapien
ttaatcataaaatgcagtaccctct

SEQ ID NO: 189017 - DNA, 25 bp, Homo sapien
tccagaagatgcaagagtcattgaa

SEQ ID NO: 189018 - DNA, 25 bp, Homo sapien
caaaatttgatcctctgaagttcag

SEQ ID NO: 189019 - DNA, 25 bp, Homo sapien
gttcagagtgcatgcttaatttgta

SEQ ID NO: 189020 - DNA, 25 bp, Homo sapien
aatgttgttggttctaagtggtgct

SEQ ID NO: 189021 - DNA, 25 bp, Homo sapien
tgctggacaattgtttgcaggtatc

SEQ ID NO: 189022 - DNA, 25 bp, Homo sapien
caattgtttgcaggtatcgtgctct

SEQ ID NO: 189023 - DNA, 25 bp, Homo sapien
ttgcaggtatcgtgctctctcctca

SEQ ID NO: 189024 - DNA, 25 bp, Homo sapien
cttttgaacaacccactccaggctt

SEQ ID NO: 189025 - DNA, 25 bp, Homo sapien
tgcttttgaacaacccactccaggc

SEQ ID NO: 189026 - DNA, 25 bp, Homo sapien
gcttttgaacaacccactccaggct

SEQ ID NO: 189027 - DNA, 25 bp, Homo sapien
gttgttcacgaaagcaactatggaa

SEQ ID NO: 189028 - DNA, 25 bp, Homo sapien
tttctgttgttcacgaaagcaacta

SEQ ID NO: 189029 - DNA, 25 bp, Homo sapien
tctgttgttcacgaaagcaactatg

SEQ ID NO: 189030 - DNA, 25 bp, Homo sapien
tatttctgttgttcacgaaagcaac

SEQ ID NO: 189031 - DNA, 25 bp, Homo sapien
agagcagcaggcagcaacatacaat

SEQ ID NO: 189032 - DNA, 25 bp, Homo sapien
ctgtcaaaatgtagagcagcaggca

SEQ ID NO: 189033 - DNA, 25 bp, Homo sapien
agcaggcagcaacatacaattatca

SEQ ID NO: 189034 - DNA, 25 bp, Homo sapien
agcagcaggcagcaacatacaatta

SEQ ID NO: 189035 - DNA, 25 bp, Homo sapien
gaaattgtagactaagccaagaccc

SEQ ID NO: 189036 - DNA, 25 bp, Homo sapien
taattcaatgggagataccatggcc

SEQ ID NO: 189037 - DNA, 25 bp, Homo sapien
cagcatcaaggattttacatgagga

SEQ ID NO: 189038 - DNA, 25 bp, Homo sapien
tgggaagcaataggacaagatgcat

SEQ ID NO: 189039 - DNA, 25 bp, Homo sapien
gcagtgccccttgtacaaaaaatac

SEQ ID NO: 189040 - DNA, 25 bp, Homo sapien
cagcagtgccccttgtacaaaaaat

SEQ ID NO: 189041 - DNA, 25 bp, Homo sapien
cagctgccgaattttctgcagttaa

SEQ ID NO: 189042 - DNA, 25 bp, Homo sapien
ttttcattgggggagattcacagct

SEQ ID NO: 189043 - DNA, 25 bp, Homo sapien
aagtctgcttgaatgggtaaaatgc

SEQ ID NO: 189044 - DNA, 25 bp, Homo sapien
ggcccacaggagaacagtctgctat

SEQ ID NO: 189045 - DNA, 25 bp, Homo sapien
tatcactctatgcatgctggcactg

SEQ ID NO: 189046 - DNA, 25 bp, Homo sapien
gatcactctcttttcgcaccaaagg

SEQ ID NO: 189047 - DNA, 25 bp, Homo sapien
gaaaggcaactgcattagcagaacc

SEQ ID NO: 189048 - DNA, 25 bp, Homo sapien
aaccaatcaattcatcaattccatt

SEQ ID NO: 189049 - DNA, 25 bp, Homo sapien
acgaaaggcaactgcattagcagaa

SEQ ID NO: 189050 - DNA, 25 bp, Homo sapien
ctttgcaacaggtactggacatttg

SEQ ID NO: 189051 - DNA, 25 bp, Homo sapien
tagacatacgttagagtagaaacca

SEQ ID NO: 189052 - DNA, 25 bp, Homo sapien
catacgttagagtagaaaccattac

SEQ ID NO: 189053 - DNA, 25 bp, Homo sapien
ctttgtgagtagacatacgttagag

SEQ ID NO: 189054 - DNA, 25 bp, Homo sapien
tgagtagacatacgttagagtagaa

SEQ ID NO: 189055 - DNA, 25 bp, Homo sapien
gcatttatagctgttgctctaacca

SEQ ID NO: 189056 - DNA, 25 bp, Homo sapien
tgatacaatggaatcagagatttca

SEQ ID NO: 189057 - DNA, 25 bp, Homo sapien
gatttcagagcacggcttgcattta

SEQ ID NO: 189058 - DNA, 25 bp, Homo sapien
ggtagaacctttccattcacaatag

SEQ ID NO: 189059 - DNA, 25 bp, Homo sapien
gctctgaccaaacaatgtgcacttc

SEQ ID NO: 189060 - DNA, 25 bp, Homo sapien
aataaggacatcaccaaattctgtg

SEQ ID NO: 189061 - DNA, 25 bp, Homo sapien
tagtctctagtatgctctgaccaaa

SEQ ID NO: 189062 - DNA, 25 bp, Homo sapien
cattggatatattacaataaggaca

SEQ ID NO: 189063 - DNA, 25 bp, Homo sapien
aaaattgttaaattgcacttgatca

SEQ ID NO: 189064 - DNA, 25 bp, Homo sapien
aaattgttaaattgcacttgatcag

SEQ ID NO: 189065 - DNA, 25 bp, Homo sapien
tgtcctatggagcagggtgtggtgg

SEQ ID NO: 189066 - DNA, 25 bp, Homo sapien
tgtgtcctatggagcagggtgtggt

SEQ ID NO: 189067 - DNA, 25 bp, Homo sapien
gattgtgtcctatggagcagggtgt

SEQ ID NO: 189068 - DNA, 25 bp, Homo sapien
aagattgtgtcctatggagcagggt

SEQ ID NO: 189069 - DNA, 25 bp, Homo sapien
caacagtcattaggtatagggaaac

SEQ ID NO: 189070 - DNA, 25 bp, Homo sapien
taataggacacatgttctagcctca

SEQ ID NO: 189071 - DNA, 25 bp, Homo sapien
tagggaaacgggaaacatcagtata

SEQ ID NO: 189072 - DNA, 25 bp, Homo sapien
ttcaacccgtgctcattaatgtgtc

SEQ ID NO: 189073 - DNA, 25 bp, Homo sapien
gcaagcagtaatatataagcagtat

SEQ ID NO: 189074 - DNA, 25 bp, Homo sapien
actgcacccggttggtatagtgtaa

SEQ ID NO: 189075 - DNA, 25 bp, Homo sapien
tagtgtaaactctacagcaatcact

SEQ ID NO: 189076 - DNA, 25 bp, Homo sapien
tgtaacttggattaactacaaatgt

SEQ ID NO: 189077 - DNA, 25 bp, Homo sapien
ttggtcaaagaatcatcagaatcag

SEQ ID NO: 189078 - DNA, 25 bp, Homo sapien
tgtagtcctcccataaaaccacaat

SEQ ID NO: 189079 - DNA, 25 bp, Homo sapien
gagtggtcaatccagtgcttttgtt

SEQ ID NO: 189080 - DNA, 25 bp, Homo sapien
tagcaaaatatggagtggtcaatcc

SEQ ID NO: 189081 - DNA, 25 bp, Homo sapien
gactccacctcaaaacaaacagaca

SEQ ID NO: 189082 - DNA, 25 bp, Homo sapien
caaaaaacagattctgagttgacag

SEQ ID NO: 189083 - DNA, 25 bp, Homo sapien
aacaaaaaacagattctgagttgac

SEQ ID NO: 189084 - DNA, 25 bp, Homo sapien
acaaacaaaaaacagattctgagtt

SEQ ID NO: 189085 - DNA, 25 bp, Homo sapien
ttcaccgacctttttgaatctacag

SEQ ID NO: 189086 - DNA, 25 bp, Homo sapien
tttcaccgacctttttgaatctaca

SEQ ID NO: 189087 - DNA, 25 bp, Homo sapien
caatagcacattagcatgactgtag

SEQ ID NO: 189088 - DNA, 25 bp, Homo sapien
taggctggctaatgaatacgaaaca

SEQ ID NO: 189089 - DNA, 25 bp, Homo sapien
gaataagtcctactgttcaatagca

SEQ ID NO: 189090 - DNA, 25 bp, Homo sapien
gaatgacagttaccagaggcaggtg

SEQ ID NO: 189091 - DNA, 25 bp, Homo sapien
tgacttcctcctgtattggtgagaa

SEQ ID NO: 189092 - DNA, 25 bp, Homo sapien
acttcctcctgtattggtgagaatg

SEQ ID NO: 189093 - DNA, 25 bp, Homo sapien
gacttcctcctgtattggtgagaat

SEQ ID NO: 189094 - DNA, 25 bp, Homo sapien
ttgacttcctcctgtattggtgaga

SEQ ID NO: 189095 - DNA, 25 bp, Homo sapien
catctttcccgtgtatgcagaagtg

SEQ ID NO: 189096 - DNA, 25 bp, Homo sapien
tcaacccagtacacatttaaatagg

SEQ ID NO: 189097 - DNA, 25 bp, Homo sapien
tttagggtcaaatctagtgcagtgt

SEQ ID NO: 189098 - DNA, 25 bp, Homo sapien
cttcacgtggctttcttataaggac

SEQ ID NO: 189099 - DNA, 25 bp, Homo sapien
ccttgaatccaagttcctaagttct

SEQ ID NO: 189100 - DNA, 25 bp, Homo sapien
caagttcctaagttctctaagtagc

SEQ ID NO: 189101 - DNA, 25 bp, Homo sapien
gaatccaagttcctaagttctctaa

SEQ ID NO: 189102 - DNA, 25 bp, Homo sapien
tccaagttcctaagttctctaagta

SEQ ID NO: 189103 - DNA, 25 bp, Homo sapien
gcttaaggatagcattaataacatc

SEQ ID NO: 189104 - DNA, 25 bp, Homo sapien
tgttgcttaaggatagcattaataa

SEQ ID NO: 189105 - DNA, 25 bp, Homo sapien
gtttaagtcattaaagtgcttctca

SEQ ID NO: 189106 - DNA, 25 bp, Homo sapien
tgaggtttttgaggtattggttcat

SEQ ID NO: 189107 - DNA, 25 bp, Homo sapien
aaagatgtaggttctgacaagccac

SEQ ID NO: 189108 - DNA, 25 bp, Homo sapien
gcattcattagatgtcggaggctct

SEQ ID NO: 189109 - DNA, 25 bp, Homo sapien
caagccacttacaggaggtgggcca

SEQ ID NO: 189110 - DNA, 25 bp, Homo sapien
taagcattcaggactagtaacaccc

SEQ ID NO: 189111 - DNA, 25 bp, Homo sapien
gaactggatatttggactctcaaag

SEQ ID NO: 189112 - DNA, 25 bp, Homo sapien
ctggatacaggacactaaggttgta

SEQ ID NO: 189113 - DNA, 25 bp, Homo sapien
tactttcactgtaatgattgtcgtg

SEQ ID NO: 189114 - DNA, 25 bp, Homo sapien
caggagaaagttcagtactttcact

SEQ ID NO: 189115 - DNA, 25 bp, Homo sapien
taacagtgcgggctgctatagagat

SEQ ID NO: 189116 - DNA, 25 bp, Homo sapien
gaccaccgctcattggataatggcc

SEQ ID NO: 189117 - DNA, 25 bp, Homo sapien
taatggcccaggtgatttaccagat

SEQ ID NO: 189118 - DNA, 25 bp, Homo sapien
gacttgttagcatagcaggaccacc

SEQ ID NO: 189119 - DNA, 25 bp, Homo sapien
tctgttactggctggagtttagaag

SEQ ID NO: 189120 - DNA, 25 bp, Homo sapien
ggctcatgggaaaataccttggatt

SEQ ID NO: 189121 - DNA, 25 bp, Homo sapien
aaaggatcataatctacagatgcca

SEQ ID NO: 189122 - DNA, 25 bp, Homo sapien
ttagaagatcgttctgagtcaggag

SEQ ID NO: 189123 - DNA, 25 bp, Homo sapien
gctcccgtagcatgaaatggttgga

SEQ ID NO: 189124 - DNA, 25 bp, Homo sapien
aaatgcaattgagaacagatttttc

SEQ ID NO: 189125 - DNA, 25 bp, Homo sapien
tgtctttagaggtaaggccatgatc

SEQ ID NO: 189126 - DNA, 25 bp, Homo sapien
tttatcgctttctgctcccgtagca

SEQ ID NO: 189127 - DNA, 25 bp, Homo sapien
tatcttcctgaatgatctgtgggtc

SEQ ID NO: 189128 - DNA, 25 bp, Homo sapien
atcttcctgaatgatctgtgggtca

SEQ ID NO: 189129 - DNA, 25 bp, Homo sapien
tctgtacttggtaaaagatgggtga

SEQ ID NO: 189130 - DNA, 25 bp, Homo sapien
aaagatgggtgatggtagctattag

SEQ ID NO: 189131 - DNA, 25 bp, Homo sapien
gatgggtgatggtagctattaggat

SEQ ID NO: 189132 - DNA, 25 bp, Homo sapien
gcctctgtacttggtaaaagatggg

SEQ ID NO: 189133 - DNA, 25 bp, Homo sapien
tgttacaagctacgtgggctactgt

SEQ ID NO: 189134 - DNA, 25 bp, Homo sapien
tctgaagtctaggtacataatgaac

SEQ ID NO: 189135 - DNA, 25 bp, Homo sapien
caagggagaatcaggctggtaaatc

SEQ ID NO: 189136 - DNA, 25 bp, Homo sapien
cataatgaaccagcatgtgaagcat

SEQ ID NO: 189137 - DNA, 25 bp, Homo sapien
caagaattcagggagtggtaataaa

SEQ ID NO: 189138 - DNA, 25 bp, Homo sapien
tttagagtcttatacaggtgctgtg

SEQ ID NO: 189139 - DNA, 25 bp, Homo sapien
gttatccctcactgtctagcaatgt

SEQ ID NO: 189140 - DNA, 25 bp, Homo sapien
ctagcaatgtgcctcatagtaaata

SEQ ID NO: 189141 - DNA, 25 bp, Homo sapien
ccttaatttgaggatgatgagactc

SEQ ID NO: 189142 - DNA, 25 bp, Homo sapien
atgagactcatggactagttcttca

SEQ ID NO: 189143 - DNA, 25 bp, Homo sapien
tcacaaatccaaatacctaaactac

SEQ ID NO: 189144 - DNA, 25 bp, Homo sapien
caaatcacattcagagcttccttaa

SEQ ID NO: 189145 - DNA, 25 bp, Homo sapien
tatatatgccatgtcccgatactga

SEQ ID NO: 189146 - DNA, 25 bp, Homo sapien
tcagtctagagtgttaaggctacca

SEQ ID NO: 189147 - DNA, 25 bp, Homo sapien
agcactaaataaccaagcttcgggt

SEQ ID NO: 189148 - DNA, 25 bp, Homo sapien
gaagcaaagctctccgtggatgcag

SEQ ID NO: 189149 - DNA, 25 bp, Homo sapien
ggctcatctcttgccgagcttaata

SEQ ID NO: 189150 - DNA, 25 bp, Homo sapien
cagagggctcatctcttgccgagct

SEQ ID NO: 189151 - DNA, 25 bp, Homo sapien
gaccagagggctcatctcttgccga

SEQ ID NO: 189152 - DNA, 25 bp, Homo sapien
tcttgccgagcttaatacagttttg

SEQ ID NO: 189153 - DNA, 25 bp, Homo sapien
tgtgacaagcacaacttctcaggac

SEQ ID NO: 189154 - DNA, 25 bp, Homo sapien
aattctagggaccaattcaggtcac

SEQ ID NO: 189155 - DNA, 25 bp, Homo sapien
aagaccatctggcaattactgtgac

SEQ ID NO: 189156 - DNA, 25 bp, Homo sapien
tctgcttagcccctgaggagctatg

SEQ ID NO: 189157 - DNA, 25 bp, Homo sapien
ggcagttcacaatataagttgggaa

SEQ ID NO: 189158 - DNA, 25 bp, Homo sapien
gaacttgtgcttctactcttggtgc

SEQ ID NO: 189159 - DNA, 25 bp, Homo sapien
cacaatataagttgggaaagcaaac

SEQ ID NO: 189160 - DNA, 25 bp, Homo sapien
aagagaaggcagttcacaatataag

SEQ ID NO: 189161 - DNA, 25 bp, Homo sapien
ctgaagaagccactctaccagctgc

SEQ ID NO: 189162 - DNA, 25 bp, Homo sapien
gctgaagaagccactctaccagctg

SEQ ID NO: 189163 - DNA, 25 bp, Homo sapien
gtgtttgatgattgtattgacaata

SEQ ID NO: 189164 - DNA, 25 bp, Homo sapien
ggcaccaggcaaaccaagtgaaaaa

SEQ ID NO: 189165 - DNA, 25 bp, Homo sapien
agtgtttgatgattgtattgacaat

SEQ ID NO: 189166 - DNA, 25 bp, Homo sapien
ggaaaaaagaatatcacatatgtaa

SEQ ID NO: 189167 - DNA, 25 bp, Homo sapien
agaaggaaaaaagaatatcacatat

SEQ ID NO: 189168 - DNA, 25 bp, Homo sapien
gaaggaaaaaagaatatcacatatg

SEQ ID NO: 189169 - DNA, 25 bp, Homo sapien
aaggaaaaaagaatatcacatatgt

SEQ ID NO: 189170 - DNA, 25 bp, Homo sapien
gtcaatatgaagtaatccacaatgc

SEQ ID NO: 189171 - DNA, 25 bp, Homo sapien
tggtcaatatgaagtaatccacaat

SEQ ID NO: 189172 - DNA, 25 bp, Homo sapien
ggtcaatatgaagtaatccacaatg

SEQ ID NO: 189173 - DNA, 25 bp, Homo sapien
tatttggagaaacatcttgtcttct

SEQ ID NO: 189174 - DNA, 25 bp, Homo sapien
gtttatatttatcagtcaacatggt

SEQ ID NO: 189175 - DNA, 25 bp, Homo sapien
aaggtgtaagaattctcagtggagg

SEQ ID NO: 189176 - DNA, 25 bp, Homo sapien
caaggtgtaagaattctcagtggag

SEQ ID NO: 189177 - DNA, 25 bp, Homo sapien
ggtgtaagaattctcagtggaggaa

SEQ ID NO: 189178 - DNA, 25 bp, Homo sapien
gccaaggtgtaagaattctcagtgg

SEQ ID NO: 189179 - DNA, 25 bp, Homo sapien
cttgagcatgtatttcaggatccat

SEQ ID NO: 189180 - DNA, 25 bp, Homo sapien
tctgccaaagttcacagaggtaatc

SEQ ID NO: 189181 - DNA, 25 bp, Homo sapien
cttagctagattctgccaaagttca

SEQ ID NO: 189182 - DNA, 25 bp, Homo sapien
ggtaatcaaaaacttgagcatgtat

SEQ ID NO: 189183 - DNA, 25 bp, Homo sapien
tttacatctcccaaaatgcctagca

SEQ ID NO: 189184 - DNA, 25 bp, Homo sapien
acagtagcaacatcagcatgccatc

SEQ ID NO: 189185 - DNA, 25 bp, Homo sapien
cattcttcgccacattacagtagca

SEQ ID NO: 189186 - DNA, 25 bp, Homo sapien
tgccatccagtcagagtacctcctg

SEQ ID NO: 189187 - DNA, 25 bp, Homo sapien
cacactacaacattctgatggaaat

SEQ ID NO: 189188 - DNA, 25 bp, Homo sapien
cattctgatggaaattcactaattt

SEQ ID NO: 189189 - DNA, 25 bp, Homo sapien
ctacaacattctgatggaaattcac

SEQ ID NO: 189190 - DNA, 25 bp, Homo sapien
cactacaacattctgatggaaattc

SEQ ID NO: 189191 - DNA, 25 bp, Homo sapien
tattgggacaattgaggacttacga

SEQ ID NO: 189192 - DNA, 25 bp, Homo sapien
tcacacccgtaatcttgggaggccg

SEQ ID NO: 189193 - DNA, 25 bp, Homo sapien
taatgttactacgttctcctgtgag

SEQ ID NO: 189194 - DNA, 25 bp, Homo sapien
tatttatgatctcctgacactgacg

SEQ ID NO: 189195 - DNA, 25 bp, Homo sapien
tgttccatgtgatctatattcaatg

SEQ ID NO: 189196 - DNA, 25 bp, Homo sapien
gcttctcgtcgagctgcagatcctt

SEQ ID NO: 189197 - DNA, 25 bp, Homo sapien
aacagagtggtggagcttctcgtcg

SEQ ID NO: 189198 - DNA, 25 bp, Homo sapien
tctggtgtctgaagaacagagtggt

SEQ ID NO: 189199 - DNA, 25 bp, Homo sapien
ggttcccattctccactagggccat

SEQ ID NO: 189200 - DNA, 25 bp, Homo sapien
caatggggctgctaaagttcttgcc

SEQ ID NO: 189201 - DNA, 25 bp, Homo sapien
gtagctctaacccaattggttccca

SEQ ID NO: 189202 - DNA, 25 bp, Homo sapien
tcctataatgatggaactgtagctc

SEQ ID NO: 189203 - DNA, 25 bp, Homo sapien
gaagcttaacccagtggacctcagg

SEQ ID NO: 189204 - DNA, 25 bp, Homo sapien
aaatcactccaactatctcatgtac

SEQ ID NO: 189205 - DNA, 25 bp, Homo sapien
taaaatactacaagttcacagagtc

SEQ ID NO: 189206 - DNA, 25 bp, Homo sapien
ggacctcaggtcaagaaactaatgt

SEQ ID NO: 189207 - DNA, 25 bp, Homo sapien
gagtagttagactagccacttcctg

SEQ ID NO: 189208 - DNA, 25 bp, Homo sapien
gcagagaaagcttgctgattaagac

SEQ ID NO: 189209 - DNA, 25 bp, Homo sapien
gtaatagttgcaacttcagcagaga

SEQ ID NO: 189210 - DNA, 25 bp, Homo sapien
tgatggccagaacctgaatccacat

SEQ ID NO: 189211 - DNA, 25 bp, Homo sapien
aaatgttattatatgagtcccaatt

SEQ ID NO: 189212 - DNA, 25 bp, Homo sapien
aatgttattatatgagtcccaatta

SEQ ID NO: 189213 - DNA, 25 bp, Homo sapien
tgttattatatgagtcccaattaca

SEQ ID NO: 189214 - DNA, 25 bp, Homo sapien
ttattatatgagtcccaattacaaa

SEQ ID NO: 189215 - DNA, 25 bp, Homo sapien
ggagaagtccattctgagggcacac

SEQ ID NO: 189216 - DNA, 25 bp, Homo sapien
agaatccgaatgactatctgagctg

SEQ ID NO: 189217 - DNA, 25 bp, Homo sapien
tgcactggcaggagaagtccattct

SEQ ID NO: 189218 - DNA, 25 bp, Homo sapien
tattggaaagcgctgaaagaatccg

SEQ ID NO: 189219 - DNA, 25 bp, Homo sapien
aatagggcgcatctggttctgcttg

SEQ ID NO: 189220 - DNA, 25 bp, Homo sapien
atcaatagggcgcatctggttctgc

SEQ ID NO: 189221 - DNA, 25 bp, Homo sapien
ctgggtcatcaatagggcgcatctg

SEQ ID NO: 189222 - DNA, 25 bp, Homo sapien
gggtcatcaatagggcgcatctggt

SEQ ID NO: 189223 - DNA, 25 bp, Homo sapien
taaactcatccatcagatcaggaac

SEQ ID NO: 189224 - DNA, 25 bp, Homo sapien
tctgctataaactcatccatcagat

SEQ ID NO: 189225 - DNA, 25 bp, Homo sapien
gctataaactcatccatcagatcag

SEQ ID NO: 189226 - DNA, 25 bp, Homo sapien
tataaactcatccatcagatcagga

SEQ ID NO: 189227 - DNA, 25 bp, Homo sapien
ggaaacatttgccttcggcttcgaa

SEQ ID NO: 189228 - DNA, 25 bp, Homo sapien
agatccctcagtggagcctctggtg

SEQ ID NO: 189229 - DNA, 25 bp, Homo sapien
gaacggactcagtggatggcctaaa

SEQ ID NO: 189230 - DNA, 25 bp, Homo sapien
tcttggcacgcataacatgtgggac

SEQ ID NO: 189231 - DNA, 25 bp, Homo sapien
ctaatttatctaaggataatctttc

SEQ ID NO: 189232 - DNA, 25 bp, Homo sapien
ctaaggataatctttcacccctatt

SEQ ID NO: 189233 - DNA, 25 bp, Homo sapien
tttatctaaggataatctttcaccc

SEQ ID NO: 189234 - DNA, 25 bp, Homo sapien
tatctaaggataatctttcacccct

SEQ ID NO: 189235 - DNA, 25 bp, Homo sapien
gcaatagtcacttcctgagaagctg

SEQ ID NO: 189236 - DNA, 25 bp, Homo sapien
caaagatggtcatatatgctatcac

SEQ ID NO: 189237 - DNA, 25 bp, Homo sapien
catgacgggatgaactgtcaatgac

SEQ ID NO: 189238 - DNA, 25 bp, Homo sapien
tctgcaagcttggtgcatgacggga

SEQ ID NO: 189239 - DNA, 25 bp, Homo sapien
gagcggggaagtatttgagcatcat

SEQ ID NO: 189240 - DNA, 25 bp, Homo sapien
aaatgtctgactctagttgagcggg

SEQ ID NO: 189241 - DNA, 25 bp, Homo sapien
tgaaaaatgtctgactctagttgag

SEQ ID NO: 189242 - DNA, 25 bp, Homo sapien
caacagtgaatggttccaagatgtc

SEQ ID NO: 189243 - DNA, 25 bp, Homo sapien
ggagtgagaacaatatcaggcaaga

SEQ ID NO: 189244 - DNA, 25 bp, Homo sapien
gatggcagagcacattcaccaatgg

SEQ ID NO: 189245 - DNA, 25 bp, Homo sapien
tagcactgcgtatataggccgatgg

SEQ ID NO: 189246 - DNA, 25 bp, Homo sapien
tcaccaatggatcggcttctcatgg

SEQ ID NO: 189247 - DNA, 25 bp, Homo sapien
ggaatagcattaaacaacagcagac

SEQ ID NO: 189248 - DNA, 25 bp, Homo sapien
ggtaagaggatgctaatcaaatcag

SEQ ID NO: 189249 - DNA, 25 bp, Homo sapien
tcagcacggcaaatactggcaagct

SEQ ID NO: 189250 - DNA, 25 bp, Homo sapien
ttgcagagcatgaaaaattgggttc

SEQ ID NO: 189251 - DNA, 25 bp, Homo sapien
tgattactggacagacttggttccc

SEQ ID NO: 189252 - DNA, 25 bp, Homo sapien
tcacacaactcacacaaggccttta

SEQ ID NO: 189253 - DNA, 25 bp, Homo sapien
gacttgcctacaatctaccactcag

SEQ ID NO: 189254 - DNA, 25 bp, Homo sapien
tattgttacacatgaatcaaggact

SEQ ID NO: 189255 - DNA, 25 bp, Homo sapien
tacaatctatttttagtggactgta

SEQ ID NO: 189256 - DNA, 25 bp, Homo sapien
attatttactggcaacacagcaata

SEQ ID NO: 189257 - DNA, 25 bp, Homo sapien
tcccacttttgcaaaacttacaatc

SEQ ID NO: 189258 - DNA, 25 bp, Homo sapien
tacatgaataagtcaccatggccag

SEQ ID NO: 189259 - DNA, 25 bp, Homo sapien
aatttatgttgtgattctgaatgaa

SEQ ID NO: 189260 - DNA, 25 bp, Homo sapien
ccatatttgcagtggaataaattta

SEQ ID NO: 189261 - DNA, 25 bp, Homo sapien
ttccatatttgcagtggaataaatt

SEQ ID NO: 189262 - DNA, 25 bp, Homo sapien
tatgttgtgattctgaatgaattct

SEQ ID NO: 189263 - DNA, 25 bp, Homo sapien
tccatgtacatgaactagacctctc

SEQ ID NO: 189264 - DNA, 25 bp, Homo sapien
tgccttgttgtggatctcagcagaa

SEQ ID NO: 189265 - DNA, 25 bp, Homo sapien
taatctggcatcctataaccttgct

SEQ ID NO: 189266 - DNA, 25 bp, Homo sapien
gtatgatgctagaggtaagttgtcc

SEQ ID NO: 189267 - DNA, 25 bp, Homo sapien
gtagaaggatagttactagaggctc

SEQ ID NO: 189268 - DNA, 25 bp, Homo sapien
gatgtgattaatacgcattgtactc

SEQ ID NO: 189269 - DNA, 25 bp, Homo sapien
tgagatcctgacatgaggtcattat

SEQ ID NO: 189270 - DNA, 25 bp, Homo sapien
ggatagttactagaggctcagaagt

SEQ ID NO: 189271 - DNA, 25 bp, Homo sapien
gtttaaggcatgttttatgacccag

SEQ ID NO: 189272 - DNA, 25 bp, Homo sapien
tccagttgactgacagtgctattca

SEQ ID NO: 189273 - DNA, 25 bp, Homo sapien
ccattgcagtcagagggtatattat

SEQ ID NO: 189274 - DNA, 25 bp, Homo sapien
tcttgaaacatctttgaactgtgcg

SEQ ID NO: 189275 - DNA, 25 bp, Homo sapien
tatcaagttcactatgttgctggca

SEQ ID NO: 189276 - DNA, 25 bp, Homo sapien
ccagtggtacgacgaaatgctagca

SEQ ID NO: 189277 - DNA, 25 bp, Homo sapien
tcagtcatccaaccttgaagcttgc

SEQ ID NO: 189278 - DNA, 25 bp, Homo sapien
tgtacaactgtcaggaagcattact

SEQ ID NO: 189279 - DNA, 25 bp, Homo sapien
taaatacggatacattcccatggaa

SEQ ID NO: 189280 - DNA, 25 bp, Homo sapien
taaaccttggaataacttcaggcaa

SEQ ID NO: 189281 - DNA, 25 bp, Homo sapien
cattcccactacacagatgaagtac

SEQ ID NO: 189282 - DNA, 25 bp, Homo sapien
tagaagcattgattgtaaaccttgg

SEQ ID NO: 189283 - DNA, 25 bp, Homo sapien
gagaaccagtggttgttgcactcct

SEQ ID NO: 189284 - DNA, 25 bp, Homo sapien
gacttgtcaactgaaactttctgaa

SEQ ID NO: 189285 - DNA, 25 bp, Homo sapien
cgacagttttttgccgtactatact

SEQ ID NO: 189286 - DNA, 25 bp, Homo sapien
tcctcgccttttcggttcctggaga

SEQ ID NO: 189287 - DNA, 25 bp, Homo sapien
tgctttgatccaggcaactataagg

SEQ ID NO: 189288 - DNA, 25 bp, Homo sapien
caaagttctcgggagatgtacacat

SEQ ID NO: 189289 - DNA, 25 bp, Homo sapien
tgacagtaagtcatcccaaagttct

SEQ ID NO: 189290 - DNA, 25 bp, Homo sapien
tgttcactcagcttatccaatggta

SEQ ID NO: 189291 - DNA, 25 bp, Homo sapien
taaagtcagcactctatcctcagat

SEQ ID NO: 189292 - DNA, 25 bp, Homo sapien
taaagcagtcaggtcattatcccta

SEQ ID NO: 189293 - DNA, 25 bp, Homo sapien
agtcccagagatacggaaactcata

SEQ ID NO: 189294 - DNA, 25 bp, Homo sapien
tgttcacagacctgatattacctcc

SEQ ID NO: 189295 - DNA, 25 bp, Homo sapien
ctgcaagtcgacctgccaaggtcat

SEQ ID NO: 189296 - DNA, 25 bp, Homo sapien
ctggaaaagtggtcctgcaagtcga

SEQ ID NO: 189297 - DNA, 25 bp, Homo sapien
tacagattccgtgactctgagcaac

SEQ ID NO: 189298 - DNA, 25 bp, Homo sapien
gatggcatcttcagtacagattccg

SEQ ID NO: 189299 - DNA, 25 bp, Homo sapien
tcatttatcggccacaatatcctct

SEQ ID NO: 189300 - DNA, 25 bp, Homo sapien
cacaatatagttctacccagatgga

SEQ ID NO: 189301 - DNA, 25 bp, Homo sapien
cgtctccgcaaccacaaattaagta

SEQ ID NO: 189302 - DNA, 25 bp, Homo sapien
gtgaccttaaggagctatctgaaga

SEQ ID NO: 189303 - DNA, 25 bp, Homo sapien
ggcggcaacagatcctagatctaga

SEQ ID NO: 189304 - DNA, 25 bp, Homo sapien
ggcatagcgatacgtggaacagtca

SEQ ID NO: 189305 - DNA, 25 bp, Homo sapien
actttcagttgggtgtatcagccca

SEQ ID NO: 189306 - DNA, 25 bp, Homo sapien
tgcaagtccattccaggcatagcga

SEQ ID NO: 189307 - DNA, 25 bp, Homo sapien
aaaactgcagaaccactttcccatc

SEQ ID NO: 189308 - DNA, 25 bp, Homo sapien
caggaaggtgaatctaagggacagt

SEQ ID NO: 189309 - DNA, 25 bp, Homo sapien
ggacagttacggtgacaacaggaaa

SEQ ID NO: 189310 - DNA, 25 bp, Homo sapien
tctcagttctatggtggtaaacaga

SEQ ID NO: 189311 - DNA, 25 bp, Homo sapien
tgtccattgatacttgtacaaccat

SEQ ID NO: 189312 - DNA, 25 bp, Homo sapien
ccattgatacttgtacaaccatgta

SEQ ID NO: 189313 - DNA, 25 bp, Homo sapien
tgtacaaccatgtaccgataaatgt

SEQ ID NO: 189314 - DNA, 25 bp, Homo sapien
accatgtaccgataaatgttaagaa

SEQ ID NO: 189315 - DNA, 25 bp, Homo sapien
cctggccttgatagagacctacaca

SEQ ID NO: 189316 - DNA, 25 bp, Homo sapien
gcttccctggccttgatagagacct

SEQ ID NO: 189317 - DNA, 25 bp, Homo sapien
aaagcttccctggccttgatagaga

SEQ ID NO: 189318 - DNA, 25 bp, Homo sapien
aacacctgggaaattcactgcaaaa

SEQ ID NO: 189319 - DNA, 25 bp, Homo sapien
cctgggtaccagctcgtatgttttg

SEQ ID NO: 189320 - DNA, 25 bp, Homo sapien
tgaagagcaccttggtaggagccgt

SEQ ID NO: 189321 - DNA, 25 bp, Homo sapien
ttttgcccaactggaatttcgaaca

SEQ ID NO: 189322 - DNA, 25 bp, Homo sapien
tgatcagcagtattggtcccatttt

SEQ ID NO: 189323 - DNA, 25 bp, Homo sapien
cattgaaatatcatggtctgtgaca

SEQ ID NO: 189324 - DNA, 25 bp, Homo sapien
ttaccacttttctcatagctgctgc

SEQ ID NO: 189325 - DNA, 25 bp, Homo sapien
gtctgaagaagtgatcacaatttct

SEQ ID NO: 189326 - DNA, 25 bp, Homo sapien
cctcttgttggatccattcttgata

SEQ ID NO: 189327 - DNA, 25 bp, Homo sapien
tactcagaatggtgatattccttgc

SEQ ID NO: 189328 - DNA, 25 bp, Homo sapien
taatttgcacactgatataggaatg

SEQ ID NO: 189329 - DNA, 25 bp, Homo sapien
gataggcactgacttcaagtagaag

SEQ ID NO: 189330 - DNA, 25 bp, Homo sapien
ccaattcattgtcgtaaaaagccta

SEQ ID NO: 189331 - DNA, 25 bp, Homo sapien
taaatgacgaacttcaagcagagga

SEQ ID NO: 189332 - DNA, 25 bp, Homo sapien
gattgtagtaatcatccgcaatgta

SEQ ID NO: 189333 - DNA, 25 bp, Homo sapien
cagactagtagggttctaaggtcct

SEQ ID NO: 189334 - DNA, 25 bp, Homo sapien
gccatgattatgttaaccagattga

SEQ ID NO: 189335 - DNA, 25 bp, Homo sapien
atctctggcaagaatcatcattaaa

SEQ ID NO: 189336 - DNA, 25 bp, Homo sapien
caaacaagggatagggccaggcaca

SEQ ID NO: 189337 - DNA, 25 bp, Homo sapien
gcttcagaggttaaaaggattataa

SEQ ID NO: 189338 - DNA, 25 bp, Homo sapien
aaatcaccaggcaattaaatactgc

SEQ ID NO: 189339 - DNA, 25 bp, Homo sapien
ctgaacaactacaactaaaggtaca

SEQ ID NO: 189340 - DNA, 25 bp, Homo sapien
ctacaactaaaggtacacaccactg

SEQ ID NO: 189341 - DNA, 25 bp, Homo sapien
caactacaactaaaggtacacacca

SEQ ID NO: 189342 - DNA, 25 bp, Homo sapien
gaacaactacaactaaaggtacaca

SEQ ID NO: 189343 - DNA, 25 bp, Homo sapien
tctctggatactaaactagcagctg

SEQ ID NO: 189344 - DNA, 25 bp, Homo sapien
gatgagctaggttctcgctccgtga

SEQ ID NO: 189345 - DNA, 25 bp, Homo sapien
tattggaatgagactgttcgggttc

SEQ ID NO: 189346 - DNA, 25 bp, Homo sapien
caatactacagagactagatgagct

SEQ ID NO: 189347 - DNA, 25 bp, Homo sapien
tattctttggcaagacttcaccttc

SEQ ID NO: 189348 - DNA, 25 bp, Homo sapien
aataacacgagccttaatgaaaggc

SEQ ID NO: 189349 - DNA, 25 bp, Homo sapien
aaccagccaacgaatgacaataaca

SEQ ID NO: 189350 - DNA, 25 bp, Homo sapien
tgaaaggctcctttgtacaatagat

SEQ ID NO: 189351 - DNA, 25 bp, Homo sapien
caagtataggatgatataaactgtt

SEQ ID NO: 189352 - DNA, 25 bp, Homo sapien
tggaaaaatataaggcaagtaatat

SEQ ID NO: 189353 - DNA, 25 bp, Homo sapien
tgttttccttacagatgtttggaaa

SEQ ID NO: 189354 - DNA, 25 bp, Homo sapien
gtataggatgatataaactgttttc

SEQ ID NO: 189355 - DNA, 25 bp, Homo sapien
tggttttctttgttcttccattcta

SEQ ID NO: 189356 - DNA, 25 bp, Homo sapien
gcttcaagaaaatagcttgtgagat

SEQ ID NO: 189357 - DNA, 25 bp, Homo sapien
gcttgtgagatcttcttgcccttta

SEQ ID NO: 189358 - DNA, 25 bp, Homo sapien
ctatgtattttagaagtgcttcaag

SEQ ID NO: 189359 - DNA, 25 bp, Homo sapien
ttatctcctgattgtggggggacaa

SEQ ID NO: 189360 - DNA, 25 bp, Homo sapien
tgacggataacatcccatgaatctt

SEQ ID NO: 189361 - DNA, 25 bp, Homo sapien
catagtaagaaaagacgaacacctt

SEQ ID NO: 189362 - DNA, 25 bp, Homo sapien
tccagggattaagcatgaaaacatc

SEQ ID NO: 189363 - DNA, 25 bp, Homo sapien
gattatctaaagttcgaggtccatg

SEQ ID NO: 189364 - DNA, 25 bp, Homo sapien
tgaagagcttgcaaccatagtaaga

SEQ ID NO: 189365 - DNA, 25 bp, Homo sapien
cctgtgtgaagtagcttctttaaaa

SEQ ID NO: 189366 - DNA, 25 bp, Homo sapien
ctgtgtgaagtagcttctttaaaat

SEQ ID NO: 189367 - DNA, 25 bp, Homo sapien
tgtgtgaagtagcttctttaaaatc

SEQ ID NO: 189368 - DNA, 25 bp, Homo sapien
taactgtacaggtatcactgaggcc

SEQ ID NO: 189369 - DNA, 25 bp, Homo sapien
aactgtacaggtatcactgaggccc

SEQ ID NO: 189370 - DNA, 25 bp, Homo sapien
ggcatgaaaatagccaacaccacca

SEQ ID NO: 189371 - DNA, 25 bp, Homo sapien
gtccatccctacatcagtaacagtg

SEQ ID NO: 189372 - DNA, 25 bp, Homo sapien
aagcttaggtctttggctgatctcc

SEQ ID NO: 189373 - DNA, 25 bp, Homo sapien
caagtttccatacataagcttaggt

SEQ ID NO: 189374 - DNA, 25 bp, Homo sapien
caatactatgaaactgccatcgctg

SEQ ID NO: 189375 - DNA, 25 bp, Homo sapien
aaactgccatcgctgatgaattctt

SEQ ID NO: 189376 - DNA, 25 bp, Homo sapien
aatactatgaaactgccatcgctga

SEQ ID NO: 189377 - DNA, 25 bp, Homo sapien
ctgccatcgctgatgaattctttct

SEQ ID NO: 189378 - DNA, 25 bp, Homo sapien
tgtgaaactagaggtacttagatgc

SEQ ID NO: 189379 - DNA, 25 bp, Homo sapien
accactatgtctagcaattcctaga

SEQ ID NO: 189380 - DNA, 25 bp, Homo sapien
attttgatttcatgagaaccccatc

SEQ ID NO: 189381 - DNA, 25 bp, Homo sapien
gtgcatcacagccttaactcccaga

SEQ ID NO: 189382 - DNA, 25 bp, Homo sapien
gagtcactagcactacaagcgcctg

SEQ ID NO: 189383 - DNA, 25 bp, Homo sapien
cctgagtcactagcactacaagcgc

SEQ ID NO: 189384 - DNA, 25 bp, Homo sapien
taaatgaggttgttcaaattctaaa

SEQ ID NO: 189385 - DNA, 25 bp, Homo sapien
cacggctcactatagtttcgacctc

SEQ ID NO: 189386 - DNA, 25 bp, Homo sapien
caattcctctctttgagacttgtga

SEQ ID NO: 189387 - DNA, 25 bp, Homo sapien
aattcctctctttgagacttgtgac

SEQ ID NO: 189388 - DNA, 25 bp, Homo sapien
aaaaagtatagcatccaattcctct

SEQ ID NO: 189389 - DNA, 25 bp, Homo sapien
aaagtatagcatccaattcctctct

SEQ ID NO: 189390 - DNA, 25 bp, Homo sapien
tttaagatcaatagattctgcattc

SEQ ID NO: 189391 - DNA, 25 bp, Homo sapien
taagactagcttcaatagtcacaaa

SEQ ID NO: 189392 - DNA, 25 bp, Homo sapien
aaaactgtttaagatcaatagattc

SEQ ID NO: 189393 - DNA, 25 bp, Homo sapien
gtttaagactagcttcaatagtcac

SEQ ID NO: 189394 - DNA, 25 bp, Homo sapien
aggtttgtgggacgtacatctcata

SEQ ID NO: 189395 - DNA, 25 bp, Homo sapien
aaaggtttgtgggacgtacatctca

SEQ ID NO: 189396 - DNA, 25 bp, Homo sapien
gtttgtgggacgtacatctcatata

SEQ ID NO: 189397 - DNA, 25 bp, Homo sapien
tgtgggacgtacatctcatatatga

SEQ ID NO: 189398 - DNA, 25 bp, Homo sapien
gatcgctggaccctgaaaggtcaag

SEQ ID NO: 189399 - DNA, 25 bp, Homo sapien
gcaatgagccacgtttgcaacacgg

SEQ ID NO: 189400 - DNA, 25 bp, Homo sapien
tttaattggccatacacggtggtgc

SEQ ID NO: 189401 - DNA, 25 bp, Homo sapien
gcaacacggtactccagccagagtg

SEQ ID NO: 189402 - DNA, 25 bp, Homo sapien
gacttcttcacgtccccgtgcggct

SEQ ID NO: 189403 - DNA, 25 bp, Homo sapien
gcgcaggtgcttgaggcgagtcagt

SEQ ID NO: 189404 - DNA, 25 bp, Homo sapien
tccccgtgcggcttcttggagaaca

SEQ ID NO: 189405 - DNA, 25 bp, Homo sapien
gcgagtcagtgcgtccttcttggtg

SEQ ID NO: 189406 - DNA, 25 bp, Homo sapien
cagctccaatatggcggatccctct

SEQ ID NO: 189407 - DNA, 25 bp, Homo sapien
cccagctccaatatggcggatccct

SEQ ID NO: 189408 - DNA, 25 bp, Homo sapien
tccaaggcaccttcggccccagctc

SEQ ID NO: 189409 - DNA, 25 bp, Homo sapien
tcgcgccgcggctccaaggcacctt

SEQ ID NO: 189410 - DNA, 25 bp, Homo sapien
ctgaggcccccttaaggttgaagct

SEQ ID NO: 189411 - DNA, 25 bp, Homo sapien
gagccacgaaggtggagctctcggc

SEQ ID NO: 189412 - DNA, 25 bp, Homo sapien
tcggcggcaggagcacaactctctc

SEQ ID NO: 189413 - DNA, 25 bp, Homo sapien
gccgccgctcgtctccagcggccgc

SEQ ID NO: 189414 - DNA, 25 bp, Homo sapien
cctgcagaggccgaaacggagacga

SEQ ID NO: 189415 - DNA, 25 bp, Homo sapien
gagttcttgacgtcatgccagcatg

SEQ ID NO: 189416 - DNA, 25 bp, Homo sapien
tggcgaacggtgtccgtggcaaccg

SEQ ID NO: 189417 - DNA, 25 bp, Homo sapien
cgccttctgacgtcaagagttcttg

SEQ ID NO: 189418 - DNA, 25 bp, Homo sapien
gtgcataagttgttgtggccaccag

SEQ ID NO: 189419 - DNA, 25 bp, Homo sapien
ataagttgttgtggccaccagatcc

SEQ ID NO: 189420 - DNA, 25 bp, Homo sapien
tatctttgaaaatgtgcataagttg

SEQ ID NO: 189421 - DNA, 25 bp, Homo sapien
aaaatgtgcataagttgttgtggcc

SEQ ID NO: 189422 - DNA, 25 bp, Homo sapien
aatacccatgtctgaattattgtag

SEQ ID NO: 189423 - DNA, 25 bp, Homo sapien
gaataaagttgctaggtcagttcac

SEQ ID NO: 189424 - DNA, 25 bp, Homo sapien
gttcttctaaaaatgacaggcgcac

SEQ ID NO: 189425 - DNA, 25 bp, Homo sapien
gttcacaactcaattgcagaaaatt

SEQ ID NO: 189426 - DNA, 25 bp, Homo sapien
tttgagaccgtgctgggttgccgcc

SEQ ID NO: 189427 - DNA, 25 bp, Homo sapien
tagtgaaaaaattgggagcagcctc

SEQ ID NO: 189428 - DNA, 25 bp, Homo sapien
tagcatacgtaatgcatgagaccac

SEQ ID NO: 189429 - DNA, 25 bp, Homo sapien
gccaatttgggagcagataggatcc

SEQ ID NO: 189430 - DNA, 25 bp, Homo sapien
gcatcaccgcgcaggaccatcagct

SEQ ID NO: 189431 - DNA, 25 bp, Homo sapien
agctcacgccgcatagctgcatcat

SEQ ID NO: 189432 - DNA, 25 bp, Homo sapien
agaccgccatcatggggttccacca

SEQ ID NO: 189433 - DNA, 25 bp, Homo sapien
gatgaagaccgccatcatggggttc

SEQ ID NO: 189434 - DNA, 25 bp, Homo sapien
ggctcgccctgcacaactttggctg

SEQ ID NO: 189435 - DNA, 25 bp, Homo sapien
aactttggctgacctctcagcaggc

SEQ ID NO: 189436 - DNA, 25 bp, Homo sapien
ccgtggcgggagtgggtgcagtgcg

SEQ ID NO: 189437 - DNA, 25 bp, Homo sapien
tacttgggtttgcaccaatgacatg

SEQ ID NO: 189438 - DNA, 25 bp, Homo sapien
gaaggtctgacatcggtaggccaaa

SEQ ID NO: 189439 - DNA, 25 bp, Homo sapien
tgccctgaatggtagaggtgctgac

SEQ ID NO: 189440 - DNA, 25 bp, Homo sapien
ttaacttgacctgcctgactactgc

SEQ ID NO: 189441 - DNA, 25 bp, Homo sapien
ccaataggtgagacgcatttgctaa

SEQ ID NO: 189442 - DNA, 25 bp, Homo sapien
agacggggtggctgccggacggagg

SEQ ID NO: 189443 - DNA, 25 bp, Homo sapien
cccagacggggtggctgccggacgg

SEQ ID NO: 189444 - DNA, 25 bp, Homo sapien
tgccgggcggagacgctcttcactt

SEQ ID NO: 189445 - DNA, 25 bp, Homo sapien
ggctgccgggcggagacgctcttca

SEQ ID NO: 189446 - DNA, 25 bp, Homo sapien
gaaggagaccaaccatcacgatgag

SEQ ID NO: 189447 - DNA, 25 bp, Homo sapien
tggtcaggcaggtcaaacaatcact

SEQ ID NO: 189448 - DNA, 25 bp, Homo sapien
tataaactgcgatccagagtgtcag

SEQ ID NO: 189449 - DNA, 25 bp, Homo sapien
gggcaaccaatcgtaccagagcagg

SEQ ID NO: 189450 - DNA, 25 bp, Homo sapien
ctagcttccagcgttgcttttgtaa

SEQ ID NO: 189451 - DNA, 25 bp, Homo sapien
caagaaagagtattagtctctacca

SEQ ID NO: 189452 - DNA, 25 bp, Homo sapien
gacgctcacacttaagagtatggaa

SEQ ID NO: 189453 - DNA, 25 bp, Homo sapien
catcctacccgtattcaagaaagag

SEQ ID NO: 189454 - DNA, 25 bp, Homo sapien
tatttctagtgaccctttagcggca

SEQ ID NO: 189455 - DNA, 25 bp, Homo sapien
gaaaccctcaatatggcagcacagc

SEQ ID NO: 189456 - DNA, 25 bp, Homo sapien
cacagccggctgtagtgtatattta

SEQ ID NO: 189457 - DNA, 25 bp, Homo sapien
tcagtgtcagcaaagtgatattacg

SEQ ID NO: 189458 - DNA, 25 bp, Homo sapien
tatcttaagtcttatgatcatacat

SEQ ID NO: 189459 - DNA, 25 bp, Homo sapien
caaactgaacatactcatttagcca

SEQ ID NO: 189460 - DNA, 25 bp, Homo sapien
tcacaaactgaacatactcatttag

SEQ ID NO: 189461 - DNA, 25 bp, Homo sapien
aaatgtgagaagtgttcaacaatct

SEQ ID NO: 189462 - DNA, 25 bp, Homo sapien
tccccagagctatcttccttcagta

SEQ ID NO: 189463 - DNA, 25 bp, Homo sapien
cccagagctatcttccttcagtagt

SEQ ID NO: 189464 - DNA, 25 bp, Homo sapien
tcatttgtccccagagctatcttcc

SEQ ID NO: 189465 - DNA, 25 bp, Homo sapien
cagagctatcttccttcagtagtaa

SEQ ID NO: 189466 - DNA, 25 bp, Homo sapien
aagcactgtgtaagtccggagctgc

SEQ ID NO: 189467 - DNA, 25 bp, Homo sapien
tccggagctgcacagtgccatcttt

SEQ ID NO: 189468 - DNA, 25 bp, Homo sapien
ccggaagtcatgtgccacaagcact

SEQ ID NO: 189469 - DNA, 25 bp, Homo sapien
tcatgtgccacaagcactgtgtaag

SEQ ID NO: 189470 - DNA, 25 bp, Homo sapien
ctaggtatgttttgtgtcttaccca

SEQ ID NO: 189471 - DNA, 25 bp, Homo sapien
tgtgctatcttatcgatgacagttc

SEQ ID NO: 189472 - DNA, 25 bp, Homo sapien
gaatttgatggctatgccaggacct

SEQ ID NO: 189473 - DNA, 25 bp, Homo sapien
taggtggaaagtttgtgccaaatga

SEQ ID NO: 189474 - DNA, 25 bp, Homo sapien
ctttcgtttgttgcagagcagctgc

SEQ ID NO: 189475 - DNA, 25 bp, Homo sapien
gctttactgtcaatccaacatcctg

SEQ ID NO: 189476 - DNA, 25 bp, Homo sapien
gtctttctttcgctaaggtctctta

SEQ ID NO: 189477 - DNA, 25 bp, Homo sapien
aatttgctctgggtgtgcaaaacca

SEQ ID NO: 189478 - DNA, 25 bp, Homo sapien
tagaattagaaggcgaggaatagtg

SEQ ID NO: 189479 - DNA, 25 bp, Homo sapien
aattagaaggcgaggaatagtgagg

SEQ ID NO: 189480 - DNA, 25 bp, Homo sapien
gaattagaaggcgaggaatagtgag

SEQ ID NO: 189481 - DNA, 25 bp, Homo sapien
agaattagaaggcgaggaatagtga

SEQ ID NO: 189482 - DNA, 25 bp, Homo sapien
cacagcggaagctttgttggaagcc

SEQ ID NO: 189483 - DNA, 25 bp, Homo sapien
cagtcactttgcttcggcaatggtg

SEQ ID NO: 189484 - DNA, 25 bp, Homo sapien
ggcaatggtgtacattggtgcccca

SEQ ID NO: 189485 - DNA, 25 bp, Homo sapien
tctgcttaacatcgccacagcggaa

SEQ ID NO: 189486 - DNA, 25 bp, Homo sapien
caatagttagcttgagtgccaggta

SEQ ID NO: 189487 - DNA, 25 bp, Homo sapien
gtgcaaagcctcctgatgtctaggg

SEQ ID NO: 189488 - DNA, 25 bp, Homo sapien
cacattgactaaccagttgcaggga

SEQ ID NO: 189489 - DNA, 25 bp, Homo sapien
tatatagctgtgcatgaacccatgt

SEQ ID NO: 189490 - DNA, 25 bp, Homo sapien
ccagttttgggtggtagcatgcttc

SEQ ID NO: 189491 - DNA, 25 bp, Homo sapien
tgcttccataggcaatcagccctgt

SEQ ID NO: 189492 - DNA, 25 bp, Homo sapien
ggctttgtcagaagatgctaaaaaa

SEQ ID NO: 189493 - DNA, 25 bp, Homo sapien
tttgagaggagtaaagagatggctt

SEQ ID NO: 189494 - DNA, 25 bp, Homo sapien
gctggccaaaccatcaggccagctg

SEQ ID NO: 189495 - DNA, 25 bp, Homo sapien
tttgctggccaaaccatcaggccag

SEQ ID NO: 189496 - DNA, 25 bp, Homo sapien
tggctttgctggccaaaccatcagg

SEQ ID NO: 189497 - DNA, 25 bp, Homo sapien
gctttgctggccaaaccatcaggcc

SEQ ID NO: 189498 - DNA, 25 bp, Homo sapien
gaaagatgctgggtgttccaaccag

SEQ ID NO: 189499 - DNA, 25 bp, Homo sapien
ggacgatctcccagacatagttgag

SEQ ID NO: 189500 - DNA, 25 bp, Homo sapien
tacctaaaaatggaatgcctcctgg

SEQ ID NO: 189501 - DNA, 25 bp, Homo sapien
taattaggcaaatacgctgctgccc

SEQ ID NO: 189502 - DNA, 25 bp, Homo sapien
tgtgtgcacccatgacagtaggtgt

SEQ ID NO: 189503 - DNA, 25 bp, Homo sapien
gccagagagtactttgctgccagtg

SEQ ID NO: 189504 - DNA, 25 bp, Homo sapien
tgactgcctgccagagagtactttg

SEQ ID NO: 189505 - DNA, 25 bp, Homo sapien
tggtaatggtccaagtgtgtgcacc

SEQ ID NO: 189506 - DNA, 25 bp, Homo sapien
tcagctgcaggttcttgctgtcctg

SEQ ID NO: 189507 - DNA, 25 bp, Homo sapien
ctcccatagacagcatcagctgcag

SEQ ID NO: 189508 - DNA, 25 bp, Homo sapien
agctgcaggttcttgctgtcctgaa

SEQ ID NO: 189509 - DNA, 25 bp, Homo sapien
agcatcagctgcaggttcttgctgt

SEQ ID NO: 189510 - DNA, 25 bp, Homo sapien
cacatactcttataaaccatggagc

SEQ ID NO: 189511 - DNA, 25 bp, Homo sapien
aaagtgcggatggtatcacatactc

SEQ ID NO: 189512 - DNA, 25 bp, Homo sapien
caaattacgctcagtgtaaagggca

SEQ ID NO: 189513 - DNA, 25 bp, Homo sapien
gacatctgtctaggatgctttttcc

SEQ ID NO: 189514 - DNA, 25 bp, Homo sapien
ccactggcagctagcttaggctcca

SEQ ID NO: 189515 - DNA, 25 bp, Homo sapien
tgttgtcttcctgtcccacggaaat

SEQ ID NO: 189516 - DNA, 25 bp, Homo sapien
gaaatgttggtatcccgcttcatta

SEQ ID NO: 189517 - DNA, 25 bp, Homo sapien
taggtcataaatgggagactctggc

SEQ ID NO: 189518 - DNA, 25 bp, Homo sapien
ctgagtttccatgctttcctctttc

SEQ ID NO: 189519 - DNA, 25 bp, Homo sapien
tccttgaggtggttcttctgtcttc

SEQ ID NO: 189520 - DNA, 25 bp, Homo sapien
cctctttctctccttgaggtggttc

SEQ ID NO: 189521 - DNA, 25 bp, Homo sapien
tttctctccttgaggtggttcttct

SEQ ID NO: 189522 - DNA, 25 bp, Homo sapien
aaagccaccagaggattcagaccag

SEQ ID NO: 189523 - DNA, 25 bp, Homo sapien
gtagatattttggaagcaagatggc

SEQ ID NO: 189524 - DNA, 25 bp, Homo sapien
gcagttgcatggtcatgactgtgtg

SEQ ID NO: 189525 - DNA, 25 bp, Homo sapien
agatggctggcatcgtcctcctggc

SEQ ID NO: 189526 - DNA, 25 bp, Homo sapien
gctcatatgcaacatttagggccaa

SEQ ID NO: 189527 - DNA, 25 bp, Homo sapien
agcaatgctcatatgcaacatttag

SEQ ID NO: 189528 - DNA, 25 bp, Homo sapien
aatgctcatatgcaacatttagggc

SEQ ID NO: 189529 - DNA, 25 bp, Homo sapien
cctggtgggaactgtcctgcagcca

SEQ ID NO: 189530 - DNA, 25 bp, Homo sapien
ttgagtgacactattgtaatgagaa

SEQ ID NO: 189531 - DNA, 25 bp, Homo sapien
gcaataccttgctatccaaatagac

SEQ ID NO: 189532 - DNA, 25 bp, Homo sapien
cagttttccaagattgagtgacact

SEQ ID NO: 189533 - DNA, 25 bp, Homo sapien
actttatggactgagaggcacttct

SEQ ID NO: 189534 - DNA, 25 bp, Homo sapien
ggcagagtctttagtattatcacca

SEQ ID NO: 189535 - DNA, 25 bp, Homo sapien
cagaagaatcttgtgctctgaggct

SEQ ID NO: 189536 - DNA, 25 bp, Homo sapien
cagcacggtcaaaacttcagaagaa

SEQ ID NO: 189537 - DNA, 25 bp, Homo sapien
cagggcagtaacagcttccagtgtt

SEQ ID NO: 189538 - DNA, 25 bp, Homo sapien
atcccacctgtcagacttcttgaat

SEQ ID NO: 189539 - DNA, 25 bp, Homo sapien
cctgtcagacttcttgaatttgcac

SEQ ID NO: 189540 - DNA, 25 bp, Homo sapien
cttttagtacgatcccacctgtcag

SEQ ID NO: 189541 - DNA, 25 bp, Homo sapien
ttctcttttagtacgatcccacctg

SEQ ID NO: 189542 - DNA, 25 bp, Homo sapien
agagttgggagccaggtactgatct

SEQ ID NO: 189543 - DNA, 25 bp, Homo sapien
gccaggtactgatctctcttcagca

SEQ ID NO: 189544 - DNA, 25 bp, Homo sapien
gtgctggcttgacccctgggaaggc

SEQ ID NO: 189545 - DNA, 25 bp, Homo sapien
ttgggagccaggtactgatctctct

SEQ ID NO: 189546 - DNA, 25 bp, Homo sapien
cagatggaaatcaaatgggatatgt

SEQ ID NO: 189547 - DNA, 25 bp, Homo sapien
acacagatggaaatcaaatgggata

SEQ ID NO: 189548 - DNA, 25 bp, Homo sapien
acagatggaaatcaaatgggatatg

SEQ ID NO: 189549 - DNA, 25 bp, Homo sapien
cacagatggaaatcaaatgggatat

SEQ ID NO: 189550 - DNA, 25 bp, Homo sapien
tctggaaccaaagcgcccaccacga

SEQ ID NO: 189551 - DNA, 25 bp, Homo sapien
taaattggttatatgtagagaactt

SEQ ID NO: 189552 - DNA, 25 bp, Homo sapien
caatgtaccactaacatagataaat

SEQ ID NO: 189553 - DNA, 25 bp, Homo sapien
catagataaattggttatatgtaga

SEQ ID NO: 189554 - DNA, 25 bp, Homo sapien
tcaatgtaccactaacatagataaa

SEQ ID NO: 189555 - DNA, 25 bp, Homo sapien
ccaggtaccagttggaagaccacaa

SEQ ID NO: 189556 - DNA, 25 bp, Homo sapien
cacgaggaatcacaaattaggtaca

SEQ ID NO: 189557 - DNA, 25 bp, Homo sapien
taatgagtactgttatgagtctggc

SEQ ID NO: 189558 - DNA, 25 bp, Homo sapien
caatgtgtttgttcagacctgtggg

SEQ ID NO: 189559 - DNA, 25 bp, Homo sapien
cccgagctttggttaaataatcatg

SEQ ID NO: 189560 - DNA, 25 bp, Homo sapien
cgttacagtaggttccagttagttg

SEQ ID NO: 189561 - DNA, 25 bp, Homo sapien
tgtggtcactcatctccaaagctgg

SEQ ID NO: 189562 - DNA, 25 bp, Homo sapien
cagttagttgaagtgtagtcaaccc

SEQ ID NO: 189563 - DNA, 25 bp, Homo sapien
ttggtgtattctctagtgatggctt

SEQ ID NO: 189564 - DNA, 25 bp, Homo sapien
tggtgtattctctagtgatggcttc

SEQ ID NO: 189565 - DNA, 25 bp, Homo sapien
actggtacagaagggccctcaaggc

SEQ ID NO: 189566 - DNA, 25 bp, Homo sapien
gatcttgagaaaggtaccgctcatc

SEQ ID NO: 189567 - DNA, 25 bp, Homo sapien
gggatcttgagaaaggtaccgctca

SEQ ID NO: 189568 - DNA, 25 bp, Homo sapien
ctcactggtacagaagggccctcaa

SEQ ID NO: 189569 - DNA, 25 bp, Homo sapien
aagcttctaccatgatacacttgag

SEQ ID NO: 189570 - DNA, 25 bp, Homo sapien
atacaaattgtaggatgaagttaaa

SEQ ID NO: 189571 - DNA, 25 bp, Homo sapien
tgaagttaaatgtttagagggacat

SEQ ID NO: 189572 - DNA, 25 bp, Homo sapien
tggccttaaagaacttaagcttcta

SEQ ID NO: 189573 - DNA, 25 bp, Homo sapien
taaccatggtagtacagatatctca

SEQ ID NO: 189574 - DNA, 25 bp, Homo sapien
tactcatctattggtggacactcag

SEQ ID NO: 189575 - DNA, 25 bp, Homo sapien
ggctccaaacatatgtgaagaacag

SEQ ID NO: 189576 - DNA, 25 bp, Homo sapien
ggtgacactcccattccagcattag

SEQ ID NO: 189577 - DNA, 25 bp, Homo sapien
cctaaagagcccctgagtagtggaa

SEQ ID NO: 189578 - DNA, 25 bp, Homo sapien
tgtagaagctaatggcagcataagc

SEQ ID NO: 189579 - DNA, 25 bp, Homo sapien
gcataagccattctagacaactagg

SEQ ID NO: 189580 - DNA, 25 bp, Homo sapien
caattttggccgcatgtgaaaggtg

SEQ ID NO: 189581 - DNA, 25 bp, Homo sapien
aaataactgcttgacagctgtgatg

SEQ ID NO: 189582 - DNA, 25 bp, Homo sapien
tctgctgctcatgctgtatgtgtca

SEQ ID NO: 189583 - DNA, 25 bp, Homo sapien
tgtaaataactgcttgacagctgtg

SEQ ID NO: 189584 - DNA, 25 bp, Homo sapien
gctgtatgtgtcataagctttagta

SEQ ID NO: 189585 - DNA, 25 bp, Homo sapien
tagattacggctgggtctacctttc

SEQ ID NO: 189586 - DNA, 25 bp, Homo sapien
ttctgcctactttatcttctagctg

SEQ ID NO: 189587 - DNA, 25 bp, Homo sapien
caaggatagtgagtcccagtcccaa

SEQ ID NO: 189588 - DNA, 25 bp, Homo sapien
taaccatcacagtggtagactccct

SEQ ID NO: 189589 - DNA, 25 bp, Homo sapien
gcttgggcaacgtgtcgagactcca

SEQ ID NO: 189590 - DNA, 25 bp, Homo sapien
cttgggcaacgtgtcgagactccat

SEQ ID NO: 189591 - DNA, 25 bp, Homo sapien
aagattgttcaagccctggagtttg

SEQ ID NO: 189592 - DNA, 25 bp, Homo sapien
caagtgaattgagttggtgccactg

SEQ ID NO: 189593 - DNA, 25 bp, Homo sapien
cgagcctgcaagtgaattgagttgg

SEQ ID NO: 189594 - DNA, 25 bp, Homo sapien
gaggtcgagcctgcaagtgaattga

SEQ ID NO: 189595 - DNA, 25 bp, Homo sapien
gaggtggtatgggtcacctgagcct

SEQ ID NO: 189596 - DNA, 25 bp, Homo sapien
tacattgagtcaccaaatgaaggaa

SEQ ID NO: 189597 - DNA, 25 bp, Homo sapien
cagtctgaatacattgagtcaccaa

SEQ ID NO: 189598 - DNA, 25 bp, Homo sapien
gatatgacccagtctgaatacattg

SEQ ID NO: 189599 - DNA, 25 bp, Homo sapien
caaatgaaggaattttttctgtgac

SEQ ID NO: 189600 - DNA, 25 bp, Homo sapien
taagatttggatgcccatgtgctgg

SEQ ID NO: 189601 - DNA, 25 bp, Homo sapien
gggtttcccctcatgacagtaccaa

SEQ ID NO: 189602 - DNA, 25 bp, Homo sapien
gatctgcgcaactgagtctgccaaa

SEQ ID NO: 189603 - DNA, 25 bp, Homo sapien
ggaagaccaaatttcaaccgatctg

SEQ ID NO: 189604 - DNA, 25 bp, Homo sapien
tcttcaatctgtgatatctttcttc

SEQ ID NO: 189605 - DNA, 25 bp, Homo sapien
tcaatctgtgatatctttcttccac

SEQ ID NO: 189606 - DNA, 25 bp, Homo sapien
ccttctgacagaccactctgctgca

SEQ ID NO: 189607 - DNA, 25 bp, Homo sapien
ggtgaggcattctggtgttagaaat

SEQ ID NO: 189608 - DNA, 25 bp, Homo sapien
tttgcattaatctccctgggagctg

SEQ ID NO: 189609 - DNA, 25 bp, Homo sapien
ttgcattaatctccctgggagctgt

SEQ ID NO: 189610 - DNA, 25 bp, Homo sapien
ttttgcattaatctccctgggagct

SEQ ID NO: 189611 - DNA, 25 bp, Homo sapien
tgcttcaggacgataatgaaactaa

SEQ ID NO: 189612 - DNA, 25 bp, Homo sapien
acttgcttagcggttttgtgattca

SEQ ID NO: 189613 - DNA, 25 bp, Homo sapien
aaaagctgtcagtgaacaggatgag

SEQ ID NO: 189614 - DNA, 25 bp, Homo sapien
tcacatttggcgaggcaagtacaat

SEQ ID NO: 189615 - DNA, 25 bp, Homo sapien
gaaaagccaagtcatcatccaacac

SEQ ID NO: 189616 - DNA, 25 bp, Homo sapien
ggttggcttcgatagtcatgttcag

SEQ ID NO: 189617 - DNA, 25 bp, Homo sapien
tatcaaatgctctgagtaggttggc

SEQ ID NO: 189618 - DNA, 25 bp, Homo sapien
tctggacttagggaaagcacttagg

SEQ ID NO: 189619 - DNA, 25 bp, Homo sapien
cacaacagtcttcactcacaggcag

SEQ ID NO: 189620 - DNA, 25 bp, Homo sapien
tgttccctctcagtgcagtcttaag

SEQ ID NO: 189621 - DNA, 25 bp, Homo sapien
ggtctctccagttgacttttccaca

SEQ ID NO: 189622 - DNA, 25 bp, Homo sapien
agtcttaagcctaattcctcttctg

SEQ ID NO: 189623 - DNA, 25 bp, Homo sapien
caatggtggtacatgggtacttttc

SEQ ID NO: 189624 - DNA, 25 bp, Homo sapien
ttcttccaatggtggtacatgggta

SEQ ID NO: 189625 - DNA, 25 bp, Homo sapien
atttcttccaatggtggtacatggg

SEQ ID NO: 189626 - DNA, 25 bp, Homo sapien
cttccaatggtggtacatgggtact

SEQ ID NO: 189627 - DNA, 25 bp, Homo sapien
aatttcccatgcattagtcacttag

SEQ ID NO: 189628 - DNA, 25 bp, Homo sapien
tgctccataaacattcatgttattg

SEQ ID NO: 189629 - DNA, 25 bp, Homo sapien
tgtgcgtttactatatgccaaactt

SEQ ID NO: 189630 - DNA, 25 bp, Homo sapien
aagggagacaatgaaagtaaagtgc

SEQ ID NO: 189631 - DNA, 25 bp, Homo sapien
tgggcttcccattaatctcagagga

SEQ ID NO: 189632 - DNA, 25 bp, Homo sapien
cactctatctcttaaggagctgtga

SEQ ID NO: 189633 - DNA, 25 bp, Homo sapien
gtagtcctcagcaataacttagccc

SEQ ID NO: 189634 - DNA, 25 bp, Homo sapien
tggaatgaccttaattctcgctttg

SEQ ID NO: 189635 - DNA, 25 bp, Homo sapien
ggtgcacttctctgataggctgcca

SEQ ID NO: 189636 - DNA, 25 bp, Homo sapien
gccatttgttcccactcacctagag

SEQ ID NO: 189637 - DNA, 25 bp, Homo sapien
cctagagagcttgtggatagcctga

SEQ ID NO: 189638 - DNA, 25 bp, Homo sapien
caactgtgcaattgtcctgggtgca

SEQ ID NO: 189639 - DNA, 25 bp, Homo sapien
tgcagagcaaaaaaggtccatccac

SEQ ID NO: 189640 - DNA, 25 bp, Homo sapien
tccacttcacttgtgttgcctcctg

SEQ ID NO: 189641 - DNA, 25 bp, Homo sapien
tttttcaatactatgaaatgatgca

SEQ ID NO: 189642 - DNA, 25 bp, Homo sapien
aaggtccatccacttcacttgtgtt

SEQ ID NO: 189643 - DNA, 25 bp, Homo sapien
gaacaatacgggcatgcaaacaccg

SEQ ID NO: 189644 - DNA, 25 bp, Homo sapien
tgcaagggtctttacgttctaggaa

SEQ ID NO: 189645 - DNA, 25 bp, Homo sapien
tgaaaatgctttcgggaactggtgg

SEQ ID NO: 189646 - DNA, 25 bp, Homo sapien
actggtggcgccgtgcacgtgcatc

SEQ ID NO: 189647 - DNA, 25 bp, Homo sapien
gggtacacccgcatagctagccagg

SEQ ID NO: 189648 - DNA, 25 bp, Homo sapien
gcatagctagccaggttggcagcca

SEQ ID NO: 189649 - DNA, 25 bp, Homo sapien
cccgcatagctagccaggttggcag

SEQ ID NO: 189650 - DNA, 25 bp, Homo sapien
tacacccgcatagctagccaggttg

SEQ ID NO: 189651 - DNA, 25 bp, Homo sapien
gatctttatcaagtccctgtgccgt

SEQ ID NO: 189652 - DNA, 25 bp, Homo sapien
caaaagcatatgaggtagacatgat

SEQ ID NO: 189653 - DNA, 25 bp, Homo sapien
gtcatgaacttcaattctgctggcc

SEQ ID NO: 189654 - DNA, 25 bp, Homo sapien
cactgagttcaagtacaggatcttt

SEQ ID NO: 189655 - DNA, 25 bp, Homo sapien
tcattcttccaacacgaaccagaca

SEQ ID NO: 189656 - DNA, 25 bp, Homo sapien
cctcattcttccaacacgaaccaga

SEQ ID NO: 189657 - DNA, 25 bp, Homo sapien
caccctcattcttccaacacgaacc

SEQ ID NO: 189658 - DNA, 25 bp, Homo sapien
attcttccaacacgaaccagacagg

SEQ ID NO: 189659 - DNA, 25 bp, Homo sapien
tggggttttcgataagtgcctcatc

SEQ ID NO: 189660 - DNA, 25 bp, Homo sapien
ggttttcgataagtgcctcatcagt

SEQ ID NO: 189661 - DNA, 25 bp, Homo sapien
tgtggggttttcgataagtgcctca

SEQ ID NO: 189662 - DNA, 25 bp, Homo sapien
tgatgtggggttttcgataagtgcc

SEQ ID NO: 189663 - DNA, 25 bp, Homo sapien
tcatgctcgtgttgctccgccgcgg

SEQ ID NO: 189664 - DNA, 25 bp, Homo sapien
ctcaggcgcgcacagtaatatgcaa

SEQ ID NO: 189665 - DNA, 25 bp, Homo sapien
ttgtaattgcccgaatctgctcccg

SEQ ID NO: 189666 - DNA, 25 bp, Homo sapien
gccgcggcgtgtgccctgacttgat

SEQ ID NO: 189667 - DNA, 25 bp, Homo sapien
tttgatgttatatttctctgtatta

SEQ ID NO: 189668 - DNA, 25 bp, Homo sapien
tattttgatgttatatttctctgta

SEQ ID NO: 189669 - DNA, 25 bp, Homo sapien
tgatgttatatttctctgtattagg

SEQ ID NO: 189670 - DNA, 25 bp, Homo sapien
atgttatatttctctgtattaggtg

SEQ ID NO: 189671 - DNA, 25 bp, Homo sapien
gaacgaactgaacctgtggacaggg

SEQ ID NO: 189672 - DNA, 25 bp, Homo sapien
cttagaacgaactgaacctgtggac

SEQ ID NO: 189673 - DNA, 25 bp, Homo sapien
taagatgatttcttagaacgaactg

SEQ ID NO: 189674 - DNA, 25 bp, Homo sapien
gatttcttagaacgaactgaacctg

SEQ ID NO: 189675 - DNA, 25 bp, Homo sapien
tctggaccgttcttcactctcaagg

SEQ ID NO: 189676 - DNA, 25 bp, Homo sapien
ttgcaaggcttttcagatctggacc

SEQ ID NO: 189677 - DNA, 25 bp, Homo sapien
taacgtgccactctgatcgggccat

SEQ ID NO: 189678 - DNA, 25 bp, Homo sapien
gagcatagtgatccattctgcacac

SEQ ID NO: 189679 - DNA, 25 bp, Homo sapien
cccaagttgagaatatgaactcctg

SEQ ID NO: 189680 - DNA, 25 bp, Homo sapien
gaactcctgttccagattttgaatc

SEQ ID NO: 189681 - DNA, 25 bp, Homo sapien
tcataaggatcaaacaagggatact

SEQ ID NO: 189682 - DNA, 25 bp, Homo sapien
tactggaagcaaagagctacgtcag

SEQ ID NO: 189683 - DNA, 25 bp, Homo sapien
gaagaggttcggccccatctggccc

SEQ ID NO: 189684 - DNA, 25 bp, Homo sapien
ggccccagctgactgagacgcctgg

SEQ ID NO: 189685 - DNA, 25 bp, Homo sapien
actgagacgcctggtcacactgagt

SEQ ID NO: 189686 - DNA, 25 bp, Homo sapien
cagctgactgagacgcctggtcaca

SEQ ID NO: 189687 - DNA, 25 bp, Homo sapien
gctgcaagctggactcatgtgaaaa

SEQ ID NO: 189688 - DNA, 25 bp, Homo sapien
tatatatccgttgaattaataacag

SEQ ID NO: 189689 - DNA, 25 bp, Homo sapien
gaaaaaagatgtaccagcacttgta

SEQ ID NO: 189690 - DNA, 25 bp, Homo sapien
gaaaaacaagttcatacacatgcat

SEQ ID NO: 189691 - DNA, 25 bp, Homo sapien
cttgattttctgaggagggcttgtt

SEQ ID NO: 189692 - DNA, 25 bp, Homo sapien
tttctcatcaagttcagccagtgaa

SEQ ID NO: 189693 - DNA, 25 bp, Homo sapien
tttgagggcactaattttctcatca

SEQ ID NO: 189694 - DNA, 25 bp, Homo sapien
aaggtggtgggttgccatggattct

SEQ ID NO: 189695 - DNA, 25 bp, Homo sapien
taccaataccaattactgtctgtaa

SEQ ID NO: 189696 - DNA, 25 bp, Homo sapien
attatgtacagccttgggaaccctg

SEQ ID NO: 189697 - DNA, 25 bp, Homo sapien
caaattatgtacagccttgggaacc

SEQ ID NO: 189698 - DNA, 25 bp, Homo sapien
caacatctaccttatattctgcaag

SEQ ID NO: 189699 - DNA, 25 bp, Homo sapien
ccatcctagggtattgaacaagtga

SEQ ID NO: 189700 - DNA, 25 bp, Homo sapien
aaaacggaatctggtatatgaggcc

SEQ ID NO: 189701 - DNA, 25 bp, Homo sapien
aatggcttcccggtcttgtcagtga

SEQ ID NO: 189702 - DNA, 25 bp, Homo sapien
tactgccgtattgggtaagacacct

SEQ ID NO: 189703 - DNA, 25 bp, Homo sapien
tctaccgtggatacactagattaac

SEQ ID NO: 189704 - DNA, 25 bp, Homo sapien
tataaggaaatctcagtacagttcc

SEQ ID NO: 189705 - DNA, 25 bp, Homo sapien
tcctgggctagtgacatgtgatacg

SEQ ID NO: 189706 - DNA, 25 bp, Homo sapien
aataaggtcatcagtcgctcagtga

SEQ ID NO: 189707 - DNA, 25 bp, Homo sapien
tctatccaattgtaagaagctcccc

SEQ ID NO: 189708 - DNA, 25 bp, Homo sapien
caatccttaataaactgaatgggct

SEQ ID NO: 189709 - DNA, 25 bp, Homo sapien
tgctacgcttcaatgttacccatga

SEQ ID NO: 189710 - DNA, 25 bp, Homo sapien
gaatgggctcaactttcctttccta

SEQ ID NO: 189711 - DNA, 25 bp, Homo sapien
caagtgaggttcctaaagatggctc

SEQ ID NO: 189712 - DNA, 25 bp, Homo sapien
tcttctttcccatagggcttgtgtc

SEQ ID NO: 189713 - DNA, 25 bp, Homo sapien
cactcttagagctgactgtattcca

SEQ ID NO: 189714 - DNA, 25 bp, Homo sapien
taaggtatgtgctcaacttctcctg

SEQ ID NO: 189715 - DNA, 25 bp, Homo sapien
tgattttaccatactctattgtaag

SEQ ID NO: 189716 - DNA, 25 bp, Homo sapien
gcaagttctcattggaggcatctga

SEQ ID NO: 189717 - DNA, 25 bp, Homo sapien
acaaggtatgaaattgaactagaaa

SEQ ID NO: 189718 - DNA, 25 bp, Homo sapien
aagatcggttctatcgttaataaga

SEQ ID NO: 189719 - DNA, 25 bp, Homo sapien
tatttttaaaagacacttatactca

SEQ ID NO: 189720 - DNA, 25 bp, Homo sapien
caggagagatgccttccaattcaag

SEQ ID NO: 189721 - DNA, 25 bp, Homo sapien
tgataaatgtctcttggcactggac

SEQ ID NO: 189722 - DNA, 25 bp, Homo sapien
taaatgtctcttggcactggaccac

SEQ ID NO: 189723 - DNA, 25 bp, Homo sapien
ggagagatgccttccaattcaagga

SEQ ID NO: 189724 - DNA, 25 bp, Homo sapien
gtaacgcaggcactgccgaaacctc

SEQ ID NO: 189725 - DNA, 25 bp, Homo sapien
tgccgaaacctcttcattcgcataa

SEQ ID NO: 189726 - DNA, 25 bp, Homo sapien
taacgcaggcactgccgaaacctct

SEQ ID NO: 189727 - DNA, 25 bp, Homo sapien
tcttcattcgcataaaggctccttg

SEQ ID NO: 189728 - DNA, 25 bp, Homo sapien
gagtgactggcacttactgttcaag

SEQ ID NO: 189729 - DNA, 25 bp, Homo sapien
caccatctcaaaagggtactatgac

SEQ ID NO: 189730 - DNA, 25 bp, Homo sapien
ggttcattatgaggtgccacttagc

SEQ ID NO: 189731 - DNA, 25 bp, Homo sapien
tttgcttgggctctttaaacttcaa

SEQ ID NO: 189732 - DNA, 25 bp, Homo sapien
tgtctgtaaccgcaagtgggcctca

SEQ ID NO: 189733 - DNA, 25 bp, Homo sapien
ttgtagtcgttcttctacagcctga

SEQ ID NO: 189734 - DNA, 25 bp, Homo sapien
gcctgattaccacagtctcgaagca

SEQ ID NO: 189735 - DNA, 25 bp, Homo sapien
agtgggcctcaatattttgtagtcg

SEQ ID NO: 189736 - DNA, 25 bp, Homo sapien
tcaggtctagtctgtggtccgtatg

SEQ ID NO: 189737 - DNA, 25 bp, Homo sapien
tatgacctgaccctggaattccttc

SEQ ID NO: 189738 - DNA, 25 bp, Homo sapien
gctgttaggtttatgacctgaccct

SEQ ID NO: 189739 - DNA, 25 bp, Homo sapien
tctgtggtccgtatgtattcacaac

SEQ ID NO: 189740 - DNA, 25 bp, Homo sapien
aggggtaaaaatcgcatcagttctt

SEQ ID NO: 189741 - DNA, 25 bp, Homo sapien
gggtaaaaatcgcatcagttcttgc

SEQ ID NO: 189742 - DNA, 25 bp, Homo sapien
taaggggtaaaaatcgcatcagttc

SEQ ID NO: 189743 - DNA, 25 bp, Homo sapien
ggtaaaaatcgcatcagttcttgca

SEQ ID NO: 189744 - DNA, 25 bp, Homo sapien
ccttagtagttctgttgataaatca

SEQ ID NO: 189745 - DNA, 25 bp, Homo sapien
ttttggaggcacctcaaaatatgct

SEQ ID NO: 189746 - DNA, 25 bp, Homo sapien
tgcttaaagggccatcctttctcca

SEQ ID NO: 189747 - DNA, 25 bp, Homo sapien
gagactaaatagacatctttcctcc

SEQ ID NO: 189748 - DNA, 25 bp, Homo sapien
ctatcccctggtggtttataataat

SEQ ID NO: 189749 - DNA, 25 bp, Homo sapien
tccacagcaattcttgctagcactg

SEQ ID NO: 189750 - DNA, 25 bp, Homo sapien
ttgaatgggccaaggaatcctgctg

SEQ ID NO: 189751 - DNA, 25 bp, Homo sapien
gcatggtgtgagtgtatgactgcta

SEQ ID NO: 189752 - DNA, 25 bp, Homo sapien
gattttgccattgttgcacctgttc

SEQ ID NO: 189753 - DNA, 25 bp, Homo sapien
gcttgtagttggttgtagtacctga

SEQ ID NO: 189754 - DNA, 25 bp, Homo sapien
tcatagtcgcttgtagttggttgta

SEQ ID NO: 189755 - DNA, 25 bp, Homo sapien
gccattgttgcacctgttctgaaaa

SEQ ID NO: 189756 - DNA, 25 bp, Homo sapien
gacatttcaaacagctcaggagtag

SEQ ID NO: 189757 - DNA, 25 bp, Homo sapien
ccatgagatattagaggcaacaaga

SEQ ID NO: 189758 - DNA, 25 bp, Homo sapien
taaattggttgtatcgtgacacagg

SEQ ID NO: 189759 - DNA, 25 bp, Homo sapien
tatggtgcctgagtataatctatgg

SEQ ID NO: 189760 - DNA, 25 bp, Homo sapien
taaatgcagatattcgtctgtcaat

SEQ ID NO: 189761 - DNA, 25 bp, Homo sapien
ataaatgcagatattcgtctgtcaa

SEQ ID NO: 189762 - DNA, 25 bp, Homo sapien
ttcttcctcttgtaggtcgccaatg

SEQ ID NO: 189763 - DNA, 25 bp, Homo sapien
cttgtaggtcgccaatggaaaattt

SEQ ID NO: 189764 - DNA, 25 bp, Homo sapien
cttcctcttgtaggtcgccaatgga

SEQ ID NO: 189765 - DNA, 25 bp, Homo sapien
cctcttgtaggtcgccaatggaaaa

SEQ ID NO: 189766 - DNA, 25 bp, Homo sapien
cctctttaatcggagactgaagttt

SEQ ID NO: 189767 - DNA, 25 bp, Homo sapien
ttctcctctttaatcggagactgaa

SEQ ID NO: 189768 - DNA, 25 bp, Homo sapien
ttcaacagcagttgtattctcctct

SEQ ID NO: 189769 - DNA, 25 bp, Homo sapien
ctcctctttaatcggagactgaagt

SEQ ID NO: 189770 - DNA, 25 bp, Homo sapien
tcaccacatcatctctgaggtcaag

SEQ ID NO: 189771 - DNA, 25 bp, Homo sapien
gagaggctctggagcttgttccaat

SEQ ID NO: 189772 - DNA, 25 bp, Homo sapien
tccaatcgattgtaattttcaccac

SEQ ID NO: 189773 - DNA, 25 bp, Homo sapien
caatgcaggctggaatgccgagagg

SEQ ID NO: 189774 - DNA, 25 bp, Homo sapien
caacgatacttagggatgacacagg

SEQ ID NO: 189775 - DNA, 25 bp, Homo sapien
tttagcttggtaagatggaccatcc

SEQ ID NO: 189776 - DNA, 25 bp, Homo sapien
gaagttaggcatgttacaacataca

SEQ ID NO: 189777 - DNA, 25 bp, Homo sapien
gcattttgccctacagaacttggaa

SEQ ID NO: 189778 - DNA, 25 bp, Homo sapien
gctttgtccacttgcgctagtacca

SEQ ID NO: 189779 - DNA, 25 bp, Homo sapien
gacttgatcgaagaagcccatttca

SEQ ID NO: 189780 - DNA, 25 bp, Homo sapien
tctgcaaaagcgatttatcagccag

SEQ ID NO: 189781 - DNA, 25 bp, Homo sapien
catgaaacgaaacagtgacttgatc

SEQ ID NO: 189782 - DNA, 25 bp, Homo sapien
tcctcactccgaccgaggaggctgg

SEQ ID NO: 189783 - DNA, 25 bp, Homo sapien
aaaggaccctgaacgctaagcgcct

SEQ ID NO: 189784 - DNA, 25 bp, Homo sapien
taagcgcctcctaaactcgcagtga

SEQ ID NO: 189785 - DNA, 25 bp, Homo sapien
ggacagctgcaaggtaaacgactct

SEQ ID NO: 189786 - DNA, 25 bp, Homo sapien
ccggatggtttccatattcccagtc

SEQ ID NO: 189787 - DNA, 25 bp, Homo sapien
gagaaaaagaatggcgaggagggac

SEQ ID NO: 189788 - DNA, 25 bp, Homo sapien
gaaagatttcgtagagcacctctcg

SEQ ID NO: 189789 - DNA, 25 bp, Homo sapien
ggagcgaaagatttcgtagagcacc

SEQ ID NO: 189790 - DNA, 25 bp, Homo sapien
tgtgtagggagcgaaagatttcgta

SEQ ID NO: 189791 - DNA, 25 bp, Homo sapien
tcgtagagcacctctcgggagaggt

SEQ ID NO: 189792 - DNA, 25 bp, Homo sapien
ctgcatcttcgctccaggttcctgt

SEQ ID NO: 189793 - DNA, 25 bp, Homo sapien
gattaagctccgtggcagcagccat

SEQ ID NO: 189794 - DNA, 25 bp, Homo sapien
aggttcctgtcaccgctgctcgggc

SEQ ID NO: 189795 - DNA, 25 bp, Homo sapien
gctgctcgggcgattaagctccgtg

SEQ ID NO: 189796 - DNA, 25 bp, Homo sapien
caccaccaagatttgctcacaaccc

SEQ ID NO: 189797 - DNA, 25 bp, Homo sapien
caccaccaccaagatttgctcacaa

SEQ ID NO: 189798 - DNA, 25 bp, Homo sapien
ccaccaagatttgctcacaaccccg

SEQ ID NO: 189799 - DNA, 25 bp, Homo sapien
accaagatttgctcacaaccccgcc

SEQ ID NO: 189800 - DNA, 25 bp, Homo sapien
gaaggcctagacaccaagagatcag

SEQ ID NO: 189801 - DNA, 25 bp, Homo sapien
gaaaattaacctgatggcggcttgt

SEQ ID NO: 189802 - DNA, 25 bp, Homo sapien
tagagttcagaattgcaggccctgg

SEQ ID NO: 189803 - DNA, 25 bp, Homo sapien
ctctagaggtgaagtgataagggcc

SEQ ID NO: 189804 - DNA, 25 bp, Homo sapien
cctctttgctttcaagccccttttg

SEQ ID NO: 189805 - DNA, 25 bp, Homo sapien
tctttgctttcaagccccttttgaa

SEQ ID NO: 189806 - DNA, 25 bp, Homo sapien
agatgaccaagggttgacctccacc

SEQ ID NO: 189807 - DNA, 25 bp, Homo sapien
gacctccaccctgagattggaatag

SEQ ID NO: 189808 - DNA, 25 bp, Homo sapien
tcttgaccacatctgaggatagaat

SEQ ID NO: 189809 - DNA, 25 bp, Homo sapien
ggaatagattggacatggctccagg

SEQ ID NO: 189810 - DNA, 25 bp, Homo sapien
gatctggctctgtatactccaatgt

SEQ ID NO: 189811 - DNA, 25 bp, Homo sapien
ctacagatctggctctgtatactcc

SEQ ID NO: 189812 - DNA, 25 bp, Homo sapien
agatctggctctgtatactccaatg

SEQ ID NO: 189813 - DNA, 25 bp, Homo sapien
acagatctggctctgtatactccaa

SEQ ID NO: 189814 - DNA, 25 bp, Homo sapien
cacaggacttttccgtaactgctaa

SEQ ID NO: 189815 - DNA, 25 bp, Homo sapien
ttcacaggacttttccgtaactgct

SEQ ID NO: 189816 - DNA, 25 bp, Homo sapien
acaggacttttccgtaactgctaag

SEQ ID NO: 189817 - DNA, 25 bp, Homo sapien
atttcacaggacttttccgtaactg

SEQ ID NO: 189818 - DNA, 25 bp, Homo sapien
gggagttgcagatttgtgttaccag

SEQ ID NO: 189819 - DNA, 25 bp, Homo sapien
tttgtgttaccagagacagatgaca

SEQ ID NO: 189820 - DNA, 25 bp, Homo sapien
tgcagatttgtgttaccagagacag

SEQ ID NO: 189821 - DNA, 25 bp, Homo sapien
cagatgacaaaatctaacagctgat

SEQ ID NO: 189822 - DNA, 25 bp, Homo sapien
cagttgaatttgtgttaagtctgca

SEQ ID NO: 189823 - DNA, 25 bp, Homo sapien
tgtgcctgtatcttctgacaggctg

SEQ ID NO: 189824 - DNA, 25 bp, Homo sapien
tgtgttaagtctgcaaatactgact

SEQ ID NO: 189825 - DNA, 25 bp, Homo sapien
tactgacttaatgtgcctgtatctt

SEQ ID NO: 189826 - DNA, 25 bp, Homo sapien
aagaagactttggggaccatcctca

SEQ ID NO: 189827 - DNA, 25 bp, Homo sapien
agaagactttggggaccatcctcac

SEQ ID NO: 189828 - DNA, 25 bp, Homo sapien
taagaagactttggggaccatcctc

SEQ ID NO: 189829 - DNA, 25 bp, Homo sapien
aatcctctgtttggttgtcactgtt

SEQ ID NO: 189830 - DNA, 25 bp, Homo sapien
gcactgcttgcaaaatcctctgttt

SEQ ID NO: 189831 - DNA, 25 bp, Homo sapien
aaatcctctgtttggttgtcactgt

SEQ ID NO: 189832 - DNA, 25 bp, Homo sapien
gaaaagatgaactgggcccatcaga

SEQ ID NO: 189833 - DNA, 25 bp, Homo sapien
gcaagggtggcccacccataggcca

SEQ ID NO: 189834 - DNA, 25 bp, Homo sapien
gccctatgaagtgccctagcttgaa

SEQ ID NO: 189835 - DNA, 25 bp, Homo sapien
tagcttgaaaagatgaactgggccc

SEQ ID NO: 189836 - DNA, 25 bp, Homo sapien
acctcagggtacaggactcctacat

SEQ ID NO: 189837 - DNA, 25 bp, Homo sapien
agccaggagcatccaaaagctgatg

SEQ ID NO: 189838 - DNA, 25 bp, Homo sapien
ccaggagcatccaaaagctgatggg

SEQ ID NO: 189839 - DNA, 25 bp, Homo sapien
gtacaggactcctacattctcacag

SEQ ID NO: 189840 - DNA, 25 bp, Homo sapien
gaaggaataataggcaagtgggtgg

SEQ ID NO: 189841 - DNA, 25 bp, Homo sapien
tttgctaagcaacttccctgctgct

SEQ ID NO: 189842 - DNA, 25 bp, Homo sapien
taatgtctactttgttcttgtgtca

SEQ ID NO: 189843 - DNA, 25 bp, Homo sapien
catgtcacaggcgaggaaggaataa

SEQ ID NO: 189844 - DNA, 25 bp, Homo sapien
tgctgaggtgtcgatatgatcatca

SEQ ID NO: 189845 - DNA, 25 bp, Homo sapien
gttggcacctgggaagcacttgttg

SEQ ID NO: 189846 - DNA, 25 bp, Homo sapien
tgaggtgtcgatatgatcatcaaaa

SEQ ID NO: 189847 - DNA, 25 bp, Homo sapien
gcacctgggaagcacttgttgctga

SEQ ID NO: 189848 - DNA, 25 bp, Homo sapien
tcgcctgtgatcaacacttcgtgtg

SEQ ID NO: 189849 - DNA, 25 bp, Homo sapien
tgtgacagaattctgagcttctcca

SEQ ID NO: 189850 - DNA, 25 bp, Homo sapien
aatcaacaggattttggtatgtgac

SEQ ID NO: 189851 - DNA, 25 bp, Homo sapien
ttctccacgagctattgcaaagatg

SEQ ID NO: 189852 - DNA, 25 bp, Homo sapien
tagtgaactagctcctggtgcagag

SEQ ID NO: 189853 - DNA, 25 bp, Homo sapien
aattccattccgtgtccccacgtag

SEQ ID NO: 189854 - DNA, 25 bp, Homo sapien
tgctgggtgcatacctaggaagcat

SEQ ID NO: 189855 - DNA, 25 bp, Homo sapien
aaggaggacggcagagcagcgtggg

SEQ ID NO: 189856 - DNA, 25 bp, Homo sapien
taagtaagccagagtgctgcagccc

SEQ ID NO: 189857 - DNA, 25 bp, Homo sapien
tgagaaggccctccaaactcaggag

SEQ ID NO: 189858 - DNA, 25 bp, Homo sapien
aaaagtgccacttccaacaagaggg

SEQ ID NO: 189859 - DNA, 25 bp, Homo sapien
gatgatagctcttagccaggccaag

SEQ ID NO: 189860 - DNA, 25 bp, Homo sapien
caagtaattcaatccctgacattaa

SEQ ID NO: 189861 - DNA, 25 bp, Homo sapien
tccctgacattaaacgtgcactgac

SEQ ID NO: 189862 - DNA, 25 bp, Homo sapien
ccctgacattaaacgtgcactgact

SEQ ID NO: 189863 - DNA, 25 bp, Homo sapien
accacttccaagtaattcaatccct

SEQ ID NO: 189864 - DNA, 25 bp, Homo sapien
tatctcagcatacaaccctgacgag

SEQ ID NO: 189865 - DNA, 25 bp, Homo sapien
gaatgctgtaagtgccttaaacacg

SEQ ID NO: 189866 - DNA, 25 bp, Homo sapien
tctatccattcaaaggctctagcag

SEQ ID NO: 189867 - DNA, 25 bp, Homo sapien
tccttcggcatgtaggctgaggcct

SEQ ID NO: 189868 - DNA, 25 bp, Homo sapien
agcttgacgccctagcacctgcttt

SEQ ID NO: 189869 - DNA, 25 bp, Homo sapien
cattgactattagcttgacgcccta

SEQ ID NO: 189870 - DNA, 25 bp, Homo sapien
gactattagcttgacgccctagcac

SEQ ID NO: 189871 - DNA, 25 bp, Homo sapien
cgtggcacacattgactattagctt

SEQ ID NO: 189872 - DNA, 25 bp, Homo sapien
ttatttcttggtccaagagtcttgg

SEQ ID NO: 189873 - DNA, 25 bp, Homo sapien
cttggcgaagctggcctgcgtcaca

SEQ ID NO: 189874 - DNA, 25 bp, Homo sapien
agtcttggcgaagctggcctgcgtc

SEQ ID NO: 189875 - DNA, 25 bp, Homo sapien
tccaagagtcttggcgaagctggcc

SEQ ID NO: 189876 - DNA, 25 bp, Homo sapien
acttccagagctaggcatgccagca

SEQ ID NO: 189877 - DNA, 25 bp, Homo sapien
tcaccacttccagagctaggcatgc

SEQ ID NO: 189878 - DNA, 25 bp, Homo sapien
tatgtggtacttgcagagagtgctg

SEQ ID NO: 189879 - DNA, 25 bp, Homo sapien
gagtgctgtataaatccaggcttca

SEQ ID NO: 189880 - DNA, 25 bp, Homo sapien
agatgtagataagttcagtattcag

SEQ ID NO: 189881 - DNA, 25 bp, Homo sapien
cacacgtttgaataaatttatccag

SEQ ID NO: 189882 - DNA, 25 bp, Homo sapien
tgtgtgttttcccagtaccgttgca

SEQ ID NO: 189883 - DNA, 25 bp, Homo sapien
cccattaaactggtattgaggtata

SEQ ID NO: 189884 - DNA, 25 bp, Homo sapien
tgtcacattcataaaaaacatggtg

SEQ ID NO: 189885 - DNA, 25 bp, Homo sapien
gcactaattgggagtctcccgccat

SEQ ID NO: 189886 - DNA, 25 bp, Homo sapien
catggtgcactaattgggagtctcc

SEQ ID NO: 189887 - DNA, 25 bp, Homo sapien
taaaaaacatggtgcactaattggg

SEQ ID NO: 189888 - DNA, 25 bp, Homo sapien
cagattatcagtgttcagtatactc

SEQ ID NO: 189889 - DNA, 25 bp, Homo sapien
tcttcttataattaaaccaccatca

SEQ ID NO: 189890 - DNA, 25 bp, Homo sapien
ttgcatacaaatcagattatcagtg

SEQ ID NO: 189891 - DNA, 25 bp, Homo sapien
ccccgaagtaattgcatacaaatca

SEQ ID NO: 189892 - DNA, 25 bp, Homo sapien
aatataaaaatttcataagaactgc

SEQ ID NO: 189893 - DNA, 25 bp, Homo sapien
tactcataaaattttatttgaacaa

SEQ ID NO: 189894 - DNA, 25 bp, Homo sapien
aaatataaaaatttcataagaactg

SEQ ID NO: 189895 - DNA, 25 bp, Homo sapien
taaattctgtgttgacgtagacctc

SEQ ID NO: 189896 - DNA, 25 bp, Homo sapien
cgtagacctccattggtgttccaaa

SEQ ID NO: 189897 - DNA, 25 bp, Homo sapien
cacagaggtgaattagaagagtata

SEQ ID NO: 189898 - DNA, 25 bp, Homo sapien
tcctctccccaattaaggtgtctct

SEQ ID NO: 189899 - DNA, 25 bp, Homo sapien
gagcaaagcattctggacatcaatt

SEQ ID NO: 189900 - DNA, 25 bp, Homo sapien
aacttgtcaaaggacattgataaac

SEQ ID NO: 189901 - DNA, 25 bp, Homo sapien
tggctaagagcaaagcattctggac

SEQ ID NO: 189902 - DNA, 25 bp, Homo sapien
tgaatccatgaaatgatgcaataca

SEQ ID NO: 189903 - DNA, 25 bp, Homo sapien
cagcagggctgtatggactgttcct

SEQ ID NO: 189904 - DNA, 25 bp, Homo sapien
tcctggacttggcacgcaaacagcg

SEQ ID NO: 189905 - DNA, 25 bp, Homo sapien
gacacaggtgggtatccgcttttcc

SEQ ID NO: 189906 - DNA, 25 bp, Homo sapien
tgtgacagcgtcgtgggatgcagca

SEQ ID NO: 189907 - DNA, 25 bp, Homo sapien
ggcatgtctctcatcatggccaggg

SEQ ID NO: 189908 - DNA, 25 bp, Homo sapien
tggaagggccaacaattaaatgaat

SEQ ID NO: 189909 - DNA, 25 bp, Homo sapien
ccaatatgtttgtgcacgtgtgtcc

SEQ ID NO: 189910 - DNA, 25 bp, Homo sapien
gatgccattgatgatatgcccaata

SEQ ID NO: 189911 - DNA, 25 bp, Homo sapien
ttcctggaatctagatgggctctct

SEQ ID NO: 189912 - DNA, 25 bp, Homo sapien
agggcgggcgcccatgggacagctg

SEQ ID NO: 189913 - DNA, 25 bp, Homo sapien
gcgggcagacgaggcccacagggga

SEQ ID NO: 189914 - DNA, 25 bp, Homo sapien
cctggaatctagatgggctctcttg

SEQ ID NO: 189915 - DNA, 25 bp, Homo sapien
tcaaacacaactccaggctgactca

SEQ ID NO: 189916 - DNA, 25 bp, Homo sapien
gccaagcaagtggtggtcacagtac

SEQ ID NO: 189917 - DNA, 25 bp, Homo sapien
ttatggcaaacaggagtcaagaggg

SEQ ID NO: 189918 - DNA, 25 bp, Homo sapien
cagtaagctcttcaaaccagtgcca

SEQ ID NO: 189919 - DNA, 25 bp, Homo sapien
acagattaagggcaggattcgtcgg

SEQ ID NO: 189920 - DNA, 25 bp, Homo sapien
ttcagagggaacgagcagatcgcac

SEQ ID NO: 189921 - DNA, 25 bp, Homo sapien
gaggaggaaatacgtaacagagacc

SEQ ID NO: 189922 - DNA, 25 bp, Homo sapien
cattggttattatgctctggaggag

SEQ ID NO: 189923 - DNA, 25 bp, Homo sapien
tccatatgtccaggtgaagactgga

SEQ ID NO: 189924 - DNA, 25 bp, Homo sapien
taccctaaactcatttggaggtcca

SEQ ID NO: 189925 - DNA, 25 bp, Homo sapien
tggttctttgaacagtgtgtaacac

SEQ ID NO: 189926 - DNA, 25 bp, Homo sapien
catttggtgagtcttcacatcagta

SEQ ID NO: 189927 - DNA, 25 bp, Homo sapien
gaaggaatcagagctatgtggttct

SEQ ID NO: 189928 - DNA, 25 bp, Homo sapien
tggccactttaacctctgagatcca

SEQ ID NO: 189929 - DNA, 25 bp, Homo sapien
tgttccatgttctctatttcagcaa

SEQ ID NO: 189930 - DNA, 25 bp, Homo sapien
aatacacttggccactaaacccctg

SEQ ID NO: 189931 - DNA, 25 bp, Homo sapien
tcagagctgaggtgtactcttctcc

SEQ ID NO: 189932 - DNA, 25 bp, Homo sapien
ggaaactggcaagtcacagaagcta

SEQ ID NO: 189933 - DNA, 25 bp, Homo sapien
gggtggccctattatccctgttgta

SEQ ID NO: 189934 - DNA, 25 bp, Homo sapien
aatgacttgcctaggatctcacagc

SEQ ID NO: 189935 - DNA, 25 bp, Homo sapien
catctggattggacttgaagtttac

SEQ ID NO: 189936 - DNA, 25 bp, Homo sapien
aaagtggtagattctgatactgggt

SEQ ID NO: 189937 - DNA, 25 bp, Homo sapien
acaaagtggtagattctgatactgg

SEQ ID NO: 189938 - DNA, 25 bp, Homo sapien
caaagtggtagattctgatactggg

SEQ ID NO: 189939 - DNA, 25 bp, Homo sapien
aagtggtagattctgatactgggtt

SEQ ID NO: 189940 - DNA, 25 bp, Homo sapien
tacagaaaccgagtattcaagaaag

SEQ ID NO: 189941 - DNA, 25 bp, Homo sapien
aaagagaacctagctaagagacacc

SEQ ID NO: 189942 - DNA, 25 bp, Homo sapien
aagagacacctcttgcaatggaagt

SEQ ID NO: 189943 - DNA, 25 bp, Homo sapien
tgtgtaaattagtagaaagagtaac

SEQ ID NO: 189944 - DNA, 25 bp, Homo sapien
ctggaatgtagaaagagatgaactc

SEQ ID NO: 189945 - DNA, 25 bp, Homo sapien
gaaattgtcaattcccacctctact

SEQ ID NO: 189946 - DNA, 25 bp, Homo sapien
taaacagtacagcatcacctcacat

SEQ ID NO: 189947 - DNA, 25 bp, Homo sapien
gaatgatcatttgtgaacccctcat

SEQ ID NO: 189948 - DNA, 25 bp, Homo sapien
cgagctctccggaggttcgatggcc

SEQ ID NO: 189949 - DNA, 25 bp, Homo sapien
tcagcccctgtgaagacgctttggg

SEQ ID NO: 189950 - DNA, 25 bp, Homo sapien
gcggccagcgccttagaagagcctg

SEQ ID NO: 189951 - DNA, 25 bp, Homo sapien
gatgaagaagtcaagcctcgagctc

SEQ ID NO: 189952 - DNA, 25 bp, Homo sapien
tgcggcagagcgtgcagtcagctca

SEQ ID NO: 189953 - DNA, 25 bp, Homo sapien
gctctggaagcgtctgttgggacca

SEQ ID NO: 189954 - DNA, 25 bp, Homo sapien
ggcatatccagttccttagacattg

SEQ ID NO: 189955 - DNA, 25 bp, Homo sapien
aactttgcgaggttcgctttacaca

SEQ ID NO: 189956 - DNA, 25 bp, Homo sapien
tatctggatcgcctgagaagagact

SEQ ID NO: 189957 - DNA, 25 bp, Homo sapien
agagactcgcgctaccttttgtgca

SEQ ID NO: 189958 - DNA, 25 bp, Homo sapien
tgagttggaagtcagaaaacccggc

SEQ ID NO: 189959 - DNA, 25 bp, Homo sapien
gctgtgcggcctctaaagtctcaga

SEQ ID NO: 189960 - DNA, 25 bp, Homo sapien
gaaaggccaaactctaagcttcgtg

SEQ ID NO: 189961 - DNA, 25 bp, Homo sapien
aaaatcccttagacttgctcccgag

SEQ ID NO: 189962 - DNA, 25 bp, Homo sapien
tggccttgaggaccgcagtgtgtac

SEQ ID NO: 189963 - DNA, 25 bp, Homo sapien
ccagagcgtttctagcggagactgc

SEQ ID NO: 189964 - DNA, 25 bp, Homo sapien
gaccccctcgctagctgagagagct

SEQ ID NO: 189965 - DNA, 25 bp, Homo sapien
ccctcgctagctgagagagctgctt

SEQ ID NO: 189966 - DNA, 25 bp, Homo sapien
ctgaccccctcgctagctgagagag

SEQ ID NO: 189967 - DNA, 25 bp, Homo sapien
cccctcgctagctgagagagctgct

SEQ ID NO: 189968 - DNA, 25 bp, Homo sapien
cggaggcaaagcttcgcggtgatct

SEQ ID NO: 189969 - DNA, 25 bp, Homo sapien
cagaatgctgatttctccgagaggg

SEQ ID NO: 189970 - DNA, 25 bp, Homo sapien
aggtcctgtttgtctcggtccgcaa

SEQ ID NO: 189971 - DNA, 25 bp, Homo sapien
cgtacttgctcccaaacctcggaag

SEQ ID NO: 189972 - DNA, 25 bp, Homo sapien
ttcgagtccctctggctgttggaaa

SEQ ID NO: 189973 - DNA, 25 bp, Homo sapien
agctgaccattccaacgcaagtggt

SEQ ID NO: 189974 - DNA, 25 bp, Homo sapien
tcttgggaatcttcgagtccctctg

SEQ ID NO: 189975 - DNA, 25 bp, Homo sapien
tagacccaaccatcctcttgggaat

SEQ ID NO: 189976 - DNA, 25 bp, Homo sapien
actacaaaaatttaggatcccagag

SEQ ID NO: 189977 - DNA, 25 bp, Homo sapien
tcctgggatgtcctcaggcctgtca

SEQ ID NO: 189978 - DNA, 25 bp, Homo sapien
aacaggagaaagattcattactaca

SEQ ID NO: 189979 - DNA, 25 bp, Homo sapien
taaaacccagtacaacaaagagtga

SEQ ID NO: 189980 - DNA, 25 bp, Homo sapien
ggaggccaaaggagccaaaagcagc

SEQ ID NO: 189981 - DNA, 25 bp, Homo sapien
gcaggggctgaaggcgtctgctgct

SEQ ID NO: 189982 - DNA, 25 bp, Homo sapien
cgttggaggccaaaggagccaaaag

SEQ ID NO: 189983 - DNA, 25 bp, Homo sapien
tgctgctggtcccctagaggggtcc

SEQ ID NO: 189984 - DNA, 25 bp, Homo sapien
cctgaatgacttccttactttcgaa

SEQ ID NO: 189985 - DNA, 25 bp, Homo sapien
cttactttcgaaaacagcctcccat

SEQ ID NO: 189986 - DNA, 25 bp, Homo sapien
ttcgaaaacagcctcccatcgaatt

SEQ ID NO: 189987 - DNA, 25 bp, Homo sapien
tgacttccttactttcgaaaacagc

SEQ ID NO: 189988 - DNA, 25 bp, Homo sapien
aaaggtttgatgttcaaatctacag

SEQ ID NO: 189989 - DNA, 25 bp, Homo sapien
ctgatttaaaatgggtgtcctctct

SEQ ID NO: 189990 - DNA, 25 bp, Homo sapien
agctttgtgagaccacagtagacag

SEQ ID NO: 189991 - DNA, 25 bp, Homo sapien
atctacagaggtgatccattcactg

SEQ ID NO: 189992 - DNA, 25 bp, Homo sapien
gccctagcgtggaaaacccatttga

SEQ ID NO: 189993 - DNA, 25 bp, Homo sapien
gaaagacgtccagcagtttggcctt

SEQ ID NO: 189994 - DNA, 25 bp, Homo sapien
taagaaaagtcgaagcgcgtggagc

SEQ ID NO: 189995 - DNA, 25 bp, Homo sapien
tgttccttggtctaaacgcggccag

SEQ ID NO: 189996 - DNA, 25 bp, Homo sapien
cgtatagcaaggtggagcaggacat

SEQ ID NO: 189997 - DNA, 25 bp, Homo sapien
caggtccggagactggcctgcgctg

SEQ ID NO: 189998 - DNA, 25 bp, Homo sapien
ggacatggtgccgtagtccgagccc

SEQ ID NO: 189999 - DNA, 25 bp, Homo sapien
tgggacaggctggatacctggccct

SEQ ID NO: 190000 - DNA, 25 bp, Homo sapien
gtggcccgggtgtgcgccaaggccg

SEQ ID NO: 190001 - DNA, 25 bp, Homo sapien
gggtgtgcgccaaggccggcgccac

SEQ ID NO: 190002 - DNA, 25 bp, Homo sapien
ccgggtgtgcgccaaggccggcgcc

SEQ ID NO: 190003 - DNA, 25 bp, Homo sapien
gcccgggtgtgcgccaaggccggcg

SEQ ID NO: 190004 - DNA, 25 bp, Homo sapien
tgctgctgcgcgtggccttgtaggc

SEQ ID NO: 190005 - DNA, 25 bp, Homo sapien
ttggcctggcgcttcattttgtagc

SEQ ID NO: 190006 - DNA, 25 bp, Homo sapien
cgtcgcggcgactgctgctgagcct

SEQ ID NO: 190007 - DNA, 25 bp, Homo sapien
tttgccgtctttcaccaggaccggc

SEQ ID NO: 190008 - DNA, 25 bp, Homo sapien
cgtgggcgtcaggtggatcatgctg

SEQ ID NO: 190009 - DNA, 25 bp, Homo sapien
ctgcgtgggcgtcaggtggatcatg

SEQ ID NO: 190010 - DNA, 25 bp, Homo sapien
gggcgtcaggtggatcatgctggcc

SEQ ID NO: 190011 - DNA, 25 bp, Homo sapien
tgcgtgggcgtcaggtggatcatgc

SEQ ID NO: 190012 - DNA, 25 bp, Homo sapien
tcggacccttagagtcccctctgga

SEQ ID NO: 190013 - DNA, 25 bp, Homo sapien
cagcccgggtcagagcattaggatt

SEQ ID NO: 190014 - DNA, 25 bp, Homo sapien
ctttcgaaccaaaagacgcagtggg

SEQ ID NO: 190015 - DNA, 25 bp, Homo sapien
ttaggattagctggccacaggcggc

SEQ ID NO: 190016 - DNA, 25 bp, Homo sapien
tgtcagacactgagaacggagtcgt

SEQ ID NO: 190017 - DNA, 25 bp, Homo sapien
cagaggcgctgttcctcatggtgtc

SEQ ID NO: 190018 - DNA, 25 bp, Homo sapien
actttcttgtagctttcctccaggg

SEQ ID NO: 190019 - DNA, 25 bp, Homo sapien
tggtacggcggcagctcgctcatgt

SEQ ID NO: 190020 - DNA, 25 bp, Homo sapien
ttctccctttgccaaatattctggt

SEQ ID NO: 190021 - DNA, 25 bp, Homo sapien
ggaaggcgaagcctcgctgcttttt

SEQ ID NO: 190022 - DNA, 25 bp, Homo sapien
cctttgccaaatattctggtgttac

SEQ ID NO: 190023 - DNA, 25 bp, Homo sapien
gaaggcgaagcctcgctgctttttt

SEQ ID NO: 190024 - DNA, 25 bp, Homo sapien
tacacgtaacggagtggaccgagtc

SEQ ID NO: 190025 - DNA, 25 bp, Homo sapien
cttaattggcttgagtggaggctcg

SEQ ID NO: 190026 - DNA, 25 bp, Homo sapien
cgcgtttgttttagcccggcgccag

SEQ ID NO: 190027 - DNA, 25 bp, Homo sapien
gccgatcttgttggatgtacacgta

SEQ ID NO: 190028 - DNA, 25 bp, Homo sapien
gacaatagaagcctacatcttgccc

SEQ ID NO: 190029 - DNA, 25 bp, Homo sapien
taattagcttacatgctgatgacaa

SEQ ID NO: 190030 - DNA, 25 bp, Homo sapien
gcttacatgctgatgacaaggtaaa

SEQ ID NO: 190031 - DNA, 25 bp, Homo sapien
tcttgcccgagataattagcttaca

SEQ ID NO: 190032 - DNA, 25 bp, Homo sapien
cagccccgcgccttcccactgcctc

SEQ ID NO: 190033 - DNA, 25 bp, Homo sapien
cccagccccgcgccttcccactgcc

SEQ ID NO: 190034 - DNA, 25 bp, Homo sapien
ccttcccactgcctccggaccacat

SEQ ID NO: 190035 - DNA, 25 bp, Homo sapien
gcgccttcccactgcctccggacca

SEQ ID NO: 190036 - DNA, 25 bp, Homo sapien
caacaaatgagcgagcgagtctggg

SEQ ID NO: 190037 - DNA, 25 bp, Homo sapien
ccagtcgccaacaaatgagcgagcg

SEQ ID NO: 190038 - DNA, 25 bp, Homo sapien
gctgagccccagtcgccaacaaatg

SEQ ID NO: 190039 - DNA, 25 bp, Homo sapien
tcgccaacaaatgagcgagcgagtc

SEQ ID NO: 190040 - DNA, 25 bp, Homo sapien
ggagctgactttccgaggacatcac

SEQ ID NO: 190041 - DNA, 25 bp, Homo sapien
ggctggagctgactttccgaggaca

SEQ ID NO: 190042 - DNA, 25 bp, Homo sapien
cagagccacgctgttttcccctctg

SEQ ID NO: 190043 - DNA, 25 bp, Homo sapien
catctcccagacacgcggggatctg

SEQ ID NO: 190044 - DNA, 25 bp, Homo sapien
gagcggcgtgagtgcccgtctgtct

SEQ ID NO: 190045 - DNA, 25 bp, Homo sapien
ggcgaatgccgaggtgcgggcagct

SEQ ID NO: 190046 - DNA, 25 bp, Homo sapien
gcggaactgagcctgaaccccggcg

SEQ ID NO: 190047 - DNA, 25 bp, Homo sapien
ccgtctgtctgttgccgggcggaac

SEQ ID NO: 190048 - DNA, 25 bp, Homo sapien
tcatccgacgagcaagaaactgctt

SEQ ID NO: 190049 - DNA, 25 bp, Homo sapien
taaatggccagtcgctttgtggcca

SEQ ID NO: 190050 - DNA, 25 bp, Homo sapien
tctgcttcaattgggcgcctctcat

SEQ ID NO: 190051 - DNA, 25 bp, Homo sapien
tgtggccacgctggatattagtaga

SEQ ID NO: 190052 - DNA, 25 bp, Homo sapien
cgcggattttgagaccgactccggt

SEQ ID NO: 190053 - DNA, 25 bp, Homo sapien
gactaccgagtggagcactgaacgg

SEQ ID NO: 190054 - DNA, 25 bp, Homo sapien
ctgcagccgagtcgactaccgagtg

SEQ ID NO: 190055 - DNA, 25 bp, Homo sapien
tggagcactgaacggcgcggatttt

SEQ ID NO: 190056 - DNA, 25 bp, Homo sapien
ggcgggcaaagactcccgcttcact

SEQ ID NO: 190057 - DNA, 25 bp, Homo sapien
gcagcaagtggcgactctgggagct

SEQ ID NO: 190058 - DNA, 25 bp, Homo sapien
tctgcctgcaggcgtgcttctcgcg

SEQ ID NO: 190059 - DNA, 25 bp, Homo sapien
tctgggacacaactgggacggcgct

SEQ ID NO: 190060 - DNA, 25 bp, Homo sapien
ccaagacggagacgggaggtaggag

SEQ ID NO: 190061 - DNA, 25 bp, Homo sapien
tgaattgcgaggaaaccaagacgga

SEQ ID NO: 190062 - DNA, 25 bp, Homo sapien
aagcggtcagccgaccctgtgaggc

SEQ ID NO: 190063 - DNA, 25 bp, Homo sapien
aagcagagaacagcgggagctcagc

SEQ ID NO: 190064 - DNA, 25 bp, Homo sapien
taaaggacagattcccgaagcatcc

SEQ ID NO: 190065 - DNA, 25 bp, Homo sapien
tgttttcgccccaggacctgtgcag

SEQ ID NO: 190066 - DNA, 25 bp, Homo sapien
ctaaggtaagtttcgcagctgctcc

SEQ ID NO: 190067 - DNA, 25 bp, Homo sapien
gcagtttccggtggccgcagtatcg

SEQ ID NO: 190068 - DNA, 25 bp, Homo sapien
gaagctttgctactagtttccggct

SEQ ID NO: 190069 - DNA, 25 bp, Homo sapien
ctgaattctccctcgctgcctagga

SEQ ID NO: 190070 - DNA, 25 bp, Homo sapien
ctgaaggttgcagaccgaggcgatc

SEQ ID NO: 190071 - DNA, 25 bp, Homo sapien
gaactgcagctttagagcggtctcg

SEQ ID NO: 190072 - DNA, 25 bp, Homo sapien
cacgcattcgctcattctaactgtc

SEQ ID NO: 190073 - DNA, 25 bp, Homo sapien
gcattcgctcattctaactgtccgc

SEQ ID NO: 190074 - DNA, 25 bp, Homo sapien
ggtagtacatcatccacgcattcgc

SEQ ID NO: 190075 - DNA, 25 bp, Homo sapien
gtggtcggagactggtagtacatca

SEQ ID NO: 190076 - DNA, 25 bp, Homo sapien
ttccagcagaaaattaatcaacacc

SEQ ID NO: 190077 - DNA, 25 bp, Homo sapien
gagtggggacactgttgttaaagta

SEQ ID NO: 190078 - DNA, 25 bp, Homo sapien
cagcagaaaattaatcaacaccttt

SEQ ID NO: 190079 - DNA, 25 bp, Homo sapien
gcagaaaattaatcaacacctttgt

SEQ ID NO: 190080 - DNA, 25 bp, Homo sapien
gttttcagtataacggatataacca

SEQ ID NO: 190081 - DNA, 25 bp, Homo sapien
ttgttttcagtataacggatataac

SEQ ID NO: 190082 - DNA, 25 bp, Homo sapien
ctttcatcagtttgtctagatctac

SEQ ID NO: 190083 - DNA, 25 bp, Homo sapien
cagcttcctttagttgaatctcata

SEQ ID NO: 190084 - DNA, 25 bp, Homo sapien
gtaactccacagcgatctgtctgta

SEQ ID NO: 190085 - DNA, 25 bp, Homo sapien
ctccacagcgatctgtctgtatcta

SEQ ID NO: 190086 - DNA, 25 bp, Homo sapien
aactccacagcgatctgtctgtatc

SEQ ID NO: 190087 - DNA, 25 bp, Homo sapien
tagtaactccacagcgatctgtctg

SEQ ID NO: 190088 - DNA, 25 bp, Homo sapien
cctgtggttggactttgaaactgca

SEQ ID NO: 190089 - DNA, 25 bp, Homo sapien
gctgggtcctgcttaaactggtgga

SEQ ID NO: 190090 - DNA, 25 bp, Homo sapien
gcccaagccctagaagcacagtata

SEQ ID NO: 190091 - DNA, 25 bp, Homo sapien
tatgtgaaagttaaagcccaagccc

SEQ ID NO: 190092 - DNA, 25 bp, Homo sapien
ctgcctctctagaacttgggtgaag

SEQ ID NO: 190093 - DNA, 25 bp, Homo sapien
gcatattagaaccacgaggctctga

SEQ ID NO: 190094 - DNA, 25 bp, Homo sapien
aggctctgattagcagctgggcctg

SEQ ID NO: 190095 - DNA, 25 bp, Homo sapien
ctgggcctggattgcaactcagagc

SEQ ID NO: 190096 - DNA, 25 bp, Homo sapien
gtgaccacccccatataccatccag

SEQ ID NO: 190097 - DNA, 25 bp, Homo sapien
atataccatccagagtgcatgcaca

SEQ ID NO: 190098 - DNA, 25 bp, Homo sapien
ccccatataccatccagagtgcatg

SEQ ID NO: 190099 - DNA, 25 bp, Homo sapien
ccatataccatccagagtgcatgca

SEQ ID NO: 190100 - DNA, 25 bp, Homo sapien
gagggaactgatgttatcagcgatg

SEQ ID NO: 190101 - DNA, 25 bp, Homo sapien
gaactgatgttatcagcgatgttca

SEQ ID NO: 190102 - DNA, 25 bp, Homo sapien
ctgatgttatcagcgatgttcacaa

SEQ ID NO: 190103 - DNA, 25 bp, Homo sapien
tgttatcagcgatgttcacaatttc

SEQ ID NO: 190104 - DNA, 25 bp, Homo sapien
ggcaaagcaatgctgacaaggttcc

SEQ ID NO: 190105 - DNA, 25 bp, Homo sapien
gcaatgctgacaaggttccaaacaa

SEQ ID NO: 190106 - DNA, 25 bp, Homo sapien
caaagcaatgctgacaaggttccaa

SEQ ID NO: 190107 - DNA, 25 bp, Homo sapien
tgctgacaaggttccaaacaagaga

SEQ ID NO: 190108 - DNA, 25 bp, Homo sapien
gaatcgaggaggtcttggtgaggac

SEQ ID NO: 190109 - DNA, 25 bp, Homo sapien
tgtaatcaaacgtgggaatcgagga

SEQ ID NO: 190110 - DNA, 25 bp, Homo sapien
ccaaggtcatcagcgtgtaatcaaa

SEQ ID NO: 190111 - DNA, 25 bp, Homo sapien
tgagggttccaaggtcatcagcgtg

SEQ ID NO: 190112 - DNA, 25 bp, Homo sapien
tttgttgtaaaaatgcgttcttgcc

SEQ ID NO: 190113 - DNA, 25 bp, Homo sapien
tgttgtaaaaatgcgttcttgccat

SEQ ID NO: 190114 - DNA, 25 bp, Homo sapien
ttgttgtaaaaatgcgttcttgcca

SEQ ID NO: 190115 - DNA, 25 bp, Homo sapien
gagtcagcagcgactctacccaaca

SEQ ID NO: 190116 - DNA, 25 bp, Homo sapien
cactgagtggacaactggtgtcaag

SEQ ID NO: 190117 - DNA, 25 bp, Homo sapien
tggacaactggtgtcaaggcagcag

SEQ ID NO: 190118 - DNA, 25 bp, Homo sapien
gcagcgactctacccaacactgagt

SEQ ID NO: 190119 - DNA, 25 bp, Homo sapien
cctgcctcagttttacgtgtacaaa

SEQ ID NO: 190120 - DNA, 25 bp, Homo sapien
tgtcctcatggacatgtccccatgt

SEQ ID NO: 190121 - DNA, 25 bp, Homo sapien
atatctatctgaagcctttataggg

SEQ ID NO: 190122 - DNA, 25 bp, Homo sapien
tgtccccatgtccagatagatagac

SEQ ID NO: 190123 - DNA, 25 bp, Homo sapien
gcaggtgacacccttcggaatcttg

SEQ ID NO: 190124 - DNA, 25 bp, Homo sapien
aggtgacacccttcggaatcttggg

SEQ ID NO: 190125 - DNA, 25 bp, Homo sapien
gcttgcaggtgacacccttcggaat

SEQ ID NO: 190126 - DNA, 25 bp, Homo sapien
tgagcttgcaggtgacacccttcgg

SEQ ID NO: 190127 - DNA, 25 bp, Homo sapien
cacatacactcacagccttggcatt

SEQ ID NO: 190128 - DNA, 25 bp, Homo sapien
tgatagcctcggcacatacactcac

SEQ ID NO: 190129 - DNA, 25 bp, Homo sapien
attggggtttcttgacactatttct

SEQ ID NO: 190130 - DNA, 25 bp, Homo sapien
ttcctcaggaacttagggtccattc

SEQ ID NO: 190131 - DNA, 25 bp, Homo sapien
cttagggtccattcccttaagagat

SEQ ID NO: 190132 - DNA, 25 bp, Homo sapien
ttgtgattggggtttcttgacacta

SEQ ID NO: 190133 - DNA, 25 bp, Homo sapien
tctttaaaggaaggaccttatcagc

SEQ ID NO: 190134 - DNA, 25 bp, Homo sapien
ctctttaaaggaaggaccttatcag

SEQ ID NO: 190135 - DNA, 25 bp, Homo sapien
gaagtgggccacagtttatacctta

SEQ ID NO: 190136 - DNA, 25 bp, Homo sapien
tcctcttgcccagtacacaagctgg

SEQ ID NO: 190137 - DNA, 25 bp, Homo sapien
tctgtcacaggaaactgctgccctc

SEQ ID NO: 190138 - DNA, 25 bp, Homo sapien
gtttataccttatggctgccagtgc

SEQ ID NO: 190139 - DNA, 25 bp, Homo sapien
gaccaggatgaatttgactaaggct

SEQ ID NO: 190140 - DNA, 25 bp, Homo sapien
atgtaaggccttctccactgcacac

SEQ ID NO: 190141 - DNA, 25 bp, Homo sapien
tcctgtgggcctcctatgtaaggcc

SEQ ID NO: 190142 - DNA, 25 bp, Homo sapien
tggcttcttggttagacctctgctg

SEQ ID NO: 190143 - DNA, 25 bp, Homo sapien
catccatatggaaggcaaggtggcc

SEQ ID NO: 190144 - DNA, 25 bp, Homo sapien
tacccctatgcaggaagagcatgga

SEQ ID NO: 190145 - DNA, 25 bp, Homo sapien
tgtgccagagctaactgggaagccc

SEQ ID NO: 190146 - DNA, 25 bp, Homo sapien
aacagtgcggattttgtctaggtcc

SEQ ID NO: 190147 - DNA, 25 bp, Homo sapien
aaagtgactgcttgcacaagaggcc

SEQ ID NO: 190148 - DNA, 25 bp, Homo sapien
cgaggtcgtcgcttctgtgagaaag

SEQ ID NO: 190149 - DNA, 25 bp, Homo sapien
tctcctctggcgcatctcccagcag

SEQ ID NO: 190150 - DNA, 25 bp, Homo sapien
agaaagtgactgcttgcacaagagg

SEQ ID NO: 190151 - DNA, 25 bp, Homo sapien
gttacaaattccccggtgctcttca

SEQ ID NO: 190152 - DNA, 25 bp, Homo sapien
aacttaggcacttgcaggcttaaat

SEQ ID NO: 190153 - DNA, 25 bp, Homo sapien
gcactctggaaacagcttgcggccc

SEQ ID NO: 190154 - DNA, 25 bp, Homo sapien
gcacttttcaaagggtccccgagca

SEQ ID NO: 190155 - DNA, 25 bp, Homo sapien
tggcctcgccggctcatctccggag

SEQ ID NO: 190156 - DNA, 25 bp, Homo sapien
cacagggttgacttttcggtattcg

SEQ ID NO: 190157 - DNA, 25 bp, Homo sapien
tcgccggctcatctccggagaaact

SEQ ID NO: 190158 - DNA, 25 bp, Homo sapien
ttcggtattcgaaacgccagcagct

SEQ ID NO: 190159 - DNA, 25 bp, Homo sapien
agcccagcggagagtcggagtcact

SEQ ID NO: 190160 - DNA, 25 bp, Homo sapien
ggagcccagcggagagtcggagtca

SEQ ID NO: 190161 - DNA, 25 bp, Homo sapien
ctgggagcccagcggagagtcggag

SEQ ID NO: 190162 - DNA, 25 bp, Homo sapien
gggagcccagcggagagtcggagtc

SEQ ID NO: 190163 - DNA, 25 bp, Homo sapien
ccagcgatgcgaacaccggtctggg

SEQ ID NO: 190164 - DNA, 25 bp, Homo sapien
tcctaaagccgtgtcgggactgcaa

SEQ ID NO: 190165 - DNA, 25 bp, Homo sapien
agagcgcgctccaaagtcgagggta

SEQ ID NO: 190166 - DNA, 25 bp, Homo sapien
acgtccctcgtgtgtgcttgcgcga

SEQ ID NO: 190167 - DNA, 25 bp, Homo sapien
gcgccgagccgggaccgaaggcagg

SEQ ID NO: 190168 - DNA, 25 bp, Homo sapien
gaaggcagggtagcccggcagaggg

SEQ ID NO: 190169 - DNA, 25 bp, Homo sapien
cgggggatgctaagtgctggtaggc

SEQ ID NO: 190170 - DNA, 25 bp, Homo sapien
cggggaagaggccaagcgccgagcc

SEQ ID NO: 190171 - DNA, 25 bp, Homo sapien
caggtcaggcgactccgccgcccct

SEQ ID NO: 190172 - DNA, 25 bp, Homo sapien
gcagctcggcggatgctgccaggtc

SEQ ID NO: 190173 - DNA, 25 bp, Homo sapien
tgcccgtcgcgaacaagcaccggca

SEQ ID NO: 190174 - DNA, 25 bp, Homo sapien
gggcgcggcgtgcagctcggcggat

SEQ ID NO: 190175 - DNA, 25 bp, Homo sapien
ttggagaatagcacccgccgcttct

SEQ ID NO: 190176 - DNA, 25 bp, Homo sapien
aggcgaagcaggctcgccagctgct

SEQ ID NO: 190177 - DNA, 25 bp, Homo sapien
ggagacgcgggcctagcggacggcc

SEQ ID NO: 190178 - DNA, 25 bp, Homo sapien
caactccagcgtctgcgccttggag

SEQ ID NO: 190179 - DNA, 25 bp, Homo sapien
cagcaaaggagacacgggtgggtga

SEQ ID NO: 190180 - DNA, 25 bp, Homo sapien
acagcaaaggagacacgggtgggtg

SEQ ID NO: 190181 - DNA, 25 bp, Homo sapien
gtgggtgagacgccggaccctacga

SEQ ID NO: 190182 - DNA, 25 bp, Homo sapien
gcaaaggagacacgggtgggtgaga

SEQ ID NO: 190183 - DNA, 25 bp, Homo sapien
cgagactttcgggatgaggccattt

SEQ ID NO: 190184 - DNA, 25 bp, Homo sapien
gagatcgtggccgtgttttcaggca

SEQ ID NO: 190185 - DNA, 25 bp, Homo sapien
taacatgtccgcaccggtagttgcg

SEQ ID NO: 190186 - DNA, 25 bp, Homo sapien
cagcggtcatcagcgggcctgagat

SEQ ID NO: 190187 - DNA, 25 bp, Homo sapien
aatctagaaggctgcgcacggtgaa

SEQ ID NO: 190188 - DNA, 25 bp, Homo sapien
tcccgcctcggcaggtgttgcgcgt

SEQ ID NO: 190189 - DNA, 25 bp, Homo sapien
gcacggtgaagctcaggcgtccaga

SEQ ID NO: 190190 - DNA, 25 bp, Homo sapien
cgtcctgctcgggtaaatctagaag

SEQ ID NO: 190191 - DNA, 25 bp, Homo sapien
cagccgggatattagcgcatttaca

SEQ ID NO: 190192 - DNA, 25 bp, Homo sapien
ctacggatgggcgtgggaggcgctc

SEQ ID NO: 190193 - DNA, 25 bp, Homo sapien
cacccaggccgctttgaaagccgag

SEQ ID NO: 190194 - DNA, 25 bp, Homo sapien
tacagcggaatctctgtttatataa

SEQ ID NO: 190195 - DNA, 25 bp, Homo sapien
gtccggaataatgcatgattgacgt

SEQ ID NO: 190196 - DNA, 25 bp, Homo sapien
taatgcatgattgacgtctgctcac

SEQ ID NO: 190197 - DNA, 25 bp, Homo sapien
ccggaataatgcatgattgacgtct

SEQ ID NO: 190198 - DNA, 25 bp, Homo sapien
aataatgcatgattgacgtctgctc

SEQ ID NO: 190199 - DNA, 25 bp, Homo sapien
gagcttgtccggtgttgtcatggtt

SEQ ID NO: 190200 - DNA, 25 bp, Homo sapien
cgcggccctggcaatagatttatta

SEQ ID NO: 190201 - DNA, 25 bp, Homo sapien
ttcaatgggattgggagcacgatcg

SEQ ID NO: 190202 - DNA, 25 bp, Homo sapien
cgccgggataaatcggagcttgtcc

SEQ ID NO: 190203 - DNA, 25 bp, Homo sapien
gcttcatcttggattccctcctcct

SEQ ID NO: 190204 - DNA, 25 bp, Homo sapien
cttggattccctcctcctctgccat

SEQ ID NO: 190205 - DNA, 25 bp, Homo sapien
ctgcttcatcttggattccctcctc

SEQ ID NO: 190206 - DNA, 25 bp, Homo sapien
ttcatcttggattccctcctcctct

SEQ ID NO: 190207 - DNA, 25 bp, Homo sapien
gaatcctctcaattcagccagagca

SEQ ID NO: 190208 - DNA, 25 bp, Homo sapien
aaaagttctctctcgttagcacgtg

SEQ ID NO: 190209 - DNA, 25 bp, Homo sapien
tagcacgtgtgaaacaccacataag

SEQ ID NO: 190210 - DNA, 25 bp, Homo sapien
gaacagaatcagacgcattggaaac

SEQ ID NO: 190211 - DNA, 25 bp, Homo sapien
cctcctcttccactgagtgcacagc

SEQ ID NO: 190212 - DNA, 25 bp, Homo sapien
ctattgggtatggtcctcctcttcc

SEQ ID NO: 190213 - DNA, 25 bp, Homo sapien
gcagctagtcataaacccttgactg

SEQ ID NO: 190214 - DNA, 25 bp, Homo sapien
gatcagccaaatccaccctagtgat

SEQ ID NO: 190215 - DNA, 25 bp, Homo sapien
tcctaggaagcattgcccacatgac

SEQ ID NO: 190216 - DNA, 25 bp, Homo sapien
cacatgactgggttaagaacttgga

SEQ ID NO: 190217 - DNA, 25 bp, Homo sapien
tgcacctctactgagtgacttctgg

SEQ ID NO: 190218 - DNA, 25 bp, Homo sapien
gtactccccgacctgtccaggaatg

SEQ ID NO: 190219 - DNA, 25 bp, Homo sapien
ggctgtctccctgttgcttagttga

SEQ ID NO: 190220 - DNA, 25 bp, Homo sapien
tgccagagatgaacccaaatgaagg

SEQ ID NO: 190221 - DNA, 25 bp, Homo sapien
caaatgaagggacgggggctgctat

SEQ ID NO: 190222 - DNA, 25 bp, Homo sapien
caagttgccagagatgaacccaaat

SEQ ID NO: 190223 - DNA, 25 bp, Homo sapien
tgaggtcttgtgtctggtgtactca

SEQ ID NO: 190224 - DNA, 25 bp, Homo sapien
ctgaggtcttgtgtctggtgtactc

SEQ ID NO: 190225 - DNA, 25 bp, Homo sapien
gatccatccgatctgctgggctgta

SEQ ID NO: 190226 - DNA, 25 bp, Homo sapien
agctgtgatccatccgatctgctgg

SEQ ID NO: 190227 - DNA, 25 bp, Homo sapien
accgcagaaccatagccaagctgtg

SEQ ID NO: 190228 - DNA, 25 bp, Homo sapien
ttagttctgaattaccgcagaacca

SEQ ID NO: 190229 - DNA, 25 bp, Homo sapien
tgttcaaactcatctagaagaagct

SEQ ID NO: 190230 - DNA, 25 bp, Homo sapien
catctagaagaagctcctggtatcc

SEQ ID NO: 190231 - DNA, 25 bp, Homo sapien
actcatctagaagaagctcctggta

SEQ ID NO: 190232 - DNA, 25 bp, Homo sapien
aaactcatctagaagaagctcctgg

SEQ ID NO: 190233 - DNA, 25 bp, Homo sapien
cagccactgtttgttcatggctcca

SEQ ID NO: 190234 - DNA, 25 bp, Homo sapien
gccactgtttgttcatggctccacc

SEQ ID NO: 190235 - DNA, 25 bp, Homo sapien
cactgtttgttcatggctccacctg

SEQ ID NO: 190236 - DNA, 25 bp, Homo sapien
ctgtttgttcatggctccacctggg

SEQ ID NO: 190237 - DNA, 25 bp, Homo sapien
ttatgagggctgtggttgagaaacc

SEQ ID NO: 190238 - DNA, 25 bp, Homo sapien
tagaagtgtagatccgtgctttggc

SEQ ID NO: 190239 - DNA, 25 bp, Homo sapien
catgagatctcttgggtgcaggaaa

SEQ ID NO: 190240 - DNA, 25 bp, Homo sapien
taggattataccagatcacacgagt

SEQ ID NO: 190241 - DNA, 25 bp, Homo sapien
tcttgaggctgcaacccgagcttgc

SEQ ID NO: 190242 - DNA, 25 bp, Homo sapien
tgtgtcctcccatcatacctgaggg

SEQ ID NO: 190243 - DNA, 25 bp, Homo sapien
gaaccagggttctcagtcagctatc

SEQ ID NO: 190244 - DNA, 25 bp, Homo sapien
gatgctcacattcgcaggattatgg

SEQ ID NO: 190245 - DNA, 25 bp, Homo sapien
tagagaagctcttgtacaccatagc

SEQ ID NO: 190246 - DNA, 25 bp, Homo sapien
ccggttgtgccatgattcaggtgta

SEQ ID NO: 190247 - DNA, 25 bp, Homo sapien
tcaggtgtatcgtgagccagtctac

SEQ ID NO: 190248 - DNA, 25 bp, Homo sapien
tcttttatagcttcaccggttgtgc

SEQ ID NO: 190249 - DNA, 25 bp, Homo sapien
cttgaggacaaccataaggctctgc

SEQ ID NO: 190250 - DNA, 25 bp, Homo sapien
caaccataaggctctgccacaataa

SEQ ID NO: 190251 - DNA, 25 bp, Homo sapien
taaggctctgccacaataatctgta

SEQ ID NO: 190252 - DNA, 25 bp, Homo sapien
gccacaataatctgtaccaataaaa

SEQ ID NO: 190253 - DNA, 25 bp, Homo sapien
ttgaagaggttaaatacagcggccc

SEQ ID NO: 190254 - DNA, 25 bp, Homo sapien
aagttatggcaactccaaggttata

SEQ ID NO: 190255 - DNA, 25 bp, Homo sapien
gcggcccattattgaggatccaaaa

SEQ ID NO: 190256 - DNA, 25 bp, Homo sapien
tctgcaatttgacactctgaccttc

SEQ ID NO: 190257 - DNA, 25 bp, Homo sapien
caggaggagcactgactggcaaagg

SEQ ID NO: 190258 - DNA, 25 bp, Homo sapien
cagctctttcgttggtcctggtgag

SEQ ID NO: 190259 - DNA, 25 bp, Homo sapien
tgtctagaaagccacagccgctgtg

SEQ ID NO: 190260 - DNA, 25 bp, Homo sapien
cacaaatccgcctcttggagcaaac

SEQ ID NO: 190261 - DNA, 25 bp, Homo sapien
gggcctattagagcctgcccagttc

SEQ ID NO: 190262 - DNA, 25 bp, Homo sapien
caggtagaggggcctattagagcct

SEQ ID NO: 190263 - DNA, 25 bp, Homo sapien
ctattagagcctgcccagttcccgg

SEQ ID NO: 190264 - DNA, 25 bp, Homo sapien
gtagaggggcctattagagcctgcc

SEQ ID NO: 190265 - DNA, 25 bp, Homo sapien
ttgttcccactatagtggtcttaaa

SEQ ID NO: 190266 - DNA, 25 bp, Homo sapien
tttgttcccactatagtggtcttaa

SEQ ID NO: 190267 - DNA, 25 bp, Homo sapien
tcccactatagtggtcttaaaaaga

SEQ ID NO: 190268 - DNA, 25 bp, Homo sapien
tgttcccactatagtggtcttaaaa

SEQ ID NO: 190269 - DNA, 25 bp, Homo sapien
tcggtgcttgagttgatgctctgag

SEQ ID NO: 190270 - DNA, 25 bp, Homo sapien
gcactcttggaaacaaattgcagcc

SEQ ID NO: 190271 - DNA, 25 bp, Homo sapien
tctcgggcatgtcttggcactcttg

SEQ ID NO: 190272 - DNA, 25 bp, Homo sapien
caagagcacggttcttccggtcctc

SEQ ID NO: 190273 - DNA, 25 bp, Homo sapien
aacatgttgtgcaccgcccgagtgg

SEQ ID NO: 190274 - DNA, 25 bp, Homo sapien
cgagtggctgcggacctcacctcga

SEQ ID NO: 190275 - DNA, 25 bp, Homo sapien
ccaggaggagacgagcaggcagtct

SEQ ID NO: 190276 - DNA, 25 bp, Homo sapien
cacctcgacgccctggatagccggg

SEQ ID NO: 190277 - DNA, 25 bp, Homo sapien
gatcctctttgctgcgggttctggg

SEQ ID NO: 190278 - DNA, 25 bp, Homo sapien
tagtcagctgcgacctccgcggcgt

SEQ ID NO: 190279 - DNA, 25 bp, Homo sapien
tccgcggcgtggactcttggccagc

SEQ ID NO: 190280 - DNA, 25 bp, Homo sapien
tgaggaggacaaggttgcagatcct

SEQ ID NO: 190281 - DNA, 25 bp, Homo sapien
gccctgacgcaaggacagctcacaa

SEQ ID NO: 190282 - DNA, 25 bp, Homo sapien
agctctcccgccctgacgcaaggac

SEQ ID NO: 190283 - DNA, 25 bp, Homo sapien
gacagctcacaaccagtgtccttga

SEQ ID NO: 190284 - DNA, 25 bp, Homo sapien
cacaaccagtgtccttgagtagccc

SEQ ID NO: 190285 - DNA, 25 bp, Homo sapien
gattagctaggactgtgcaacacca

SEQ ID NO: 190286 - DNA, 25 bp, Homo sapien
tcaggtgcgaggattcgccagacgc

SEQ ID NO: 190287 - DNA, 25 bp, Homo sapien
ggcgactcgcaagggcatcatgcca

SEQ ID NO: 190288 - DNA, 25 bp, Homo sapien
aacgcagctcctcgactttgcagcg

SEQ ID NO: 190289 - DNA, 25 bp, Homo sapien
aatgggagaacgttcgagtcggtca

SEQ ID NO: 190290 - DNA, 25 bp, Homo sapien
tagagtgggttggtccctccgtcag

SEQ ID NO: 190291 - DNA, 25 bp, Homo sapien
ttgattcagactcctcggaagccag

SEQ ID NO: 190292 - DNA, 25 bp, Homo sapien
actccggcctgcgagttgattcaga

SEQ ID NO: 190293 - DNA, 25 bp, Homo sapien
cagacgtccggctctgatcagagta

SEQ ID NO: 190294 - DNA, 25 bp, Homo sapien
ctagagggcagacgtccggctctga

SEQ ID NO: 190295 - DNA, 25 bp, Homo sapien
gtccggctctgatcagagtacagcg

SEQ ID NO: 190296 - DNA, 25 bp, Homo sapien
ctctgatcagagtacagcgggctgg

SEQ ID NO: 190297 - DNA, 25 bp, Homo sapien
accggcaatcttgcttttcccacac

SEQ ID NO: 190298 - DNA, 25 bp, Homo sapien
tgtgcttgaagaaccggcaatcttg

SEQ ID NO: 190299 - DNA, 25 bp, Homo sapien
gtgcttgaagaaccggcaatcttgc

SEQ ID NO: 190300 - DNA, 25 bp, Homo sapien
ccggcaatcttgcttttcccacacg

SEQ ID NO: 190301 - DNA, 25 bp, Homo sapien
gcgcaacttctgctaatgctgcaac

SEQ ID NO: 190302 - DNA, 25 bp, Homo sapien
gctgatggctgtatagtgaccacgg

SEQ ID NO: 190303 - DNA, 25 bp, Homo sapien
tcctcacgaagctgcgcaacttctg

SEQ ID NO: 190304 - DNA, 25 bp, Homo sapien
gtgaccacggactgcgtcctcctca

SEQ ID NO: 190305 - DNA, 25 bp, Homo sapien
gactgctccttttagccgccatccc

SEQ ID NO: 190306 - DNA, 25 bp, Homo sapien
tccatccccaatccccgcgactgct

SEQ ID NO: 190307 - DNA, 25 bp, Homo sapien
ccaatccccgcgactgctcctttta

SEQ ID NO: 190308 - DNA, 25 bp, Homo sapien
gccatcccctcccgcagcgcagatc

SEQ ID NO: 190309 - DNA, 25 bp, Homo sapien
gtcacttgccgctgcagtttcaggg

SEQ ID NO: 190310 - DNA, 25 bp, Homo sapien
cttctggctgtcacttgccgctgca

SEQ ID NO: 190311 - DNA, 25 bp, Homo sapien
tcagggaaactcagctggccgctta

SEQ ID NO: 190312 - DNA, 25 bp, Homo sapien
tgggcgcggggcgagcttctggctg

SEQ ID NO: 190313 - DNA, 25 bp, Homo sapien
tgcaactcctccgagtggacaagag

SEQ ID NO: 190314 - DNA, 25 bp, Homo sapien
caagaggcgggcaccgtcgcctggg

SEQ ID NO: 190315 - DNA, 25 bp, Homo sapien
actcctccgagtggacaagaggcgg

SEQ ID NO: 190316 - DNA, 25 bp, Homo sapien
cctgcaactcctccgagtggacaag

SEQ ID NO: 190317 - DNA, 25 bp, Homo sapien
ttcggcagccctcgggtacagtctg

SEQ ID NO: 190318 - DNA, 25 bp, Homo sapien
tgtagtgcttgggtctgacttcggc

SEQ ID NO: 190319 - DNA, 25 bp, Homo sapien
gcgttccgcacaacctgtagtgctt

SEQ ID NO: 190320 - DNA, 25 bp, Homo sapien
tctgccgggctagattcccgttgct

SEQ ID NO: 190321 - DNA, 25 bp, Homo sapien
gaagggggcgccgcaggtgactgcc

SEQ ID NO: 190322 - DNA, 25 bp, Homo sapien
ggaagggggcgccgcaggtgactgc

SEQ ID NO: 190323 - DNA, 25 bp, Homo sapien
tttatggagacttcacagcatctgg

SEQ ID NO: 190324 - DNA, 25 bp, Homo sapien
acagatttatggagacttcacagca

SEQ ID NO: 190325 - DNA, 25 bp, Homo sapien
ttatggagacttcacagcatctggc

SEQ ID NO: 190326 - DNA, 25 bp, Homo sapien
gatttatggagacttcacagcatct

SEQ ID NO: 190327 - DNA, 25 bp, Homo sapien
cgcggatacttagtggcccaaaaca

SEQ ID NO: 190328 - DNA, 25 bp, Homo sapien
tcagatccgtcgtctctcggtcggt

SEQ ID NO: 190329 - DNA, 25 bp, Homo sapien
gggtcttcggcttgccgcggatact

SEQ ID NO: 190330 - DNA, 25 bp, Homo sapien
tcttcctgcgctcttgagaatgcca

SEQ ID NO: 190331 - DNA, 25 bp, Homo sapien
tatgtgagaactgggaagatgtgtg

SEQ ID NO: 190332 - DNA, 25 bp, Homo sapien
tgtgagaactgggaagatgtgtggc

SEQ ID NO: 190333 - DNA, 25 bp, Homo sapien
tgagaactgggaagatgtgtggcag

SEQ ID NO: 190334 - DNA, 25 bp, Homo sapien
ctatgtgagaactgggaagatgtgt

SEQ ID NO: 190335 - DNA, 25 bp, Homo sapien
gtatgcgaacatccttgtacccgcc

SEQ ID NO: 190336 - DNA, 25 bp, Homo sapien
tgctaaagctctcgcagagtcccca

SEQ ID NO: 190337 - DNA, 25 bp, Homo sapien
gaggtcttgcctgttcgtatgcgaa

SEQ ID NO: 190338 - DNA, 25 bp, Homo sapien
cagtttctgaaccagtctaggctgg

SEQ ID NO: 190339 - DNA, 25 bp, Homo sapien
ggggaggaggattccttcctggtca

SEQ ID NO: 190340 - DNA, 25 bp, Homo sapien
ccttcctggtcaagttgccgggcat

SEQ ID NO: 190341 - DNA, 25 bp, Homo sapien
ggaggattccttcctggtcaagttg

SEQ ID NO: 190342 - DNA, 25 bp, Homo sapien
gattccttcctggtcaagttgccgg

SEQ ID NO: 190343 - DNA, 25 bp, Homo sapien
ctctgggtgtagaccgcagccacac

SEQ ID NO: 190344 - DNA, 25 bp, Homo sapien
ggtgtagaccgcagccacacacatc

SEQ ID NO: 190345 - DNA, 25 bp, Homo sapien
tctgggtgtagaccgcagccacaca

SEQ ID NO: 190346 - DNA, 25 bp, Homo sapien
tgggtgtagaccgcagccacacaca

SEQ ID NO: 190347 - DNA, 25 bp, Homo sapien
gagtgccccacgcactggcaattgg

SEQ ID NO: 190348 - DNA, 25 bp, Homo sapien
tgtggttcagttccccgcacacggc

SEQ ID NO: 190349 - DNA, 25 bp, Homo sapien
gccttgggctccgtagtgagtgccc

SEQ ID NO: 190350 - DNA, 25 bp, Homo sapien
ggctgtgcgctagcgttagccgcct

SEQ ID NO: 190351 - DNA, 25 bp, Homo sapien
tggactggggggtcgccgcaggaag

SEQ ID NO: 190352 - DNA, 25 bp, Homo sapien
ctggactggggggtcgccgcaggaa

SEQ ID NO: 190353 - DNA, 25 bp, Homo sapien
gaacctccctggccttaacagtggc

SEQ ID NO: 190354 - DNA, 25 bp, Homo sapien
ctggcggtaggaggaacctccctgg

SEQ ID NO: 190355 - DNA, 25 bp, Homo sapien
gtttctttggccggcctatcttctc

SEQ ID NO: 190356 - DNA, 25 bp, Homo sapien
tggtttctttggccggcctatcttc

SEQ ID NO: 190357 - DNA, 25 bp, Homo sapien
tttctttggccggcctatcttctca

SEQ ID NO: 190358 - DNA, 25 bp, Homo sapien
ttctttggccggcctatcttctcac

SEQ ID NO: 190359 - DNA, 25 bp, Homo sapien
gaagtgaggtagaatcggcaggtga

SEQ ID NO: 190360 - DNA, 25 bp, Homo sapien
cgccacctggcatggactgaagtga

SEQ ID NO: 190361 - DNA, 25 bp, Homo sapien
tgcgctctcgccacctggcatggac

SEQ ID NO: 190362 - DNA, 25 bp, Homo sapien
gactgaagtgaggtagaatcggcag

SEQ ID NO: 190363 - DNA, 25 bp, Homo sapien
cgtgtggatgtgcagcgtctgcccc

SEQ ID NO: 190364 - DNA, 25 bp, Homo sapien
gcttgctcacttggagagtgcggcc

SEQ ID NO: 190365 - DNA, 25 bp, Homo sapien
cgctccatcaccgaccaaggtaggg

SEQ ID NO: 190366 - DNA, 25 bp, Homo sapien
tcgcggaggtcccagtatctgcagc

SEQ ID NO: 190367 - DNA, 25 bp, Homo sapien
taatgaatgtaacaatggcttgctg

SEQ ID NO: 190368 - DNA, 25 bp, Homo sapien
aactggtggtggtactagaaataca

SEQ ID NO: 190369 - DNA, 25 bp, Homo sapien
cagaagcatgtttcgcatgtaggta

SEQ ID NO: 190370 - DNA, 25 bp, Homo sapien
tatctgaacaagaaggctctaaagg

SEQ ID NO: 190371 - DNA, 25 bp, Homo sapien
tctatctgatccacatggagaggtt

SEQ ID NO: 190372 - DNA, 25 bp, Homo sapien
tctcatagatggtaaaagtgttgct

SEQ ID NO: 190373 - DNA, 25 bp, Homo sapien
caggcagcgctctcattggatgtaa

SEQ ID NO: 190374 - DNA, 25 bp, Homo sapien
tacgagaaggaaaataggatggatt

SEQ ID NO: 190375 - DNA, 25 bp, Homo sapien
tagccccgtagtagaaatagcccac

SEQ ID NO: 190376 - DNA, 25 bp, Homo sapien
tagcccacggtagtaacttaggaca

SEQ ID NO: 190377 - DNA, 25 bp, Homo sapien
tactgatggctgacaaatgggtcca

SEQ ID NO: 190378 - DNA, 25 bp, Homo sapien
taggacaggtgtcatatggactttc

SEQ ID NO: 190379 - DNA, 25 bp, Homo sapien
tctagacctcttaggaaaaatgctg

SEQ ID NO: 190380 - DNA, 25 bp, Homo sapien
gaaaatagagctgatatgtgcatag

SEQ ID NO: 190381 - DNA, 25 bp, Homo sapien
tggccgatcgatagtctctcttctt

SEQ ID NO: 190382 - DNA, 25 bp, Homo sapien
tcataattatacacctggccgatcg

SEQ ID NO: 190383 - DNA, 25 bp, Homo sapien
ccatgaataggtgtattcataaacc

SEQ ID NO: 190384 - DNA, 25 bp, Homo sapien
gtgtattcataaaccagcagcatca

SEQ ID NO: 190385 - DNA, 25 bp, Homo sapien
aataggtgtattcataaaccagcag

SEQ ID NO: 190386 - DNA, 25 bp, Homo sapien
tcttgaagccatgaataggtgtatt

SEQ ID NO: 190387 - DNA, 25 bp, Homo sapien
atcttgggaagcaggcctttgtaca

SEQ ID NO: 190388 - DNA, 25 bp, Homo sapien
aagtctcataatcttgggaagcagg

SEQ ID NO: 190389 - DNA, 25 bp, Homo sapien
cataatcttgggaagcaggcctttg

SEQ ID NO: 190390 - DNA, 25 bp, Homo sapien
ctggtccaagtctcataatcttggg

SEQ ID NO: 190391 - DNA, 25 bp, Homo sapien
tcttcctgatagactgttgccattg

SEQ ID NO: 190392 - DNA, 25 bp, Homo sapien
ttgtccccgagagaagaccaatccc

SEQ ID NO: 190393 - DNA, 25 bp, Homo sapien
tacttttggcaacatcaaaagggat

SEQ ID NO: 190394 - DNA, 25 bp, Homo sapien
taatgactgaggctattgtccccga

SEQ ID NO: 190395 - DNA, 25 bp, Homo sapien
gaggcccttgaatcctacttttggc

SEQ ID NO: 190396 - DNA, 25 bp, Homo sapien
tattttcacgtgtagctgatccact

SEQ ID NO: 190397 - DNA, 25 bp, Homo sapien
ggcggctgcaaaacagcctgtgaca

SEQ ID NO: 190398 - DNA, 25 bp, Homo sapien
gctattgcccgccaggttttttgca

SEQ ID NO: 190399 - DNA, 25 bp, Homo sapien
gatccactgtactgagaagtgctag

SEQ ID NO: 190400 - DNA, 25 bp, Homo sapien
gcatgtgttactcctctttgtgtca

SEQ ID NO: 190401 - DNA, 25 bp, Homo sapien
tgctatggcccacttagtgttcagt

SEQ ID NO: 190402 - DNA, 25 bp, Homo sapien
tctgagtctgcacagcataggagca

SEQ ID NO: 190403 - DNA, 25 bp, Homo sapien
gctaaataaaccaagatgctcggag

SEQ ID NO: 190404 - DNA, 25 bp, Homo sapien
ctgctagcttgataaacagaaacat

SEQ ID NO: 190405 - DNA, 25 bp, Homo sapien
gctgctagcttgataaacagaaaca

SEQ ID NO: 190406 - DNA, 25 bp, Homo sapien
ggctgctagcttgataaacagaaac

SEQ ID NO: 190407 - DNA, 25 bp, Homo sapien
tgcaattaagtcaccctttaattcc

SEQ ID NO: 190408 - DNA, 25 bp, Homo sapien
tctgcaattaagtcaccctttaatt

SEQ ID NO: 190409 - DNA, 25 bp, Homo sapien
ctctgcaattaagtcaccctttaat

SEQ ID NO: 190410 - DNA, 25 bp, Homo sapien
ctgcaattaagtcaccctttaattc

SEQ ID NO: 190411 - DNA, 25 bp, Homo sapien
tcatcattgtcttgcccacagctgg

SEQ ID NO: 190412 - DNA, 25 bp, Homo sapien
tgtcttgcccacagctgggtatggt

SEQ ID NO: 190413 - DNA, 25 bp, Homo sapien
tggtagcaaccgcaaggcaaataat

SEQ ID NO: 190414 - DNA, 25 bp, Homo sapien
aaaatgatgtggtgcattggaatca

SEQ ID NO: 190415 - DNA, 25 bp, Homo sapien
gaacttccatacatgaaactttccc

SEQ ID NO: 190416 - DNA, 25 bp, Homo sapien
ctgtgaacttccatacatgaaactt

SEQ ID NO: 190417 - DNA, 25 bp, Homo sapien
acttccatacatgaaactttcccat

SEQ ID NO: 190418 - DNA, 25 bp, Homo sapien
gtgaacttccatacatgaaactttc

SEQ ID NO: 190419 - DNA, 25 bp, Homo sapien
cgtcccaaagttgcagttaatcctt

SEQ ID NO: 190420 - DNA, 25 bp, Homo sapien
gtttttgacattgtagtagaagcca

SEQ ID NO: 190421 - DNA, 25 bp, Homo sapien
tgttgaaaactccatgtcgtcccaa

SEQ ID NO: 190422 - DNA, 25 bp, Homo sapien
tcttgcataacccacagtggatggt

SEQ ID NO: 190423 - DNA, 25 bp, Homo sapien
gagtgcgagaccagctggccaatgt

SEQ ID NO: 190424 - DNA, 25 bp, Homo sapien
aaataaataaataagcagatcctaa

SEQ ID NO: 190425 - DNA, 25 bp, Homo sapien
aggagtgcgagaccagctggccaat

SEQ ID NO: 190426 - DNA, 25 bp, Homo sapien
gtcaggagtgcgagaccagctggcc

SEQ ID NO: 190427 - DNA, 25 bp, Homo sapien
gaagttgttaggaaatttcatgtct

SEQ ID NO: 190428 - DNA, 25 bp, Homo sapien
tgctggaagttgttaggaaatttca

SEQ ID NO: 190429 - DNA, 25 bp, Homo sapien
ttcatgtctaaaagaccccacggac

SEQ ID NO: 190430 - DNA, 25 bp, Homo sapien
tgttgtcctcgactgtcctctgctg

SEQ ID NO: 190431 - DNA, 25 bp, Homo sapien
tctcctctccagaggtatgaatttc

SEQ ID NO: 190432 - DNA, 25 bp, Homo sapien
agtctcctctccagaggtatgaatt

SEQ ID NO: 190433 - DNA, 25 bp, Homo sapien
tcctctccagaggtatgaatttcag

SEQ ID NO: 190434 - DNA, 25 bp, Homo sapien
cctctccagaggtatgaatttcagt

SEQ ID NO: 190435 - DNA, 25 bp, Homo sapien
aatgtgttccgatttgcttgcaagc

SEQ ID NO: 190436 - DNA, 25 bp, Homo sapien
ctcaaaagggttaactacaatggct

SEQ ID NO: 190437 - DNA, 25 bp, Homo sapien
gatcccaatccagcaatggcgaatg

SEQ ID NO: 190438 - DNA, 25 bp, Homo sapien
actacaatggcttctgttagtccag

SEQ ID NO: 190439 - DNA, 25 bp, Homo sapien
gacagtgacacatatcccagcaatt

SEQ ID NO: 190440 - DNA, 25 bp, Homo sapien
tcttgtactgctcaaaggtgaaaaa

SEQ ID NO: 190441 - DNA, 25 bp, Homo sapien
ttcttgtactgctcaaaggtgaaaa

SEQ ID NO: 190442 - DNA, 25 bp, Homo sapien
gtgacagtgacacatatcccagcaa

SEQ ID NO: 190443 - DNA, 25 bp, Homo sapien
gaaaaactagtgctatccatctggc

SEQ ID NO: 190444 - DNA, 25 bp, Homo sapien
gatgtctgggacacatacaccatat

SEQ ID NO: 190445 - DNA, 25 bp, Homo sapien
gattgagttcttttgcccctggaca

SEQ ID NO: 190446 - DNA, 25 bp, Homo sapien
gcaatgcctgtcagagtcgctatga

SEQ ID NO: 190447 - DNA, 25 bp, Homo sapien
gagagactgaccaagtctaattata

SEQ ID NO: 190448 - DNA, 25 bp, Homo sapien
ttgatctacatatttgagagactga

SEQ ID NO: 190449 - DNA, 25 bp, Homo sapien
ccaagctattttgtggtttgattac

SEQ ID NO: 190450 - DNA, 25 bp, Homo sapien
agctgttactgtgccctacttttgc

SEQ ID NO: 190451 - DNA, 25 bp, Homo sapien
tggcagaattcccttgtaaaaacca

SEQ ID NO: 190452 - DNA, 25 bp, Homo sapien
tttggggtttcagccaagataggtg

SEQ ID NO: 190453 - DNA, 25 bp, Homo sapien
gctctttttggggtttcagccaaga

SEQ ID NO: 190454 - DNA, 25 bp, Homo sapien
aagataggtggcagaattcccttgt

SEQ ID NO: 190455 - DNA, 25 bp, Homo sapien
caggaagttaagagattggtgacac

SEQ ID NO: 190456 - DNA, 25 bp, Homo sapien
taatccaggaagttaagagattggt

SEQ ID NO: 190457 - DNA, 25 bp, Homo sapien
ggaccataatccaggaagttaagag

SEQ ID NO: 190458 - DNA, 25 bp, Homo sapien
gaagttaagagattggtgacaccca

SEQ ID NO: 190459 - DNA, 25 bp, Homo sapien
gtatggaagccttgagtcatctgtt

SEQ ID NO: 190460 - DNA, 25 bp, Homo sapien
gccttacagtcaatcatatctttac

SEQ ID NO: 190461 - DNA, 25 bp, Homo sapien
ccatttcttgtatggaagccttgag

SEQ ID NO: 190462 - DNA, 25 bp, Homo sapien
agttgattttgaagccttacagtca

SEQ ID NO: 190463 - DNA, 25 bp, Homo sapien
tgtacgcggcttcacatctgtcagc

SEQ ID NO: 190464 - DNA, 25 bp, Homo sapien
caaagcgagaagcatgacgtggttc

SEQ ID NO: 190465 - DNA, 25 bp, Homo sapien
gctggaagacgatgttcggccgcct

SEQ ID NO: 190466 - DNA, 25 bp, Homo sapien
ttctgagcgattggaagctggtgcc

SEQ ID NO: 190467 - DNA, 25 bp, Homo sapien
ggagattaattcttcaaggggagcc

SEQ ID NO: 190468 - DNA, 25 bp, Homo sapien
agattaattcttcaaggggagcctt

SEQ ID NO: 190469 - DNA, 25 bp, Homo sapien
cgcaagaggatggagattaattctt

SEQ ID NO: 190470 - DNA, 25 bp, Homo sapien
gaggatggagattaattcttcaagg

SEQ ID NO: 190471 - DNA, 25 bp, Homo sapien
ctttcattgagatggctcccctggc

SEQ ID NO: 190472 - DNA, 25 bp, Homo sapien
tttcattgagatggctcccctggcc

SEQ ID NO: 190473 - DNA, 25 bp, Homo sapien
gcctttcattgagatggctcccctg

SEQ ID NO: 190474 - DNA, 25 bp, Homo sapien
ttgcctttcattgagatggctcccc

SEQ ID NO: 190475 - DNA, 25 bp, Homo sapien
tgttgttctgatggcaggtccccag

SEQ ID NO: 190476 - DNA, 25 bp, Homo sapien
tggcttaggacccagcatgctttga

SEQ ID NO: 190477 - DNA, 25 bp, Homo sapien
ttccttagtaatgggaggcggtgcc

SEQ ID NO: 190478 - DNA, 25 bp, Homo sapien
cccctaaactgttgttctgatggca

SEQ ID NO: 190479 - DNA, 25 bp, Homo sapien
agttctctggcagttcagtgttaca

SEQ ID NO: 190480 - DNA, 25 bp, Homo sapien
taaatctgtgaataccaaggctccc

SEQ ID NO: 190481 - DNA, 25 bp, Homo sapien
ccttcatggtcgattgcaaatattc

SEQ ID NO: 190482 - DNA, 25 bp, Homo sapien
aaggctcccctgcatagttctctgg

SEQ ID NO: 190483 - DNA, 25 bp, Homo sapien
cccatatgtaaggatagattaatta

SEQ ID NO: 190484 - DNA, 25 bp, Homo sapien
gaatgtaacctatccttattgtccc

SEQ ID NO: 190485 - DNA, 25 bp, Homo sapien
gtccctgattcccatatgtaaggat

SEQ ID NO: 190486 - DNA, 25 bp, Homo sapien
tgtgaatgtaacctatccttattgt

SEQ ID NO: 190487 - DNA, 25 bp, Homo sapien
tcatcttttccccatagaattctga

SEQ ID NO: 190488 - DNA, 25 bp, Homo sapien
gggaagacagtccaacatcatgtca

SEQ ID NO: 190489 - DNA, 25 bp, Homo sapien
caaagtgaaccacatgctcttcaac

SEQ ID NO: 190490 - DNA, 25 bp, Homo sapien
gtcctcctactggaatgggtcaggg

SEQ ID NO: 190491 - DNA, 25 bp, Homo sapien
cacattcagggggccagatgtagtc

SEQ ID NO: 190492 - DNA, 25 bp, Homo sapien
acattcagggggccagatgtagtca

SEQ ID NO: 190493 - DNA, 25 bp, Homo sapien
cattcagggggccagatgtagtcac

SEQ ID NO: 190494 - DNA, 25 bp, Homo sapien
aatgacggtgcaagaacagacatgc

SEQ ID NO: 190495 - DNA, 25 bp, Homo sapien
aagaagaataatgacggtgcaagaa

SEQ ID NO: 190496 - DNA, 25 bp, Homo sapien
gaataatgacggtgcaagaacagac

SEQ ID NO: 190497 - DNA, 25 bp, Homo sapien
gaagaataatgacggtgcaagaaca

SEQ ID NO: 190498 - DNA, 25 bp, Homo sapien
tgtatttatattactaagtcccacc

SEQ ID NO: 190499 - DNA, 25 bp, Homo sapien
gagctctcatttctgtaatgtgtat

SEQ ID NO: 190500 - DNA, 25 bp, Homo sapien
tgtgtatttatattactaagtccca

SEQ ID NO: 190501 - DNA, 25 bp, Homo sapien
agctctcatttctgtaatgtgtatt

SEQ ID NO: 190502 - DNA, 25 bp, Homo sapien
agaacggcggctgttatctgaagct

SEQ ID NO: 190503 - DNA, 25 bp, Homo sapien
ttctcaacaaagagtggcgatcatg

SEQ ID NO: 190504 - DNA, 25 bp, Homo sapien
tatctgaagctgcaaaccgctgcca

SEQ ID NO: 190505 - DNA, 25 bp, Homo sapien
gatcatgaaaggctgagccaccgag

SEQ ID NO: 190506 - DNA, 25 bp, Homo sapien
aaatccacgtgcagtttccatagaa

SEQ ID NO: 190507 - DNA, 25 bp, Homo sapien
gaatggcaagttttggcttggttct

SEQ ID NO: 190508 - DNA, 25 bp, Homo sapien
cataataaaatagctgcagtcagtc

SEQ ID NO: 190509 - DNA, 25 bp, Homo sapien
tgtacatccccagggtcaaattcaa

SEQ ID NO: 190510 - DNA, 25 bp, Homo sapien
cttacacttgtcagtatctcagatt

SEQ ID NO: 190511 - DNA, 25 bp, Homo sapien
aaaactagctaagtatgaggattcc

SEQ ID NO: 190512 - DNA, 25 bp, Homo sapien
tgtaaagctgtgttgaaaagccatg

SEQ ID NO: 190513 - DNA, 25 bp, Homo sapien
cagtaaagggatttggactcatgtg

SEQ ID NO: 190514 - DNA, 25 bp, Homo sapien
tgatgaaggtactctcaacagtgat

SEQ ID NO: 190515 - DNA, 25 bp, Homo sapien
gtttggatcggttgcacatctctga

SEQ ID NO: 190516 - DNA, 25 bp, Homo sapien
gctgtctaccaagcttttataactg

SEQ ID NO: 190517 - DNA, 25 bp, Homo sapien
gaaaatcattcgaaagctgtctacc

SEQ ID NO: 190518 - DNA, 25 bp, Homo sapien
ttataactgtttggatcggttgcac

SEQ ID NO: 190519 - DNA, 25 bp, Homo sapien
ggaaatatgcaaaatgtgaagtagc

SEQ ID NO: 190520 - DNA, 25 bp, Homo sapien
tcacgaggggagcaattactgcttt

SEQ ID NO: 190521 - DNA, 25 bp, Homo sapien
cactgggtcgtccaggtgttcacga

SEQ ID NO: 190522 - DNA, 25 bp, Homo sapien
aagtagcatcggcactgggtcgtcc

SEQ ID NO: 190523 - DNA, 25 bp, Homo sapien
tcttctcagtgcatgaatggctatt

SEQ ID NO: 190524 - DNA, 25 bp, Homo sapien
tggctattaaacttgtctgagagag

SEQ ID NO: 190525 - DNA, 25 bp, Homo sapien
taaacttgtctgagagagctggacc

SEQ ID NO: 190526 - DNA, 25 bp, Homo sapien
aataggacacgagataagatcttct

SEQ ID NO: 190527 - DNA, 25 bp, Homo sapien
caggaaccaagtcatcaccacagag

SEQ ID NO: 190528 - DNA, 25 bp, Homo sapien
gcccgtggaagtgattatagctaca

SEQ ID NO: 190529 - DNA, 25 bp, Homo sapien
ccctgtggaagactgatgtgggcaa

SEQ ID NO: 190530 - DNA, 25 bp, Homo sapien
gcagggtctgaagatggactccaca

SEQ ID NO: 190531 - DNA, 25 bp, Homo sapien
gtaccggaaacacccaggtcaatca

SEQ ID NO: 190532 - DNA, 25 bp, Homo sapien
tgtaccggaaacacccaggtcaatc

SEQ ID NO: 190533 - DNA, 25 bp, Homo sapien
tcaggaggtgaaacgtaaggaaatg

SEQ ID NO: 190534 - DNA, 25 bp, Homo sapien
caggaggtgaaacgtaaggaaatgg

SEQ ID NO: 190535 - DNA, 25 bp, Homo sapien
tacgggcttgctgatatggagttca

SEQ ID NO: 190536 - DNA, 25 bp, Homo sapien
acgggcttgctgatatggagttcag

SEQ ID NO: 190537 - DNA, 25 bp, Homo sapien
ggatacgggcttgctgatatggagt

SEQ ID NO: 190538 - DNA, 25 bp, Homo sapien
cctcggtgtgaggatacgggcttgc

SEQ ID NO: 190539 - DNA, 25 bp, Homo sapien
atgtgacttcatggtctgttcctgc

SEQ ID NO: 190540 - DNA, 25 bp, Homo sapien
tgtgacttcatggtctgttcctgcc

SEQ ID NO: 190541 - DNA, 25 bp, Homo sapien
cattcgaaaatctggacagagggtc

SEQ ID NO: 190542 - DNA, 25 bp, Homo sapien
gcttccaggttaatgaaaagcttca

SEQ ID NO: 190543 - DNA, 25 bp, Homo sapien
ccatgtaaatagaaggcttccaggt

SEQ ID NO: 190544 - DNA, 25 bp, Homo sapien
tgagaccaggctgtgaaccatgtaa

SEQ ID NO: 190545 - DNA, 25 bp, Homo sapien
cacagagaacaacagcatagtctga

SEQ ID NO: 190546 - DNA, 25 bp, Homo sapien
agtctgatctgtttccaccagccag

SEQ ID NO: 190547 - DNA, 25 bp, Homo sapien
gcttcctggattctacatcttttct

SEQ ID NO: 190548 - DNA, 25 bp, Homo sapien
cagcatagtctgatctgtttccacc

SEQ ID NO: 190549 - DNA, 25 bp, Homo sapien
gtgtcctgtgccctgttcacacttc

SEQ ID NO: 190550 - DNA, 25 bp, Homo sapien
aagtgtcctgtgccctgttcacact

SEQ ID NO: 190551 - DNA, 25 bp, Homo sapien
gtcctgtgccctgttcacacttcat

SEQ ID NO: 190552 - DNA, 25 bp, Homo sapien
ctggttaaagtgtcctgtgccctgt

SEQ ID NO: 190553 - DNA, 25 bp, Homo sapien
tttaggaggatctccattacactgg

SEQ ID NO: 190554 - DNA, 25 bp, Homo sapien
ttaggaggatctccattacactggg

SEQ ID NO: 190555 - DNA, 25 bp, Homo sapien
catccaatctggtgtctttgaacac

SEQ ID NO: 190556 - DNA, 25 bp, Homo sapien
gggaagtcggcatccaatctggtgt

SEQ ID NO: 190557 - DNA, 25 bp, Homo sapien
gatctcgagcattaagtcccagtag

SEQ ID NO: 190558 - DNA, 25 bp, Homo sapien
gtcccagtagctcagacatggcttg

SEQ ID NO: 190559 - DNA, 25 bp, Homo sapien
gagactgctcattctgcgagtgggc

SEQ ID NO: 190560 - DNA, 25 bp, Homo sapien
tttgattccaaagcggtcaggccag

SEQ ID NO: 190561 - DNA, 25 bp, Homo sapien
tgctggtgcaaaaggacatttaatt

SEQ ID NO: 190562 - DNA, 25 bp, Homo sapien
taattcctgcaaacaatgcttggca

SEQ ID NO: 190563 - DNA, 25 bp, Homo sapien
gcaaaaggacatttaattcctgcaa

SEQ ID NO: 190564 - DNA, 25 bp, Homo sapien
ctgcaatgatttttacagccctcat

SEQ ID NO: 190565 - DNA, 25 bp, Homo sapien
acatttaccactgtttgactctaga

SEQ ID NO: 190566 - DNA, 25 bp, Homo sapien
ccactgtttgactctagaatacact

SEQ ID NO: 190567 - DNA, 25 bp, Homo sapien
tttaccactgtttgactctagaata

SEQ ID NO: 190568 - DNA, 25 bp, Homo sapien
taccactgtttgactctagaataca

SEQ ID NO: 190569 - DNA, 25 bp, Homo sapien
agctcctcctttttcctgggtcaca

SEQ ID NO: 190570 - DNA, 25 bp, Homo sapien
agcagcagaagtgggcgtgcgtgga

SEQ ID NO: 190571 - DNA, 25 bp, Homo sapien
cagaagtgggcgtgcgtggagcact

SEQ ID NO: 190572 - DNA, 25 bp, Homo sapien
tcaggcaatgaatccttcagctcct

SEQ ID NO: 190573 - DNA, 25 bp, Homo sapien
tcatggcctatcatcctcaaaccct

SEQ ID NO: 190574 - DNA, 25 bp, Homo sapien
gaatgtagacatgcagctttctgta

SEQ ID NO: 190575 - DNA, 25 bp, Homo sapien
tttctccagagggtcccatacatct

SEQ ID NO: 190576 - DNA, 25 bp, Homo sapien
tacatctagaatgtagacatgcagc

SEQ ID NO: 190577 - DNA, 25 bp, Homo sapien
ccagaggcttgtaatctttcgccca

SEQ ID NO: 190578 - DNA, 25 bp, Homo sapien
caccagaggcttgtaatctttcgcc

SEQ ID NO: 190579 - DNA, 25 bp, Homo sapien
accagaggcttgtaatctttcgccc

SEQ ID NO: 190580 - DNA, 25 bp, Homo sapien
gactccatttgtctttgtattcccc

SEQ ID NO: 190581 - DNA, 25 bp, Homo sapien
ccatttgtctttgtattccccccat

SEQ ID NO: 190582 - DNA, 25 bp, Homo sapien
agactccatttgtctttgtattccc

SEQ ID NO: 190583 - DNA, 25 bp, Homo sapien
ctgtagactccatttgtctttgtat

SEQ ID NO: 190584 - DNA, 25 bp, Homo sapien
tttgctaaaccaggattaaacacca

SEQ ID NO: 190585 - DNA, 25 bp, Homo sapien
ttgctaaaccaggattaaacaccat

SEQ ID NO: 190586 - DNA, 25 bp, Homo sapien
ctggttttcaccacatctagggggt

SEQ ID NO: 190587 - DNA, 25 bp, Homo sapien
ctagggggtgcatcaggcaaatttc

SEQ ID NO: 190588 - DNA, 25 bp, Homo sapien
cacatctagggggtgcatcaggcaa

SEQ ID NO: 190589 - DNA, 25 bp, Homo sapien
tgcatcaggcaaatttctacaagac

SEQ ID NO: 190590 - DNA, 25 bp, Homo sapien
ctcaaggtagcatgagcagaaatct

SEQ ID NO: 190591 - DNA, 25 bp, Homo sapien
gcagaaatcttccttgctaactgtt

SEQ ID NO: 190592 - DNA, 25 bp, Homo sapien
taaggtctccatatacttctccttg

SEQ ID NO: 190593 - DNA, 25 bp, Homo sapien
ttactcaaggtagcatgagcagaaa

SEQ ID NO: 190594 - DNA, 25 bp, Homo sapien
tacccatgatgataccagttcctta

SEQ ID NO: 190595 - DNA, 25 bp, Homo sapien
agaatcaggtgaccagaatttttgt

SEQ ID NO: 190596 - DNA, 25 bp, Homo sapien
tctggtgccttcatggactcatcat

SEQ ID NO: 190597 - DNA, 25 bp, Homo sapien
agtaagaatcaggtgaccagaattt

SEQ ID NO: 190598 - DNA, 25 bp, Homo sapien
cctggatgccctggcccttgaactg

SEQ ID NO: 190599 - DNA, 25 bp, Homo sapien
tggatgccctggcccttgaactgcc

SEQ ID NO: 190600 - DNA, 25 bp, Homo sapien
ggcccttgaactgcctcaagtacat

SEQ ID NO: 190601 - DNA, 25 bp, Homo sapien
ctggatgccctggcccttgaactgc

SEQ ID NO: 190602 - DNA, 25 bp, Homo sapien
agtataagcctatatattacttaga

SEQ ID NO: 190603 - DNA, 25 bp, Homo sapien
tagaggtagaagtagtcatgtgtga

SEQ ID NO: 190604 - DNA, 25 bp, Homo sapien
tacaaaggctaaagtataagcctat

SEQ ID NO: 190605 - DNA, 25 bp, Homo sapien
gaagtagtcatgtgtgaactgagat

SEQ ID NO: 190606 - DNA, 25 bp, Homo sapien
gaaagaaactgaaagttgatttcaa

SEQ ID NO: 190607 - DNA, 25 bp, Homo sapien
actaaatgattgtcttttccctgaa

SEQ ID NO: 190608 - DNA, 25 bp, Homo sapien
taaaggactaaatgattgtcttttc

SEQ ID NO: 190609 - DNA, 25 bp, Homo sapien
ggaaagaaactgaaagttgatttca

SEQ ID NO: 190610 - DNA, 25 bp, Homo sapien
tttctcatatcagagtggatccaca

SEQ ID NO: 190611 - DNA, 25 bp, Homo sapien
ctttctcatatcagagtggatccac

SEQ ID NO: 190612 - DNA, 25 bp, Homo sapien
tctttctcatatcagagtggatcca

SEQ ID NO: 190613 - DNA, 25 bp, Homo sapien
ttctcatatcagagtggatccacaa

SEQ ID NO: 190614 - DNA, 25 bp, Homo sapien
agctgaatcacaaacagtccacacc

SEQ ID NO: 190615 - DNA, 25 bp, Homo sapien
tcccaagctgaatcacaaacagtcc

SEQ ID NO: 190616 - DNA, 25 bp, Homo sapien
ttctcccaagctgaatcacaaacag

SEQ ID NO: 190617 - DNA, 25 bp, Homo sapien
caagctgaatcacaaacagtccaca

SEQ ID NO: 190618 - DNA, 25 bp, Homo sapien
cttgactggatgagctattatctca

SEQ ID NO: 190619 - DNA, 25 bp, Homo sapien
gggcttgactggatgagctattatc

SEQ ID NO: 190620 - DNA, 25 bp, Homo sapien
gaatgggcttgactggatgagctat

SEQ ID NO: 190621 - DNA, 25 bp, Homo sapien
aggaatgggcttgactggatgagct

SEQ ID NO: 190622 - DNA, 25 bp, Homo sapien
tttgctaaagagatcttcgtcgtca

SEQ ID NO: 190623 - DNA, 25 bp, Homo sapien
tctcctccacgtcatatttgctaaa

SEQ ID NO: 190624 - DNA, 25 bp, Homo sapien
ccacgtcatatttgctaaagagatc

SEQ ID NO: 190625 - DNA, 25 bp, Homo sapien
tgttttacattcagcgttctcctcc

SEQ ID NO: 190626 - DNA, 25 bp, Homo sapien
tctgtggtctgggttgaattcaaca

SEQ ID NO: 190627 - DNA, 25 bp, Homo sapien
caaagaatttaatcgttctgtggtc

SEQ ID NO: 190628 - DNA, 25 bp, Homo sapien
aatttaatcgttctgtggtctgggt

SEQ ID NO: 190629 - DNA, 25 bp, Homo sapien
tgtggtctgggttgaattcaacact

SEQ ID NO: 190630 - DNA, 25 bp, Homo sapien
actgaaattcttcgcgattagaaag

SEQ ID NO: 190631 - DNA, 25 bp, Homo sapien
aaactgaaattcttcgcgattagaa

SEQ ID NO: 190632 - DNA, 25 bp, Homo sapien
aaattcttcgcgattagaaagccaa

SEQ ID NO: 190633 - DNA, 25 bp, Homo sapien
attcttcgcgattagaaagccaagt

SEQ ID NO: 190634 - DNA, 25 bp, Homo sapien
ctttggcggtttcaattctagcctt

SEQ ID NO: 190635 - DNA, 25 bp, Homo sapien
tctttggcggtttcaattctagcct

SEQ ID NO: 190636 - DNA, 25 bp, Homo sapien
agcaaaagtttctaagtcatcaact

SEQ ID NO: 190637 - DNA, 25 bp, Homo sapien
tggcggtttcaattctagccttttg

SEQ ID NO: 190638 - DNA, 25 bp, Homo sapien
ttctgagcacctgtaaaatctgatg

SEQ ID NO: 190639 - DNA, 25 bp, Homo sapien
cactgtacattaatgttctgagcac

SEQ ID NO: 190640 - DNA, 25 bp, Homo sapien
aatctgatgtgcattctttcaggcc

SEQ ID NO: 190641 - DNA, 25 bp, Homo sapien
cgtattatttatgttgggagtagct

SEQ ID NO: 190642 - DNA, 25 bp, Homo sapien
caaggaaggggcaatgcaaacccag

SEQ ID NO: 190643 - DNA, 25 bp, Homo sapien
cctggtgcagctgctagcaaagatc

SEQ ID NO: 190644 - DNA, 25 bp, Homo sapien
gctgctagcaaagatccagagactc

SEQ ID NO: 190645 - DNA, 25 bp, Homo sapien
gactcaaggaaggggcaatgcaaac

SEQ ID NO: 190646 - DNA, 25 bp, Homo sapien
catgtttccatgacacactgacaca

SEQ ID NO: 190647 - DNA, 25 bp, Homo sapien
cccatgtttccatgacacactgaca

SEQ ID NO: 190648 - DNA, 25 bp, Homo sapien
atgtttccatgacacactgacacac

SEQ ID NO: 190649 - DNA, 25 bp, Homo sapien
ccatgtttccatgacacactgacac

SEQ ID NO: 190650 - DNA, 25 bp, Homo sapien
aatccgcaaacctgagcatgcccag

SEQ ID NO: 190651 - DNA, 25 bp, Homo sapien
taaaatccgcaaacctgagcatgcc

SEQ ID NO: 190652 - DNA, 25 bp, Homo sapien
tgagaaataaaatccgcaaacctga

SEQ ID NO: 190653 - DNA, 25 bp, Homo sapien
aaataaaatccgcaaacctgagcat

SEQ ID NO: 190654 - DNA, 25 bp, Homo sapien
caactgcagcgacttccaaggtggt

SEQ ID NO: 190655 - DNA, 25 bp, Homo sapien
aggtggttctttccgaaccactcat

SEQ ID NO: 190656 - DNA, 25 bp, Homo sapien
cttctgtctggacaactgcagcgac

SEQ ID NO: 190657 - DNA, 25 bp, Homo sapien
cagcgacttccaaggtggttctttc

SEQ ID NO: 190658 - DNA, 25 bp, Homo sapien
tggccctccccagattatagtgatt

SEQ ID NO: 190659 - DNA, 25 bp, Homo sapien
aagaaggtatttatggctgacagag

SEQ ID NO: 190660 - DNA, 25 bp, Homo sapien
tgaacagcatgttagcaaagaaggt

SEQ ID NO: 190661 - DNA, 25 bp, Homo sapien
gctgcttagatcatgtgaacagaga

SEQ ID NO: 190662 - DNA, 25 bp, Homo sapien
cagagggatcatggctagaacatca

SEQ ID NO: 190663 - DNA, 25 bp, Homo sapien
gttaccctgcgcaacccagagggat

SEQ ID NO: 190664 - DNA, 25 bp, Homo sapien
tggaaggatgctcaaagtgctcggt

SEQ ID NO: 190665 - DNA, 25 bp, Homo sapien
caagcctgctcaacgagtgccagga

SEQ ID NO: 190666 - DNA, 25 bp, Homo sapien
gacattcccatcgaataacaactgt

SEQ ID NO: 190667 - DNA, 25 bp, Homo sapien
tcctctgcgacattcccatcgaata

SEQ ID NO: 190668 - DNA, 25 bp, Homo sapien
ctgttatctgccctgtgcaagggtt

SEQ ID NO: 190669 - DNA, 25 bp, Homo sapien
gaataacaactgttatctgccctgt

SEQ ID NO: 190670 - DNA, 25 bp, Homo sapien
catggaacaggaagtcttttctctt

SEQ ID NO: 190671 - DNA, 25 bp, Homo sapien
tttctcttttcagagcatcatccat

SEQ ID NO: 190672 - DNA, 25 bp, Homo sapien
ctcttttcagagcatcatccatcat

SEQ ID NO: 190673 - DNA, 25 bp, Homo sapien
tccatggaacaggaagtcttttctc

SEQ ID NO: 190674 - DNA, 25 bp, Homo sapien
gccaggcagtgtcaatgtaaaccaa

SEQ ID NO: 190675 - DNA, 25 bp, Homo sapien
gaaggaacctgcagtgtacccatga

SEQ ID NO: 190676 - DNA, 25 bp, Homo sapien
cccatgaaataacggtaggcaggtc

SEQ ID NO: 190677 - DNA, 25 bp, Homo sapien
gatgttcccatgtgttgacctgcca

SEQ ID NO: 190678 - DNA, 25 bp, Homo sapien
cagatgatctcagtacctaagccat

SEQ ID NO: 190679 - DNA, 25 bp, Homo sapien
gcactgatagacatgctggacacag

SEQ ID NO: 190680 - DNA, 25 bp, Homo sapien
taggagtgctaatatcaacccgctg

SEQ ID NO: 190681 - DNA, 25 bp, Homo sapien
taaatcaggcacattgctaggagtg

SEQ ID NO: 190682 - DNA, 25 bp, Homo sapien
aattagccagacgtgctgccacgca

SEQ ID NO: 190683 - DNA, 25 bp, Homo sapien
tttaacaggttagacagcatgatgc

SEQ ID NO: 190684 - DNA, 25 bp, Homo sapien
gcatgatgctgttccttgtcaaact

SEQ ID NO: 190685 - DNA, 25 bp, Homo sapien
gaaatttcctggtcctttgagctac

SEQ ID NO: 190686 - DNA, 25 bp, Homo sapien
cgagttgagatattaaacgcttgca

SEQ ID NO: 190687 - DNA, 25 bp, Homo sapien
aacgcttgcatggttgtaatcttgc

SEQ ID NO: 190688 - DNA, 25 bp, Homo sapien
taatcttgcagagtgaaagtatggg

SEQ ID NO: 190689 - DNA, 25 bp, Homo sapien
catttatctgactggcgagttgaga

SEQ ID NO: 190690 - DNA, 25 bp, Homo sapien
gggaacatctgggaatatagaagcc

SEQ ID NO: 190691 - DNA, 25 bp, Homo sapien
cataagatttatttcacgatatttc

SEQ ID NO: 190692 - DNA, 25 bp, Homo sapien
caactgataagatatggttgctgtc

SEQ ID NO: 190693 - DNA, 25 bp, Homo sapien
gaacatctgggaatatagaagccaa

SEQ ID NO: 190694 - DNA, 25 bp, Homo sapien
gaccacagtggattgcccattcagg

SEQ ID NO: 190695 - DNA, 25 bp, Homo sapien
ggtatgagcaaagagtgctggtttc

SEQ ID NO: 190696 - DNA, 25 bp, Homo sapien
taacattcaacagaatgggaggact

SEQ ID NO: 190697 - DNA, 25 bp, Homo sapien
ggaggactgttaatggtgaccaccc

SEQ ID NO: 190698 - DNA, 25 bp, Homo sapien
ttcaacacttatggacctgctgttg

SEQ ID NO: 190699 - DNA, 25 bp, Homo sapien
tcaacacttatggacctgctgttgc

SEQ ID NO: 190700 - DNA, 25 bp, Homo sapien
gaatctttgctagagtctgcacaag

SEQ ID NO: 190701 - DNA, 25 bp, Homo sapien
gggccaggcccaatcataactagct

SEQ ID NO: 190702 - DNA, 25 bp, Homo sapien
aactagctaaggctagactcctggg

SEQ ID NO: 190703 - DNA, 25 bp, Homo sapien
taagcatccttaatagtagccctgt

SEQ ID NO: 190704 - DNA, 25 bp, Homo sapien
tggcaaagtgactcataaagaaaca

SEQ ID NO: 190705 - DNA, 25 bp, Homo sapien
aagtgactcataaagaaacacccac

SEQ ID NO: 190706 - DNA, 25 bp, Homo sapien
aaagtgactcataaagaaacaccca

SEQ ID NO: 190707 - DNA, 25 bp, Homo sapien
cttgctaaattagctatggttctgt

SEQ ID NO: 190708 - DNA, 25 bp, Homo sapien
ctctgctgaaaatacgatgattcta

SEQ ID NO: 190709 - DNA, 25 bp, Homo sapien
ctgatttcagacacgcatttttggc

SEQ ID NO: 190710 - DNA, 25 bp, Homo sapien
cagtcagggcacttgctaaattagc

SEQ ID NO: 190711 - DNA, 25 bp, Homo sapien
caagctggtatttgacctttggcag

SEQ ID NO: 190712 - DNA, 25 bp, Homo sapien
gggtcttatattctcaacaaactgg

SEQ ID NO: 190713 - DNA, 25 bp, Homo sapien
tggactgggaaataccggagtttgc

SEQ ID NO: 190714 - DNA, 25 bp, Homo sapien
ctgggcccaagacaatagtgtgctt

SEQ ID NO: 190715 - DNA, 25 bp, Homo sapien
gccgccaatggttcccagctaaagg

SEQ ID NO: 190716 - DNA, 25 bp, Homo sapien
tttatcatcccttgcgctaactttg

SEQ ID NO: 190717 - DNA, 25 bp, Homo sapien
atctggaatcctaatgggccgccaa

SEQ ID NO: 190718 - DNA, 25 bp, Homo sapien
gaagaattacccatgttattttatc

SEQ ID NO: 190719 - DNA, 25 bp, Homo sapien
cattgatgtcaaatcatgtccctcc

SEQ ID NO: 190720 - DNA, 25 bp, Homo sapien
aatcatgtccctccttcttcagaat

SEQ ID NO: 190721 - DNA, 25 bp, Homo sapien
ccagcccagaagtcttcgcagatca

SEQ ID NO: 190722 - DNA, 25 bp, Homo sapien
gaagtcttcgcagatcattgatgtc

SEQ ID NO: 190723 - DNA, 25 bp, Homo sapien
gaagtgtgtcttgctttccattaca

SEQ ID NO: 190724 - DNA, 25 bp, Homo sapien
tagtagacactcaagcagataaagg

SEQ ID NO: 190725 - DNA, 25 bp, Homo sapien
ccaaaaacaaagtctggcacatagt

SEQ ID NO: 190726 - DNA, 25 bp, Homo sapien
tgtaaagtaacacaagccaaggaaa

SEQ ID NO: 190727 - DNA, 25 bp, Homo sapien
tctgcccctcctataggaacactgg

SEQ ID NO: 190728 - DNA, 25 bp, Homo sapien
gaatattctcctaaccctgtcttga

SEQ ID NO: 190729 - DNA, 25 bp, Homo sapien
gtcatggaacactaaaaactaagaa

SEQ ID NO: 190730 - DNA, 25 bp, Homo sapien
cattattgggctttcttaaggtaga

SEQ ID NO: 190731 - DNA, 25 bp, Homo sapien
tgcaatgacctctttcaaatcgaaa

SEQ ID NO: 190732 - DNA, 25 bp, Homo sapien
gccaagaattccacacaccatgact

SEQ ID NO: 190733 - DNA, 25 bp, Homo sapien
ccatgctccttctaaagtgccaaga

SEQ ID NO: 190734 - DNA, 25 bp, Homo sapien
tgactacaattacgaaggagagatt

SEQ ID NO: 190735 - DNA, 25 bp, Homo sapien
tgcagtctccgtttggacctggaag

SEQ ID NO: 190736 - DNA, 25 bp, Homo sapien
gtacttgggaatatgctaagcatgg

SEQ ID NO: 190737 - DNA, 25 bp, Homo sapien
gaattagaagtctgggtcctctatc

SEQ ID NO: 190738 - DNA, 25 bp, Homo sapien
gattgactcactccagggttttgaa

SEQ ID NO: 190739 - DNA, 25 bp, Homo sapien
ctatatagccttcaattaaacttct

SEQ ID NO: 190740 - DNA, 25 bp, Homo sapien
gcgtctgcagccaagtcagcactga

SEQ ID NO: 190741 - DNA, 25 bp, Homo sapien
gggcaaacgttcatccatatccatc

SEQ ID NO: 190742 - DNA, 25 bp, Homo sapien
tatccatcacacctttccaaaacat

SEQ ID NO: 190743 - DNA, 25 bp, Homo sapien
tgacctccaactacacacagacttg

SEQ ID NO: 190744 - DNA, 25 bp, Homo sapien
ggaagttttcacagagttgacaagg

SEQ ID NO: 190745 - DNA, 25 bp, Homo sapien
gataaacagggtctggtgacaatgt

SEQ ID NO: 190746 - DNA, 25 bp, Homo sapien
gagtcagtacagtccgcactagagg

SEQ ID NO: 190747 - DNA, 25 bp, Homo sapien
ctgaggtgccttagctagtctggaa

SEQ ID NO: 190748 - DNA, 25 bp, Homo sapien
caaggaacttaaccattttcgcata

SEQ ID NO: 190749 - DNA, 25 bp, Homo sapien
aggttagcctcctgcgatcccactg

SEQ ID NO: 190750 - DNA, 25 bp, Homo sapien
tatttgggcataacccaggttagcc

SEQ ID NO: 190751 - DNA, 25 bp, Homo sapien
cccactgctccttgattgatcaagg

SEQ ID NO: 190752 - DNA, 25 bp, Homo sapien
aatgatgcaagcagcgccctggatg

SEQ ID NO: 190753 - DNA, 25 bp, Homo sapien
catcgccatgtagttggtgggtctc

SEQ ID NO: 190754 - DNA, 25 bp, Homo sapien
tgggtctcaacgctggtgatatgct

SEQ ID NO: 190755 - DNA, 25 bp, Homo sapien
tgctggcaacacagcgccaagcttg

SEQ ID NO: 190756 - DNA, 25 bp, Homo sapien
ggacaataaaggatatgaaggtgac

SEQ ID NO: 190757 - DNA, 25 bp, Homo sapien
tggtttggggacaataaaggatatg

SEQ ID NO: 190758 - DNA, 25 bp, Homo sapien
caataaaggatatgaaggtgacaag

SEQ ID NO: 190759 - DNA, 25 bp, Homo sapien
aataaaggatatgaaggtgacaaga

SEQ ID NO: 190760 - DNA, 25 bp, Homo sapien
ttctgaaacaaggtcttactctgtt

SEQ ID NO: 190761 - DNA, 25 bp, Homo sapien
tttctgaaacaaggtcttactctgt

SEQ ID NO: 190762 - DNA, 25 bp, Homo sapien
gtggtgctatctcagctcactgcag

SEQ ID NO: 190763 - DNA, 25 bp, Homo sapien
gcccaggctggagcgcagtggtgct

SEQ ID NO: 190764 - DNA, 25 bp, Homo sapien
gctctgccactaactcactgggaaa

SEQ ID NO: 190765 - DNA, 25 bp, Homo sapien
tctactgtcataacttagcctgagg

SEQ ID NO: 190766 - DNA, 25 bp, Homo sapien
aaacagcagtgtatagagtcctaga

SEQ ID NO: 190767 - DNA, 25 bp, Homo sapien
ctttactcagggtgtgactttgacc

SEQ ID NO: 190768 - DNA, 25 bp, Homo sapien
catgcccagccggacttaaaaattt

SEQ ID NO: 190769 - DNA, 25 bp, Homo sapien
gagccaagagcatataaaatccttt

SEQ ID NO: 190770 - DNA, 25 bp, Homo sapien
tgtgtctatctaaaatcctcctggg

SEQ ID NO: 190771 - DNA, 25 bp, Homo sapien
ttaacctctggaattgagaccacat

SEQ ID NO: 190772 - DNA, 25 bp, Homo sapien
tggtctccgggttgggtttgcattc

SEQ ID NO: 190773 - DNA, 25 bp, Homo sapien
caacgtgtgatgacaaatggtctcc

SEQ ID NO: 190774 - DNA, 25 bp, Homo sapien
aacatagagttacaatcaacgtgtg

SEQ ID NO: 190775 - DNA, 25 bp, Homo sapien
gcattcctctaaatatattggcatt

SEQ ID NO: 190776 - DNA, 25 bp, Homo sapien
aagtttgccaagaattgatgctacg

SEQ ID NO: 190777 - DNA, 25 bp, Homo sapien
caggacagggccctgtcagttctcc

SEQ ID NO: 190778 - DNA, 25 bp, Homo sapien
gatgctacggagtattgaaaacagg

SEQ ID NO: 190779 - DNA, 25 bp, Homo sapien
ccaagaattgatgctacggagtatt

SEQ ID NO: 190780 - DNA, 25 bp, Homo sapien
cccgaattatactaacgtacagatg

SEQ ID NO: 190781 - DNA, 25 bp, Homo sapien
tacagatgtaatggattaccagcca

SEQ ID NO: 190782 - DNA, 25 bp, Homo sapien
ttccagaggtcacaatatttgcagc

SEQ ID NO: 190783 - DNA, 25 bp, Homo sapien
atgataatagccctccccagaaact

SEQ ID NO: 190784 - DNA, 25 bp, Homo sapien
attcatggaacttttgaaatctgtt

SEQ ID NO: 190785 - DNA, 25 bp, Homo sapien
ttcatggaacttttgaaatctgttt

SEQ ID NO: 190786 - DNA, 25 bp, Homo sapien
catgcagtgacttggtgggaagctc

SEQ ID NO: 190787 - DNA, 25 bp, Homo sapien
tgtcactgtcaaatcttgggaaaag

SEQ ID NO: 190788 - DNA, 25 bp, Homo sapien
gaagctcgggacaggtcttgactga

SEQ ID NO: 190789 - DNA, 25 bp, Homo sapien
aattaggtggtctctttaccactgg

SEQ ID NO: 190790 - DNA, 25 bp, Homo sapien
tgacatatatgtttagggcattaca

SEQ ID NO: 190791 - DNA, 25 bp, Homo sapien
ggaaatgcattctgacctcaaactc

SEQ ID NO: 190792 - DNA, 25 bp, Homo sapien
tggcttgcccatgaattgcataaca

SEQ ID NO: 190793 - DNA, 25 bp, Homo sapien
gggcattacatgagaccacactttt

SEQ ID NO: 190794 - DNA, 25 bp, Homo sapien
aatcccttagctgtatacatttctc

SEQ ID NO: 190795 - DNA, 25 bp, Homo sapien
tttagtacagtaccttcaatattca

SEQ ID NO: 190796 - DNA, 25 bp, Homo sapien
tcccattcataaaccaaatccacaa

SEQ ID NO: 190797 - DNA, 25 bp, Homo sapien
catgggaaagttatactgccatctt

SEQ ID NO: 190798 - DNA, 25 bp, Homo sapien
aagccaaagagtggatgggtttgtt

SEQ ID NO: 190799 - DNA, 25 bp, Homo sapien
cttaaaaatgtgagcctgcagagcg

SEQ ID NO: 190800 - DNA, 25 bp, Homo sapien
gagggagctcccacaccatttataa

SEQ ID NO: 190801 - DNA, 25 bp, Homo sapien
cctaacatgaggaaagggtgagtga

SEQ ID NO: 190802 - DNA, 25 bp, Homo sapien
tataagacctaagaagctacaggaa

SEQ ID NO: 190803 - DNA, 25 bp, Homo sapien
ggtgagtgacagacttccagcagcc

SEQ ID NO: 190804 - DNA, 25 bp, Homo sapien
tgcttccgagattccagcaatcctc

SEQ ID NO: 190805 - DNA, 25 bp, Homo sapien
tatttttgaagagacttgaaagaat

SEQ ID NO: 190806 - DNA, 25 bp, Homo sapien
aacctctgcttccgagattccagca

SEQ ID NO: 190807 - DNA, 25 bp, Homo sapien
tctgcttccgagattccagcaatcc

SEQ ID NO: 190808 - DNA, 25 bp, Homo sapien
ggccacgatctgccgagaagcctcg

SEQ ID NO: 190809 - DNA, 25 bp, Homo sapien
agaagcctcgcgcactaagctgact

SEQ ID NO: 190810 - DNA, 25 bp, Homo sapien
agaaccaccggccacgatctgccga

SEQ ID NO: 190811 - DNA, 25 bp, Homo sapien
tcgcgcactaagctgacttcaggct

SEQ ID NO: 190812 - DNA, 25 bp, Homo sapien
taactcaagtgaagtgacccaggcc

SEQ ID NO: 190813 - DNA, 25 bp, Homo sapien
aatccggcgactgctggaaagcgag

SEQ ID NO: 190814 - DNA, 25 bp, Homo sapien
tctctggaaagaagacccgcggatg

SEQ ID NO: 190815 - DNA, 25 bp, Homo sapien
caggagcctccggtagtttgtcaaa

SEQ ID NO: 190816 - DNA, 25 bp, Homo sapien
cccagatccctttactaagctggcc

SEQ ID NO: 190817 - DNA, 25 bp, Homo sapien
gttgatggctatggactcatagtta

SEQ ID NO: 190818 - DNA, 25 bp, Homo sapien
ggctatggactcatagttaatttat

SEQ ID NO: 190819 - DNA, 25 bp, Homo sapien
tcaatgtcattgtagtggatgattt

SEQ ID NO: 190820 - DNA, 25 bp, Homo sapien
gaggccagtttgattcttgtctgaa

SEQ ID NO: 190821 - DNA, 25 bp, Homo sapien
ctaattagaggccagtttgattctt

SEQ ID NO: 190822 - DNA, 25 bp, Homo sapien
taattagaggccagtttgattcttg

SEQ ID NO: 190823 - DNA, 25 bp, Homo sapien
ttagaggccagtttgattcttgtct

SEQ ID NO: 190824 - DNA, 25 bp, Homo sapien
tgtggcctccgtagtatgattaata

SEQ ID NO: 190825 - DNA, 25 bp, Homo sapien
gattaatataaaggtctgagtgtgc

SEQ ID NO: 190826 - DNA, 25 bp, Homo sapien
tatgattaatataaaggtctgagtg

SEQ ID NO: 190827 - DNA, 25 bp, Homo sapien
tgactgtgtggcctccgtagtatga

SEQ ID NO: 190828 - DNA, 25 bp, Homo sapien
acaggtgtgaagcgaagccaccacg

SEQ ID NO: 190829 - DNA, 25 bp, Homo sapien
tgtgttgtatttgtggtgtattcat

SEQ ID NO: 190830 - DNA, 25 bp, Homo sapien
aggtgtgaagcgaagccaccacgcc

SEQ ID NO: 190831 - DNA, 25 bp, Homo sapien
cttgttttattatgaactagtttct

SEQ ID NO: 190832 - DNA, 25 bp, Homo sapien
aactgaacaacctgctcctgaatga

SEQ ID NO: 190833 - DNA, 25 bp, Homo sapien
actcaaaactgctcagctacgtgga

SEQ ID NO: 190834 - DNA, 25 bp, Homo sapien
actcactcaaaactgctcagctacg

SEQ ID NO: 190835 - DNA, 25 bp, Homo sapien
tcactcaaaactgctcagctacgtg

SEQ ID NO: 190836 - DNA, 25 bp, Homo sapien
tcatcatgtgaaagagcagaaccag

SEQ ID NO: 190837 - DNA, 25 bp, Homo sapien
caatcaagaacgtgctctgaaggta

SEQ ID NO: 190838 - DNA, 25 bp, Homo sapien
aacggttagagcaggagcttcatca

SEQ ID NO: 190839 - DNA, 25 bp, Homo sapien
tcccctgtggcagtgcaaacggtta

SEQ ID NO: 190840 - DNA, 25 bp, Homo sapien
tgtggttgtccgtgacagcagctct

SEQ ID NO: 190841 - DNA, 25 bp, Homo sapien
cagaatctgcctgaaagtggcctaa

SEQ ID NO: 190842 - DNA, 25 bp, Homo sapien
gaactgattgatacttacttggcca

SEQ ID NO: 190843 - DNA, 25 bp, Homo sapien
gaggcgttgccacatcagagttaag

SEQ ID NO: 190844 - DNA, 25 bp, Homo sapien
taaacgtagtgcctcaaggctacgg

SEQ ID NO: 190845 - DNA, 25 bp, Homo sapien
tatcccataaacgtagtgcctcaag

SEQ ID NO: 190846 - DNA, 25 bp, Homo sapien
tgttttatcccataaacgtagtgcc

SEQ ID NO: 190847 - DNA, 25 bp, Homo sapien
gcctcaaggctacgggcttttcaaa

SEQ ID NO: 190848 - DNA, 25 bp, Homo sapien
ctggcaatgtgggacgcttaggatt

SEQ ID NO: 190849 - DNA, 25 bp, Homo sapien
caatagactgtatataaatagggca

SEQ ID NO: 190850 - DNA, 25 bp, Homo sapien
gcctcaaactcccatgctgaaatga

SEQ ID NO: 190851 - DNA, 25 bp, Homo sapien
aaatctcagagcaagccatcgggct

SEQ ID NO: 190852 - DNA, 25 bp, Homo sapien
ttagtatatgtacccaaggtgagca

SEQ ID NO: 190853 - DNA, 25 bp, Homo sapien
ttgtctgtcatccttgcataggagc

SEQ ID NO: 190854 - DNA, 25 bp, Homo sapien
ttttagtatatgtacccaaggtgag

SEQ ID NO: 190855 - DNA, 25 bp, Homo sapien
atttgtctgtcatccttgcatagga

SEQ ID NO: 190856 - DNA, 25 bp, Homo sapien
ctaatttgttggggtcttttgtgtg

SEQ ID NO: 190857 - DNA, 25 bp, Homo sapien
gcctccccctccaagggtcagtctc

SEQ ID NO: 190858 - DNA, 25 bp, Homo sapien
tttgagaaaagtacggccagatggc

SEQ ID NO: 190859 - DNA, 25 bp, Homo sapien
gccagatggcagatataaaactcat

SEQ ID NO: 190860 - DNA, 25 bp, Homo sapien
gtacggccagatggcagatataaaa

SEQ ID NO: 190861 - DNA, 25 bp, Homo sapien
gaaaagtacggccagatggcagata

SEQ ID NO: 190862 - DNA, 25 bp, Homo sapien
gagagaaggggacctatatgcctcc

SEQ ID NO: 190863 - DNA, 25 bp, Homo sapien
gaaggggacctatatgcctcctctg

SEQ ID NO: 190864 - DNA, 25 bp, Homo sapien
gagctggcactgtaggtgactatat

SEQ ID NO: 190865 - DNA, 25 bp, Homo sapien
tggcactgtaggtgactatatggta

SEQ ID NO: 190866 - DNA, 25 bp, Homo sapien
tttctctgcattcagaattccttgt

SEQ ID NO: 190867 - DNA, 25 bp, Homo sapien
tcaatctttctctgcattcagaatt

SEQ ID NO: 190868 - DNA, 25 bp, Homo sapien
aatctttctctgcattcagaattcc

SEQ ID NO: 190869 - DNA, 25 bp, Homo sapien
tctttctctgcattcagaattcctt

SEQ ID NO: 190870 - DNA, 25 bp, Homo sapien
ttttctgtatgaaggaatagccttg

SEQ ID NO: 190871 - DNA, 25 bp, Homo sapien
gcctactgaagataggttctctatg

SEQ ID NO: 190872 - DNA, 25 bp, Homo sapien
tgcaactttagaagtattccacact

SEQ ID NO: 190873 - DNA, 25 bp, Homo sapien
tattgttcagtataggtaatctccc

SEQ ID NO: 190874 - DNA, 25 bp, Homo sapien
catctctataagttagaattgagtt

SEQ ID NO: 190875 - DNA, 25 bp, Homo sapien
ttcatctctataagttagaattgag

SEQ ID NO: 190876 - DNA, 25 bp, Homo sapien
gtctaatgtgttgttaacccatcca

SEQ ID NO: 190877 - DNA, 25 bp, Homo sapien
gcagtgtctaatgtgttgttaaccc

SEQ ID NO: 190878 - DNA, 25 bp, Homo sapien
cctgtttagaaatcagctgtcagtc

SEQ ID NO: 190879 - DNA, 25 bp, Homo sapien
ccattgtagccagaagtgtaggtcc

SEQ ID NO: 190880 - DNA, 25 bp, Homo sapien
taatatctagcttccctcttacctg

SEQ ID NO: 190881 - DNA, 25 bp, Homo sapien
gacagtggcaggataaatctggtcc

SEQ ID NO: 190882 - DNA, 25 bp, Homo sapien
tttgtcccctgctacgttacaaggc

SEQ ID NO: 190883 - DNA, 25 bp, Homo sapien
cccggatggattctggctttgtact

SEQ ID NO: 190884 - DNA, 25 bp, Homo sapien
aggccctgaaaacccaagctcaact

SEQ ID NO: 190885 - DNA, 25 bp, Homo sapien
aagatttctctccccggatggattc

SEQ ID NO: 190886 - DNA, 25 bp, Homo sapien
tagcacctggcacattaccaggtaa

SEQ ID NO: 190887 - DNA, 25 bp, Homo sapien
agcacctggcacattaccaggtaaa

SEQ ID NO: 190888 - DNA, 25 bp, Homo sapien
gcacctggcacattaccaggtaaaa

SEQ ID NO: 190889 - DNA, 25 bp, Homo sapien
atcaatttaaagtgaagggctgttg

SEQ ID NO: 190890 - DNA, 25 bp, Homo sapien
cactccatgatgaactgaagtctgg

SEQ ID NO: 190891 - DNA, 25 bp, Homo sapien
tacattgcttgtccaaattcaggca

SEQ ID NO: 190892 - DNA, 25 bp, Homo sapien
ggtaccgtgcagtccaaagtttgaa

SEQ ID NO: 190893 - DNA, 25 bp, Homo sapien
tagctgttaaatattggtaccgtgc

SEQ ID NO: 190894 - DNA, 25 bp, Homo sapien
tcattacccttgtctagtaggctag

SEQ ID NO: 190895 - DNA, 25 bp, Homo sapien
ggatttggcattacatagcctgaga

SEQ ID NO: 190896 - DNA, 25 bp, Homo sapien
cttattcagagcacaagaaggaact

SEQ ID NO: 190897 - DNA, 25 bp, Homo sapien
gccactggctaacatgaaaagatga

SEQ ID NO: 190898 - DNA, 25 bp, Homo sapien
ctgcacccaagcctgtttggatcga

SEQ ID NO: 190899 - DNA, 25 bp, Homo sapien
cgagaaatagtgatactctgtgaca

SEQ ID NO: 190900 - DNA, 25 bp, Homo sapien
caagcctgtttggatcgagaaatag

SEQ ID NO: 190901 - DNA, 25 bp, Homo sapien
taaatatcatgtcacctgacctgag

SEQ ID NO: 190902 - DNA, 25 bp, Homo sapien
attcgataaggcgaagatagcaccc

SEQ ID NO: 190903 - DNA, 25 bp, Homo sapien
ggcgaagatagcacccaaatcattt

SEQ ID NO: 190904 - DNA, 25 bp, Homo sapien
aatggagattcatccctgaaattcg

SEQ ID NO: 190905 - DNA, 25 bp, Homo sapien
ttcatccctgaaattcgataaggcg

SEQ ID NO: 190906 - DNA, 25 bp, Homo sapien
gagataactcacttagcggcagcag

SEQ ID NO: 190907 - DNA, 25 bp, Homo sapien
tagaacatcaaccagggaccatggc

SEQ ID NO: 190908 - DNA, 25 bp, Homo sapien
tgctatagcccatgctcttgtgagc

SEQ ID NO: 190909 - DNA, 25 bp, Homo sapien
ttaaaaacgtgttccggcagctcag

SEQ ID NO: 190910 - DNA, 25 bp, Homo sapien
gcactttatttggatcaatcttatg

SEQ ID NO: 190911 - DNA, 25 bp, Homo sapien
tatttggatcaatcttatgtaggaa

SEQ ID NO: 190912 - DNA, 25 bp, Homo sapien
ttatttggatcaatcttatgtagga

SEQ ID NO: 190913 - DNA, 25 bp, Homo sapien
ctttatttggatcaatcttatgtag

SEQ ID NO: 190914 - DNA, 25 bp, Homo sapien
gccaggttgcgggtacagccagctc

SEQ ID NO: 190915 - DNA, 25 bp, Homo sapien
ttttccttgccaggttgcgggtaca

SEQ ID NO: 190916 - DNA, 25 bp, Homo sapien
ggcgcttttccgcaatggctggcgt

SEQ ID NO: 190917 - DNA, 25 bp, Homo sapien
tttccgcaatggctggcgtggaagc

SEQ ID NO: 190918 - DNA, 25 bp, Homo sapien
gaaggggcccgggcattgttgttca

SEQ ID NO: 190919 - DNA, 25 bp, Homo sapien
ggggagcctttcccctgatcgctgc

SEQ ID NO: 190920 - DNA, 25 bp, Homo sapien
ctgcttttgaagtgaaggggcccgg

SEQ ID NO: 190921 - DNA, 25 bp, Homo sapien
ggagcctttcccctgatcgctgctt

SEQ ID NO: 190922 - DNA, 25 bp, Homo sapien
ctcgcggcccatacggctgaagaaa

SEQ ID NO: 190923 - DNA, 25 bp, Homo sapien
tttgatgggctgagaaccgcctcgg

SEQ ID NO: 190924 - DNA, 25 bp, Homo sapien
ggcctgcgggcagcatatgtctcgg

SEQ ID NO: 190925 - DNA, 25 bp, Homo sapien
tcggcagtgagcactccgtcgggcc

SEQ ID NO: 190926 - DNA, 25 bp, Homo sapien
ggccagggatctgccgttcctcccg

SEQ ID NO: 190927 - DNA, 25 bp, Homo sapien
gggctggaatgaggccggcacccgg

SEQ ID NO: 190928 - DNA, 25 bp, Homo sapien
ttcaggcctccggccagggatctgc

SEQ ID NO: 190929 - DNA, 25 bp, Homo sapien
cccgcccacctggcgtagcgcagga

SEQ ID NO: 190930 - DNA, 25 bp, Homo sapien
gacgcagcggtagttggcgcccagg

SEQ ID NO: 190931 - DNA, 25 bp, Homo sapien
gttgggttacgggtgtatagctgga

SEQ ID NO: 190932 - DNA, 25 bp, Homo sapien
cgaaaagcggcggaggacgcagcgg

SEQ ID NO: 190933 - DNA, 25 bp, Homo sapien
ttgagccgctgttgggttacgggtg

SEQ ID NO: 190934 - DNA, 25 bp, Homo sapien
cacgggactaggagggcgcctactt

SEQ ID NO: 190935 - DNA, 25 bp, Homo sapien
gaaattccgctttccaggagcacgg

SEQ ID NO: 190936 - DNA, 25 bp, Homo sapien
caggagcacgggactaggagggcgc

SEQ ID NO: 190937 - DNA, 25 bp, Homo sapien
tgaatcatgcaaagaaattccgctt

SEQ ID NO: 190938 - DNA, 25 bp, Homo sapien
ttgacccgcattccacctggattct

SEQ ID NO: 190939 - DNA, 25 bp, Homo sapien
tcactggcctggttcttgatttcgc

SEQ ID NO: 190940 - DNA, 25 bp, Homo sapien
tcgagcacgattctacttaagccct

SEQ ID NO: 190941 - DNA, 25 bp, Homo sapien
cctggattctgatgtattcgagcac

SEQ ID NO: 190942 - DNA, 25 bp, Homo sapien
tgctaaatcaacagaaaaccaattg

SEQ ID NO: 190943 - DNA, 25 bp, Homo sapien
tgttgacattgagggatcacattaa

SEQ ID NO: 190944 - DNA, 25 bp, Homo sapien
tattgatctcggcagttttttgcaa

SEQ ID NO: 190945 - DNA, 25 bp, Homo sapien
ttaatttgggtgacaggtcttctac

SEQ ID NO: 190946 - DNA, 25 bp, Homo sapien
tactagctacacattcattataaca

SEQ ID NO: 190947 - DNA, 25 bp, Homo sapien
cgtattcagaaatattcacttcgga

SEQ ID NO: 190948 - DNA, 25 bp, Homo sapien
tcacttcggatttagttaagtgaaa

SEQ ID NO: 190949 - DNA, 25 bp, Homo sapien
cagaaggcttaagccggtgtcaaaa

SEQ ID NO: 190950 - DNA, 25 bp, Homo sapien
taacactggatgaaacaagcacacg

SEQ ID NO: 190951 - DNA, 25 bp, Homo sapien
taaatatacggaggatgtctacaca

SEQ ID NO: 190952 - DNA, 25 bp, Homo sapien
ggttaagagtattgccacagacctg

SEQ ID NO: 190953 - DNA, 25 bp, Homo sapien
gaccatggcactctgcaaagcaaga

SEQ ID NO: 190954 - DNA, 25 bp, Homo sapien
ctaggaagtgtttaggacgggtctg

SEQ ID NO: 190955 - DNA, 25 bp, Homo sapien
tttaggacgggtctggaatacacac

SEQ ID NO: 190956 - DNA, 25 bp, Homo sapien
gtgtttaggacgggtctggaataca

SEQ ID NO: 190957 - DNA, 25 bp, Homo sapien
gtttaggacgggtctggaatacaca

SEQ ID NO: 190958 - DNA, 25 bp, Homo sapien
gccgtaaggcgagtattgcagtgcc

SEQ ID NO: 190959 - DNA, 25 bp, Homo sapien
tgcctgttcgtatgccttgaagtcc

SEQ ID NO: 190960 - DNA, 25 bp, Homo sapien
tcctggtggtcaccgaggcgctgcc

SEQ ID NO: 190961 - DNA, 25 bp, Homo sapien
agtccagcttatgctgctgctccga

SEQ ID NO: 190962 - DNA, 25 bp, Homo sapien
gaggctggagtcttcaactccgagg

SEQ ID NO: 190963 - DNA, 25 bp, Homo sapien
ttatggggggcgcagttgaggaggc

SEQ ID NO: 190964 - DNA, 25 bp, Homo sapien
gaggaggctggagtcttcaactccg

SEQ ID NO: 190965 - DNA, 25 bp, Homo sapien
tggagtcttcaactccgaggcgccc

SEQ ID NO: 190966 - DNA, 25 bp, Homo sapien
ggtccttgcggctctcagggccgcc

SEQ ID NO: 190967 - DNA, 25 bp, Homo sapien
tagctggccggtcttcccgtgcaca

SEQ ID NO: 190968 - DNA, 25 bp, Homo sapien
gccagaggggtccttgcggctctca

SEQ ID NO: 190969 - DNA, 25 bp, Homo sapien
gcgagtcggcgctggggttagaggc

SEQ ID NO: 190970 - DNA, 25 bp, Homo sapien
catgttgccggagtccgggtgcagc

SEQ ID NO: 190971 - DNA, 25 bp, Homo sapien
ccggagtccgggtgcagcgtccagt

SEQ ID NO: 190972 - DNA, 25 bp, Homo sapien
agcgtgagcatcttgctgggcgcct

SEQ ID NO: 190973 - DNA, 25 bp, Homo sapien
gcttgtccggggagcgtgccacctt

SEQ ID NO: 190974 - DNA, 25 bp, Homo sapien
ctgcgcttgaacgtcttggcgtcgc

SEQ ID NO: 190975 - DNA, 25 bp, Homo sapien
tgcggcccaggttggacggcgcgta

SEQ ID NO: 190976 - DNA, 25 bp, Homo sapien
cgcttgaacgtcttggcgtcgccgc

SEQ ID NO: 190977 - DNA, 25 bp, Homo sapien
gctgcggcccaggttggacggcgcg

SEQ ID NO: 190978 - DNA, 25 bp, Homo sapien
agtcatgctgttcatggcgcccgcc

SEQ ID NO: 190979 - DNA, 25 bp, Homo sapien
catgttgccgctcgtagtcatggtg

SEQ ID NO: 190980 - DNA, 25 bp, Homo sapien
cataggacatgttgaaggacgccgg

SEQ ID NO: 190981 - DNA, 25 bp, Homo sapien
agttcatgttgctgaccgggacgga

SEQ ID NO: 190982 - DNA, 25 bp, Homo sapien
ggcactggagggcggccgtccggga

SEQ ID NO: 190983 - DNA, 25 bp, Homo sapien
gcactggagggcggccgtccgggac

SEQ ID NO: 190984 - DNA, 25 bp, Homo sapien
gagggtaatcgccagctgtttccag

SEQ ID NO: 190985 - DNA, 25 bp, Homo sapien
tgctgccgatgatttcaacgcctgg

SEQ ID NO: 190986 - DNA, 25 bp, Homo sapien
cacccagcggttttagagaaggagc

SEQ ID NO: 190987 - DNA, 25 bp, Homo sapien
agaagattttggtcgcactagcgcc

SEQ ID NO: 190988 - DNA, 25 bp, Homo sapien
cgtagtagctgttccagtcgctggt

SEQ ID NO: 190989 - DNA, 25 bp, Homo sapien
ctcctgcgtgtctgcgtagtagctg

SEQ ID NO: 190990 - DNA, 25 bp, Homo sapien
cagtcgctggtttcatgcccttcca

SEQ ID NO: 190991 - DNA, 25 bp, Homo sapien
gcgtgtctgcgtagtagctgttcca

SEQ ID NO: 190992 - DNA, 25 bp, Homo sapien
ccacccgggcgaagaggaagcccag

SEQ ID NO: 190993 - DNA, 25 bp, Homo sapien
atccagccctgtgcgaagcgacggg

SEQ ID NO: 190994 - DNA, 25 bp, Homo sapien
gcagttgagctgatgtggatcttac

SEQ ID NO: 190995 - DNA, 25 bp, Homo sapien
gaagtgagcgggctgcctctgcgag

SEQ ID NO: 190996 - DNA, 25 bp, Homo sapien
ctctccccatttgtccgccgcacaa

SEQ ID NO: 190997 - DNA, 25 bp, Homo sapien
ctccccatttgtccgccgcacaaag

SEQ ID NO: 190998 - DNA, 25 bp, Homo sapien
tctccccatttgtccgccgcacaaa

SEQ ID NO: 190999 - DNA, 25 bp, Homo sapien
tacaaagcccgaggtgcacctgcaa

SEQ ID NO: 191000 - DNA, 25 bp, Homo sapien
ctacaaagcccgaggtgcacctgca

SEQ ID NO: 191001 - DNA, 25 bp, Homo sapien
ggaggcgctgccacgaaactcgtac

SEQ ID NO: 191002 - DNA, 25 bp, Homo sapien
gccccgggctagcagagcggaggcg

SEQ ID NO: 191003 - DNA, 25 bp, Homo sapien
tcagccgagccaagtgacgttaggc

SEQ ID NO: 191004 - DNA, 25 bp, Homo sapien
agccaagtgacgttaggccgacccg

SEQ ID NO: 191005 - DNA, 25 bp, Homo sapien
ctgcggctaagagcaggtgagtcac

SEQ ID NO: 191006 - DNA, 25 bp, Homo sapien
gtgagtcacagcaccggtttatatc

SEQ ID NO: 191007 - DNA, 25 bp, Homo sapien
acagcaccggtttatatctttatga

SEQ ID NO: 191008 - DNA, 25 bp, Homo sapien
gtcacagcaccggtttatatcttta

SEQ ID NO: 191009 - DNA, 25 bp, Homo sapien
tatacggatgcttagcttcctgggc

SEQ ID NO: 191010 - DNA, 25 bp, Homo sapien
tgcaaagttcccattagtagctgac

SEQ ID NO: 191011 - DNA, 25 bp, Homo sapien
gggtagaaacgtcacatcataagga

SEQ ID NO: 191012 - DNA, 25 bp, Homo sapien
tggaactcagtagggcaggaaccct

SEQ ID NO: 191013 - DNA, 25 bp, Homo sapien
tcccaaacctactaagtctcatatt

SEQ ID NO: 191014 - DNA, 25 bp, Homo sapien
gagagtaacaatttatggatagtaa

SEQ ID NO: 191015 - DNA, 25 bp, Homo sapien
ttatagtgcacaaaaaagttggcgc

SEQ ID NO: 191016 - DNA, 25 bp, Homo sapien
tgcacaaaaaagttggcgctttaag

SEQ ID NO: 191017 - DNA, 25 bp, Homo sapien
gaaaacagcgcctcctgtcgtggag

SEQ ID NO: 191018 - DNA, 25 bp, Homo sapien
aaagctgaattttcccgcaggcgcc

SEQ ID NO: 191019 - DNA, 25 bp, Homo sapien
tcaaagcccaagaccggtgatgcag

SEQ ID NO: 191020 - DNA, 25 bp, Homo sapien
gatactggattgaactccgcacgca

SEQ ID NO: 191021 - DNA, 25 bp, Homo sapien
tggccagtcggtagccaggtccagc

SEQ ID NO: 191022 - DNA, 25 bp, Homo sapien
aataggcacctacaccattggaaac

SEQ ID NO: 191023 - DNA, 25 bp, Homo sapien
gattgtgctgctcgttggaggaaac

SEQ ID NO: 191024 - DNA, 25 bp, Homo sapien
tgctcgttggaggaaaccaggcctg

SEQ ID NO: 191025 - DNA, 25 bp, Homo sapien
aagctgcccttgctacacccgtggg

SEQ ID NO: 191026 - DNA, 25 bp, Homo sapien
ttaagacgggtctgcgacagcttgg

SEQ ID NO: 191027 - DNA, 25 bp, Homo sapien
gatccgcggcagtgaggactgtagg

SEQ ID NO: 191028 - DNA, 25 bp, Homo sapien
ggactgtagggtgcgcgggtactcc

SEQ ID NO: 191029 - DNA, 25 bp, Homo sapien
cagcttacacttcccagcaggatct

SEQ ID NO: 191030 - DNA, 25 bp, Homo sapien
ctgagcggcactcggtcctttgacc

SEQ ID NO: 191031 - DNA, 25 bp, Homo sapien
ggtcctttgaccacgcttggctgcc

SEQ ID NO: 191032 - DNA, 25 bp, Homo sapien
ctcagcttacacttcccagcaggat

SEQ ID NO: 191033 - DNA, 25 bp, Homo sapien
cccctgctgggcagtcgacagcgtt

SEQ ID NO: 191034 - DNA, 25 bp, Homo sapien
acagcgttggaaggaagaagtgccc

SEQ ID NO: 191035 - DNA, 25 bp, Homo sapien
tgagaagggcgatttcccctgctgg

SEQ ID NO: 191036 - DNA, 25 bp, Homo sapien
acgggagagcatcgccttgccaaaa

SEQ ID NO: 191037 - DNA, 25 bp, Homo sapien
tcagcgcctgttggaggacgtgctc

SEQ ID NO: 191038 - DNA, 25 bp, Homo sapien
aggatcctcgggctttcccgctcta

SEQ ID NO: 191039 - DNA, 25 bp, Homo sapien
gctgctgaaaggatcctcgggcttt

SEQ ID NO: 191040 - DNA, 25 bp, Homo sapien
cgcctgttggaggacgtgctcagcc

SEQ ID NO: 191041 - DNA, 25 bp, Homo sapien
caatgcacgcttcacacaaagaggt

SEQ ID NO: 191042 - DNA, 25 bp, Homo sapien
ttagagcagaaaggacctgagcagc

SEQ ID NO: 191043 - DNA, 25 bp, Homo sapien
ggtcctactgcgtgccacagacttg

SEQ ID NO: 191044 - DNA, 25 bp, Homo sapien
gacacctcttaggtatccgttagag

SEQ ID NO: 191045 - DNA, 25 bp, Homo sapien
ctggacgtgggcagaatcagcagct

SEQ ID NO: 191046 - DNA, 25 bp, Homo sapien
ggtggtcaacgtgtgacccaaaatc

SEQ ID NO: 191047 - DNA, 25 bp, Homo sapien
tttgcccatatagggtggtcaacgt

SEQ ID NO: 191048 - DNA, 25 bp, Homo sapien
cttttcctcgctgtagaaaggcagc

SEQ ID NO: 191049 - DNA, 25 bp, Homo sapien
tgctatcactcgagaaggcacaagg

SEQ ID NO: 191050 - DNA, 25 bp, Homo sapien
tccgatgcggcggaggatctgcacc

SEQ ID NO: 191051 - DNA, 25 bp, Homo sapien
ggcacaaggctgtgcgatcctccgc

SEQ ID NO: 191052 - DNA, 25 bp, Homo sapien
gatgaacccactgaacccacggttc

SEQ ID NO: 191053 - DNA, 25 bp, Homo sapien
ggcaatcgtcagttgtaggaacaaa

SEQ ID NO: 191054 - DNA, 25 bp, Homo sapien
gcatggttctgacgctgaccgcagt

SEQ ID NO: 191055 - DNA, 25 bp, Homo sapien
agcctggacctgatgcccggattct

SEQ ID NO: 191056 - DNA, 25 bp, Homo sapien
tctaatatgctagggaacccagcca

SEQ ID NO: 191057 - DNA, 25 bp, Homo sapien
ggcggagcggttgtcccctctgttc

SEQ ID NO: 191058 - DNA, 25 bp, Homo sapien
gctgcctttcgtgggagaatgagca

SEQ ID NO: 191059 - DNA, 25 bp, Homo sapien
tcgctaatccgctgtggcaggttca

SEQ ID NO: 191060 - DNA, 25 bp, Homo sapien
acctgaattggagcggaggcgccct

SEQ ID NO: 191061 - DNA, 25 bp, Homo sapien
tgtccctttacagggcagcttgttt

SEQ ID NO: 191062 - DNA, 25 bp, Homo sapien
caccagtaggtggttgccccactag

SEQ ID NO: 191063 - DNA, 25 bp, Homo sapien
tgagtaaacctcaaccaccagtagg

SEQ ID NO: 191064 - DNA, 25 bp, Homo sapien
cactagggtcgatgtgtgtagtttc

SEQ ID NO: 191065 - DNA, 25 bp, Homo sapien
gaagggcttcctatcaatgtttttg

SEQ ID NO: 191066 - DNA, 25 bp, Homo sapien
gaatcaaaggtcagtcggagacgtg

SEQ ID NO: 191067 - DNA, 25 bp, Homo sapien
tctggctagaatgatgaagggcttc

SEQ ID NO: 191068 - DNA, 25 bp, Homo sapien
gagtttgtcctgcatatacgtgaat

SEQ ID NO: 191069 - DNA, 25 bp, Homo sapien
ctcaggccttgaaccttctggcaga

SEQ ID NO: 191070 - DNA, 25 bp, Homo sapien
ctcttgacccttctgactgcttcac

SEQ ID NO: 191071 - DNA, 25 bp, Homo sapien
caggccttgaaccttctggcagaag

SEQ ID NO: 191072 - DNA, 25 bp, Homo sapien
tcaggccttgaaccttctggcagaa

SEQ ID NO: 191073 - DNA, 25 bp, Homo sapien
tgaggatccgcagcaacttcgtgag

SEQ ID NO: 191074 - DNA, 25 bp, Homo sapien
tctccgcagaggacggctacatgga

SEQ ID NO: 191075 - DNA, 25 bp, Homo sapien
ggacttttacttgcggagctccgcg

SEQ ID NO: 191076 - DNA, 25 bp, Homo sapien
gcagggccctgcatggccaaagaga

SEQ ID NO: 191077 - DNA, 25 bp, Homo sapien
aatgggttcattagctgattggaga

SEQ ID NO: 191078 - DNA, 25 bp, Homo sapien
caaatgggttcattagctgattgga

SEQ ID NO: 191079 - DNA, 25 bp, Homo sapien
aactcagcaaatgggttcattagct

SEQ ID NO: 191080 - DNA, 25 bp, Homo sapien
cagcaaatgggttcattagctgatt

SEQ ID NO: 191081 - DNA, 25 bp, Homo sapien
gaggtaagagaattgccttaaccca

SEQ ID NO: 191082 - DNA, 25 bp, Homo sapien
actgaggtaagagaattgccttaac

SEQ ID NO: 191083 - DNA, 25 bp, Homo sapien
gtaagagaattgccttaacccagga

SEQ ID NO: 191084 - DNA, 25 bp, Homo sapien
agactgaggtaagagaattgcctta

SEQ ID NO: 191085 - DNA, 25 bp, Homo sapien
ttttcttgaggacgaagggcaccat

SEQ ID NO: 191086 - DNA, 25 bp, Homo sapien
tggcacaggtgtgccccggcagagg

SEQ ID NO: 191087 - DNA, 25 bp, Homo sapien
atctttttcttgaggacgaagggca

SEQ ID NO: 191088 - DNA, 25 bp, Homo sapien
ccggcagaggcgctaagttgatctt

SEQ ID NO: 191089 - DNA, 25 bp, Homo sapien
catagcagtttcctggagcgatgca

SEQ ID NO: 191090 - DNA, 25 bp, Homo sapien
gtggctcttttgtcaaactgcccat

SEQ ID NO: 191091 - DNA, 25 bp, Homo sapien
caggtagagtgcctggttaggccac

SEQ ID NO: 191092 - DNA, 25 bp, Homo sapien
taggccaccgaggagatttcttgct

SEQ ID NO: 191093 - DNA, 25 bp, Homo sapien
cccagaagaccaaggttttcgtatg

SEQ ID NO: 191094 - DNA, 25 bp, Homo sapien
ccaaggttttcgtatggggctctgc

SEQ ID NO: 191095 - DNA, 25 bp, Homo sapien
cagaagaccaaggttttcgtatggg

SEQ ID NO: 191096 - DNA, 25 bp, Homo sapien
accaaggttttcgtatggggctctg

SEQ ID NO: 191097 - DNA, 25 bp, Homo sapien
gatatagtcgaattccaaaccgtag

SEQ ID NO: 191098 - DNA, 25 bp, Homo sapien
ctcctgactgcaggatatagtcgaa

SEQ ID NO: 191099 - DNA, 25 bp, Homo sapien
ttccaaaccgtagatagcatagagg

SEQ ID NO: 191100 - DNA, 25 bp, Homo sapien
cgtagatagcatagagggttcttca

SEQ ID NO: 191101 - DNA, 25 bp, Homo sapien
tctgcctgtaaggaggattccacag

SEQ ID NO: 191102 - DNA, 25 bp, Homo sapien
caggggtaagaacggatgtcaagca

SEQ ID NO: 191103 - DNA, 25 bp, Homo sapien
ttcttctgcctgtaaggaggattcc

SEQ ID NO: 191104 - DNA, 25 bp, Homo sapien
gtcacaggggtaagaacggatgtca

SEQ ID NO: 191105 - DNA, 25 bp, Homo sapien
catatcctatttttgttaggcccta

SEQ ID NO: 191106 - DNA, 25 bp, Homo sapien
ggtcaggtgctgtgtagtacaaaat

SEQ ID NO: 191107 - DNA, 25 bp, Homo sapien
tggaaatgccatagaccactctcta

SEQ ID NO: 191108 - DNA, 25 bp, Homo sapien
tattaatgattcaatagtgtccata

SEQ ID NO: 191109 - DNA, 25 bp, Homo sapien
ttttatcctcatttatcagaagact

SEQ ID NO: 191110 - DNA, 25 bp, Homo sapien
gaagtcagtaatacagttggcaagt

SEQ ID NO: 191111 - DNA, 25 bp, Homo sapien
tgttagaaccaagatcctgatccag

SEQ ID NO: 191112 - DNA, 25 bp, Homo sapien
aagatcctgatccaggcccagccaa

SEQ ID NO: 191113 - DNA, 25 bp, Homo sapien
tggccaatagccagtaatgttgtgt

SEQ ID NO: 191114 - DNA, 25 bp, Homo sapien
tacctccaatacagcttcgttgtgg

SEQ ID NO: 191115 - DNA, 25 bp, Homo sapien
ccagaagtcactaataggcaagaaa

SEQ ID NO: 191116 - DNA, 25 bp, Homo sapien
tggatgccagggcttacccactaat

SEQ ID NO: 191117 - DNA, 25 bp, Homo sapien
tcttctgtgtacttgaccttatttc

SEQ ID NO: 191118 - DNA, 25 bp, Homo sapien
taatataagtaatttatgagttttc

SEQ ID NO: 191119 - DNA, 25 bp, Homo sapien
tttcttctgtgtacttgaccttatt

SEQ ID NO: 191120 - DNA, 25 bp, Homo sapien
tgtgtacttgaccttatttcaaacc

SEQ ID NO: 191121 - DNA, 25 bp, Homo sapien
cctgtattataggtgaggtccacga

SEQ ID NO: 191122 - DNA, 25 bp, Homo sapien
ggtccacgaattctctctttagttg

SEQ ID NO: 191123 - DNA, 25 bp, Homo sapien
cttgtgcttggtattggattctgga

SEQ ID NO: 191124 - DNA, 25 bp, Homo sapien
ctgcttctcctaaacctggctggtt

SEQ ID NO: 191125 - DNA, 25 bp, Homo sapien
cccaactgccctatttatgaatcca

SEQ ID NO: 191126 - DNA, 25 bp, Homo sapien
tatcctgcaccaatagtttagaaat

SEQ ID NO: 191127 - DNA, 25 bp, Homo sapien
gtacaattctaactctgatctcctg

SEQ ID NO: 191128 - DNA, 25 bp, Homo sapien
gcagtacattgaggtcaaattttga

SEQ ID NO: 191129 - DNA, 25 bp, Homo sapien
ggagaatgtctcagctaagagctag

SEQ ID NO: 191130 - DNA, 25 bp, Homo sapien
tctgcagaataaagtatccagctcc

SEQ ID NO: 191131 - DNA, 25 bp, Homo sapien
taatcaatggtgcagcactcaggct

SEQ ID NO: 191132 - DNA, 25 bp, Homo sapien
aaaaataccgtatcacattgtgaga

SEQ ID NO: 191133 - DNA, 25 bp, Homo sapien
cacagggggcttgccaaccctctgt

SEQ ID NO: 191134 - DNA, 25 bp, Homo sapien
gggggcttgccaaccctctgtgtgt

SEQ ID NO: 191135 - DNA, 25 bp, Homo sapien
cagttttagtgtatatgttgccgaa

SEQ ID NO: 191136 - DNA, 25 bp, Homo sapien
gcttgccaaccctctgtgtgttgtt

SEQ ID NO: 191137 - DNA, 25 bp, Homo sapien
ccagttgtctgtcccaagtggctgg

SEQ ID NO: 191138 - DNA, 25 bp, Homo sapien
taactaggcggccacacactgttgc

SEQ ID NO: 191139 - DNA, 25 bp, Homo sapien
gcttgccaagtaaagagcttaacta

SEQ ID NO: 191140 - DNA, 25 bp, Homo sapien
ccagtctgagcgtggttctccaaaa

SEQ ID NO: 191141 - DNA, 25 bp, Homo sapien
ctgcactgaataggagccacctttg

SEQ ID NO: 191142 - DNA, 25 bp, Homo sapien
actttggctttagggcagccccaag

SEQ ID NO: 191143 - DNA, 25 bp, Homo sapien
gggaagggtatccacgtctgcagcc

SEQ ID NO: 191144 - DNA, 25 bp, Homo sapien
cagccccaagactgattgaggtgaa

SEQ ID NO: 191145 - DNA, 25 bp, Homo sapien
agtttggcagggaggttggcaagca

SEQ ID NO: 191146 - DNA, 25 bp, Homo sapien
gagtttggcagggaggttggcaagc

SEQ ID NO: 191147 - DNA, 25 bp, Homo sapien
gtttggcagggaggttggcaagcat

SEQ ID NO: 191148 - DNA, 25 bp, Homo sapien
tggcaggtgaccagccgtctctcca

SEQ ID NO: 191149 - DNA, 25 bp, Homo sapien
ctggcaggtgaccagccgtctctcc

SEQ ID NO: 191150 - DNA, 25 bp, Homo sapien
ggcaggtgaccagccgtctctccat

SEQ ID NO: 191151 - DNA, 25 bp, Homo sapien
gctttgctgttcacccttttgggcg

SEQ ID NO: 191152 - DNA, 25 bp, Homo sapien
ctttgggctgagtttggccggatcc

SEQ ID NO: 191153 - DNA, 25 bp, Homo sapien
ctggtggtctcagcgcctgcttttc

SEQ ID NO: 191154 - DNA, 25 bp, Homo sapien
gtgcactttaacctgccctctgctg

SEQ ID NO: 191155 - DNA, 25 bp, Homo sapien
gattgtgccctctgacctgtgccaa

SEQ ID NO: 191156 - DNA, 25 bp, Homo sapien
tgtgccctctgacctgtgccaatcc

SEQ ID NO: 191157 - DNA, 25 bp, Homo sapien
ttgtgccctctgacctgtgccaatc

SEQ ID NO: 191158 - DNA, 25 bp, Homo sapien
tgccctctgacctgtgccaatccat

SEQ ID NO: 191159 - DNA, 25 bp, Homo sapien
caatcagtgagtgtccgagctcttc

SEQ ID NO: 191160 - DNA, 25 bp, Homo sapien
tcaactgaagtcgattcaagtcact

SEQ ID NO: 191161 - DNA, 25 bp, Homo sapien
gagctcttctagaactctcggtgag

SEQ ID NO: 191162 - DNA, 25 bp, Homo sapien
tcggtgagccatcaatagagcaggt

SEQ ID NO: 191163 - DNA, 25 bp, Homo sapien
cagattatctctgtccgggaagcag

SEQ ID NO: 191164 - DNA, 25 bp, Homo sapien
tctcagagaggaccaaaacagggtt

SEQ ID NO: 191165 - DNA, 25 bp, Homo sapien
gacatgggcccagttttaccacaaa

SEQ ID NO: 191166 - DNA, 25 bp, Homo sapien
ggtggtagcatgacttccccgagta

SEQ ID NO: 191167 - DNA, 25 bp, Homo sapien
tgaaaaagaattgccctgtccatgt

SEQ ID NO: 191168 - DNA, 25 bp, Homo sapien
cctgaaagcctagtggaaggacaga

SEQ ID NO: 191169 - DNA, 25 bp, Homo sapien
gagtctgctacaggaaacttggaag

SEQ ID NO: 191170 - DNA, 25 bp, Homo sapien
tccaaggcggccagttgtctgtggt

SEQ ID NO: 191171 - DNA, 25 bp, Homo sapien
ccaggtgactgtgcaagaagccagt

SEQ ID NO: 191172 - DNA, 25 bp, Homo sapien
ctagtctaaggccaggtgactgtgc

SEQ ID NO: 191173 - DNA, 25 bp, Homo sapien
gagatgagacaattcaaagctcctg

SEQ ID NO: 191174 - DNA, 25 bp, Homo sapien
gattgctagtgttgtaaggaccttc

SEQ ID NO: 191175 - DNA, 25 bp, Homo sapien
tttcctcttagctgcttggaacctc

SEQ ID NO: 191176 - DNA, 25 bp, Homo sapien
tggaacctcttgtgccctggagctc

SEQ ID NO: 191177 - DNA, 25 bp, Homo sapien
tggagctcccggcaaagcaggctgc

SEQ ID NO: 191178 - DNA, 25 bp, Homo sapien
tcttagctgcttggaacctcttgtg

SEQ ID NO: 191179 - DNA, 25 bp, Homo sapien
gaacagcatgtctacactggaccag

SEQ ID NO: 191180 - DNA, 25 bp, Homo sapien
gaaagttctcaggacaattcctagt

SEQ ID NO: 191181 - DNA, 25 bp, Homo sapien
tgagccattgtggaagaaagttctc

SEQ ID NO: 191182 - DNA, 25 bp, Homo sapien
cagactgccggtttaaaatggagat

SEQ ID NO: 191183 - DNA, 25 bp, Homo sapien
caacgtgcaggccacatgtctctgg

SEQ ID NO: 191184 - DNA, 25 bp, Homo sapien
gactgccttgggatgcattgggttt

SEQ ID NO: 191185 - DNA, 25 bp, Homo sapien
ggcgctttagaaggcaggactgcct

SEQ ID NO: 191186 - DNA, 25 bp, Homo sapien
gttgggatccaaatagactgattac

SEQ ID NO: 191187 - DNA, 25 bp, Homo sapien
gctgagccatatggttggtgggact

SEQ ID NO: 191188 - DNA, 25 bp, Homo sapien
tttgaagttatacctggtggagcat

SEQ ID NO: 191189 - DNA, 25 bp, Homo sapien
tgggtagctaaatccgagtgtggcc

SEQ ID NO: 191190 - DNA, 25 bp, Homo sapien
cagacaacatagatgtaaggagaat

SEQ ID NO: 191191 - DNA, 25 bp, Homo sapien
tctgcatacacatttcctggattag

SEQ ID NO: 191192 - DNA, 25 bp, Homo sapien
cagtgtgtaggcatcattctggagc

SEQ ID NO: 191193 - DNA, 25 bp, Homo sapien
gaacccttagtccagctcttgtcta

SEQ ID NO: 191194 - DNA, 25 bp, Homo sapien
ttcctcctcgatttgcctctgcata

SEQ ID NO: 191195 - DNA, 25 bp, Homo sapien
ctttgtcacatgctctttgtccagg

SEQ ID NO: 191196 - DNA, 25 bp, Homo sapien
gccctagagttgtgagatgtagttt

SEQ ID NO: 191197 - DNA, 25 bp, Homo sapien
tttgtcacatgctctttgtccaggg

SEQ ID NO: 191198 - DNA, 25 bp, Homo sapien
tgtccagggttaccgaaggtagagc

SEQ ID NO: 191199 - DNA, 25 bp, Homo sapien
gtgtagaggtcaagaagaggcccat

SEQ ID NO: 191200 - DNA, 25 bp, Homo sapien
aggtgtagaggtcaagaagaggccc

SEQ ID NO: 191201 - DNA, 25 bp, Homo sapien
ggtgtagaggtcaagaagaggccca

SEQ ID NO: 191202 - DNA, 25 bp, Homo sapien
gaggtgtagaggtcaagaagaggcc

SEQ ID NO: 191203 - DNA, 25 bp, Homo sapien
ctcaaaggcagctgcgagaactcca

SEQ ID NO: 191204 - DNA, 25 bp, Homo sapien
aaggcagctgcgagaactccatctg

SEQ ID NO: 191205 - DNA, 25 bp, Homo sapien
tcaaaggcagctgcgagaactccat

SEQ ID NO: 191206 - DNA, 25 bp, Homo sapien
ggcagctgcgagaactccatctgtg

SEQ ID NO: 191207 - DNA, 25 bp, Homo sapien
gcagacactgatgggagcacctcta

SEQ ID NO: 191208 - DNA, 25 bp, Homo sapien
cctctaggagccacataaagacctg

SEQ ID NO: 191209 - DNA, 25 bp, Homo sapien
ggaacagctaccactatgcagttac

SEQ ID NO: 191210 - DNA, 25 bp, Homo sapien
acagctaccactatgcagttacagg

SEQ ID NO: 191211 - DNA, 25 bp, Homo sapien
tgaaattcttgtagttgaaggtgat

SEQ ID NO: 191212 - DNA, 25 bp, Homo sapien
gtttattactcttaatgagtttcca

SEQ ID NO: 191213 - DNA, 25 bp, Homo sapien
aggtgatgctatcacagagccaggg

SEQ ID NO: 191214 - DNA, 25 bp, Homo sapien
attactcttaatgagtttccaaaag

SEQ ID NO: 191215 - DNA, 25 bp, Homo sapien
tgaccttgatgctccagtcatttgc

SEQ ID NO: 191216 - DNA, 25 bp, Homo sapien
gcaggttggataacatagacttcac

SEQ ID NO: 191217 - DNA, 25 bp, Homo sapien
gtcatttgcaggttggataacatag

SEQ ID NO: 191218 - DNA, 25 bp, Homo sapien
ccttgatgctccagtcatttgcagg

SEQ ID NO: 191219 - DNA, 25 bp, Homo sapien
tctcttaagtcccaaacagaggaag

SEQ ID NO: 191220 - DNA, 25 bp, Homo sapien
tgctctcttaagtcccaaacagagg

SEQ ID NO: 191221 - DNA, 25 bp, Homo sapien
tcttaagtcccaaacagaggaagcc

SEQ ID NO: 191222 - DNA, 25 bp, Homo sapien
cttaagtcccaaacagaggaagcct

SEQ ID NO: 191223 - DNA, 25 bp, Homo sapien
taggtggtcgcatgctatcctgcct

SEQ ID NO: 191224 - DNA, 25 bp, Homo sapien
agccactgagctatgccgataggtg

SEQ ID NO: 191225 - DNA, 25 bp, Homo sapien
tgagctatgccgataggtggtcgca

SEQ ID NO: 191226 - DNA, 25 bp, Homo sapien
cctgcctactgagtgttgactgata

SEQ ID NO: 191227 - DNA, 25 bp, Homo sapien
ctagtagagtcattgacagaatacc

SEQ ID NO: 191228 - DNA, 25 bp, Homo sapien
cattgacagaatacctctttcttgc

SEQ ID NO: 191229 - DNA, 25 bp, Homo sapien
cagggtgacttgtagaagcactggc

SEQ ID NO: 191230 - DNA, 25 bp, Homo sapien
tgctctatcattagcccagggtgac

SEQ ID NO: 191231 - DNA, 25 bp, Homo sapien
gctgtccttggacaaatgggcagca

SEQ ID NO: 191232 - DNA, 25 bp, Homo sapien
tccttggacaaatgggcagcaggtc

SEQ ID NO: 191233 - DNA, 25 bp, Homo sapien
tgtccttggacaaatgggcagcagg

SEQ ID NO: 191234 - DNA, 25 bp, Homo sapien
ccttggacaaatgggcagcaggtct

SEQ ID NO: 191235 - DNA, 25 bp, Homo sapien
catggttaagtaacactatggctca

SEQ ID NO: 191236 - DNA, 25 bp, Homo sapien
tgacgtagcagtagtgactccgttg

SEQ ID NO: 191237 - DNA, 25 bp, Homo sapien
ggtgcgactccacactgacgtagca

SEQ ID NO: 191238 - DNA, 25 bp, Homo sapien
ttctgtgtgccatcaaggaacatgg

SEQ ID NO: 191239 - DNA, 25 bp, Homo sapien
gcttttgctgcaccacttgttaata

SEQ ID NO: 191240 - DNA, 25 bp, Homo sapien
gagactggaaaccagaggaccaagg

SEQ ID NO: 191241 - DNA, 25 bp, Homo sapien
tgttaatatgactttgagcctcagt

SEQ ID NO: 191242 - DNA, 25 bp, Homo sapien
ctgagactggaaaccagaggaccaa

SEQ ID NO: 191243 - DNA, 25 bp, Homo sapien
gaagttaggatttttcacccgcaca

SEQ ID NO: 191244 - DNA, 25 bp, Homo sapien
tcttatgtctctgcaaattccggcg

SEQ ID NO: 191245 - DNA, 25 bp, Homo sapien
cccagtagactgttccaagagaaga

SEQ ID NO: 191246 - DNA, 25 bp, Homo sapien
ccttaggagtgcaaaagcaagctac

SEQ ID NO: 191247 - DNA, 25 bp, Homo sapien
cattcacagatgcttctaaactcac

SEQ ID NO: 191248 - DNA, 25 bp, Homo sapien
ctagacagggatgcttcagaagaga

SEQ ID NO: 191249 - DNA, 25 bp, Homo sapien
cataccatcccactagacagggatg

SEQ ID NO: 191250 - DNA, 25 bp, Homo sapien
tagggatagagtagaacataccatc

SEQ ID NO: 191251 - DNA, 25 bp, Homo sapien
aaaagctgaaatccctccaggtgga

SEQ ID NO: 191252 - DNA, 25 bp, Homo sapien
tccaggtggaaacacaagaggtagg

SEQ ID NO: 191253 - DNA, 25 bp, Homo sapien
agaaaagctgaaatccctccaggtg

SEQ ID NO: 191254 - DNA, 25 bp, Homo sapien
ccctccaggtggaaacacaagaggt

SEQ ID NO: 191255 - DNA, 25 bp, Homo sapien
atcaaggccagcctggttaacgtgg

SEQ ID NO: 191256 - DNA, 25 bp, Homo sapien
gagatcaaggccagcctggttaacg

SEQ ID NO: 191257 - DNA, 25 bp, Homo sapien
agatcaaggccagcctggttaacgt

SEQ ID NO: 191258 - DNA, 25 bp, Homo sapien
aggagatcaaggccagcctggttaa

SEQ ID NO: 191259 - DNA, 25 bp, Homo sapien
aacggttgtagatgtgaggcaagca

SEQ ID NO: 191260 - DNA, 25 bp, Homo sapien
cttccccataggtggagtatacttt

SEQ ID NO: 191261 - DNA, 25 bp, Homo sapien
tgggttggtcagtggaacggttgta

SEQ ID NO: 191262 - DNA, 25 bp, Homo sapien
catggccatttgacgtgggttggtc

SEQ ID NO: 191263 - DNA, 25 bp, Homo sapien
gagctacactgtccatctgaactgt

SEQ ID NO: 191264 - DNA, 25 bp, Homo sapien
tctgctgaaaggtgtctgttctggc

SEQ ID NO: 191265 - DNA, 25 bp, Homo sapien
cattcaatgataggccaggatttgg

SEQ ID NO: 191266 - DNA, 25 bp, Homo sapien
cacctattgtgagacaactctgagg

SEQ ID NO: 191267 - DNA, 25 bp, Homo sapien
tccagatgtagtgaaaccataaaga

SEQ ID NO: 191268 - DNA, 25 bp, Homo sapien
gatgtagtgaaaccataaagatgga

SEQ ID NO: 191269 - DNA, 25 bp, Homo sapien
taagtgtatgatagtaaagtgatat

SEQ ID NO: 191270 - DNA, 25 bp, Homo sapien
gtaaagtgatatccagatgtagtga

SEQ ID NO: 191271 - DNA, 25 bp, Homo sapien
cggcatttgataggatataaacaac

SEQ ID NO: 191272 - DNA, 25 bp, Homo sapien
cagatgtcggcatttgataggatat

SEQ ID NO: 191273 - DNA, 25 bp, Homo sapien
tagctctggcaaggacacggtccat

SEQ ID NO: 191274 - DNA, 25 bp, Homo sapien
cacggtccatgaacagatgtcggca

SEQ ID NO: 191275 - DNA, 25 bp, Homo sapien
gaatgtttggcgtcagatcggtcac

SEQ ID NO: 191276 - DNA, 25 bp, Homo sapien
gaatctagaaaggatgggtgttccc

SEQ ID NO: 191277 - DNA, 25 bp, Homo sapien
tgtgcagcctactgacccgtttgag

SEQ ID NO: 191278 - DNA, 25 bp, Homo sapien
tgtggtgggacacgaatcctgccta

SEQ ID NO: 191279 - DNA, 25 bp, Homo sapien
gaccacacagatggcgggattctgc

SEQ ID NO: 191280 - DNA, 25 bp, Homo sapien
atggcgggattctgccagtcttggc

SEQ ID NO: 191281 - DNA, 25 bp, Homo sapien
agaccacacagatggcgggattctg

SEQ ID NO: 191282 - DNA, 25 bp, Homo sapien
cacagatggcgggattctgccagtc

SEQ ID NO: 191283 - DNA, 25 bp, Homo sapien
tcatctgagtgccaacaatgaatat

SEQ ID NO: 191284 - DNA, 25 bp, Homo sapien
agttcctcctaaatgtgaccagttt

SEQ ID NO: 191285 - DNA, 25 bp, Homo sapien
tctacccctccttcaagagattgct

SEQ ID NO: 191286 - DNA, 25 bp, Homo sapien
tcaataaatcctatgactgctccag

SEQ ID NO: 191287 - DNA, 25 bp, Homo sapien
gaggtataaaattgtctgcaggaat

SEQ ID NO: 191288 - DNA, 25 bp, Homo sapien
aaattgtctgcaggaatagtggaaa

SEQ ID NO: 191289 - DNA, 25 bp, Homo sapien
gaagtcaaggattgaggtataaaat

SEQ ID NO: 191290 - DNA, 25 bp, Homo sapien
ttgaagtcaaggattgaggtataaa

SEQ ID NO: 191291 - DNA, 25 bp, Homo sapien
tttctcctggaccaccggtgtcagg

SEQ ID NO: 191292 - DNA, 25 bp, Homo sapien
agtttctcctggaccaccggtgtca

SEQ ID NO: 191293 - DNA, 25 bp, Homo sapien
tctcctggaccaccggtgtcaggca

SEQ ID NO: 191294 - DNA, 25 bp, Homo sapien
agtggtggtgctcagaacctctgca

SEQ ID NO: 191295 - DNA, 25 bp, Homo sapien
ccaagtgatgaaatttcattgagga

SEQ ID NO: 191296 - DNA, 25 bp, Homo sapien
tgaggatactttcacagcccgtcat

SEQ ID NO: 191297 - DNA, 25 bp, Homo sapien
tcattgaggatactttcacagcccg

SEQ ID NO: 191298 - DNA, 25 bp, Homo sapien
cttccaacagcaatctgcttctgta

SEQ ID NO: 191299 - DNA, 25 bp, Homo sapien
gctgtgttgcttactctcgggctga

SEQ ID NO: 191300 - DNA, 25 bp, Homo sapien
tgtaactctgatataagcaagccct

SEQ ID NO: 191301 - DNA, 25 bp, Homo sapien
aaattgccaacatcgtgactcagcg

SEQ ID NO: 191302 - DNA, 25 bp, Homo sapien
gaagctgcatctccgctgctaaatt

SEQ ID NO: 191303 - DNA, 25 bp, Homo sapien
tggatgtgcaatcttccatgatcat

SEQ ID NO: 191304 - DNA, 25 bp, Homo sapien
ctggatgtgcaatcttccatgatca

SEQ ID NO: 191305 - DNA, 25 bp, Homo sapien
ttgtgctccaggtctggtaaacagg

SEQ ID NO: 191306 - DNA, 25 bp, Homo sapien
gctccaggtctggtaaacaggtcat

SEQ ID NO: 191307 - DNA, 25 bp, Homo sapien
tttgtgctccaggtctggtaaacag

SEQ ID NO: 191308 - DNA, 25 bp, Homo sapien
tgctccaggtctggtaaacaggtca

SEQ ID NO: 191309 - DNA, 25 bp, Homo sapien
tatatggcagatatggcaacctctc

SEQ ID NO: 191310 - DNA, 25 bp, Homo sapien
tgaacttggaagaagaccctgagcc

SEQ ID NO: 191311 - DNA, 25 bp, Homo sapien
tgagacccggagcaaagaacttaac

SEQ ID NO: 191312 - DNA, 25 bp, Homo sapien
ttggataagaccgaagccctggcca

SEQ ID NO: 191313 - DNA, 25 bp, Homo sapien
tggagaccacccattgtgcccttgg

SEQ ID NO: 191314 - DNA, 25 bp, Homo sapien
gatggcgtgcccaatatccttggcc

SEQ ID NO: 191315 - DNA, 25 bp, Homo sapien
gcatcgcccactctgttgctggaga

SEQ ID NO: 191316 - DNA, 25 bp, Homo sapien
gacagccaacttcttccttgagcgg

SEQ ID NO: 191317 - DNA, 25 bp, Homo sapien
tgcctgagaaacaccgcctctgctc

SEQ ID NO: 191318 - DNA, 25 bp, Homo sapien
tcagtgggaaccagcgttttgcacc

SEQ ID NO: 191319 - DNA, 25 bp, Homo sapien
agaaacaccgcctctgctccacttt

SEQ ID NO: 191320 - DNA, 25 bp, Homo sapien
tgccatactgtccatgccagtgcct

SEQ ID NO: 191321 - DNA, 25 bp, Homo sapien
ttcctcaaggactaagtaaagtagc

SEQ ID NO: 191322 - DNA, 25 bp, Homo sapien
aggaaagtagtagcacgggctactt

SEQ ID NO: 191323 - DNA, 25 bp, Homo sapien
aaagtagtagcacgggctacttcct

SEQ ID NO: 191324 - DNA, 25 bp, Homo sapien
ctacttcctcaaggactaagtaaag

SEQ ID NO: 191325 - DNA, 25 bp, Homo sapien
agttccagtctgacagctcacagac

SEQ ID NO: 191326 - DNA, 25 bp, Homo sapien
gattacctggataaagcaacagggc

SEQ ID NO: 191327 - DNA, 25 bp, Homo sapien
gagacttacagtacagcgggcacag

SEQ ID NO: 191328 - DNA, 25 bp, Homo sapien
gaccggtacagatagcctccatgag

SEQ ID NO: 191329 - DNA, 25 bp, Homo sapien
gacagcaaagcttgaaggaggcaga

SEQ ID NO: 191330 - DNA, 25 bp, Homo sapien
ccggaaaaactcgaatgtcgccctg

SEQ ID NO: 191331 - DNA, 25 bp, Homo sapien
cgaatgtcgccctgccgttcctggg

SEQ ID NO: 191332 - DNA, 25 bp, Homo sapien
gctgacatcctagctcttcccggaa

SEQ ID NO: 191333 - DNA, 25 bp, Homo sapien
gagctgacatcctagctcttcccgg

SEQ ID NO: 191334 - DNA, 25 bp, Homo sapien
aatgtgggttatcctcctctccatg

SEQ ID NO: 191335 - DNA, 25 bp, Homo sapien
tgcacagtggaaagtcctgaactcc

SEQ ID NO: 191336 - DNA, 25 bp, Homo sapien
ttatctcatcctttcctctagcttt

SEQ ID NO: 191337 - DNA, 25 bp, Homo sapien
caatgctgggccctcttatctcatc

SEQ ID NO: 191338 - DNA, 25 bp, Homo sapien
ttctctgagtcttctatggccccag

SEQ ID NO: 191339 - DNA, 25 bp, Homo sapien
ccagtatagtccactagcccagtgg

SEQ ID NO: 191340 - DNA, 25 bp, Homo sapien
cttctatggccccagtatagtccac

SEQ ID NO: 191341 - DNA, 25 bp, Homo sapien
cagtatagtccactagcccagtggt

SEQ ID NO: 191342 - DNA, 25 bp, Homo sapien
gggaatgaactagagtaaagctgcc

SEQ ID NO: 191343 - DNA, 25 bp, Homo sapien
caagagacttcatgtgcttaccatc

SEQ ID NO: 191344 - DNA, 25 bp, Homo sapien
tttgcccaataaccacagctctcag

SEQ ID NO: 191345 - DNA, 25 bp, Homo sapien
tagaagactttaactgtccaagcac

SEQ ID NO: 191346 - DNA, 25 bp, Homo sapien
gcccataccaagcataaagacagcc

SEQ ID NO: 191347 - DNA, 25 bp, Homo sapien
aaaaatggtcaaaatatgagctgcc

SEQ ID NO: 191348 - DNA, 25 bp, Homo sapien
ctcactaaagataaagacggacatt

SEQ ID NO: 191349 - DNA, 25 bp, Homo sapien
gaaaacagtaggtgtaaatcctctc

SEQ ID NO: 191350 - DNA, 25 bp, Homo sapien
tagcgtttataaagtgtcccaggcc

SEQ ID NO: 191351 - DNA, 25 bp, Homo sapien
tatagcaaagcacacaagtagcagt

SEQ ID NO: 191352 - DNA, 25 bp, Homo sapien
gggaggtcattacgctggaaagcac

SEQ ID NO: 191353 - DNA, 25 bp, Homo sapien
gactttgattccacgaggcagtgat

SEQ ID NO: 191354 - DNA, 25 bp, Homo sapien
gaacaacatagaacatttcctttcc

SEQ ID NO: 191355 - DNA, 25 bp, Homo sapien
caatatactcctagcctgaacaaca

SEQ ID NO: 191356 - DNA, 25 bp, Homo sapien
tccctgggatttcgaaccaatatac

SEQ ID NO: 191357 - DNA, 25 bp, Homo sapien
gatttcgaaccaatatactcctagc

SEQ ID NO: 191358 - DNA, 25 bp, Homo sapien
gcagaaattgtcagttacacaagta

SEQ ID NO: 191359 - DNA, 25 bp, Homo sapien
tggttccccgtttcatcaaaagtga

SEQ ID NO: 191360 - DNA, 25 bp, Homo sapien
taagaaaatatctctccccagcact

SEQ ID NO: 191361 - DNA, 25 bp, Homo sapien
agtatcaccatcctaaaggcacttc

SEQ ID NO: 191362 - DNA, 25 bp, Homo sapien
ccattgtttgtgcaatgtgcagaac

SEQ ID NO: 191363 - DNA, 25 bp, Homo sapien
ctatgcatcactagagccaagaggg

SEQ ID NO: 191364 - DNA, 25 bp, Homo sapien
aactggagcccaaagcagcgggctc

SEQ ID NO: 191365 - DNA, 25 bp, Homo sapien
cgcagatcacagtccccgactttca

SEQ ID NO: 191366 - DNA, 25 bp, Homo sapien
catttgaagggtagacatcgtgctc

SEQ ID NO: 191367 - DNA, 25 bp, Homo sapien
ttcgtccgcgatgcaagtaactgag

SEQ ID NO: 191368 - DNA, 25 bp, Homo sapien
agtaactgagatcgggagctgtccc

SEQ ID NO: 191369 - DNA, 25 bp, Homo sapien
tgcgcatttgccagcacggaggtac

SEQ ID NO: 191370 - DNA, 25 bp, Homo sapien
gaagggcgcgcgatagctcaagtta

SEQ ID NO: 191371 - DNA, 25 bp, Homo sapien
cgcgatagctcaagttagaggcggc

SEQ ID NO: 191372 - DNA, 25 bp, Homo sapien
gcgcgcgatagctcaagttagaggc

SEQ ID NO: 191373 - DNA, 25 bp, Homo sapien
atagctcaagttagaggcggccccg

SEQ ID NO: 191374 - DNA, 25 bp, Homo sapien
cactgcagcgtgtcgctttcgagac

SEQ ID NO: 191375 - DNA, 25 bp, Homo sapien
catctccgcgcggtgcaggagcgtt

SEQ ID NO: 191376 - DNA, 25 bp, Homo sapien
cgcaaaggctcgttctccagggtgc

SEQ ID NO: 191377 - DNA, 25 bp, Homo sapien
acttgcacaggtagccgttggcgcg

SEQ ID NO: 191378 - DNA, 25 bp, Homo sapien
gccccacctcgcaggatgcaggcct

SEQ ID NO: 191379 - DNA, 25 bp, Homo sapien
ccccacctcgcaggatgcaggcctc

SEQ ID NO: 191380 - DNA, 25 bp, Homo sapien
gcgccccacctcgcaggatgcaggc

SEQ ID NO: 191381 - DNA, 25 bp, Homo sapien
ccacctcgcaggatgcaggcctcct

SEQ ID NO: 191382 - DNA, 25 bp, Homo sapien
agcagccagcacggtcggcagtggg

SEQ ID NO: 191383 - DNA, 25 bp, Homo sapien
ggcacagggcgaacgccggcctcat

SEQ ID NO: 191384 - DNA, 25 bp, Homo sapien
cgtggtgcaggctgtagcaggcccc

SEQ ID NO: 191385 - DNA, 25 bp, Homo sapien
tcggcagtggggtgttcgccgccgc

SEQ ID NO: 191386 - DNA, 25 bp, Homo sapien
ttaggccgcgacaggaaatgtgtgc

SEQ ID NO: 191387 - DNA, 25 bp, Homo sapien
gggacgcagtcgactagaaggtcaa

SEQ ID NO: 191388 - DNA, 25 bp, Homo sapien
gaaggtcaaacaccctgcttagagc

SEQ ID NO: 191389 - DNA, 25 bp, Homo sapien
acttggatctgtcccgctcgaggac

SEQ ID NO: 191390 - DNA, 25 bp, Homo sapien
ttcttgtgggccttctccaaacacc

SEQ ID NO: 191391 - DNA, 25 bp, Homo sapien
cactcgggatttgtctcaatttctc

SEQ ID NO: 191392 - DNA, 25 bp, Homo sapien
aaacaccctcatacaagatcggcag

SEQ ID NO: 191393 - DNA, 25 bp, Homo sapien
tacctcctcgcctacttcttgtggg

SEQ ID NO: 191394 - DNA, 25 bp, Homo sapien
tgttttgtgtatcaacttcgaacat

SEQ ID NO: 191395 - DNA, 25 bp, Homo sapien
taatttgaatagatcctgttttgtg

SEQ ID NO: 191396 - DNA, 25 bp, Homo sapien
catataatttgaatagatcctgttt

SEQ ID NO: 191397 - DNA, 25 bp, Homo sapien
cctgttttgtgtatcaacttcgaac

SEQ ID NO: 191398 - DNA, 25 bp, Homo sapien
cttctttccactaacgtactccaag

SEQ ID NO: 191399 - DNA, 25 bp, Homo sapien
tccactaacgtactccaagggatta

SEQ ID NO: 191400 - DNA, 25 bp, Homo sapien
gaaataacctggaagaccattcttc

SEQ ID NO: 191401 - DNA, 25 bp, Homo sapien
atcttcaggaaataacctggaagac

SEQ ID NO: 191402 - DNA, 25 bp, Homo sapien
ttccttgaattgacgctgaatttta

SEQ ID NO: 191403 - DNA, 25 bp, Homo sapien
caggaaataacctggaagaccattc

SEQ ID NO: 191404 - DNA, 25 bp, Homo sapien
ctgagcatgatggttgattcctcat

SEQ ID NO: 191405 - DNA, 25 bp, Homo sapien
cacttgatgtgattgaacagcgaga

SEQ ID NO: 191406 - DNA, 25 bp, Homo sapien
ccaagagctatgatgtaaaaggtgc

SEQ ID NO: 191407 - DNA, 25 bp, Homo sapien
caacaataatagtgggctgcctcga

SEQ ID NO: 191408 - DNA, 25 bp, Homo sapien
aaggtgctatctgtttaccagctgc

SEQ ID NO: 191409 - DNA, 25 bp, Homo sapien
cagtagaggagccaagccaataacc

SEQ ID NO: 191410 - DNA, 25 bp, Homo sapien
ttgtgttaaggtcagtagaggagcc

SEQ ID NO: 191411 - DNA, 25 bp, Homo sapien
cattagcaaatagaccacctggaaa

SEQ ID NO: 191412 - DNA, 25 bp, Homo sapien
cacctggaaagtggactcagtttgt

SEQ ID NO: 191413 - DNA, 25 bp, Homo sapien
tgctgcacttgaccatcatagcaat

SEQ ID NO: 191414 - DNA, 25 bp, Homo sapien
cttgaccatcatagcaatagagata

SEQ ID NO: 191415 - DNA, 25 bp, Homo sapien
gaagttccttgaagccccaaatggc

SEQ ID NO: 191416 - DNA, 25 bp, Homo sapien
gatcgcctctggatggttgtgatga

SEQ ID NO: 191417 - DNA, 25 bp, Homo sapien
tgatactagaatgacccaacaagaa

SEQ ID NO: 191418 - DNA, 25 bp, Homo sapien
tttatgacaggtacaaaacctcaca

SEQ ID NO: 191419 - DNA, 25 bp, Homo sapien
tgctaaggacattcactgatactag

SEQ ID NO: 191420 - DNA, 25 bp, Homo sapien
taatcctagaaagcattgaaactcc

SEQ ID NO: 191421 - DNA, 25 bp, Homo sapien
actggatgatttgcttaaccacaaa

SEQ ID NO: 191422 - DNA, 25 bp, Homo sapien
aaaactggatgatttgcttaaccac

SEQ ID NO: 191423 - DNA, 25 bp, Homo sapien
gatttgcttaaccacaaatatttcc

SEQ ID NO: 191424 - DNA, 25 bp, Homo sapien
tgtaaaaactggatgatttgcttaa

SEQ ID NO: 191425 - DNA, 25 bp, Homo sapien
gctgatgttgccttcctgtgagatt

SEQ ID NO: 191426 - DNA, 25 bp, Homo sapien
tccaggtgaaaactggttaatctga

SEQ ID NO: 191427 - DNA, 25 bp, Homo sapien
tattgcagcaaccactttgaactgt

SEQ ID NO: 191428 - DNA, 25 bp, Homo sapien
catctctgcgcttcaagagaaaaca

SEQ ID NO: 191429 - DNA, 25 bp, Homo sapien
agtatccagtaggagtcactccctt

SEQ ID NO: 191430 - DNA, 25 bp, Homo sapien
ttacctccacttttcctacaatctg

SEQ ID NO: 191431 - DNA, 25 bp, Homo sapien
gttagaaggcttaagcaagtatcca

SEQ ID NO: 191432 - DNA, 25 bp, Homo sapien
ggacagctgccaaccatccatccaa

SEQ ID NO: 191433 - DNA, 25 bp, Homo sapien
tgtcctctcctctttacccatatta

SEQ ID NO: 191434 - DNA, 25 bp, Homo sapien
cgctagtaggagatcatacctggtt

SEQ ID NO: 191435 - DNA, 25 bp, Homo sapien
tgccctgggaagacctctcccacca

SEQ ID NO: 191436 - DNA, 25 bp, Homo sapien
cacacaggagtacgctagtaggaga

SEQ ID NO: 191437 - DNA, 25 bp, Homo sapien
gagtacgctagtaggagatcatacc

SEQ ID NO: 191438 - DNA, 25 bp, Homo sapien
ttcactgttgcccccatgagagatg

SEQ ID NO: 191439 - DNA, 25 bp, Homo sapien
gcccccatgagagatgcctttggga

SEQ ID NO: 191440 - DNA, 25 bp, Homo sapien
cactgttgcccccatgagagatgcc

SEQ ID NO: 191441 - DNA, 25 bp, Homo sapien
tgttgcccccatgagagatgccttt

SEQ ID NO: 191442 - DNA, 25 bp, Homo sapien
catctacatgccttgaagtcagaat

SEQ ID NO: 191443 - DNA, 25 bp, Homo sapien
atctacatgccttgaagtcagaatt

SEQ ID NO: 191444 - DNA, 25 bp, Homo sapien
ccatctacatgccttgaagtcagaa

SEQ ID NO: 191445 - DNA, 25 bp, Homo sapien
tctacatgccttgaagtcagaattc

SEQ ID NO: 191446 - DNA, 25 bp, Homo sapien
ccagttttggttctgtcgcgggctg

SEQ ID NO: 191447 - DNA, 25 bp, Homo sapien
aagacccgcaatgagaagctggtgt

SEQ ID NO: 191448 - DNA, 25 bp, Homo sapien
agctggtgtccgagttgtctgacat

SEQ ID NO: 191449 - DNA, 25 bp, Homo sapien
tgaagaagatcaagacccgcaatga

SEQ ID NO: 191450 - DNA, 25 bp, Homo sapien
ggtgtagacgtaagaagctttccaa

SEQ ID NO: 191451 - DNA, 25 bp, Homo sapien
tttccaagctttgtgccagcccttc

SEQ ID NO: 191452 - DNA, 25 bp, Homo sapien
caggtctgcctggtgtagacgtaag

SEQ ID NO: 191453 - DNA, 25 bp, Homo sapien
ttacaacacagaacgcaggtctgcc

SEQ ID NO: 191454 - DNA, 25 bp, Homo sapien
taatgaatccccatggtctctcatt

SEQ ID NO: 191455 - DNA, 25 bp, Homo sapien
taatcccttctattttttagcacag

SEQ ID NO: 191456 - DNA, 25 bp, Homo sapien
taaaactgcaataccgtcaactcca

SEQ ID NO: 191457 - DNA, 25 bp, Homo sapien
caaatcaagtgaatgcaaagatcca

SEQ ID NO: 191458 - DNA, 25 bp, Homo sapien
aagactgtggatgtttcacctgtcc

SEQ ID NO: 191459 - DNA, 25 bp, Homo sapien
actctgagcttgattcaggtcaaga

SEQ ID NO: 191460 - DNA, 25 bp, Homo sapien
aaagactgtggatgtttcacctgtc

SEQ ID NO: 191461 - DNA, 25 bp, Homo sapien
ctgtggatgtttcacctgtccaact

SEQ ID NO: 191462 - DNA, 25 bp, Homo sapien
aggcatcgttcatttcaaggtgttg

SEQ ID NO: 191463 - DNA, 25 bp, Homo sapien
cagcttcagagagttagagctatgt

SEQ ID NO: 191464 - DNA, 25 bp, Homo sapien
agagagttagagctatgtccaccct

SEQ ID NO: 191465 - DNA, 25 bp, Homo sapien
acatgaggcatcgttcatttcaagg

SEQ ID NO: 191466 - DNA, 25 bp, Homo sapien
tcctatgaccaagaaacgtcacacc

SEQ ID NO: 191467 - DNA, 25 bp, Homo sapien
taagtcctctggtgtcagatcacac

SEQ ID NO: 191468 - DNA, 25 bp, Homo sapien
gggaaagtccatgaatctgccagtg

SEQ ID NO: 191469 - DNA, 25 bp, Homo sapien
tctgccagtgaagatgttaacactg

SEQ ID NO: 191470 - DNA, 25 bp, Homo sapien
gaatcgagggcaaaagtaaagctca

SEQ ID NO: 191471 - DNA, 25 bp, Homo sapien
ccatggctaatggagactggtctag

SEQ ID NO: 191472 - DNA, 25 bp, Homo sapien
caaaatagagcttcacactgtggag

SEQ ID NO: 191473 - DNA, 25 bp, Homo sapien
tatacactaaacaatcggagaatcg

SEQ ID NO: 191474 - DNA, 25 bp, Homo sapien
caaactgtatggtatcaattgttat

SEQ ID NO: 191475 - DNA, 25 bp, Homo sapien
aaagatatgaatatactagccattt

SEQ ID NO: 191476 - DNA, 25 bp, Homo sapien
aatagcatactaggctgtttagcgg

SEQ ID NO: 191477 - DNA, 25 bp, Homo sapien
tattaaagtttgtaacatgcagcta

SEQ ID NO: 191478 - DNA, 25 bp, Homo sapien
aaaaattgagtaatatatgttagcc

SEQ ID NO: 191479 - DNA, 25 bp, Homo sapien
gaaaacatatttcatggcaggccct

SEQ ID NO: 191480 - DNA, 25 bp, Homo sapien
gagaaggaagctctgatcaggtaac

SEQ ID NO: 191481 - DNA, 25 bp, Homo sapien
tagggaaacagttatacataaacag

SEQ ID NO: 191482 - DNA, 25 bp, Homo sapien
tgtgaaaagctaggctgtgtaagca

SEQ ID NO: 191483 - DNA, 25 bp, Homo sapien
gaagacttaggcagctagccccatg

SEQ ID NO: 191484 - DNA, 25 bp, Homo sapien
aaggaaatcattgcacagagtgtga

SEQ ID NO: 191485 - DNA, 25 bp, Homo sapien
gacactcttctaatggctctacaca

SEQ ID NO: 191486 - DNA, 25 bp, Homo sapien
cccttctagtagtcctcacagtcta

SEQ ID NO: 191487 - DNA, 25 bp, Homo sapien
catacccaataatggaatcactagg

SEQ ID NO: 191488 - DNA, 25 bp, Homo sapien
tcactattgaacatactagtatgtg

SEQ ID NO: 191489 - DNA, 25 bp, Homo sapien
tgtgaggtttgggataccaatgatc

SEQ ID NO: 191490 - DNA, 25 bp, Homo sapien
tgcacaccgactttgctagatctcg

SEQ ID NO: 191491 - DNA, 25 bp, Homo sapien
aagatcatcctataagctccgtgag

SEQ ID NO: 191492 - DNA, 25 bp, Homo sapien
taaaacatggtactctggtgtgcct

SEQ ID NO: 191493 - DNA, 25 bp, Homo sapien
tgaggtaatcctctctggtcccagg

SEQ ID NO: 191494 - DNA, 25 bp, Homo sapien
ttcaaagaatccaattcaacttcat

SEQ ID NO: 191495 - DNA, 25 bp, Homo sapien
caaagaatccaattcaacttcatta

SEQ ID NO: 191496 - DNA, 25 bp, Homo sapien
tgatatgtttgtctagcatattaat

SEQ ID NO: 191497 - DNA, 25 bp, Homo sapien
tatgtttgtctagcatattaatctt

SEQ ID NO: 191498 - DNA, 25 bp, Homo sapien
gccatgatatcatgaaaggttctga

SEQ ID NO: 191499 - DNA, 25 bp, Homo sapien
gcctgtatttagttgctcctctatg

SEQ ID NO: 191500 - DNA, 25 bp, Homo sapien
gctccgtcattactagaggcagaaa

SEQ ID NO: 191501 - DNA, 25 bp, Homo sapien
tctgtgaacaagcattatattgccc

SEQ ID NO: 191502 - DNA, 25 bp, Homo sapien
cagagtgtcagtcccgcactgggag

SEQ ID NO: 191503 - DNA, 25 bp, Homo sapien
cttggcctcccggtgcagagtgtca

SEQ ID NO: 191504 - DNA, 25 bp, Homo sapien
ccttagccctcacgcttccaaggaa

SEQ ID NO: 191505 - DNA, 25 bp, Homo sapien
ggtgtgtgggaagcaagcctttctt

SEQ ID NO: 191506 - DNA, 25 bp, Homo sapien
caccagaggactgacgctgttggcc

SEQ ID NO: 191507 - DNA, 25 bp, Homo sapien
gcctttcggcacagctttgatgtca

SEQ ID NO: 191508 - DNA, 25 bp, Homo sapien
acagaccacattcgccatcagaggg

SEQ ID NO: 191509 - DNA, 25 bp, Homo sapien
tgttggccttcatcagacgtgttgc

SEQ ID NO: 191510 - DNA, 25 bp, Homo sapien
cagcagagtacatgcagggaagcac

SEQ ID NO: 191511 - DNA, 25 bp, Homo sapien
aacgtgacatctgcagttcgtgcca

SEQ ID NO: 191512 - DNA, 25 bp, Homo sapien
agtgtcagcgttctcactgcaggag

SEQ ID NO: 191513 - DNA, 25 bp, Homo sapien
tgcagaatgatatctcaccaggtca

SEQ ID NO: 191514 - DNA, 25 bp, Homo sapien
tcagctagccacacgttcagggagc

SEQ ID NO: 191515 - DNA, 25 bp, Homo sapien
ggttcctggatacggctctgagcca

SEQ ID NO: 191516 - DNA, 25 bp, Homo sapien
tcagccgagtggattcagcgagagt

SEQ ID NO: 191517 - DNA, 25 bp, Homo sapien
tccaggatcaggcagtcagggagcc

SEQ ID NO: 191518 - DNA, 25 bp, Homo sapien
cagtgtttgcgcctctgtccccgtg

SEQ ID NO: 191519 - DNA, 25 bp, Homo sapien
tcagtgtttgcgcctctgtccccgt

SEQ ID NO: 191520 - DNA, 25 bp, Homo sapien
gagctttactttgacggaccatcag

SEQ ID NO: 191521 - DNA, 25 bp, Homo sapien
tgcatttgggataagcgtccatttg

SEQ ID NO: 191522 - DNA, 25 bp, Homo sapien
gctgctgcattggttcgcctccctt

SEQ ID NO: 191523 - DNA, 25 bp, Homo sapien
tgcgtgtactgtgacgctgacccct

SEQ ID NO: 191524 - DNA, 25 bp, Homo sapien
tatgaggaaaggctttgactgacac

SEQ ID NO: 191525 - DNA, 25 bp, Homo sapien
gctataaatatgaggaaaggctttg

SEQ ID NO: 191526 - DNA, 25 bp, Homo sapien
taaatatgaggaaaggctttgactg

SEQ ID NO: 191527 - DNA, 25 bp, Homo sapien
aatatgaggaaaggctttgactgac

SEQ ID NO: 191528 - DNA, 25 bp, Homo sapien
tccttgaaaaacgatgaaacattcc

SEQ ID NO: 191529 - DNA, 25 bp, Homo sapien
gctccttgaaaaacgatgaaacatt

SEQ ID NO: 191530 - DNA, 25 bp, Homo sapien
gggctccttgaaaaacgatgaaaca

SEQ ID NO: 191531 - DNA, 25 bp, Homo sapien
tgggctccttgaaaaacgatgaaac

SEQ ID NO: 191532 - DNA, 25 bp, Homo sapien
ttgagggatgccgcagactagccat

SEQ ID NO: 191533 - DNA, 25 bp, Homo sapien
ggtggttgagggatgccgcagacta

SEQ ID NO: 191534 - DNA, 25 bp, Homo sapien
agagctagagactcctcggtgagga

SEQ ID NO: 191535 - DNA, 25 bp, Homo sapien
ccagagctagagactcctcggtgag

SEQ ID NO: 191536 - DNA, 25 bp, Homo sapien
ctgaaacatcaccaactgtttcatt

SEQ ID NO: 191537 - DNA, 25 bp, Homo sapien
tttgagttgggttctctgaaacatc

SEQ ID NO: 191538 - DNA, 25 bp, Homo sapien
ctctgaaacatcaccaactgtttca

SEQ ID NO: 191539 - DNA, 25 bp, Homo sapien
gtttgagttgggttctctgaaacat

SEQ ID NO: 191540 - DNA, 25 bp, Homo sapien
tagctggggaggcttcacaattatg

SEQ ID NO: 191541 - DNA, 25 bp, Homo sapien
acatagctggggaggcttcacaatt

SEQ ID NO: 191542 - DNA, 25 bp, Homo sapien
cagaaggcaaggagcagcaaatcac

SEQ ID NO: 191543 - DNA, 25 bp, Homo sapien
agaaggcaaggagcagcaaatcaca

SEQ ID NO: 191544 - DNA, 25 bp, Homo sapien
gagccctcagaaatagtaccacaca

SEQ ID NO: 191545 - DNA, 25 bp, Homo sapien
actacaaagccatagtaaccaaaag

SEQ ID NO: 191546 - DNA, 25 bp, Homo sapien
caaactatactacaaagccatagta

SEQ ID NO: 191547 - DNA, 25 bp, Homo sapien
agcatggtactggtaccaaaacaga

SEQ ID NO: 191548 - DNA, 25 bp, Homo sapien
aatagtagtagagtcccaggtcacc

SEQ ID NO: 191549 - DNA, 25 bp, Homo sapien
gacaagtttacttctggagaggccg

SEQ ID NO: 191550 - DNA, 25 bp, Homo sapien
tgtggcacagggctaatagaagact

SEQ ID NO: 191551 - DNA, 25 bp, Homo sapien
aagactttttcggattcttcatcaa

SEQ ID NO: 191552 - DNA, 25 bp, Homo sapien
aattggtgccttgggagttttcagc

SEQ ID NO: 191553 - DNA, 25 bp, Homo sapien
aatggggtggccaagtcgctgacct

SEQ ID NO: 191554 - DNA, 25 bp, Homo sapien
gcaaggctgtgcacataccaacagt

SEQ ID NO: 191555 - DNA, 25 bp, Homo sapien
ataccaacagttggcaacagttcag

SEQ ID NO: 191556 - DNA, 25 bp, Homo sapien
ggggtggcaaaggcagaagcaaatt

SEQ ID NO: 191557 - DNA, 25 bp, Homo sapien
gaagagaaggggttgttggtcttgc

SEQ ID NO: 191558 - DNA, 25 bp, Homo sapien
caggggtggcaaaggcagaagcaaa

SEQ ID NO: 191559 - DNA, 25 bp, Homo sapien
tctcaggggtggcaaaggcagaagc

SEQ ID NO: 191560 - DNA, 25 bp, Homo sapien
tgtcaactgtagcagactggagact

SEQ ID NO: 191561 - DNA, 25 bp, Homo sapien
tatgacgaaggtaagaggcaacacg

SEQ ID NO: 191562 - DNA, 25 bp, Homo sapien
ggtctgagcattactatgacgaagg

SEQ ID NO: 191563 - DNA, 25 bp, Homo sapien
cacgaactggtgcatgtgtgatcct

SEQ ID NO: 191564 - DNA, 25 bp, Homo sapien
gttgctccatgctccaaaatcttcc

SEQ ID NO: 191565 - DNA, 25 bp, Homo sapien
ctctcaaatttcctccaccatcata

SEQ ID NO: 191566 - DNA, 25 bp, Homo sapien
tccatctagcaaacagtctaaaact

SEQ ID NO: 191567 - DNA, 25 bp, Homo sapien
catctagcaaacagtctaaaactct

SEQ ID NO: 191568 - DNA, 25 bp, Homo sapien
taaactcagcagaggatgcaccgtg

SEQ ID NO: 191569 - DNA, 25 bp, Homo sapien
catggcacgatgctcttacaaaagg

SEQ ID NO: 191570 - DNA, 25 bp, Homo sapien
gtctgacacacgcataaaaaggagt

SEQ ID NO: 191571 - DNA, 25 bp, Homo sapien
taatattgccctacaggttgctgag

SEQ ID NO: 191572 - DNA, 25 bp, Homo sapien
tttatgatcctgtctctgccctttc

SEQ ID NO: 191573 - DNA, 25 bp, Homo sapien
ttcccccagaggacattttcctcca

SEQ ID NO: 191574 - DNA, 25 bp, Homo sapien
ttatgatcctgtctctgccctttcc

SEQ ID NO: 191575 - DNA, 25 bp, Homo sapien
ccccagaggacattttcctccagac

SEQ ID NO: 191576 - DNA, 25 bp, Homo sapien
atctgaatcagactcatcgttatag

SEQ ID NO: 191577 - DNA, 25 bp, Homo sapien
gaaaatggaagagctagtttcttcc

SEQ ID NO: 191578 - DNA, 25 bp, Homo sapien
tagaagtatatcatggcttgcactg

SEQ ID NO: 191579 - DNA, 25 bp, Homo sapien
catcgttatagaagtatatcatggc

SEQ ID NO: 191580 - DNA, 25 bp, Homo sapien
aatattattgacatttcaaaaaggg

SEQ ID NO: 191581 - DNA, 25 bp, Homo sapien
tattattgacatttcaaaaagggta

SEQ ID NO: 191582 - DNA, 25 bp, Homo sapien
caaatattattgacatttcaaaaag

SEQ ID NO: 191583 - DNA, 25 bp, Homo sapien
ctgcaaatattattgacatttcaaa

SEQ ID NO: 191584 - DNA, 25 bp, Homo sapien
cacaggtctccacgctgtgaggctc

SEQ ID NO: 191585 - DNA, 25 bp, Homo sapien
gggcagtgacagacgtgcccccatg

SEQ ID NO: 191586 - DNA, 25 bp, Homo sapien
cagcatctgcaggtgtcaggatcac

SEQ ID NO: 191587 - DNA, 25 bp, Homo sapien
tgatctcccccaggtttaaattggc

SEQ ID NO: 191588 - DNA, 25 bp, Homo sapien
gctattgtggacagtgcaatctact

SEQ ID NO: 191589 - DNA, 25 bp, Homo sapien
cactaccctctactctcgatgtcca

SEQ ID NO: 191590 - DNA, 25 bp, Homo sapien
gatgtccatcctctattctctgtgt

SEQ ID NO: 191591 - DNA, 25 bp, Homo sapien
ctttcgatcccacgaataagtgaga

SEQ ID NO: 191592 - DNA, 25 bp, Homo sapien
aagcatggcctttcattagaatccg

SEQ ID NO: 191593 - DNA, 25 bp, Homo sapien
taaacacatgggttaaatcgatctc

SEQ ID NO: 191594 - DNA, 25 bp, Homo sapien
catgatcatagctccgttcggtttt

SEQ ID NO: 191595 - DNA, 25 bp, Homo sapien
taagaagtgtatatcccagagccaa

SEQ ID NO: 191596 - DNA, 25 bp, Homo sapien
ggcatttaggcctagcgtagttcaa

SEQ ID NO: 191597 - DNA, 25 bp, Homo sapien
cagctgcgggattgttacccaaaaa

SEQ ID NO: 191598 - DNA, 25 bp, Homo sapien
tctagaaccagctataacactgtgg

SEQ ID NO: 191599 - DNA, 25 bp, Homo sapien
catctgtagtacgaggcagactcta

SEQ ID NO: 191600 - DNA, 25 bp, Homo sapien
cataaacacttgtaaactaacatca

SEQ ID NO: 191601 - DNA, 25 bp, Homo sapien
cacttgtaaactaacatcatctgta

SEQ ID NO: 191602 - DNA, 25 bp, Homo sapien
aacacttgtaaactaacatcatctg

SEQ ID NO: 191603 - DNA, 25 bp, Homo sapien
ttgtaaactaacatcatctgtaaga

SEQ ID NO: 191604 - DNA, 25 bp, Homo sapien
caatcatgcaattgtaggacggtgc

SEQ ID NO: 191605 - DNA, 25 bp, Homo sapien
tgactgggtcataagggttccgccc

SEQ ID NO: 191606 - DNA, 25 bp, Homo sapien
tatgctatgtttaaggtcctatgga

SEQ ID NO: 191607 - DNA, 25 bp, Homo sapien
taataatctaacaggagcaatgcca

SEQ ID NO: 191608 - DNA, 25 bp, Homo sapien
ctggaagttgaagccatcatgacat

SEQ ID NO: 191609 - DNA, 25 bp, Homo sapien
ttctggaagttgaagccatcatgac

SEQ ID NO: 191610 - DNA, 25 bp, Homo sapien
gaagttgaagccatcatgacatttt

SEQ ID NO: 191611 - DNA, 25 bp, Homo sapien
gaagccatcatgacattttattcct

SEQ ID NO: 191612 - DNA, 25 bp, Homo sapien
tgcctttactccctctcacttggat

SEQ ID NO: 191613 - DNA, 25 bp, Homo sapien
tgccatgccctggaataattacttt

SEQ ID NO: 191614 - DNA, 25 bp, Homo sapien
aattcagattttgtgcatagttgcc

SEQ ID NO: 191615 - DNA, 25 bp, Homo sapien
gcaacttctaatcaagtcctattga

SEQ ID NO: 191616 - DNA, 25 bp, Homo sapien
caaaggcatgggtaataactgcacc

SEQ ID NO: 191617 - DNA, 25 bp, Homo sapien
caataatgatttgcagggttcctgc

SEQ ID NO: 191618 - DNA, 25 bp, Homo sapien
ttcacaacctagcattaaactggag

SEQ ID NO: 191619 - DNA, 25 bp, Homo sapien
cacttttgtcctatggtgtcgccaa

SEQ ID NO: 191620 - DNA, 25 bp, Homo sapien
ttattatgagtctgtgaagggttga

SEQ ID NO: 191621 - DNA, 25 bp, Homo sapien
tattattatgagtctgtgaagggtt

SEQ ID NO: 191622 - DNA, 25 bp, Homo sapien
attatgagtctgtgaagggttgact

SEQ ID NO: 191623 - DNA, 25 bp, Homo sapien
atattattatgagtctgtgaagggt

SEQ ID NO: 191624 - DNA, 25 bp, Homo sapien
cctgttcaggaagctaggctagaga

SEQ ID NO: 191625 - DNA, 25 bp, Homo sapien
ccaggtttaggcaactagtcaataa

SEQ ID NO: 191626 - DNA, 25 bp, Homo sapien
tgtatttactgtgttcccttggcca

SEQ ID NO: 191627 - DNA, 25 bp, Homo sapien
tataataccgtactaggcactaggg

SEQ ID NO: 191628 - DNA, 25 bp, Homo sapien
gcttgcagaaggtggcggaaatttt

SEQ ID NO: 191629 - DNA, 25 bp, Homo sapien
ggtggcggaaattttcatactcagg

SEQ ID NO: 191630 - DNA, 25 bp, Homo sapien
ttggcattggaaatctggagtgaag

SEQ ID NO: 191631 - DNA, 25 bp, Homo sapien
tggtatcctgacttccgccactgtg

SEQ ID NO: 191632 - DNA, 25 bp, Homo sapien
ccataggtaagtagctctaaacacc

SEQ ID NO: 191633 - DNA, 25 bp, Homo sapien
tacctaagcttatgatacgtgaaag

SEQ ID NO: 191634 - DNA, 25 bp, Homo sapien
gaatgttagctaaaagctatctacc

SEQ ID NO: 191635 - DNA, 25 bp, Homo sapien
tacgtgaaagcaattgaatcaatcc

SEQ ID NO: 191636 - DNA, 25 bp, Homo sapien
catgagaagaatacgatctgcaaga

SEQ ID NO: 191637 - DNA, 25 bp, Homo sapien
ctcaccatgataaatcaaaatctgg

SEQ ID NO: 191638 - DNA, 25 bp, Homo sapien
gaatacgatctgcaagaatgctact

SEQ ID NO: 191639 - DNA, 25 bp, Homo sapien
tgctactgctatcaagaagaaccgg

SEQ ID NO: 191640 - DNA, 25 bp, Homo sapien
gatcttgacgcataaaatggtgacg

SEQ ID NO: 191641 - DNA, 25 bp, Homo sapien
aagaatacgcatacaggataggctg

SEQ ID NO: 191642 - DNA, 25 bp, Homo sapien
ctggtggtccactaaaagaatacgc

SEQ ID NO: 191643 - DNA, 25 bp, Homo sapien
ggctgaatcataattagagactggg

SEQ ID NO: 191644 - DNA, 25 bp, Homo sapien
ctctgaagatctaaaagcccaacaa

SEQ ID NO: 191645 - DNA, 25 bp, Homo sapien
catgccttaagacaagcagaccttg

SEQ ID NO: 191646 - DNA, 25 bp, Homo sapien
aaagctccttgtaagagggatccat

SEQ ID NO: 191647 - DNA, 25 bp, Homo sapien
taggctaatgccctccatcactttc

SEQ ID NO: 191648 - DNA, 25 bp, Homo sapien
ggaacttgggtcatctttatgatat

SEQ ID NO: 191649 - DNA, 25 bp, Homo sapien
aaatctgaaggaacttgggtcatct

SEQ ID NO: 191650 - DNA, 25 bp, Homo sapien
gaaggaacttgggtcatctttatga

SEQ ID NO: 191651 - DNA, 25 bp, Homo sapien
tctgaaggaacttgggtcatcttta

SEQ ID NO: 191652 - DNA, 25 bp, Homo sapien
tggacacagaaattcgacagcttag

SEQ ID NO: 191653 - DNA, 25 bp, Homo sapien
caaaagggtgtttaagctagagtgc

SEQ ID NO: 191654 - DNA, 25 bp, Homo sapien
gctagagtgcataaagaagtacctt

SEQ ID NO: 191655 - DNA, 25 bp, Homo sapien
agcagtttgagactaccttgagcaa

SEQ ID NO: 191656 - DNA, 25 bp, Homo sapien
aaaggcaatctagtttactggaaga

SEQ ID NO: 191657 - DNA, 25 bp, Homo sapien
tgagttctactattcattactgtgc

SEQ ID NO: 191658 - DNA, 25 bp, Homo sapien
tgaaagagattatctgcaacaaaca

SEQ ID NO: 191659 - DNA, 25 bp, Homo sapien
cactgttaagtactttgaaagagat

SEQ ID NO: 191660 - DNA, 25 bp, Homo sapien
tgtccagccacctaagcacatctgg

SEQ ID NO: 191661 - DNA, 25 bp, Homo sapien
tgctctatatattgctagccgggcc

SEQ ID NO: 191662 - DNA, 25 bp, Homo sapien
cagtcgaatgagctgtctgtccagc

SEQ ID NO: 191663 - DNA, 25 bp, Homo sapien
gcctcctggtcaaaagatgcagcaa

SEQ ID NO: 191664 - DNA, 25 bp, Homo sapien
ccacttgaatgctgatactgagtca

SEQ ID NO: 191665 - DNA, 25 bp, Homo sapien
ctcggatgcgtctctgcccacttga

SEQ ID NO: 191666 - DNA, 25 bp, Homo sapien
ttcctagcaatggtggtcactcgga

SEQ ID NO: 191667 - DNA, 25 bp, Homo sapien
tactgagtcacaaactggattgcac

SEQ ID NO: 191668 - DNA, 25 bp, Homo sapien
catatcttccactgacatgtgccac

SEQ ID NO: 191669 - DNA, 25 bp, Homo sapien
tgacatgtgccacctgttcctatct

SEQ ID NO: 191670 - DNA, 25 bp, Homo sapien
gattgacaacctcaaaatatatggc

SEQ ID NO: 191671 - DNA, 25 bp, Homo sapien
taaggttgtagtgggactaagtcca

SEQ ID NO: 191672 - DNA, 25 bp, Homo sapien
tatatgcatttacgaacacatgttc

SEQ ID NO: 191673 - DNA, 25 bp, Homo sapien
gatatagacagacctttaccacgca

SEQ ID NO: 191674 - DNA, 25 bp, Homo sapien
tctgattcccaagaaaacgtcatag

SEQ ID NO: 191675 - DNA, 25 bp, Homo sapien
cacgcaaactgcttgtacatattaa

SEQ ID NO: 191676 - DNA, 25 bp, Homo sapien
gaaagagcaaccatgaatagaggta

SEQ ID NO: 191677 - DNA, 25 bp, Homo sapien
aaaggaatgctataggctgccaccc

SEQ ID NO: 191678 - DNA, 25 bp, Homo sapien
caagtttttattggtgctgtcctgt

SEQ ID NO: 191679 - DNA, 25 bp, Homo sapien
caatgggagctgaactacctaaaac

SEQ ID NO: 191680 - DNA, 25 bp, Homo sapien
agacacacagggtcctttagaattg

SEQ ID NO: 191681 - DNA, 25 bp, Homo sapien
cagggtcctttagaattgagtgaca

SEQ ID NO: 191682 - DNA, 25 bp, Homo sapien
cacacagggtcctttagaattgagt

SEQ ID NO: 191683 - DNA, 25 bp, Homo sapien
ggtcctttagaattgagtgacacac

SEQ ID NO: 191684 - DNA, 25 bp, Homo sapien
agggtccaatagctcctgaaatctt

SEQ ID NO: 191685 - DNA, 25 bp, Homo sapien
tagatttggctctacaaatgataga

SEQ ID NO: 191686 - DNA, 25 bp, Homo sapien
aaacacaaattagacagacacagtg

SEQ ID NO: 191687 - DNA, 25 bp, Homo sapien
catactttaaagagctaagccctat

SEQ ID NO: 191688 - DNA, 25 bp, Homo sapien
taacctagcactaacataaatagat

SEQ ID NO: 191689 - DNA, 25 bp, Homo sapien
ggaagtattgaaagaatcacccatt

SEQ ID NO: 191690 - DNA, 25 bp, Homo sapien
agtttgtttgaataaggaagtattg

SEQ ID NO: 191691 - DNA, 25 bp, Homo sapien
aaggaagtattgaaagaatcaccca

SEQ ID NO: 191692 - DNA, 25 bp, Homo sapien
aggaagtattgaaagaatcacccat

SEQ ID NO: 191693 - DNA, 25 bp, Homo sapien
ccacacaatggagtaatacactgct

SEQ ID NO: 191694 - DNA, 25 bp, Homo sapien
cacaaggttattcgctgaagcacta

SEQ ID NO: 191695 - DNA, 25 bp, Homo sapien
caaaatggtacaaccccagtacaga

SEQ ID NO: 191696 - DNA, 25 bp, Homo sapien
gctggactacaggttgcaccaacac

SEQ ID NO: 191697 - DNA, 25 bp, Homo sapien
tgcacacgcatagatatcaataaca

SEQ ID NO: 191698 - DNA, 25 bp, Homo sapien
gggacagcatttcatctccaggaga

SEQ ID NO: 191699 - DNA, 25 bp, Homo sapien
gacctgtctgatctaatgcacacgc

SEQ ID NO: 191700 - DNA, 25 bp, Homo sapien
taacatggccagttgtagcagctcg

SEQ ID NO: 191701 - DNA, 25 bp, Homo sapien
caacaacttctgtgagtctgacatt

SEQ ID NO: 191702 - DNA, 25 bp, Homo sapien
gatctaaggactaaaagagtaactc

SEQ ID NO: 191703 - DNA, 25 bp, Homo sapien
tagataaacccctaaatgaagccaa

SEQ ID NO: 191704 - DNA, 25 bp, Homo sapien
caaacttaaagaaagtcctattgca

SEQ ID NO: 191705 - DNA, 25 bp, Homo sapien
gaacatcatgatacgagcaccagtg

SEQ ID NO: 191706 - DNA, 25 bp, Homo sapien
gcccctgagtagcaggaccaccaat

SEQ ID NO: 191707 - DNA, 25 bp, Homo sapien
tgtctttgtcaatgtcatgccacga

SEQ ID NO: 191708 - DNA, 25 bp, Homo sapien
tataggtgtcttcaactcatctcca

SEQ ID NO: 191709 - DNA, 25 bp, Homo sapien
gatgtttagaacacaagtatcatag

SEQ ID NO: 191710 - DNA, 25 bp, Homo sapien
gtttagaacacaagtatcatagaac

SEQ ID NO: 191711 - DNA, 25 bp, Homo sapien
tttagaacacaagtatcatagaaca

SEQ ID NO: 191712 - DNA, 25 bp, Homo sapien
tgtttagaacacaagtatcatagaa

SEQ ID NO: 191713 - DNA, 25 bp, Homo sapien
tccagcagtcctacagctatggaaa

SEQ ID NO: 191714 - DNA, 25 bp, Homo sapien
ccagaggaacgcaaaggtctctttc

SEQ ID NO: 191715 - DNA, 25 bp, Homo sapien
ctccagcagtcctacagctatggaa

SEQ ID NO: 191716 - DNA, 25 bp, Homo sapien
ccaccccagaggaacgcaaaggtct

SEQ ID NO: 191717 - DNA, 25 bp, Homo sapien
ccaagggtctcgctggagttctccc

SEQ ID NO: 191718 - DNA, 25 bp, Homo sapien
gattcatgtctattttctgtactgg

SEQ ID NO: 191719 - DNA, 25 bp, Homo sapien
tgtggtacaggccaagggtctcgct

SEQ ID NO: 191720 - DNA, 25 bp, Homo sapien
cccagaagatctgtgagattcatgt

SEQ ID NO: 191721 - DNA, 25 bp, Homo sapien
ggaccacgtgttgcttgagtaagtg

SEQ ID NO: 191722 - DNA, 25 bp, Homo sapien
tgagtaagtggtactttagagagcc

SEQ ID NO: 191723 - DNA, 25 bp, Homo sapien
gtaagtggtactttagagagcccca

SEQ ID NO: 191724 - DNA, 25 bp, Homo sapien
aagtggtactttagagagccccagc

SEQ ID NO: 191725 - DNA, 25 bp, Homo sapien
caggatcatacaaccagaagagttt

SEQ ID NO: 191726 - DNA, 25 bp, Homo sapien
tcataaccaaactacgaactgccac

SEQ ID NO: 191727 - DNA, 25 bp, Homo sapien
aaaaattcagtctgcaggcattcac

SEQ ID NO: 191728 - DNA, 25 bp, Homo sapien
taaagctctataagggtttacacca

SEQ ID NO: 191729 - DNA, 25 bp, Homo sapien
cactcgcccacatcatggcctccat

SEQ ID NO: 191730 - DNA, 25 bp, Homo sapien
tcaggtgactagcaccatgtcaggc

SEQ ID NO: 191731 - DNA, 25 bp, Homo sapien
cagccctgcactcgcccacatcatg

SEQ ID NO: 191732 - DNA, 25 bp, Homo sapien
cctgcactcgcccacatcatggcct

SEQ ID NO: 191733 - DNA, 25 bp, Homo sapien
aatgttgaacctttctggcctgatt

SEQ ID NO: 191734 - DNA, 25 bp, Homo sapien
aaatgttgaacctttctggcctgat

SEQ ID NO: 191735 - DNA, 25 bp, Homo sapien
ttgaacctttctggcctgatttgtt

SEQ ID NO: 191736 - DNA, 25 bp, Homo sapien
tgttgaacctttctggcctgatttg

SEQ ID NO: 191737 - DNA, 25 bp, Homo sapien
atatagagtaattttcagataggta

SEQ ID NO: 191738 - DNA, 25 bp, Homo sapien
tatatagagtaattttcagataggt

SEQ ID NO: 191739 - DNA, 25 bp, Homo sapien
catatatagagtaattttcagatag

SEQ ID NO: 191740 - DNA, 25 bp, Homo sapien
acatatatagagtaattttcagata

SEQ ID NO: 191741 - DNA, 25 bp, Homo sapien
caaccacatagaggaatatcaaagg

SEQ ID NO: 191742 - DNA, 25 bp, Homo sapien
tctgcatggattctttcagggcttg

SEQ ID NO: 191743 - DNA, 25 bp, Homo sapien
gaaatgccttcacatccaagttcat

SEQ ID NO: 191744 - DNA, 25 bp, Homo sapien
cattctcccaaaagtaataagtcca

SEQ ID NO: 191745 - DNA, 25 bp, Homo sapien
gacaaattactgaatggtccaagtg

SEQ ID NO: 191746 - DNA, 25 bp, Homo sapien
gtatcttggccacccatcaaataag

SEQ ID NO: 191747 - DNA, 25 bp, Homo sapien
tactcagtatagcaaatcacaccac

SEQ ID NO: 191748 - DNA, 25 bp, Homo sapien
tcagataactagaaactagccaggc

SEQ ID NO: 191749 - DNA, 25 bp, Homo sapien
gattcagttcagatataccagcata

SEQ ID NO: 191750 - DNA, 25 bp, Homo sapien
agatataccagcataactaggtgga

SEQ ID NO: 191751 - DNA, 25 bp, Homo sapien
gatataccagcataactaggtggaa

SEQ ID NO: 191752 - DNA, 25 bp, Homo sapien
tttggtaacaaaagttgcaagccca

SEQ ID NO: 191753 - DNA, 25 bp, Homo sapien
tcctttggtaacaaaagttgcaagc

SEQ ID NO: 191754 - DNA, 25 bp, Homo sapien
agttgcaagcccaaagttttgctcg

SEQ ID NO: 191755 - DNA, 25 bp, Homo sapien
gcccaaagttttgctcgataatcca

SEQ ID NO: 191756 - DNA, 25 bp, Homo sapien
cataaaggattcaaaactgcacggc

SEQ ID NO: 191757 - DNA, 25 bp, Homo sapien
gaataggtggtaagtcaggtctctc

SEQ ID NO: 191758 - DNA, 25 bp, Homo sapien
tctctttcagtggtgtaaacagggc

SEQ ID NO: 191759 - DNA, 25 bp, Homo sapien
tagcttccagtcgacttgatggcca

SEQ ID NO: 191760 - DNA, 25 bp, Homo sapien
aaacttgtgcctgctaccataagct

SEQ ID NO: 191761 - DNA, 25 bp, Homo sapien
acttgtgcctgctaccataagcttg

SEQ ID NO: 191762 - DNA, 25 bp, Homo sapien
atgcttgaggcaccgctccccgcca

SEQ ID NO: 191763 - DNA, 25 bp, Homo sapien
gcaccgctccccgccattaaattgt

SEQ ID NO: 191764 - DNA, 25 bp, Homo sapien
tgaaaacgagaattccacatcccca

SEQ ID NO: 191765 - DNA, 25 bp, Homo sapien
ttgagggagttcaagtgaaaacgag

SEQ ID NO: 191766 - DNA, 25 bp, Homo sapien
tatccatggctttggacggtagagg

SEQ ID NO: 191767 - DNA, 25 bp, Homo sapien
tgatgtagatttactatgaccttcc

SEQ ID NO: 191768 - DNA, 25 bp, Homo sapien
tccaaggctgaattacggtgacgta

SEQ ID NO: 191769 - DNA, 25 bp, Homo sapien
caattgggttcaaagtctaggacac

SEQ ID NO: 191770 - DNA, 25 bp, Homo sapien
gaatgaaacagtaagtccaagggcc

SEQ ID NO: 191771 - DNA, 25 bp, Homo sapien
gagatgctcgaaccaccgttttcca

SEQ ID NO: 191772 - DNA, 25 bp, Homo sapien
tgcaaaatctgtcctctccgcccag

SEQ ID NO: 191773 - DNA, 25 bp, Homo sapien
agacgaggcggccctttcctcactg

SEQ ID NO: 191774 - DNA, 25 bp, Homo sapien
gcagtccgtggcaccgcaatcaggg

SEQ ID NO: 191775 - DNA, 25 bp, Homo sapien
tcgcagcctccgctttgcaaaatct

SEQ ID NO: 191776 - DNA, 25 bp, Homo sapien
acatcgtggttgacggcgagccctt

SEQ ID NO: 191777 - DNA, 25 bp, Homo sapien
ggattggattataagtgttcccttc

SEQ ID NO: 191778 - DNA, 25 bp, Homo sapien
ttcaacatcgtggttgacggcgagc

SEQ ID NO: 191779 - DNA, 25 bp, Homo sapien
cgtgttcttcaacatcgtggttgac

SEQ ID NO: 191780 - DNA, 25 bp, Homo sapien
aaatgctggacccatcacaaacagt

SEQ ID NO: 191781 - DNA, 25 bp, Homo sapien
ctggacccatcacaaacagttccca

SEQ ID NO: 191782 - DNA, 25 bp, Homo sapien
agtggttggatggcaggccatgtgg

SEQ ID NO: 191783 - DNA, 25 bp, Homo sapien
gttggatggcaggccatgtggtctt

SEQ ID NO: 191784 - DNA, 25 bp, Homo sapien
gcttggcgcccaggatagaatctca

SEQ ID NO: 191785 - DNA, 25 bp, Homo sapien
cattctctcttagtggctctggacc

SEQ ID NO: 191786 - DNA, 25 bp, Homo sapien
ggagactactcatgcctagatggca

SEQ ID NO: 191787 - DNA, 25 bp, Homo sapien
taggaagcaaactggatctctccgc

SEQ ID NO: 191788 - DNA, 25 bp, Homo sapien
tgcaaggttggcctgaaactcctgg

SEQ ID NO: 191789 - DNA, 25 bp, Homo sapien
catgagctatcatggctagccaaaa

SEQ ID NO: 191790 - DNA, 25 bp, Homo sapien
tcagccttcaacataccaggggcag

SEQ ID NO: 191791 - DNA, 25 bp, Homo sapien
agtaagcgtttaatgtatatcctct

SEQ ID NO: 191792 - DNA, 25 bp, Homo sapien
gggacaagtgtagagaatatttaat

SEQ ID NO: 191793 - DNA, 25 bp, Homo sapien
agctgggacaagtgtagagaatatt

SEQ ID NO: 191794 - DNA, 25 bp, Homo sapien
ttaaatgctagctttacatagtaaa

SEQ ID NO: 191795 - DNA, 25 bp, Homo sapien
aaatgctagctttacatagtaaatg

SEQ ID NO: 191796 - DNA, 25 bp, Homo sapien
ttatcagtgaggtcagtgaggttag

SEQ ID NO: 191797 - DNA, 25 bp, Homo sapien
ctcactctgttgctatagttagggt

SEQ ID NO: 191798 - DNA, 25 bp, Homo sapien
gtgaggttagatcgtatttattaca

SEQ ID NO: 191799 - DNA, 25 bp, Homo sapien
ctctgttgctatagttagggtgcag

SEQ ID NO: 191800 - DNA, 25 bp, Homo sapien
tgtgtcctgcgttcattttcagttg

SEQ ID NO: 191801 - DNA, 25 bp, Homo sapien
gcctgtgtcctgcgttcattttcag

SEQ ID NO: 191802 - DNA, 25 bp, Homo sapien
ctgtgtcctgcgttcattttcagtt

SEQ ID NO: 191803 - DNA, 25 bp, Homo sapien
cctgtgtcctgcgttcattttcagt

SEQ ID NO: 191804 - DNA, 25 bp, Homo sapien
tgagatgatatagcattgccctact

SEQ ID NO: 191805 - DNA, 25 bp, Homo sapien
ggcaactttgactccggagctaaac

SEQ ID NO: 191806 - DNA, 25 bp, Homo sapien
ttagagtaatgatccaaacccaggc

SEQ ID NO: 191807 - DNA, 25 bp, Homo sapien
agctaatacctacctcatctgttgg

SEQ ID NO: 191808 - DNA, 25 bp, Homo sapien
tactttagcagtataaatacgttcc

SEQ ID NO: 191809 - DNA, 25 bp, Homo sapien
aacacgtatattggcagtcctacac

SEQ ID NO: 191810 - DNA, 25 bp, Homo sapien
cttaataaatcctggaaatcatact

SEQ ID NO: 191811 - DNA, 25 bp, Homo sapien
cataaggtagcatacagaacaatct

SEQ ID NO: 191812 - DNA, 25 bp, Homo sapien
gttttctgtaatcaagcagcttgca

SEQ ID NO: 191813 - DNA, 25 bp, Homo sapien
caaaagacaatggatggccttagca

SEQ ID NO: 191814 - DNA, 25 bp, Homo sapien
tgaaggcagcctaactctgaggaaa

SEQ ID NO: 191815 - DNA, 25 bp, Homo sapien
gatgtagctgatctctcagggatag

SEQ ID NO: 191816 - DNA, 25 bp, Homo sapien
gtctatctctgcatttgttgcctgc

SEQ ID NO: 191817 - DNA, 25 bp, Homo sapien
tcccctatgttttctgctagaattg

SEQ ID NO: 191818 - DNA, 25 bp, Homo sapien
tcaagatagaaagggccgagtgtat

SEQ ID NO: 191819 - DNA, 25 bp, Homo sapien
tgaattcttggttgaaccgtcaaga

SEQ ID NO: 191820 - DNA, 25 bp, Homo sapien
tgctttctatctacatcccactatt

SEQ ID NO: 191821 - DNA, 25 bp, Homo sapien
cacctactcccgcagaaaaaggcat

SEQ ID NO: 191822 - DNA, 25 bp, Homo sapien
ccaaaggtaaagcagttcctggatt

SEQ ID NO: 191823 - DNA, 25 bp, Homo sapien
caattgtcccatactaatttttgaa

SEQ ID NO: 191824 - DNA, 25 bp, Homo sapien
tatacacctaagctatggcctattg

SEQ ID NO: 191825 - DNA, 25 bp, Homo sapien
catttctatggcagagtacccagtg

SEQ ID NO: 191826 - DNA, 25 bp, Homo sapien
caaggcagccatacagagttttagg

SEQ ID NO: 191827 - DNA, 25 bp, Homo sapien
tgtgtcattagctattcctgggtca

SEQ ID NO: 191828 - DNA, 25 bp, Homo sapien
tatgtcatggcagaatgtcccttca

SEQ ID NO: 191829 - DNA, 25 bp, Homo sapien
taagggccctgcatcttggtgtctg

SEQ ID NO: 191830 - DNA, 25 bp, Homo sapien
ctttaccaggacttccatgcacggg

SEQ ID NO: 191831 - DNA, 25 bp, Homo sapien
gattacattaatggagctctgaagg

SEQ ID NO: 191832 - DNA, 25 bp, Homo sapien
gcttctgtatcatcacctgaaattt

SEQ ID NO: 191833 - DNA, 25 bp, Homo sapien
ttctgtatcatcacctgaaatttgc

SEQ ID NO: 191834 - DNA, 25 bp, Homo sapien
ctacagcttctgtatcatcacctga

SEQ ID NO: 191835 - DNA, 25 bp, Homo sapien
cagcttctgtatcatcacctgaaat

SEQ ID NO: 191836 - DNA, 25 bp, Homo sapien
tagatacaaagaaaacaagtctaaa

SEQ ID NO: 191837 - DNA, 25 bp, Homo sapien
aagaaaacaagtctaaacatcaatt

SEQ ID NO: 191838 - DNA, 25 bp, Homo sapien
caaataattctttgattttagatac

SEQ ID NO: 191839 - DNA, 25 bp, Homo sapien
catcaattttctgttccatatagga

SEQ ID NO: 191840 - DNA, 25 bp, Homo sapien
aacatttgtaagaaaggcgaattca

SEQ ID NO: 191841 - DNA, 25 bp, Homo sapien
atttgtaagaaaggcgaattcaact

SEQ ID NO: 191842 - DNA, 25 bp, Homo sapien
catttgtaagaaaggcgaattcaac

SEQ ID NO: 191843 - DNA, 25 bp, Homo sapien
tgtaagaaaggcgaattcaacttac

SEQ ID NO: 191844 - DNA, 25 bp, Homo sapien
cacctctgattaagccacacgtaaa

SEQ ID NO: 191845 - DNA, 25 bp, Homo sapien
gattaagccacacgtaaatgctaaa

SEQ ID NO: 191846 - DNA, 25 bp, Homo sapien
gccacctctgattaagccacacgta

SEQ ID NO: 191847 - DNA, 25 bp, Homo sapien
tctgattaagccacacgtaaatgct

SEQ ID NO: 191848 - DNA, 25 bp, Homo sapien
tgttgtcctgaagtacatagatgcc

SEQ ID NO: 191849 - DNA, 25 bp, Homo sapien
ggcgaaatttgttgtcctgaagtac

SEQ ID NO: 191850 - DNA, 25 bp, Homo sapien
tttcctgcagacatctgagtaagca

SEQ ID NO: 191851 - DNA, 25 bp, Homo sapien
cttagatgcatgttctaaatactgt

SEQ ID NO: 191852 - DNA, 25 bp, Homo sapien
ctgatgatttgtccttagattgtcg

SEQ ID NO: 191853 - DNA, 25 bp, Homo sapien
ccttagattgtcgatttgtttcttg

SEQ ID NO: 191854 - DNA, 25 bp, Homo sapien
gaacttcatgatatctaactcatcc

SEQ ID NO: 191855 - DNA, 25 bp, Homo sapien
tgtttcttgaataccgtagtccaaa

SEQ ID NO: 191856 - DNA, 25 bp, Homo sapien
tccaaatgccagaacagcactgaac

SEQ ID NO: 191857 - DNA, 25 bp, Homo sapien
ggtaacatgatcctatctcaatgga

SEQ ID NO: 191858 - DNA, 25 bp, Homo sapien
tatgaggcctcaaattagtctaaca

SEQ ID NO: 191859 - DNA, 25 bp, Homo sapien
cactaataaagtcataagcaccagg

SEQ ID NO: 191860 - DNA, 25 bp, Homo sapien
aaattttcaaatccaacctgctcac

SEQ ID NO: 191861 - DNA, 25 bp, Homo sapien
gaaaattttcaaatccaacctgctc

SEQ ID NO: 191862 - DNA, 25 bp, Homo sapien
caagaaaattttcaaatccaacctg

SEQ ID NO: 191863 - DNA, 25 bp, Homo sapien
ctgcaagaaaattttcaaatccaac

SEQ ID NO: 191864 - DNA, 25 bp, Homo sapien
ttccagcttagtaatacatcgtccg

SEQ ID NO: 191865 - DNA, 25 bp, Homo sapien
cagcttagtaatacatcgtccgttt

SEQ ID NO: 191866 - DNA, 25 bp, Homo sapien
cttgtcccactcgaaaccccatgtt

SEQ ID NO: 191867 - DNA, 25 bp, Homo sapien
gcttagtaatacatcgtccgttttc

SEQ ID NO: 191868 - DNA, 25 bp, Homo sapien
aatgcagtccagttaggagaaaacc

SEQ ID NO: 191869 - DNA, 25 bp, Homo sapien
aacagccgatgttggtaggaataac

SEQ ID NO: 191870 - DNA, 25 bp, Homo sapien
gcttacgtcactgaggtctatgaac

SEQ ID NO: 191871 - DNA, 25 bp, Homo sapien
tcaatgggttaaagctttgtgctcc

SEQ ID NO: 191872 - DNA, 25 bp, Homo sapien
tgtctttgggcatgagagccaactc

SEQ ID NO: 191873 - DNA, 25 bp, Homo sapien
taccgtagatggcacacaaattagc

SEQ ID NO: 191874 - DNA, 25 bp, Homo sapien
ttgaaatcctgggtgatctctctca

SEQ ID NO: 191875 - DNA, 25 bp, Homo sapien
ggtacacttcactagcctccaggta

SEQ ID NO: 191876 - DNA, 25 bp, Homo sapien
gctaggtcaatttctggtaacgaga

SEQ ID NO: 191877 - DNA, 25 bp, Homo sapien
cgagaatctctagaagtgccacagt

SEQ ID NO: 191878 - DNA, 25 bp, Homo sapien
aagcacttgtcttggcttgggccat

SEQ ID NO: 191879 - DNA, 25 bp, Homo sapien
ttttctggcagcgttaataacctgc

SEQ ID NO: 191880 - DNA, 25 bp, Homo sapien
aaagaccaaactgctatttacttat

SEQ ID NO: 191881 - DNA, 25 bp, Homo sapien
ggaaaaaccgcagtgtccaagctaa

SEQ ID NO: 191882 - DNA, 25 bp, Homo sapien
gaatagacgttcctccaacaaaaga

SEQ ID NO: 191883 - DNA, 25 bp, Homo sapien
aaaaccgcagtgtccaagctaagaa

SEQ ID NO: 191884 - DNA, 25 bp, Homo sapien
tccgcggacttgtacactccagaca

SEQ ID NO: 191885 - DNA, 25 bp, Homo sapien
tccagacaccatctcgttatggaga

SEQ ID NO: 191886 - DNA, 25 bp, Homo sapien
gaagcaaaaacaacgcctcatccgc

SEQ ID NO: 191887 - DNA, 25 bp, Homo sapien
caccatctcgttatggagaagcaaa

SEQ ID NO: 191888 - DNA, 25 bp, Homo sapien
cgcccagatatgaggaaggttcccc

SEQ ID NO: 191889 - DNA, 25 bp, Homo sapien
taagagaccgaggtattcacacgac

SEQ ID NO: 191890 - DNA, 25 bp, Homo sapien
aaagtctgacgggagctctaaccaa

SEQ ID NO: 191891 - DNA, 25 bp, Homo sapien
tcctagggccgaactaaagtctgac

SEQ ID NO: 191892 - DNA, 25 bp, Homo sapien
attttcaaaccctagcttactgctg

SEQ ID NO: 191893 - DNA, 25 bp, Homo sapien
aggaagatagatgcctggctgagat

SEQ ID NO: 191894 - DNA, 25 bp, Homo sapien
ggcccactaattctttgtacaagga

SEQ ID NO: 191895 - DNA, 25 bp, Homo sapien
tactgctgatacacaatggaagctc

SEQ ID NO: 191896 - DNA, 25 bp, Homo sapien
aaaccctgttgtcgccgaggtggag

SEQ ID NO: 191897 - DNA, 25 bp, Homo sapien
tcttggcctgtgagaagacccggac

SEQ ID NO: 191898 - DNA, 25 bp, Homo sapien
cttaagaagactggaacctcgaggc

SEQ ID NO: 191899 - DNA, 25 bp, Homo sapien
tccgaatgacgtgaggtaagggcct

SEQ ID NO: 191900 - DNA, 25 bp, Homo sapien
ttatggatgtgctagagatggttga

SEQ ID NO: 191901 - DNA, 25 bp, Homo sapien
gcagcaggatagtcagcctgaagaa

SEQ ID NO: 191902 - DNA, 25 bp, Homo sapien
gtcagcctgaagaagttatggatgt

SEQ ID NO: 191903 - DNA, 25 bp, Homo sapien
tgagaagcagcaggatagtcagcct

SEQ ID NO: 191904 - DNA, 25 bp, Homo sapien
acatgtaattgctgaccaggaggta

SEQ ID NO: 191905 - DNA, 25 bp, Homo sapien
gaggtaatggaaactaatcgagttg

SEQ ID NO: 191906 - DNA, 25 bp, Homo sapien
gaaactaatcgagttgaaagtgtag

SEQ ID NO: 191907 - DNA, 25 bp, Homo sapien
cgagttgaaagtgtagaaccttcag

SEQ ID NO: 191908 - DNA, 25 bp, Homo sapien
tagcagtcgcagtagttccagtagc

SEQ ID NO: 191909 - DNA, 25 bp, Homo sapien
gaaaaagaatctgagccccaacctg

SEQ ID NO: 191910 - DNA, 25 bp, Homo sapien
tgaggtaccagtagagccagtcttg

SEQ ID NO: 191911 - DNA, 25 bp, Homo sapien
tccagcagtggaagtagtagcagtc

SEQ ID NO: 191912 - DNA, 25 bp, Homo sapien
tatcaaaattatgtgaggttccaaa

SEQ ID NO: 191913 - DNA, 25 bp, Homo sapien
tacctttccttgtaaagaggatgct

SEQ ID NO: 191914 - DNA, 25 bp, Homo sapien
caaaaggcgttaatggaagaagcca

SEQ ID NO: 191915 - DNA, 25 bp, Homo sapien
agaggatgctgccttaagaattgca

SEQ ID NO: 191916 - DNA, 25 bp, Homo sapien
cagtttttagttgtcagagtcagag

SEQ ID NO: 191917 - DNA, 25 bp, Homo sapien
ggaagtattgtatggaagtccacaa

SEQ ID NO: 191918 - DNA, 25 bp, Homo sapien
tttcttcctgatgatgggagcgtca

SEQ ID NO: 191919 - DNA, 25 bp, Homo sapien
gcttttaacactagatactgcacgt

SEQ ID NO: 191920 - DNA, 25 bp, Homo sapien
caaactctgccgcccagtttcaagt

SEQ ID NO: 191921 - DNA, 25 bp, Homo sapien
tttcaagtgattctcctggctcagc

SEQ ID NO: 191922 - DNA, 25 bp, Homo sapien
ccgcgcccagcccactcctggctaa

SEQ ID NO: 191923 - DNA, 25 bp, Homo sapien
tctcaagtgttctgcccacctcagc

SEQ ID NO: 191924 - DNA, 25 bp, Homo sapien
ttctcacactatgggaaacgccaag

SEQ ID NO: 191925 - DNA, 25 bp, Homo sapien
gaataaaccagtgaccaactctagg

SEQ ID NO: 191926 - DNA, 25 bp, Homo sapien
tcaggaagtgcctctggaaaaggct

SEQ ID NO: 191927 - DNA, 25 bp, Homo sapien
caactctagggacactcaggaagtg

SEQ ID NO: 191928 - DNA, 25 bp, Homo sapien
gagttgcttcaccaaagtacttgag

SEQ ID NO: 191929 - DNA, 25 bp, Homo sapien
gcatacacgttgttctaggagtctg

SEQ ID NO: 191930 - DNA, 25 bp, Homo sapien
cgttgctacaagaggttacatcagg

SEQ ID NO: 191931 - DNA, 25 bp, Homo sapien
aaagctaggccgcattttggtcctg

SEQ ID NO: 191932 - DNA, 25 bp, Homo sapien
gacagctgggcctaacaagtgccca

SEQ ID NO: 191933 - DNA, 25 bp, Homo sapien
cttctcggaggaaaacagcacgcac

SEQ ID NO: 191934 - DNA, 25 bp, Homo sapien
cacttggcactttattcgacggtcc

SEQ ID NO: 191935 - DNA, 25 bp, Homo sapien
taactggccgctaatggaactgaag

SEQ ID NO: 191936 - DNA, 25 bp, Homo sapien
tccaaagtccggacgtggttggcag

SEQ ID NO: 191937 - DNA, 25 bp, Homo sapien
tcttgcgtgggacaggttaaactct

SEQ ID NO: 191938 - DNA, 25 bp, Homo sapien
tcaggtaagcgaggaaaccagatcg

SEQ ID NO: 191939 - DNA, 25 bp, Homo sapien
agccgggacgccttcctgtctaaag

SEQ ID NO: 191940 - DNA, 25 bp, Homo sapien
gacgcctctaggagaagtctcgccg

SEQ ID NO: 191941 - DNA, 25 bp, Homo sapien
gttgcgccgagacgcctctaggaga

SEQ ID NO: 191942 - DNA, 25 bp, Homo sapien
ccttgggacatagccctggtctttg

SEQ ID NO: 191943 - DNA, 25 bp, Homo sapien
gcgggtgcccttgggacatagccct

SEQ ID NO: 191944 - DNA, 25 bp, Homo sapien
ggaagtttgcggctgtccgcgcctc

SEQ ID NO: 191945 - DNA, 25 bp, Homo sapien
gacacgtctgcgaagcttgcgcgaa

SEQ ID NO: 191946 - DNA, 25 bp, Homo sapien
acagcgcggagtatgaggccgaatc

SEQ ID NO: 191947 - DNA, 25 bp, Homo sapien
aaagtataacaagagggtcgggatg

SEQ ID NO: 191948 - DNA, 25 bp, Homo sapien
aatgagcctgctactgaacatccag

SEQ ID NO: 191949 - DNA, 25 bp, Homo sapien
caaatgagcctgctactgaacatcc

SEQ ID NO: 191950 - DNA, 25 bp, Homo sapien
atgagcctgctactgaacatccaga

SEQ ID NO: 191951 - DNA, 25 bp, Homo sapien
aagaaacctgacaatatttttgctc

SEQ ID NO: 191952 - DNA, 25 bp, Homo sapien
gcttaatggaattataattctcagg

SEQ ID NO: 191953 - DNA, 25 bp, Homo sapien
tattttagacggtataactatttca

SEQ ID NO: 191954 - DNA, 25 bp, Homo sapien
gtgattacacttttgctcaaattga

SEQ ID NO: 191955 - DNA, 25 bp, Homo sapien
ctcaaattgaagcttaatggaatta

SEQ ID NO: 191956 - DNA, 25 bp, Homo sapien
tcacccgactgcttacaaaccgaag

SEQ ID NO: 191957 - DNA, 25 bp, Homo sapien
aatgattccaaagcccctagtttag

SEQ ID NO: 191958 - DNA, 25 bp, Homo sapien
cctagtttagctcctgaatcagaca

SEQ ID NO: 191959 - DNA, 25 bp, Homo sapien
caaaccgaagtgatcagtgcaagca

SEQ ID NO: 191960 - DNA, 25 bp, Homo sapien
ccaggtcctcattctggcacatctg

SEQ ID NO: 191961 - DNA, 25 bp, Homo sapien
ggtcctcattctggcacatctgcag

SEQ ID NO: 191962 - DNA, 25 bp, Homo sapien
agaagaatgttacagcccctgacaa

SEQ ID NO: 191963 - DNA, 25 bp, Homo sapien
atgttacagcccctgacaaactctc

SEQ ID NO: 191964 - DNA, 25 bp, Homo sapien
ttgtgggatggtgggccggttggaa

SEQ ID NO: 191965 - DNA, 25 bp, Homo sapien
cttgtgggatggtgggccggttgga

SEQ ID NO: 191966 - DNA, 25 bp, Homo sapien
tgtgggatggtgggccggttggaat

SEQ ID NO: 191967 - DNA, 25 bp, Homo sapien
tgggatggtgggccggttggaatag

SEQ ID NO: 191968 - DNA, 25 bp, Homo sapien
cttaatgccctgtcggagcttgagg

SEQ ID NO: 191969 - DNA, 25 bp, Homo sapien
taatgccctgtcggagcttgaggtc

SEQ ID NO: 191970 - DNA, 25 bp, Homo sapien
ttaatgccctgtcggagcttgaggt

SEQ ID NO: 191971 - DNA, 25 bp, Homo sapien
aatgccctgtcggagcttgaggtca

SEQ ID NO: 191972 - DNA, 25 bp, Homo sapien
caccgtgttgctgaagccgcattgg

SEQ ID NO: 191973 - DNA, 25 bp, Homo sapien
catcactttgtaggccagattgtca

SEQ ID NO: 191974 - DNA, 25 bp, Homo sapien
cagttgtaggatatgcaccaccgtg

SEQ ID NO: 191975 - DNA, 25 bp, Homo sapien
tgtcgcacgtgctgcatgcccagca

SEQ ID NO: 191976 - DNA, 25 bp, Homo sapien
cagtaaatctgtgctgtacacaaga

SEQ ID NO: 191977 - DNA, 25 bp, Homo sapien
catttggcctagtgaattggagtcc

SEQ ID NO: 191978 - DNA, 25 bp, Homo sapien
gtgccacgattgaagacacacccag

SEQ ID NO: 191979 - DNA, 25 bp, Homo sapien
ggttgcaagataaaaccacataggg

SEQ ID NO: 191980 - DNA, 25 bp, Homo sapien
attaagacaagatagcagcacattc

SEQ ID NO: 191981 - DNA, 25 bp, Homo sapien
tcctctcacctaagtggaacaccaa

SEQ ID NO: 191982 - DNA, 25 bp, Homo sapien
aaaagttcaggttatactcacttgc

SEQ ID NO: 191983 - DNA, 25 bp, Homo sapien
taaaacttattaagacaagatagca

SEQ ID NO: 191984 - DNA, 25 bp, Homo sapien
gtcacagcgtagtccactatctctg

SEQ ID NO: 191985 - DNA, 25 bp, Homo sapien
cacagcgtagtccactatctctgtt

SEQ ID NO: 191986 - DNA, 25 bp, Homo sapien
tgtcacagcgtagtccactatctct

SEQ ID NO: 191987 - DNA, 25 bp, Homo sapien
agcgtagtccactatctctgttcca

SEQ ID NO: 191988 - DNA, 25 bp, Homo sapien
cttctggatgttagttctaaaagct

SEQ ID NO: 191989 - DNA, 25 bp, Homo sapien
tagtccttcttacgtgtctctaccg

SEQ ID NO: 191990 - DNA, 25 bp, Homo sapien
tggattggggcttaatattcttctg

SEQ ID NO: 191991 - DNA, 25 bp, Homo sapien
ccttcttacgtgtctctaccggatt

SEQ ID NO: 191992 - DNA, 25 bp, Homo sapien
ttctcagtgcttctatttacaacac

SEQ ID NO: 191993 - DNA, 25 bp, Homo sapien
atttgttaccaggtcatttaattgc

SEQ ID NO: 191994 - DNA, 25 bp, Homo sapien
gataatagtagatgaatttgttacc

SEQ ID NO: 191995 - DNA, 25 bp, Homo sapien
ttaattgctgttgcctctggttctc

SEQ ID NO: 191996 - DNA, 25 bp, Homo sapien
ttgtcctcgacctctcccccgcatg

SEQ ID NO: 191997 - DNA, 25 bp, Homo sapien
cccgcatgccccgtcccctagctcc

SEQ ID NO: 191998 - DNA, 25 bp, Homo sapien
aggaaacaggatgcccttgtcctcg

SEQ ID NO: 191999 - DNA, 25 bp, Homo sapien
caggatgcccttgtcctcgacctct

SEQ ID NO: 192000 - DNA, 25 bp, Homo sapien
tctgaactagagtctgaaataggaa

SEQ ID NO: 192001 - DNA, 25 bp, Homo sapien
tctttgttatcatcacctgctgtgc

SEQ ID NO: 192002 - DNA, 25 bp, Homo sapien
cggacaacctcttcttgcaaaaagg

SEQ ID NO: 192003 - DNA, 25 bp, Homo sapien
gcacctacagtctgtcatgacaact

SEQ ID NO: 192004 - DNA, 25 bp, Homo sapien
tcctctaactgaaatgcccgcttct

SEQ ID NO: 192005 - DNA, 25 bp, Homo sapien
ctctaactgaaatgcccgcttcttt

SEQ ID NO: 192006 - DNA, 25 bp, Homo sapien
cctctaactgaaatgcccgcttctt

SEQ ID NO: 192007 - DNA, 25 bp, Homo sapien
ttttctaagtgatagattagtgtca

SEQ ID NO: 192008 - DNA, 25 bp, Homo sapien
tttctaagtgatagattagtgtcac

SEQ ID NO: 192009 - DNA, 25 bp, Homo sapien
cttttctaagtgatagattagtgtc

SEQ ID NO: 192010 - DNA, 25 bp, Homo sapien
tgatgaccatagaattctcagcaac

SEQ ID NO: 192011 - DNA, 25 bp, Homo sapien
gaccatagaattctcagcaactcgt

SEQ ID NO: 192012 - DNA, 25 bp, Homo sapien
tcagcaactcgtctctcttctactt

SEQ ID NO: 192013 - DNA, 25 bp, Homo sapien
cattactgatgaccatagaattctc

SEQ ID NO: 192014 - DNA, 25 bp, Homo sapien
ttctctctcaccaggcgcacgctct

SEQ ID NO: 192015 - DNA, 25 bp, Homo sapien
gaaatgaagccgaagcattggcgga

SEQ ID NO: 192016 - DNA, 25 bp, Homo sapien
gggcctaggagggccccagaaatga

SEQ ID NO: 192017 - DNA, 25 bp, Homo sapien
tctgaggcggtcgttctctctcacc

SEQ ID NO: 192018 - DNA, 25 bp, Homo sapien
gtagctggcggcgggtaatcaaatt

SEQ ID NO: 192019 - DNA, 25 bp, Homo sapien
agctggcggcgggtaatcaaattga

SEQ ID NO: 192020 - DNA, 25 bp, Homo sapien
gctggcggcgggtaatcaaattgaa

SEQ ID NO: 192021 - DNA, 25 bp, Homo sapien
ggcggcgggtaatcaaattgaagcc

SEQ ID NO: 192022 - DNA, 25 bp, Homo sapien
tcacccttctagatgccattcagag

SEQ ID NO: 192023 - DNA, 25 bp, Homo sapien
gcctgacaatgtgactaaagtgctg

SEQ ID NO: 192024 - DNA, 25 bp, Homo sapien
tgctcaacggaagccgactttcaag

SEQ ID NO: 192025 - DNA, 25 bp, Homo sapien
ccgcatatgtggtggaagtagcaag

SEQ ID NO: 192026 - DNA, 25 bp, Homo sapien
gatgttcggacgtgtccaaagcttc

SEQ ID NO: 192027 - DNA, 25 bp, Homo sapien
ttcggacgtgtccaaagcttcttcc

SEQ ID NO: 192028 - DNA, 25 bp, Homo sapien
ccagagatgtagtgatattgtgata

SEQ ID NO: 192029 - DNA, 25 bp, Homo sapien
tgatattaatgctaacccaaatgtt

SEQ ID NO: 192030 - DNA, 25 bp, Homo sapien
gagaggcccatttagtcatccaagt

SEQ ID NO: 192031 - DNA, 25 bp, Homo sapien
ggagtcatcagcttacaggtaacca

SEQ ID NO: 192032 - DNA, 25 bp, Homo sapien
tacatcaagtacgtatggaagctgc

SEQ ID NO: 192033 - DNA, 25 bp, Homo sapien
aatagagattaagttggagaggccc

SEQ ID NO: 192034 - DNA, 25 bp, Homo sapien
gctctaagtcccaagcaagtttccc

SEQ ID NO: 192035 - DNA, 25 bp, Homo sapien
tgttactggcttcataaggatccaa

SEQ ID NO: 192036 - DNA, 25 bp, Homo sapien
gatacaatgtggtatggtccctggg

SEQ ID NO: 192037 - DNA, 25 bp, Homo sapien
ggtccctgggtattattcacatctg

SEQ ID NO: 192038 - DNA, 25 bp, Homo sapien
taaaagtagtcatgcttcatataca

SEQ ID NO: 192039 - DNA, 25 bp, Homo sapien
aagtagtcatgcttcatatacaata

SEQ ID NO: 192040 - DNA, 25 bp, Homo sapien
gtagtcatgcttcatatacaataaa

SEQ ID NO: 192041 - DNA, 25 bp, Homo sapien
actaaaagtagtcatgcttcatata

SEQ ID NO: 192042 - DNA, 25 bp, Homo sapien
tctgaggttgctgactgagccacag

SEQ ID NO: 192043 - DNA, 25 bp, Homo sapien
ccgcggttgccctgaaacagttaat

SEQ ID NO: 192044 - DNA, 25 bp, Homo sapien
tacaatagagcagccaggtctcagc

SEQ ID NO: 192045 - DNA, 25 bp, Homo sapien
gacttgttgctagggatttcacgac

SEQ ID NO: 192046 - DNA, 25 bp, Homo sapien
tttgcaagcatgtgtatttacaact

SEQ ID NO: 192047 - DNA, 25 bp, Homo sapien
tgtatttacaactctgtgtttttat

SEQ ID NO: 192048 - DNA, 25 bp, Homo sapien
taaaattatgtcagatatagttaaa

SEQ ID NO: 192049 - DNA, 25 bp, Homo sapien
caatttcagtattcgtgtttacgta

SEQ ID NO: 192050 - DNA, 25 bp, Homo sapien
cagtattcgtgtttacgtaaatgca

SEQ ID NO: 192051 - DNA, 25 bp, Homo sapien
gaaatctgggctaaatgaatgtgta

SEQ ID NO: 192052 - DNA, 25 bp, Homo sapien
caactattagatatgtaatgaaagt

SEQ ID NO: 192053 - DNA, 25 bp, Homo sapien
taacctagtactatacaaaattcaa

SEQ ID NO: 192054 - DNA, 25 bp, Homo sapien
aatggtaactggtgatatcaactat

SEQ ID NO: 192055 - DNA, 25 bp, Homo sapien
tctaacctagtactatacaaaattc

SEQ ID NO: 192056 - DNA, 25 bp, Homo sapien
cctacttgcatatgtaaccacagga

SEQ ID NO: 192057 - DNA, 25 bp, Homo sapien
gcatataaatctaccaggctatgga

SEQ ID NO: 192058 - DNA, 25 bp, Homo sapien
tacccgactacgttctttgatcaag

SEQ ID NO: 192059 - DNA, 25 bp, Homo sapien
taacaagtccattaaccgtgaaagc

SEQ ID NO: 192060 - DNA, 25 bp, Homo sapien
tggatctacatcctggtcggccagt

SEQ ID NO: 192061 - DNA, 25 bp, Homo sapien
cactgagtgattcgatgtccatgac

SEQ ID NO: 192062 - DNA, 25 bp, Homo sapien
gcaatgaggttgtgtgcccacaccg

SEQ ID NO: 192063 - DNA, 25 bp, Homo sapien
gactgcatgccaaggttgacccagg

SEQ ID NO: 192064 - DNA, 25 bp, Homo sapien
ggacagccatttcagttgcctacta

SEQ ID NO: 192065 - DNA, 25 bp, Homo sapien
gatataagatcaacaatagcccctg

SEQ ID NO: 192066 - DNA, 25 bp, Homo sapien
tatatagacccgaaagctggtgctc

SEQ ID NO: 192067 - DNA, 25 bp, Homo sapien
catgaattgccagaagagagagctt

SEQ ID NO: 192068 - DNA, 25 bp, Homo sapien
ctccaaaaagactaaacttctgaag

SEQ ID NO: 192069 - DNA, 25 bp, Homo sapien
tgtctccaaaaagactaaacttctg

SEQ ID NO: 192070 - DNA, 25 bp, Homo sapien
gaacacttatgtctccaaaaagact

SEQ ID NO: 192071 - DNA, 25 bp, Homo sapien
gctgttgtagaacacttatgtctcc

SEQ ID NO: 192072 - DNA, 25 bp, Homo sapien
caccatttcttgatggtatgtcaca

SEQ ID NO: 192073 - DNA, 25 bp, Homo sapien
tctcaagtaaatcaccttaatttca

SEQ ID NO: 192074 - DNA, 25 bp, Homo sapien
tttgtatttgttggactctcaaagt

SEQ ID NO: 192075 - DNA, 25 bp, Homo sapien
attttctcaagtaaatcaccttaat

SEQ ID NO: 192076 - DNA, 25 bp, Homo sapien
agcctccttacttttatctcacatt

SEQ ID NO: 192077 - DNA, 25 bp, Homo sapien
gcctccttacttttatctcacattt

SEQ ID NO: 192078 - DNA, 25 bp, Homo sapien
ccttactaccgctttttctagtctg

SEQ ID NO: 192079 - DNA, 25 bp, Homo sapien
ttactaccgctttttctagtctgta

SEQ ID NO: 192080 - DNA, 25 bp, Homo sapien
gttggaaatgaaggctcacaggagt

SEQ ID NO: 192081 - DNA, 25 bp, Homo sapien
tcaaaaagcaatgcccagctttgtt

SEQ ID NO: 192082 - DNA, 25 bp, Homo sapien
ttagtattgcttttgccacttgcta

SEQ ID NO: 192083 - DNA, 25 bp, Homo sapien
cttaacatagggcattttttgctat

SEQ ID NO: 192084 - DNA, 25 bp, Homo sapien
gccacttgctataagttttggtaag

SEQ ID NO: 192085 - DNA, 25 bp, Homo sapien
ccttttagtattgcttttgccactt

SEQ ID NO: 192086 - DNA, 25 bp, Homo sapien
cactcaatgacttttggtgatggaa

SEQ ID NO: 192087 - DNA, 25 bp, Homo sapien
ttacaggcagcacatggttggatcc

SEQ ID NO: 192088 - DNA, 25 bp, Homo sapien
taccacaggcataacttgcagatat

SEQ ID NO: 192089 - DNA, 25 bp, Homo sapien
tgctttacatatttaggtgccctca

SEQ ID NO: 192090 - DNA, 25 bp, Homo sapien
atctgggctctatcagtttttcagc

SEQ ID NO: 192091 - DNA, 25 bp, Homo sapien
catctgggctctatcagtttttcag

SEQ ID NO: 192092 - DNA, 25 bp, Homo sapien
tctgggctctatcagtttttcagca

SEQ ID NO: 192093 - DNA, 25 bp, Homo sapien
caagtaggtgcgcagcacttccagc

SEQ ID NO: 192094 - DNA, 25 bp, Homo sapien
ctgttgttccggatgctgaccagca

SEQ ID NO: 192095 - DNA, 25 bp, Homo sapien
tgttccggatgctgaccagcacgca

SEQ ID NO: 192096 - DNA, 25 bp, Homo sapien
caccagctccaagtaggtgcgcagc

SEQ ID NO: 192097 - DNA, 25 bp, Homo sapien
ccaccgccgctcagatagttctcgg

SEQ ID NO: 192098 - DNA, 25 bp, Homo sapien
accgccgctcagatagttctcggcg

SEQ ID NO: 192099 - DNA, 25 bp, Homo sapien
tccagtcccggtgtccgcgccacct

SEQ ID NO: 192100 - DNA, 25 bp, Homo sapien
ccgctcagatagttctcggcggcga

SEQ ID NO: 192101 - DNA, 25 bp, Homo sapien
aagaggcactcacgccagtgcgagc

SEQ ID NO: 192102 - DNA, 25 bp, Homo sapien
cacagggccggatagaagaggcact

SEQ ID NO: 192103 - DNA, 25 bp, Homo sapien
gaaccagccgcacttgcgcatgagg

SEQ ID NO: 192104 - DNA, 25 bp, Homo sapien
catgaggaattccagccgaggctgc

SEQ ID NO: 192105 - DNA, 25 bp, Homo sapien
gcccccgcagtacccggagcagccc

SEQ ID NO: 192106 - DNA, 25 bp, Homo sapien
gccgccaccgcgccacccgggcggc

SEQ ID NO: 192107 - DNA, 25 bp, Homo sapien
cgcccccgcagtacccggagcagcc

SEQ ID NO: 192108 - DNA, 25 bp, Homo sapien
ccgcccccgcagtacccggagcagc

SEQ ID NO: 192109 - DNA, 25 bp, Homo sapien
tctcggcggaaccaagtagaacaca

SEQ ID NO: 192110 - DNA, 25 bp, Homo sapien
ccaagtagaacacaagttgtggaga

SEQ ID NO: 192111 - DNA, 25 bp, Homo sapien
ggggaaaggcctctgcgggcgtggc

SEQ ID NO: 192112 - DNA, 25 bp, Homo sapien
cgtcgtgggtctcggcggaaccaag

SEQ ID NO: 192113 - DNA, 25 bp, Homo sapien
aaactctactcacgtgcgtccgagg

SEQ ID NO: 192114 - DNA, 25 bp, Homo sapien
agctgagtttgacgtcgccgctggt

SEQ ID NO: 192115 - DNA, 25 bp, Homo sapien
aagcctcaaggcgtactgtaaggaa

SEQ ID NO: 192116 - DNA, 25 bp, Homo sapien
ctcgtaaacttcagcggcccggaag

SEQ ID NO: 192117 - DNA, 25 bp, Homo sapien
taacctaactagcttaagcactgag

SEQ ID NO: 192118 - DNA, 25 bp, Homo sapien
gaggacatccacaggtatcctttga

SEQ ID NO: 192119 - DNA, 25 bp, Homo sapien
tacttaagaggcacagtctccaaag

SEQ ID NO: 192120 - DNA, 25 bp, Homo sapien
tcctttgatgtgtagggaccggaat

SEQ ID NO: 192121 - DNA, 25 bp, Homo sapien
tcaggactcctttaggctcagggaa

SEQ ID NO: 192122 - DNA, 25 bp, Homo sapien
ttgagctataaggactgacagcatc

SEQ ID NO: 192123 - DNA, 25 bp, Homo sapien
cttctattgccatcaggactccttt

SEQ ID NO: 192124 - DNA, 25 bp, Homo sapien
cctttaggctcagggaatgtggtta

SEQ ID NO: 192125 - DNA, 25 bp, Homo sapien
cagctgcttgcttggtgtggaacat

SEQ ID NO: 192126 - DNA, 25 bp, Homo sapien
tatcagctgcttgcttggtgtggaa

SEQ ID NO: 192127 - DNA, 25 bp, Homo sapien
tcagctgcttgcttggtgtggaaca

SEQ ID NO: 192128 - DNA, 25 bp, Homo sapien
cttatcagctgcttgcttggtgtgg

SEQ ID NO: 192129 - DNA, 25 bp, Homo sapien
tacataccacagttatagtgttata

SEQ ID NO: 192130 - DNA, 25 bp, Homo sapien
acataccacagttatagtgttataa

SEQ ID NO: 192131 - DNA, 25 bp, Homo sapien
cataccacagttatagtgttataat

SEQ ID NO: 192132 - DNA, 25 bp, Homo sapien
gaaattgtgaggaatctcaggccac

SEQ ID NO: 192133 - DNA, 25 bp, Homo sapien
gatgttccagcttatagccccagct

SEQ ID NO: 192134 - DNA, 25 bp, Homo sapien
gccacttccctgcatcaagaggtaa

SEQ ID NO: 192135 - DNA, 25 bp, Homo sapien
ggtttcaactaatagccagactcaa

SEQ ID NO: 192136 - DNA, 25 bp, Homo sapien
tggaggtgggcaggtaaccatcaac

SEQ ID NO: 192137 - DNA, 25 bp, Homo sapien
tgtgacagagggacttagagccaaa

SEQ ID NO: 192138 - DNA, 25 bp, Homo sapien
tgatgtggctacctgctgcaggtcc

SEQ ID NO: 192139 - DNA, 25 bp, Homo sapien
tgcactgagctactacaatcttggt

SEQ ID NO: 192140 - DNA, 25 bp, Homo sapien
ttatcccaaggctcctctggttgcc

SEQ ID NO: 192141 - DNA, 25 bp, Homo sapien
tcccacagtttggtcagagcctagt

SEQ ID NO: 192142 - DNA, 25 bp, Homo sapien
gcatttggattgcttctcccacagt

SEQ ID NO: 192143 - DNA, 25 bp, Homo sapien
gccatggcgatgtcctttgtttgct

SEQ ID NO: 192144 - DNA, 25 bp, Homo sapien
tgaaggttattggtaatttcaggga

SEQ ID NO: 192145 - DNA, 25 bp, Homo sapien
ttgcataaagcttcagaagttgagc

SEQ ID NO: 192146 - DNA, 25 bp, Homo sapien
tcagtagacagaggtgatcactgtt

SEQ ID NO: 192147 - DNA, 25 bp, Homo sapien
gagtaacggaattggcaacttgaag

SEQ ID NO: 192148 - DNA, 25 bp, Homo sapien
tctttgatcctttattgactcaaag

SEQ ID NO: 192149 - DNA, 25 bp, Homo sapien
tgatcctttattgactcaaagtgag

SEQ ID NO: 192150 - DNA, 25 bp, Homo sapien
tcctttattgactcaaagtgagtgg

SEQ ID NO: 192151 - DNA, 25 bp, Homo sapien
ttattgactcaaagtgagtggccat

SEQ ID NO: 192152 - DNA, 25 bp, Homo sapien
ggttaaggtctgagtgtcttctccc

SEQ ID NO: 192153 - DNA, 25 bp, Homo sapien
caaatctcaggtttgtccctcagca

SEQ ID NO: 192154 - DNA, 25 bp, Homo sapien
cagtttctaaagagaggcctgggtg

SEQ ID NO: 192155 - DNA, 25 bp, Homo sapien
tccctagaatcaatatgaggatctc

SEQ ID NO: 192156 - DNA, 25 bp, Homo sapien
tgatagacgctacttcaggccctct

SEQ ID NO: 192157 - DNA, 25 bp, Homo sapien
gaatctgtgagatctcttagtgtag

SEQ ID NO: 192158 - DNA, 25 bp, Homo sapien
agtgtagtatctttggtatctgttc

SEQ ID NO: 192159 - DNA, 25 bp, Homo sapien
taagatctcttagcccttatcttgc

SEQ ID NO: 192160 - DNA, 25 bp, Homo sapien
ataaaggccctgcacgaagccatgg

SEQ ID NO: 192161 - DNA, 25 bp, Homo sapien
accaaagatgagaagtcagctacaa

SEQ ID NO: 192162 - DNA, 25 bp, Homo sapien
gaccggagtgtcttatgtccttcaa

SEQ ID NO: 192163 - DNA, 25 bp, Homo sapien
ttcaaacgaccacactagatctcca

SEQ ID NO: 192164 - DNA, 25 bp, Homo sapien
ccacgaggagggtagattgctctca

SEQ ID NO: 192165 - DNA, 25 bp, Homo sapien
tccaattgctctctgaccagaaacc

SEQ ID NO: 192166 - DNA, 25 bp, Homo sapien
tttctcaagtttgttgactgctttg

SEQ ID NO: 192167 - DNA, 25 bp, Homo sapien
gaaagagctatttggattccggaat

SEQ ID NO: 192168 - DNA, 25 bp, Homo sapien
ctgcctcataaatatcaaatatctc

SEQ ID NO: 192169 - DNA, 25 bp, Homo sapien
tgcctcataaatatcaaatatctct

SEQ ID NO: 192170 - DNA, 25 bp, Homo sapien
ctatgacaatttccgggctcagctt

SEQ ID NO: 192171 - DNA, 25 bp, Homo sapien
tgacaactatgacaatttccgggct

SEQ ID NO: 192172 - DNA, 25 bp, Homo sapien
acaatttccgggctcagcttcttcc

SEQ ID NO: 192173 - DNA, 25 bp, Homo sapien
tgatgacaactatgacaatttccgg

SEQ ID NO: 192174 - DNA, 25 bp, Homo sapien
taccttctagaatagggtgtaggaa

SEQ ID NO: 192175 - DNA, 25 bp, Homo sapien
gagggctgagctttgcaccatgacc

SEQ ID NO: 192176 - DNA, 25 bp, Homo sapien
gaagggttgcactgaatcagccaga

SEQ ID NO: 192177 - DNA, 25 bp, Homo sapien
catctcactggccagcacattggta

SEQ ID NO: 192178 - DNA, 25 bp, Homo sapien
ttgaaggccgtaccattttgacaaa

SEQ ID NO: 192179 - DNA, 25 bp, Homo sapien
tgaaggccgtaccattttgacaaat

SEQ ID NO: 192180 - DNA, 25 bp, Homo sapien
gagaggaaagccagttcatctccag

SEQ ID NO: 192181 - DNA, 25 bp, Homo sapien
ggagaggaaagccagttcatctcca

SEQ ID NO: 192182 - DNA, 25 bp, Homo sapien
aggggagaggaaagccagttcatct

SEQ ID NO: 192183 - DNA, 25 bp, Homo sapien
ggatatgagctttgataaaattctt

SEQ ID NO: 192184 - DNA, 25 bp, Homo sapien
tgctggccttattgttagttggata

SEQ ID NO: 192185 - DNA, 25 bp, Homo sapien
gacttgaagaaaccagcagtgtaga

SEQ ID NO: 192186 - DNA, 25 bp, Homo sapien
taaaattcttattgtggacttgaag

SEQ ID NO: 192187 - DNA, 25 bp, Homo sapien
aaagggcactttgccgttgactgaa

SEQ ID NO: 192188 - DNA, 25 bp, Homo sapien
tcccatttagatggatagccagtgt

SEQ ID NO: 192189 - DNA, 25 bp, Homo sapien
atttcccatttagatggatagccag

SEQ ID NO: 192190 - DNA, 25 bp, Homo sapien
gccagtgtctgataaaagggcactt

SEQ ID NO: 192191 - DNA, 25 bp, Homo sapien
catctttacaagatctcagggcttc

SEQ ID NO: 192192 - DNA, 25 bp, Homo sapien
tacaagatctcagggcttcagcttt

SEQ ID NO: 192193 - DNA, 25 bp, Homo sapien
tctttacaagatctcagggcttcag

SEQ ID NO: 192194 - DNA, 25 bp, Homo sapien
tttacaagatctcagggcttcagct

SEQ ID NO: 192195 - DNA, 25 bp, Homo sapien
ggcttctgtggatcaaaatgggcat

SEQ ID NO: 192196 - DNA, 25 bp, Homo sapien
tatgtgtacgctctttttcattcct

SEQ ID NO: 192197 - DNA, 25 bp, Homo sapien
tgtgggctcagttatcaggcctggc

SEQ ID NO: 192198 - DNA, 25 bp, Homo sapien
cagttgccacaacttctgtgggctc

SEQ ID NO: 192199 - DNA, 25 bp, Homo sapien
gaagccagcattgggccaggggcca

SEQ ID NO: 192200 - DNA, 25 bp, Homo sapien
ggccaggagagctcagccagtgtgg

SEQ ID NO: 192201 - DNA, 25 bp, Homo sapien
ccaggagagctcagccagtgtggcc

SEQ ID NO: 192202 - DNA, 25 bp, Homo sapien
ggagaggaagccagcattgggccag

SEQ ID NO: 192203 - DNA, 25 bp, Homo sapien
tgttctgaggatacctcacaaccaa

SEQ ID NO: 192204 - DNA, 25 bp, Homo sapien
gatttgatctttaacccatggcagt

SEQ ID NO: 192205 - DNA, 25 bp, Homo sapien
aaggtgagtgatttgatctttaacc

SEQ ID NO: 192206 - DNA, 25 bp, Homo sapien
gagaggcttagtctctgactgagaa

SEQ ID NO: 192207 - DNA, 25 bp, Homo sapien
ctgggcatttatcatctacatgttc

SEQ ID NO: 192208 - DNA, 25 bp, Homo sapien
gcatttatcatctacatgttctctc

SEQ ID NO: 192209 - DNA, 25 bp, Homo sapien
catttatcatctacatgttctctca

SEQ ID NO: 192210 - DNA, 25 bp, Homo sapien
gggcatttatcatctacatgttctc

SEQ ID NO: 192211 - DNA, 25 bp, Homo sapien
gatagagaatgacagtgcagaactt

SEQ ID NO: 192212 - DNA, 25 bp, Homo sapien
aatgacagtgcagaacttgatgcca

SEQ ID NO: 192213 - DNA, 25 bp, Homo sapien
tctgatagagaatgacagtgcagaa

SEQ ID NO: 192214 - DNA, 25 bp, Homo sapien
ctagtgtgagtcttctgatagagaa

SEQ ID NO: 192215 - DNA, 25 bp, Homo sapien
gccagaatgatctttgatgtcacat

SEQ ID NO: 192216 - DNA, 25 bp, Homo sapien
tactctaggcctttgaacacgttgc

SEQ ID NO: 192217 - DNA, 25 bp, Homo sapien
cacaacttaagagcttgagataacc

SEQ ID NO: 192218 - DNA, 25 bp, Homo sapien
tttaagatctgcctagcactctggc

SEQ ID NO: 192219 - DNA, 25 bp, Homo sapien
tgtgctctacccgtgtccacttcag

SEQ ID NO: 192220 - DNA, 25 bp, Homo sapien
ttcagcaccagagctaaggggtgtg

SEQ ID NO: 192221 - DNA, 25 bp, Homo sapien
attttcctgtgctctacccgtgtcc

SEQ ID NO: 192222 - DNA, 25 bp, Homo sapien
cagcttcatacagcgaatggtagct

SEQ ID NO: 192223 - DNA, 25 bp, Homo sapien
caggtagtgttgacaatagtagaca

SEQ ID NO: 192224 - DNA, 25 bp, Homo sapien
ccgaagactgggtcgcaggtagtgt

SEQ ID NO: 192225 - DNA, 25 bp, Homo sapien
actgggtcgcaggtagtgttgacaa

SEQ ID NO: 192226 - DNA, 25 bp, Homo sapien
gggatgccgaagactgggtcgcagg

SEQ ID NO: 192227 - DNA, 25 bp, Homo sapien
tatatgggaagtttcagtgctccag

SEQ ID NO: 192228 - DNA, 25 bp, Homo sapien
ctttgtatatgggaagtttcagtgc

SEQ ID NO: 192229 - DNA, 25 bp, Homo sapien
gagcatagtcctttgtatatgggaa

SEQ ID NO: 192230 - DNA, 25 bp, Homo sapien
taaattcaaatattgagcatagtcc

SEQ ID NO: 192231 - DNA, 25 bp, Homo sapien
tttgaagcagggactgaagtcctga

SEQ ID NO: 192232 - DNA, 25 bp, Homo sapien
caggtgtgcttgatcattggtgata

SEQ ID NO: 192233 - DNA, 25 bp, Homo sapien
agccaggtgtgcttgatcattggtg

SEQ ID NO: 192234 - DNA, 25 bp, Homo sapien
tggtgatagcatttgaagcagggac

SEQ ID NO: 192235 - DNA, 25 bp, Homo sapien
gcccagagtgtgtgattttgcctgt

SEQ ID NO: 192236 - DNA, 25 bp, Homo sapien
gcagtgattctgaacgttttcctga

SEQ ID NO: 192237 - DNA, 25 bp, Homo sapien
ttctgtctttagcagagggagccag

SEQ ID NO: 192238 - DNA, 25 bp, Homo sapien
aaataccatgtgaacgttttgcttg

SEQ ID NO: 192239 - DNA, 25 bp, Homo sapien
tccggtcggcactgctggtagaagt

SEQ ID NO: 192240 - DNA, 25 bp, Homo sapien
gtcccacccatgcacccagtttctt

SEQ ID NO: 192241 - DNA, 25 bp, Homo sapien
tggtagaagtggagagcaggtccca

SEQ ID NO: 192242 - DNA, 25 bp, Homo sapien
tgcccctctgagtgtctttttccat

SEQ ID NO: 192243 - DNA, 25 bp, Homo sapien
tacgagaaagcgatatgagaatagt

SEQ ID NO: 192244 - DNA, 25 bp, Homo sapien
cggtactgctagaaatcatattgcc

SEQ ID NO: 192245 - DNA, 25 bp, Homo sapien
tcatattgcctgtccaaaggaaatg

SEQ ID NO: 192246 - DNA, 25 bp, Homo sapien
ggttctctgtggaggattaacaaat

SEQ ID NO: 192247 - DNA, 25 bp, Homo sapien
ctttttttcctccgatactctcatt

SEQ ID NO: 192248 - DNA, 25 bp, Homo sapien
ttttttcctccgatactctcatttc

SEQ ID NO: 192249 - DNA, 25 bp, Homo sapien
tctttttttcctccgatactctcat

SEQ ID NO: 192250 - DNA, 25 bp, Homo sapien
ttttcctccgatactctcatttcca

SEQ ID NO: 192251 - DNA, 25 bp, Homo sapien
tgtctgtcgaaccagagactgctgg

SEQ ID NO: 192252 - DNA, 25 bp, Homo sapien
tgtttttcattattgcgctggcatc

SEQ ID NO: 192253 - DNA, 25 bp, Homo sapien
gaatgcttgtgcaggataataacca

SEQ ID NO: 192254 - DNA, 25 bp, Homo sapien
tgccatcaccactaatgaagaagta

SEQ ID NO: 192255 - DNA, 25 bp, Homo sapien
tgtacatctgttccaaacctcatct

SEQ ID NO: 192256 - DNA, 25 bp, Homo sapien
aacctctggtgaacatgtacatctg

SEQ ID NO: 192257 - DNA, 25 bp, Homo sapien
ttatcctggatcgtcaaacctctgg

SEQ ID NO: 192258 - DNA, 25 bp, Homo sapien
gcacaactctgtttaatacgtagaa

SEQ ID NO: 192259 - DNA, 25 bp, Homo sapien
aaagcacgcaagtttgataaaactt

SEQ ID NO: 192260 - DNA, 25 bp, Homo sapien
aaaagcacgcaagtttgataaaact

SEQ ID NO: 192261 - DNA, 25 bp, Homo sapien
aagcacgcaagtttgataaaacttc

SEQ ID NO: 192262 - DNA, 25 bp, Homo sapien
ggaatttagctgcattaaggtaacc

SEQ ID NO: 192263 - DNA, 25 bp, Homo sapien
ttttcctctggcctacacttctctt

SEQ ID NO: 192264 - DNA, 25 bp, Homo sapien
ttagctgcattaaggtaacctaaat

SEQ ID NO: 192265 - DNA, 25 bp, Homo sapien
tgctgatttggagataagacatttt

SEQ ID NO: 192266 - DNA, 25 bp, Homo sapien
tatttccagtggacttctataagca

SEQ ID NO: 192267 - DNA, 25 bp, Homo sapien
gggtccacggatccagactggttga

SEQ ID NO: 192268 - DNA, 25 bp, Homo sapien
agctgctgggtgttaggtatttcca

SEQ ID NO: 192269 - DNA, 25 bp, Homo sapien
tgatgagggctcaaggcctgtagct

SEQ ID NO: 192270 - DNA, 25 bp, Homo sapien
cagagttacattataggcccaattc

SEQ ID NO: 192271 - DNA, 25 bp, Homo sapien
taggcccaattcctgttgtgcctcc

SEQ ID NO: 192272 - DNA, 25 bp, Homo sapien
ggaagggagaagagttcctccactg

SEQ ID NO: 192273 - DNA, 25 bp, Homo sapien
agggagaagagttcctccactggaa

SEQ ID NO: 192274 - DNA, 25 bp, Homo sapien
tgtttgtagtcctttcttaccacaa

SEQ ID NO: 192275 - DNA, 25 bp, Homo sapien
ttgtagtcctttcttaccacaactc

SEQ ID NO: 192276 - DNA, 25 bp, Homo sapien
tgtagtcctttcttaccacaactct

SEQ ID NO: 192277 - DNA, 25 bp, Homo sapien
tgtattatcaggtttcatgtcctat

SEQ ID NO: 192278 - DNA, 25 bp, Homo sapien
gttgtggaagataatctgtagccta

SEQ ID NO: 192279 - DNA, 25 bp, Homo sapien
cctattgcagaccagataattatat

SEQ ID NO: 192280 - DNA, 25 bp, Homo sapien
tctgtagcctaagattcatcttcta

SEQ ID NO: 192281 - DNA, 25 bp, Homo sapien
tggcatggataaccctgtgcttcct

SEQ ID NO: 192282 - DNA, 25 bp, Homo sapien
ctggtatgggggcataacaacacca

SEQ ID NO: 192283 - DNA, 25 bp, Homo sapien
ttgcttttggcatggataaccctgt

SEQ ID NO: 192284 - DNA, 25 bp, Homo sapien
gggcataacaacaccaactggaaaa

SEQ ID NO: 192285 - DNA, 25 bp, Homo sapien
gagagccatagctcctgagttgttg

SEQ ID NO: 192286 - DNA, 25 bp, Homo sapien
tgaggcattgaactcagtgttgccc

SEQ ID NO: 192287 - DNA, 25 bp, Homo sapien
gaaccaaaaatcaggcgaatactca

SEQ ID NO: 192288 - DNA, 25 bp, Homo sapien
tggaacaagatggtgaaatagaggc

SEQ ID NO: 192289 - DNA, 25 bp, Homo sapien
aatagaggcttcactaatcatctcc

SEQ ID NO: 192290 - DNA, 25 bp, Homo sapien
ttgacagctccagaattaagtttat

SEQ ID NO: 192291 - DNA, 25 bp, Homo sapien
gcttatcctctgttccttttttgac

SEQ ID NO: 192292 - DNA, 25 bp, Homo sapien
tttttgacagctccagaattaagtt

SEQ ID NO: 192293 - DNA, 25 bp, Homo sapien
ttcctgcatttaatggatttgtcat

SEQ ID NO: 192294 - DNA, 25 bp, Homo sapien
cagagaagccatctacttggcgggc

SEQ ID NO: 192295 - DNA, 25 bp, Homo sapien
tgagttgatgacttcctcgcaggtc

SEQ ID NO: 192296 - DNA, 25 bp, Homo sapien
aagtgaagtcttggtcctgtgtccc

SEQ ID NO: 192297 - DNA, 25 bp, Homo sapien
cttggcgggcttcagaggttacatc

SEQ ID NO: 192298 - DNA, 25 bp, Homo sapien
cgaaagtcgtatgtgcacatgcata

SEQ ID NO: 192299 - DNA, 25 bp, Homo sapien
ttattgaaatgaccgaaagtcgtat

SEQ ID NO: 192300 - DNA, 25 bp, Homo sapien
atgtgtgtactaaagtcgctgtctg

SEQ ID NO: 192301 - DNA, 25 bp, Homo sapien
gtgtgtactaaagtcgctgtctgtg

SEQ ID NO: 192302 - DNA, 25 bp, Homo sapien
tccaaatacaaataaggtacagtcc

SEQ ID NO: 192303 - DNA, 25 bp, Homo sapien
gtgcagaaagatacttgtgggcatt

SEQ ID NO: 192304 - DNA, 25 bp, Homo sapien
aaaggctttcagctggacacgatgg

SEQ ID NO: 192305 - DNA, 25 bp, Homo sapien
aaggctttcagctggacacgatggc

SEQ ID NO: 192306 - DNA, 25 bp, Homo sapien
tatcagcccaatcctgtgagtagcc

SEQ ID NO: 192307 - DNA, 25 bp, Homo sapien
ctgcaagattcagacttcctgttcc

SEQ ID NO: 192308 - DNA, 25 bp, Homo sapien
caacttcagaatagtctaggaggat

SEQ ID NO: 192309 - DNA, 25 bp, Homo sapien
tgagtagccaaatcataaccacttc

SEQ ID NO: 192310 - DNA, 25 bp, Homo sapien
catcaaaatagttgtgagaatttga

SEQ ID NO: 192311 - DNA, 25 bp, Homo sapien
caaagcagagtaatttggagagttg

SEQ ID NO: 192312 - DNA, 25 bp, Homo sapien
ttagactattagtgctttcaaagca

SEQ ID NO: 192313 - DNA, 25 bp, Homo sapien
ggagagttgcttgttattatgaaca

SEQ ID NO: 192314 - DNA, 25 bp, Homo sapien
gagtgagatataagcaccctggtga

SEQ ID NO: 192315 - DNA, 25 bp, Homo sapien
gagagtgagatataagcaccctggt

SEQ ID NO: 192316 - DNA, 25 bp, Homo sapien
ggagagtgagatataagcaccctgg

SEQ ID NO: 192317 - DNA, 25 bp, Homo sapien
aggagagtgagatataagcaccctg

SEQ ID NO: 192318 - DNA, 25 bp, Homo sapien
tatgttttagtagcaggggcggtca

SEQ ID NO: 192319 - DNA, 25 bp, Homo sapien
atgttttagtagcaggggcggtcat

SEQ ID NO: 192320 - DNA, 25 bp, Homo sapien
ctgctttatacacccagaaatatgt

SEQ ID NO: 192321 - DNA, 25 bp, Homo sapien
ctttatacacccagaaatatgtttt

SEQ ID NO: 192322 - DNA, 25 bp, Homo sapien
tcaactggcttggtctgacggtact

SEQ ID NO: 192323 - DNA, 25 bp, Homo sapien
catgtgaatatatcctcagtttcat

SEQ ID NO: 192324 - DNA, 25 bp, Homo sapien
cttgacatccaaaaggaagttaata

SEQ ID NO: 192325 - DNA, 25 bp, Homo sapien
tgaaagttgggtaacttgacatcca

SEQ ID NO: 192326 - DNA, 25 bp, Homo sapien
tccacatccattgaaaacaagtaat

SEQ ID NO: 192327 - DNA, 25 bp, Homo sapien
caagtaatagaagatcagtaaatac

SEQ ID NO: 192328 - DNA, 25 bp, Homo sapien
gaaaacaagtaatagaagatcagta

SEQ ID NO: 192329 - DNA, 25 bp, Homo sapien
tggtccacatccattgaaaacaagt

SEQ ID NO: 192330 - DNA, 25 bp, Homo sapien
gaaccttcacctagagtcctccaag

SEQ ID NO: 192331 - DNA, 25 bp, Homo sapien
tagtaaatctatggccagaaggcct

SEQ ID NO: 192332 - DNA, 25 bp, Homo sapien
gacttccaggaccatgggcattttt

SEQ ID NO: 192333 - DNA, 25 bp, Homo sapien
aaaaggttagtaaatctatggccag

SEQ ID NO: 192334 - DNA, 25 bp, Homo sapien
tgccaaattgtaagtccattgacac

SEQ ID NO: 192335 - DNA, 25 bp, Homo sapien
cttctgtgtagtataagaaacttac

SEQ ID NO: 192336 - DNA, 25 bp, Homo sapien
gagagacttttttcatcacagggcc

SEQ ID NO: 192337 - DNA, 25 bp, Homo sapien
tacacttgcgttttgctgtcatgaa

SEQ ID NO: 192338 - DNA, 25 bp, Homo sapien
ttaaaccctaccatgaagatgatag

SEQ ID NO: 192339 - DNA, 25 bp, Homo sapien
gatacttcgacctctcaaaatctga

SEQ ID NO: 192340 - DNA, 25 bp, Homo sapien
tcttatgaggccttacttgtgtgag

SEQ ID NO: 192341 - DNA, 25 bp, Homo sapien
tgtgaactttactctatgccgcatg

SEQ ID NO: 192342 - DNA, 25 bp, Homo sapien
aaatctcctgtagccttttcctaat

SEQ ID NO: 192343 - DNA, 25 bp, Homo sapien
taattagaaatctcctgtagccttt

SEQ ID NO: 192344 - DNA, 25 bp, Homo sapien
tagaaatctcctgtagccttttcct

SEQ ID NO: 192345 - DNA, 25 bp, Homo sapien
ctaattagaaatctcctgtagcctt

SEQ ID NO: 192346 - DNA, 25 bp, Homo sapien
tgttttgatgtccagagtggactct

SEQ ID NO: 192347 - DNA, 25 bp, Homo sapien
ttagggctgcggtgttttgatgtcc

SEQ ID NO: 192348 - DNA, 25 bp, Homo sapien
ggactcttggcaggagtgtctaaga

SEQ ID NO: 192349 - DNA, 25 bp, Homo sapien
gtggactcttggcaggagtgtctaa

SEQ ID NO: 192350 - DNA, 25 bp, Homo sapien
ttatcttatgatcttcaacatccat

SEQ ID NO: 192351 - DNA, 25 bp, Homo sapien
tttttggcaagtcttgttatcttat

SEQ ID NO: 192352 - DNA, 25 bp, Homo sapien
gatcctgataccaaggtctctctga

SEQ ID NO: 192353 - DNA, 25 bp, Homo sapien
tcagagccgctgtaactctgtgcat

SEQ ID NO: 192354 - DNA, 25 bp, Homo sapien
tctccctggtgagctaatttacact

SEQ ID NO: 192355 - DNA, 25 bp, Homo sapien
gcctccatagagagctaggccctgc

SEQ ID NO: 192356 - DNA, 25 bp, Homo sapien
ttgtggagatttggaaaggtaccca

SEQ ID NO: 192357 - DNA, 25 bp, Homo sapien
aaaggtacccaaggtccatactgat

SEQ ID NO: 192358 - DNA, 25 bp, Homo sapien
tgtggagatttggaaaggtacccaa

SEQ ID NO: 192359 - DNA, 25 bp, Homo sapien
gaaaggtacccaaggtccatactga

SEQ ID NO: 192360 - DNA, 25 bp, Homo sapien
tagaatgaatactattgacagctga

SEQ ID NO: 192361 - DNA, 25 bp, Homo sapien
cagctgaagtatcatcagcataagt

SEQ ID NO: 192362 - DNA, 25 bp, Homo sapien
ttaatgaggacttagaatgaatact

SEQ ID NO: 192363 - DNA, 25 bp, Homo sapien
ctacttcttcaagggttcattcttc

SEQ ID NO: 192364 - DNA, 25 bp, Homo sapien
gagtaatcaaccatgtcaaacaaag

SEQ ID NO: 192365 - DNA, 25 bp, Homo sapien
aatctgtttggtccagtgtgaatca

SEQ ID NO: 192366 - DNA, 25 bp, Homo sapien
taactggcctgttgcccacttagta

SEQ ID NO: 192367 - DNA, 25 bp, Homo sapien
tcagctgtccaactcttgagtaatc

SEQ ID NO: 192368 - DNA, 25 bp, Homo sapien
ttctctcttaggtatctgttatcca

SEQ ID NO: 192369 - DNA, 25 bp, Homo sapien
ctgtatttagctcccttgtctgttc

SEQ ID NO: 192370 - DNA, 25 bp, Homo sapien
tgtctgttcagtcggtcttttccaa

SEQ ID NO: 192371 - DNA, 25 bp, Homo sapien
ctcattctctcttaggtatctgtta

SEQ ID NO: 192372 - DNA, 25 bp, Homo sapien
gaatctctctgacagcagtgatgca

SEQ ID NO: 192373 - DNA, 25 bp, Homo sapien
tctttgatgagcattggagaggagc

SEQ ID NO: 192374 - DNA, 25 bp, Homo sapien
tcatatctttgatgagcattggaga

SEQ ID NO: 192375 - DNA, 25 bp, Homo sapien
agaggagctggaatctctctgacag

SEQ ID NO: 192376 - DNA, 25 bp, Homo sapien
agcagaagtgttggatttagaggca

SEQ ID NO: 192377 - DNA, 25 bp, Homo sapien
aggcatttaataagattagactttc

SEQ ID NO: 192378 - DNA, 25 bp, Homo sapien
caaacattatttggtgcattaattc

SEQ ID NO: 192379 - DNA, 25 bp, Homo sapien
tggatttagaggcatttaataagat

SEQ ID NO: 192380 - DNA, 25 bp, Homo sapien
actattatccctcgggcagagaata

SEQ ID NO: 192381 - DNA, 25 bp, Homo sapien
tttccactattatccctcgggcaga

SEQ ID NO: 192382 - DNA, 25 bp, Homo sapien
taatatacctagtcagtttttccac

SEQ ID NO: 192383 - DNA, 25 bp, Homo sapien
tgtttcttaagcaaacccacttgct

SEQ ID NO: 192384 - DNA, 25 bp, Homo sapien
gatactcgtccccagaggctaaaca

SEQ ID NO: 192385 - DNA, 25 bp, Homo sapien
acaccttagccttatatgggcacag

SEQ ID NO: 192386 - DNA, 25 bp, Homo sapien
aaatgcgttcctttcagtacttggc

SEQ ID NO: 192387 - DNA, 25 bp, Homo sapien
ttgacaggaagtatctgccctttat

SEQ ID NO: 192388 - DNA, 25 bp, Homo sapien
ttcttatcctcctcctctctgtgta

SEQ ID NO: 192389 - DNA, 25 bp, Homo sapien
cttcttatcctcctcctctctgtgt

SEQ ID NO: 192390 - DNA, 25 bp, Homo sapien
tcttatcctcctcctctctgtgtac

SEQ ID NO: 192391 - DNA, 25 bp, Homo sapien
tcttcttatcctcctcctctctgtg

SEQ ID NO: 192392 - DNA, 25 bp, Homo sapien
gttctcacataacagctttgccaaa

SEQ ID NO: 192393 - DNA, 25 bp, Homo sapien
ctttgctgcctcctcctttcccatc

SEQ ID NO: 192394 - DNA, 25 bp, Homo sapien
gccaaaagcttcaatttaggaatgt

SEQ ID NO: 192395 - DNA, 25 bp, Homo sapien
taacagctttgccaaaagcttcaat

SEQ ID NO: 192396 - DNA, 25 bp, Homo sapien
tcatttaatatttatctcactcaca

SEQ ID NO: 192397 - DNA, 25 bp, Homo sapien
atttaatatttatctcactcacagg

SEQ ID NO: 192398 - DNA, 25 bp, Homo sapien
ttaatatttatctcactcacaggag

SEQ ID NO: 192399 - DNA, 25 bp, Homo sapien
taatatttatctcactcacaggagc

SEQ ID NO: 192400 - DNA, 25 bp, Homo sapien
gggacattgtatgccagggacagct

SEQ ID NO: 192401 - DNA, 25 bp, Homo sapien
gaaagggacattgtatgccagggac

SEQ ID NO: 192402 - DNA, 25 bp, Homo sapien
aaagggacattgtatgccagggaca

SEQ ID NO: 192403 - DNA, 25 bp, Homo sapien
acattgtatgccagggacagctgac

SEQ ID NO: 192404 - DNA, 25 bp, Homo sapien
ggtctcttatgcacaattaccagct

SEQ ID NO: 192405 - DNA, 25 bp, Homo sapien
tgcacaattaccagctgagccttca

SEQ ID NO: 192406 - DNA, 25 bp, Homo sapien
gatgtcttaagagcagcggtctctt

SEQ ID NO: 192407 - DNA, 25 bp, Homo sapien
tgtgaaacttttgcatcgtgatgtc

SEQ ID NO: 192408 - DNA, 25 bp, Homo sapien
tagtgcttaattgaaggattgctgt

SEQ ID NO: 192409 - DNA, 25 bp, Homo sapien
gctgtactggttaactcttctatac

SEQ ID NO: 192410 - DNA, 25 bp, Homo sapien
tcttctatacctctgtgttgtaagc

SEQ ID NO: 192411 - DNA, 25 bp, Homo sapien
tttagggttcctgcagttattccat

SEQ ID NO: 192412 - DNA, 25 bp, Homo sapien
cagtgctgacactgccaagctgact

SEQ ID NO: 192413 - DNA, 25 bp, Homo sapien
tggaattctaacaatactgtcctcc

SEQ ID NO: 192414 - DNA, 25 bp, Homo sapien
ctagagattaccacttggaattcta

SEQ ID NO: 192415 - DNA, 25 bp, Homo sapien
tcaacccagtgctgacactgccaag

SEQ ID NO: 192416 - DNA, 25 bp, Homo sapien
cagtttcaccctgagattttcccct

SEQ ID NO: 192417 - DNA, 25 bp, Homo sapien
ctaaacttcttcccataggaaacag

SEQ ID NO: 192418 - DNA, 25 bp, Homo sapien
catggtggctagatttcaagaagga

SEQ ID NO: 192419 - DNA, 25 bp, Homo sapien
tggagactcaactggcagctgggct

SEQ ID NO: 192420 - DNA, 25 bp, Homo sapien
cgattctccacttggctgcttgggt

SEQ ID NO: 192421 - DNA, 25 bp, Homo sapien
tgggctgacattcacgaccacgatt

SEQ ID NO: 192422 - DNA, 25 bp, Homo sapien
gaaggcttcgcctagctggatatcc

SEQ ID NO: 192423 - DNA, 25 bp, Homo sapien
tatgggagtaactggatgtcagccg

SEQ ID NO: 192424 - DNA, 25 bp, Homo sapien
tgtcagccggagctatcatttgaag

SEQ ID NO: 192425 - DNA, 25 bp, Homo sapien
tacttgatgctgactgttatgggac

SEQ ID NO: 192426 - DNA, 25 bp, Homo sapien
tctcatcacgttttctgcgaccact

SEQ ID NO: 192427 - DNA, 25 bp, Homo sapien
catcacgttttctgcgaccactgtc

SEQ ID NO: 192428 - DNA, 25 bp, Homo sapien
taaggagcatatgtggttatcatag

SEQ ID NO: 192429 - DNA, 25 bp, Homo sapien
gtctctaaggctctcactgagcttg

SEQ ID NO: 192430 - DNA, 25 bp, Homo sapien
aattcaaaggccgatttttgcatga

SEQ ID NO: 192431 - DNA, 25 bp, Homo sapien
gagaaattcaaaggccgatttttgc

SEQ ID NO: 192432 - DNA, 25 bp, Homo sapien
tcaaaggccgatttttgcatgaagt

SEQ ID NO: 192433 - DNA, 25 bp, Homo sapien
atgagaaattcaaaggccgattttt

SEQ ID NO: 192434 - DNA, 25 bp, Homo sapien
tgtgcttgtctgtaggccaaacctg

SEQ ID NO: 192435 - DNA, 25 bp, Homo sapien
ctttatagagttttccaggtcagag

SEQ ID NO: 192436 - DNA, 25 bp, Homo sapien
ggatgggccataaaagacgtcccca

SEQ ID NO: 192437 - DNA, 25 bp, Homo sapien
cagtgattttgcagaggatgggcca

SEQ ID NO: 192438 - DNA, 25 bp, Homo sapien
agtgggcaattctgagtctttacat

SEQ ID NO: 192439 - DNA, 25 bp, Homo sapien
tctagcgtctgtttcctcccattgt

SEQ ID NO: 192440 - DNA, 25 bp, Homo sapien
ttattgttctatgttctcctaagca

SEQ ID NO: 192441 - DNA, 25 bp, Homo sapien
ttactccaggaagcgttcaatttcc

SEQ ID NO: 192442 - DNA, 25 bp, Homo sapien
gaagtctcagagattgcctttctct

SEQ ID NO: 192443 - DNA, 25 bp, Homo sapien
taacttcctatgaatgccatctcag

SEQ ID NO: 192444 - DNA, 25 bp, Homo sapien
aacagttaacttcctatgaatgcca

SEQ ID NO: 192445 - DNA, 25 bp, Homo sapien
tataactgatctaataatcatcttc

SEQ ID NO: 192446 - DNA, 25 bp, Homo sapien
tggccttgagtcttcaggctcacag

SEQ ID NO: 192447 - DNA, 25 bp, Homo sapien
tgtgcaggtcgcctgtcttttgggt

SEQ ID NO: 192448 - DNA, 25 bp, Homo sapien
ctctgtgcaggtcgcctgtcttttg

SEQ ID NO: 192449 - DNA, 25 bp, Homo sapien
tcttcaggctcacaggattgaagtt

SEQ ID NO: 192450 - DNA, 25 bp, Homo sapien
tcagctaaagatgtctacaggtggc

SEQ ID NO: 192451 - DNA, 25 bp, Homo sapien
attgctggtgcatttgagtgctgcc

SEQ ID NO: 192452 - DNA, 25 bp, Homo sapien
tacaggtggcgcatttgattgctgg

SEQ ID NO: 192453 - DNA, 25 bp, Homo sapien
taaggcttgtgcagaatctagcagg

SEQ ID NO: 192454 - DNA, 25 bp, Homo sapien
cttgagtttactcctgttggctttt

SEQ ID NO: 192455 - DNA, 25 bp, Homo sapien
ttccatccaagtcattttgccccat

SEQ ID NO: 192456 - DNA, 25 bp, Homo sapien
ctttctccttgagtttactcctgtt

SEQ ID NO: 192457 - DNA, 25 bp, Homo sapien
tttccatccaagtcattttgcccca

SEQ ID NO: 192458 - DNA, 25 bp, Homo sapien
tggcacatcatgatcacaaaatcct

SEQ ID NO: 192459 - DNA, 25 bp, Homo sapien
taatgatgacaacataagcagtgac

SEQ ID NO: 192460 - DNA, 25 bp, Homo sapien
tctttgtcagccaagggtttcattg

SEQ ID NO: 192461 - DNA, 25 bp, Homo sapien
gcagtgactagcatttggcacatca

SEQ ID NO: 192462 - DNA, 25 bp, Homo sapien
gtgtgcgcagcacattcttgccgtg

SEQ ID NO: 192463 - DNA, 25 bp, Homo sapien
tcttgccgtgcttggcccttgggca

SEQ ID NO: 192464 - DNA, 25 bp, Homo sapien
cattcttgccgtgcttggcccttgg

SEQ ID NO: 192465 - DNA, 25 bp, Homo sapien
ctgggcagtgtgcgcagcacattct

SEQ ID NO: 192466 - DNA, 25 bp, Homo sapien
ctactttcttctcatccttgcaaag

SEQ ID NO: 192467 - DNA, 25 bp, Homo sapien
tttcttctcatccttgcaaagtctc

SEQ ID NO: 192468 - DNA, 25 bp, Homo sapien
tcttctcatccttgcaaagtctctc

SEQ ID NO: 192469 - DNA, 25 bp, Homo sapien
actttcttctcatccttgcaaagtc

SEQ ID NO: 192470 - DNA, 25 bp, Homo sapien
gagctataggccagagattgggttt

SEQ ID NO: 192471 - DNA, 25 bp, Homo sapien
ctacttctctgagctataggccaga

SEQ ID NO: 192472 - DNA, 25 bp, Homo sapien
tacttctctgagctataggccagag

SEQ ID NO: 192473 - DNA, 25 bp, Homo sapien
tctctgagctataggccagagattg

SEQ ID NO: 192474 - DNA, 25 bp, Homo sapien
ttccgtaatttacattatctttcaa

SEQ ID NO: 192475 - DNA, 25 bp, Homo sapien
tccgtaatttacattatctttcaac

SEQ ID NO: 192476 - DNA, 25 bp, Homo sapien
tttccgtaatttacattatctttca

SEQ ID NO: 192477 - DNA, 25 bp, Homo sapien
ttatacatttcaaaatttgtgacaa

SEQ ID NO: 192478 - DNA, 25 bp, Homo sapien
tagtttatacatttcaaaatttgtg

SEQ ID NO: 192479 - DNA, 25 bp, Homo sapien
atacatttcaaaatttgtgacaacc

SEQ ID NO: 192480 - DNA, 25 bp, Homo sapien
acatttcaaaatttgtgacaaccat

SEQ ID NO: 192481 - DNA, 25 bp, Homo sapien
tggttcgccttccactctcaaactt

SEQ ID NO: 192482 - DNA, 25 bp, Homo sapien
ctgtggttcgccttccactctcaaa

SEQ ID NO: 192483 - DNA, 25 bp, Homo sapien
gagtccctactgtggttcgccttcc

SEQ ID NO: 192484 - DNA, 25 bp, Homo sapien
cctttggagtccctactgtggttcg

SEQ ID NO: 192485 - DNA, 25 bp, Homo sapien
aaactgagacttggttgcaaggaag

SEQ ID NO: 192486 - DNA, 25 bp, Homo sapien
ccaaactgagacttggttgcaagga

SEQ ID NO: 192487 - DNA, 25 bp, Homo sapien
tttttccaaactgagacttggttgc

SEQ ID NO: 192488 - DNA, 25 bp, Homo sapien
ttccaaactgagacttggttgcaag

SEQ ID NO: 192489 - DNA, 25 bp, Homo sapien
cactctcagttaggccccaatgtct

SEQ ID NO: 192490 - DNA, 25 bp, Homo sapien
tatcatgtggctttggtatacagat

SEQ ID NO: 192491 - DNA, 25 bp, Homo sapien
aaaactgacacctagataatcatcg

SEQ ID NO: 192492 - DNA, 25 bp, Homo sapien
tactgtcccattggttcaagggcct

SEQ ID NO: 192493 - DNA, 25 bp, Homo sapien
agtttgtggtcagttttggaatatg

SEQ ID NO: 192494 - DNA, 25 bp, Homo sapien
tttgtggtcagttttggaatatgtg

SEQ ID NO: 192495 - DNA, 25 bp, Homo sapien
aagtttgtggtcagttttggaatat

SEQ ID NO: 192496 - DNA, 25 bp, Homo sapien
ttgtggtcagttttggaatatgtgt

SEQ ID NO: 192497 - DNA, 25 bp, Homo sapien
aattgactgcctctttctagcagac

SEQ ID NO: 192498 - DNA, 25 bp, Homo sapien
agtttgctcctggactccactagct

SEQ ID NO: 192499 - DNA, 25 bp, Homo sapien
gactccactagctagagaatcagag

SEQ ID NO: 192500 - DNA, 25 bp, Homo sapien
tgccaccttcataagtcttgttgct

SEQ ID NO: 192501 - DNA, 25 bp, Homo sapien
gacccttgtggtatcaaagttataa

SEQ ID NO: 192502 - DNA, 25 bp, Homo sapien
tcataattgtgtttacgtagaccct

SEQ ID NO: 192503 - DNA, 25 bp, Homo sapien
taatttccatagctcgtcccatacc

SEQ ID NO: 192504 - DNA, 25 bp, Homo sapien
ccttagcactgctatctgaaattgt

SEQ ID NO: 192505 - DNA, 25 bp, Homo sapien
cctatagcaacagggatgatgggtc

SEQ ID NO: 192506 - DNA, 25 bp, Homo sapien
cataaattccattcctatagcaaca

SEQ ID NO: 192507 - DNA, 25 bp, Homo sapien
ctctgagtcatgttatggtttgcta

SEQ ID NO: 192508 - DNA, 25 bp, Homo sapien
ggtttgctaccttagcagttctgat

SEQ ID NO: 192509 - DNA, 25 bp, Homo sapien
gattctgtacatcccatggatttgg

SEQ ID NO: 192510 - DNA, 25 bp, Homo sapien
gattcaaaccgtaagcagcttgttc

SEQ ID NO: 192511 - DNA, 25 bp, Homo sapien
tgtgctactgtttatctattcatgt

SEQ ID NO: 192512 - DNA, 25 bp, Homo sapien
caattatagcgtcattcagagtagt

SEQ ID NO: 192513 - DNA, 25 bp, Homo sapien
aaaatgacaacagatgtttaggaac

SEQ ID NO: 192514 - DNA, 25 bp, Homo sapien
caacctatatctgtaaacaatggaa

SEQ ID NO: 192515 - DNA, 25 bp, Homo sapien
tacaaggagacttggatatttcatc

SEQ ID NO: 192516 - DNA, 25 bp, Homo sapien
taaaagctttgctccaatccacttc

SEQ ID NO: 192517 - DNA, 25 bp, Homo sapien
aacatccagtttcacagccctttgc

SEQ ID NO: 192518 - DNA, 25 bp, Homo sapien
ggattttcctgttatttcatggctc

SEQ ID NO: 192519 - DNA, 25 bp, Homo sapien
ataccaagtttcaaggattttcctg

SEQ ID NO: 192520 - DNA, 25 bp, Homo sapien
tctgttgatctagaacaattctgtc

SEQ ID NO: 192521 - DNA, 25 bp, Homo sapien
taccaagtaacttgattttgaggac

SEQ ID NO: 192522 - DNA, 25 bp, Homo sapien
ttaaaaaagacctcttggatccaga

SEQ ID NO: 192523 - DNA, 25 bp, Homo sapien
aaagacctcttggatccagatttaa

SEQ ID NO: 192524 - DNA, 25 bp, Homo sapien
cctcttggatccagatttaaaaagc

SEQ ID NO: 192525 - DNA, 25 bp, Homo sapien
tgagttttcagattttcgatgactt

SEQ ID NO: 192526 - DNA, 25 bp, Homo sapien
tgtctgccactcatggaagccatca

SEQ ID NO: 192527 - DNA, 25 bp, Homo sapien
cagtgtctgccactcatggaagcca

SEQ ID NO: 192528 - DNA, 25 bp, Homo sapien
agtgtctgccactcatggaagccat

SEQ ID NO: 192529 - DNA, 25 bp, Homo sapien
gtctgccactcatggaagccatcac

SEQ ID NO: 192530 - DNA, 25 bp, Homo sapien
gactgccaagataggccacaccaag

SEQ ID NO: 192531 - DNA, 25 bp, Homo sapien
cattctgaattggagatcagccttc

SEQ ID NO: 192532 - DNA, 25 bp, Homo sapien
tctatcaatcaacttgacaaatgac

SEQ ID NO: 192533 - DNA, 25 bp, Homo sapien
tgcaggaaggtattgtgtgctcatc

SEQ ID NO: 192534 - DNA, 25 bp, Homo sapien
caattcatgttctttccttccattt

SEQ ID NO: 192535 - DNA, 25 bp, Homo sapien
tcaattcatgttctttccttccatt

SEQ ID NO: 192536 - DNA, 25 bp, Homo sapien
attcatgttctttccttccatttca

SEQ ID NO: 192537 - DNA, 25 bp, Homo sapien
tcatgttctttccttccatttcagc

SEQ ID NO: 192538 - DNA, 25 bp, Homo sapien
tgaacaggttgaaggttgcattttc

SEQ ID NO: 192539 - DNA, 25 bp, Homo sapien
gaaaagagtgagaatacttacacca

SEQ ID NO: 192540 - DNA, 25 bp, Homo sapien
tattaatcaagctgtggacttgtgc

SEQ ID NO: 192541 - DNA, 25 bp, Homo sapien
ggcagatgtggatattgactaaaac

SEQ ID NO: 192542 - DNA, 25 bp, Homo sapien
tctatgatgagaacgctaacacagc

SEQ ID NO: 192543 - DNA, 25 bp, Homo sapien
cattgagggtgttaaaagctggaat

SEQ ID NO: 192544 - DNA, 25 bp, Homo sapien
cttcattgagggtgttaaaagctgg

SEQ ID NO: 192545 - DNA, 25 bp, Homo sapien
tgagggtgttaaaagctggaatgac

SEQ ID NO: 192546 - DNA, 25 bp, Homo sapien
tcattgagggtgttaaaagctggaa

SEQ ID NO: 192547 - DNA, 25 bp, Homo sapien
caggtcagagaaagtgtagcaaatg

SEQ ID NO: 192548 - DNA, 25 bp, Homo sapien
tgtagatttttgaaggtttgttcac

SEQ ID NO: 192549 - DNA, 25 bp, Homo sapien
tatatgtagatttttgaaggtttgt

SEQ ID NO: 192550 - DNA, 25 bp, Homo sapien
tatgtagatttttgaaggtttgttc

SEQ ID NO: 192551 - DNA, 25 bp, Homo sapien
ttatatatgtagatttttgaaggtt

SEQ ID NO: 192552 - DNA, 25 bp, Homo sapien
acacaactgaaggaccattccttga

SEQ ID NO: 192553 - DNA, 25 bp, Homo sapien
tgtacacaactgaaggaccattcct

SEQ ID NO: 192554 - DNA, 25 bp, Homo sapien
tatcagtgaagcccctgtcatcctc

SEQ ID NO: 192555 - DNA, 25 bp, Homo sapien
ctgaggtagtatgaaaatctcttgg

SEQ ID NO: 192556 - DNA, 25 bp, Homo sapien
gtggctactagtagcacaaaaaatg

SEQ ID NO: 192557 - DNA, 25 bp, Homo sapien
tctgtggctactagtagcacaaaaa

SEQ ID NO: 192558 - DNA, 25 bp, Homo sapien
aaatatctgtggctactagtagcac

SEQ ID NO: 192559 - DNA, 25 bp, Homo sapien
tcccaaatatctgtggctactagta

SEQ ID NO: 192560 - DNA, 25 bp, Homo sapien
ccacattccttatctgctatggttg

SEQ ID NO: 192561 - DNA, 25 bp, Homo sapien
cattccttatctgctatggttgctc

SEQ ID NO: 192562 - DNA, 25 bp, Homo sapien
tccttatctgctatggttgctctta

SEQ ID NO: 192563 - DNA, 25 bp, Homo sapien
ttatctgctatggttgctcttaaca

SEQ ID NO: 192564 - DNA, 25 bp, Homo sapien
tccatgtcccggattggatgaaaaa

SEQ ID NO: 192565 - DNA, 25 bp, Homo sapien
tggaatccatgtcccggattggatg

SEQ ID NO: 192566 - DNA, 25 bp, Homo sapien
cattcttggaatccatgtcccggat

SEQ ID NO: 192567 - DNA, 25 bp, Homo sapien
catgtcccggattggatgaaaaatc

SEQ ID NO: 192568 - DNA, 25 bp, Homo sapien
gctctagatatttcatccaagaaca

SEQ ID NO: 192569 - DNA, 25 bp, Homo sapien
ctctagatatttcatccaagaacat

SEQ ID NO: 192570 - DNA, 25 bp, Homo sapien
ggctctagatatttcatccaagaac

SEQ ID NO: 192571 - DNA, 25 bp, Homo sapien
acttccaattctaccacaagcagaa

SEQ ID NO: 192572 - DNA, 25 bp, Homo sapien
tagattactgcatgaacttccaatt

SEQ ID NO: 192573 - DNA, 25 bp, Homo sapien
caattctaccacaagcagaagtttc

SEQ ID NO: 192574 - DNA, 25 bp, Homo sapien
ccttgcctgcctgtagtttagatta

SEQ ID NO: 192575 - DNA, 25 bp, Homo sapien
taagtgttcctttgctcggaaacag

SEQ ID NO: 192576 - DNA, 25 bp, Homo sapien
tcagctcaagggacgcagatgcaga

SEQ ID NO: 192577 - DNA, 25 bp, Homo sapien
caaagtggtactgggtttagcagca

SEQ ID NO: 192578 - DNA, 25 bp, Homo sapien
aatggtcgtggagtttataggcacc

SEQ ID NO: 192579 - DNA, 25 bp, Homo sapien
ttacatgctgactctaaatcttgga

SEQ ID NO: 192580 - DNA, 25 bp, Homo sapien
tacatgctgactctaaatcttggat

SEQ ID NO: 192581 - DNA, 25 bp, Homo sapien
caatataataatccgataattctat

SEQ ID NO: 192582 - DNA, 25 bp, Homo sapien
atataataatccgataattctatca

SEQ ID NO: 192583 - DNA, 25 bp, Homo sapien
tataataatccgataattctatcat

SEQ ID NO: 192584 - DNA, 25 bp, Homo sapien
aatataataatccgataattctatc

SEQ ID NO: 192585 - DNA, 25 bp, Homo sapien
aagcctttctgtgctctgaattaat

SEQ ID NO: 192586 - DNA, 25 bp, Homo sapien
tcattctcgaagcctttctgtgctc

SEQ ID NO: 192587 - DNA, 25 bp, Homo sapien
cgaagcctttctgtgctctgaatta

SEQ ID NO: 192588 - DNA, 25 bp, Homo sapien
gcctttctgtgctctgaattaattt

SEQ ID NO: 192589 - DNA, 25 bp, Homo sapien
aagctgctgcaaaaggctccaggtt

SEQ ID NO: 192590 - DNA, 25 bp, Homo sapien
ctagcagcatacagaaagctgctgc

SEQ ID NO: 192591 - DNA, 25 bp, Homo sapien
ttaatattctagcagcatacagaaa

SEQ ID NO: 192592 - DNA, 25 bp, Homo sapien
agctgctgcaaaaggctccaggttt

SEQ ID NO: 192593 - DNA, 25 bp, Homo sapien
ccagtggagagtgttgatagtcaaa

SEQ ID NO: 192594 - DNA, 25 bp, Homo sapien
tgatacagatactatgaaccagaga

SEQ ID NO: 192595 - DNA, 25 bp, Homo sapien
gaatctctcagtcctctagtttcag

SEQ ID NO: 192596 - DNA, 25 bp, Homo sapien
gaaccagagaactaaagagactgaa

SEQ ID NO: 192597 - DNA, 25 bp, Homo sapien
ttcttcctatgcctttcaggctatc

SEQ ID NO: 192598 - DNA, 25 bp, Homo sapien
tcaggctatccgataggacttcaca

SEQ ID NO: 192599 - DNA, 25 bp, Homo sapien
tgcctttcaggctatccgataggac

SEQ ID NO: 192600 - DNA, 25 bp, Homo sapien
tccgataggacttcacaattgtgcc

SEQ ID NO: 192601 - DNA, 25 bp, Homo sapien
taatatttatggttgggagagagac

SEQ ID NO: 192602 - DNA, 25 bp, Homo sapien
taaaataatatttatggttgggaga

SEQ ID NO: 192603 - DNA, 25 bp, Homo sapien
gaccttcaggactaaagcaataatt

SEQ ID NO: 192604 - DNA, 25 bp, Homo sapien
gagagaccttcaggactaaagcaat

SEQ ID NO: 192605 - DNA, 25 bp, Homo sapien
tatagcgttcaagtcttacaaaacc

SEQ ID NO: 192606 - DNA, 25 bp, Homo sapien
cataccactgagatgtggcagacac

SEQ ID NO: 192607 - DNA, 25 bp, Homo sapien
gcggtggctattgtaatctgcatac

SEQ ID NO: 192608 - DNA, 25 bp, Homo sapien
gcttatgatcctaaccactattctg

SEQ ID NO: 192609 - DNA, 25 bp, Homo sapien
cattacactgttttgcttggccata

SEQ ID NO: 192610 - DNA, 25 bp, Homo sapien
taaagtgatgatcctgcaagtaagt

SEQ ID NO: 192611 - DNA, 25 bp, Homo sapien
aacgctgaggtgatgaatgtgttca

SEQ ID NO: 192612 - DNA, 25 bp, Homo sapien
cttggccataaatagggtgtataca

SEQ ID NO: 192613 - DNA, 25 bp, Homo sapien
agttatttacttaagacaactcagg

SEQ ID NO: 192614 - DNA, 25 bp, Homo sapien
tccatttttagtcttgcaaaaagct

SEQ ID NO: 192615 - DNA, 25 bp, Homo sapien
cttaagcaatttacctcagatctcc

SEQ ID NO: 192616 - DNA, 25 bp, Homo sapien
tacttaagacaactcaggtgaaagg

SEQ ID NO: 192617 - DNA, 25 bp, Homo sapien
ttactgaatacagtatcctttcccc

SEQ ID NO: 192618 - DNA, 25 bp, Homo sapien
tctacatgtggcttaccactttttc

SEQ ID NO: 192619 - DNA, 25 bp, Homo sapien
gaattctttgcgtaagccaacattt

SEQ ID NO: 192620 - DNA, 25 bp, Homo sapien
ttatttggtgtgcaaaatcttttca

SEQ ID NO: 192621 - DNA, 25 bp, Homo sapien
tactgcatgttctcatttataagtg

SEQ ID NO: 192622 - DNA, 25 bp, Homo sapien
gtaaactaatgcaagaacagaaaac

SEQ ID NO: 192623 - DNA, 25 bp, Homo sapien
gggagctaaatgatgagaacacatg

SEQ ID NO: 192624 - DNA, 25 bp, Homo sapien
caaatactgcatgttctcatttata

SEQ ID NO: 192625 - DNA, 25 bp, Homo sapien
tgttgcctttcaatctgagctttca

SEQ ID NO: 192626 - DNA, 25 bp, Homo sapien
ccatggcgtagatgcattgcactaa

SEQ ID NO: 192627 - DNA, 25 bp, Homo sapien
cacttcttagtgtataccatggcgt

SEQ ID NO: 192628 - DNA, 25 bp, Homo sapien
gatgcattgcactaaggcaaaataa

SEQ ID NO: 192629 - DNA, 25 bp, Homo sapien
tcccgcagccccagtgaacgcgcat

SEQ ID NO: 192630 - DNA, 25 bp, Homo sapien
ccctgacttggcattttcgcctgtt

SEQ ID NO: 192631 - DNA, 25 bp, Homo sapien
atttattcccgccatcccgacagcc

SEQ ID NO: 192632 - DNA, 25 bp, Homo sapien
gactcagcatttccgggttcacctg

SEQ ID NO: 192633 - DNA, 25 bp, Homo sapien
gattgcattcagttacaggaccagg

SEQ ID NO: 192634 - DNA, 25 bp, Homo sapien
cagtcttctctctaaacggctgtga

SEQ ID NO: 192635 - DNA, 25 bp, Homo sapien
gttttctaatttggcgctggaagcc

SEQ ID NO: 192636 - DNA, 25 bp, Homo sapien
tgagagtgtctcattactgccgact

SEQ ID NO: 192637 - DNA, 25 bp, Homo sapien
aataactcaatagtgatttctcacc

SEQ ID NO: 192638 - DNA, 25 bp, Homo sapien
ccagtcttgaactgtcagataactt

SEQ ID NO: 192639 - DNA, 25 bp, Homo sapien
cagaaactcaggtaatcttttgata

SEQ ID NO: 192640 - DNA, 25 bp, Homo sapien
gatgtgcaaactaattgttaacgcc

SEQ ID NO: 192641 - DNA, 25 bp, Homo sapien
gctaggtcagtgtgtcccctcccta

SEQ ID NO: 192642 - DNA, 25 bp, Homo sapien
cttacagctaggtcagtgtgtcccc

SEQ ID NO: 192643 - DNA, 25 bp, Homo sapien
ccttgacttcttacagctaggtcag

SEQ ID NO: 192644 - DNA, 25 bp, Homo sapien
tgtcccaacccttgacttcttacag

SEQ ID NO: 192645 - DNA, 25 bp, Homo sapien
tacttggaagtgctcgctgggatct

SEQ ID NO: 192646 - DNA, 25 bp, Homo sapien
gaagtcccagaagcgatcaagttta

SEQ ID NO: 192647 - DNA, 25 bp, Homo sapien
ccacttcgagggacagaaagctaca

SEQ ID NO: 192648 - DNA, 25 bp, Homo sapien
gaaaacaagttattcagcccagcga

SEQ ID NO: 192649 - DNA, 25 bp, Homo sapien
cgcgggctgagctcacggccgcgcg

SEQ ID NO: 192650 - DNA, 25 bp, Homo sapien
gggctgagctcacggccgcgcgccc

SEQ ID NO: 192651 - DNA, 25 bp, Homo sapien
cagcgcgggctgagctcacggccgc

SEQ ID NO: 192652 - DNA, 25 bp, Homo sapien
agcgcgggctgagctcacggccgcg

SEQ ID NO: 192653 - DNA, 25 bp, Homo sapien
aactcctcttcgagtctgggctcgg

SEQ ID NO: 192654 - DNA, 25 bp, Homo sapien
tttgacactttctccgggcagggcg

SEQ ID NO: 192655 - DNA, 25 bp, Homo sapien
catttgcagacttctagctggccga

SEQ ID NO: 192656 - DNA, 25 bp, Homo sapien
caaggccatgtatgcagcgggcttt

SEQ ID NO: 192657 - DNA, 25 bp, Homo sapien
ggtcaatccaagtttgatcacagga

SEQ ID NO: 192658 - DNA, 25 bp, Homo sapien
gatcacaggattaaacgtatttgct

SEQ ID NO: 192659 - DNA, 25 bp, Homo sapien
ttcaagatgcaacaactggtcaatc

SEQ ID NO: 192660 - DNA, 25 bp, Homo sapien
tatgaatcttgacactttttgaaca

SEQ ID NO: 192661 - DNA, 25 bp, Homo sapien
ttgactaagtatcctggtagaatga

SEQ ID NO: 192662 - DNA, 25 bp, Homo sapien
gactaagtatcctggtagaatgagt

SEQ ID NO: 192663 - DNA, 25 bp, Homo sapien
tgactaagtatcctggtagaatgag

SEQ ID NO: 192664 - DNA, 25 bp, Homo sapien
gacaatgggctgattcatggaatac

SEQ ID NO: 192665 - DNA, 25 bp, Homo sapien
ttatgggtaagtgccagatgtggcc

SEQ ID NO: 192666 - DNA, 25 bp, Homo sapien
gaatcaaatgggtagccaccaagca

SEQ ID NO: 192667 - DNA, 25 bp, Homo sapien
cacccagaagtgtgcctaggcttga

SEQ ID NO: 192668 - DNA, 25 bp, Homo sapien
cagttgtgacaggaagatacgttgg

SEQ ID NO: 192669 - DNA, 25 bp, Homo sapien
ctctgcagttgtgacaggaagatac

SEQ ID NO: 192670 - DNA, 25 bp, Homo sapien
tgacaggaagatacgttggagcgac

SEQ ID NO: 192671 - DNA, 25 bp, Homo sapien
aagatacgttggagcgactatgtga

SEQ ID NO: 192672 - DNA, 25 bp, Homo sapien
gcaacatcagcaattcccgtggatg

SEQ ID NO: 192673 - DNA, 25 bp, Homo sapien
ggtttggggcaacatcagcaattcc

SEQ ID NO: 192674 - DNA, 25 bp, Homo sapien
gagccaaactgggtttggggcaaca

SEQ ID NO: 192675 - DNA, 25 bp, Homo sapien
caaactgggtttggggcaacatcag

SEQ ID NO: 192676 - DNA, 25 bp, Homo sapien
ctgccagcaaatagtggcatagacc

SEQ ID NO: 192677 - DNA, 25 bp, Homo sapien
tagtggcatagacctgtgcaagaga

SEQ ID NO: 192678 - DNA, 25 bp, Homo sapien
gcaaatagtggcatagacctgtgca

SEQ ID NO: 192679 - DNA, 25 bp, Homo sapien
tggcatagacctgtgcaagagacat

SEQ ID NO: 192680 - DNA, 25 bp, Homo sapien
aggcagagtgccgactccttcacag

SEQ ID NO: 192681 - DNA, 25 bp, Homo sapien
ttcacagccgtgaggaactcttcag

SEQ ID NO: 192682 - DNA, 25 bp, Homo sapien
ttgagaagatatgtagcagccgagc

SEQ ID NO: 192683 - DNA, 25 bp, Homo sapien
tcactctgtccgtcttctgcagcag

SEQ ID NO: 192684 - DNA, 25 bp, Homo sapien
gattccagcaaacaaccaacattgg

SEQ ID NO: 192685 - DNA, 25 bp, Homo sapien
tctggaaattggtgtggcctgaatg

SEQ ID NO: 192686 - DNA, 25 bp, Homo sapien
ggcctgaatgtgtcactaagtagtg

SEQ ID NO: 192687 - DNA, 25 bp, Homo sapien
gctatactgacgatgagagtgggct

SEQ ID NO: 192688 - DNA, 25 bp, Homo sapien
ccacgtgagtatccccgttttggtg

SEQ ID NO: 192689 - DNA, 25 bp, Homo sapien
tgggtttatgggcattctggtgttt

SEQ ID NO: 192690 - DNA, 25 bp, Homo sapien
tgtcttctgagtggattcctgagtc

SEQ ID NO: 192691 - DNA, 25 bp, Homo sapien
tctgagtggattcctgagtcttatt

SEQ ID NO: 192692 - DNA, 25 bp, Homo sapien
tgtttctgactctgtctttaagatg

SEQ ID NO: 192693 - DNA, 25 bp, Homo sapien
ttggatatatacactgtaaaactgc

SEQ ID NO: 192694 - DNA, 25 bp, Homo sapien
tcacaacttacattgcagacaggat

SEQ ID NO: 192695 - DNA, 25 bp, Homo sapien
gaacattatggagatgctattgcag

SEQ ID NO: 192696 - DNA, 25 bp, Homo sapien
caatcagatcggtgggtttatgaac

SEQ ID NO: 192697 - DNA, 25 bp, Homo sapien
tgctccaggtaagcggatgctgtct

SEQ ID NO: 192698 - DNA, 25 bp, Homo sapien
cctttccctgccagaagcctatggg

SEQ ID NO: 192699 - DNA, 25 bp, Homo sapien
gctctttattgttctaaggcctgga

SEQ ID NO: 192700 - DNA, 25 bp, Homo sapien
cttttctcacttccttgctggcttc

SEQ ID NO: 192701 - DNA, 25 bp, Homo sapien
ttctcacttccttgctggcttccct

SEQ ID NO: 192702 - DNA, 25 bp, Homo sapien
ttttctcacttccttgctggcttcc

SEQ ID NO: 192703 - DNA, 25 bp, Homo sapien
tcacttccttgctggcttccctcat

SEQ ID NO: 192704 - DNA, 25 bp, Homo sapien
gaccctctctttcagcgagctcagg

SEQ ID NO: 192705 - DNA, 25 bp, Homo sapien
caagatgactcggttagatgtgaca

SEQ ID NO: 192706 - DNA, 25 bp, Homo sapien
tggtggaaaccccttgcattgcaat

SEQ ID NO: 192707 - DNA, 25 bp, Homo sapien
gagctcaggtactagcaacctcagg

SEQ ID NO: 192708 - DNA, 25 bp, Homo sapien
acaacctaatttcatccatttcaaa

SEQ ID NO: 192709 - DNA, 25 bp, Homo sapien
catttcaaacttggtgactgttatg

SEQ ID NO: 192710 - DNA, 25 bp, Homo sapien
aaacttggtgactgttatgttcatg

SEQ ID NO: 192711 - DNA, 25 bp, Homo sapien
catccatttcaaacttggtgactgt

SEQ ID NO: 192712 - DNA, 25 bp, Homo sapien
gaaaactataatcttccagatattt

SEQ ID NO: 192713 - DNA, 25 bp, Homo sapien
atcttatctttcatagagccatcag

SEQ ID NO: 192714 - DNA, 25 bp, Homo sapien
gactcatcttatctttcatagagcc

SEQ ID NO: 192715 - DNA, 25 bp, Homo sapien
tcatcttatctttcatagagccatc

SEQ ID NO: 192716 - DNA, 25 bp, Homo sapien
tctgtttcttcgatgaattattttc

SEQ ID NO: 192717 - DNA, 25 bp, Homo sapien
ctgatctctttttccctagcccgaa

SEQ ID NO: 192718 - DNA, 25 bp, Homo sapien
tttccctagcccgaatgcacttaca

SEQ ID NO: 192719 - DNA, 25 bp, Homo sapien
tattttctgccaggttcccctgatc

SEQ ID NO: 192720 - DNA, 25 bp, Homo sapien
ctatggtaggatatttgagttccag

SEQ ID NO: 192721 - DNA, 25 bp, Homo sapien
ctacttccatcctctatggtaggat

SEQ ID NO: 192722 - DNA, 25 bp, Homo sapien
tccatcctctatggtaggatatttg

SEQ ID NO: 192723 - DNA, 25 bp, Homo sapien
cctctatggtaggatatttgagttc

SEQ ID NO: 192724 - DNA, 25 bp, Homo sapien
tgtagctttacaattgagggttaga

SEQ ID NO: 192725 - DNA, 25 bp, Homo sapien
tagctttacaattgagggttagaaa

SEQ ID NO: 192726 - DNA, 25 bp, Homo sapien
ataggatgtagctttacaattgagg

SEQ ID NO: 192727 - DNA, 25 bp, Homo sapien
gatgtagctttacaattgagggtta

SEQ ID NO: 192728 - DNA, 25 bp, Homo sapien
gtttttggagatgcacaaggaagat

SEQ ID NO: 192729 - DNA, 25 bp, Homo sapien
ccgggacatctgtgggtcttaaatg

SEQ ID NO: 192730 - DNA, 25 bp, Homo sapien
agatctgtctagacacaatttgcca

SEQ ID NO: 192731 - DNA, 25 bp, Homo sapien
aattctcatgataccgttgtccggg

SEQ ID NO: 192732 - DNA, 25 bp, Homo sapien
tgaggtccctgacccacattcgcat

SEQ ID NO: 192733 - DNA, 25 bp, Homo sapien
tttgaatttgtgttctgaggtccct

SEQ ID NO: 192734 - DNA, 25 bp, Homo sapien
ttttgaatttgtgttctgaggtccc

SEQ ID NO: 192735 - DNA, 25 bp, Homo sapien
gttctgaggtccctgacccacattc

SEQ ID NO: 192736 - DNA, 25 bp, Homo sapien
aaagttctttcactgagtactggtg

SEQ ID NO: 192737 - DNA, 25 bp, Homo sapien
gaccgtctgagctgtgtttaaagga

SEQ ID NO: 192738 - DNA, 25 bp, Homo sapien
caggtctgaaggtgagaccgtctga

SEQ ID NO: 192739 - DNA, 25 bp, Homo sapien
gatgagaaatggctccatattgctg

SEQ ID NO: 192740 - DNA, 25 bp, Homo sapien
gaaaaatttaggctccacactgaac

SEQ ID NO: 192741 - DNA, 25 bp, Homo sapien
gatgaaagaataaaatgccgtagag

SEQ ID NO: 192742 - DNA, 25 bp, Homo sapien
tagagattgagatgcacagctggat

SEQ ID NO: 192743 - DNA, 25 bp, Homo sapien
ggttgaaatgtgttctctggacgga

SEQ ID NO: 192744 - DNA, 25 bp, Homo sapien
gacatcccctcttattgttgtaaaa

SEQ ID NO: 192745 - DNA, 25 bp, Homo sapien
ctattctccactgttatacacagaa

SEQ ID NO: 192746 - DNA, 25 bp, Homo sapien
tgtaaaaaatgtgaacgtcctctga

SEQ ID NO: 192747 - DNA, 25 bp, Homo sapien
ctctgagtgacagtgccgggaaact

SEQ ID NO: 192748 - DNA, 25 bp, Homo sapien
ttcccaggatatctgttgtttatac

SEQ ID NO: 192749 - DNA, 25 bp, Homo sapien
ctagcaaatcgtttcagttgaacag

SEQ ID NO: 192750 - DNA, 25 bp, Homo sapien
atactgggggtgtgcttttcccagg

SEQ ID NO: 192751 - DNA, 25 bp, Homo sapien
tagcaaatcgtttcagttgaacagg

SEQ ID NO: 192752 - DNA, 25 bp, Homo sapien
atctttaacatgcaaggacattgca

SEQ ID NO: 192753 - DNA, 25 bp, Homo sapien
ctttaacatgcaaggacattgcaat

SEQ ID NO: 192754 - DNA, 25 bp, Homo sapien
tctttaacatgcaaggacattgcaa

SEQ ID NO: 192755 - DNA, 25 bp, Homo sapien
gaaaaaaatctaggatggggattga

SEQ ID NO: 192756 - DNA, 25 bp, Homo sapien
agaaaaaaatctaggatggggattg

SEQ ID NO: 192757 - DNA, 25 bp, Homo sapien
cagaaaaaaatctaggatggggatt

SEQ ID NO: 192758 - DNA, 25 bp, Homo sapien
gggcctcttcatgtgtactggactt

SEQ ID NO: 192759 - DNA, 25 bp, Homo sapien
ctcaaagcatggctttttactcttt

SEQ ID NO: 192760 - DNA, 25 bp, Homo sapien
ttccaagatggcttcttcacacacg

SEQ ID NO: 192761 - DNA, 25 bp, Homo sapien
cacacgcgtatggagacttgatgat

SEQ ID NO: 192762 - DNA, 25 bp, Homo sapien
tgatctcctcggttggagaattcat

SEQ ID NO: 192763 - DNA, 25 bp, Homo sapien
cttgctgatctcctcggttggagaa

SEQ ID NO: 192764 - DNA, 25 bp, Homo sapien
ttgctgatctcctcggttggagaat

SEQ ID NO: 192765 - DNA, 25 bp, Homo sapien
ccaatgcagaatccttggtaataca

SEQ ID NO: 192766 - DNA, 25 bp, Homo sapien
cccaatgcagaatccttggtaatac

SEQ ID NO: 192767 - DNA, 25 bp, Homo sapien
caatgcagaatccttggtaatacat

SEQ ID NO: 192768 - DNA, 25 bp, Homo sapien
ctttttaatccgtgaaaatggactg

SEQ ID NO: 192769 - DNA, 25 bp, Homo sapien
gcgttagcttgtgaatgggatcgca

SEQ ID NO: 192770 - DNA, 25 bp, Homo sapien
acagctgtaagagcttttgggtaga

SEQ ID NO: 192771 - DNA, 25 bp, Homo sapien
ttgcaaaagttgtttaacagctgta

SEQ ID NO: 192772 - DNA, 25 bp, Homo sapien
catctatgttgtttttatgcctcat

SEQ ID NO: 192773 - DNA, 25 bp, Homo sapien
taacatcatctatgttgtttttatg

SEQ ID NO: 192774 - DNA, 25 bp, Homo sapien
atcatctatgttgtttttatgcctc

SEQ ID NO: 192775 - DNA, 25 bp, Homo sapien
atgggataacatcatctatgttgtt

SEQ ID NO: 192776 - DNA, 25 bp, Homo sapien
caaagtgaaattgaaaatacgacta

SEQ ID NO: 192777 - DNA, 25 bp, Homo sapien
tgacggtatgttttcctggtggaca

SEQ ID NO: 192778 - DNA, 25 bp, Homo sapien
gatgctacatagttactgtagttga

SEQ ID NO: 192779 - DNA, 25 bp, Homo sapien
tacgactagttgaagatttctcctg

SEQ ID NO: 192780 - DNA, 25 bp, Homo sapien
tacagaacatcaatggcaggcacaa

SEQ ID NO: 192781 - DNA, 25 bp, Homo sapien
gatgggaggtactagaacaagcaga

SEQ ID NO: 192782 - DNA, 25 bp, Homo sapien
gcacaagtaccagctgtaagggaga

SEQ ID NO: 192783 - DNA, 25 bp, Homo sapien
cacagagtgcacagtagtttgagct

SEQ ID NO: 192784 - DNA, 25 bp, Homo sapien
tcatttgtgaacatcaggctcctct

SEQ ID NO: 192785 - DNA, 25 bp, Homo sapien
catttgtgaacatcaggctcctctg

SEQ ID NO: 192786 - DNA, 25 bp, Homo sapien
aacacagaaatagcaaggttagtca

SEQ ID NO: 192787 - DNA, 25 bp, Homo sapien
acacagaaatagcaaggttagtcat

SEQ ID NO: 192788 - DNA, 25 bp, Homo sapien
aaacacagaaatagcaaggttagtc

SEQ ID NO: 192789 - DNA, 25 bp, Homo sapien
aagcctccttcagctatctttttag

SEQ ID NO: 192790 - DNA, 25 bp, Homo sapien
tgatgttccaaaactccttattttg

SEQ ID NO: 192791 - DNA, 25 bp, Homo sapien
ccttgatgttccaaaactccttatt

SEQ ID NO: 192792 - DNA, 25 bp, Homo sapien
gcctccttcagctatctttttaggg

SEQ ID NO: 192793 - DNA, 25 bp, Homo sapien
cttcttgaccttcccatattaaatt

SEQ ID NO: 192794 - DNA, 25 bp, Homo sapien
tcttgaccttcccatattaaattta

SEQ ID NO: 192795 - DNA, 25 bp, Homo sapien
aaatatggtccagaattcaccccct

SEQ ID NO: 192796 - DNA, 25 bp, Homo sapien
gaagaaatgtatgaggaccttgtaa

SEQ ID NO: 192797 - DNA, 25 bp, Homo sapien
ttcacccccttggtgcatacatttg

SEQ ID NO: 192798 - DNA, 25 bp, Homo sapien
tggtccagaattcacccccttggtg

SEQ ID NO: 192799 - DNA, 25 bp, Homo sapien
tattttccagtatactgcactaatg

SEQ ID NO: 192800 - DNA, 25 bp, Homo sapien
catattttccagtatactgcactaa

SEQ ID NO: 192801 - DNA, 25 bp, Homo sapien
tccacatattttccagtatactgca

SEQ ID NO: 192802 - DNA, 25 bp, Homo sapien
ttccagtatactgcactaatgtcat

SEQ ID NO: 192803 - DNA, 25 bp, Homo sapien
ctgtgcaattaaagcattggataat

SEQ ID NO: 192804 - DNA, 25 bp, Homo sapien
tgcaattaaagcattggataatggt

SEQ ID NO: 192805 - DNA, 25 bp, Homo sapien
caattaaagcattggataatggtga

SEQ ID NO: 192806 - DNA, 25 bp, Homo sapien
ctggacactttaattgctgtgcaat

SEQ ID NO: 192807 - DNA, 25 bp, Homo sapien
acttctgctgtataccgctctctct

SEQ ID NO: 192808 - DNA, 25 bp, Homo sapien
ggaaaattcttctacctcattcata

SEQ ID NO: 192809 - DNA, 25 bp, Homo sapien
tcctactgccattataagacttttc

SEQ ID NO: 192810 - DNA, 25 bp, Homo sapien
cttttcggtgtcctactgccattat

SEQ ID NO: 192811 - DNA, 25 bp, Homo sapien
tggagaaataggcagaaacgttcat

SEQ ID NO: 192812 - DNA, 25 bp, Homo sapien
tcatcatgaggatggactgagaagg

SEQ ID NO: 192813 - DNA, 25 bp, Homo sapien
ggctaaagacacttgtggagccatc

SEQ ID NO: 192814 - DNA, 25 bp, Homo sapien
gagtaagcgggagcccttgatatgc

SEQ ID NO: 192815 - DNA, 25 bp, Homo sapien
ctttgttagcatgctcatttatggc

SEQ ID NO: 192816 - DNA, 25 bp, Homo sapien
aattccaagatctttgttagcatgc

SEQ ID NO: 192817 - DNA, 25 bp, Homo sapien
cattctaacgtcaatgaaaagtcat

SEQ ID NO: 192818 - DNA, 25 bp, Homo sapien
gaaaagtcattggtggatttgaggc

SEQ ID NO: 192819 - DNA, 25 bp, Homo sapien
tcaactgcacagaggcagtttcttt

SEQ ID NO: 192820 - DNA, 25 bp, Homo sapien
gaacctaaggttcaagatcacaaag

SEQ ID NO: 192821 - DNA, 25 bp, Homo sapien
atgaacctaaggttcaagatcacaa

SEQ ID NO: 192822 - DNA, 25 bp, Homo sapien
aacctaaggttcaagatcacaaagt

SEQ ID NO: 192823 - DNA, 25 bp, Homo sapien
tgaacctaaggttcaagatcacaaa

SEQ ID NO: 192824 - DNA, 25 bp, Homo sapien
ccgttacagctttagcttttcccag

SEQ ID NO: 192825 - DNA, 25 bp, Homo sapien
gttacagctttagcttttcccagca

SEQ ID NO: 192826 - DNA, 25 bp, Homo sapien
cagctttagcttttcccagcagcat

SEQ ID NO: 192827 - DNA, 25 bp, Homo sapien
tacagctttagcttttcccagcagc

SEQ ID NO: 192828 - DNA, 25 bp, Homo sapien
tatgccaggatgtaggatgtaacag

SEQ ID NO: 192829 - DNA, 25 bp, Homo sapien
tgccaggatgtaggatgtaacagtg

SEQ ID NO: 192830 - DNA, 25 bp, Homo sapien
atgccaggatgtaggatgtaacagt

SEQ ID NO: 192831 - DNA, 25 bp, Homo sapien
ttatgccaggatgtaggatgtaaca

SEQ ID NO: 192832 - DNA, 25 bp, Homo sapien
ccttcctcaacggtgtttggttgat

SEQ ID NO: 192833 - DNA, 25 bp, Homo sapien
tcctcaacggtgtttggttgatact

SEQ ID NO: 192834 - DNA, 25 bp, Homo sapien
caatttctaccttcctcaacggtgt

SEQ ID NO: 192835 - DNA, 25 bp, Homo sapien
ctcaacggtgtttggttgatacttt

SEQ ID NO: 192836 - DNA, 25 bp, Homo sapien
tctggcaggtttctagttgactgta

SEQ ID NO: 192837 - DNA, 25 bp, Homo sapien
tagtagggatgacccacaaccagca

SEQ ID NO: 192838 - DNA, 25 bp, Homo sapien
ctagttgactgtattgactcatggt

SEQ ID NO: 192839 - DNA, 25 bp, Homo sapien
ttgactcatggttagtagggatgac

SEQ ID NO: 192840 - DNA, 25 bp, Homo sapien
tgttttgcttaacatgtaagcagct

SEQ ID NO: 192841 - DNA, 25 bp, Homo sapien
taagcagctcttactatagagttgg

SEQ ID NO: 192842 - DNA, 25 bp, Homo sapien
tttacaatcgtattagcttttacaa

SEQ ID NO: 192843 - DNA, 25 bp, Homo sapien
ggaggttctgtcttggttcccactg

SEQ ID NO: 192844 - DNA, 25 bp, Homo sapien
caggagtgcctgtgcaactctgccc

SEQ ID NO: 192845 - DNA, 25 bp, Homo sapien
gaaagctggattcctaaacttggca

SEQ ID NO: 192846 - DNA, 25 bp, Homo sapien
tcctcatgatcaataggcagacaag

SEQ ID NO: 192847 - DNA, 25 bp, Homo sapien
aacttggcagactaaacagatttcc

SEQ ID NO: 192848 - DNA, 25 bp, Homo sapien
cttcacctacataatattttgtcat

SEQ ID NO: 192849 - DNA, 25 bp, Homo sapien
tactttgtgggaaatatatgtgcca

SEQ ID NO: 192850 - DNA, 25 bp, Homo sapien
tattactttgggcttctagactcac

SEQ ID NO: 192851 - DNA, 25 bp, Homo sapien
tatacttctgtaaccttgctttctg

SEQ ID NO: 192852 - DNA, 25 bp, Homo sapien
tcttccatcattcataaaccagtgt

SEQ ID NO: 192853 - DNA, 25 bp, Homo sapien
tacaatgttaagacatacctctgtg

SEQ ID NO: 192854 - DNA, 25 bp, Homo sapien
gctagtaataatgccacatgaagaa

SEQ ID NO: 192855 - DNA, 25 bp, Homo sapien
taagtacagtatttcactaatgcca

SEQ ID NO: 192856 - DNA, 25 bp, Homo sapien
cttcatatgaggaactgtgattaca

SEQ ID NO: 192857 - DNA, 25 bp, Homo sapien
agaatcacagaattaactctgacag

SEQ ID NO: 192858 - DNA, 25 bp, Homo sapien
tggggctagaagtcattacatgtta

SEQ ID NO: 192859 - DNA, 25 bp, Homo sapien
gtttcaatgtgttctaaattgtacc

SEQ ID NO: 192860 - DNA, 25 bp, Homo sapien
tatttactgtttagctataagcacc

SEQ ID NO: 192861 - DNA, 25 bp, Homo sapien
acactaaagtggatgctataatgca

SEQ ID NO: 192862 - DNA, 25 bp, Homo sapien
ggcaaagccggagttgtataaatta

SEQ ID NO: 192863 - DNA, 25 bp, Homo sapien
tcatggcatcagattgaggttctaa

SEQ ID NO: 192864 - DNA, 25 bp, Homo sapien
gagggcctagatatggtaagaaacc

SEQ ID NO: 192865 - DNA, 25 bp, Homo sapien
atacagcccctatgaacagctgcca

SEQ ID NO: 192866 - DNA, 25 bp, Homo sapien
tatcagtgtatcctccaattggtga

SEQ ID NO: 192867 - DNA, 25 bp, Homo sapien
tgcccaatatcgagctatcagtgta

SEQ ID NO: 192868 - DNA, 25 bp, Homo sapien
caaatcaatactgcccaatatcgag

SEQ ID NO: 192869 - DNA, 25 bp, Homo sapien
tgaaacagggtctttctcacaagaa

SEQ ID NO: 192870 - DNA, 25 bp, Homo sapien
caccccatatccagtggtcagtctg

SEQ ID NO: 192871 - DNA, 25 bp, Homo sapien
catattaaaggggagctcacagtga

SEQ ID NO: 192872 - DNA, 25 bp, Homo sapien
tcacagtgaaacagggtctttctca

SEQ ID NO: 192873 - DNA, 25 bp, Homo sapien
ctacttgtgcgcatctttcatacgg

SEQ ID NO: 192874 - DNA, 25 bp, Homo sapien
catcaactgctgctaaattatgtga

SEQ ID NO: 192875 - DNA, 25 bp, Homo sapien
gaaaatggcatcaactgctgctaaa

SEQ ID NO: 192876 - DNA, 25 bp, Homo sapien
tctttcatacgggaaaagtcaacag

SEQ ID NO: 192877 - DNA, 25 bp, Homo sapien
tcattttcagaggctatgcatttac

SEQ ID NO: 192878 - DNA, 25 bp, Homo sapien
tttcagaggctatgcatttactcat

SEQ ID NO: 192879 - DNA, 25 bp, Homo sapien
cacagagctgtgttcattttcagag

SEQ ID NO: 192880 - DNA, 25 bp, Homo sapien
cattttcagaggctatgcatttact

SEQ ID NO: 192881 - DNA, 25 bp, Homo sapien
caggaaacactaccaattagtatac

SEQ ID NO: 192882 - DNA, 25 bp, Homo sapien
tcaggaaacactaccaattagtata

SEQ ID NO: 192883 - DNA, 25 bp, Homo sapien
ccatggatcaacatttttcctggtg

SEQ ID NO: 192884 - DNA, 25 bp, Homo sapien
catggatcaacatttttcctggtgc

SEQ ID NO: 192885 - DNA, 25 bp, Homo sapien
accatttgtgttgtcaatggcacag

SEQ ID NO: 192886 - DNA, 25 bp, Homo sapien
aagtcgttgaccatttgtgttgtca

SEQ ID NO: 192887 - DNA, 25 bp, Homo sapien
tgctaagtcgttgaccatttgtgtt

SEQ ID NO: 192888 - DNA, 25 bp, Homo sapien
ttgaccatttgtgttgtcaatggca

SEQ ID NO: 192889 - DNA, 25 bp, Homo sapien
gtttttcccctcaagatttcagaca

SEQ ID NO: 192890 - DNA, 25 bp, Homo sapien
tttttcccctcaagatttcagacat

SEQ ID NO: 192891 - DNA, 25 bp, Homo sapien
atcgtttttcccctcaagatttcag

SEQ ID NO: 192892 - DNA, 25 bp, Homo sapien
tcgtttttcccctcaagatttcaga

SEQ ID NO: 192893 - DNA, 25 bp, Homo sapien
cttgcaaaacgccaataatcaaact

SEQ ID NO: 192894 - DNA, 25 bp, Homo sapien
gcaaaacgccaataatcaaactgct

SEQ ID NO: 192895 - DNA, 25 bp, Homo sapien
caaaacgccaataatcaaactgctc

SEQ ID NO: 192896 - DNA, 25 bp, Homo sapien
tgcaaaacgccaataatcaaactgc

SEQ ID NO: 192897 - DNA, 25 bp, Homo sapien
aagagaagccttgtatgtgaatgaa

SEQ ID NO: 192898 - DNA, 25 bp, Homo sapien
tttagtaaactgaaggcagttggag

SEQ ID NO: 192899 - DNA, 25 bp, Homo sapien
ttgtgaaagtgtcagcaaatgatgc

SEQ ID NO: 192900 - DNA, 25 bp, Homo sapien
cagttggagaatattgaggcataca

SEQ ID NO: 192901 - DNA, 25 bp, Homo sapien
tttttggagatttcatactcacatc

SEQ ID NO: 192902 - DNA, 25 bp, Homo sapien
actgatttttggagatttcatactc

SEQ ID NO: 192903 - DNA, 25 bp, Homo sapien
gatttttggagatttcatactcaca

SEQ ID NO: 192904 - DNA, 25 bp, Homo sapien
ttacccatagatgaaactgattttt

SEQ ID NO: 192905 - DNA, 25 bp, Homo sapien
tcctactcttgatcctcatggcata

SEQ ID NO: 192906 - DNA, 25 bp, Homo sapien
taactccctcattgtattaaacttg

SEQ ID NO: 192907 - DNA, 25 bp, Homo sapien
taatgttcagactagttgtcttcct

SEQ ID NO: 192908 - DNA, 25 bp, Homo sapien
tctgcaaagattccctccactaaca

SEQ ID NO: 192909 - DNA, 25 bp, Homo sapien
tagatatatggttcagctgcatctc

SEQ ID NO: 192910 - DNA, 25 bp, Homo sapien
catagatatatggttcagctgcatc

SEQ ID NO: 192911 - DNA, 25 bp, Homo sapien
gtgttcatagatatatggttcagct

SEQ ID NO: 192912 - DNA, 25 bp, Homo sapien
ttcatagatatatggttcagctgca

SEQ ID NO: 192913 - DNA, 25 bp, Homo sapien
tctgagagatgtcataggtgtgctg

SEQ ID NO: 192914 - DNA, 25 bp, Homo sapien
tgtgctgctgttccatcctccttct

SEQ ID NO: 192915 - DNA, 25 bp, Homo sapien
cttaacataaaatctgttgggcaga

SEQ ID NO: 192916 - DNA, 25 bp, Homo sapien
tcagacttaacataaaatctgttgg

SEQ ID NO: 192917 - DNA, 25 bp, Homo sapien
gaatgagggtaacagcgactatggg

SEQ ID NO: 192918 - DNA, 25 bp, Homo sapien
ctatggctaacatggtatctatgcc

SEQ ID NO: 192919 - DNA, 25 bp, Homo sapien
gactccagtgccagcgagagagaat

SEQ ID NO: 192920 - DNA, 25 bp, Homo sapien
tatctatgcctagagactccagtgc

SEQ ID NO: 192921 - DNA, 25 bp, Homo sapien
cgttttcattttcatatcaatatct

SEQ ID NO: 192922 - DNA, 25 bp, Homo sapien
ctttctctctcacagtgagaaccct

SEQ ID NO: 192923 - DNA, 25 bp, Homo sapien
tctctctcacagtgagaaccctcat

SEQ ID NO: 192924 - DNA, 25 bp, Homo sapien
ttcattttcatatcaatatcttctt

SEQ ID NO: 192925 - DNA, 25 bp, Homo sapien
tctactagagcaactgcacatgagg

SEQ ID NO: 192926 - DNA, 25 bp, Homo sapien
agaaatggacatgtttgacaaggtt

SEQ ID NO: 192927 - DNA, 25 bp, Homo sapien
tagttttctgctccgtcacattttt

SEQ ID NO: 192928 - DNA, 25 bp, Homo sapien
atcaagaaatggagtcctcccaaag

SEQ ID NO: 192929 - DNA, 25 bp, Homo sapien
tgcagtggcctcattaaaagccttt

SEQ ID NO: 192930 - DNA, 25 bp, Homo sapien
ggatctcatggtaaaatatggaaaa

SEQ ID NO: 192931 - DNA, 25 bp, Homo sapien
atcaagttttgcagtggcctcatta

SEQ ID NO: 192932 - DNA, 25 bp, Homo sapien
gctgtctttgcataagtgttcatta

SEQ ID NO: 192933 - DNA, 25 bp, Homo sapien
gcattggctagtaaatgcttatcca

SEQ ID NO: 192934 - DNA, 25 bp, Homo sapien
ctgagagccagatcatgggagattg

SEQ ID NO: 192935 - DNA, 25 bp, Homo sapien
gccatatgcaactttagtaaagtac

SEQ ID NO: 192936 - DNA, 25 bp, Homo sapien
gtaaagtacaagaagtagtctctct

SEQ ID NO: 192937 - DNA, 25 bp, Homo sapien
ctggtgcagatggatctcagctcag

SEQ ID NO: 192938 - DNA, 25 bp, Homo sapien
gcagatggatctcagctcagacttc

SEQ ID NO: 192939 - DNA, 25 bp, Homo sapien
atctcagctcagacttcactttctg

SEQ ID NO: 192940 - DNA, 25 bp, Homo sapien
tctcagctcagacttcactttctgc

SEQ ID NO: 192941 - DNA, 25 bp, Homo sapien
ctgcaacttcttgtcagagttgtca

SEQ ID NO: 192942 - DNA, 25 bp, Homo sapien
gagatagtccttcatcagctgcaaa

SEQ ID NO: 192943 - DNA, 25 bp, Homo sapien
cagttttctgcttgagatagtcctt

SEQ ID NO: 192944 - DNA, 25 bp, Homo sapien
tgcaacttcttgtcagagttgtcag

SEQ ID NO: 192945 - DNA, 25 bp, Homo sapien
ttggaggtattggttttctgctcaa

SEQ ID NO: 192946 - DNA, 25 bp, Homo sapien
cattcagatgaccttccaggcagac

SEQ ID NO: 192947 - DNA, 25 bp, Homo sapien
ctgttggaggtattggttttctgct

SEQ ID NO: 192948 - DNA, 25 bp, Homo sapien
tgcttcattcagatgaccttccagg

SEQ ID NO: 192949 - DNA, 25 bp, Homo sapien
ctttgggcaactggacaccctgctt

SEQ ID NO: 192950 - DNA, 25 bp, Homo sapien
tgggcaactggacaccctgcttggc

SEQ ID NO: 192951 - DNA, 25 bp, Homo sapien
ccacggctttcctgaatgtggccat

SEQ ID NO: 192952 - DNA, 25 bp, Homo sapien
gcttggccacggctttcctgaatgt

SEQ ID NO: 192953 - DNA, 25 bp, Homo sapien
tctgaatcagccgtagatctactcc

SEQ ID NO: 192954 - DNA, 25 bp, Homo sapien
tcagcttagccttctgaatcagccg

SEQ ID NO: 192955 - DNA, 25 bp, Homo sapien
tctcagcctgcttggtcagcttagc

SEQ ID NO: 192956 - DNA, 25 bp, Homo sapien
actccatgacatgtggtgagctgtt

SEQ ID NO: 192957 - DNA, 25 bp, Homo sapien
tgcagaatttcacacggtatccagt

SEQ ID NO: 192958 - DNA, 25 bp, Homo sapien
tcttctgaacccttgtgtgcttgca

SEQ ID NO: 192959 - DNA, 25 bp, Homo sapien
ttgaaagagcaaagcgtcctagttg

SEQ ID NO: 192960 - DNA, 25 bp, Homo sapien
tgtgtgcttgcaccattgaaagagc

SEQ ID NO: 192961 - DNA, 25 bp, Homo sapien
ctggtgccctccaatgcagagttgt

SEQ ID NO: 192962 - DNA, 25 bp, Homo sapien
cagagttgtgaagacgtctgcgtta

SEQ ID NO: 192963 - DNA, 25 bp, Homo sapien
tggtgccctccaatgcagagttgtg

SEQ ID NO: 192964 - DNA, 25 bp, Homo sapien
acgtctgcgttagagtagggaagat

SEQ ID NO: 192965 - DNA, 25 bp, Homo sapien
tagtgttgatctggatgatactctc

SEQ ID NO: 192966 - DNA, 25 bp, Homo sapien
ttagtgttgatctggatgatactct

SEQ ID NO: 192967 - DNA, 25 bp, Homo sapien
gtgttgatctggatgatactctcca

SEQ ID NO: 192968 - DNA, 25 bp, Homo sapien
agtgttgatctggatgatactctcc

SEQ ID NO: 192969 - DNA, 25 bp, Homo sapien
agcttctaaagatgtaggcataatt

SEQ ID NO: 192970 - DNA, 25 bp, Homo sapien
tctaaagatgtaggcataattccac

SEQ ID NO: 192971 - DNA, 25 bp, Homo sapien
aaagatgtaggcataattccacttc

SEQ ID NO: 192972 - DNA, 25 bp, Homo sapien
atgtaggcataattccacttctctg

SEQ ID NO: 192973 - DNA, 25 bp, Homo sapien
atacattcttcataaccaagagcac

SEQ ID NO: 192974 - DNA, 25 bp, Homo sapien
cattcttcataaccaagagcaccac

SEQ ID NO: 192975 - DNA, 25 bp, Homo sapien
attcttcataaccaagagcaccacc

SEQ ID NO: 192976 - DNA, 25 bp, Homo sapien
tgttgtgctgaggaatattggtcat

SEQ ID NO: 192977 - DNA, 25 bp, Homo sapien
attgttgtgctgaggaatattggtc

SEQ ID NO: 192978 - DNA, 25 bp, Homo sapien
gatgtactattgttgtgctgaggaa

SEQ ID NO: 192979 - DNA, 25 bp, Homo sapien
aagcacaatgatgtactattgttgt

SEQ ID NO: 192980 - DNA, 25 bp, Homo sapien
tattgtcaacgaacaaagattgttt

SEQ ID NO: 192981 - DNA, 25 bp, Homo sapien
tcttttcctgtttagatgcctgtat

SEQ ID NO: 192982 - DNA, 25 bp, Homo sapien
ttgattttattatcagcctggatat

SEQ ID NO: 192983 - DNA, 25 bp, Homo sapien
ctttgtcagagtgtttatggttttc

SEQ ID NO: 192984 - DNA, 25 bp, Homo sapien
ggttcgtttgctgtaggttctctag

SEQ ID NO: 192985 - DNA, 25 bp, Homo sapien
tgccacgatctgaaagacactttgt

SEQ ID NO: 192986 - DNA, 25 bp, Homo sapien
taacactgccttaagtgcatcccag

SEQ ID NO: 192987 - DNA, 25 bp, Homo sapien
tggtgtctctttgatctcattagct

SEQ ID NO: 192988 - DNA, 25 bp, Homo sapien
ttatgtagaagaaatcttgatgtga

SEQ ID NO: 192989 - DNA, 25 bp, Homo sapien
atgtagaagaaatcttgatgtgatc

SEQ ID NO: 192990 - DNA, 25 bp, Homo sapien
tatgtagaagaaatcttgatgtgat

SEQ ID NO: 192991 - DNA, 25 bp, Homo sapien
taattggtgtcagatatgtactact

SEQ ID NO: 192992 - DNA, 25 bp, Homo sapien
gaactctgcattcaattgtttgagc

SEQ ID NO: 192993 - DNA, 25 bp, Homo sapien
tacttagaaggtccaaagtgtagta

SEQ ID NO: 192994 - DNA, 25 bp, Homo sapien
tgtctcctatagaaagctctctgct

SEQ ID NO: 192995 - DNA, 25 bp, Homo sapien
tggatcaaaccgaaagctgcccaaa

SEQ ID NO: 192996 - DNA, 25 bp, Homo sapien
gaaagctgcccaaaccatccatgtt

SEQ ID NO: 192997 - DNA, 25 bp, Homo sapien
gctgcccaaaccatccatgttaatt

SEQ ID NO: 192998 - DNA, 25 bp, Homo sapien
tcatgatggatatggatcaaaccga

SEQ ID NO: 192999 - DNA, 25 bp, Homo sapien
cttttcatgaatgcgagcttggctc

SEQ ID NO: 193000 - DNA, 25 bp, Homo sapien
tcccctagggtctgagcacaagctg

SEQ ID NO: 193001 - DNA, 25 bp, Homo sapien
cagaggcaatggggcacatccaaat

SEQ ID NO: 193002 - DNA, 25 bp, Homo sapien
ggcaatggggcacatccaaattcat

SEQ ID NO: 193003 - DNA, 25 bp, Homo sapien
caatggggcacatccaaattcatgt

SEQ ID NO: 193004 - DNA, 25 bp, Homo sapien
gggcacatccaaattcatgtagtgt

SEQ ID NO: 193005 - DNA, 25 bp, Homo sapien
ccttttggtttccagacacagttat

SEQ ID NO: 193006 - DNA, 25 bp, Homo sapien
ttttggtttccagacacagttattc

SEQ ID NO: 193007 - DNA, 25 bp, Homo sapien
agtttctagtaagtgattgggaatt

SEQ ID NO: 193008 - DNA, 25 bp, Homo sapien
cttttggtttccagacacagttatt

SEQ ID NO: 193009 - DNA, 25 bp, Homo sapien
actttaagagaaacatcaccagaat

SEQ ID NO: 193010 - DNA, 25 bp, Homo sapien
tgactttaagagaaacatcaccaga

SEQ ID NO: 193011 - DNA, 25 bp, Homo sapien
gggagtccatttaaatagtagaatc

SEQ ID NO: 193012 - DNA, 25 bp, Homo sapien
taagggagtccatttaaatagtaga

SEQ ID NO: 193013 - DNA, 25 bp, Homo sapien
ctcttgcaaccacttttattgtcat

SEQ ID NO: 193014 - DNA, 25 bp, Homo sapien
cctcttgcaaccacttttattgtca

SEQ ID NO: 193015 - DNA, 25 bp, Homo sapien
tcctcttgcaaccacttttattgtc

SEQ ID NO: 193016 - DNA, 25 bp, Homo sapien
ctcctcttgcaaccacttttattgt

SEQ ID NO: 193017 - DNA, 25 bp, Homo sapien
tcgtaatgcatttctaggtttgctg

SEQ ID NO: 193018 - DNA, 25 bp, Homo sapien
taattgttcatgagagtcagtgagt

SEQ ID NO: 193019 - DNA, 25 bp, Homo sapien
agtacatccaggataggaagagaca

SEQ ID NO: 193020 - DNA, 25 bp, Homo sapien
catagcattcgtaatgcatttctag

SEQ ID NO: 193021 - DNA, 25 bp, Homo sapien
agagggctgactccattctattttc

SEQ ID NO: 193022 - DNA, 25 bp, Homo sapien
ttctattttcctgtactgtggtgtc

SEQ ID NO: 193023 - DNA, 25 bp, Homo sapien
ctgtggtgtcacaagatgttttcat

SEQ ID NO: 193024 - DNA, 25 bp, Homo sapien
tttcatgatagcatagagggctgac

SEQ ID NO: 193025 - DNA, 25 bp, Homo sapien
ccaataacagcaaactacacaaaag

SEQ ID NO: 193026 - DNA, 25 bp, Homo sapien
agaagacatgaagaatactattaac

SEQ ID NO: 193027 - DNA, 25 bp, Homo sapien
taccaaaattgaacattatttggaa

SEQ ID NO: 193028 - DNA, 25 bp, Homo sapien
gttaacatttgtagaagtctctctc

SEQ ID NO: 193029 - DNA, 25 bp, Homo sapien
tctctgcaaggtaggaatagaagtt

SEQ ID NO: 193030 - DNA, 25 bp, Homo sapien
taacatacagaaagatctcttggga

SEQ ID NO: 193031 - DNA, 25 bp, Homo sapien
catgaggactaagatactagctttg

SEQ ID NO: 193032 - DNA, 25 bp, Homo sapien
aactgaggttgcagggtaaactgcc

SEQ ID NO: 193033 - DNA, 25 bp, Homo sapien
ccaaagctggagcccgggcgtagct

SEQ ID NO: 193034 - DNA, 25 bp, Homo sapien
gttgttcacttggagcaggacgtca

SEQ ID NO: 193035 - DNA, 25 bp, Homo sapien
caagggggctacctcaggcagtaaa

SEQ ID NO: 193036 - DNA, 25 bp, Homo sapien
tttggcacaggtagctgaggtttgt

SEQ ID NO: 193037 - DNA, 25 bp, Homo sapien
atgtccagggccagcttgatgttca

SEQ ID NO: 193038 - DNA, 25 bp, Homo sapien
ccagcaggctctcctcgccctccag

SEQ ID NO: 193039 - DNA, 25 bp, Homo sapien
tccagcaggctctcctcgccctcca

SEQ ID NO: 193040 - DNA, 25 bp, Homo sapien
gtggcgatctcgatgtccagggcca

SEQ ID NO: 193041 - DNA, 25 bp, Homo sapien
cagggctgaggtgcggccgttgtcc

SEQ ID NO: 193042 - DNA, 25 bp, Homo sapien
aaggcgcagtccgacgagattgcca

SEQ ID NO: 193043 - DNA, 25 bp, Homo sapien
acgagattgccaagcgcagcagggc

SEQ ID NO: 193044 - DNA, 25 bp, Homo sapien
gcatcattgcaaaggtcaaggcgca

SEQ ID NO: 193045 - DNA, 25 bp, Homo sapien
ctgggatacggttaattgccacagc

SEQ ID NO: 193046 - DNA, 25 bp, Homo sapien
gggatacggttaattgccacagcac

SEQ ID NO: 193047 - DNA, 25 bp, Homo sapien
ggatacggttaattgccacagcacc

SEQ ID NO: 193048 - DNA, 25 bp, Homo sapien
gatacggttaattgccacagcacca

SEQ ID NO: 193049 - DNA, 25 bp, Homo sapien
taacaacccaatttggtgcactgat

SEQ ID NO: 193050 - DNA, 25 bp, Homo sapien
gaagatcattattcagcataacaac

SEQ ID NO: 193051 - DNA, 25 bp, Homo sapien
agcataacaacccaatttggtgcac

SEQ ID NO: 193052 - DNA, 25 bp, Homo sapien
gtgcactgatacattgctcatgttc

SEQ ID NO: 193053 - DNA, 25 bp, Homo sapien
gggctttcgaggaccacttggtctc

SEQ ID NO: 193054 - DNA, 25 bp, Homo sapien
gctgggctttcgaggaccacttggt

SEQ ID NO: 193055 - DNA, 25 bp, Homo sapien
tttcgaggaccacttggtctcctcc

SEQ ID NO: 193056 - DNA, 25 bp, Homo sapien
actctgctgggctttcgaggaccac

SEQ ID NO: 193057 - DNA, 25 bp, Homo sapien
agtggtctgaactccctgctaggca

SEQ ID NO: 193058 - DNA, 25 bp, Homo sapien
taatattgggctgcgcagttcaacc

SEQ ID NO: 193059 - DNA, 25 bp, Homo sapien
aggtccccgcaatggcaggtacaag

SEQ ID NO: 193060 - DNA, 25 bp, Homo sapien
caagggataatcaatgggtggccac

SEQ ID NO: 193061 - DNA, 25 bp, Homo sapien
atggatcttccatagtgaaagaaca

SEQ ID NO: 193062 - DNA, 25 bp, Homo sapien
tattatgattaactgctctcgagtt

SEQ ID NO: 193063 - DNA, 25 bp, Homo sapien
tatgattaactgctctcgagttagc

SEQ ID NO: 193064 - DNA, 25 bp, Homo sapien
ttatgattaactgctctcgagttag

SEQ ID NO: 193065 - DNA, 25 bp, Homo sapien
tgattaactgctctcgagttagcat

SEQ ID NO: 193066 - DNA, 25 bp, Homo sapien
ctttagttgttttactttcagccag

SEQ ID NO: 193067 - DNA, 25 bp, Homo sapien
tttagcttggcacatctgaagtggg

SEQ ID NO: 193068 - DNA, 25 bp, Homo sapien
tctttccctagccaataatcctgaa

SEQ ID NO: 193069 - DNA, 25 bp, Homo sapien
atcctgaactcactttagttgtttt

SEQ ID NO: 193070 - DNA, 25 bp, Homo sapien
tctaaggacaatgcttccaccgttt

SEQ ID NO: 193071 - DNA, 25 bp, Homo sapien
ctaaggacaatgcttccaccgtttc

SEQ ID NO: 193072 - DNA, 25 bp, Homo sapien
atctaaggacaatgcttccaccgtt

SEQ ID NO: 193073 - DNA, 25 bp, Homo sapien
taaggacaatgcttccaccgtttct

SEQ ID NO: 193074 - DNA, 25 bp, Homo sapien
tctctcaactgactttctaaaaact

SEQ ID NO: 193075 - DNA, 25 bp, Homo sapien
tcaaactctctcaactgactttcta

SEQ ID NO: 193076 - DNA, 25 bp, Homo sapien
tctcctttcaaactctctcaactga

SEQ ID NO: 193077 - DNA, 25 bp, Homo sapien
ctctcaactgactttctaaaaactc

SEQ ID NO: 193078 - DNA, 25 bp, Homo sapien
tgcagtgctctctaccagatccaga

SEQ ID NO: 193079 - DNA, 25 bp, Homo sapien
gatggctatatgctcagaacttagg

SEQ ID NO: 193080 - DNA, 25 bp, Homo sapien
agtcacttggtagcattatccctag

SEQ ID NO: 193081 - DNA, 25 bp, Homo sapien
cctttgtccagaatgtagtcacttg

SEQ ID NO: 193082 - DNA, 25 bp, Homo sapien
ggtgctgcatattccaggttcctct

SEQ ID NO: 193083 - DNA, 25 bp, Homo sapien
gaggtgctgcatattccaggttcct

SEQ ID NO: 193084 - DNA, 25 bp, Homo sapien
gtttgaggtgctgcatattccaggt

SEQ ID NO: 193085 - DNA, 25 bp, Homo sapien
ttgaggtgctgcatattccaggttc

SEQ ID NO: 193086 - DNA, 25 bp, Homo sapien
ctctgatgttctaatttcattacat

SEQ ID NO: 193087 - DNA, 25 bp, Homo sapien
agctctgatgttctaatttcattac

SEQ ID NO: 193088 - DNA, 25 bp, Homo sapien
gctctgatgttctaatttcattaca

SEQ ID NO: 193089 - DNA, 25 bp, Homo sapien
tagctctgatgttctaatttcatta

SEQ ID NO: 193090 - DNA, 25 bp, Homo sapien
ctagcctgagtttgagtgggttgac

SEQ ID NO: 193091 - DNA, 25 bp, Homo sapien
ctaaactagcctgagtttgagtggg

SEQ ID NO: 193092 - DNA, 25 bp, Homo sapien
aactagcctgagtttgagtgggttg

SEQ ID NO: 193093 - DNA, 25 bp, Homo sapien
taaactagcctgagtttgagtgggt

SEQ ID NO: 193094 - DNA, 25 bp, Homo sapien
ttgagcatctgattggcgagtgaac

SEQ ID NO: 193095 - DNA, 25 bp, Homo sapien
gagcatctgattggcgagtgaaccc

SEQ ID NO: 193096 - DNA, 25 bp, Homo sapien
tgattggcgagtgaacccacatttg

SEQ ID NO: 193097 - DNA, 25 bp, Homo sapien
catctgattggcgagtgaacccaca

SEQ ID NO: 193098 - DNA, 25 bp, Homo sapien
ggaagctgctagttcatctgcaggc

SEQ ID NO: 193099 - DNA, 25 bp, Homo sapien
tcgggtaaatagtataaggcctctc

SEQ ID NO: 193100 - DNA, 25 bp, Homo sapien
tgacagacaaaataagggtgtcggg

SEQ ID NO: 193101 - DNA, 25 bp, Homo sapien
gtacattgccagacataagcctgag

SEQ ID NO: 193102 - DNA, 25 bp, Homo sapien
gacagcaagcaatagcagatttaca

SEQ ID NO: 193103 - DNA, 25 bp, Homo sapien
gcaatagcagatttacactcaaaaa

SEQ ID NO: 193104 - DNA, 25 bp, Homo sapien
ttctccaagacagcaagcaatagca

SEQ ID NO: 193105 - DNA, 25 bp, Homo sapien
aaggctgtgtaatttctccaagaca

SEQ ID NO: 193106 - DNA, 25 bp, Homo sapien
aaatatgctcatgctttgtcacaaa

SEQ ID NO: 193107 - DNA, 25 bp, Homo sapien
cctccaaaaggataatgatgacatc

SEQ ID NO: 193108 - DNA, 25 bp, Homo sapien
tgatgttcaaatcacactgtggcag

SEQ ID NO: 193109 - DNA, 25 bp, Homo sapien
gcttgtacccgatccatgatgttca

SEQ ID NO: 193110 - DNA, 25 bp, Homo sapien
gctgacccattttctaaagtcgtta

SEQ ID NO: 193111 - DNA, 25 bp, Homo sapien
gtcgttaggttcatgtaattcaaca

SEQ ID NO: 193112 - DNA, 25 bp, Homo sapien
tttatcaattagtgaagcagctgac

SEQ ID NO: 193113 - DNA, 25 bp, Homo sapien
gtttctgattctgccggtaatgttg

SEQ ID NO: 193114 - DNA, 25 bp, Homo sapien
tctacatctgagacagctggttcca

SEQ ID NO: 193115 - DNA, 25 bp, Homo sapien
gtcctaatagcagcaaaagaactgg

SEQ ID NO: 193116 - DNA, 25 bp, Homo sapien
gaagatagttgcatgcgaggccgca

SEQ ID NO: 193117 - DNA, 25 bp, Homo sapien
gctggttccaagagtggtcctaata

SEQ ID NO: 193118 - DNA, 25 bp, Homo sapien
aagcctctcagaatcttgagcatca

SEQ ID NO: 193119 - DNA, 25 bp, Homo sapien
gcatcatagccaaggttcttcacag

SEQ ID NO: 193120 - DNA, 25 bp, Homo sapien
caaggttcttcacagtatgttccaa

SEQ ID NO: 193121 - DNA, 25 bp, Homo sapien
tcagaatcttgagcatcatagccaa

SEQ ID NO: 193122 - DNA, 25 bp, Homo sapien
tggtccagttgagaatcctgcctga

SEQ ID NO: 193123 - DNA, 25 bp, Homo sapien
cacattgtatggtccagttgagaat

SEQ ID NO: 193124 - DNA, 25 bp, Homo sapien
tgtatggtccagttgagaatcctgc

SEQ ID NO: 193125 - DNA, 25 bp, Homo sapien
tccagttgagaatcctgcctgagag

SEQ ID NO: 193126 - DNA, 25 bp, Homo sapien
cagagcagcagagaagagtcaccac

SEQ ID NO: 193127 - DNA, 25 bp, Homo sapien
ctgtaaggcatgagatctggcttcc

SEQ ID NO: 193128 - DNA, 25 bp, Homo sapien
catgagatctggcttccttaatact

SEQ ID NO: 193129 - DNA, 25 bp, Homo sapien
aaggcatgagatctggcttccttaa

SEQ ID NO: 193130 - DNA, 25 bp, Homo sapien
gagatctggcttccttaatacttct

SEQ ID NO: 193131 - DNA, 25 bp, Homo sapien
tgcctcagagtctccatgtgtgtct

SEQ ID NO: 193132 - DNA, 25 bp, Homo sapien
catggcagaaagtgtatttgccgac

SEQ ID NO: 193133 - DNA, 25 bp, Homo sapien
tcactgcaggccagctttttccaca

SEQ ID NO: 193134 - DNA, 25 bp, Homo sapien
cagaaagtgtatttgccgacactct

SEQ ID NO: 193135 - DNA, 25 bp, Homo sapien
ccacatggcagaaagtgtatttgcc

SEQ ID NO: 193136 - DNA, 25 bp, Homo sapien
cagcagctaaagaataggtcttttg

SEQ ID NO: 193137 - DNA, 25 bp, Homo sapien
gctcagcagctaaagaataggtctt

SEQ ID NO: 193138 - DNA, 25 bp, Homo sapien
tctttttgtctgccaacaccaattt

SEQ ID NO: 193139 - DNA, 25 bp, Homo sapien
cagctaaagaataggtcttttgtgt

SEQ ID NO: 193140 - DNA, 25 bp, Homo sapien
aatctcaaaaactggagggttctat

SEQ ID NO: 193141 - DNA, 25 bp, Homo sapien
tatttctcataaaggttgtttccgc

SEQ ID NO: 193142 - DNA, 25 bp, Homo sapien
gaatttctggaggatcatgatgact

SEQ ID NO: 193143 - DNA, 25 bp, Homo sapien
cgcatattctgattccaaaagtttg

SEQ ID NO: 193144 - DNA, 25 bp, Homo sapien
tgactttcacccagataccccagaa

SEQ ID NO: 193145 - DNA, 25 bp, Homo sapien
ttctgttaaatggaggcctcttagg

SEQ ID NO: 193146 - DNA, 25 bp, Homo sapien
taaatggaggcctcttaggcactaa

SEQ ID NO: 193147 - DNA, 25 bp, Homo sapien
ttccagactttatatcaatgtcatt

SEQ ID NO: 193148 - DNA, 25 bp, Homo sapien
gcctcttaggcactaaccacactgg

SEQ ID NO: 193149 - DNA, 25 bp, Homo sapien
gtagaggtctattcaacgtaatctt

SEQ ID NO: 193150 - DNA, 25 bp, Homo sapien
tgtagaggtctattcaacgtaatct

SEQ ID NO: 193151 - DNA, 25 bp, Homo sapien
tcccccaccacttgtcagagattgc

SEQ ID NO: 193152 - DNA, 25 bp, Homo sapien
cccccaccacttgtcagagattgct

SEQ ID NO: 193153 - DNA, 25 bp, Homo sapien
ccaccacttgtcagagattgctgct

SEQ ID NO: 193154 - DNA, 25 bp, Homo sapien
taaaatacaacagtctcccaattgc

SEQ ID NO: 193155 - DNA, 25 bp, Homo sapien
gataacttgtgatctctggcataca

SEQ ID NO: 193156 - DNA, 25 bp, Homo sapien
tgggaggccctctatcatcctgctt

SEQ ID NO: 193157 - DNA, 25 bp, Homo sapien
cctaattctcctgattgtagctgaa

SEQ ID NO: 193158 - DNA, 25 bp, Homo sapien
ctaaatgatagcaatgactgctatc

SEQ ID NO: 193159 - DNA, 25 bp, Homo sapien
taaatgatagcaatgactgctatcc

SEQ ID NO: 193160 - DNA, 25 bp, Homo sapien
ccatcttaacaagtgtgaaaagtac

SEQ ID NO: 193161 - DNA, 25 bp, Homo sapien
ccccataaggtgaattagagggttg

SEQ ID NO: 193162 - DNA, 25 bp, Homo sapien
tctcatgttgctttggtccaaaaga

SEQ ID NO: 193163 - DNA, 25 bp, Homo sapien
agactacttgggatcataatattcc

SEQ ID NO: 193164 - DNA, 25 bp, Homo sapien
tatacaactcttactctttacaaaa

SEQ ID NO: 193165 - DNA, 25 bp, Homo sapien
tagtcatgcccataaaagtgtaacc

SEQ ID NO: 193166 - DNA, 25 bp, Homo sapien
taacccatggcatttgaaagcaaac

SEQ ID NO: 193167 - DNA, 25 bp, Homo sapien
taatacaaagactaagcgtttggga

SEQ ID NO: 193168 - DNA, 25 bp, Homo sapien
tgtttttgggatcctccacttcatc

SEQ ID NO: 193169 - DNA, 25 bp, Homo sapien
ttgggatcctccacttcatcagggt

SEQ ID NO: 193170 - DNA, 25 bp, Homo sapien
ggatcctccacttcatcagggtgct

SEQ ID NO: 193171 - DNA, 25 bp, Homo sapien
cagcttggagttcttcagcagattc

SEQ ID NO: 193172 - DNA, 25 bp, Homo sapien
aggatcaggtgaatcatcatcgtca

SEQ ID NO: 193173 - DNA, 25 bp, Homo sapien
tcaggatcaggtgaatcatcatcgt

SEQ ID NO: 193174 - DNA, 25 bp, Homo sapien
caggatcaggtgaatcatcatcgtc

SEQ ID NO: 193175 - DNA, 25 bp, Homo sapien
gacgttgatttgcaatctcctataa

SEQ ID NO: 193176 - DNA, 25 bp, Homo sapien
tccatcataatcttctacctcactg

SEQ ID NO: 193177 - DNA, 25 bp, Homo sapien
ccctgtttggaagtgagacgttgat

SEQ ID NO: 193178 - DNA, 25 bp, Homo sapien
ctgatattgggtctccagttctaca

SEQ ID NO: 193179 - DNA, 25 bp, Homo sapien
gagcattttccagtaagccataagt

SEQ ID NO: 193180 - DNA, 25 bp, Homo sapien
agtgtgagagcattttccagtaagc

SEQ ID NO: 193181 - DNA, 25 bp, Homo sapien
cataagtagatgtacatgagtgtca

SEQ ID NO: 193182 - DNA, 25 bp, Homo sapien
tttccagtaagccataagtagatgt

SEQ ID NO: 193183 - DNA, 25 bp, Homo sapien
cgcaatgtttgaccctcctttccaa

SEQ ID NO: 193184 - DNA, 25 bp, Homo sapien
tccagatttcttcttgaacagcatc

SEQ ID NO: 193185 - DNA, 25 bp, Homo sapien
tcagaaacactcccgcaatgtttga

SEQ ID NO: 193186 - DNA, 25 bp, Homo sapien
aaacactcccgcaatgtttgaccct

SEQ ID NO: 193187 - DNA, 25 bp, Homo sapien
ttcaacatactctatgctcttgccc

SEQ ID NO: 193188 - DNA, 25 bp, Homo sapien
aacatactctatgctcttgccctct

SEQ ID NO: 193189 - DNA, 25 bp, Homo sapien
cagcataagctgttctctttcaaca

SEQ ID NO: 193190 - DNA, 25 bp, Homo sapien
ggcttatctaatctaaacatgtttc

SEQ ID NO: 193191 - DNA, 25 bp, Homo sapien
tgtgctacgtcttccttaccaagaa

SEQ ID NO: 193192 - DNA, 25 bp, Homo sapien
tatgttcaggtttcaagaatagtgc

SEQ ID NO: 193193 - DNA, 25 bp, Homo sapien
tggaccaagccagatgacagtgatg

SEQ ID NO: 193194 - DNA, 25 bp, Homo sapien
cagtgatgcaggaagagtatgacct

SEQ ID NO: 193195 - DNA, 25 bp, Homo sapien
tttgttgtagccttcacgagttgaa

SEQ ID NO: 193196 - DNA, 25 bp, Homo sapien
tgtagccttcacgagttgaaatctc

SEQ ID NO: 193197 - DNA, 25 bp, Homo sapien
tgttgtagccttcacgagttgaaat

SEQ ID NO: 193198 - DNA, 25 bp, Homo sapien
gccttcacgagttgaaatctcacat

SEQ ID NO: 193199 - DNA, 25 bp, Homo sapien
tcacatttctagttcagacagaggc

SEQ ID NO: 193200 - DNA, 25 bp, Homo sapien
agaatatgatctctgcactcatgct

SEQ ID NO: 193201 - DNA, 25 bp, Homo sapien
gagtatcaggatttgtgccaaagag

SEQ ID NO: 193202 - DNA, 25 bp, Homo sapien
cagaggctcagtaataatatgataa

SEQ ID NO: 193203 - DNA, 25 bp, Homo sapien
cttctttgttttcacctcgtaatgg

SEQ ID NO: 193204 - DNA, 25 bp, Homo sapien
ttgttttcacctcgtaatggtcttc

SEQ ID NO: 193205 - DNA, 25 bp, Homo sapien
ttcacctcgtaatggtcttcactcc

SEQ ID NO: 193206 - DNA, 25 bp, Homo sapien
tctttgttttcacctcgtaatggtc

SEQ ID NO: 193207 - DNA, 25 bp, Homo sapien
agccatcagtggagtagacagtttc

SEQ ID NO: 193208 - DNA, 25 bp, Homo sapien
gccatcagtggagtagacagtttca

SEQ ID NO: 193209 - DNA, 25 bp, Homo sapien
ccatcagtggagtagacagtttcat

SEQ ID NO: 193210 - DNA, 25 bp, Homo sapien
cagccatcagtggagtagacagttt

SEQ ID NO: 193211 - DNA, 25 bp, Homo sapien
tatattcaggacatatggatgacaa

SEQ ID NO: 193212 - DNA, 25 bp, Homo sapien
tacaacacagagagcttatagccca

SEQ ID NO: 193213 - DNA, 25 bp, Homo sapien
ggatgacaaatggtccactgtgttt

SEQ ID NO: 193214 - DNA, 25 bp, Homo sapien
taatgtattgagtccaacaatggct

SEQ ID NO: 193215 - DNA, 25 bp, Homo sapien
ctgagccaaataacaaaagtagact

SEQ ID NO: 193216 - DNA, 25 bp, Homo sapien
acatcatttacagatagctcttagc

SEQ ID NO: 193217 - DNA, 25 bp, Homo sapien
tagattttgctctgtgcttgtgaag

SEQ ID NO: 193218 - DNA, 25 bp, Homo sapien
catttacagatagctcttagctcac

SEQ ID NO: 193219 - DNA, 25 bp, Homo sapien
ccaatacttgagacgaagctccaag

SEQ ID NO: 193220 - DNA, 25 bp, Homo sapien
tgcccaatacttgagacgaagctcc

SEQ ID NO: 193221 - DNA, 25 bp, Homo sapien
ctgtcatttgcccaatacttgagac

SEQ ID NO: 193222 - DNA, 25 bp, Homo sapien
catttgcccaatacttgagacgaag

SEQ ID NO: 193223 - DNA, 25 bp, Homo sapien
gaatgttctgtgtcagaagtggttg

SEQ ID NO: 193224 - DNA, 25 bp, Homo sapien
tcagaagtggttggcggtagacgaa

SEQ ID NO: 193225 - DNA, 25 bp, Homo sapien
caacatattgctcagcccatttggc

SEQ ID NO: 193226 - DNA, 25 bp, Homo sapien
agacatcatgcagtctttcgtgaca

SEQ ID NO: 193227 - DNA, 25 bp, Homo sapien
ttggatggtgagagtcgcaaggctc

SEQ ID NO: 193228 - DNA, 25 bp, Homo sapien
gatggtgagagtcgcaaggctcaaa

SEQ ID NO: 193229 - DNA, 25 bp, Homo sapien
ctttggatggtgagagtcgcaaggc

SEQ ID NO: 193230 - DNA, 25 bp, Homo sapien
aactctgtccctagatcttgctgct

SEQ ID NO: 193231 - DNA, 25 bp, Homo sapien
ctgtatctgtgaactgttcctactg

SEQ ID NO: 193232 - DNA, 25 bp, Homo sapien
tactgttatcacttgaatctgccat

SEQ ID NO: 193233 - DNA, 25 bp, Homo sapien
tcctactgttatcacttgaatctgc

SEQ ID NO: 193234 - DNA, 25 bp, Homo sapien
gaactgttcctactgttatcacttg

SEQ ID NO: 193235 - DNA, 25 bp, Homo sapien
ttcagtagaagctttcttgacatct

SEQ ID NO: 193236 - DNA, 25 bp, Homo sapien
ttaactttcagtagaagctttcttg

SEQ ID NO: 193237 - DNA, 25 bp, Homo sapien
agctttcttgacatctactccatga

SEQ ID NO: 193238 - DNA, 25 bp, Homo sapien
tactccatgatctcttccaataatc

SEQ ID NO: 193239 - DNA, 25 bp, Homo sapien
gactgttcacgactcaatctagaag

SEQ ID NO: 193240 - DNA, 25 bp, Homo sapien
tatcaagagcaagtactgactgttc

SEQ ID NO: 193241 - DNA, 25 bp, Homo sapien
tcaatctagaagttacaggcaccat

SEQ ID NO: 193242 - DNA, 25 bp, Homo sapien
ttccattatcatcctatcaagagca

SEQ ID NO: 193243 - DNA, 25 bp, Homo sapien
cccagtagcaaagaaaaggatgcct

SEQ ID NO: 193244 - DNA, 25 bp, Homo sapien
ccaagacccagtagcaaagaaaagg

SEQ ID NO: 193245 - DNA, 25 bp, Homo sapien
ctaccaagacccagtagcaaagaaa

SEQ ID NO: 193246 - DNA, 25 bp, Homo sapien
caagacccagtagcaaagaaaagga

SEQ ID NO: 193247 - DNA, 25 bp, Homo sapien
ggtagcagtacttgcattaaccact

SEQ ID NO: 193248 - DNA, 25 bp, Homo sapien
tacggtttgctgatcctagaggaag

SEQ ID NO: 193249 - DNA, 25 bp, Homo sapien
gcctgaataatggatccatccctac

SEQ ID NO: 193250 - DNA, 25 bp, Homo sapien
caaccaggtgtcaagaggctgcaag

SEQ ID NO: 193251 - DNA, 25 bp, Homo sapien
ctggctggttaaagtcctctctctg

SEQ ID NO: 193252 - DNA, 25 bp, Homo sapien
ggacctttgcatttgactggctggt

SEQ ID NO: 193253 - DNA, 25 bp, Homo sapien
catttgactggctggttaaagtcct

SEQ ID NO: 193254 - DNA, 25 bp, Homo sapien
cctttgcatttgactggctggttaa

SEQ ID NO: 193255 - DNA, 25 bp, Homo sapien
agcccccacgttgcgcaccaaaaat

SEQ ID NO: 193256 - DNA, 25 bp, Homo sapien
tcgagcccccacgttgcgcaccaaa

SEQ ID NO: 193257 - DNA, 25 bp, Homo sapien
gagcccccacgttgcgcaccaaaaa

SEQ ID NO: 193258 - DNA, 25 bp, Homo sapien
ctcgagcccccacgttgcgcaccaa

SEQ ID NO: 193259 - DNA, 25 bp, Homo sapien
aaaacacaatctgagtttgagccca

SEQ ID NO: 193260 - DNA, 25 bp, Homo sapien
aactcatgttgggtgtctgttcacc

SEQ ID NO: 193261 - DNA, 25 bp, Homo sapien
agatccttgagccatgcatcccatg

SEQ ID NO: 193262 - DNA, 25 bp, Homo sapien
tcttcttggctgacgggaaagttag

SEQ ID NO: 193263 - DNA, 25 bp, Homo sapien
tattttcagacgtttgactagctct

SEQ ID NO: 193264 - DNA, 25 bp, Homo sapien
tcagacgtttgactagctctaccca

SEQ ID NO: 193265 - DNA, 25 bp, Homo sapien
tgtgatgttcacaatcccaaatcca

SEQ ID NO: 193266 - DNA, 25 bp, Homo sapien
tacccatcatgaaatgtagtttgtg

SEQ ID NO: 193267 - DNA, 25 bp, Homo sapien
tcatttaaaatgtataagcaaagac

SEQ ID NO: 193268 - DNA, 25 bp, Homo sapien
tttcatttaaaatgtataagcaaag

SEQ ID NO: 193269 - DNA, 25 bp, Homo sapien
catttaaaatgtataagcaaagact

SEQ ID NO: 193270 - DNA, 25 bp, Homo sapien
tttaaaatgtataagcaaagactac

SEQ ID NO: 193271 - DNA, 25 bp, Homo sapien
catcgattgcaattctccactgtct

SEQ ID NO: 193272 - DNA, 25 bp, Homo sapien
tttctttgaatgtctccatcgattg

SEQ ID NO: 193273 - DNA, 25 bp, Homo sapien
tcatcttctacaatgtccagtttca

SEQ ID NO: 193274 - DNA, 25 bp, Homo sapien
gaatgtctccatcgattgcaattct

SEQ ID NO: 193275 - DNA, 25 bp, Homo sapien
gtctgacaagaacaaatgcttgaag

SEQ ID NO: 193276 - DNA, 25 bp, Homo sapien
acccagaggccggattgacattttc

SEQ ID NO: 193277 - DNA, 25 bp, Homo sapien
tgttttaacagctcctcaacccaga

SEQ ID NO: 193278 - DNA, 25 bp, Homo sapien
aagtgcaaagccatatgttttaaca

SEQ ID NO: 193279 - DNA, 25 bp, Homo sapien
gctagtctaccgcttttatctcctt

SEQ ID NO: 193280 - DNA, 25 bp, Homo sapien
tttgttagctagtctaccgctttta

SEQ ID NO: 193281 - DNA, 25 bp, Homo sapien
agattatattgagcctctaatagac

SEQ ID NO: 193282 - DNA, 25 bp, Homo sapien
aaagattatattgagcctctaatag

SEQ ID NO: 193283 - DNA, 25 bp, Homo sapien
tcaacaatgattgctttctcaattt

SEQ ID NO: 193284 - DNA, 25 bp, Homo sapien
aacaatgattgctttctcaatttca

SEQ ID NO: 193285 - DNA, 25 bp, Homo sapien
cctcaacaatgattgctttctcaat

SEQ ID NO: 193286 - DNA, 25 bp, Homo sapien
caatgattgctttctcaatttcatc

SEQ ID NO: 193287 - DNA, 25 bp, Homo sapien
gtacagttgttcccttttattcaca

SEQ ID NO: 193288 - DNA, 25 bp, Homo sapien
tatacctcttgattacagtggtggt

SEQ ID NO: 193289 - DNA, 25 bp, Homo sapien
ttacagtggtggttgtaagggtaca

SEQ ID NO: 193290 - DNA, 25 bp, Homo sapien
tgatgaagctgttatacctcttgat

SEQ ID NO: 193291 - DNA, 25 bp, Homo sapien
aataggagggcttaagttgcatcgc

SEQ ID NO: 193292 - DNA, 25 bp, Homo sapien
taagttgcatcgctttgttttcaga

SEQ ID NO: 193293 - DNA, 25 bp, Homo sapien
ctgtttcatccacaataggagggct

SEQ ID NO: 193294 - DNA, 25 bp, Homo sapien
catccacaataggagggcttaagtt

SEQ ID NO: 193295 - DNA, 25 bp, Homo sapien
cttacaaggcttacagctgaatgaa

SEQ ID NO: 193296 - DNA, 25 bp, Homo sapien
tccaataccacctagcttcattttt

SEQ ID NO: 193297 - DNA, 25 bp, Homo sapien
tgtcagcctactgagagcagtcttc

SEQ ID NO: 193298 - DNA, 25 bp, Homo sapien
gcagtcttcagagattctcctccaa

SEQ ID NO: 193299 - DNA, 25 bp, Homo sapien
aactctaagctctcagacaccagga

SEQ ID NO: 193300 - DNA, 25 bp, Homo sapien
taaccctttcatatagatcttttat

SEQ ID NO: 193301 - DNA, 25 bp, Homo sapien
aaactctaagctctcagacaccagg

SEQ ID NO: 193302 - DNA, 25 bp, Homo sapien
tctaagctctcagacaccaggacag

SEQ ID NO: 193303 - DNA, 25 bp, Homo sapien
tctgctgcatcctgagaggcccgtg

SEQ ID NO: 193304 - DNA, 25 bp, Homo sapien
tggtacaattctgccgctctcttgt

SEQ ID NO: 193305 - DNA, 25 bp, Homo sapien
ggcctgctgcatgcatggtacaatt

SEQ ID NO: 193306 - DNA, 25 bp, Homo sapien
cccgtgtagagcatggcctgctgca

SEQ ID NO: 193307 - DNA, 25 bp, Homo sapien
cttaaagtgtggtctacagaccacc

SEQ ID NO: 193308 - DNA, 25 bp, Homo sapien
gcccaatccttgaagataattctta

SEQ ID NO: 193309 - DNA, 25 bp, Homo sapien
cttgaagataattcttaaagtgtgg

SEQ ID NO: 193310 - DNA, 25 bp, Homo sapien
tcttaaagtgtggtctacagaccac

SEQ ID NO: 193311 - DNA, 25 bp, Homo sapien
aagaaaagatggctgcagattaaac

SEQ ID NO: 193312 - DNA, 25 bp, Homo sapien
ttttcatgccataaatttgaatgaa

SEQ ID NO: 193313 - DNA, 25 bp, Homo sapien
gatggctgcagattaaactttactc

SEQ ID NO: 193314 - DNA, 25 bp, Homo sapien
ctttactcgtgtcaacaagtttact

SEQ ID NO: 193315 - DNA, 25 bp, Homo sapien
cctttaatttgccttattgacaaag

SEQ ID NO: 193316 - DNA, 25 bp, Homo sapien
gcttctgattgctagcttaggtaca

SEQ ID NO: 193317 - DNA, 25 bp, Homo sapien
gattgctagcttaggtacaacctga

SEQ ID NO: 193318 - DNA, 25 bp, Homo sapien
tattgacaaagctacttcccgctgc

SEQ ID NO: 193319 - DNA, 25 bp, Homo sapien
tcaagagtgggagcctgtccatcat

SEQ ID NO: 193320 - DNA, 25 bp, Homo sapien
caaccgatcctaattttactgctgg

SEQ ID NO: 193321 - DNA, 25 bp, Homo sapien
tgccacctgcggtgactgaaattct

SEQ ID NO: 193322 - DNA, 25 bp, Homo sapien
caggaggacgttgttttaattctat

SEQ ID NO: 193323 - DNA, 25 bp, Homo sapien
tatcctgtacggctggtctgctgag

SEQ ID NO: 193324 - DNA, 25 bp, Homo sapien
aatgtttgtcaacggaggcctcttc

SEQ ID NO: 193325 - DNA, 25 bp, Homo sapien
tgctgagggagaccgaatttcacca

SEQ ID NO: 193326 - DNA, 25 bp, Homo sapien
gaattctccgcaactgcagtggctg

SEQ ID NO: 193327 - DNA, 25 bp, Homo sapien
aatttcttgcctacacgctgagata

SEQ ID NO: 193328 - DNA, 25 bp, Homo sapien
cgctgagataggctgattagagtca

SEQ ID NO: 193329 - DNA, 25 bp, Homo sapien
catactacactcttgttggatccca

SEQ ID NO: 193330 - DNA, 25 bp, Homo sapien
tggatcccaccttattcagtaagcg

SEQ ID NO: 193331 - DNA, 25 bp, Homo sapien
tgtgctgtccgtgagtttgctctga

SEQ ID NO: 193332 - DNA, 25 bp, Homo sapien
ttggacctctctgaaaacttgtgct

SEQ ID NO: 193333 - DNA, 25 bp, Homo sapien
tctgaaaacttgtgctgtccgtgag

SEQ ID NO: 193334 - DNA, 25 bp, Homo sapien
tgtccgtgagtttgctctgagcatc

SEQ ID NO: 193335 - DNA, 25 bp, Homo sapien
aagcctcagtctctggatatgagga

SEQ ID NO: 193336 - DNA, 25 bp, Homo sapien
cagtctctggatatgaggagagata

SEQ ID NO: 193337 - DNA, 25 bp, Homo sapien
gatagcttgggctgtgatattaagc

SEQ ID NO: 193338 - DNA, 25 bp, Homo sapien
tatgaggagagatagcttgggctgt

SEQ ID NO: 193339 - DNA, 25 bp, Homo sapien
tactggtgatgagcaatgactgttc

SEQ ID NO: 193340 - DNA, 25 bp, Homo sapien
tgaaggcctgtggaactctcatgga

SEQ ID NO: 193341 - DNA, 25 bp, Homo sapien
gtaaacttgatagtcacaggctggg

SEQ ID NO: 193342 - DNA, 25 bp, Homo sapien
gaaccatactggtgatgagcaatga

SEQ ID NO: 193343 - DNA, 25 bp, Homo sapien
ccaaccagatacgtagaatcatgtt

SEQ ID NO: 193344 - DNA, 25 bp, Homo sapien
ccagatacgtagaatcatgttgatt

SEQ ID NO: 193345 - DNA, 25 bp, Homo sapien
gatacgtagaatcatgttgattcca

SEQ ID NO: 193346 - DNA, 25 bp, Homo sapien
atgaccaaccagatacgtagaatca

SEQ ID NO: 193347 - DNA, 25 bp, Homo sapien
aagaatggaaatcaaccaatggata

SEQ ID NO: 193348 - DNA, 25 bp, Homo sapien
accgcatctggccttttcatttact

SEQ ID NO: 193349 - DNA, 25 bp, Homo sapien
ccgcatctggccttttcatttactt

SEQ ID NO: 193350 - DNA, 25 bp, Homo sapien
gagaagctgccctgtgaccgtggac

SEQ ID NO: 193351 - DNA, 25 bp, Homo sapien
ctctgctgatttgtgagaagctgcc

SEQ ID NO: 193352 - DNA, 25 bp, Homo sapien
cctgtgaccgtggactgtgctgcct

SEQ ID NO: 193353 - DNA, 25 bp, Homo sapien
ctgatttgtgagaagctgccctgtg

SEQ ID NO: 193354 - DNA, 25 bp, Homo sapien
ctttttcatactgcttttcagggcc

SEQ ID NO: 193355 - DNA, 25 bp, Homo sapien
taggaggcacatatcctaggacagt

SEQ ID NO: 193356 - DNA, 25 bp, Homo sapien
tatgggctagttgaagttctgtgcc

SEQ ID NO: 193357 - DNA, 25 bp, Homo sapien
cctcagggctgccacatagaattgt

SEQ ID NO: 193358 - DNA, 25 bp, Homo sapien
cctttattgagtgatgtgtgagcct

SEQ ID NO: 193359 - DNA, 25 bp, Homo sapien
ccctccaaggatgctaatagactca

SEQ ID NO: 193360 - DNA, 25 bp, Homo sapien
taaagagcatgtgtcccgctaactg

SEQ ID NO: 193361 - DNA, 25 bp, Homo sapien
aaaacatcttgttggacaccttgaa

SEQ ID NO: 193362 - DNA, 25 bp, Homo sapien
gagatcaagaagtcttggtaggttg

SEQ ID NO: 193363 - DNA, 25 bp, Homo sapien
ttgtgacaagtcttctgcgctatgt

SEQ ID NO: 193364 - DNA, 25 bp, Homo sapien
gctatgtcccgcagtttaattttac

SEQ ID NO: 193365 - DNA, 25 bp, Homo sapien
taggttggtcctaaattgtgacaag

SEQ ID NO: 193366 - DNA, 25 bp, Homo sapien
gctgtaggaccttataaatgagtca

SEQ ID NO: 193367 - DNA, 25 bp, Homo sapien
caacacagtttcgttcttatctagg

SEQ ID NO: 193368 - DNA, 25 bp, Homo sapien
taaatcactgtggtgtacctcatct

SEQ ID NO: 193369 - DNA, 25 bp, Homo sapien
atgtaatccgcttgaatcatccaga

SEQ ID NO: 193370 - DNA, 25 bp, Homo sapien
gtaattccagtctcaaggaatgagc

SEQ ID NO: 193371 - DNA, 25 bp, Homo sapien
ccagtttggagttaccaggttagct

SEQ ID NO: 193372 - DNA, 25 bp, Homo sapien
ctcatccagtttggagttaccaggt

SEQ ID NO: 193373 - DNA, 25 bp, Homo sapien
gagttaccaggttagctgtatgcac

SEQ ID NO: 193374 - DNA, 25 bp, Homo sapien
tctgatctttgaagtgcactgtgcc

SEQ ID NO: 193375 - DNA, 25 bp, Homo sapien
caatagcatccactaacagtctgat

SEQ ID NO: 193376 - DNA, 25 bp, Homo sapien
gagacctggtaaatccatttccctg

SEQ ID NO: 193377 - DNA, 25 bp, Homo sapien
gttgccaggtgatagcttttagccc

SEQ ID NO: 193378 - DNA, 25 bp, Homo sapien
actgtctttgattgtgtccccaagg

SEQ ID NO: 193379 - DNA, 25 bp, Homo sapien
ttcctcttggcaactactgtctttg

SEQ ID NO: 193380 - DNA, 25 bp, Homo sapien
ctactgtctttgattgtgtccccaa

SEQ ID NO: 193381 - DNA, 25 bp, Homo sapien
ttggcaactactgtctttgattgtg

SEQ ID NO: 193382 - DNA, 25 bp, Homo sapien
taataaatcatggctgcgcttggtg

SEQ ID NO: 193383 - DNA, 25 bp, Homo sapien
cttgacggtagccccagtggctcag

SEQ ID NO: 193384 - DNA, 25 bp, Homo sapien
ccagtggctcagaaatctgtttcca

SEQ ID NO: 193385 - DNA, 25 bp, Homo sapien
ccccagtggctcagaaatctgtttc

SEQ ID NO: 193386 - DNA, 25 bp, Homo sapien
tagccccagtggctcagaaatctgt

SEQ ID NO: 193387 - DNA, 25 bp, Homo sapien
agatactggcataagtgttaaatct

SEQ ID NO: 193388 - DNA, 25 bp, Homo sapien
agctcttcataattacataatccat

SEQ ID NO: 193389 - DNA, 25 bp, Homo sapien
aattacataatccatttccccagca

SEQ ID NO: 193390 - DNA, 25 bp, Homo sapien
tgaaaactagtcacctaaaggaaga

SEQ ID NO: 193391 - DNA, 25 bp, Homo sapien
ggactcctgaccttactgtttgtgc

SEQ ID NO: 193392 - DNA, 25 bp, Homo sapien
tcataggacctattgactcaagtta

SEQ ID NO: 193393 - DNA, 25 bp, Homo sapien
aaatacagcctcgtcagtttagtgt

SEQ ID NO: 193394 - DNA, 25 bp, Homo sapien
aagccctggaggtagcaaaccagtc

SEQ ID NO: 193395 - DNA, 25 bp, Homo sapien
tcccaggtagtggtctattccatag

SEQ ID NO: 193396 - DNA, 25 bp, Homo sapien
gtttgtcaccacaactcccaggtag

SEQ ID NO: 193397 - DNA, 25 bp, Homo sapien
catagcctctgtgtgcggtctcaaa

SEQ ID NO: 193398 - DNA, 25 bp, Homo sapien
catgtatgtctactctgaaggaatc

SEQ ID NO: 193399 - DNA, 25 bp, Homo sapien
tctatcctcatgtatgtctactctg

SEQ ID NO: 193400 - DNA, 25 bp, Homo sapien
gagttctatcctcatgtatgtctac

SEQ ID NO: 193401 - DNA, 25 bp, Homo sapien
tcctcatgtatgtctactctgaagg

SEQ ID NO: 193402 - DNA, 25 bp, Homo sapien
gttgtttttcgtgtcctggacagca

SEQ ID NO: 193403 - DNA, 25 bp, Homo sapien
aggccatctcctatagctcacattc

SEQ ID NO: 193404 - DNA, 25 bp, Homo sapien
atcacctttgctcacctcaggccat

SEQ ID NO: 193405 - DNA, 25 bp, Homo sapien
ggacagcagcatcacctttgctcac

SEQ ID NO: 193406 - DNA, 25 bp, Homo sapien
gacatgcaatgtgttgctaatccag

SEQ ID NO: 193407 - DNA, 25 bp, Homo sapien
gggaaccatagcctcggttactcaa

SEQ ID NO: 193408 - DNA, 25 bp, Homo sapien
ttttcacacttcagtgtatcttggg

SEQ ID NO: 193409 - DNA, 25 bp, Homo sapien
cctgagaaagttcaatcttattgtc

SEQ ID NO: 193410 - DNA, 25 bp, Homo sapien
gcactgttcttctgtacaaccctgc

SEQ ID NO: 193411 - DNA, 25 bp, Homo sapien
tttggtatttacctcgtctgtatcc

SEQ ID NO: 193412 - DNA, 25 bp, Homo sapien
gacattcgccataccaaatttttca

SEQ ID NO: 193413 - DNA, 25 bp, Homo sapien
acctcgtctgtatcctgaatttttt

SEQ ID NO: 193414 - DNA, 25 bp, Homo sapien
ggccataaaggcaactctgaagaaa

SEQ ID NO: 193415 - DNA, 25 bp, Homo sapien
tgaagaaagtgcctaaaattctctt

SEQ ID NO: 193416 - DNA, 25 bp, Homo sapien
tctgaagaaagtgcctaaaattctc

SEQ ID NO: 193417 - DNA, 25 bp, Homo sapien
ctggccataaaggcaactctgaaga

SEQ ID NO: 193418 - DNA, 25 bp, Homo sapien
aagctccctgaagagttctataaac

SEQ ID NO: 193419 - DNA, 25 bp, Homo sapien
gtgtaagctccctgaagagttctat

SEQ ID NO: 193420 - DNA, 25 bp, Homo sapien
gtaagctccctgaagagttctataa

SEQ ID NO: 193421 - DNA, 25 bp, Homo sapien
agaatttttgtgtaagctccctgaa

SEQ ID NO: 193422 - DNA, 25 bp, Homo sapien
cataaagttttgccttccataagct

SEQ ID NO: 193423 - DNA, 25 bp, Homo sapien
aagttttgccttccataagctatcc

SEQ ID NO: 193424 - DNA, 25 bp, Homo sapien
agttttgccttccataagctatcca

SEQ ID NO: 193425 - DNA, 25 bp, Homo sapien
taaagttttgccttccataagctat

SEQ ID NO: 193426 - DNA, 25 bp, Homo sapien
actctgcaactagagctgctgcatg

SEQ ID NO: 193427 - DNA, 25 bp, Homo sapien
atggacataacacattgcagcctct

SEQ ID NO: 193428 - DNA, 25 bp, Homo sapien
gaagggtgaacatccattaggaaat

SEQ ID NO: 193429 - DNA, 25 bp, Homo sapien
cttgaagggtgaacatccattagga

SEQ ID NO: 193430 - DNA, 25 bp, Homo sapien
cttccacttagtgctatatcagcta

SEQ ID NO: 193431 - DNA, 25 bp, Homo sapien
taagctacattggagatcagttagc

SEQ ID NO: 193432 - DNA, 25 bp, Homo sapien
taagctctgggatacttgcatagga

SEQ ID NO: 193433 - DNA, 25 bp, Homo sapien
tcttgatcttccacttagtgctata

SEQ ID NO: 193434 - DNA, 25 bp, Homo sapien
gtaattttcggtctattcagaagtg

SEQ ID NO: 193435 - DNA, 25 bp, Homo sapien
aatgtctgttcagttgttgcagaac

SEQ ID NO: 193436 - DNA, 25 bp, Homo sapien
ccctgatggaaaatgacatggtatc

SEQ ID NO: 193437 - DNA, 25 bp, Homo sapien
agttgggtcttaaagccctgatgga

SEQ ID NO: 193438 - DNA, 25 bp, Homo sapien
ttccccatatatctaaagtgaaaca

SEQ ID NO: 193439 - DNA, 25 bp, Homo sapien
ccatatatctaaagtgaaacaagca

SEQ ID NO: 193440 - DNA, 25 bp, Homo sapien
cttttccccatatatctaaagtgaa

SEQ ID NO: 193441 - DNA, 25 bp, Homo sapien
ttcttttccccatatatctaaagtg

SEQ ID NO: 193442 - DNA, 25 bp, Homo sapien
taaaaatgtgtatgagttcctgagg

SEQ ID NO: 193443 - DNA, 25 bp, Homo sapien
aaaatgtgtatgagttcctgaggag

SEQ ID NO: 193444 - DNA, 25 bp, Homo sapien
aaaaatgtgtatgagttcctgagga

SEQ ID NO: 193445 - DNA, 25 bp, Homo sapien
ttcattccagtaagttaagagagta

SEQ ID NO: 193446 - DNA, 25 bp, Homo sapien
ccagtaagttaagagagtatcttcc

SEQ ID NO: 193447 - DNA, 25 bp, Homo sapien
gagtatcttccgaaatcacttttac

SEQ ID NO: 193448 - DNA, 25 bp, Homo sapien
ttaagagagtatcttccgaaatcac

SEQ ID NO: 193449 - DNA, 25 bp, Homo sapien
tatatacaggtagcacatcaagagg

SEQ ID NO: 193450 - DNA, 25 bp, Homo sapien
tactgggatacgctactccttgtag

SEQ ID NO: 193451 - DNA, 25 bp, Homo sapien
tcacactgatccaggcggttatact

SEQ ID NO: 193452 - DNA, 25 bp, Homo sapien
caggtagcacatcaagaggcttctg

SEQ ID NO: 193453 - DNA, 25 bp, Homo sapien
tgtccattttgaaaagacccataag

SEQ ID NO: 193454 - DNA, 25 bp, Homo sapien
ttgtcaggtgaagtaaagccataat

SEQ ID NO: 193455 - DNA, 25 bp, Homo sapien
ggtgaagtaaagccataatggaaac

SEQ ID NO: 193456 - DNA, 25 bp, Homo sapien
ctattgtcaggtgaagtaaagccat

SEQ ID NO: 193457 - DNA, 25 bp, Homo sapien
gtgaagtaaagccataatggaaact

SEQ ID NO: 193458 - DNA, 25 bp, Homo sapien
aagaatacaaggtatcttgacctgc

SEQ ID NO: 193459 - DNA, 25 bp, Homo sapien
gaatacaaggtatcttgacctgcta

SEQ ID NO: 193460 - DNA, 25 bp, Homo sapien
acaagaatacaaggtatcttgacct

SEQ ID NO: 193461 - DNA, 25 bp, Homo sapien
ctgcacaagaatacaaggtatcttg

SEQ ID NO: 193462 - DNA, 25 bp, Homo sapien
gtatatctgatctcataattgtcct

SEQ ID NO: 193463 - DNA, 25 bp, Homo sapien
tgtatatctgatctcataattgtcc

SEQ ID NO: 193464 - DNA, 25 bp, Homo sapien
taggttttgcaaatgccattggcaa

SEQ ID NO: 193465 - DNA, 25 bp, Homo sapien
gtaatgttcgtgattgcaaattgtt

SEQ ID NO: 193466 - DNA, 25 bp, Homo sapien
attgcaaattgtttgcagaaattca

SEQ ID NO: 193467 - DNA, 25 bp, Homo sapien
tgtaatgttcgtgattgcaaattgt

SEQ ID NO: 193468 - DNA, 25 bp, Homo sapien
aatcctctatccattagtgtcaaac

SEQ ID NO: 193469 - DNA, 25 bp, Homo sapien
cctctatccattagtgtcaaacagc

SEQ ID NO: 193470 - DNA, 25 bp, Homo sapien
aaatcctctatccattagtgtcaaa

SEQ ID NO: 193471 - DNA, 25 bp, Homo sapien
tcctctatccattagtgtcaaacag

SEQ ID NO: 193472 - DNA, 25 bp, Homo sapien
ctggccatgggtaagcttaatctta

SEQ ID NO: 193473 - DNA, 25 bp, Homo sapien
tggccatgggtaagcttaatcttat

SEQ ID NO: 193474 - DNA, 25 bp, Homo sapien
ggccatgggtaagcttaatcttatt

SEQ ID NO: 193475 - DNA, 25 bp, Homo sapien
tatccatcattcagatttaagtagc

SEQ ID NO: 193476 - DNA, 25 bp, Homo sapien
caaatgatgtttttgatgcaagtga

SEQ ID NO: 193477 - DNA, 25 bp, Homo sapien
ccaggcaaactcaactggagtttca

SEQ ID NO: 193478 - DNA, 25 bp, Homo sapien
aaagggaagctcaattttaatctca

SEQ ID NO: 193479 - DNA, 25 bp, Homo sapien
gttttgattgtgatgtgagacaaca

SEQ ID NO: 193480 - DNA, 25 bp, Homo sapien
actttcatctgaatcccggaattcc

SEQ ID NO: 193481 - DNA, 25 bp, Homo sapien
ctttcatctgaatcccggaattcca

SEQ ID NO: 193482 - DNA, 25 bp, Homo sapien
ggcaaatgttttctagctatcgtat

SEQ ID NO: 193483 - DNA, 25 bp, Homo sapien
gctatcgtattttaattgcaaggga

SEQ ID NO: 193484 - DNA, 25 bp, Homo sapien
ctagctatcgtattttaattgcaag

SEQ ID NO: 193485 - DNA, 25 bp, Homo sapien
tgttttctagctatcgtattttaat

SEQ ID NO: 193486 - DNA, 25 bp, Homo sapien
atagcaacttgagaacgtcttcatt

SEQ ID NO: 193487 - DNA, 25 bp, Homo sapien
gatagcaacttgagaacgtcttcat

SEQ ID NO: 193488 - DNA, 25 bp, Homo sapien
tagcaacttgagaacgtcttcattt

SEQ ID NO: 193489 - DNA, 25 bp, Homo sapien
atctcccatccagatagagaaagcc

SEQ ID NO: 193490 - DNA, 25 bp, Homo sapien
ttctgtattgtccaaaatggctaca

SEQ ID NO: 193491 - DNA, 25 bp, Homo sapien
cctttgggttactgtcactgcacag

SEQ ID NO: 193492 - DNA, 25 bp, Homo sapien
tccatgaatgaaagactcaggtgaa

SEQ ID NO: 193493 - DNA, 25 bp, Homo sapien
cacagttggattgaagagccccaca

SEQ ID NO: 193494 - DNA, 25 bp, Homo sapien
tgtagcaccttttcgattctcgcag

SEQ ID NO: 193495 - DNA, 25 bp, Homo sapien
tgaaagttaaatcatggcaatttac

SEQ ID NO: 193496 - DNA, 25 bp, Homo sapien
atttgtgggtggtccttttgcattg

SEQ ID NO: 193497 - DNA, 25 bp, Homo sapien
gcattgtctccaatttggcccaaga

SEQ ID NO: 193498 - DNA, 25 bp, Homo sapien
caatttggcccaagatattgaaagt

SEQ ID NO: 193499 - DNA, 25 bp, Homo sapien
ggctttatatcaggttcaattcctg

SEQ ID NO: 193500 - DNA, 25 bp, Homo sapien
ctttatatcaggttcaattcctgaa

SEQ ID NO: 193501 - DNA, 25 bp, Homo sapien
ctactgagtttgtttagttgttcag

SEQ ID NO: 193502 - DNA, 25 bp, Homo sapien
ttatatcaggttcaattcctgaaaa

SEQ ID NO: 193503 - DNA, 25 bp, Homo sapien
gttatcggcttttcgttggctacta

SEQ ID NO: 193504 - DNA, 25 bp, Homo sapien
tatcggcttttcgttggctactagt

SEQ ID NO: 193505 - DNA, 25 bp, Homo sapien
atgttatcggcttttcgttggctac

SEQ ID NO: 193506 - DNA, 25 bp, Homo sapien
gatgttatcggcttttcgttggcta

SEQ ID NO: 193507 - DNA, 25 bp, Homo sapien
ataacataaagcaggtaagtcctta

SEQ ID NO: 193508 - DNA, 25 bp, Homo sapien
aacataaagcaggtaagtccttatc

SEQ ID NO: 193509 - DNA, 25 bp, Homo sapien
cataaagcaggtaagtccttatctt

SEQ ID NO: 193510 - DNA, 25 bp, Homo sapien
taacataaagcaggtaagtccttat

SEQ ID NO: 193511 - DNA, 25 bp, Homo sapien
cgtgccaatctgtgctacaggtttt

SEQ ID NO: 193512 - DNA, 25 bp, Homo sapien
caatctgtgctacaggttttaatac

SEQ ID NO: 193513 - DNA, 25 bp, Homo sapien
tgccaatctgtgctacaggttttaa

SEQ ID NO: 193514 - DNA, 25 bp, Homo sapien
cacgtgccaatctgtgctacaggtt

SEQ ID NO: 193515 - DNA, 25 bp, Homo sapien
ctgtgctgacgacccatcaccgaga

SEQ ID NO: 193516 - DNA, 25 bp, Homo sapien
ggattgcaccgttctgtgctgacga

SEQ ID NO: 193517 - DNA, 25 bp, Homo sapien
accgttctgtgctgacgacccatca

SEQ ID NO: 193518 - DNA, 25 bp, Homo sapien
gtacagtggattgcaccgttctgtg

SEQ ID NO: 193519 - DNA, 25 bp, Homo sapien
tctctgagggggttgctgtaaatct

SEQ ID NO: 193520 - DNA, 25 bp, Homo sapien
atagtccagggggtcaacaactttg

SEQ ID NO: 193521 - DNA, 25 bp, Homo sapien
ggaaacataagcagatctctgaggg

SEQ ID NO: 193522 - DNA, 25 bp, Homo sapien
ttttatttgggcgataacattctca

SEQ ID NO: 193523 - DNA, 25 bp, Homo sapien
cttttccagcaccaaggagccccac

SEQ ID NO: 193524 - DNA, 25 bp, Homo sapien
ccaaggagccccacacggcctctga

SEQ ID NO: 193525 - DNA, 25 bp, Homo sapien
aggagccccacacggcctctgacac

SEQ ID NO: 193526 - DNA, 25 bp, Homo sapien
ttttccagcaccaaggagccccaca

SEQ ID NO: 193527 - DNA, 25 bp, Homo sapien
tccctgtggacctgtagtggcagta

SEQ ID NO: 193528 - DNA, 25 bp, Homo sapien
tttgcaccttaggtacaggcgcagc

SEQ ID NO: 193529 - DNA, 25 bp, Homo sapien
caaatagccagcgataccagcgata

SEQ ID NO: 193530 - DNA, 25 bp, Homo sapien
gatacctaggtatgcagtgggcctt

SEQ ID NO: 193531 - DNA, 25 bp, Homo sapien
ccaccgaggagcagacccgacagga

SEQ ID NO: 193532 - DNA, 25 bp, Homo sapien
caccgaggagcagacccgacaggag

SEQ ID NO: 193533 - DNA, 25 bp, Homo sapien
gccaccgaggagcagacccgacagg

SEQ ID NO: 193534 - DNA, 25 bp, Homo sapien
ggccaccgaggagcagacccgacag

SEQ ID NO: 193535 - DNA, 25 bp, Homo sapien
tgggtcagcgccaacttgcggaggg

SEQ ID NO: 193536 - DNA, 25 bp, Homo sapien
cgccaacttgcggaggggcgccgag

SEQ ID NO: 193537 - DNA, 25 bp, Homo sapien
ctgtgggtcagcgccaacttgcgga

SEQ ID NO: 193538 - DNA, 25 bp, Homo sapien
gggctgtgggtcagcgccaacttgc

SEQ ID NO: 193539 - DNA, 25 bp, Homo sapien
ctcctggtcttccttcttggcagcg

SEQ ID NO: 193540 - DNA, 25 bp, Homo sapien
ttgctcctggtcttccttcttggca

SEQ ID NO: 193541 - DNA, 25 bp, Homo sapien
cctggtcttccttcttggcagcgtt

SEQ ID NO: 193542 - DNA, 25 bp, Homo sapien
tgctcctggtcttccttcttggcag

SEQ ID NO: 193543 - DNA, 25 bp, Homo sapien
caggtagcgcaggaggatgtttgtc

SEQ ID NO: 193544 - DNA, 25 bp, Homo sapien
tgcaggtagcgcaggaggatgtttg

SEQ ID NO: 193545 - DNA, 25 bp, Homo sapien
ggtagcgcaggaggatgtttgtctt

SEQ ID NO: 193546 - DNA, 25 bp, Homo sapien
cattgctgatgcaggtagcgcagga

SEQ ID NO: 193547 - DNA, 25 bp, Homo sapien
ttcagacgggtactctcgggtgggc

SEQ ID NO: 193548 - DNA, 25 bp, Homo sapien
agacgggtactctcgggtgggcagg

SEQ ID NO: 193549 - DNA, 25 bp, Homo sapien
ctgttcagacgggtactctcgggtg

SEQ ID NO: 193550 - DNA, 25 bp, Homo sapien
tgttcagacgggtactctcgggtgg

SEQ ID NO: 193551 - DNA, 25 bp, Homo sapien
ctgagggccgttggttcgaggcttt

SEQ ID NO: 193552 - DNA, 25 bp, Homo sapien
ggccgttggttcgaggctttgcaca

SEQ ID NO: 193553 - DNA, 25 bp, Homo sapien
agggccgttggttcgaggctttgca

SEQ ID NO: 193554 - DNA, 25 bp, Homo sapien
gccgttggttcgaggctttgcacac

SEQ ID NO: 193555 - DNA, 25 bp, Homo sapien
tagacaggcagtcctttcaaaaaat

SEQ ID NO: 193556 - DNA, 25 bp, Homo sapien
tgcttttattgtagacaggcagtcc

SEQ ID NO: 193557 - DNA, 25 bp, Homo sapien
tccccgtgaaatcgactaaaattgc

SEQ ID NO: 193558 - DNA, 25 bp, Homo sapien
ccgtgaaatcgactaaaattgcttt

SEQ ID NO: 193559 - DNA, 25 bp, Homo sapien
tctgtttcctccgtagccgcctcag

SEQ ID NO: 193560 - DNA, 25 bp, Homo sapien
tcttctgtttcctccgtagccgcct

SEQ ID NO: 193561 - DNA, 25 bp, Homo sapien
gtttcctccgtagccgcctcagccg

SEQ ID NO: 193562 - DNA, 25 bp, Homo sapien
atcttctgtttcctccgtagccgcc

SEQ ID NO: 193563 - DNA, 25 bp, Homo sapien
aggcctggatctctctgtctagagt

SEQ ID NO: 193564 - DNA, 25 bp, Homo sapien
tgaattgcaggcctggatctctctg

SEQ ID NO: 193565 - DNA, 25 bp, Homo sapien
tgcaggcctggatctctctgtctag

SEQ ID NO: 193566 - DNA, 25 bp, Homo sapien
ttgaattgcaggcctggatctctct

SEQ ID NO: 193567 - DNA, 25 bp, Homo sapien
caaagtccacttttaagcacgcaat

SEQ ID NO: 193568 - DNA, 25 bp, Homo sapien
gatcagagtagctacagaaggcatc

SEQ ID NO: 193569 - DNA, 25 bp, Homo sapien
gaagggaccaatttattgcagctca

SEQ ID NO: 193570 - DNA, 25 bp, Homo sapien
tccatactccggaaagaagggacca

SEQ ID NO: 193571 - DNA, 25 bp, Homo sapien
catcgacttcaagaattcgggcaaa

SEQ ID NO: 193572 - DNA, 25 bp, Homo sapien
ggccatcgtgatgctctttgcactg

SEQ ID NO: 193573 - DNA, 25 bp, Homo sapien
tcttctcaaatctgtggccatcgtg

SEQ ID NO: 193574 - DNA, 25 bp, Homo sapien
gctttgtagcgcttttcatcccagg

SEQ ID NO: 193575 - DNA, 25 bp, Homo sapien
cattagccctcacgtgttctgaacg

SEQ ID NO: 193576 - DNA, 25 bp, Homo sapien
gctcagcctgtgacggaaaaccaca

SEQ ID NO: 193577 - DNA, 25 bp, Homo sapien
tactaggatagccttgagctctctc

SEQ ID NO: 193578 - DNA, 25 bp, Homo sapien
catcacaccggtcaagaaggcatcc

SEQ ID NO: 193579 - DNA, 25 bp, Homo sapien
caggtttgccaataaagctccgcct

SEQ ID NO: 193580 - DNA, 25 bp, Homo sapien
aaaagccaatcaggtttgccaataa

SEQ ID NO: 193581 - DNA, 25 bp, Homo sapien
ttgccaataaagctccgcctccgtg

SEQ ID NO: 193582 - DNA, 25 bp, Homo sapien
aaaaagccaatcaggtttgccaata

SEQ ID NO: 193583 - DNA, 25 bp, Homo sapien
cagtggaaccccgcccctctctgcg

SEQ ID NO: 193584 - DNA, 25 bp, Homo sapien
gaaccccgcccctctctgcgaggtc

SEQ ID NO: 193585 - DNA, 25 bp, Homo sapien
gcccctctctgcgaggtcccgcccc

SEQ ID NO: 193586 - DNA, 25 bp, Homo sapien
ccccgcccctctctgcgaggtcccg

SEQ ID NO: 193587 - DNA, 25 bp, Homo sapien
tccgtaataagaagcgacgtgtccc

SEQ ID NO: 193588 - DNA, 25 bp, Homo sapien
gctgcgctgtcaggcggctgaaaac

SEQ ID NO: 193589 - DNA, 25 bp, Homo sapien
tcccattgggcgaatctggatgctg

SEQ ID NO: 193590 - DNA, 25 bp, Homo sapien
ggtcgtgccgaatcttcctccgtaa

SEQ ID NO: 193591 - DNA, 25 bp, Homo sapien
taagacactgatctcagtcactcat

SEQ ID NO: 193592 - DNA, 25 bp, Homo sapien
atggtcaaaataagacactgatctc

SEQ ID NO: 193593 - DNA, 25 bp, Homo sapien
cactcctcagatgcctccctttttt

SEQ ID NO: 193594 - DNA, 25 bp, Homo sapien
tgatctcagtcactcatttctctgt

SEQ ID NO: 193595 - DNA, 25 bp, Homo sapien
aaaacaaagtgcctagtggtcctca

SEQ ID NO: 193596 - DNA, 25 bp, Homo sapien
aacaaagtgcctagtggtcctcaag

SEQ ID NO: 193597 - DNA, 25 bp, Homo sapien
caaagtgcctagtggtcctcaaggt

SEQ ID NO: 193598 - DNA, 25 bp, Homo sapien
agtgcctagtggtcctcaaggttgg

SEQ ID NO: 193599 - DNA, 25 bp, Homo sapien
gaaatgcgtgcctggaaatacttct

SEQ ID NO: 193600 - DNA, 25 bp, Homo sapien
gcatgcggctttgacttgcaataca

SEQ ID NO: 193601 - DNA, 25 bp, Homo sapien
taagtagtgattgatagcatgcggc

SEQ ID NO: 193602 - DNA, 25 bp, Homo sapien
cgatttgcctagtatccctgcagca

SEQ ID NO: 193603 - DNA, 25 bp, Homo sapien
cacaggagggacaactctgaaaaca

SEQ ID NO: 193604 - DNA, 25 bp, Homo sapien
ttgaaccaggcctttcacagtagct

SEQ ID NO: 193605 - DNA, 25 bp, Homo sapien
ctgtgaggtttttgaaccaggcctt

SEQ ID NO: 193606 - DNA, 25 bp, Homo sapien
ctctgaaaacaaccgctgtgaggtt

SEQ ID NO: 193607 - DNA, 25 bp, Homo sapien
tcagccagagtcttgatactacagg

SEQ ID NO: 193608 - DNA, 25 bp, Homo sapien
cacttaggtgacaataccaggaatc

SEQ ID NO: 193609 - DNA, 25 bp, Homo sapien
gagtatatctctctagctcccacag

SEQ ID NO: 193610 - DNA, 25 bp, Homo sapien
tccttggagctacattaaaagccac

SEQ ID NO: 193611 - DNA, 25 bp, Homo sapien
caatagtctagaacattatggcact

SEQ ID NO: 193612 - DNA, 25 bp, Homo sapien
aagtctgggccaactacaatagtgc

SEQ ID NO: 193613 - DNA, 25 bp, Homo sapien
tgttcactggtgtatggctcctact

SEQ ID NO: 193614 - DNA, 25 bp, Homo sapien
aaattgcccggctatagtattcaag

SEQ ID NO: 193615 - DNA, 25 bp, Homo sapien
ccatccggatgttcatgcagtacaa

SEQ ID NO: 193616 - DNA, 25 bp, Homo sapien
tgggaggcctgctgtactactgaag

SEQ ID NO: 193617 - DNA, 25 bp, Homo sapien
taaattcatccaacgttaacctgcc

SEQ ID NO: 193618 - DNA, 25 bp, Homo sapien
tcatggttatcagggaaggagagct

SEQ ID NO: 193619 - DNA, 25 bp, Homo sapien
ataggaagaccctgagtgaccaccg

SEQ ID NO: 193620 - DNA, 25 bp, Homo sapien
tagttatcgattacagcagcaccaa

SEQ ID NO: 193621 - DNA, 25 bp, Homo sapien
gctgaatccagccacgtatctgaga

SEQ ID NO: 193622 - DNA, 25 bp, Homo sapien
cagttaacccaaagttgcagcgaca

SEQ ID NO: 193623 - DNA, 25 bp, Homo sapien
gaaaacattgccttacatgtttaga

SEQ ID NO: 193624 - DNA, 25 bp, Homo sapien
tattcctactgctatattccaagga

SEQ ID NO: 193625 - DNA, 25 bp, Homo sapien
cattgccttacatgtttagaaatta

SEQ ID NO: 193626 - DNA, 25 bp, Homo sapien
ggaactattattgcaagcacatcat

SEQ ID NO: 193627 - DNA, 25 bp, Homo sapien
aataaagcctagcatgacacccacg

SEQ ID NO: 193628 - DNA, 25 bp, Homo sapien
cgtatctttcaatgctggacaaatg

SEQ ID NO: 193629 - DNA, 25 bp, Homo sapien
cactgattttgatgaggatcgtatc

SEQ ID NO: 193630 - DNA, 25 bp, Homo sapien
gacacccacgccaaagtgaatcctt

SEQ ID NO: 193631 - DNA, 25 bp, Homo sapien
cttacttggatcataacgctccaca

SEQ ID NO: 193632 - DNA, 25 bp, Homo sapien
ccttacttggatcataacgctccac

SEQ ID NO: 193633 - DNA, 25 bp, Homo sapien
tccttacttggatcataacgctcca

SEQ ID NO: 193634 - DNA, 25 bp, Homo sapien
actgtgtttcagagaacgtgtggca

SEQ ID NO: 193635 - DNA, 25 bp, Homo sapien
ttaacaggctgtgacaccattctgg

SEQ ID NO: 193636 - DNA, 25 bp, Homo sapien
ggagaattcatgtggcttactgcaa

SEQ ID NO: 193637 - DNA, 25 bp, Homo sapien
gaagaagagttgatgcactgcagca

SEQ ID NO: 193638 - DNA, 25 bp, Homo sapien
acaattacaattatatccatggagc

SEQ ID NO: 193639 - DNA, 25 bp, Homo sapien
tactgtgcacatagatgtacacacc

SEQ ID NO: 193640 - DNA, 25 bp, Homo sapien
catggagcagattaagtttcccaaa

SEQ ID NO: 193641 - DNA, 25 bp, Homo sapien
caaatgccggaagttcattcataca

SEQ ID NO: 193642 - DNA, 25 bp, Homo sapien
ttcatgtgggcaggaccatacccac

SEQ ID NO: 193643 - DNA, 25 bp, Homo sapien
gttcatgtgggcaggaccataccca

SEQ ID NO: 193644 - DNA, 25 bp, Homo sapien
tgttcatgtgggcaggaccataccc

SEQ ID NO: 193645 - DNA, 25 bp, Homo sapien
ctgttcatgtgggcaggaccatacc

SEQ ID NO: 193646 - DNA, 25 bp, Homo sapien
caagtatttgtatcaggattccagc

SEQ ID NO: 193647 - DNA, 25 bp, Homo sapien
gggtgccaaaccaatccaagagtca

SEQ ID NO: 193648 - DNA, 25 bp, Homo sapien
ttttctgatagtgacgccaggacgc

SEQ ID NO: 193649 - DNA, 25 bp, Homo sapien
cgtcattggtgccacaggttgccat

SEQ ID NO: 193650 - DNA, 25 bp, Homo sapien
ctcatggtagaagacatcacatgga

SEQ ID NO: 193651 - DNA, 25 bp, Homo sapien
gacatcacatggatagctagcaagc

SEQ ID NO: 193652 - DNA, 25 bp, Homo sapien
tagcatctgggaagggtcatctcat

SEQ ID NO: 193653 - DNA, 25 bp, Homo sapien
gctagcatctgggaagggtcatctc

SEQ ID NO: 193654 - DNA, 25 bp, Homo sapien
gtcaaggcatgatacatcctgaggc

SEQ ID NO: 193655 - DNA, 25 bp, Homo sapien
ctaaatcatatataagcgagagtca

SEQ ID NO: 193656 - DNA, 25 bp, Homo sapien
taagcgagagtcaaggcatgataca

SEQ ID NO: 193657 - DNA, 25 bp, Homo sapien
aattccagagtctatctaaatcata

SEQ ID NO: 193658 - DNA, 25 bp, Homo sapien
gaagggtcatcccatgatggaagac

SEQ ID NO: 193659 - DNA, 25 bp, Homo sapien
gacttatcttattatcaggagccca

SEQ ID NO: 193660 - DNA, 25 bp, Homo sapien
catcacatgaagtgcaagcgagtat

SEQ ID NO: 193661 - DNA, 25 bp, Homo sapien
cacatttaaactatagcagagggca

SEQ ID NO: 193662 - DNA, 25 bp, Homo sapien
acaaaacttcccctgatgctatcag

SEQ ID NO: 193663 - DNA, 25 bp, Homo sapien
tacccaccaaaagtcattatgttct

SEQ ID NO: 193664 - DNA, 25 bp, Homo sapien
tctgcttgaaattacccaccaaggc

SEQ ID NO: 193665 - DNA, 25 bp, Homo sapien
tatctacagcatttctacaactctg

SEQ ID NO: 193666 - DNA, 25 bp, Homo sapien
tgtagcccagtctcaacaatactag

SEQ ID NO: 193667 - DNA, 25 bp, Homo sapien
gagttaaacaatcaattcgtgtagc

SEQ ID NO: 193668 - DNA, 25 bp, Homo sapien
aactaatgttctatgtgtagcccag

SEQ ID NO: 193669 - DNA, 25 bp, Homo sapien
taaccagtgcatttcagaataagag

SEQ ID NO: 193670 - DNA, 25 bp, Homo sapien
cagagttaagtagatgccacaaaga

SEQ ID NO: 193671 - DNA, 25 bp, Homo sapien
caaagattacatggctcacaaagtc

SEQ ID NO: 193672 - DNA, 25 bp, Homo sapien
gatctcgttataatgcccaggcttg

SEQ ID NO: 193673 - DNA, 25 bp, Homo sapien
caaattaagggttggcaagctatca

SEQ ID NO: 193674 - DNA, 25 bp, Homo sapien
tgtataggcatactccacaatggcc

SEQ ID NO: 193675 - DNA, 25 bp, Homo sapien
cacaaagtactttgggagcacagcg

SEQ ID NO: 193676 - DNA, 25 bp, Homo sapien
aaaaacagtctcttcggtagctaca

SEQ ID NO: 193677 - DNA, 25 bp, Homo sapien
aatacgggctgacgctggcaagtac

SEQ ID NO: 193678 - DNA, 25 bp, Homo sapien
gtactaaattgccacttcccaatat

SEQ ID NO: 193679 - DNA, 25 bp, Homo sapien
tgtactaaattgccacttcccaata

SEQ ID NO: 193680 - DNA, 25 bp, Homo sapien
gatgcagccccaagaaagctcacac

SEQ ID NO: 193681 - DNA, 25 bp, Homo sapien
agccccaagaaagctcacaccaggt

SEQ ID NO: 193682 - DNA, 25 bp, Homo sapien
ccccaagaaagctcacaccaggtgt

SEQ ID NO: 193683 - DNA, 25 bp, Homo sapien
accagatgcagccccaagaaagctc

SEQ ID NO: 193684 - DNA, 25 bp, Homo sapien
tggatgtggtaatgactttgaactt

SEQ ID NO: 193685 - DNA, 25 bp, Homo sapien
ttggcttcccaagttcttggataca

SEQ ID NO: 193686 - DNA, 25 bp, Homo sapien
ctagttattaacttggcttcccaag

SEQ ID NO: 193687 - DNA, 25 bp, Homo sapien
ctctagttattaacttggcttccca

SEQ ID NO: 193688 - DNA, 25 bp, Homo sapien
cttggcttcccaagttcttggatac

SEQ ID NO: 193689 - DNA, 25 bp, Homo sapien
cagagcagggtaggaatacttgcat

SEQ ID NO: 193690 - DNA, 25 bp, Homo sapien
tccaaagcattcaggctcacactag

SEQ ID NO: 193691 - DNA, 25 bp, Homo sapien
cagctcttccactgtgtccgtttaa

SEQ ID NO: 193692 - DNA, 25 bp, Homo sapien
tgataacttagacttttcgcacgag

SEQ ID NO: 193693 - DNA, 25 bp, Homo sapien
ggatcctcactagctccggtcaaac

SEQ ID NO: 193694 - DNA, 25 bp, Homo sapien
gaggaaccgcggacaactggagcct

SEQ ID NO: 193695 - DNA, 25 bp, Homo sapien
aggaaccgcggacaactggagcctg

SEQ ID NO: 193696 - DNA, 25 bp, Homo sapien
gggctggatcctcactagctccggt

SEQ ID NO: 193697 - DNA, 25 bp, Homo sapien
caatcggtttggtcacgtggtgccc

SEQ ID NO: 193698 - DNA, 25 bp, Homo sapien
ccatggaagcaatcggtttggtcac

SEQ ID NO: 193699 - DNA, 25 bp, Homo sapien
tgcccttggttacgcccggtggcag

SEQ ID NO: 193700 - DNA, 25 bp, Homo sapien
aagaggtccgcgctgggtacatcac

SEQ ID NO: 193701 - DNA, 25 bp, Homo sapien
cagcactaactacagtgctcttccc

SEQ ID NO: 193702 - DNA, 25 bp, Homo sapien
taacagcactaactacagtgctctt

SEQ ID NO: 193703 - DNA, 25 bp, Homo sapien
acagcactaactacagtgctcttcc

SEQ ID NO: 193704 - DNA, 25 bp, Homo sapien
gtaacagcactaactacagtgctct

SEQ ID NO: 193705 - DNA, 25 bp, Homo sapien
ttactgggactaccggaatgcaaca

SEQ ID NO: 193706 - DNA, 25 bp, Homo sapien
actaccggaatgcaacaccaggcct

SEQ ID NO: 193707 - DNA, 25 bp, Homo sapien
agttactgggactaccggaatgcaa

SEQ ID NO: 193708 - DNA, 25 bp, Homo sapien
ggactaccggaatgcaacaccaggc

SEQ ID NO: 193709 - DNA, 25 bp, Homo sapien
tacctgacatctgcgatagtccctg

SEQ ID NO: 193710 - DNA, 25 bp, Homo sapien
gcgatagtccctgggttactgttgc

SEQ ID NO: 193711 - DNA, 25 bp, Homo sapien
tgatattgtatacctgacatctgcg

SEQ ID NO: 193712 - DNA, 25 bp, Homo sapien
catctgcgatagtccctgggttact

SEQ ID NO: 193713 - DNA, 25 bp, Homo sapien
gaattcatgggcttacaagtactgt

SEQ ID NO: 193714 - DNA, 25 bp, Homo sapien
tataaaggtgttattctgctgccca

SEQ ID NO: 193715 - DNA, 25 bp, Homo sapien
ttttcagaattcatgggcttacaag

SEQ ID NO: 193716 - DNA, 25 bp, Homo sapien
tgctgcccagttttgtaattctcaa

SEQ ID NO: 193717 - DNA, 25 bp, Homo sapien
ttttattaaagtggagatggtggta

SEQ ID NO: 193718 - DNA, 25 bp, Homo sapien
aaagtggagatggtggtacaactga

SEQ ID NO: 193719 - DNA, 25 bp, Homo sapien
ttaaagtggagatggtggtacaact

SEQ ID NO: 193720 - DNA, 25 bp, Homo sapien
gtggagatggtggtacaactgaaga

SEQ ID NO: 193721 - DNA, 25 bp, Homo sapien
ctaagattgttaacgcacagtcccc

SEQ ID NO: 193722 - DNA, 25 bp, Homo sapien
agtccccctcaatttgtccagagga

SEQ ID NO: 193723 - DNA, 25 bp, Homo sapien
acagtccccctcaatttgtccagag

SEQ ID NO: 193724 - DNA, 25 bp, Homo sapien
ctgctaagattgttaacgcacagtc

SEQ ID NO: 193725 - DNA, 25 bp, Homo sapien
catccttgatagctgatcatcctca

SEQ ID NO: 193726 - DNA, 25 bp, Homo sapien
taacatatcccttcagatacaaaga

SEQ ID NO: 193727 - DNA, 25 bp, Homo sapien
ctaagtcagattagcaataaacccc

SEQ ID NO: 193728 - DNA, 25 bp, Homo sapien
gcaaagaactttgctaagtcagatt

SEQ ID NO: 193729 - DNA, 25 bp, Homo sapien
gtggtccctatacctgttgcgatgg

SEQ ID NO: 193730 - DNA, 25 bp, Homo sapien
cccatgctgtatgaggagttgagcc

SEQ ID NO: 193731 - DNA, 25 bp, Homo sapien
caagtctccattgcagtcagtggtc

SEQ ID NO: 193732 - DNA, 25 bp, Homo sapien
ttcaggaaacctgagtgggcccagg

SEQ ID NO: 193733 - DNA, 25 bp, Homo sapien
gcgctgtgtttaagatcaggcgtgt

SEQ ID NO: 193734 - DNA, 25 bp, Homo sapien
ctataccatcgtgagatttgtgggt

SEQ ID NO: 193735 - DNA, 25 bp, Homo sapien
aggctgaatttctgcccgtttttag

SEQ ID NO: 193736 - DNA, 25 bp, Homo sapien
tcaggcgtgtgaaagcccctaaacg

SEQ ID NO: 193737 - DNA, 25 bp, Homo sapien
ggaaaggcaggtaggcgcagcggtc

SEQ ID NO: 193738 - DNA, 25 bp, Homo sapien
aggcgcagcggtccccgccctcgct

SEQ ID NO: 193739 - DNA, 25 bp, Homo sapien
gtaggcgcagcggtccccgccctcg

SEQ ID NO: 193740 - DNA, 25 bp, Homo sapien
ggagggaaaggcaggtaggcgcagc

SEQ ID NO: 193741 - DNA, 25 bp, Homo sapien
tgactttttcgcctccagggacact

SEQ ID NO: 193742 - DNA, 25 bp, Homo sapien
gtgactttttcgcctccagggacac

SEQ ID NO: 193743 - DNA, 25 bp, Homo sapien
catgcgcatcgtgccctggaccagg

SEQ ID NO: 193744 - DNA, 25 bp, Homo sapien
gcatgcgcatcgtgccctggaccag

SEQ ID NO: 193745 - DNA, 25 bp, Homo sapien
cacacaacccggtcagaatgcaggg

SEQ ID NO: 193746 - DNA, 25 bp, Homo sapien
tatggtctgtaacccaaagcctgcc

SEQ ID NO: 193747 - DNA, 25 bp, Homo sapien
tacactgcagcttaacaagtagggc

SEQ ID NO: 193748 - DNA, 25 bp, Homo sapien
ttgatgctctaatgggtctgtgccc

SEQ ID NO: 193749 - DNA, 25 bp, Homo sapien
ttgaggtatttccttgacccttgta

SEQ ID NO: 193750 - DNA, 25 bp, Homo sapien
tttaacatcttccatcagattatta

SEQ ID NO: 193751 - DNA, 25 bp, Homo sapien
tattggatttttaacatcttccatc

SEQ ID NO: 193752 - DNA, 25 bp, Homo sapien
gtatttccttgacccttgtattgga

SEQ ID NO: 193753 - DNA, 25 bp, Homo sapien
gtcagttggcctatggtgtttcaca

SEQ ID NO: 193754 - DNA, 25 bp, Homo sapien
tggtggattcccagtgatagtaacc

SEQ ID NO: 193755 - DNA, 25 bp, Homo sapien
tctgaaatccccatagctgggcggg

SEQ ID NO: 193756 - DNA, 25 bp, Homo sapien
caagcatatggaagcactgtgtgtt

SEQ ID NO: 193757 - DNA, 25 bp, Homo sapien
taggcgttgcctatgttgtaagcac

SEQ ID NO: 193758 - DNA, 25 bp, Homo sapien
cagtccctctaaactgatgttgcca

SEQ ID NO: 193759 - DNA, 25 bp, Homo sapien
gaggacttgggagaatacttcataa

SEQ ID NO: 193760 - DNA, 25 bp, Homo sapien
tcataaacaaaagcataggcgttgc

SEQ ID NO: 193761 - DNA, 25 bp, Homo sapien
tagtggctcattggttttgaagtac

SEQ ID NO: 193762 - DNA, 25 bp, Homo sapien
gatgaggtccttagttccaattccc

SEQ ID NO: 193763 - DNA, 25 bp, Homo sapien
caatctgtccagataattttactgg

SEQ ID NO: 193764 - DNA, 25 bp, Homo sapien
gttactccctggtttgatgaggtcc

SEQ ID NO: 193765 - DNA, 25 bp, Homo sapien
ttattgagccacttaagtttacaac

SEQ ID NO: 193766 - DNA, 25 bp, Homo sapien
tccttgaccagtattttacacagct

SEQ ID NO: 193767 - DNA, 25 bp, Homo sapien
gattcataagggatttatctctcaa

SEQ ID NO: 193768 - DNA, 25 bp, Homo sapien
gaaagtattttagaccagggattca

SEQ ID NO: 193769 - DNA, 25 bp, Homo sapien
caagttctaactagttgtgtaaatt

SEQ ID NO: 193770 - DNA, 25 bp, Homo sapien
taatatccttagagctgaagcactg

SEQ ID NO: 193771 - DNA, 25 bp, Homo sapien
tcctttacaatagtaacaagttcta

SEQ ID NO: 193772 - DNA, 25 bp, Homo sapien
tgctaatatccttagagctgaagca

SEQ ID NO: 193773 - DNA, 25 bp, Homo sapien
cttcaaaagtgagttttgcatttgg

SEQ ID NO: 193774 - DNA, 25 bp, Homo sapien
attccacttcaaaagtgagttttgc

SEQ ID NO: 193775 - DNA, 25 bp, Homo sapien
tccacttcaaaagtgagttttgcat

SEQ ID NO: 193776 - DNA, 25 bp, Homo sapien
cacttcaaaagtgagttttgcattt

SEQ ID NO: 193777 - DNA, 25 bp, Homo sapien
tcctcaaaggtgatctagacgtttt

SEQ ID NO: 193778 - DNA, 25 bp, Homo sapien
tacagtttgtactgggcatggtaac

SEQ ID NO: 193779 - DNA, 25 bp, Homo sapien
aatactattgcctattggaggtgct

SEQ ID NO: 193780 - DNA, 25 bp, Homo sapien
tcaggaagactagtctggacaggat

SEQ ID NO: 193781 - DNA, 25 bp, Homo sapien
cctttctttccgtaagcccattctg

SEQ ID NO: 193782 - DNA, 25 bp, Homo sapien
ttggcatcaggctgtcctttctttc

SEQ ID NO: 193783 - DNA, 25 bp, Homo sapien
tcatagtcaagagagcttcatccca

SEQ ID NO: 193784 - DNA, 25 bp, Homo sapien
cattctggttcaatctccagtcgag

SEQ ID NO: 193785 - DNA, 25 bp, Homo sapien
tgataactttgcctactccgacctt

SEQ ID NO: 193786 - DNA, 25 bp, Homo sapien
gataactttgcctactccgacctta

SEQ ID NO: 193787 - DNA, 25 bp, Homo sapien
tcctctgataactttgcctactccg

SEQ ID NO: 193788 - DNA, 25 bp, Homo sapien
tctgataactttgcctactccgacc

SEQ ID NO: 193789 - DNA, 25 bp, Homo sapien
cagatttagtatattttggtggacc

SEQ ID NO: 193790 - DNA, 25 bp, Homo sapien
tagtatcaaaaacagtcccatcttg

SEQ ID NO: 193791 - DNA, 25 bp, Homo sapien
cttgtagtgttcctgtataccagca

SEQ ID NO: 193792 - DNA, 25 bp, Homo sapien
tataccagcagtgaacaacatctcc

SEQ ID NO: 193793 - DNA, 25 bp, Homo sapien
cagaggaactgtcaagaatcttagg

SEQ ID NO: 193794 - DNA, 25 bp, Homo sapien
caattcatatatgagaggaaagcag

SEQ ID NO: 193795 - DNA, 25 bp, Homo sapien
tcagaccaaattcagagggatctgc

SEQ ID NO: 193796 - DNA, 25 bp, Homo sapien
aacaggcatatttcctagaacaaag

SEQ ID NO: 193797 - DNA, 25 bp, Homo sapien
tacttgctcagacactttacttata

SEQ ID NO: 193798 - DNA, 25 bp, Homo sapien
cttgctcagacactttacttatact

SEQ ID NO: 193799 - DNA, 25 bp, Homo sapien
ttttacttgctcagacactttactt

SEQ ID NO: 193800 - DNA, 25 bp, Homo sapien
tgctcagacactttacttatacttt

SEQ ID NO: 193801 - DNA, 25 bp, Homo sapien
aaaagatggttataggctgtaacca

SEQ ID NO: 193802 - DNA, 25 bp, Homo sapien
caaaaagatggttataggctgtaac

SEQ ID NO: 193803 - DNA, 25 bp, Homo sapien
aaagatggttataggctgtaaccaa

SEQ ID NO: 193804 - DNA, 25 bp, Homo sapien
tcttagccgactaggaagagtcact

SEQ ID NO: 193805 - DNA, 25 bp, Homo sapien
gctcactgcaggaggatacttgggt

SEQ ID NO: 193806 - DNA, 25 bp, Homo sapien
ggttggacatagctatcctgaggca

SEQ ID NO: 193807 - DNA, 25 bp, Homo sapien
taaaatcctagctgtgtgggccggg

SEQ ID NO: 193808 - DNA, 25 bp, Homo sapien
gaaatgtgcatgtagctcccttaaa

SEQ ID NO: 193809 - DNA, 25 bp, Homo sapien
gaatacggaatgtatgggcatctcc

SEQ ID NO: 193810 - DNA, 25 bp, Homo sapien
tcaaggatcccaatgaggttctaac

SEQ ID NO: 193811 - DNA, 25 bp, Homo sapien
aagcaagttggatacaccgttccca

SEQ ID NO: 193812 - DNA, 25 bp, Homo sapien
cgaatctgaaccgtgttcctgcaga

SEQ ID NO: 193813 - DNA, 25 bp, Homo sapien
gcagctgctcactgcgcagctgctc

SEQ ID NO: 193814 - DNA, 25 bp, Homo sapien
gtccacgcccgctgtggaacggccg

SEQ ID NO: 193815 - DNA, 25 bp, Homo sapien
tgctccacggtccacgcccgctgtg

SEQ ID NO: 193816 - DNA, 25 bp, Homo sapien
gccgcagttcggcatcgccccgccc

SEQ ID NO: 193817 - DNA, 25 bp, Homo sapien
tttactgagccagcccgccgcagtt

SEQ ID NO: 193818 - DNA, 25 bp, Homo sapien
gccagcccgccgcagttcggcatcg

SEQ ID NO: 193819 - DNA, 25 bp, Homo sapien
ctttactgagccagcccgccgcagt

SEQ ID NO: 193820 - DNA, 25 bp, Homo sapien
tcaaggctgtgctatgagggcttct

SEQ ID NO: 193821 - DNA, 25 bp, Homo sapien
ggcttctttgttgagtccgggttga

SEQ ID NO: 193822 - DNA, 25 bp, Homo sapien
gggcctgtctttgagtgacgtcaag

SEQ ID NO: 193823 - DNA, 25 bp, Homo sapien
tgagtgacgtcaaggctgtgctatg

SEQ ID NO: 193824 - DNA, 25 bp, Homo sapien
gaattagacaccttgtgaagcgacc

SEQ ID NO: 193825 - DNA, 25 bp, Homo sapien
gaccgctagagatcttcgattctga

SEQ ID NO: 193826 - DNA, 25 bp, Homo sapien
tacccacatttaaggcagctatgcc

SEQ ID NO: 193827 - DNA, 25 bp, Homo sapien
cagtcgactgagtagaagaccgcta

SEQ ID NO: 193828 - DNA, 25 bp, Homo sapien
gaacatcaggactccttacttaaaa

SEQ ID NO: 193829 - DNA, 25 bp, Homo sapien
gttgaacatcaggactccttactta

SEQ ID NO: 193830 - DNA, 25 bp, Homo sapien
aataaagatttaatagttgaacatc

SEQ ID NO: 193831 - DNA, 25 bp, Homo sapien
tagttgaacatcaggactccttact

SEQ ID NO: 193832 - DNA, 25 bp, Homo sapien
agagaatggcgggttctgcacctcc

SEQ ID NO: 193833 - DNA, 25 bp, Homo sapien
gatcatctgggactccgggttgcag

SEQ ID NO: 193834 - DNA, 25 bp, Homo sapien
gatttaccctaccaattgcccagtg

SEQ ID NO: 193835 - DNA, 25 bp, Homo sapien
tgatgtgttgcttgtcgcggcgtac

SEQ ID NO: 193836 - DNA, 25 bp, Homo sapien
taaaattcaagacagctgggctcag

SEQ ID NO: 193837 - DNA, 25 bp, Homo sapien
aaggttaatctaacagtttactgat

SEQ ID NO: 193838 - DNA, 25 bp, Homo sapien
ttaaaattcaagacagctgggctca

SEQ ID NO: 193839 - DNA, 25 bp, Homo sapien
aattcaagacagctgggctcagtga

SEQ ID NO: 193840 - DNA, 25 bp, Homo sapien
tactataacaaagagccagtcatct

SEQ ID NO: 193841 - DNA, 25 bp, Homo sapien
aaacaggcccctccaatgaaaagct

SEQ ID NO: 193842 - DNA, 25 bp, Homo sapien
gattcatggcaatcactggacactg

SEQ ID NO: 193843 - DNA, 25 bp, Homo sapien
cagagctaaggttgtagggcaaaca

SEQ ID NO: 193844 - DNA, 25 bp, Homo sapien
acaagggtaggtgaatgtgtagcca

SEQ ID NO: 193845 - DNA, 25 bp, Homo sapien
aatagctaccaatacaacctctgtc

SEQ ID NO: 193846 - DNA, 25 bp, Homo sapien
tgtgtagccagagggaaaatatcct

SEQ ID NO: 193847 - DNA, 25 bp, Homo sapien
tttacaaaggtttcatagatatgcc

SEQ ID NO: 193848 - DNA, 25 bp, Homo sapien
tgctttatggtaaaaatcccaggaa

SEQ ID NO: 193849 - DNA, 25 bp, Homo sapien
cataggaagctactttacaaagaaa

SEQ ID NO: 193850 - DNA, 25 bp, Homo sapien
tacagatatctacacgagcaaaaac

SEQ ID NO: 193851 - DNA, 25 bp, Homo sapien
catttttagtaagctgcagcaatga

SEQ ID NO: 193852 - DNA, 25 bp, Homo sapien
ttccaataccagagttttctcctaa

SEQ ID NO: 193853 - DNA, 25 bp, Homo sapien
tttccaataccagagttttctccta

SEQ ID NO: 193854 - DNA, 25 bp, Homo sapien
ctatgcagaatcagagttcgaaaaa

SEQ ID NO: 193855 - DNA, 25 bp, Homo sapien
gcagaatcagagttcgaaaaataat

SEQ ID NO: 193856 - DNA, 25 bp, Homo sapien
taagtctgtccacttgagagcaatt

SEQ ID NO: 193857 - DNA, 25 bp, Homo sapien
tctgtccacttgagagcaattaatt

SEQ ID NO: 193858 - DNA, 25 bp, Homo sapien
tccacttgagagcaattaattttaa

SEQ ID NO: 193859 - DNA, 25 bp, Homo sapien
agtctgtccacttgagagcaattaa

SEQ ID NO: 193860 - DNA, 25 bp, Homo sapien
gtgttggagttgagaaatcagtttc

SEQ ID NO: 193861 - DNA, 25 bp, Homo sapien
ttggtgttggagttgagaaatcagt

SEQ ID NO: 193862 - DNA, 25 bp, Homo sapien
ttggagttgagaaatcagtttcaac

SEQ ID NO: 193863 - DNA, 25 bp, Homo sapien
cttcttggtgttggagttgagaaat

SEQ ID NO: 193864 - DNA, 25 bp, Homo sapien
gtgaagtctacctcaaatctagaca

SEQ ID NO: 193865 - DNA, 25 bp, Homo sapien
aaaattaagcatgcttatccccaga

SEQ ID NO: 193866 - DNA, 25 bp, Homo sapien
taaaagagttactattaatagctaa

SEQ ID NO: 193867 - DNA, 25 bp, Homo sapien
aaatggtacctcctggtgaagtcta

SEQ ID NO: 193868 - DNA, 25 bp, Homo sapien
ggttcccataagttaccattctcga

SEQ ID NO: 193869 - DNA, 25 bp, Homo sapien
tttctgagatgaggtaaaacactgc

SEQ ID NO: 193870 - DNA, 25 bp, Homo sapien
gatccccattgtcataccacacatg

SEQ ID NO: 193871 - DNA, 25 bp, Homo sapien
gatacaaattcatgctcacagactg

SEQ ID NO: 193872 - DNA, 25 bp, Homo sapien
tacattataatcacctcagggacag

SEQ ID NO: 193873 - DNA, 25 bp, Homo sapien
ggacagggactgttacatgacttac

SEQ ID NO: 193874 - DNA, 25 bp, Homo sapien
cagacctctgtgtatatttttccca

SEQ ID NO: 193875 - DNA, 25 bp, Homo sapien
ttcagtcaatgtgatgccatctgta

SEQ ID NO: 193876 - DNA, 25 bp, Homo sapien
tatgatatttttgcatacgaaaaac

SEQ ID NO: 193877 - DNA, 25 bp, Homo sapien
ttttgcatacgaaaaacatatttat

SEQ ID NO: 193878 - DNA, 25 bp, Homo sapien
tttcttgatgttgccccagacaata

SEQ ID NO: 193879 - DNA, 25 bp, Homo sapien
atgttgccccagacaataccaccat

SEQ ID NO: 193880 - DNA, 25 bp, Homo sapien
tgtcatacttttaaccacaggttga

SEQ ID NO: 193881 - DNA, 25 bp, Homo sapien
cctatggagatggacaaaatgctta

SEQ ID NO: 193882 - DNA, 25 bp, Homo sapien
ggacaataaaatgtgcctatggaga

SEQ ID NO: 193883 - DNA, 25 bp, Homo sapien
cacaggttgaacaacaattgcctaa

SEQ ID NO: 193884 - DNA, 25 bp, Homo sapien
tctttccggtatcttgctgcctctc

SEQ ID NO: 193885 - DNA, 25 bp, Homo sapien
taccgtctacgctctttccggtatc

SEQ ID NO: 193886 - DNA, 25 bp, Homo sapien
ggactcccttttgctataccattat

SEQ ID NO: 193887 - DNA, 25 bp, Homo sapien
ttggactcccttttgctataccatt

SEQ ID NO: 193888 - DNA, 25 bp, Homo sapien
aacaggcctagccagttgttcagga

SEQ ID NO: 193889 - DNA, 25 bp, Homo sapien
gggtttctaatccagctcatcaagc

SEQ ID NO: 193890 - DNA, 25 bp, Homo sapien
caggatcagcaactggtaagtctat

SEQ ID NO: 193891 - DNA, 25 bp, Homo sapien
tatgcctggtgattgaaaactgtca

SEQ ID NO: 193892 - DNA, 25 bp, Homo sapien
gaatagcaccccgatttgatgaact

SEQ ID NO: 193893 - DNA, 25 bp, Homo sapien
tactggcatctatggtcctcatgaa

SEQ ID NO: 193894 - DNA, 25 bp, Homo sapien
aattcctaagtcaaagggcatgtgc

SEQ ID NO: 193895 - DNA, 25 bp, Homo sapien
tgttgctgcaaagatcgcactactt

SEQ ID NO: 193896 - DNA, 25 bp, Homo sapien
tagcatgccaggactgacatgctga

SEQ ID NO: 193897 - DNA, 25 bp, Homo sapien
ctagcatgccaggactgacatgctg

SEQ ID NO: 193898 - DNA, 25 bp, Homo sapien
agcatgccaggactgacatgctgac

SEQ ID NO: 193899 - DNA, 25 bp, Homo sapien
tggaaagataactgatgatggagtt

SEQ ID NO: 193900 - DNA, 25 bp, Homo sapien
gaaagataactgatgatggagttgt

SEQ ID NO: 193901 - DNA, 25 bp, Homo sapien
aatggaaagataactgatgatggag

SEQ ID NO: 193902 - DNA, 25 bp, Homo sapien
ccaatggaaagataactgatgatgg

SEQ ID NO: 193903 - DNA, 25 bp, Homo sapien
tagttttggaggactgataagttgg

SEQ ID NO: 193904 - DNA, 25 bp, Homo sapien
gactgataagttggttcttcttgta

SEQ ID NO: 193905 - DNA, 25 bp, Homo sapien
ctgataagttggttcttcttgtaac

SEQ ID NO: 193906 - DNA, 25 bp, Homo sapien
tggaggactgataagttggttcttc

SEQ ID NO: 193907 - DNA, 25 bp, Homo sapien
gttcactccacaaattgaagactgg

SEQ ID NO: 193908 - DNA, 25 bp, Homo sapien
tgttggagcagattgagccacctaa

SEQ ID NO: 193909 - DNA, 25 bp, Homo sapien
gggccggatcctggcataaactgga

SEQ ID NO: 193910 - DNA, 25 bp, Homo sapien
gctggccccttcaccaaatggaata

SEQ ID NO: 193911 - DNA, 25 bp, Homo sapien
tagccgttagtaggaacccaagcag

SEQ ID NO: 193912 - DNA, 25 bp, Homo sapien
ttatgcttagccgttagtaggaacc

SEQ ID NO: 193913 - DNA, 25 bp, Homo sapien
ctatgcagaatgtgctttgctaaaa

SEQ ID NO: 193914 - DNA, 25 bp, Homo sapien
cccaagcagtgttaaccattgtggg

SEQ ID NO: 193915 - DNA, 25 bp, Homo sapien
agttatcttaatagtttgtttctga

SEQ ID NO: 193916 - DNA, 25 bp, Homo sapien
tgatgctgtaaaggtgttgtactga

SEQ ID NO: 193917 - DNA, 25 bp, Homo sapien
atcatggtcatcttttggcaactgt

SEQ ID NO: 193918 - DNA, 25 bp, Homo sapien
aagagttcccactttggcagttatc

SEQ ID NO: 193919 - DNA, 25 bp, Homo sapien
ttttggcctttggaattggctggct

SEQ ID NO: 193920 - DNA, 25 bp, Homo sapien
ggagatcgagaacctacagccgcag

SEQ ID NO: 193921 - DNA, 25 bp, Homo sapien
tcttagtgacatgtttctgggatcc

SEQ ID NO: 193922 - DNA, 25 bp, Homo sapien
tgtgctttggaagagatgcaaaagc

SEQ ID NO: 193923 - DNA, 25 bp, Homo sapien
gactccgcctccttagtggttggca

SEQ ID NO: 193924 - DNA, 25 bp, Homo sapien
taacgctgtattgttccttgcccaa

SEQ ID NO: 193925 - DNA, 25 bp, Homo sapien
aggagtgccgggcattatcatagct

SEQ ID NO: 193926 - DNA, 25 bp, Homo sapien
catctcctctaggttattccagata

SEQ ID NO: 193927 - DNA, 25 bp, Homo sapien
tactgctttgatggtgccagcggac

SEQ ID NO: 193928 - DNA, 25 bp, Homo sapien
ccaggtaagcattctaagggatgcc

SEQ ID NO: 193929 - DNA, 25 bp, Homo sapien
gccagcggacagattatacctcatg

SEQ ID NO: 193930 - DNA, 25 bp, Homo sapien
taagtaagtcacgttcatcgcaatc

SEQ ID NO: 193931 - DNA, 25 bp, Homo sapien
tggatacatccaattcttcagttgt

SEQ ID NO: 193932 - DNA, 25 bp, Homo sapien
aatatcaatggatacatccaattct

SEQ ID NO: 193933 - DNA, 25 bp, Homo sapien
tcaatggatacatccaattcttcag

SEQ ID NO: 193934 - DNA, 25 bp, Homo sapien
gatacatccaattcttcagttgtct

SEQ ID NO: 193935 - DNA, 25 bp, Homo sapien
tcataagacaaaaccaaagaccaaa

SEQ ID NO: 193936 - DNA, 25 bp, Homo sapien
taatttcataagacaaaaccaaaga

SEQ ID NO: 193937 - DNA, 25 bp, Homo sapien
gacaaaaccaaagaccaaaatctca

SEQ ID NO: 193938 - DNA, 25 bp, Homo sapien
accaaagaccaaaatctcaaattag

SEQ ID NO: 193939 - DNA, 25 bp, Homo sapien
aactcggaagtataagtagcactgc

SEQ ID NO: 193940 - DNA, 25 bp, Homo sapien
gaagcctctaaattacaatccgtgg

SEQ ID NO: 193941 - DNA, 25 bp, Homo sapien
tccaattcaaatgtttacctgggaa

SEQ ID NO: 193942 - DNA, 25 bp, Homo sapien
gctatcttggatacttaaaccgaat

SEQ ID NO: 193943 - DNA, 25 bp, Homo sapien
gtttctttgaagacattttatattc

SEQ ID NO: 193944 - DNA, 25 bp, Homo sapien
catttgttctttcaccaatttttag

SEQ ID NO: 193945 - DNA, 25 bp, Homo sapien
cttgcttctgactttttattatcct

SEQ ID NO: 193946 - DNA, 25 bp, Homo sapien
ttattatcctttcatttgttctttc

SEQ ID NO: 193947 - DNA, 25 bp, Homo sapien
gaatagtattatttacttggtcatc

SEQ ID NO: 193948 - DNA, 25 bp, Homo sapien
ggtcatctgggaaccttaatgttgg

SEQ ID NO: 193949 - DNA, 25 bp, Homo sapien
tgattagataagtcatctcctcctc

SEQ ID NO: 193950 - DNA, 25 bp, Homo sapien
aattctgtagctcctggtgactcac

SEQ ID NO: 193951 - DNA, 25 bp, Homo sapien
gtttggttttctcgtgcatcatttt

SEQ ID NO: 193952 - DNA, 25 bp, Homo sapien
ttgatttccttatgtcacggacaga

SEQ ID NO: 193953 - DNA, 25 bp, Homo sapien
caatcaaaatcgtaagtggtggtgg

SEQ ID NO: 193954 - DNA, 25 bp, Homo sapien
tatgtcacggacagatcttccagtt

SEQ ID NO: 193955 - DNA, 25 bp, Homo sapien
ttccttaatactgattctcaaaaaa

SEQ ID NO: 193956 - DNA, 25 bp, Homo sapien
aaactccaaaactggcatttcaggc

SEQ ID NO: 193957 - DNA, 25 bp, Homo sapien
tgcttctgaaatgcttcacagacca

SEQ ID NO: 193958 - DNA, 25 bp, Homo sapien
agttctagtaaaatgttattgcttc

SEQ ID NO: 193959 - DNA, 25 bp, Homo sapien
ttcacagaccaaagcaaactccaaa

SEQ ID NO: 193960 - DNA, 25 bp, Homo sapien
ctgagacaggcggatcacttgtagc

SEQ ID NO: 193961 - DNA, 25 bp, Homo sapien
agttcgagaccagtctggccaacat

SEQ ID NO: 193962 - DNA, 25 bp, Homo sapien
gacaggcggatcacttgtagccagg

SEQ ID NO: 193963 - DNA, 25 bp, Homo sapien
gagacaggcggatcacttgtagcca

SEQ ID NO: 193964 - DNA, 25 bp, Homo sapien
tatatctcaataaagttgacttcta

SEQ ID NO: 193965 - DNA, 25 bp, Homo sapien
tctcaataaagttgacttctaaaaa

SEQ ID NO: 193966 - DNA, 25 bp, Homo sapien
tatctcaataaagttgacttctaaa

SEQ ID NO: 193967 - DNA, 25 bp, Homo sapien
ttatatctcaataaagttgacttct

SEQ ID NO: 193968 - DNA, 25 bp, Homo sapien
caatgtgctctttccaattttctgg

SEQ ID NO: 193969 - DNA, 25 bp, Homo sapien
ttccagaaaattatcaatgtgctct

SEQ ID NO: 193970 - DNA, 25 bp, Homo sapien
ttccttatgagataatttggatatc

SEQ ID NO: 193971 - DNA, 25 bp, Homo sapien
ttctggaaatccaaacataaatttc

SEQ ID NO: 193972 - DNA, 25 bp, Homo sapien
tgtgccaatatatgttagtgacgtc

SEQ ID NO: 193973 - DNA, 25 bp, Homo sapien
tctttcatggaaatttggtctatca

SEQ ID NO: 193974 - DNA, 25 bp, Homo sapien
gctcaatccgctctataattacatt

SEQ ID NO: 193975 - DNA, 25 bp, Homo sapien
taaacgttgcctgatatagtcctaa

SEQ ID NO: 193976 - DNA, 25 bp, Homo sapien
tatagcagtattattattgatgctt

SEQ ID NO: 193977 - DNA, 25 bp, Homo sapien
gatgcttttaatcatccattcctgt

SEQ ID NO: 193978 - DNA, 25 bp, Homo sapien
atatagcagtattattattgatgct

SEQ ID NO: 193979 - DNA, 25 bp, Homo sapien
atgcttttaatcatccattcctgta

SEQ ID NO: 193980 - DNA, 25 bp, Homo sapien
attccaaagtaaacatctgaatagc

SEQ ID NO: 193981 - DNA, 25 bp, Homo sapien
ggtaactgctggtaatctagattta

SEQ ID NO: 193982 - DNA, 25 bp, Homo sapien
tcttactacaagtaaaatatcattc

SEQ ID NO: 193983 - DNA, 25 bp, Homo sapien
taagattgaactacttctgatgaga

SEQ ID NO: 193984 - DNA, 25 bp, Homo sapien
ccacatttggaactacctgagatat

SEQ ID NO: 193985 - DNA, 25 bp, Homo sapien
taggatagtttataagccatgggtc

SEQ ID NO: 193986 - DNA, 25 bp, Homo sapien
tgagatatatcaacgcaccagtcag

SEQ ID NO: 193987 - DNA, 25 bp, Homo sapien
cagtgagcctcaacaggtgatggaa

SEQ ID NO: 193988 - DNA, 25 bp, Homo sapien
cagagaatttgtcctaatgtaacag

SEQ ID NO: 193989 - DNA, 25 bp, Homo sapien
gactacacaactagtaatagagcaa

SEQ ID NO: 193990 - DNA, 25 bp, Homo sapien
gaattcaatgttcatcaccaaaagg

SEQ ID NO: 193991 - DNA, 25 bp, Homo sapien
caaaataagacttaacatgtgggtc

SEQ ID NO: 193992 - DNA, 25 bp, Homo sapien
agtttgaaatattcttggaggagaa

SEQ ID NO: 193993 - DNA, 25 bp, Homo sapien
tattcttggaggagaaagctttgaa

SEQ ID NO: 193994 - DNA, 25 bp, Homo sapien
gaaatattcttggaggagaaagctt

SEQ ID NO: 193995 - DNA, 25 bp, Homo sapien
tttaagtccatttgtaacagtttga

SEQ ID NO: 193996 - DNA, 25 bp, Homo sapien
ctccgaggtattgttatatgaagtc

SEQ ID NO: 193997 - DNA, 25 bp, Homo sapien
ggtgttgcaagtacaattttacatg

SEQ ID NO: 193998 - DNA, 25 bp, Homo sapien
tgttatatgaagtcttggtgttgca

SEQ ID NO: 193999 - DNA, 25 bp, Homo sapien
aagtcttggtgttgcaagtacaatt

SEQ ID NO: 194000 - DNA, 25 bp, Homo sapien
tgtctctccaggcactgtttttcca

SEQ ID NO: 194001 - DNA, 25 bp, Homo sapien
tctctccaggcactgtttttccatt

SEQ ID NO: 194002 - DNA, 25 bp, Homo sapien
tggaagacctgtctctccaggcact

SEQ ID NO: 194003 - DNA, 25 bp, Homo sapien
tctccaggcactgtttttccatttc

SEQ ID NO: 194004 - DNA, 25 bp, Homo sapien
aatgtcttgtttcgggcttctacag

SEQ ID NO: 194005 - DNA, 25 bp, Homo sapien
ggttgcaactatactctcctttgag

SEQ ID NO: 194006 - DNA, 25 bp, Homo sapien
tatcagaaaccattaacaggctgcc

SEQ ID NO: 194007 - DNA, 25 bp, Homo sapien
tgtttagccaactgagctctagtta

SEQ ID NO: 194008 - DNA, 25 bp, Homo sapien
tatttgatgattctagaggaactcc

SEQ ID NO: 194009 - DNA, 25 bp, Homo sapien
ttatttgatgattctagaggaactc

SEQ ID NO: 194010 - DNA, 25 bp, Homo sapien
caaaaaagattgcatccatgggtag

SEQ ID NO: 194011 - DNA, 25 bp, Homo sapien
tcttttacaggagtaagtgtgcctg

SEQ ID NO: 194012 - DNA, 25 bp, Homo sapien
gcactgatatcaagagaactgttag

SEQ ID NO: 194013 - DNA, 25 bp, Homo sapien
ggtagtagcctctgttagcatagtt

SEQ ID NO: 194014 - DNA, 25 bp, Homo sapien
cacttaagcgcaattttcagataga

SEQ ID NO: 194015 - DNA, 25 bp, Homo sapien
cttgacaagaaagtagcaaccaagt

SEQ ID NO: 194016 - DNA, 25 bp, Homo sapien
caagaaagtagcaaccaagttcttc

SEQ ID NO: 194017 - DNA, 25 bp, Homo sapien
agaacttcagaagggatccacagaa

SEQ ID NO: 194018 - DNA, 25 bp, Homo sapien
gataattgtggtcacgttgaaaggc

SEQ ID NO: 194019 - DNA, 25 bp, Homo sapien
tgtggtcacgttgaaaggctccaag

SEQ ID NO: 194020 - DNA, 25 bp, Homo sapien
aaacagagctttctgtttcctaatg

SEQ ID NO: 194021 - DNA, 25 bp, Homo sapien
ccaaaacagagctttctgtttccta

SEQ ID NO: 194022 - DNA, 25 bp, Homo sapien
tttagtaactagcaacccgcaagtg

SEQ ID NO: 194023 - DNA, 25 bp, Homo sapien
cattagtggagatttagtaactagc

SEQ ID NO: 194024 - DNA, 25 bp, Homo sapien
accactgggtctagataatccagga

SEQ ID NO: 194025 - DNA, 25 bp, Homo sapien
gctaaacaaagaaatcagcctctga

SEQ ID NO: 194026 - DNA, 25 bp, Homo sapien
ttcaaatttgaagagcccgccctcc

SEQ ID NO: 194027 - DNA, 25 bp, Homo sapien
tcacagggacgcaagaaaactgcag

SEQ ID NO: 194028 - DNA, 25 bp, Homo sapien
tgtgtccacaaaaagtaggcgaccc

SEQ ID NO: 194029 - DNA, 25 bp, Homo sapien
taggcgaccctaagctgtcacaggc

SEQ ID NO: 194030 - DNA, 25 bp, Homo sapien
tcgtttcgtcttcgtagggcacgcg

SEQ ID NO: 194031 - DNA, 25 bp, Homo sapien
tactgcggctaagtttggcctttcc

SEQ ID NO: 194032 - DNA, 25 bp, Homo sapien
gaatcccgcctttcctctcgtgaag

SEQ ID NO: 194033 - DNA, 25 bp, Homo sapien
tctcaggaaaacagcgtgcttggtg

SEQ ID NO: 194034 - DNA, 25 bp, Homo sapien
gataaaatgaagtttctttcttgta

SEQ ID NO: 194035 - DNA, 25 bp, Homo sapien
taaaatgaagtttctttcttgtaca

SEQ ID NO: 194036 - DNA, 25 bp, Homo sapien
ctggataaaatgaagtttctttctt

SEQ ID NO: 194037 - DNA, 25 bp, Homo sapien
atgaagtttctttcttgtacaccat

SEQ ID NO: 194038 - DNA, 25 bp, Homo sapien
aaaaagtatgaaacacttcacaaat

SEQ ID NO: 194039 - DNA, 25 bp, Homo sapien
atgaaacacttcacaaattcgtatg

SEQ ID NO: 194040 - DNA, 25 bp, Homo sapien
acaaattcgtatgtcatccttgttc

SEQ ID NO: 194041 - DNA, 25 bp, Homo sapien
aaacacttcacaaattcgtatgtca

SEQ ID NO: 194042 - DNA, 25 bp, Homo sapien
ctctggatcaatgtatctgtgttct

SEQ ID NO: 194043 - DNA, 25 bp, Homo sapien
ttagggctctggatcaatgtatctg

SEQ ID NO: 194044 - DNA, 25 bp, Homo sapien
tagggctctggatcaatgtatctgt

SEQ ID NO: 194045 - DNA, 25 bp, Homo sapien
gggctctggatcaatgtatctgtgt

SEQ ID NO: 194046 - DNA, 25 bp, Homo sapien
tgaacactgtcatcttcttctttta

SEQ ID NO: 194047 - DNA, 25 bp, Homo sapien
ctgaacactgtcatcttcttctttt

SEQ ID NO: 194048 - DNA, 25 bp, Homo sapien
catcttcttcttttactctgtcttc

SEQ ID NO: 194049 - DNA, 25 bp, Homo sapien
cttcttcttttactctgtcttccat

SEQ ID NO: 194050 - DNA, 25 bp, Homo sapien
caagctttctctggttcccacatag

SEQ ID NO: 194051 - DNA, 25 bp, Homo sapien
tcaagctttctctggttcccacata

SEQ ID NO: 194052 - DNA, 25 bp, Homo sapien
caaagcatccaggtgtgagagtgag

SEQ ID NO: 194053 - DNA, 25 bp, Homo sapien
tcttgctggcggttgacagttggtt

SEQ ID NO: 194054 - DNA, 25 bp, Homo sapien
cttaagttcttgctggcggttgaca

SEQ ID NO: 194055 - DNA, 25 bp, Homo sapien
cggttgacagttggtttcaaagcat

SEQ ID NO: 194056 - DNA, 25 bp, Homo sapien
tgagagtgcacagggattatatgtc

SEQ ID NO: 194057 - DNA, 25 bp, Homo sapien
caaaaatagtttgggctgagagtgc

SEQ ID NO: 194058 - DNA, 25 bp, Homo sapien
cagggattatatgtcccagcttcat

SEQ ID NO: 194059 - DNA, 25 bp, Homo sapien
ttttccaacacggttagctgctgct

SEQ ID NO: 194060 - DNA, 25 bp, Homo sapien
ttgtccttggggatgcttcttctcc

SEQ ID NO: 194061 - DNA, 25 bp, Homo sapien
cccataagcccagagttgtccttgg

SEQ ID NO: 194062 - DNA, 25 bp, Homo sapien
tacacattagctgctgatctgagct

SEQ ID NO: 194063 - DNA, 25 bp, Homo sapien
ctgagtttctgagctatacacatta

SEQ ID NO: 194064 - DNA, 25 bp, Homo sapien
catagccgaaattagagtagaggct

SEQ ID NO: 194065 - DNA, 25 bp, Homo sapien
gagtctgggtactgccaatttcaaa

SEQ ID NO: 194066 - DNA, 25 bp, Homo sapien
cattcacccatagccgaaattagag

SEQ ID NO: 194067 - DNA, 25 bp, Homo sapien
gagtgagtctgggtactgccaattt

SEQ ID NO: 194068 - DNA, 25 bp, Homo sapien
tcattagcttcacggctgtcaagac

SEQ ID NO: 194069 - DNA, 25 bp, Homo sapien
ggctgtcaagactgtgacttgtaaa

SEQ ID NO: 194070 - DNA, 25 bp, Homo sapien
tagcttcacggctgtcaagactgtg

SEQ ID NO: 194071 - DNA, 25 bp, Homo sapien
tggatgtttgccttcattagcttca

SEQ ID NO: 194072 - DNA, 25 bp, Homo sapien
taaaaggccacatactcatggttac

SEQ ID NO: 194073 - DNA, 25 bp, Homo sapien
aaaggccacatactcatggttacaa

SEQ ID NO: 194074 - DNA, 25 bp, Homo sapien
gtaaaaggccacatactcatggtta

SEQ ID NO: 194075 - DNA, 25 bp, Homo sapien
aaaaggccacatactcatggttaca

SEQ ID NO: 194076 - DNA, 25 bp, Homo sapien
taataatctggatcctggagtgcag

SEQ ID NO: 194077 - DNA, 25 bp, Homo sapien
tggacattcagaggatggcccaggc

SEQ ID NO: 194078 - DNA, 25 bp, Homo sapien
tggagtgcagtcactggacattcag

SEQ ID NO: 194079 - DNA, 25 bp, Homo sapien
cattcagaggatggcccaggcacca

SEQ ID NO: 194080 - DNA, 25 bp, Homo sapien
tcttgctccaccatcatgaactgac

SEQ ID NO: 194081 - DNA, 25 bp, Homo sapien
ttaatatctgatgtctgtggtgttg

SEQ ID NO: 194082 - DNA, 25 bp, Homo sapien
tctgtggtgttgaaaaggtgtttgg

SEQ ID NO: 194083 - DNA, 25 bp, Homo sapien
tgtttggggtcaatgttttcttgct

SEQ ID NO: 194084 - DNA, 25 bp, Homo sapien
gggcagggaaagcaggcgcttgatc

SEQ ID NO: 194085 - DNA, 25 bp, Homo sapien
tccagtacaccaggggcagggaaag

SEQ ID NO: 194086 - DNA, 25 bp, Homo sapien
aggggcagggaaagcaggcgcttga

SEQ ID NO: 194087 - DNA, 25 bp, Homo sapien
gcagggaaagcaggcgcttgatcac

SEQ ID NO: 194088 - DNA, 25 bp, Homo sapien
cattgtcactgggtctggactgggc

SEQ ID NO: 194089 - DNA, 25 bp, Homo sapien
ccactactgtagggccaaagacttt

SEQ ID NO: 194090 - DNA, 25 bp, Homo sapien
tgggcacagcatgggccactactgt

SEQ ID NO: 194091 - DNA, 25 bp, Homo sapien
tgagttgacacttgatgtcctgtaa

SEQ ID NO: 194092 - DNA, 25 bp, Homo sapien
tatgtgaaatctgagccacactctg

SEQ ID NO: 194093 - DNA, 25 bp, Homo sapien
tgtgaaatctgagccacactctgca

SEQ ID NO: 194094 - DNA, 25 bp, Homo sapien
tagtatgtgaaatctgagccacact

SEQ ID NO: 194095 - DNA, 25 bp, Homo sapien
ttagtatgtgaaatctgagccacac

SEQ ID NO: 194096 - DNA, 25 bp, Homo sapien
gttctgttgctgatgaggagctgct

SEQ ID NO: 194097 - DNA, 25 bp, Homo sapien
tctgttgctgatgaggagctgcttt

SEQ ID NO: 194098 - DNA, 25 bp, Homo sapien
ttctgttgctgatgaggagctgctt

SEQ ID NO: 194099 - DNA, 25 bp, Homo sapien
ctgttgctgatgaggagctgctttc

SEQ ID NO: 194100 - DNA, 25 bp, Homo sapien
ccgtattgcatgtacatgaagccaa

SEQ ID NO: 194101 - DNA, 25 bp, Homo sapien
agaatcccagcagagcacgagagag

SEQ ID NO: 194102 - DNA, 25 bp, Homo sapien
gtcagatttagtttgccgtattgca

SEQ ID NO: 194103 - DNA, 25 bp, Homo sapien
caccacttggtatgtgttgaaaagg

SEQ ID NO: 194104 - DNA, 25 bp, Homo sapien
aacattgagcatgaataatgaattt

SEQ ID NO: 194105 - DNA, 25 bp, Homo sapien
cattgagcatgaataatgaatttca

SEQ ID NO: 194106 - DNA, 25 bp, Homo sapien
acattgagcatgaataatgaatttc

SEQ ID NO: 194107 - DNA, 25 bp, Homo sapien
attgagcatgaataatgaatttcat

SEQ ID NO: 194108 - DNA, 25 bp, Homo sapien
tcaaaagctgctttcatggctcttc

SEQ ID NO: 194109 - DNA, 25 bp, Homo sapien
atcaaaagctgctttcatggctctt

SEQ ID NO: 194110 - DNA, 25 bp, Homo sapien
aattcgaggggtattgtctaaatgc

SEQ ID NO: 194111 - DNA, 25 bp, Homo sapien
ccattaaattcgaggggtattgtct

SEQ ID NO: 194112 - DNA, 25 bp, Homo sapien
ttgctcctgctttgatggctcccat

SEQ ID NO: 194113 - DNA, 25 bp, Homo sapien
tgtcctttaggccttctgttgctcc

SEQ ID NO: 194114 - DNA, 25 bp, Homo sapien
aggtgggcattcacatccccccccg

SEQ ID NO: 194115 - DNA, 25 bp, Homo sapien
cctttaggccttctgttgctcctgc

SEQ ID NO: 194116 - DNA, 25 bp, Homo sapien
aggaggaaccgggtagcactagtat

SEQ ID NO: 194117 - DNA, 25 bp, Homo sapien
gaaccgggtagcactagtatagcta

SEQ ID NO: 194118 - DNA, 25 bp, Homo sapien
ccgggtagcactagtatagctataa

SEQ ID NO: 194119 - DNA, 25 bp, Homo sapien
tacacaacagcgaaatgctgagaac

SEQ ID NO: 194120 - DNA, 25 bp, Homo sapien
tctcaaaatcgaaatctttgtgttt

SEQ ID NO: 194121 - DNA, 25 bp, Homo sapien
tgtgtacatccctactcttctgctc

SEQ ID NO: 194122 - DNA, 25 bp, Homo sapien
tctgctctcttacaggtgccctgaa

SEQ ID NO: 194123 - DNA, 25 bp, Homo sapien
gtgttttttgtgtacatccctactc

SEQ ID NO: 194124 - DNA, 25 bp, Homo sapien
actcagttgagaaaatcatgacgta

SEQ ID NO: 194125 - DNA, 25 bp, Homo sapien
tgagaaaatcatgacgtagtgagtc

SEQ ID NO: 194126 - DNA, 25 bp, Homo sapien
tgtcaaattcttattcctaacaatt

SEQ ID NO: 194127 - DNA, 25 bp, Homo sapien
cgtagtgagtcaaacagaccttttc

SEQ ID NO: 194128 - DNA, 25 bp, Homo sapien
atgaatgaaagaagagtatctggag

SEQ ID NO: 194129 - DNA, 25 bp, Homo sapien
tgaatgaaagaagagtatctggagg

SEQ ID NO: 194130 - DNA, 25 bp, Homo sapien
ttactcctttgtctatccattctcc

SEQ ID NO: 194131 - DNA, 25 bp, Homo sapien
tttgagatagtggtcaatgaatgaa

SEQ ID NO: 194132 - DNA, 25 bp, Homo sapien
acagctaacaaagaaagtgaagaac

SEQ ID NO: 194133 - DNA, 25 bp, Homo sapien
aggaatacagctaacaaagaaagtg

SEQ ID NO: 194134 - DNA, 25 bp, Homo sapien
taggaatacagctaacaaagaaagt

SEQ ID NO: 194135 - DNA, 25 bp, Homo sapien
ctaacaaagaaagtgaagaacctct

SEQ ID NO: 194136 - DNA, 25 bp, Homo sapien
ttaaatccataagcagagtggcttc

SEQ ID NO: 194137 - DNA, 25 bp, Homo sapien
ctgcaaatgtagtcatcatattctt

SEQ ID NO: 194138 - DNA, 25 bp, Homo sapien
ttctttaaatccataagcagagtgg

SEQ ID NO: 194139 - DNA, 25 bp, Homo sapien
aatccataagcagagtggcttctac

SEQ ID NO: 194140 - DNA, 25 bp, Homo sapien
agccaccagctattatgcacaactg

SEQ ID NO: 194141 - DNA, 25 bp, Homo sapien
gccaccagctattatgcacaactgc

SEQ ID NO: 194142 - DNA, 25 bp, Homo sapien
tgggtcactctcagtaaatcatatt

SEQ ID NO: 194143 - DNA, 25 bp, Homo sapien
ggtttatggccactaactgggtcac

SEQ ID NO: 194144 - DNA, 25 bp, Homo sapien
cataacaaacatttagcatcttggg

SEQ ID NO: 194145 - DNA, 25 bp, Homo sapien
tgatactgtctcatcttaatgggaa

SEQ ID NO: 194146 - DNA, 25 bp, Homo sapien
cgttggctcaccactttccatggta

SEQ ID NO: 194147 - DNA, 25 bp, Homo sapien
cacctcgggcctgaaaaactgttgc

SEQ ID NO: 194148 - DNA, 25 bp, Homo sapien
atagaacccggttcactttgtgtca

SEQ ID NO: 194149 - DNA, 25 bp, Homo sapien
gtcccttttgtttgcatatcctcag

SEQ ID NO: 194150 - DNA, 25 bp, Homo sapien
ttgtcctctgtatttgtaaggagct

SEQ ID NO: 194151 - DNA, 25 bp, Homo sapien
cctctgtatttgtaaggagctatca

SEQ ID NO: 194152 - DNA, 25 bp, Homo sapien
tctgtatttgtaaggagctatcatt

SEQ ID NO: 194153 - DNA, 25 bp, Homo sapien
tcctctgtatttgtaaggagctatc

SEQ ID NO: 194154 - DNA, 25 bp, Homo sapien
ggagcaaatatgctcacttataggg

SEQ ID NO: 194155 - DNA, 25 bp, Homo sapien
aaaatacccaggagcaaatatgctc

SEQ ID NO: 194156 - DNA, 25 bp, Homo sapien
caaatatgctcacttatagggtagg

SEQ ID NO: 194157 - DNA, 25 bp, Homo sapien
gcttagatagctgataaagtattgt

SEQ ID NO: 194158 - DNA, 25 bp, Homo sapien
cctaggaaatagaatgggcatcatc

SEQ ID NO: 194159 - DNA, 25 bp, Homo sapien
tatcccttcctaggaaatagaatgg

SEQ ID NO: 194160 - DNA, 25 bp, Homo sapien
ccttcctaggaaatagaatgggcat

SEQ ID NO: 194161 - DNA, 25 bp, Homo sapien
cttatcccttcctaggaaatagaat

SEQ ID NO: 194162 - DNA, 25 bp, Homo sapien
aggcccacggttgggatccatgtgt

SEQ ID NO: 194163 - DNA, 25 bp, Homo sapien
ctgtcttcgtattcagctcatactg

SEQ ID NO: 194164 - DNA, 25 bp, Homo sapien
gttggtggtttgttctgtcttcgta

SEQ ID NO: 194165 - DNA, 25 bp, Homo sapien
tggtagtacacaccttgggggcacc

SEQ ID NO: 194166 - DNA, 25 bp, Homo sapien
gatcttcctcgttcaagtccctgta

SEQ ID NO: 194167 - DNA, 25 bp, Homo sapien
gctggtctttgctaatctcggctag

SEQ ID NO: 194168 - DNA, 25 bp, Homo sapien
tagtccctgttagtccctgttcagg

SEQ ID NO: 194169 - DNA, 25 bp, Homo sapien
tatggtccctgttacttcctgcaag

SEQ ID NO: 194170 - DNA, 25 bp, Homo sapien
tattctttaccgtgaggagcctgta

SEQ ID NO: 194171 - DNA, 25 bp, Homo sapien
gataaattgtgtctcggtaataaca

SEQ ID NO: 194172 - DNA, 25 bp, Homo sapien
gtaatgactgtgtcttacatttgca

SEQ ID NO: 194173 - DNA, 25 bp, Homo sapien
gggtgtctcatctttctggcaatca

SEQ ID NO: 194174 - DNA, 25 bp, Homo sapien
ccagatggcacagagctttttgctg

SEQ ID NO: 194175 - DNA, 25 bp, Homo sapien
gatggcacagagctttttgctgctg

SEQ ID NO: 194176 - DNA, 25 bp, Homo sapien
gcacagagctttttgctgctgatgc

SEQ ID NO: 194177 - DNA, 25 bp, Homo sapien
tggcacagagctttttgctgctgat

SEQ ID NO: 194178 - DNA, 25 bp, Homo sapien
ctagttgatatactgtgcctgtgta

SEQ ID NO: 194179 - DNA, 25 bp, Homo sapien
gttgatatactgtgcctgtgtacct

SEQ ID NO: 194180 - DNA, 25 bp, Homo sapien
gcctgtgtacctccatcacattcat

SEQ ID NO: 194181 - DNA, 25 bp, Homo sapien
tgtacctccatcacattcataatca

SEQ ID NO: 194182 - DNA, 25 bp, Homo sapien
ttccacagcagataggattttaatt

SEQ ID NO: 194183 - DNA, 25 bp, Homo sapien
attccacagcagataggattttaat

SEQ ID NO: 194184 - DNA, 25 bp, Homo sapien
gcctgtgtctcaagccggtgctgag

SEQ ID NO: 194185 - DNA, 25 bp, Homo sapien
caagccggtgctgagattactatac

SEQ ID NO: 194186 - DNA, 25 bp, Homo sapien
catggaactaatctgccaatttcag

SEQ ID NO: 194187 - DNA, 25 bp, Homo sapien
tgagattactatacaggcatggaac

SEQ ID NO: 194188 - DNA, 25 bp, Homo sapien
atgcatatctgcagagcacttttta

SEQ ID NO: 194189 - DNA, 25 bp, Homo sapien
gaaggatgaactgaggtaatgcata

SEQ ID NO: 194190 - DNA, 25 bp, Homo sapien
taatgcatatctgcagagcactttt

SEQ ID NO: 194191 - DNA, 25 bp, Homo sapien
tctgcgttgcagtatgtggccactg

SEQ ID NO: 194192 - DNA, 25 bp, Homo sapien
atgcaagggtttggcccagggcttt

SEQ ID NO: 194193 - DNA, 25 bp, Homo sapien
gactttctgctttaaagtgcagctg

SEQ ID NO: 194194 - DNA, 25 bp, Homo sapien
cagctggtgctcctgttggcagtct

SEQ ID NO: 194195 - DNA, 25 bp, Homo sapien
gcccagtcttgccagatcaagtggg

SEQ ID NO: 194196 - DNA, 25 bp, Homo sapien
gaggatagagataagctggcagacc

SEQ ID NO: 194197 - DNA, 25 bp, Homo sapien
actggagaaggcactagaggataga

SEQ ID NO: 194198 - DNA, 25 bp, Homo sapien
aaaagagtgttgaggtttttgcaca

SEQ ID NO: 194199 - DNA, 25 bp, Homo sapien
accattatcggcttcttgatgtgca

SEQ ID NO: 194200 - DNA, 25 bp, Homo sapien
tcatggtccatcttaatggaaatgt

SEQ ID NO: 194201 - DNA, 25 bp, Homo sapien
ggcagttttcatggtccatcttaat

SEQ ID NO: 194202 - DNA, 25 bp, Homo sapien
aatggaaatgtagatctgtgttagt

SEQ ID NO: 194203 - DNA, 25 bp, Homo sapien
ggaaatgtagatctgtgttagttta

SEQ ID NO: 194204 - DNA, 25 bp, Homo sapien
ctactggaagcggcaggttgcagta

SEQ ID NO: 194205 - DNA, 25 bp, Homo sapien
tcgctaaggcattaatatattcttc

SEQ ID NO: 194206 - DNA, 25 bp, Homo sapien
ggcccagtactgtggttcagattcg

SEQ ID NO: 194207 - DNA, 25 bp, Homo sapien
acattgatttattgggcagagaagc

SEQ ID NO: 194208 - DNA, 25 bp, Homo sapien
ttgacactttgatgccaagtgtcat

SEQ ID NO: 194209 - DNA, 25 bp, Homo sapien
ttttgacactttgatgccaagtgtc

SEQ ID NO: 194210 - DNA, 25 bp, Homo sapien
tttgacactttgatgccaagtgtca

SEQ ID NO: 194211 - DNA, 25 bp, Homo sapien
tggtgtggtaaacaccagggcaaca

SEQ ID NO: 194212 - DNA, 25 bp, Homo sapien
aggacctatgcttgtactccctgga

SEQ ID NO: 194213 - DNA, 25 bp, Homo sapien
tggtaaacaccagggcaacatgagg

SEQ ID NO: 194214 - DNA, 25 bp, Homo sapien
tgccctcaaatcaagtgtcacaaag

SEQ ID NO: 194215 - DNA, 25 bp, Homo sapien
tatgtgctacacggtttttcaattt

SEQ ID NO: 194216 - DNA, 25 bp, Homo sapien
atgtgctacacggtttttcaatttc

SEQ ID NO: 194217 - DNA, 25 bp, Homo sapien
tgtatatgtgctacacggtttttca

SEQ ID NO: 194218 - DNA, 25 bp, Homo sapien
caattctgctatattcaggtccatc

SEQ ID NO: 194219 - DNA, 25 bp, Homo sapien
cagtggactgaatccattgagtttt

SEQ ID NO: 194220 - DNA, 25 bp, Homo sapien
aactcatttaatagccacagtggac

SEQ ID NO: 194221 - DNA, 25 bp, Homo sapien
tagccacagtggactgaatccattg

SEQ ID NO: 194222 - DNA, 25 bp, Homo sapien
tctgcgagggtcagatttactcagc

SEQ ID NO: 194223 - DNA, 25 bp, Homo sapien
ttctgtgaaacaaggtctgcgaggg

SEQ ID NO: 194224 - DNA, 25 bp, Homo sapien
tagccagcatgattgaaaccttttc

SEQ ID NO: 194225 - DNA, 25 bp, Homo sapien
aagaagtccaccagtcccaactgtg

SEQ ID NO: 194226 - DNA, 25 bp, Homo sapien
tcatgacatgatactgctttcaaca

SEQ ID NO: 194227 - DNA, 25 bp, Homo sapien
tttcttctgatccagactatagaag

SEQ ID NO: 194228 - DNA, 25 bp, Homo sapien
ctatagaagcatcatgacatgatac

SEQ ID NO: 194229 - DNA, 25 bp, Homo sapien
ttctgatccagactatagaagcatc

SEQ ID NO: 194230 - DNA, 25 bp, Homo sapien
gctagtgtaacattatcctgcttga

SEQ ID NO: 194231 - DNA, 25 bp, Homo sapien
ctgctgctgctagtgtaacattatc

SEQ ID NO: 194232 - DNA, 25 bp, Homo sapien
tgtccccgtgcaagtgtagactgtc

SEQ ID NO: 194233 - DNA, 25 bp, Homo sapien
aaatgtagaaatgtccccgtgcaag

SEQ ID NO: 194234 - DNA, 25 bp, Homo sapien
atggcagagctctcgttgacagtct

SEQ ID NO: 194235 - DNA, 25 bp, Homo sapien
cactcaagtcttgatacgttgtatt

SEQ ID NO: 194236 - DNA, 25 bp, Homo sapien
cagtgtctagtgagggttcagtctc

SEQ ID NO: 194237 - DNA, 25 bp, Homo sapien
taagcactagtttggcagcatcact

SEQ ID NO: 194238 - DNA, 25 bp, Homo sapien
tcttataatactgaagcctggaaag

SEQ ID NO: 194239 - DNA, 25 bp, Homo sapien
gatattaatatgtcaactccagctt

SEQ ID NO: 194240 - DNA, 25 bp, Homo sapien
tattgcacagcatatacttaggttt

SEQ ID NO: 194241 - DNA, 25 bp, Homo sapien
tcttatacttgctgttcacatggta

SEQ ID NO: 194242 - DNA, 25 bp, Homo sapien
gcagaaactccttgcagtaaagtgt

SEQ ID NO: 194243 - DNA, 25 bp, Homo sapien
actgtatcagctcttgtagtatttc

SEQ ID NO: 194244 - DNA, 25 bp, Homo sapien
tgcctcctgtttaagtcatactgta

SEQ ID NO: 194245 - DNA, 25 bp, Homo sapien
cctgtttaagtcatactgtatcagc

SEQ ID NO: 194246 - DNA, 25 bp, Homo sapien
agtcatactgtatcagctcttgtag

SEQ ID NO: 194247 - DNA, 25 bp, Homo sapien
tggatttgcatgcagttgactctga

SEQ ID NO: 194248 - DNA, 25 bp, Homo sapien
gctggatttgcatgcagttgactct

SEQ ID NO: 194249 - DNA, 25 bp, Homo sapien
ctgctggatttgcatgcagttgact

SEQ ID NO: 194250 - DNA, 25 bp, Homo sapien
gatttgcatgcagttgactctgact

SEQ ID NO: 194251 - DNA, 25 bp, Homo sapien
taaggtgcaaacctttggcatttcc

SEQ ID NO: 194252 - DNA, 25 bp, Homo sapien
taactggttggcagacatctaggaa

SEQ ID NO: 194253 - DNA, 25 bp, Homo sapien
ggcatttccttagctggacctccaa

SEQ ID NO: 194254 - DNA, 25 bp, Homo sapien
catctaggaatgtgtgaagtataat

SEQ ID NO: 194255 - DNA, 25 bp, Homo sapien
cacagtagtttgaattctaatcaaa

SEQ ID NO: 194256 - DNA, 25 bp, Homo sapien
tatactcacagtagtttgaattcta

SEQ ID NO: 194257 - DNA, 25 bp, Homo sapien
cacagtgacaaatgctagttgaatt

SEQ ID NO: 194258 - DNA, 25 bp, Homo sapien
gctagttgaattatactcacagtag

SEQ ID NO: 194259 - DNA, 25 bp, Homo sapien
gatttagcagtattcacataatggc

SEQ ID NO: 194260 - DNA, 25 bp, Homo sapien
ggtgattgatttagcagtattcaca

SEQ ID NO: 194261 - DNA, 25 bp, Homo sapien
cagtattcacataatggcttggagg

SEQ ID NO: 194262 - DNA, 25 bp, Homo sapien
tcatacgaaggtgattgatttagca

SEQ ID NO: 194263 - DNA, 25 bp, Homo sapien
cctgaccacatttaccaccggagcc

SEQ ID NO: 194264 - DNA, 25 bp, Homo sapien
ctccctgaccacatttaccaccgga

SEQ ID NO: 194265 - DNA, 25 bp, Homo sapien
tccctgaccacatttaccaccggag

SEQ ID NO: 194266 - DNA, 25 bp, Homo sapien
gaccacatttaccaccggagccctg

SEQ ID NO: 194267 - DNA, 25 bp, Homo sapien
tatttgttcacggatttttagcaca

SEQ ID NO: 194268 - DNA, 25 bp, Homo sapien
tttccgcctctgttattggtgatca

SEQ ID NO: 194269 - DNA, 25 bp, Homo sapien
caaaactaatgtcagtcctatctag

SEQ ID NO: 194270 - DNA, 25 bp, Homo sapien
cattgctatatctaatgtctgggca

SEQ ID NO: 194271 - DNA, 25 bp, Homo sapien
cacaatttctcctgccgtgcttcag

SEQ ID NO: 194272 - DNA, 25 bp, Homo sapien
gcagttgttttttcctagtgcccta

SEQ ID NO: 194273 - DNA, 25 bp, Homo sapien
agctgcagcctttggctcaagatgt

SEQ ID NO: 194274 - DNA, 25 bp, Homo sapien
gcctttggctcaagatgttttcctc

SEQ ID NO: 194275 - DNA, 25 bp, Homo sapien
tgtcccaatgctttgagtgccccaa

SEQ ID NO: 194276 - DNA, 25 bp, Homo sapien
ccccaataaagctgaagccccaaat

SEQ ID NO: 194277 - DNA, 25 bp, Homo sapien
gaagccccaaatttatcgagcctct

SEQ ID NO: 194278 - DNA, 25 bp, Homo sapien
tgatcttcacctgtgacattcacag

SEQ ID NO: 194279 - DNA, 25 bp, Homo sapien
cccaacaatccagattgcattggaa

SEQ ID NO: 194280 - DNA, 25 bp, Homo sapien
caatccagattgcattggaactcag

SEQ ID NO: 194281 - DNA, 25 bp, Homo sapien
gcattggaactcagtatctatctcc

SEQ ID NO: 194282 - DNA, 25 bp, Homo sapien
ccagattgcattggaactcagtatc

SEQ ID NO: 194283 - DNA, 25 bp, Homo sapien
gcaaagatggtaccagtgagtttgc

SEQ ID NO: 194284 - DNA, 25 bp, Homo sapien
aagatggtaccagtgagtttgcaca

SEQ ID NO: 194285 - DNA, 25 bp, Homo sapien
agatggtaccagtgagtttgcacat

SEQ ID NO: 194286 - DNA, 25 bp, Homo sapien
aaagatggtaccagtgagtttgcac

SEQ ID NO: 194287 - DNA, 25 bp, Homo sapien
gaacaaaagcttgatctttcataac

SEQ ID NO: 194288 - DNA, 25 bp, Homo sapien
agaacaaaagcttgatctttcataa

SEQ ID NO: 194289 - DNA, 25 bp, Homo sapien
caaacacaacctcgaagtagacatt

SEQ ID NO: 194290 - DNA, 25 bp, Homo sapien
aacacaacctcgaagtagacatttt

SEQ ID NO: 194291 - DNA, 25 bp, Homo sapien
acacaacctcgaagtagacattttt

SEQ ID NO: 194292 - DNA, 25 bp, Homo sapien
aacaaacacaacctcgaagtagaca

SEQ ID NO: 194293 - DNA, 25 bp, Homo sapien
caatgagaatcaataccgccatgat

SEQ ID NO: 194294 - DNA, 25 bp, Homo sapien
gccatgatgaccacacactcagtgt

SEQ ID NO: 194295 - DNA, 25 bp, Homo sapien
tgtctgggatcggtgcatactgttt

SEQ ID NO: 194296 - DNA, 25 bp, Homo sapien
cagtgtctgggatcggtgcatactg

SEQ ID NO: 194297 - DNA, 25 bp, Homo sapien
catgtacacaaacagcgatggcttt

SEQ ID NO: 194298 - DNA, 25 bp, Homo sapien
tgtcttgacatcaggtggttacact

SEQ ID NO: 194299 - DNA, 25 bp, Homo sapien
gatacacgtctgatacacacatgca

SEQ ID NO: 194300 - DNA, 25 bp, Homo sapien
aaacatctagtttgacatttggtac

SEQ ID NO: 194301 - DNA, 25 bp, Homo sapien
gctgcgtggagccatgccttgacct

SEQ ID NO: 194302 - DNA, 25 bp, Homo sapien
tccgaaattcctgagcattgactga

SEQ ID NO: 194303 - DNA, 25 bp, Homo sapien
cagtgactactactggttctctgca

SEQ ID NO: 194304 - DNA, 25 bp, Homo sapien
tagttcgtaattgctgggctgcgtg

SEQ ID NO: 194305 - DNA, 25 bp, Homo sapien
gatttgagatactggcattcagtgc

SEQ ID NO: 194306 - DNA, 25 bp, Homo sapien
cctgttctgagaaagggtaggacat

SEQ ID NO: 194307 - DNA, 25 bp, Homo sapien
caagccatactttaacctgttctga

SEQ ID NO: 194308 - DNA, 25 bp, Homo sapien
ggtaggacatagtcttataattgga

SEQ ID NO: 194309 - DNA, 25 bp, Homo sapien
aggaagcaggccactagcccgctgt

SEQ ID NO: 194310 - DNA, 25 bp, Homo sapien
ttctagttatgattggcaccagggc

SEQ ID NO: 194311 - DNA, 25 bp, Homo sapien
ccctcagtaatgagtaggacactca

SEQ ID NO: 194312 - DNA, 25 bp, Homo sapien
cgctgttcttggaatcctccatgcc

SEQ ID NO: 194313 - DNA, 25 bp, Homo sapien
gtcaatggcatcctaggtaaagcta

SEQ ID NO: 194314 - DNA, 25 bp, Homo sapien
agtttattgccttctagtcttacag

SEQ ID NO: 194315 - DNA, 25 bp, Homo sapien
tagcctgagaggtgacaaataacca

SEQ ID NO: 194316 - DNA, 25 bp, Homo sapien
tgtaagccaaaaatgtcacccacat

SEQ ID NO: 194317 - DNA, 25 bp, Homo sapien
cagcagtgagaggagataagacaat

SEQ ID NO: 194318 - DNA, 25 bp, Homo sapien
ttagacttcctgctgatgcccgtct

SEQ ID NO: 194319 - DNA, 25 bp, Homo sapien
tagacttcctgctgatgcccgtctc

SEQ ID NO: 194320 - DNA, 25 bp, Homo sapien
gagtgccagcagtgagaggagataa

SEQ ID NO: 194321 - DNA, 25 bp, Homo sapien
atatccccagagcacattatgcaca

SEQ ID NO: 194322 - DNA, 25 bp, Homo sapien
cacacctccatcaagacacttttca

SEQ ID NO: 194323 - DNA, 25 bp, Homo sapien
catatccccagagcacattatgcac

SEQ ID NO: 194324 - DNA, 25 bp, Homo sapien
ctccatatccccagagcacattatg

SEQ ID NO: 194325 - DNA, 25 bp, Homo sapien
tggcgcttcctgctggtgaacttcc

SEQ ID NO: 194326 - DNA, 25 bp, Homo sapien
actggcgcttcctgctggtgaactt

SEQ ID NO: 194327 - DNA, 25 bp, Homo sapien
ctggcgcttcctgctggtgaacttc

SEQ ID NO: 194328 - DNA, 25 bp, Homo sapien
ttctttgtcatctaggttgaaattc

SEQ ID NO: 194329 - DNA, 25 bp, Homo sapien
cttgtttagttctaagtccacattc

SEQ ID NO: 194330 - DNA, 25 bp, Homo sapien
ttcttgtttagttctaagtccacat

SEQ ID NO: 194331 - DNA, 25 bp, Homo sapien
gtttagttctaagtccacattccat

SEQ ID NO: 194332 - DNA, 25 bp, Homo sapien
tagttgttcctcctacattataagg

SEQ ID NO: 194333 - DNA, 25 bp, Homo sapien
tggtcaaatttggttatcccctcgc

SEQ ID NO: 194334 - DNA, 25 bp, Homo sapien
tagtcaaggactctgcaattagttt

SEQ ID NO: 194335 - DNA, 25 bp, Homo sapien
ctttccaacatacaatgccggtatt

SEQ ID NO: 194336 - DNA, 25 bp, Homo sapien
ttgaagaagtgtttctccctgatgc

SEQ ID NO: 194337 - DNA, 25 bp, Homo sapien
agtagagatttgaagaagtgtttct

SEQ ID NO: 194338 - DNA, 25 bp, Homo sapien
tttgaagaagtgtttctccctgatg

SEQ ID NO: 194339 - DNA, 25 bp, Homo sapien
tgaagaagtgtttctccctgatgct

SEQ ID NO: 194340 - DNA, 25 bp, Homo sapien
tcatccttcatattctggttcattc

SEQ ID NO: 194341 - DNA, 25 bp, Homo sapien
cacttccttcattgcgagcaaagcc

SEQ ID NO: 194342 - DNA, 25 bp, Homo sapien
gagcaaagccattcatcagttcttt

SEQ ID NO: 194343 - DNA, 25 bp, Homo sapien
ccttcattgcgagcaaagccattca

SEQ ID NO: 194344 - DNA, 25 bp, Homo sapien
tcattgcgagcaaagccattcatca

SEQ ID NO: 194345 - DNA, 25 bp, Homo sapien
gattcttccatctatgctcatcaag

SEQ ID NO: 194346 - DNA, 25 bp, Homo sapien
gaacagagtaccttgcatagtcttt

SEQ ID NO: 194347 - DNA, 25 bp, Homo sapien
cagacatgcagctgatggcaagagt

SEQ ID NO: 194348 - DNA, 25 bp, Homo sapien
gatcctcttgtgtcgtcttctcaaa

SEQ ID NO: 194349 - DNA, 25 bp, Homo sapien
atattcaaatacttcatcattattg

SEQ ID NO: 194350 - DNA, 25 bp, Homo sapien
ttcaaatacttcatcattattggat

SEQ ID NO: 194351 - DNA, 25 bp, Homo sapien
cttatattcaaatacttcatcatta

SEQ ID NO: 194352 - DNA, 25 bp, Homo sapien
caaatacttcatcattattggattt

SEQ ID NO: 194353 - DNA, 25 bp, Homo sapien
tgctctatactctcctaaatttaaa

SEQ ID NO: 194354 - DNA, 25 bp, Homo sapien
taatgcctactattattttcatcgc

SEQ ID NO: 194355 - DNA, 25 bp, Homo sapien
gtagtctatattctaaaacattgga

SEQ ID NO: 194356 - DNA, 25 bp, Homo sapien
gcataacttatgactttactacaaa

SEQ ID NO: 194357 - DNA, 25 bp, Homo sapien
ttagtaagcataagtcagaccagca

SEQ ID NO: 194358 - DNA, 25 bp, Homo sapien
taagcataagtcagaccagcatggc

SEQ ID NO: 194359 - DNA, 25 bp, Homo sapien
tattagtaagcataagtcagaccag

SEQ ID NO: 194360 - DNA, 25 bp, Homo sapien
tttattagtaagcataagtcagacc

SEQ ID NO: 194361 - DNA, 25 bp, Homo sapien
tgtccaaggggccatgactgggaac

SEQ ID NO: 194362 - DNA, 25 bp, Homo sapien
agtgcagaacccgccacttgtccaa

SEQ ID NO: 194363 - DNA, 25 bp, Homo sapien
gcagaacccgccacttgtccaaggg

SEQ ID NO: 194364 - DNA, 25 bp, Homo sapien
caaggggccatgactgggaacgtac

SEQ ID NO: 194365 - DNA, 25 bp, Homo sapien
atcaggaacccctcggcagaaacga

SEQ ID NO: 194366 - DNA, 25 bp, Homo sapien
gttggcacaaatacgggcggcctcc

SEQ ID NO: 194367 - DNA, 25 bp, Homo sapien
caataccggtaacagcgagctggac

SEQ ID NO: 194368 - DNA, 25 bp, Homo sapien
gatgcggatcttggcatcaggaacc

SEQ ID NO: 194369 - DNA, 25 bp, Homo sapien
catttatatacgttgcccctcgtcc

SEQ ID NO: 194370 - DNA, 25 bp, Homo sapien
tcttaactacgcctgcgcgcattta

SEQ ID NO: 194371 - DNA, 25 bp, Homo sapien
gtcaaaatgcgctctcttaactacg

SEQ ID NO: 194372 - DNA, 25 bp, Homo sapien
gtaacgtcggcggtgcctcgaagtc

SEQ ID NO: 194373 - DNA, 25 bp, Homo sapien
ctagttcctgtttaacatattgaga

SEQ ID NO: 194374 - DNA, 25 bp, Homo sapien
gagataaagtagctaataccatgtt

SEQ ID NO: 194375 - DNA, 25 bp, Homo sapien
tctcaactagttcctgtttaacata

SEQ ID NO: 194376 - DNA, 25 bp, Homo sapien
tgttgctctcaccaagcttacaagc

SEQ ID NO: 194377 - DNA, 25 bp, Homo sapien
gtaacttcacactgggggctgtaat

SEQ ID NO: 194378 - DNA, 25 bp, Homo sapien
gatttcttagtaacttcacactggg

SEQ ID NO: 194379 - DNA, 25 bp, Homo sapien
tcatctggatttcttagtaacttca

SEQ ID NO: 194380 - DNA, 25 bp, Homo sapien
ctaacagtcattttcatctggattt

SEQ ID NO: 194381 - DNA, 25 bp, Homo sapien
agtttgcttgtagagaatgagttcc

SEQ ID NO: 194382 - DNA, 25 bp, Homo sapien
tttgcttgtagagaatgagttcccc

SEQ ID NO: 194383 - DNA, 25 bp, Homo sapien
atgagttccccccaaatgaatgact

SEQ ID NO: 194384 - DNA, 25 bp, Homo sapien
gtagtttgcttgtagagaatgagtt

SEQ ID NO: 194385 - DNA, 25 bp, Homo sapien
ggcatgatcagaactaggtcctgtg

SEQ ID NO: 194386 - DNA, 25 bp, Homo sapien
tcagaactaggtcctgtggtgccca

SEQ ID NO: 194387 - DNA, 25 bp, Homo sapien
catgatcagaactaggtcctgtggt

SEQ ID NO: 194388 - DNA, 25 bp, Homo sapien
gatcagaactaggtcctgtggtgcc

SEQ ID NO: 194389 - DNA, 25 bp, Homo sapien
aatggaaatgtgtaaactgcactga

SEQ ID NO: 194390 - DNA, 25 bp, Homo sapien
aaggaatggaaatgtgtaaactgca

SEQ ID NO: 194391 - DNA, 25 bp, Homo sapien
ggaatggaaatgtgtaaactgcact

SEQ ID NO: 194392 - DNA, 25 bp, Homo sapien
ggaaatgtgtaaactgcactgaatt

SEQ ID NO: 194393 - DNA, 25 bp, Homo sapien
agatgtttggcattacacttaagtc

SEQ ID NO: 194394 - DNA, 25 bp, Homo sapien
gcctggcatgtcttatgccctcaag

SEQ ID NO: 194395 - DNA, 25 bp, Homo sapien
gtcttatgccctcaagatgtttggc

SEQ ID NO: 194396 - DNA, 25 bp, Homo sapien
tgtttctcttggtcttgcctggcat

SEQ ID NO: 194397 - DNA, 25 bp, Homo sapien
ctcaggagatcaaaggataggccta

SEQ ID NO: 194398 - DNA, 25 bp, Homo sapien
taatttgggataaatcttggtgggc

SEQ ID NO: 194399 - DNA, 25 bp, Homo sapien
cagagtgttaatagttctggccagt

SEQ ID NO: 194400 - DNA, 25 bp, Homo sapien
taagacataactctagcataagctc

SEQ ID NO: 194401 - DNA, 25 bp, Homo sapien
catgaagctgagttgtagccaaacc

SEQ ID NO: 194402 - DNA, 25 bp, Homo sapien
gcaagagggtcagtggaaacacaca

SEQ ID NO: 194403 - DNA, 25 bp, Homo sapien
caagctgctcagtttgtggagcaag

SEQ ID NO: 194404 - DNA, 25 bp, Homo sapien
ctgtcaagtgttcccaagctgctca

SEQ ID NO: 194405 - DNA, 25 bp, Homo sapien
agtcctttcgtccatgaatcctcag

SEQ ID NO: 194406 - DNA, 25 bp, Homo sapien
acttttgcctgtggcctgcccgctg

SEQ ID NO: 194407 - DNA, 25 bp, Homo sapien
tggagatctttcacccatggccacc

SEQ ID NO: 194408 - DNA, 25 bp, Homo sapien
agtgcttttaccagagccaccacca

SEQ ID NO: 194409 - DNA, 25 bp, Homo sapien
agctctctcattggccacccctgcc

SEQ ID NO: 194410 - DNA, 25 bp, Homo sapien
ctctctcattggccacccctgccat

SEQ ID NO: 194411 - DNA, 25 bp, Homo sapien
gctctctcattggccacccctgcca

SEQ ID NO: 194412 - DNA, 25 bp, Homo sapien
tggagtgcttttgctggcagacacc

SEQ ID NO: 194413 - DNA, 25 bp, Homo sapien
agtgcttttgctggcagacacccat

SEQ ID NO: 194414 - DNA, 25 bp, Homo sapien
actggagtgcttttgctggcagaca

SEQ ID NO: 194415 - DNA, 25 bp, Homo sapien
gagtgcttttgctggcagacaccca

SEQ ID NO: 194416 - DNA, 25 bp, Homo sapien
ttttgctccatcaaaggactcttcc

SEQ ID NO: 194417 - DNA, 25 bp, Homo sapien
tctttgtagtatgcgatgttcttca

SEQ ID NO: 194418 - DNA, 25 bp, Homo sapien
tgttgatggctacgaactgattagg

SEQ ID NO: 194419 - DNA, 25 bp, Homo sapien
gaccaccacaagaaagtgagtatag

SEQ ID NO: 194420 - DNA, 25 bp, Homo sapien
ggtctctaacctctgcacttgttac

SEQ ID NO: 194421 - DNA, 25 bp, Homo sapien
gtgccatttgaggtctctaacctct

SEQ ID NO: 194422 - DNA, 25 bp, Homo sapien
gcaacattttttcgagactcttgaa

SEQ ID NO: 194423 - DNA, 25 bp, Homo sapien
ctaatactaagttttactgcaacat

SEQ ID NO: 194424 - DNA, 25 bp, Homo sapien
tgtggggtgcattagatctttcagg

SEQ ID NO: 194425 - DNA, 25 bp, Homo sapien
ctttgtggggtgcattagatctttc

SEQ ID NO: 194426 - DNA, 25 bp, Homo sapien
ggtgcattagatctttcaggccact

SEQ ID NO: 194427 - DNA, 25 bp, Homo sapien
tggggtgcattagatctttcaggcc

SEQ ID NO: 194428 - DNA, 25 bp, Homo sapien
tccacattcttgtaaaggagtacag

SEQ ID NO: 194429 - DNA, 25 bp, Homo sapien
agatactaaggatccctgagcaggg

SEQ ID NO: 194430 - DNA, 25 bp, Homo sapien
ctttgtcagcatacaataggtagat

SEQ ID NO: 194431 - DNA, 25 bp, Homo sapien
aaatatttgaggctccacattcttg

SEQ ID NO: 194432 - DNA, 25 bp, Homo sapien
cagtggtgtagaattagctggccaa

SEQ ID NO: 194433 - DNA, 25 bp, Homo sapien
aatagccctgcactggaaacaatcc

SEQ ID NO: 194434 - DNA, 25 bp, Homo sapien
gctggccaaagggagatgtattgtc

SEQ ID NO: 194435 - DNA, 25 bp, Homo sapien
tcaaaaggcaacactagagcgatcc

SEQ ID NO: 194436 - DNA, 25 bp, Homo sapien
tggcacatgtgcattgtaacagaca

SEQ ID NO: 194437 - DNA, 25 bp, Homo sapien
gaaagggtgcccttctacatgccgt

SEQ ID NO: 194438 - DNA, 25 bp, Homo sapien
tgagcctcccatgaatcctgtaaaa

SEQ ID NO: 194439 - DNA, 25 bp, Homo sapien
tgtaagtcactaacccatgaacaga

SEQ ID NO: 194440 - DNA, 25 bp, Homo sapien
atgtgacttcacataacacaggaag

SEQ ID NO: 194441 - DNA, 25 bp, Homo sapien
tgtgacttcacataacacaggaagg

SEQ ID NO: 194442 - DNA, 25 bp, Homo sapien
gaaagtggacagagaagccaagatg

SEQ ID NO: 194443 - DNA, 25 bp, Homo sapien
ggacagagaagccaagatgtaaata

SEQ ID NO: 194444 - DNA, 25 bp, Homo sapien
tacatgatgtaactgactagctggg

SEQ ID NO: 194445 - DNA, 25 bp, Homo sapien
aaatgtctgttgattggccctcatc

SEQ ID NO: 194446 - DNA, 25 bp, Homo sapien
aaagttccgatcattctgtggtagc

SEQ ID NO: 194447 - DNA, 25 bp, Homo sapien
ttaagagccatacaaaaacgaactg

SEQ ID NO: 194448 - DNA, 25 bp, Homo sapien
tggtccccttttgaactgactgaaa

SEQ ID NO: 194449 - DNA, 25 bp, Homo sapien
tcaacttaaagatcaagggagggag

SEQ ID NO: 194450 - DNA, 25 bp, Homo sapien
tatgtggagcactgaagatttatcc

SEQ ID NO: 194451 - DNA, 25 bp, Homo sapien
ggctagttgccacaaaatggaagtc

SEQ ID NO: 194452 - DNA, 25 bp, Homo sapien
gtggccgcaagcaaactccgataag

SEQ ID NO: 194453 - DNA, 25 bp, Homo sapien
actaaagggcagaggcatattaccc

SEQ ID NO: 194454 - DNA, 25 bp, Homo sapien
tgcatgggcttacgcagcagcttcg

SEQ ID NO: 194455 - DNA, 25 bp, Homo sapien
tagtttgggtgttcaagtggccgca

SEQ ID NO: 194456 - DNA, 25 bp, Homo sapien
tacagttatctagcttagccatggg

SEQ ID NO: 194457 - DNA, 25 bp, Homo sapien
gaatcttttatagcctctgccagga

SEQ ID NO: 194458 - DNA, 25 bp, Homo sapien
aggtctcttctctactcaggtcaag

SEQ ID NO: 194459 - DNA, 25 bp, Homo sapien
gactctttcttcatgccagtgcctg

SEQ ID NO: 194460 - DNA, 25 bp, Homo sapien
gacttaagatagagatgaggacgat

SEQ ID NO: 194461 - DNA, 25 bp, Homo sapien
tatatgaaccaaaatcccaacagca

SEQ ID NO: 194462 - DNA, 25 bp, Homo sapien
gagatgaggacgataatgggaaaaa

SEQ ID NO: 194463 - DNA, 25 bp, Homo sapien
cttcgaggacttaagatagagatga

SEQ ID NO: 194464 - DNA, 25 bp, Homo sapien
tcatcaatagcaatgtcaccttcta

SEQ ID NO: 194465 - DNA, 25 bp, Homo sapien
ccttctgcaattgatacatcatcaa

SEQ ID NO: 194466 - DNA, 25 bp, Homo sapien
tccaggacctcggataccttcaaaa

SEQ ID NO: 194467 - DNA, 25 bp, Homo sapien
gtcaccttctattccaggacctcgg

SEQ ID NO: 194468 - DNA, 25 bp, Homo sapien
cagtggattctctattgttgtttgc

SEQ ID NO: 194469 - DNA, 25 bp, Homo sapien
gtcctttattcccacttgaagacca

SEQ ID NO: 194470 - DNA, 25 bp, Homo sapien
aattgggtatatattaacatgagcc

SEQ ID NO: 194471 - DNA, 25 bp, Homo sapien
tgttgtttgccctttcaaacgtaga

SEQ ID NO: 194472 - DNA, 25 bp, Homo sapien
gctgtgtgtttatgaacctttttct

SEQ ID NO: 194473 - DNA, 25 bp, Homo sapien
tgctgtgtgtttatgaacctttttc

SEQ ID NO: 194474 - DNA, 25 bp, Homo sapien
atgctgtgtgtttatgaaccttttt

SEQ ID NO: 194475 - DNA, 25 bp, Homo sapien
tgtgtgtttatgaacctttttcttc

SEQ ID NO: 194476 - DNA, 25 bp, Homo sapien
gaatcagtaattattgctatctcac

SEQ ID NO: 194477 - DNA, 25 bp, Homo sapien
tatcattaattttgtaagaatcagt

SEQ ID NO: 194478 - DNA, 25 bp, Homo sapien
gtaagaatcagtaattattgctatc

SEQ ID NO: 194479 - DNA, 25 bp, Homo sapien
ttttgtaagaatcagtaattattgc

SEQ ID NO: 194480 - DNA, 25 bp, Homo sapien
gaaaacagggctgagaagtcgagcc

SEQ ID NO: 194481 - DNA, 25 bp, Homo sapien
ccataagggtttttgggagctatgc

SEQ ID NO: 194482 - DNA, 25 bp, Homo sapien
caatatgcagtgtttgtgggtccat

SEQ ID NO: 194483 - DNA, 25 bp, Homo sapien
gagccttttcgccttccaatctggg

SEQ ID NO: 194484 - DNA, 25 bp, Homo sapien
tcaaatatatggctaaatattagta

SEQ ID NO: 194485 - DNA, 25 bp, Homo sapien
aatcttcaaatatatggctaaatat

SEQ ID NO: 194486 - DNA, 25 bp, Homo sapien
taatcttcaaatatatggctaaata

SEQ ID NO: 194487 - DNA, 25 bp, Homo sapien
tttaaaagtctctgattgctatgaa

SEQ ID NO: 194488 - DNA, 25 bp, Homo sapien
ttaggtcctgtattaggagtatatt

SEQ ID NO: 194489 - DNA, 25 bp, Homo sapien
cagcattaggtcctgtattaggagt

SEQ ID NO: 194490 - DNA, 25 bp, Homo sapien
cttctttggagccactacggtcagc

SEQ ID NO: 194491 - DNA, 25 bp, Homo sapien
cattaggtcctgtattaggagtata

SEQ ID NO: 194492 - DNA, 25 bp, Homo sapien
cttgagtgaacaaacaaatattacc

SEQ ID NO: 194493 - DNA, 25 bp, Homo sapien
acaaatattaccatcttcaaatcca

SEQ ID NO: 194494 - DNA, 25 bp, Homo sapien
tcttcaaatccacaatgaaattctc

SEQ ID NO: 194495 - DNA, 25 bp, Homo sapien
acaaacaaatattaccatcttcaaa

SEQ ID NO: 194496 - DNA, 25 bp, Homo sapien
cactatatttgatcacacgaattgt

SEQ ID NO: 194497 - DNA, 25 bp, Homo sapien
gatcacacgaattgttgaatctcct

SEQ ID NO: 194498 - DNA, 25 bp, Homo sapien
taattagctctgtcaagttatatgt

SEQ ID NO: 194499 - DNA, 25 bp, Homo sapien
agtcagtcggacttcataagcttct

SEQ ID NO: 194500 - DNA, 25 bp, Homo sapien
cctggacaggcatgaaatggttcct

SEQ ID NO: 194501 - DNA, 25 bp, Homo sapien
tatctaaatgggctaagtcaagcac

SEQ ID NO: 194502 - DNA, 25 bp, Homo sapien
aattagtgattactcgtggtcaccg

SEQ ID NO: 194503 - DNA, 25 bp, Homo sapien
tgaagtttgcacctcagtgatcgtg

SEQ ID NO: 194504 - DNA, 25 bp, Homo sapien
agacgttgaggacaatacttcgttt

SEQ ID NO: 194505 - DNA, 25 bp, Homo sapien
aaaggaattggtcaattatggattt

SEQ ID NO: 194506 - DNA, 25 bp, Homo sapien
aaggaattggtcaattatggatttt

SEQ ID NO: 194507 - DNA, 25 bp, Homo sapien
tgggagagcaaataagtatgataat

SEQ ID NO: 194508 - DNA, 25 bp, Homo sapien
gaatgggagagcaaataagtatgat

SEQ ID NO: 194509 - DNA, 25 bp, Homo sapien
ggaaggtaaggaagcaaagcggcag

SEQ ID NO: 194510 - DNA, 25 bp, Homo sapien
aaggtaaggaagcaaagcggcagga

SEQ ID NO: 194511 - DNA, 25 bp, Homo sapien
gaaggtaaggaagcaaagcggcagg

SEQ ID NO: 194512 - DNA, 25 bp, Homo sapien
gggaaggtaaggaagcaaagcggca

SEQ ID NO: 194513 - DNA, 25 bp, Homo sapien
tgcctgatgcccaaccggtatgcaa

SEQ ID NO: 194514 - DNA, 25 bp, Homo sapien
tccgatccactgcatcaggattcat

SEQ ID NO: 194515 - DNA, 25 bp, Homo sapien
ggtatgcaacaatccgatccactgc

SEQ ID NO: 194516 - DNA, 25 bp, Homo sapien
tgcccaaccggtatgcaacaatccg

SEQ ID NO: 194517 - DNA, 25 bp, Homo sapien
ccatactggattgtaggtatcataa

SEQ ID NO: 194518 - DNA, 25 bp, Homo sapien
acggtgtctgttctgccatactgga

SEQ ID NO: 194519 - DNA, 25 bp, Homo sapien
ctgtagactgtaagaataaacacgg

SEQ ID NO: 194520 - DNA, 25 bp, Homo sapien
cataatagaattctggagcataggc

SEQ ID NO: 194521 - DNA, 25 bp, Homo sapien
gactgagagacatcagataatgcgg

SEQ ID NO: 194522 - DNA, 25 bp, Homo sapien
gatggagcgaagtaggatagaataa

SEQ ID NO: 194523 - DNA, 25 bp, Homo sapien
tgagactggcagcagcatgcctgat

SEQ ID NO: 194524 - DNA, 25 bp, Homo sapien
acttatcctaaagtcataagaaaca

SEQ ID NO: 194525 - DNA, 25 bp, Homo sapien
ctggactggatctgactgcaaagca

SEQ ID NO: 194526 - DNA, 25 bp, Homo sapien
tgcaaagcaggtatctatctgcctg

SEQ ID NO: 194527 - DNA, 25 bp, Homo sapien
tcctagtaactgtctttgtcataca

SEQ ID NO: 194528 - DNA, 25 bp, Homo sapien
ctgcagttggatcccgaggctccta

SEQ ID NO: 194529 - DNA, 25 bp, Homo sapien
gctcaattgtgcattgattacttac

SEQ ID NO: 194530 - DNA, 25 bp, Homo sapien
tttatctctgacatcagtcatcctc

SEQ ID NO: 194531 - DNA, 25 bp, Homo sapien
ttatctctgacatcagtcatcctct

SEQ ID NO: 194532 - DNA, 25 bp, Homo sapien
tatctctgacatcagtcatcctctc

SEQ ID NO: 194533 - DNA, 25 bp, Homo sapien
cataggtcagcacccgtattggata

SEQ ID NO: 194534 - DNA, 25 bp, Homo sapien
tattggataggctctcagtactctg

SEQ ID NO: 194535 - DNA, 25 bp, Homo sapien
gaaagactcttcacagcgtactctg

SEQ ID NO: 194536 - DNA, 25 bp, Homo sapien
taatttattgcccaagcgccactca

SEQ ID NO: 194537 - DNA, 25 bp, Homo sapien
tttaagtggaagaggttgtcagtgt

SEQ ID NO: 194538 - DNA, 25 bp, Homo sapien
tccttttaagtggaagaggttgtca

SEQ ID NO: 194539 - DNA, 25 bp, Homo sapien
ggaagaggttgtcagtgtaattcat

SEQ ID NO: 194540 - DNA, 25 bp, Homo sapien
tggaagaggttgtcagtgtaattca

SEQ ID NO: 194541 - DNA, 25 bp, Homo sapien
aattaccacgaaggatttagaacat

SEQ ID NO: 194542 - DNA, 25 bp, Homo sapien
aaccaccaccgcattgagtcagcag

SEQ ID NO: 194543 - DNA, 25 bp, Homo sapien
tggaactgaactcccaatatctttg

SEQ ID NO: 194544 - DNA, 25 bp, Homo sapien
gtctctggataacagcatatattta

SEQ ID NO: 194545 - DNA, 25 bp, Homo sapien
tggaaaatagtagcatgcgcaacag

SEQ ID NO: 194546 - DNA, 25 bp, Homo sapien
ctttgagaagagtaattttcaactg

SEQ ID NO: 194547 - DNA, 25 bp, Homo sapien
gactgtgcaaagtacagtttctgga

SEQ ID NO: 194548 - DNA, 25 bp, Homo sapien
tgcgcaacagaatcccatgtgttct

SEQ ID NO: 194549 - DNA, 25 bp, Homo sapien
gcccaagcccagaacattgtactct

SEQ ID NO: 194550 - DNA, 25 bp, Homo sapien
ccaagcccagaacattgtactctgt

SEQ ID NO: 194551 - DNA, 25 bp, Homo sapien
tcaagagcccaagcccagaacattg

SEQ ID NO: 194552 - DNA, 25 bp, Homo sapien
aagcccagaacattgtactctgtac

SEQ ID NO: 194553 - DNA, 25 bp, Homo sapien
ttttgccattcttgttggtgaaata

SEQ ID NO: 194554 - DNA, 25 bp, Homo sapien
cagatctcagcgtctttttgccatt

SEQ ID NO: 194555 - DNA, 25 bp, Homo sapien
tcaaaatttggaatgctgagatttc

SEQ ID NO: 194556 - DNA, 25 bp, Homo sapien
gatctcagcgtctttttgccattct

SEQ ID NO: 194557 - DNA, 25 bp, Homo sapien
tgcagacagtgtcagtggtaaccac

SEQ ID NO: 194558 - DNA, 25 bp, Homo sapien
tgtcagtggtaaccacactgtggtt

SEQ ID NO: 194559 - DNA, 25 bp, Homo sapien
cagtgatttaatgcagacagtgtca

SEQ ID NO: 194560 - DNA, 25 bp, Homo sapien
aaacatatgggaaagtgatggccat

SEQ ID NO: 194561 - DNA, 25 bp, Homo sapien
caaagtgttcagttgagtatgtgct

SEQ ID NO: 194562 - DNA, 25 bp, Homo sapien
tgtgtcatcgttagcttttaggcat

SEQ ID NO: 194563 - DNA, 25 bp, Homo sapien
taggacaatctacattaagagatcc

SEQ ID NO: 194564 - DNA, 25 bp, Homo sapien
gaatatcagcatgtagatagctctg

SEQ ID NO: 194565 - DNA, 25 bp, Homo sapien
gtcaacaaagagaatgtaaatgcgg

SEQ ID NO: 194566 - DNA, 25 bp, Homo sapien
tcaatctttttccaactatgggaac

SEQ ID NO: 194567 - DNA, 25 bp, Homo sapien
tgtaaatgcggatcttcaatctttt

SEQ ID NO: 194568 - DNA, 25 bp, Homo sapien
gagaatgtaaatgcggatcttcaat

SEQ ID NO: 194569 - DNA, 25 bp, Homo sapien
tccgctctagaccaaaggatgattg

SEQ ID NO: 194570 - DNA, 25 bp, Homo sapien
tgatccatcaggcattgcaacttct

SEQ ID NO: 194571 - DNA, 25 bp, Homo sapien
tattggctggtctgacatctgtaca

SEQ ID NO: 194572 - DNA, 25 bp, Homo sapien
ggtttgccagttacttgacattgca

SEQ ID NO: 194573 - DNA, 25 bp, Homo sapien
ctgtggaacagtcagattgggtgga

SEQ ID NO: 194574 - DNA, 25 bp, Homo sapien
tgtggaacagtcagattgggtggaa

SEQ ID NO: 194575 - DNA, 25 bp, Homo sapien
catttgtgcagtagaacatctatca

SEQ ID NO: 194576 - DNA, 25 bp, Homo sapien
gagggaaatactatacaacgatctt

SEQ ID NO: 194577 - DNA, 25 bp, Homo sapien
gaatgctataaatacgaataaccag

SEQ ID NO: 194578 - DNA, 25 bp, Homo sapien
ggaagattcttatttcctacacaat

SEQ ID NO: 194579 - DNA, 25 bp, Homo sapien
gaaatatacaatccatatctgttcc

SEQ ID NO: 194580 - DNA, 25 bp, Homo sapien
cacagtggataaggccaacatctat

SEQ ID NO: 194581 - DNA, 25 bp, Homo sapien
ctaatggagggttattacttgaaat

SEQ ID NO: 194582 - DNA, 25 bp, Homo sapien
tccaaaaacaagctacctgaccttg

SEQ ID NO: 194583 - DNA, 25 bp, Homo sapien
cttctcttcaggaatgagtttgacc

SEQ ID NO: 194584 - DNA, 25 bp, Homo sapien
tcccaaccaatgattgttacattct

SEQ ID NO: 194585 - DNA, 25 bp, Homo sapien
gtttgacctcccaaccaatgattgt

SEQ ID NO: 194586 - DNA, 25 bp, Homo sapien
ggaatgagtttgacctcccaaccaa

SEQ ID NO: 194587 - DNA, 25 bp, Homo sapien
aggttaggcatcatcttctgtaggc

SEQ ID NO: 194588 - DNA, 25 bp, Homo sapien
gcaaattggaacatcaaaggtcagt

SEQ ID NO: 194589 - DNA, 25 bp, Homo sapien
tcctaggccatctagcctcaagagc

SEQ ID NO: 194590 - DNA, 25 bp, Homo sapien
tgccatccgtgtagccacacttaga

SEQ ID NO: 194591 - DNA, 25 bp, Homo sapien
ccatgtattgtttcggctattgaga

SEQ ID NO: 194592 - DNA, 25 bp, Homo sapien
aagtctcagactttgtagagcttcc

SEQ ID NO: 194593 - DNA, 25 bp, Homo sapien
gagaaaccacatctatctgtagtta

SEQ ID NO: 194594 - DNA, 25 bp, Homo sapien
tctgtagttaagtgggtactttcca

SEQ ID NO: 194595 - DNA, 25 bp, Homo sapien
ttgattctttggatctgagctttgt

SEQ ID NO: 194596 - DNA, 25 bp, Homo sapien
ggatctgagctttgtgtcactggtt

SEQ ID NO: 194597 - DNA, 25 bp, Homo sapien
tctttggatctgagctttgtgtcac

SEQ ID NO: 194598 - DNA, 25 bp, Homo sapien
ttagataaaagcattgattctttgg

SEQ ID NO: 194599 - DNA, 25 bp, Homo sapien
ttgttcccggagagacatcaggatc

SEQ ID NO: 194600 - DNA, 25 bp, Homo sapien
tacacatgtgtacgtcccaaaatcc

SEQ ID NO: 194601 - DNA, 25 bp, Homo sapien
tattaacatcgatactgatatcaga

SEQ ID NO: 194602 - DNA, 25 bp, Homo sapien
ctgtgctgctggatatattaacatc

SEQ ID NO: 194603 - DNA, 25 bp, Homo sapien
tcagaacttcttaatggacgaccat

SEQ ID NO: 194604 - DNA, 25 bp, Homo sapien
aaggaacagcttctacttggcaaga

SEQ ID NO: 194605 - DNA, 25 bp, Homo sapien
caagatattttcacctcacggccaa

SEQ ID NO: 194606 - DNA, 25 bp, Homo sapien
tctggtgtgatccaaaatcgtcctt

SEQ ID NO: 194607 - DNA, 25 bp, Homo sapien
taaagaggcactatatcaccaagct

SEQ ID NO: 194608 - DNA, 25 bp, Homo sapien
tctgtaccctccagtgataacagtg

SEQ ID NO: 194609 - DNA, 25 bp, Homo sapien
gtgacatggaagatacaacacctgt

SEQ ID NO: 194610 - DNA, 25 bp, Homo sapien
tacgattagtgatggtgcctgataa

SEQ ID NO: 194611 - DNA, 25 bp, Homo sapien
gcagtcactaattcttggttcatct

SEQ ID NO: 194612 - DNA, 25 bp, Homo sapien
catagaatagaatgtacccattact

SEQ ID NO: 194613 - DNA, 25 bp, Homo sapien
tagaatgagcactgacattggagga

SEQ ID NO: 194614 - DNA, 25 bp, Homo sapien
gctaagatggatttgaattactggg

SEQ ID NO: 194615 - DNA, 25 bp, Homo sapien
tggagaggtaggtggagaggtaaca

SEQ ID NO: 194616 - DNA, 25 bp, Homo sapien
ggagaggtaggtggagaggtaacag

SEQ ID NO: 194617 - DNA, 25 bp, Homo sapien
gtggagaggtaggtggagaggtaac

SEQ ID NO: 194618 - DNA, 25 bp, Homo sapien
gctctccagccaaagtggacccaag

SEQ ID NO: 194619 - DNA, 25 bp, Homo sapien
tgatggcaggtatggtcaaagttcc

SEQ ID NO: 194620 - DNA, 25 bp, Homo sapien
tactaatgttatggcctctccagga

SEQ ID NO: 194621 - DNA, 25 bp, Homo sapien
gcagggtttcccacattattattgg

SEQ ID NO: 194622 - DNA, 25 bp, Homo sapien
gctgtaagtaccagcatcatctgag

SEQ ID NO: 194623 - DNA, 25 bp, Homo sapien
ccaggctaccaatatgactcttcag

SEQ ID NO: 194624 - DNA, 25 bp, Homo sapien
tattagccaggctaccaatatgact

SEQ ID NO: 194625 - DNA, 25 bp, Homo sapien
caatatgactcttcagccagatgaa

SEQ ID NO: 194626 - DNA, 25 bp, Homo sapien
ttgtatattagccaggctaccaata

SEQ ID NO: 194627 - DNA, 25 bp, Homo sapien
caggtcatgatagacattgccacag

SEQ ID NO: 194628 - DNA, 25 bp, Homo sapien
gctggtagtcttccaacatgtaata

SEQ ID NO: 194629 - DNA, 25 bp, Homo sapien
tcataaagatcaggatgccaatgtt

SEQ ID NO: 194630 - DNA, 25 bp, Homo sapien
tttgagtctcctcataaagatcagg

SEQ ID NO: 194631 - DNA, 25 bp, Homo sapien
tattggacagtctaaacgacaccat

SEQ ID NO: 194632 - DNA, 25 bp, Homo sapien
cctcactgaagcaatgcagctataa

SEQ ID NO: 194633 - DNA, 25 bp, Homo sapien
ggaatattacatacattcctcactg

SEQ ID NO: 194634 - DNA, 25 bp, Homo sapien
gcatagtcctgaggtcgaagattct

SEQ ID NO: 194635 - DNA, 25 bp, Homo sapien
gtcctgaggtcgaagattctttagt

SEQ ID NO: 194636 - DNA, 25 bp, Homo sapien
tttatcagatccttgcagcaagacc

SEQ ID NO: 194637 - DNA, 25 bp, Homo sapien
gaacagttactactggatcatccaa

SEQ ID NO: 194638 - DNA, 25 bp, Homo sapien
gctataccgaacaggaggattggaa

SEQ ID NO: 194639 - DNA, 25 bp, Homo sapien
gattggaattggcaacacaccggag

SEQ ID NO: 194640 - DNA, 25 bp, Homo sapien
caaaattccccttccaaatgggcat

SEQ ID NO: 194641 - DNA, 25 bp, Homo sapien
gaggagttaacagtctttattgggc

SEQ ID NO: 194642 - DNA, 25 bp, Homo sapien
tgaggagttaacagtctttattggg

SEQ ID NO: 194643 - DNA, 25 bp, Homo sapien
tcttccagtactggatcttggcctt

SEQ ID NO: 194644 - DNA, 25 bp, Homo sapien
agtcttgaagacctctgtatatttg

SEQ ID NO: 194645 - DNA, 25 bp, Homo sapien
tccgtgagtcttgaagacctctgta

SEQ ID NO: 194646 - DNA, 25 bp, Homo sapien
cttcttccagtactggatcttggcc

SEQ ID NO: 194647 - DNA, 25 bp, Homo sapien
gccaacctcgtgagccaggcgcccc

SEQ ID NO: 194648 - DNA, 25 bp, Homo sapien
cagccaacctcgtgagccaggcgcc

SEQ ID NO: 194649 - DNA, 25 bp, Homo sapien
caacctcgtgagccaggcgccccag

SEQ ID NO: 194650 - DNA, 25 bp, Homo sapien
ctacttccagccaacctcgtgagcc

SEQ ID NO: 194651 - DNA, 25 bp, Homo sapien
attttttcttgtcatagggcggtgg

SEQ ID NO: 194652 - DNA, 25 bp, Homo sapien
caccttaaggcagtccagagcggcc

SEQ ID NO: 194653 - DNA, 25 bp, Homo sapien
ccttaaggcagtccagagcggcctg

SEQ ID NO: 194654 - DNA, 25 bp, Homo sapien
aacaccttaaggcagtccagagcgg

SEQ ID NO: 194655 - DNA, 25 bp, Homo sapien
tcgctcggtccgaacttcaacttgt

SEQ ID NO: 194656 - DNA, 25 bp, Homo sapien
ctcgctcggtccgaacttcaacttg

SEQ ID NO: 194657 - DNA, 25 bp, Homo sapien
cgctcggtccgaacttcaacttgtt

SEQ ID NO: 194658 - DNA, 25 bp, Homo sapien
ttgatgccttcgcagcatacgacca

SEQ ID NO: 194659 - DNA, 25 bp, Homo sapien
gccttcgcagcatacgaccaccact

SEQ ID NO: 194660 - DNA, 25 bp, Homo sapien
ttcgcagcatacgaccaccactttc

SEQ ID NO: 194661 - DNA, 25 bp, Homo sapien
aatgttgatgccttcgcagcatacg

SEQ ID NO: 194662 - DNA, 25 bp, Homo sapien
tcaagcaccaagacctgcacctccg

SEQ ID NO: 194663 - DNA, 25 bp, Homo sapien
tgcacctccgccatcttcggcagca

SEQ ID NO: 194664 - DNA, 25 bp, Homo sapien
gatggcctcgaccatcaagcaccaa

SEQ ID NO: 194665 - DNA, 25 bp, Homo sapien
acctccgccatcttcggcagcagct

SEQ ID NO: 194666 - DNA, 25 bp, Homo sapien
ctggagataacagtgctattatttc

SEQ ID NO: 194667 - DNA, 25 bp, Homo sapien
atgagatactcaggcacaacccagt

SEQ ID NO: 194668 - DNA, 25 bp, Homo sapien
ggtgtgtgatatgaatgagatactc

SEQ ID NO: 194669 - DNA, 25 bp, Homo sapien
ctattatttccagtaaggtgtgtga

SEQ ID NO: 194670 - DNA, 25 bp, Homo sapien
tgactttatcgctggagaccccaag

SEQ ID NO: 194671 - DNA, 25 bp, Homo sapien
ggcctccttggtgtcgctgaatatt

SEQ ID NO: 194672 - DNA, 25 bp, Homo sapien
tgagtcttggaatctgtcagaggca

SEQ ID NO: 194673 - DNA, 25 bp, Homo sapien
aagtctcattgaagacacttgagtc

SEQ ID NO: 194674 - DNA, 25 bp, Homo sapien
tcttcctctactgccatgatctgga

SEQ ID NO: 194675 - DNA, 25 bp, Homo sapien
tcaatccagatttgtaagatggtaa

SEQ ID NO: 194676 - DNA, 25 bp, Homo sapien
tctactgccatgatctggacaactt

SEQ ID NO: 194677 - DNA, 25 bp, Homo sapien
ctgccatgatctggacaacttcact

SEQ ID NO: 194678 - DNA, 25 bp, Homo sapien
tcacaggaagttttcctaggcccta

SEQ ID NO: 194679 - DNA, 25 bp, Homo sapien
ttcttcacaggaagttttcctaggc

SEQ ID NO: 194680 - DNA, 25 bp, Homo sapien
tccccaatttccataggatgaagtt

SEQ ID NO: 194681 - DNA, 25 bp, Homo sapien
tccataggatgaagtttcactgaaa

SEQ ID NO: 194682 - DNA, 25 bp, Homo sapien
tcaggaatttatccacgagtgacac

SEQ ID NO: 194683 - DNA, 25 bp, Homo sapien
tatgcctgcccctaaatgtctttcc

SEQ ID NO: 194684 - DNA, 25 bp, Homo sapien
gagtgacactcaccaacagtaccct

SEQ ID NO: 194685 - DNA, 25 bp, Homo sapien
ctgacgtggccagggcatgattaac

SEQ ID NO: 194686 - DNA, 25 bp, Homo sapien
tagcagtacatttatccagtttatc

SEQ ID NO: 194687 - DNA, 25 bp, Homo sapien
agtagcagtacatttatccagttta

SEQ ID NO: 194688 - DNA, 25 bp, Homo sapien
ttgtagtagcagtacatttatccag

SEQ ID NO: 194689 - DNA, 25 bp, Homo sapien
gtagtagcagtacatttatccagtt

SEQ ID NO: 194690 - DNA, 25 bp, Homo sapien
atttgcttgggcaacaccatctagg

SEQ ID NO: 194691 - DNA, 25 bp, Homo sapien
ttgggcaacaccatctaggccatca

SEQ ID NO: 194692 - DNA, 25 bp, Homo sapien
aatttgcttgggcaacaccatctag

SEQ ID NO: 194693 - DNA, 25 bp, Homo sapien
gggcaacaccatctaggccatcaat

SEQ ID NO: 194694 - DNA, 25 bp, Homo sapien
cacacttacatctatggagcagtac

SEQ ID NO: 194695 - DNA, 25 bp, Homo sapien
gaccacacttacatctatggagcag

SEQ ID NO: 194696 - DNA, 25 bp, Homo sapien
ctgtgaccacacttacatctatgga

SEQ ID NO: 194697 - DNA, 25 bp, Homo sapien
tgtgaccacacttacatctatggag

SEQ ID NO: 194698 - DNA, 25 bp, Homo sapien
aacaattatttggataccttgaaat

SEQ ID NO: 194699 - DNA, 25 bp, Homo sapien
aattatttggataccttgaaatgat

SEQ ID NO: 194700 - DNA, 25 bp, Homo sapien
tcaacaattatttggataccttgaa

SEQ ID NO: 194701 - DNA, 25 bp, Homo sapien
tgggctgcagagctccgtctcggga

SEQ ID NO: 194702 - DNA, 25 bp, Homo sapien
ttgccataaactgcctctcataaag

SEQ ID NO: 194703 - DNA, 25 bp, Homo sapien
taatgggaacctcaatgagtcttct

SEQ ID NO: 194704 - DNA, 25 bp, Homo sapien
tgtgtttagaccctcctgtttagat

SEQ ID NO: 194705 - DNA, 25 bp, Homo sapien
cactctttgtgggactaatgggaac

SEQ ID NO: 194706 - DNA, 25 bp, Homo sapien
tcttcaatgttacaggccaagcctg

SEQ ID NO: 194707 - DNA, 25 bp, Homo sapien
tgtagaccctttcggagtagcgctc

SEQ ID NO: 194708 - DNA, 25 bp, Homo sapien
gacaagtcaactcaagggtttctcc

SEQ ID NO: 194709 - DNA, 25 bp, Homo sapien
ctccttcccggatagtgtagaccct

SEQ ID NO: 194710 - DNA, 25 bp, Homo sapien
tcatcatccttaaattggactaagg

SEQ ID NO: 194711 - DNA, 25 bp, Homo sapien
atcatccttaaattggactaagggt

SEQ ID NO: 194712 - DNA, 25 bp, Homo sapien
attcatcatccttaaattggactaa

SEQ ID NO: 194713 - DNA, 25 bp, Homo sapien
attggactaagggttaagatctcct

SEQ ID NO: 194714 - DNA, 25 bp, Homo sapien
tgccactatgtctcagacataggag

SEQ ID NO: 194715 - DNA, 25 bp, Homo sapien
cttgccactgtacagccttatcagc

SEQ ID NO: 194716 - DNA, 25 bp, Homo sapien
gccactatgtctcagacataggaga

SEQ ID NO: 194717 - DNA, 25 bp, Homo sapien
ccactatgtctcagacataggagag

SEQ ID NO: 194718 - DNA, 25 bp, Homo sapien
ctggcctctccacaagcacttttac

SEQ ID NO: 194719 - DNA, 25 bp, Homo sapien
ctctggcctctccacaagcactttt

SEQ ID NO: 194720 - DNA, 25 bp, Homo sapien
tctggcctctccacaagcactttta

SEQ ID NO: 194721 - DNA, 25 bp, Homo sapien
actctggcctctccacaagcacttt

SEQ ID NO: 194722 - DNA, 25 bp, Homo sapien
ttttaagccaggaaagcagaactct

SEQ ID NO: 194723 - DNA, 25 bp, Homo sapien
gacatggctcataattcaatgcacc

SEQ ID NO: 194724 - DNA, 25 bp, Homo sapien
tctgatagtaaagtgaaactgtgtc

SEQ ID NO: 194725 - DNA, 25 bp, Homo sapien
caaacagtatttatatgacatggct

SEQ ID NO: 194726 - DNA, 25 bp, Homo sapien
cattatgccaataggaaggtactca

SEQ ID NO: 194727 - DNA, 25 bp, Homo sapien
caaactagcctatcaggactaaggg

SEQ ID NO: 194728 - DNA, 25 bp, Homo sapien
ttaactagatcagggacacctttgc

SEQ ID NO: 194729 - DNA, 25 bp, Homo sapien
gcacgtacgaacattttggcataaa

SEQ ID NO: 194730 - DNA, 25 bp, Homo sapien
ctgaagtcacagtagtaggaggaag

SEQ ID NO: 194731 - DNA, 25 bp, Homo sapien
agaagcaggcagcactaccgtgagt

SEQ ID NO: 194732 - DNA, 25 bp, Homo sapien
tgagtcctgcggcagatcccaaggg

SEQ ID NO: 194733 - DNA, 25 bp, Homo sapien
tggcagaatgctacctcaggggagt

SEQ ID NO: 194734 - DNA, 25 bp, Homo sapien
ctttgaggactaatttccacttatc

SEQ ID NO: 194735 - DNA, 25 bp, Homo sapien
ttgaataaccagatgctcgaggcac

SEQ ID NO: 194736 - DNA, 25 bp, Homo sapien
aaacagctgaggttactttgaggac

SEQ ID NO: 194737 - DNA, 25 bp, Homo sapien
tcgaggcacacaataatgaaacagc

SEQ ID NO: 194738 - DNA, 25 bp, Homo sapien
catgctgccctagcaactttttgat

SEQ ID NO: 194739 - DNA, 25 bp, Homo sapien
tggcagacacataataaccctcctc

SEQ ID NO: 194740 - DNA, 25 bp, Homo sapien
tccggtatgatatcctctgtgaagc

SEQ ID NO: 194741 - DNA, 25 bp, Homo sapien
tatgcttttaaggtgctgttctctc

SEQ ID NO: 194742 - DNA, 25 bp, Homo sapien
tgtagatttgccgaagggagaaaat

SEQ ID NO: 194743 - DNA, 25 bp, Homo sapien
gatttgccgaagggagaaaatgcac

SEQ ID NO: 194744 - DNA, 25 bp, Homo sapien
tagatttgccgaagggagaaaatgc

SEQ ID NO: 194745 - DNA, 25 bp, Homo sapien
ctgtagatttgccgaagggagaaaa

SEQ ID NO: 194746 - DNA, 25 bp, Homo sapien
ttaagattccgagctattacatggg

SEQ ID NO: 194747 - DNA, 25 bp, Homo sapien
caactttagaaatgaggtactcacc

SEQ ID NO: 194748 - DNA, 25 bp, Homo sapien
tctgcttgccagaaaagggcgataa

SEQ ID NO: 194749 - DNA, 25 bp, Homo sapien
gaacggaattccagccttgaaaaca

SEQ ID NO: 194750 - DNA, 25 bp, Homo sapien
tccactggtggtatatgtatgtcca

SEQ ID NO: 194751 - DNA, 25 bp, Homo sapien
ccattgtgcattataggctaaaacc

SEQ ID NO: 194752 - DNA, 25 bp, Homo sapien
taggtgtgcatattaattctggccc

SEQ ID NO: 194753 - DNA, 25 bp, Homo sapien
tcaccaaaggtagcaatttatatcc

SEQ ID NO: 194754 - DNA, 25 bp, Homo sapien
tcttctagggcttgaaagttcacca

SEQ ID NO: 194755 - DNA, 25 bp, Homo sapien
ccataatgtgtttggcaggccactg

SEQ ID NO: 194756 - DNA, 25 bp, Homo sapien
aagttcaccataatgtgtttggcag

SEQ ID NO: 194757 - DNA, 25 bp, Homo sapien
caggccactggcttagtgtaggaga

SEQ ID NO: 194758 - DNA, 25 bp, Homo sapien
tatgcaaggttcaccacctgtgccc

SEQ ID NO: 194759 - DNA, 25 bp, Homo sapien
caccaggagagatggcactatgcaa

SEQ ID NO: 194760 - DNA, 25 bp, Homo sapien
tctaggtggaggtaggtacactctc

SEQ ID NO: 194761 - DNA, 25 bp, Homo sapien
tagaatcacatgaaggctaccctgc

SEQ ID NO: 194762 - DNA, 25 bp, Homo sapien
tcatgaagccataggtattacagac

SEQ ID NO: 194763 - DNA, 25 bp, Homo sapien
tgttgttaaaatcagacactaagtt

SEQ ID NO: 194764 - DNA, 25 bp, Homo sapien
ttttccttagattcaaaagcaatat

SEQ ID NO: 194765 - DNA, 25 bp, Homo sapien
aaatcagacactaagtttttataag

SEQ ID NO: 194766 - DNA, 25 bp, Homo sapien
tataaggactcccattttccttaga

SEQ ID NO: 194767 - DNA, 25 bp, Homo sapien
ctgttaatcttaaacgattattaat

SEQ ID NO: 194768 - DNA, 25 bp, Homo sapien
caagctggtcgcttttagtcagaga

SEQ ID NO: 194769 - DNA, 25 bp, Homo sapien
tctcaagctggtcgcttttagtcag

SEQ ID NO: 194770 - DNA, 25 bp, Homo sapien
ggtcgcttttagtcagagaggccat

SEQ ID NO: 194771 - DNA, 25 bp, Homo sapien
gtctctctctcaagctggtcgcttt

SEQ ID NO: 194772 - DNA, 25 bp, Homo sapien
tcccaacagcatacccctgaggatc

SEQ ID NO: 194773 - DNA, 25 bp, Homo sapien
catgtgtcggctccagtgtctcact

SEQ ID NO: 194774 - DNA, 25 bp, Homo sapien
cccatcacatgtgtcggctccagtg

SEQ ID NO: 194775 - DNA, 25 bp, Homo sapien
tttccccatcacatgtgtcggctcc

SEQ ID NO: 194776 - DNA, 25 bp, Homo sapien
acaatacagtaagagtgacagatct

SEQ ID NO: 194777 - DNA, 25 bp, Homo sapien
attacaatacagtaagagtgacaga

SEQ ID NO: 194778 - DNA, 25 bp, Homo sapien
caatacagtaagagtgacagatctg

SEQ ID NO: 194779 - DNA, 25 bp, Homo sapien
tacaatacagtaagagtgacagatc

SEQ ID NO: 194780 - DNA, 25 bp, Homo sapien
ttatttgtaagcattacatccctag

SEQ ID NO: 194781 - DNA, 25 bp, Homo sapien
tttatttgtaagcattacatcccta

SEQ ID NO: 194782 - DNA, 25 bp, Homo sapien
agctgaggttgtcaatacaactaaa

SEQ ID NO: 194783 - DNA, 25 bp, Homo sapien
gctgaggttgtcaatacaactaaac

SEQ ID NO: 194784 - DNA, 25 bp, Homo sapien
ggctaatcatgccacacatgtttaa

SEQ ID NO: 194785 - DNA, 25 bp, Homo sapien
gagaagagcagactgttttgccatt

SEQ ID NO: 194786 - DNA, 25 bp, Homo sapien
tgtacatcgaagttgaggctaatca

SEQ ID NO: 194787 - DNA, 25 bp, Homo sapien
tctttgagttgtacatcgaagttga

SEQ ID NO: 194788 - DNA, 25 bp, Homo sapien
tgagggattcgcagctcttttccca

SEQ ID NO: 194789 - DNA, 25 bp, Homo sapien
cacggccccataagaacctgatgtt

SEQ ID NO: 194790 - DNA, 25 bp, Homo sapien
ctgcctgagggattcgcagctcttt

SEQ ID NO: 194791 - DNA, 25 bp, Homo sapien
tttagcattgttattgctcttgaga

SEQ ID NO: 194792 - DNA, 25 bp, Homo sapien
taaagcatgcatgtaagacttctgg

SEQ ID NO: 194793 - DNA, 25 bp, Homo sapien
gatgtaatggtcactaagcctcata

SEQ ID NO: 194794 - DNA, 25 bp, Homo sapien
taggccgcctgctaaggagtaaaac

SEQ ID NO: 194795 - DNA, 25 bp, Homo sapien
catgagaggtcactaagactggatt

SEQ ID NO: 194796 - DNA, 25 bp, Homo sapien
agcattttgcatgactctggacatc

SEQ ID NO: 194797 - DNA, 25 bp, Homo sapien
tttgcatgactctggacatcattca

SEQ ID NO: 194798 - DNA, 25 bp, Homo sapien
agtttctgctacagggccattcaaa

SEQ ID NO: 194799 - DNA, 25 bp, Homo sapien
tgactctggacatcattcaatttct

SEQ ID NO: 194800 - DNA, 25 bp, Homo sapien
ctttgatgagcaagagcctgcttca

SEQ ID NO: 194801 - DNA, 25 bp, Homo sapien
gagacacaaacaatcatcataatca

SEQ ID NO: 194802 - DNA, 25 bp, Homo sapien
cataatcatgatcactagacttgcc

SEQ ID NO: 194803 - DNA, 25 bp, Homo sapien
tcttttcgttcgtcctgtcccgtca

SEQ ID NO: 194804 - DNA, 25 bp, Homo sapien
cacattaactcagtaattgccaagt

SEQ ID NO: 194805 - DNA, 25 bp, Homo sapien
tattggcgagcataaaaggaggtgc

SEQ ID NO: 194806 - DNA, 25 bp, Homo sapien
taagccgctgttcaataactagtga

SEQ ID NO: 194807 - DNA, 25 bp, Homo sapien
caggtggtgtagtctgtctcctcta

SEQ ID NO: 194808 - DNA, 25 bp, Homo sapien
tacgggaatcagttggctaggcctg

SEQ ID NO: 194809 - DNA, 25 bp, Homo sapien
tatgattccctgatcctccagtaga

SEQ ID NO: 194810 - DNA, 25 bp, Homo sapien
catctagttacagggaactctgaag

SEQ ID NO: 194811 - DNA, 25 bp, Homo sapien
taggcctggcgtaggtatctctttc

SEQ ID NO: 194812 - DNA, 25 bp, Homo sapien
acctgtgacaagattgctgtcgaaa

SEQ ID NO: 194813 - DNA, 25 bp, Homo sapien
gggaacaacatttcacagaacctgt

SEQ ID NO: 194814 - DNA, 25 bp, Homo sapien
ctgtgtatatgcaataagagggaac

SEQ ID NO: 194815 - DNA, 25 bp, Homo sapien
gctgtcgaaagtcctcttttttgtc

SEQ ID NO: 194816 - DNA, 25 bp, Homo sapien
acgtgtacgccacggtagttatgtg

SEQ ID NO: 194817 - DNA, 25 bp, Homo sapien
gtgtacgccacggtagttatgtgac

SEQ ID NO: 194818 - DNA, 25 bp, Homo sapien
ttacgtgtacgccacggtagttatg

SEQ ID NO: 194819 - DNA, 25 bp, Homo sapien
tacgtgtacgccacggtagttatgt

SEQ ID NO: 194820 - DNA, 25 bp, Homo sapien
cggacctggcctaaatcatctaaaa

SEQ ID NO: 194821 - DNA, 25 bp, Homo sapien
caccggacctggcctaaatcatcta

SEQ ID NO: 194822 - DNA, 25 bp, Homo sapien
ccggacctggcctaaatcatctaaa

SEQ ID NO: 194823 - DNA, 25 bp, Homo sapien
accggacctggcctaaatcatctaa

SEQ ID NO: 194824 - DNA, 25 bp, Homo sapien
gggcagttcgtaggcactgcgattc

SEQ ID NO: 194825 - DNA, 25 bp, Homo sapien
aaggggcagttcgtaggcactgcga

SEQ ID NO: 194826 - DNA, 25 bp, Homo sapien
tagaaggggcagttcgtaggcactg

SEQ ID NO: 194827 - DNA, 25 bp, Homo sapien
cagttcgtaggcactgcgattccat

SEQ ID NO: 194828 - DNA, 25 bp, Homo sapien
gtgtccaggcatttatctttgtcca

SEQ ID NO: 194829 - DNA, 25 bp, Homo sapien
ctttgtccagataaccacagggata

SEQ ID NO: 194830 - DNA, 25 bp, Homo sapien
ttctactataattgtgcattctctc

SEQ ID NO: 194831 - DNA, 25 bp, Homo sapien
attttcattttcaatcggatctaat

SEQ ID NO: 194832 - DNA, 25 bp, Homo sapien
tcgcatgttgacatcactgcagtca

SEQ ID NO: 194833 - DNA, 25 bp, Homo sapien
tgataggccaagcttgtgtcgcatg

SEQ ID NO: 194834 - DNA, 25 bp, Homo sapien
ctgattcttccggaatcttcacaca

SEQ ID NO: 194835 - DNA, 25 bp, Homo sapien
tctttgtatagagatcaatggggca

SEQ ID NO: 194836 - DNA, 25 bp, Homo sapien
gaagaaatgctaatcttcctctgaa

SEQ ID NO: 194837 - DNA, 25 bp, Homo sapien
ctgaacttcagctgccatgtgggaa

SEQ ID NO: 194838 - DNA, 25 bp, Homo sapien
tcctctgaacttcagctgccatgtg

SEQ ID NO: 194839 - DNA, 25 bp, Homo sapien
cagaagaaatgctaatcttcctctg

SEQ ID NO: 194840 - DNA, 25 bp, Homo sapien
cctgttcatagggtcgggcatagct

SEQ ID NO: 194841 - DNA, 25 bp, Homo sapien
tagggtcgggcatagctgaagcact

SEQ ID NO: 194842 - DNA, 25 bp, Homo sapien
tgtccctgttcatagggtcgggcat

SEQ ID NO: 194843 - DNA, 25 bp, Homo sapien
gctgaagcactgcagataagcaaag

SEQ ID NO: 194844 - DNA, 25 bp, Homo sapien
tgtcaagtgactgtgaaaaaatttg

SEQ ID NO: 194845 - DNA, 25 bp, Homo sapien
agtgactgtgaaaaaatttgagaac

SEQ ID NO: 194846 - DNA, 25 bp, Homo sapien
cagatgtcaagtgactgtgaaaaaa

SEQ ID NO: 194847 - DNA, 25 bp, Homo sapien
tttgaacagatgtcaagtgactgtg

SEQ ID NO: 194848 - DNA, 25 bp, Homo sapien
cctgagcagcctgaatctgtcttct

SEQ ID NO: 194849 - DNA, 25 bp, Homo sapien
ctgctttatagggagaatcacacaa

SEQ ID NO: 194850 - DNA, 25 bp, Homo sapien
tcttcggaaagtaaaatactggtgc

SEQ ID NO: 194851 - DNA, 25 bp, Homo sapien
gccttgcaatcacttcccaatactg

SEQ ID NO: 194852 - DNA, 25 bp, Homo sapien
ggctgtggctataggatacagtaca

SEQ ID NO: 194853 - DNA, 25 bp, Homo sapien
tatttcggaatcaacagtatcaagc

SEQ ID NO: 194854 - DNA, 25 bp, Homo sapien
tacagtacaatatgtttggcaaacc

SEQ ID NO: 194855 - DNA, 25 bp, Homo sapien
gagctaatgattcacactcccaggt

SEQ ID NO: 194856 - DNA, 25 bp, Homo sapien
gagtggcagagtccaagtcaagttg

SEQ ID NO: 194857 - DNA, 25 bp, Homo sapien
tttaaagagcagaggttggcccagc

SEQ ID NO: 194858 - DNA, 25 bp, Homo sapien
tgataaccgggtaacacacaggaaa

SEQ ID NO: 194859 - DNA, 25 bp, Homo sapien
gccaccaggctgaattgatctctat

SEQ ID NO: 194860 - DNA, 25 bp, Homo sapien
tacgaggtacaaatcaattcccatt

SEQ ID NO: 194861 - DNA, 25 bp, Homo sapien
ttccagcaagaaaggatacgttatt

SEQ ID NO: 194862 - DNA, 25 bp, Homo sapien
tattatttttggagcggtaagagga

SEQ ID NO: 194863 - DNA, 25 bp, Homo sapien
tccttgacatattggaacacaaaac

SEQ ID NO: 194864 - DNA, 25 bp, Homo sapien
gactatacactcctgagtctgggaa

SEQ ID NO: 194865 - DNA, 25 bp, Homo sapien
ctcaagaggcaggaatgtaagtaac

SEQ ID NO: 194866 - DNA, 25 bp, Homo sapien
taatcatcccatatcctcagaagga

SEQ ID NO: 194867 - DNA, 25 bp, Homo sapien
taagccctgcttgtaaaccctaaga

SEQ ID NO: 194868 - DNA, 25 bp, Homo sapien
tttgtgagtgggattacattcttga

SEQ ID NO: 194869 - DNA, 25 bp, Homo sapien
catatcgctgattcctttcagcagt

SEQ ID NO: 194870 - DNA, 25 bp, Homo sapien
gttttcctaattgttcatatcgctg

SEQ ID NO: 194871 - DNA, 25 bp, Homo sapien
ggctcccagcttgcacgttgttggt

SEQ ID NO: 194872 - DNA, 25 bp, Homo sapien
tgacctaagtatcttcataggtttc

SEQ ID NO: 194873 - DNA, 25 bp, Homo sapien
tctgtaatactgtcaatgggcatgc

SEQ ID NO: 194874 - DNA, 25 bp, Homo sapien
gcttgatgtctgattatgtgattaa

SEQ ID NO: 194875 - DNA, 25 bp, Homo sapien
tattttgtagtgacctaagtatctt

SEQ ID NO: 194876 - DNA, 25 bp, Homo sapien
tgagatccagtgtctacagcatttg

SEQ ID NO: 194877 - DNA, 25 bp, Homo sapien
tattgggccagggaacctgatctaa

SEQ ID NO: 194878 - DNA, 25 bp, Homo sapien
tccaactatgacagagaatgccttc

SEQ ID NO: 194879 - DNA, 25 bp, Homo sapien
cagcatttgtgggagggctgaacac

SEQ ID NO: 194880 - DNA, 25 bp, Homo sapien
tggctgattaacagaataaaacttg

SEQ ID NO: 194881 - DNA, 25 bp, Homo sapien
ttggaaggaatatttgtaaccttca

SEQ ID NO: 194882 - DNA, 25 bp, Homo sapien
tggaaggaatatttgtaaccttcat

SEQ ID NO: 194883 - DNA, 25 bp, Homo sapien
tgattaacagaataaaacttggaag

SEQ ID NO: 194884 - DNA, 25 bp, Homo sapien
tctgaaggacgtttgtggaatacct

SEQ ID NO: 194885 - DNA, 25 bp, Homo sapien
tcatggtgctgaatcaaagaggccg

SEQ ID NO: 194886 - DNA, 25 bp, Homo sapien
aatatgctcagtccacacaaagggc

SEQ ID NO: 194887 - DNA, 25 bp, Homo sapien
catatctaatggtgcctgttgccca

SEQ ID NO: 194888 - DNA, 25 bp, Homo sapien
ggctaggagcacacataatccctgg

SEQ ID NO: 194889 - DNA, 25 bp, Homo sapien
gaaaggttcacaggaagctcttggc

SEQ ID NO: 194890 - DNA, 25 bp, Homo sapien
ccaaagaggctccaatgaaaggttc

SEQ ID NO: 194891 - DNA, 25 bp, Homo sapien
tatccagggctgctctactcttggc

SEQ ID NO: 194892 - DNA, 25 bp, Homo sapien
gaagccaaccaggaaatgaattgtg

SEQ ID NO: 194893 - DNA, 25 bp, Homo sapien
ccatggatgcggaaatcttctaggt

SEQ ID NO: 194894 - DNA, 25 bp, Homo sapien
tgctagcctgttgtaaaatgtcatc

SEQ ID NO: 194895 - DNA, 25 bp, Homo sapien
cagagttgggcgattttctatggca

SEQ ID NO: 194896 - DNA, 25 bp, Homo sapien
tggtcagtatcctaactgcgctcat

SEQ ID NO: 194897 - DNA, 25 bp, Homo sapien
cattgaccctagaaatgtttttggt

SEQ ID NO: 194898 - DNA, 25 bp, Homo sapien
agtatcctaactgcgctcatcatgc

SEQ ID NO: 194899 - DNA, 25 bp, Homo sapien
ctgggatgctttcattgaccctaga

SEQ ID NO: 194900 - DNA, 25 bp, Homo sapien
gaactctccaactacacaggctgtg

SEQ ID NO: 194901 - DNA, 25 bp, Homo sapien
ctgacacagagatgagcccataaga

SEQ ID NO: 194902 - DNA, 25 bp, Homo sapien
tcttaagggtcaggactatgcccat

SEQ ID NO: 194903 - DNA, 25 bp, Homo sapien
tcccattacatggaacgacgatgtc

SEQ ID NO: 194904 - DNA, 25 bp, Homo sapien
aataaggcttgccagtaaaggacaa

SEQ ID NO: 194905 - DNA, 25 bp, Homo sapien
tcttacaacatggatatcatatcac

SEQ ID NO: 194906 - DNA, 25 bp, Homo sapien
gaaacctcaaagctgtctaattgtg

SEQ ID NO: 194907 - DNA, 25 bp, Homo sapien
ggaaataaactgtgtgaaacctcaa

SEQ ID NO: 194908 - DNA, 25 bp, Homo sapien
agatatctagcatccagaagccagc

SEQ ID NO: 194909 - DNA, 25 bp, Homo sapien
aagatatctagcatccagaagccag

SEQ ID NO: 194910 - DNA, 25 bp, Homo sapien
gagacccgctattttatctgcattt

SEQ ID NO: 194911 - DNA, 25 bp, Homo sapien
caactttatgagacccgctatttta

SEQ ID NO: 194912 - DNA, 25 bp, Homo sapien
aaatatgtacaccccttttcacatt

SEQ ID NO: 194913 - DNA, 25 bp, Homo sapien
ataaaacaactttatgagacccgct

SEQ ID NO: 194914 - DNA, 25 bp, Homo sapien
attcaagcgcttctaactctaacca

SEQ ID NO: 194915 - DNA, 25 bp, Homo sapien
caagatcacccagttggctaggggt

SEQ ID NO: 194916 - DNA, 25 bp, Homo sapien
ggctaggggtacaaacaggatacaa

SEQ ID NO: 194917 - DNA, 25 bp, Homo sapien
atccaagtagaataattcaagcgct

SEQ ID NO: 194918 - DNA, 25 bp, Homo sapien
caatacacgtatttgaacacactta

SEQ ID NO: 194919 - DNA, 25 bp, Homo sapien
cgtatttgaacacacttatagattt

SEQ ID NO: 194920 - DNA, 25 bp, Homo sapien
agatcaatacacgtatttgaacaca

SEQ ID NO: 194921 - DNA, 25 bp, Homo sapien
tacacgtatttgaacacacttatag

SEQ ID NO: 194922 - DNA, 25 bp, Homo sapien
tgttaccttctagcttcttattctg

SEQ ID NO: 194923 - DNA, 25 bp, Homo sapien
tgaggttcaactgctagagcatcta

SEQ ID NO: 194924 - DNA, 25 bp, Homo sapien
gaacagaagggaaactctccatgct

SEQ ID NO: 194925 - DNA, 25 bp, Homo sapien
aaatgatagtcctattatgaggttc

SEQ ID NO: 194926 - DNA, 25 bp, Homo sapien
tagttaatctgagctaccaaagagc

SEQ ID NO: 194927 - DNA, 25 bp, Homo sapien
taggtcagtgtatctggctgtttgc

SEQ ID NO: 194928 - DNA, 25 bp, Homo sapien
caaagagcataagctctcgagctca

SEQ ID NO: 194929 - DNA, 25 bp, Homo sapien
gctcagttcccagagtaggtcagtg

SEQ ID NO: 194930 - DNA, 25 bp, Homo sapien
aggccatttctgtccagctactgcc

SEQ ID NO: 194931 - DNA, 25 bp, Homo sapien
tgctaatttgtcatactcaagtgtt

SEQ ID NO: 194932 - DNA, 25 bp, Homo sapien
tatgcccttgttcttaatttcacca

SEQ ID NO: 194933 - DNA, 25 bp, Homo sapien
tgcctgggctgtcattcttaaattg

SEQ ID NO: 194934 - DNA, 25 bp, Homo sapien
ctgggtcagccattgacttagtcct

SEQ ID NO: 194935 - DNA, 25 bp, Homo sapien
cctgggtcagccattgacttagtcc

SEQ ID NO: 194936 - DNA, 25 bp, Homo sapien
ttgccctgggtcagccattgactta

SEQ ID NO: 194937 - DNA, 25 bp, Homo sapien
tgccctgggtcagccattgacttag

SEQ ID NO: 194938 - DNA, 25 bp, Homo sapien
aatcaagtgcaaagccgctcgttcg

SEQ ID NO: 194939 - DNA, 25 bp, Homo sapien
caaagactgctggagctcggattcc

SEQ ID NO: 194940 - DNA, 25 bp, Homo sapien
tgtaaatcaaatgccacgccgggag

SEQ ID NO: 194941 - DNA, 25 bp, Homo sapien
tatcgctcccaataacgtgatgaag

SEQ ID NO: 194942 - DNA, 25 bp, Homo sapien
tgtcagcagccacacgagaccgtac

SEQ ID NO: 194943 - DNA, 25 bp, Homo sapien
acacgagaccgtacagtaaatccat

SEQ ID NO: 194944 - DNA, 25 bp, Homo sapien
gcagccacacgagaccgtacagtaa

SEQ ID NO: 194945 - DNA, 25 bp, Homo sapien
actgtcagcagccacacgagaccgt

SEQ ID NO: 194946 - DNA, 25 bp, Homo sapien
aaccgctcgccgaaggaggaagcgc

SEQ ID NO: 194947 - DNA, 25 bp, Homo sapien
ccgaaggaggaagcgccgtccgtct

SEQ ID NO: 194948 - DNA, 25 bp, Homo sapien
caagccgaggtgcccgggaaccgct

SEQ ID NO: 194949 - DNA, 25 bp, Homo sapien
gtacgcaacgggaccttcaggaggc

SEQ ID NO: 194950 - DNA, 25 bp, Homo sapien
gagctgcgaggcgaagtgttcttca

SEQ ID NO: 194951 - DNA, 25 bp, Homo sapien
acaccgggtgcctgggaaaatcgca

SEQ ID NO: 194952 - DNA, 25 bp, Homo sapien
acgcacgccgcactcacaccgggtg

SEQ ID NO: 194953 - DNA, 25 bp, Homo sapien
tcccacaacacaataccctgacaca

SEQ ID NO: 194954 - DNA, 25 bp, Homo sapien
caggacaccgagcagggctctcttg

SEQ ID NO: 194955 - DNA, 25 bp, Homo sapien
gtgccgcgcggtaggagcctggctt

SEQ ID NO: 194956 - DNA, 25 bp, Homo sapien
gcttggacagccgaggagcaggaag

SEQ ID NO: 194957 - DNA, 25 bp, Homo sapien
gcctggattcgcctttacaaagtaa

SEQ ID NO: 194958 - DNA, 25 bp, Homo sapien
gccaatcctgttacacgatacagac

SEQ ID NO: 194959 - DNA, 25 bp, Homo sapien
gtccaacagggagcggagtgtgcgt

SEQ ID NO: 194960 - DNA, 25 bp, Homo sapien
atacagactcgcatcgccgaacggg

SEQ ID NO: 194961 - DNA, 25 bp, Homo sapien
tccatcagttgccattgcaacgcca

SEQ ID NO: 194962 - DNA, 25 bp, Homo sapien
ccacttgcaagagagggagaatgcc

SEQ ID NO: 194963 - DNA, 25 bp, Homo sapien
ccaattcccggagccgaaagcagag

SEQ ID NO: 194964 - DNA, 25 bp, Homo sapien
ctccaaaatagcctttagcgcccgg

SEQ ID NO: 194965 - DNA, 25 bp, Homo sapien
agctaacgtagtggtggcatccaga

SEQ ID NO: 194966 - DNA, 25 bp, Homo sapien
ctcctcttccaaacatcaggctttt

SEQ ID NO: 194967 - DNA, 25 bp, Homo sapien
ttccaaacatcaggcttttcccagc

SEQ ID NO: 194968 - DNA, 25 bp, Homo sapien
tcttccaaacatcaggcttttccca

SEQ ID NO: 194969 - DNA, 25 bp, Homo sapien
tttgcccactggctttgagtaaaaa

SEQ ID NO: 194970 - DNA, 25 bp, Homo sapien
ggaaaccaaatggctccacttttca

SEQ ID NO: 194971 - DNA, 25 bp, Homo sapien
gaaaccaaatggctccacttttcat

SEQ ID NO: 194972 - DNA, 25 bp, Homo sapien
accaaatggctccacttttcattct

SEQ ID NO: 194973 - DNA, 25 bp, Homo sapien
attgggaaaccaaatggctccactt

SEQ ID NO: 194974 - DNA, 25 bp, Homo sapien
tcaacatgctctagtaaggcacagc

SEQ ID NO: 194975 - DNA, 25 bp, Homo sapien
agttcaggaatgtcaaggcttgcca

SEQ ID NO: 194976 - DNA, 25 bp, Homo sapien
aaaggcatagaacacagtctcccag

SEQ ID NO: 194977 - DNA, 25 bp, Homo sapien
tatcttgactgcatacttctggcct

SEQ ID NO: 194978 - DNA, 25 bp, Homo sapien
agccttagcaaggagcaagccacgc

SEQ ID NO: 194979 - DNA, 25 bp, Homo sapien
ttcccttctgagagtgatcgctgag

SEQ ID NO: 194980 - DNA, 25 bp, Homo sapien
tcgctgagggtaagttgctttagcc

SEQ ID NO: 194981 - DNA, 25 bp, Homo sapien
tttgcaatggtaaaattcccttctg

SEQ ID NO: 194982 - DNA, 25 bp, Homo sapien
aatacgtagttagatgcgcttaatc

SEQ ID NO: 194983 - DNA, 25 bp, Homo sapien
ggaaacttcttcgaataaagatggc

SEQ ID NO: 194984 - DNA, 25 bp, Homo sapien
catacaagatgttcgtagaaagaac

SEQ ID NO: 194985 - DNA, 25 bp, Homo sapien
gcgcttaatcaggtatcaattcata

SEQ ID NO: 194986 - DNA, 25 bp, Homo sapien
aaggaggacaaactcattgagaggg

SEQ ID NO: 194987 - DNA, 25 bp, Homo sapien
gtgatccacataagtattgttgatg

SEQ ID NO: 194988 - DNA, 25 bp, Homo sapien
caagtgatccacataagtattgttg

SEQ ID NO: 194989 - DNA, 25 bp, Homo sapien
aaactcattgagagggcattcctgc

SEQ ID NO: 194990 - DNA, 25 bp, Homo sapien
actttgtaactcattcgtggcgttg

SEQ ID NO: 194991 - DNA, 25 bp, Homo sapien
ggcgttgaacatacctgcagtttta

SEQ ID NO: 194992 - DNA, 25 bp, Homo sapien
cagttttatgaacagcatagtttgg

SEQ ID NO: 194993 - DNA, 25 bp, Homo sapien
aaataatcttgtgatgccaaccttg

SEQ ID NO: 194994 - DNA, 25 bp, Homo sapien
tctgcgtggagaccaattagctgct

SEQ ID NO: 194995 - DNA, 25 bp, Homo sapien
cacacctaggaacgatgctttgcat

SEQ ID NO: 194996 - DNA, 25 bp, Homo sapien
gatacaggaggcagcatagttcaca

SEQ ID NO: 194997 - DNA, 25 bp, Homo sapien
gatttcagtgggatgcctagctcag

SEQ ID NO: 194998 - DNA, 25 bp, Homo sapien
ggtagaatacatcgactctgggaca

SEQ ID NO: 194999 - DNA, 25 bp, Homo sapien
gacccacaagtttggactgtatgat

SEQ ID NO: 195000 - DNA, 25 bp, Homo sapien
caagtttggactgtatgatggagaa

SEQ ID NO: 195001 - DNA, 25 bp, Homo sapien
tggagaagttctggtcgacaaaggt

SEQ ID NO: 195002 - DNA, 25 bp, Homo sapien
caagatctactgcagagttggaagc

SEQ ID NO: 195003 - DNA, 25 bp, Homo sapien
tggcagtcagttcctagtgagggcc

SEQ ID NO: 195004 - DNA, 25 bp, Homo sapien
gagtcttccaaagttaggccacctg

SEQ ID NO: 195005 - DNA, 25 bp, Homo sapien
cctgagaaggcatagcgactgtgac

SEQ ID NO: 195006 - DNA, 25 bp, Homo sapien
tacccaatcaacctactgtgctatg

SEQ ID NO: 195007 - DNA, 25 bp, Homo sapien
ttcccagggagcataacttgcaaca

SEQ ID NO: 195008 - DNA, 25 bp, Homo sapien
gggtggtctctatcaaagtcaaact

SEQ ID NO: 195009 - DNA, 25 bp, Homo sapien
ttacctatagtctgcttcccaggga

SEQ ID NO: 195010 - DNA, 25 bp, Homo sapien
gagattcttctaccccagcctcccg

SEQ ID NO: 195011 - DNA, 25 bp, Homo sapien
agattcttctaccccagcctcccga

SEQ ID NO: 195012 - DNA, 25 bp, Homo sapien
tggaagtacaggtgtgtgcccccac

SEQ ID NO: 195013 - DNA, 25 bp, Homo sapien
aagtacaggtgtgtgcccccacgcc

SEQ ID NO: 195014 - DNA, 25 bp, Homo sapien
cctcaagtctctatggttgtgtaca

SEQ ID NO: 195015 - DNA, 25 bp, Homo sapien
gtacaattcatctgagctcatcagg

SEQ ID NO: 195016 - DNA, 25 bp, Homo sapien
catcaggcttactggagagtcaggt

SEQ ID NO: 195017 - DNA, 25 bp, Homo sapien
tacagtattctcttagcagaccaca

SEQ ID NO: 195018 - DNA, 25 bp, Homo sapien
gctcctctagcccatagtgtgtttc

SEQ ID NO: 195019 - DNA, 25 bp, Homo sapien
catagtgtgtttccacattgacatc

SEQ ID NO: 195020 - DNA, 25 bp, Homo sapien
tcccagtggataccccagtcaacaa

SEQ ID NO: 195021 - DNA, 25 bp, Homo sapien
ttggaatagtagaggccaccaggct

SEQ ID NO: 195022 - DNA, 25 bp, Homo sapien
tactggaactctatgtttgactgcc

SEQ ID NO: 195023 - DNA, 25 bp, Homo sapien
gaatattgccaaccgaggaggctcc

SEQ ID NO: 195024 - DNA, 25 bp, Homo sapien
cttttgaatttagcaggccagtaga

SEQ ID NO: 195025 - DNA, 25 bp, Homo sapien
tgtggcccaaagacgtcatcataat

SEQ ID NO: 195026 - DNA, 25 bp, Homo sapien
tgacctagttctgtccaatgagttg

SEQ ID NO: 195027 - DNA, 25 bp, Homo sapien
tcatgactgtcctggctgctagagc

SEQ ID NO: 195028 - DNA, 25 bp, Homo sapien
cccagttgcagaggattcattatca

SEQ ID NO: 195029 - DNA, 25 bp, Homo sapien
tgtaactggagatatcctgaggaag

SEQ ID NO: 195030 - DNA, 25 bp, Homo sapien
acagagtagaagttcaagatatttt

SEQ ID NO: 195031 - DNA, 25 bp, Homo sapien
aagttcaagatattttctcacggta

SEQ ID NO: 195032 - DNA, 25 bp, Homo sapien
gttcaagatattttctcacggtaac

SEQ ID NO: 195033 - DNA, 25 bp, Homo sapien
tcaagatattttctcacggtaacac

SEQ ID NO: 195034 - DNA, 25 bp, Homo sapien
agagtcttaccccatgacacagaga

SEQ ID NO: 195035 - DNA, 25 bp, Homo sapien
tgggtgtaaagctcagatctgctac

SEQ ID NO: 195036 - DNA, 25 bp, Homo sapien
gaattgccaagtagttccttcacct

SEQ ID NO: 195037 - DNA, 25 bp, Homo sapien
agagactaaaatcaaaccgccactg

SEQ ID NO: 195038 - DNA, 25 bp, Homo sapien
ggaccaggcaagaaacatctggcac

SEQ ID NO: 195039 - DNA, 25 bp, Homo sapien
tcttgatctgcctaacattgagtct

SEQ ID NO: 195040 - DNA, 25 bp, Homo sapien
gagtctcatagcaaggaccaggcaa

SEQ ID NO: 195041 - DNA, 25 bp, Homo sapien
tctgcctaacattgagtctcatagc

SEQ ID NO: 195042 - DNA, 25 bp, Homo sapien
aacgtttctcatttcgggagtctga

SEQ ID NO: 195043 - DNA, 25 bp, Homo sapien
gtgcaggcctgaatatgcagacttc

SEQ ID NO: 195044 - DNA, 25 bp, Homo sapien
caattatcttgcttctctatgaagg

SEQ ID NO: 195045 - DNA, 25 bp, Homo sapien
ttcatgataggcaacaatctcagaa

SEQ ID NO: 195046 - DNA, 25 bp, Homo sapien
agcggcacgattcacttctagattc

SEQ ID NO: 195047 - DNA, 25 bp, Homo sapien
ttcatgtccattcttatcccggaag

SEQ ID NO: 195048 - DNA, 25 bp, Homo sapien
tcttatcccggaagcggcacgattc

SEQ ID NO: 195049 - DNA, 25 bp, Homo sapien
tcccggaagcggcacgattcacttc

SEQ ID NO: 195050 - DNA, 25 bp, Homo sapien
gatttacaatattattgcactgctg

SEQ ID NO: 195051 - DNA, 25 bp, Homo sapien
tcagactttttgacataagcgatta

SEQ ID NO: 195052 - DNA, 25 bp, Homo sapien
tatcgaccaacaatctttcaggagt

SEQ ID NO: 195053 - DNA, 25 bp, Homo sapien
cataattttgaggattccatttgga

SEQ ID NO: 195054 - DNA, 25 bp, Homo sapien
tgttcacaatgtgagcctccacaca

SEQ ID NO: 195055 - DNA, 25 bp, Homo sapien
gggagtgcctatcgggctcttcctg

SEQ ID NO: 195056 - DNA, 25 bp, Homo sapien
ctgtctaacaaagtttgcagcagca

SEQ ID NO: 195057 - DNA, 25 bp, Homo sapien
ctttcattgccattgtaaaggaagg

SEQ ID NO: 195058 - DNA, 25 bp, Homo sapien
attaggtttgtgctagtcatacagc

SEQ ID NO: 195059 - DNA, 25 bp, Homo sapien
tgctagtcatacagctgttgctaaa

SEQ ID NO: 195060 - DNA, 25 bp, Homo sapien
gactccccagaactgtctgagttaa

SEQ ID NO: 195061 - DNA, 25 bp, Homo sapien
gttgctaaatagagactccccagaa

SEQ ID NO: 195062 - DNA, 25 bp, Homo sapien
ctaaatttagcccatatgctgatga

SEQ ID NO: 195063 - DNA, 25 bp, Homo sapien
ttgttttacagcaagaataattcat

SEQ ID NO: 195064 - DNA, 25 bp, Homo sapien
cttgttttacagcaagaataattca

SEQ ID NO: 195065 - DNA, 25 bp, Homo sapien
ctcttgttttacagcaagaataatt

SEQ ID NO: 195066 - DNA, 25 bp, Homo sapien
tcttgttttacagcaagaataattc

SEQ ID NO: 195067 - DNA, 25 bp, Homo sapien
cacatattcccctgaacataaataa

SEQ ID NO: 195068 - DNA, 25 bp, Homo sapien
caagaattcatgtaacgtgcagttt

SEQ ID NO: 195069 - DNA, 25 bp, Homo sapien
gcaatttacctgtgtcacaaatctg

SEQ ID NO: 195070 - DNA, 25 bp, Homo sapien
tctgtacaccaaactgcggtgatat

SEQ ID NO: 195071 - DNA, 25 bp, Homo sapien
cctgggcaacataatgaggccctgt

SEQ ID NO: 195072 - DNA, 25 bp, Homo sapien
gagcccaggagttcaaaaccagcct

SEQ ID NO: 195073 - DNA, 25 bp, Homo sapien
cagcctgggcaacataatgaggccc

SEQ ID NO: 195074 - DNA, 25 bp, Homo sapien
ggaggcctacgtgggaggatcactt

SEQ ID NO: 195075 - DNA, 25 bp, Homo sapien
tgcaaggcggcagccaggctggggt

SEQ ID NO: 195076 - DNA, 25 bp, Homo sapien
gaaacccggtcaatcagctttgtca

SEQ ID NO: 195077 - DNA, 25 bp, Homo sapien
gacttaaacaagaaccatacattga

SEQ ID NO: 195078 - DNA, 25 bp, Homo sapien
gaaccatacattgaaacccggtcaa

SEQ ID NO: 195079 - DNA, 25 bp, Homo sapien
gacataaagggatcacgcttcagac

SEQ ID NO: 195080 - DNA, 25 bp, Homo sapien
ctgcaaacacaattgttgagatttc

SEQ ID NO: 195081 - DNA, 25 bp, Homo sapien
cagtgtcagggtacaaaatcctgcc

SEQ ID NO: 195082 - DNA, 25 bp, Homo sapien
gccaatgttatcgacactcagaagg

SEQ ID NO: 195083 - DNA, 25 bp, Homo sapien
ctgttggagtaaaatctgcagtgtc

SEQ ID NO: 195084 - DNA, 25 bp, Homo sapien
tctctgaatagcaagggtgagttgg

SEQ ID NO: 195085 - DNA, 25 bp, Homo sapien
gcaagggtgagttggttaagattca

SEQ ID NO: 195086 - DNA, 25 bp, Homo sapien
cctttttctctgaatagcaagggtg

SEQ ID NO: 195087 - DNA, 25 bp, Homo sapien
caagggtgagttggttaagattcat

SEQ ID NO: 195088 - DNA, 25 bp, Homo sapien
caatggcaatgggaagtaatgtagc

SEQ ID NO: 195089 - DNA, 25 bp, Homo sapien
cctttgccctgtggattgacctcca

SEQ ID NO: 195090 - DNA, 25 bp, Homo sapien
aatgtagcaggcgaatagtatcacc

SEQ ID NO: 195091 - DNA, 25 bp, Homo sapien
caaacactggtgctattggcctgtg

SEQ ID NO: 195092 - DNA, 25 bp, Homo sapien
gaggttaggataactcctacattta

SEQ ID NO: 195093 - DNA, 25 bp, Homo sapien
tcccattaggatatagtatattcat

SEQ ID NO: 195094 - DNA, 25 bp, Homo sapien
ttcaggattcattaaatcaatgcca

SEQ ID NO: 195095 - DNA, 25 bp, Homo sapien
taaatcaatgccatagaggttagga

SEQ ID NO: 195096 - DNA, 25 bp, Homo sapien
tttcttcagcatatctaaggctttg

SEQ ID NO: 195097 - DNA, 25 bp, Homo sapien
catatctaaggctttgaacttcaaa

SEQ ID NO: 195098 - DNA, 25 bp, Homo sapien
cctttcttcagcatatctaaggctt

SEQ ID NO: 195099 - DNA, 25 bp, Homo sapien
ttcagcatatctaaggctttgaact

SEQ ID NO: 195100 - DNA, 25 bp, Homo sapien
tgtgtgacatcaccatcgttcctga

SEQ ID NO: 195101 - DNA, 25 bp, Homo sapien
aactaaacgtttcattatctcagcc

SEQ ID NO: 195102 - DNA, 25 bp, Homo sapien
tatgccttattacacattgcctgaa

SEQ ID NO: 195103 - DNA, 25 bp, Homo sapien
gacaatcggagttatcttaagaata

SEQ ID NO: 195104 - DNA, 25 bp, Homo sapien
tcagctggataatgagcagaacggt

SEQ ID NO: 195105 - DNA, 25 bp, Homo sapien
atcactaaacatagtcacaggccag

SEQ ID NO: 195106 - DNA, 25 bp, Homo sapien
cacagctgtgtctttagtcattgcg

SEQ ID NO: 195107 - DNA, 25 bp, Homo sapien
tgtaataatgccttggtcacatggc

SEQ ID NO: 195108 - DNA, 25 bp, Homo sapien
aaatgaatcgaagctgttttaatcc

SEQ ID NO: 195109 - DNA, 25 bp, Homo sapien
aatccagatatttctaatcgtcttt

SEQ ID NO: 195110 - DNA, 25 bp, Homo sapien
gataaatgaatcgaagctgttttaa

SEQ ID NO: 195111 - DNA, 25 bp, Homo sapien
gaatcgaagctgttttaatccagat

SEQ ID NO: 195112 - DNA, 25 bp, Homo sapien
tagtggtctaatagtaactcttggc

SEQ ID NO: 195113 - DNA, 25 bp, Homo sapien
tctattgcagcacaggtatccctgc

SEQ ID NO: 195114 - DNA, 25 bp, Homo sapien
aactcttggctactatagtggccta

SEQ ID NO: 195115 - DNA, 25 bp, Homo sapien
tgtgatctggcttggaggtactcct

SEQ ID NO: 195116 - DNA, 25 bp, Homo sapien
ctgggtgcttcattgtcggggacca

SEQ ID NO: 195117 - DNA, 25 bp, Homo sapien
taatttcagaggcctttcatgcttg

SEQ ID NO: 195118 - DNA, 25 bp, Homo sapien
aatttcagaggcctttcatgcttgc

SEQ ID NO: 195119 - DNA, 25 bp, Homo sapien
ctaatttcagaggcctttcatgctt

SEQ ID NO: 195120 - DNA, 25 bp, Homo sapien
gaaatgatcgactcacccacatgga

SEQ ID NO: 195121 - DNA, 25 bp, Homo sapien
ggaggacacttgcactccatttttc

SEQ ID NO: 195122 - DNA, 25 bp, Homo sapien
aagttgggggaaatgatcgactcac

SEQ ID NO: 195123 - DNA, 25 bp, Homo sapien
cagatgaatgatcacaagttggggg

SEQ ID NO: 195124 - DNA, 25 bp, Homo sapien
cagagtagctatatttccatggaat

SEQ ID NO: 195125 - DNA, 25 bp, Homo sapien
cttttatggtcacctccgaccagag

SEQ ID NO: 195126 - DNA, 25 bp, Homo sapien
atggtcacctccgaccagagtagct

SEQ ID NO: 195127 - DNA, 25 bp, Homo sapien
cgaccagagtagctatatttccatg

SEQ ID NO: 195128 - DNA, 25 bp, Homo sapien
tatactttcaaacgtagcagttttg

SEQ ID NO: 195129 - DNA, 25 bp, Homo sapien
gggagcgtttaaaacctgcatgaga

SEQ ID NO: 195130 - DNA, 25 bp, Homo sapien
tgttcgccagtatggataagcaatg

SEQ ID NO: 195131 - DNA, 25 bp, Homo sapien
tagtgtgtagctccaatatttcgtg

SEQ ID NO: 195132 - DNA, 25 bp, Homo sapien
ctgaagcatagccatccgtactttt

SEQ ID NO: 195133 - DNA, 25 bp, Homo sapien
ttgtcttcctttacagtgagtgtca

SEQ ID NO: 195134 - DNA, 25 bp, Homo sapien
tcctttacagtgagtgtcaaactga

SEQ ID NO: 195135 - DNA, 25 bp, Homo sapien
catagccatccgtactttttaatgg

SEQ ID NO: 195136 - DNA, 25 bp, Homo sapien
tcctttgagttccttgaatttcata

SEQ ID NO: 195137 - DNA, 25 bp, Homo sapien
cttcctttgagttccttgaatttca

SEQ ID NO: 195138 - DNA, 25 bp, Homo sapien
tcagtttcaaggcctttgtataagc

SEQ ID NO: 195139 - DNA, 25 bp, Homo sapien
agtttcaaggcctttgtataagctt

SEQ ID NO: 195140 - DNA, 25 bp, Homo sapien
cctggtttctcttactcggagtaat

SEQ ID NO: 195141 - DNA, 25 bp, Homo sapien
catctttgcatgaacctgtactgta

SEQ ID NO: 195142 - DNA, 25 bp, Homo sapien
tcagtggtctttctgaagatccgtg

SEQ ID NO: 195143 - DNA, 25 bp, Homo sapien
tagttttgcagtatcagaaggaagg

SEQ ID NO: 195144 - DNA, 25 bp, Homo sapien
gaaagaaggctctcaattcccctaa

SEQ ID NO: 195145 - DNA, 25 bp, Homo sapien
tgagaatgcgtaactgaattccacg

SEQ ID NO: 195146 - DNA, 25 bp, Homo sapien
aggtctctgacgctctctccaatgt

SEQ ID NO: 195147 - DNA, 25 bp, Homo sapien
aattcccctaagaccactgcaagca

SEQ ID NO: 195148 - DNA, 25 bp, Homo sapien
tcagccaatggtggtgccccatgct

SEQ ID NO: 195149 - DNA, 25 bp, Homo sapien
ctcagccaatggtggtgccccatgc

SEQ ID NO: 195150 - DNA, 25 bp, Homo sapien
cccatgctttgtttccgcagcagct

SEQ ID NO: 195151 - DNA, 25 bp, Homo sapien
gctcagccaatggtggtgccccatg

SEQ ID NO: 195152 - DNA, 25 bp, Homo sapien
cagcatcttggggtattcaacatcc

SEQ ID NO: 195153 - DNA, 25 bp, Homo sapien
caacatccgatttcagaggcacaac

SEQ ID NO: 195154 - DNA, 25 bp, Homo sapien
catcttggggtattcaacatccgat

SEQ ID NO: 195155 - DNA, 25 bp, Homo sapien
atccgatttcagaggcacaacctgc

SEQ ID NO: 195156 - DNA, 25 bp, Homo sapien
tcatcattgcataggtgccaagata

SEQ ID NO: 195157 - DNA, 25 bp, Homo sapien
tcattgcataggtgccaagataatc

SEQ ID NO: 195158 - DNA, 25 bp, Homo sapien
gcataggtgccaagataatcttttc

SEQ ID NO: 195159 - DNA, 25 bp, Homo sapien
tgcaagtcatcattgcataggtgcc

SEQ ID NO: 195160 - DNA, 25 bp, Homo sapien
tggttagcaccgatatttcagagca

SEQ ID NO: 195161 - DNA, 25 bp, Homo sapien
tggtacgctctctcctgtaggtctc

SEQ ID NO: 195162 - DNA, 25 bp, Homo sapien
tatgcatccaatgcactcctaggca

SEQ ID NO: 195163 - DNA, 25 bp, Homo sapien
tgacttcacactccctgttgtatgg

SEQ ID NO: 195164 - DNA, 25 bp, Homo sapien
ttgcacttcatccaagctgaatcac

SEQ ID NO: 195165 - DNA, 25 bp, Homo sapien
cttcatccaagctgaatcactcagt

SEQ ID NO: 195166 - DNA, 25 bp, Homo sapien
gttctctgaaccagccattcttttt

SEQ ID NO: 195167 - DNA, 25 bp, Homo sapien
actcagttctctgaaccagccattc

SEQ ID NO: 195168 - DNA, 25 bp, Homo sapien
aatccgtttagctaccttcttgcca

SEQ ID NO: 195169 - DNA, 25 bp, Homo sapien
cttcttgccaatgataccacttcct

SEQ ID NO: 195170 - DNA, 25 bp, Homo sapien
tctaaatcaacccaaccctcagact

SEQ ID NO: 195171 - DNA, 25 bp, Homo sapien
gcctttgtgtccaaactctaaatca

SEQ ID NO: 195172 - DNA, 25 bp, Homo sapien
tacttgtttgcattgactccgtaac

SEQ ID NO: 195173 - DNA, 25 bp, Homo sapien
actccgtaacatgactgcagatggg

SEQ ID NO: 195174 - DNA, 25 bp, Homo sapien
tgggccaggcacaatccacgtgcct

SEQ ID NO: 195175 - DNA, 25 bp, Homo sapien
catgattatcaaagctctgggttca

SEQ ID NO: 195176 - DNA, 25 bp, Homo sapien
atactctgccacttcttgatatcta

SEQ ID NO: 195177 - DNA, 25 bp, Homo sapien
tcctctgatactctgccacttcttg

SEQ ID NO: 195178 - DNA, 25 bp, Homo sapien
ctctgatactctgccacttcttgat

SEQ ID NO: 195179 - DNA, 25 bp, Homo sapien
ctgatactctgccacttcttgatat

SEQ ID NO: 195180 - DNA, 25 bp, Homo sapien
aatgatatcaatgggagaaacaaat

SEQ ID NO: 195181 - DNA, 25 bp, Homo sapien
gacatatcaatgatatcaatgggag

SEQ ID NO: 195182 - DNA, 25 bp, Homo sapien
gagagcaagacatatcaatgatatc

SEQ ID NO: 195183 - DNA, 25 bp, Homo sapien
gaaacaaatgcttatgtgataggtt

SEQ ID NO: 195184 - DNA, 25 bp, Homo sapien
aagggccatcacaccgttctgctct

SEQ ID NO: 195185 - DNA, 25 bp, Homo sapien
ggctgttgcaagcaccaagcacacc

SEQ ID NO: 195186 - DNA, 25 bp, Homo sapien
tgctctctggctgttgcaagcacca

SEQ ID NO: 195187 - DNA, 25 bp, Homo sapien
attttcaagggccatcacaccgttc

SEQ ID NO: 195188 - DNA, 25 bp, Homo sapien
ttaaaacagaagcaactattggcat

SEQ ID NO: 195189 - DNA, 25 bp, Homo sapien
tgttaaaacagaagcaactattggc

SEQ ID NO: 195190 - DNA, 25 bp, Homo sapien
cttctgctgttaaaacagaagcaac

SEQ ID NO: 195191 - DNA, 25 bp, Homo sapien
gctgttaaaacagaagcaactattg

SEQ ID NO: 195192 - DNA, 25 bp, Homo sapien
tgcaatttcttcctaacatcaatgg

SEQ ID NO: 195193 - DNA, 25 bp, Homo sapien
ctatttacatttagggttaatgttg

SEQ ID NO: 195194 - DNA, 25 bp, Homo sapien
gtaaggtaggcccagtggtgacaaa

SEQ ID NO: 195195 - DNA, 25 bp, Homo sapien
tcagaagctcttgtaaggtaggccc

SEQ ID NO: 195196 - DNA, 25 bp, Homo sapien
aaggctgacaaaggtcctccatcta

SEQ ID NO: 195197 - DNA, 25 bp, Homo sapien
gctgacaaaggtcctccatctaatt

SEQ ID NO: 195198 - DNA, 25 bp, Homo sapien
gacaaaggtcctccatctaattcat

SEQ ID NO: 195199 - DNA, 25 bp, Homo sapien
ggtcctccatctaattcatgtatga

SEQ ID NO: 195200 - DNA, 25 bp, Homo sapien
tgttagtttagcgatattttgagaa

SEQ ID NO: 195201 - DNA, 25 bp, Homo sapien
ctagaggctcttttccgaatgagat

SEQ ID NO: 195202 - DNA, 25 bp, Homo sapien
tttcttcattgttagtttagcgata

SEQ ID NO: 195203 - DNA, 25 bp, Homo sapien
tctagaggctcttttccgaatgaga

SEQ ID NO: 195204 - DNA, 25 bp, Homo sapien
aactgttgcaaggacaaaataccca

SEQ ID NO: 195205 - DNA, 25 bp, Homo sapien
actgttgcaaggacaaaatacccaa

SEQ ID NO: 195206 - DNA, 25 bp, Homo sapien
tgttgcaaggacaaaatacccaaac

SEQ ID NO: 195207 - DNA, 25 bp, Homo sapien
gttgcaaggacaaaatacccaaaca

SEQ ID NO: 195208 - DNA, 25 bp, Homo sapien
tgaatgaagacaaattgcttgggct

SEQ ID NO: 195209 - DNA, 25 bp, Homo sapien
aagacagaagtttcgaaatagaact

SEQ ID NO: 195210 - DNA, 25 bp, Homo sapien
tttcgaaatagaactcaggaggatc

SEQ ID NO: 195211 - DNA, 25 bp, Homo sapien
tgaaattgatttagaaaagacagaa

SEQ ID NO: 195212 - DNA, 25 bp, Homo sapien
caggcatttgcctgagattctgacc

SEQ ID NO: 195213 - DNA, 25 bp, Homo sapien
aatctttctttcttcgtgtgcacct

SEQ ID NO: 195214 - DNA, 25 bp, Homo sapien
ggaaagagtatctcctcccctaatc

SEQ ID NO: 195215 - DNA, 25 bp, Homo sapien
ctccaggcatttgcctgagattctg

SEQ ID NO: 195216 - DNA, 25 bp, Homo sapien
ctacttattgcttcctggatgccag

SEQ ID NO: 195217 - DNA, 25 bp, Homo sapien
agtaacctgttgagatgtggccttt

SEQ ID NO: 195218 - DNA, 25 bp, Homo sapien
tgccagaggctctgtattgctgctt

SEQ ID NO: 195219 - DNA, 25 bp, Homo sapien
tttctcgatcccgtgccctacttat

SEQ ID NO: 195220 - DNA, 25 bp, Homo sapien
taccagccctctcagataaatgtgg

SEQ ID NO: 195221 - DNA, 25 bp, Homo sapien
cacagtttgctgctcaggattccac

SEQ ID NO: 195222 - DNA, 25 bp, Homo sapien
tcatgaaacagtggcttggacaagt

SEQ ID NO: 195223 - DNA, 25 bp, Homo sapien
agacgtagtacccttggcattgaca

SEQ ID NO: 195224 - DNA, 25 bp, Homo sapien
tccatccttctgtggcatcaacctt

SEQ ID NO: 195225 - DNA, 25 bp, Homo sapien
tcctctatgaggactgcccagacct

SEQ ID NO: 195226 - DNA, 25 bp, Homo sapien
tgtctccttggtaggtgtccacctt

SEQ ID NO: 195227 - DNA, 25 bp, Homo sapien
ggcatcaaccttttatgtgtctgca

SEQ ID NO: 195228 - DNA, 25 bp, Homo sapien
catttcggatgtcaacaaaatctaa

SEQ ID NO: 195229 - DNA, 25 bp, Homo sapien
tagcatttcggatgtcaacaaaatc

SEQ ID NO: 195230 - DNA, 25 bp, Homo sapien
ctctttagcatttcggatgtcaaca

SEQ ID NO: 195231 - DNA, 25 bp, Homo sapien
ttcggatgtcaacaaaatctaagat

SEQ ID NO: 195232 - DNA, 25 bp, Homo sapien
tttgtggactggcaaacataagacc

SEQ ID NO: 195233 - DNA, 25 bp, Homo sapien
gctggcactgccgtgagtggataaa

SEQ ID NO: 195234 - DNA, 25 bp, Homo sapien
tgttgcaattaccaataaaccaaac

SEQ ID NO: 195235 - DNA, 25 bp, Homo sapien
tcatcgaggaacgtcactagctgaa

SEQ ID NO: 195236 - DNA, 25 bp, Homo sapien
tgttagaggcatgcttaacagcttt

SEQ ID NO: 195237 - DNA, 25 bp, Homo sapien
gttagaggcatgcttaacagctttc

SEQ ID NO: 195238 - DNA, 25 bp, Homo sapien
ttagaggcatgcttaacagctttct

SEQ ID NO: 195239 - DNA, 25 bp, Homo sapien
tagaggcatgcttaacagctttctc

SEQ ID NO: 195240 - DNA, 25 bp, Homo sapien
gtcaaccacagagatttagtgaata

SEQ ID NO: 195241 - DNA, 25 bp, Homo sapien
tacatgtccctcaaaaattaataac

SEQ ID NO: 195242 - DNA, 25 bp, Homo sapien
caaccacagagatttagtgaatatt

SEQ ID NO: 195243 - DNA, 25 bp, Homo sapien
ctagtcaaccacagagatttagtga

SEQ ID NO: 195244 - DNA, 25 bp, Homo sapien
cactaactgagctttttgctcagac

SEQ ID NO: 195245 - DNA, 25 bp, Homo sapien
tttttgctcagacacatgaacataa

SEQ ID NO: 195246 - DNA, 25 bp, Homo sapien
ctgagctttttgctcagacacatga

SEQ ID NO: 195247 - DNA, 25 bp, Homo sapien
atgtggccactaactgagctttttg

SEQ ID NO: 195248 - DNA, 25 bp, Homo sapien
cacagacccaaattatatcagtgga

SEQ ID NO: 195249 - DNA, 25 bp, Homo sapien
cccaaattatatcagtggatgtgtg

SEQ ID NO: 195250 - DNA, 25 bp, Homo sapien
acatcttacccagggttggttcctg

SEQ ID NO: 195251 - DNA, 25 bp, Homo sapien
aatgacatgacatcttacccagggt

SEQ ID NO: 195252 - DNA, 25 bp, Homo sapien
ttagacctcctacatgtctgcatat

SEQ ID NO: 195253 - DNA, 25 bp, Homo sapien
caagttttcagcagccggttagacc

SEQ ID NO: 195254 - DNA, 25 bp, Homo sapien
gagggtccaagttttcagcagccgg

SEQ ID NO: 195255 - DNA, 25 bp, Homo sapien
tagacctcctacatgtctgcatatc

SEQ ID NO: 195256 - DNA, 25 bp, Homo sapien
caggtctgccctgaatgtcttcttg

SEQ ID NO: 195257 - DNA, 25 bp, Homo sapien
cttgctcataatggatttgaaatgc

SEQ ID NO: 195258 - DNA, 25 bp, Homo sapien
tgaaatgcattggtaacatcttctc

SEQ ID NO: 195259 - DNA, 25 bp, Homo sapien
tgtcttcttgctcataatggatttg

SEQ ID NO: 195260 - DNA, 25 bp, Homo sapien
caatgcttatgacaggtttagacta

SEQ ID NO: 195261 - DNA, 25 bp, Homo sapien
tagtatttcatagcacaacgttgtc

SEQ ID NO: 195262 - DNA, 25 bp, Homo sapien
gactgtattgaaacatcccatgtag

SEQ ID NO: 195263 - DNA, 25 bp, Homo sapien
aaacctgggatggaatgttgtacaa

SEQ ID NO: 195264 - DNA, 25 bp, Homo sapien
tcaatgcagcaaccaaccctggaca

SEQ ID NO: 195265 - DNA, 25 bp, Homo sapien
caggaagctggagcttatcctggca

SEQ ID NO: 195266 - DNA, 25 bp, Homo sapien
cttattccagttcagaggtgcagga

SEQ ID NO: 195267 - DNA, 25 bp, Homo sapien
ggcagctcagtgctcaatgcagcaa

SEQ ID NO: 195268 - DNA, 25 bp, Homo sapien
tcagccaaaaacagtgcaggtcagt

SEQ ID NO: 195269 - DNA, 25 bp, Homo sapien
cagccaaaaacagtgcaggtcagtt

SEQ ID NO: 195270 - DNA, 25 bp, Homo sapien
acactagccttctccatacctttcc

SEQ ID NO: 195271 - DNA, 25 bp, Homo sapien
cactagccttctccatacctttcca

SEQ ID NO: 195272 - DNA, 25 bp, Homo sapien
tcaggcaacttcagaggaaagaatt

SEQ ID NO: 195273 - DNA, 25 bp, Homo sapien
gagtcaccaaattggaaggaccaca

SEQ ID NO: 195274 - DNA, 25 bp, Homo sapien
tctgatgtgctaagtgatatatggg

SEQ ID NO: 195275 - DNA, 25 bp, Homo sapien
ggcaaaagcaattgaacaagctttc

SEQ ID NO: 195276 - DNA, 25 bp, Homo sapien
gatatatgggctctcttgagtcacc

SEQ ID NO: 195277 - DNA, 25 bp, Homo sapien
tccatcttgactggtggctgagaac

SEQ ID NO: 195278 - DNA, 25 bp, Homo sapien
tctgatccttgtagaccaaaaggtt

SEQ ID NO: 195279 - DNA, 25 bp, Homo sapien
gactagaaggtgctttgaagagtac

SEQ ID NO: 195280 - DNA, 25 bp, Homo sapien
gctgctgtgaaataaccctccatct

SEQ ID NO: 195281 - DNA, 25 bp, Homo sapien
gtcattttggatttgcataagtgtc

SEQ ID NO: 195282 - DNA, 25 bp, Homo sapien
cattttggatttgcataagtgtctt

SEQ ID NO: 195283 - DNA, 25 bp, Homo sapien
gatttgcataagtgtcttgaaagaa

SEQ ID NO: 195284 - DNA, 25 bp, Homo sapien
tttggatttgcataagtgtcttgaa

SEQ ID NO: 195285 - DNA, 25 bp, Homo sapien
catcggagtacaataagctgtgtcc

SEQ ID NO: 195286 - DNA, 25 bp, Homo sapien
aagaagaatagcactgaccgggcgc

SEQ ID NO: 195287 - DNA, 25 bp, Homo sapien
gaaatgttgttacgtgctgcatgac

SEQ ID NO: 195288 - DNA, 25 bp, Homo sapien
tcttattatctgatgggaccaccat

SEQ ID NO: 195289 - DNA, 25 bp, Homo sapien
taagcaattgtcacagtaagtgtga

SEQ ID NO: 195290 - DNA, 25 bp, Homo sapien
gtttaagcaattgtcacagtaagtg

SEQ ID NO: 195291 - DNA, 25 bp, Homo sapien
caattgtcacagtaagtgtgacaga

SEQ ID NO: 195292 - DNA, 25 bp, Homo sapien
tgtcacagtaagtgtgacagagttg

SEQ ID NO: 195293 - DNA, 25 bp, Homo sapien
gaaaaggatatgtcatcagggtctg

SEQ ID NO: 195294 - DNA, 25 bp, Homo sapien
ttaatagccttaaccccagtcacag

SEQ ID NO: 195295 - DNA, 25 bp, Homo sapien
cctttgggagcttctataatgaatt

SEQ ID NO: 195296 - DNA, 25 bp, Homo sapien
tggtgactaatccagaccacatttg

SEQ ID NO: 195297 - DNA, 25 bp, Homo sapien
tatcaggttcagagaatgacactgg

SEQ ID NO: 195298 - DNA, 25 bp, Homo sapien
tattacaggtgccaaattcagtcat

SEQ ID NO: 195299 - DNA, 25 bp, Homo sapien
caagcgagttgtaagtgaataaagc

SEQ ID NO: 195300 - DNA, 25 bp, Homo sapien
gctgtatttccaggtatgtggagaa

SEQ ID NO: 195301 - DNA, 25 bp, Homo sapien
cttgaaggtgggagcaagaaaaact

SEQ ID NO: 195302 - DNA, 25 bp, Homo sapien
gaaaaactttaacagctgctgctaa

SEQ ID NO: 195303 - DNA, 25 bp, Homo sapien
tgtctcagccctgcagtacttgaag

SEQ ID NO: 195304 - DNA, 25 bp, Homo sapien
acttctgtgtctcagccctgcagta

SEQ ID NO: 195305 - DNA, 25 bp, Homo sapien
tgtaacctaagtcaatgccccaggg

SEQ ID NO: 195306 - DNA, 25 bp, Homo sapien
tgagcaggatccatatcccgcaaca

SEQ ID NO: 195307 - DNA, 25 bp, Homo sapien
ggatattaaggacagctatagctga

SEQ ID NO: 195308 - DNA, 25 bp, Homo sapien
aattctctgaagacagccttcagtg

SEQ ID NO: 195309 - DNA, 25 bp, Homo sapien
ctctccagtcaaagttccatctctt

SEQ ID NO: 195310 - DNA, 25 bp, Homo sapien
tctgagtaactgctcagtccattca

SEQ ID NO: 195311 - DNA, 25 bp, Homo sapien
gagtaactgctcagtccattcagaa

SEQ ID NO: 195312 - DNA, 25 bp, Homo sapien
gtaactgctcagtccattcagaact

SEQ ID NO: 195313 - DNA, 25 bp, Homo sapien
gattccaaagctggatatctggcca

SEQ ID NO: 195314 - DNA, 25 bp, Homo sapien
tggatatctggccaaatctatggag

SEQ ID NO: 195315 - DNA, 25 bp, Homo sapien
caaagctggatatctggccaaatct

SEQ ID NO: 195316 - DNA, 25 bp, Homo sapien
tatctggccaaatctatggaggtca

SEQ ID NO: 195317 - DNA, 25 bp, Homo sapien
ctacataggtactagaattcccgtt

SEQ ID NO: 195318 - DNA, 25 bp, Homo sapien
ccacaatactttgatcttttccttg

SEQ ID NO: 195319 - DNA, 25 bp, Homo sapien
tggcaaccacaatactttgatcttt

SEQ ID NO: 195320 - DNA, 25 bp, Homo sapien
agaaagctggcaaccacaatacttt

SEQ ID NO: 195321 - DNA, 25 bp, Homo sapien
tcttgagtcatctgaccaggcagtg

SEQ ID NO: 195322 - DNA, 25 bp, Homo sapien
tatgtagggtatctggacactgagg

SEQ ID NO: 195323 - DNA, 25 bp, Homo sapien
aggttcttgagtcatctgaccaggc

SEQ ID NO: 195324 - DNA, 25 bp, Homo sapien
tattgaagttcccagaggtatgtag

SEQ ID NO: 195325 - DNA, 25 bp, Homo sapien
tgctttgaggtataaaatatctcca

SEQ ID NO: 195326 - DNA, 25 bp, Homo sapien
tgtgcattgctttgaggtataaaat

SEQ ID NO: 195327 - DNA, 25 bp, Homo sapien
tgtggatcttccctaatgcctttga

SEQ ID NO: 195328 - DNA, 25 bp, Homo sapien
gcattgctttgaggtataaaatatc

SEQ ID NO: 195329 - DNA, 25 bp, Homo sapien
aggcactttttagtccatgtcttct

SEQ ID NO: 195330 - DNA, 25 bp, Homo sapien
caacatagtagatgctaattttatc

SEQ ID NO: 195331 - DNA, 25 bp, Homo sapien
tttttgcaaactgcaacatagtaga

SEQ ID NO: 195332 - DNA, 25 bp, Homo sapien
gcactttttagtccatgtcttcttt

SEQ ID NO: 195333 - DNA, 25 bp, Homo sapien
tccgggttacagttgccagtgtgga

SEQ ID NO: 195334 - DNA, 25 bp, Homo sapien
ttctcatatggttccgggttacagt

SEQ ID NO: 195335 - DNA, 25 bp, Homo sapien
gagcattccaagagtccactttctc

SEQ ID NO: 195336 - DNA, 25 bp, Homo sapien
gtccactttctcatatggttccggg

SEQ ID NO: 195337 - DNA, 25 bp, Homo sapien
tggaagctgggaaatggggagaagt

SEQ ID NO: 195338 - DNA, 25 bp, Homo sapien
ggaaatggggagaagtcattcttcc

SEQ ID NO: 195339 - DNA, 25 bp, Homo sapien
ctgggaaatggggagaagtcattct

SEQ ID NO: 195340 - DNA, 25 bp, Homo sapien
ctggaagctgggaaatggggagaag

SEQ ID NO: 195341 - DNA, 25 bp, Homo sapien
tagagacctcttcctgatcttggag

SEQ ID NO: 195342 - DNA, 25 bp, Homo sapien
tgagtcgaggtaaaccctcacctct

SEQ ID NO: 195343 - DNA, 25 bp, Homo sapien
aagtcaggagaggtgccacggagga

SEQ ID NO: 195344 - DNA, 25 bp, Homo sapien
gtgccacggaggaaacgatgatgaa

SEQ ID NO: 195345 - DNA, 25 bp, Homo sapien
tgaatcttacaagttaaagacacgt

SEQ ID NO: 195346 - DNA, 25 bp, Homo sapien
gggatgatgctgctccgcattgttg

SEQ ID NO: 195347 - DNA, 25 bp, Homo sapien
tgttggtcaccgcagaactgctgta

SEQ ID NO: 195348 - DNA, 25 bp, Homo sapien
tgctgctccgcattgttggtcaccg

SEQ ID NO: 195349 - DNA, 25 bp, Homo sapien
gctccgcattgttggtcaccgcaga

SEQ ID NO: 195350 - DNA, 25 bp, Homo sapien
ccactgcgggagtcgcctcttccag

SEQ ID NO: 195351 - DNA, 25 bp, Homo sapien
ccctgctgccactgcgggagtcgcc

SEQ ID NO: 195352 - DNA, 25 bp, Homo sapien
tgccactgcgggagtcgcctcttcc

SEQ ID NO: 195353 - DNA, 25 bp, Homo sapien
gctgccactgcgggagtcgcctctt

SEQ ID NO: 195354 - DNA, 25 bp, Homo sapien
tatggctgtttactaccattgctgc

SEQ ID NO: 195355 - DNA, 25 bp, Homo sapien
gaaggtgctgattcctctttgctgg

SEQ ID NO: 195356 - DNA, 25 bp, Homo sapien
taccattgctgcaacctggccctga

SEQ ID NO: 195357 - DNA, 25 bp, Homo sapien
ttactaccattgctgcaacctggcc

SEQ ID NO: 195358 - DNA, 25 bp, Homo sapien
tctccgaatgtatgcctccagcagt

SEQ ID NO: 195359 - DNA, 25 bp, Homo sapien
ttctccgaatgtatgcctccagcag

SEQ ID NO: 195360 - DNA, 25 bp, Homo sapien
gaggtgatattgcttctagcatgag

SEQ ID NO: 195361 - DNA, 25 bp, Homo sapien
ctagcatgagcagaaagacttcaca

SEQ ID NO: 195362 - DNA, 25 bp, Homo sapien
tagagggatgaaatacagacgacag

SEQ ID NO: 195363 - DNA, 25 bp, Homo sapien
cagcaggatttggaacttcagaccc

SEQ ID NO: 195364 - DNA, 25 bp, Homo sapien
gagagcttgtagacacataaaaaca

SEQ ID NO: 195365 - DNA, 25 bp, Homo sapien
ctgagagcttgtagacacataaaaa

SEQ ID NO: 195366 - DNA, 25 bp, Homo sapien
tgagagcttgtagacacataaaaac

SEQ ID NO: 195367 - DNA, 25 bp, Homo sapien
gagcttgtagacacataaaaacaga

SEQ ID NO: 195368 - DNA, 25 bp, Homo sapien
ggcagtggccttgcattgcgaggag

SEQ ID NO: 195369 - DNA, 25 bp, Homo sapien
agacaatcttcaattgctagcatca

SEQ ID NO: 195370 - DNA, 25 bp, Homo sapien
aagagggtaggagagacaatcttca

SEQ ID NO: 195371 - DNA, 25 bp, Homo sapien
aatcttcaattgctagcatcacccc

SEQ ID NO: 195372 - DNA, 25 bp, Homo sapien
cttcagatgaccgaagagcttttcg

SEQ ID NO: 195373 - DNA, 25 bp, Homo sapien
tggcctggcaaaacctgctgtgggt

SEQ ID NO: 195374 - DNA, 25 bp, Homo sapien
ctttaagtgaacattggtggtggcc

SEQ ID NO: 195375 - DNA, 25 bp, Homo sapien
tgaccgaagagcttttcggctttaa

SEQ ID NO: 195376 - DNA, 25 bp, Homo sapien
ctctgcaccaaaaaactgctccttt

SEQ ID NO: 195377 - DNA, 25 bp, Homo sapien
gctgtagtaattgagacgatagcct

SEQ ID NO: 195378 - DNA, 25 bp, Homo sapien
ccaccactttgaagtgaactctgtg

SEQ ID NO: 195379 - DNA, 25 bp, Homo sapien
tctactccttcagagactgtagctg

SEQ ID NO: 195380 - DNA, 25 bp, Homo sapien
tgagacgatagcctgtttcaactct

SEQ ID NO: 195381 - DNA, 25 bp, Homo sapien
ccccagagtgcccagttatcatcat

SEQ ID NO: 195382 - DNA, 25 bp, Homo sapien
cggcacggcactgcctactgcagag

SEQ ID NO: 195383 - DNA, 25 bp, Homo sapien
gatagcataaatgtgcaccagggaa

SEQ ID NO: 195384 - DNA, 25 bp, Homo sapien
ttatcatcatatcactcaagtctag

SEQ ID NO: 195385 - DNA, 25 bp, Homo sapien
aaagtacccttaaaccagtgctgat

SEQ ID NO: 195386 - DNA, 25 bp, Homo sapien
tctggctctgtatggcctacctcct

SEQ ID NO: 195387 - DNA, 25 bp, Homo sapien
accagtgctgatctctggctctgta

SEQ ID NO: 195388 - DNA, 25 bp, Homo sapien
gatctctggctctgtatggcctacc

SEQ ID NO: 195389 - DNA, 25 bp, Homo sapien
ccatggacctctatggcaatacctg

SEQ ID NO: 195390 - DNA, 25 bp, Homo sapien
catggacctctatggcaatacctga

SEQ ID NO: 195391 - DNA, 25 bp, Homo sapien
cagcctttggtacactgagggatta

SEQ ID NO: 195392 - DNA, 25 bp, Homo sapien
ggatagaaccatgccttgattacag

SEQ ID NO: 195393 - DNA, 25 bp, Homo sapien
cacttggccctacttcttaacacgg

SEQ ID NO: 195394 - DNA, 25 bp, Homo sapien
tgattacagcacctgcactttgaga

SEQ ID NO: 195395 - DNA, 25 bp, Homo sapien
gatctcatacaagcaaaatgggaag

SEQ ID NO: 195396 - DNA, 25 bp, Homo sapien
tttaattgattctgatctcatacaa

SEQ ID NO: 195397 - DNA, 25 bp, Homo sapien
tatttgaatgaatgcattgctttgt

SEQ ID NO: 195398 - DNA, 25 bp, Homo sapien
tcactatgcttatatatatcaaaac

SEQ ID NO: 195399 - DNA, 25 bp, Homo sapien
tccagatctatgaatgttggtggga

SEQ ID NO: 195400 - DNA, 25 bp, Homo sapien
ttccagtacagagtttcatagtctg

SEQ ID NO: 195401 - DNA, 25 bp, Homo sapien
tatcttcccttgactcatccaattc

SEQ ID NO: 195402 - DNA, 25 bp, Homo sapien
gaatgttggtgggagttcttatctt

SEQ ID NO: 195403 - DNA, 25 bp, Homo sapien
agagctctccgggtatccccacagt

SEQ ID NO: 195404 - DNA, 25 bp, Homo sapien
tgattgctaacactggcccagccag

SEQ ID NO: 195405 - DNA, 25 bp, Homo sapien
gaagcctccaagatcttactccagg

SEQ ID NO: 195406 - DNA, 25 bp, Homo sapien
ccacagtccagcatcaaaggactga

SEQ ID NO: 195407 - DNA, 25 bp, Homo sapien
tcaaccaaatctgccaggcaatcat

SEQ ID NO: 195408 - DNA, 25 bp, Homo sapien
ctttcaaccaaatctgccaggcaat

SEQ ID NO: 195409 - DNA, 25 bp, Homo sapien
tactttcaaccaaatctgccaggca

SEQ ID NO: 195410 - DNA, 25 bp, Homo sapien
ctctactttcaaccaaatctgccag

SEQ ID NO: 195411 - DNA, 25 bp, Homo sapien
tctgggtatactgcctggccctagg

SEQ ID NO: 195412 - DNA, 25 bp, Homo sapien
ggtatgaatgatctcgtcactcagg

SEQ ID NO: 195413 - DNA, 25 bp, Homo sapien
taaatgagtacctggagtatttggc

SEQ ID NO: 195414 - DNA, 25 bp, Homo sapien
gggttgctagcttaaacaagagttc

SEQ ID NO: 195415 - DNA, 25 bp, Homo sapien
caaagcctccacgaaatatgtgaag

SEQ ID NO: 195416 - DNA, 25 bp, Homo sapien
agccaactgtagcaaacctgcagaa

SEQ ID NO: 195417 - DNA, 25 bp, Homo sapien
tgtgaagacaccaaacctacgattc

SEQ ID NO: 195418 - DNA, 25 bp, Homo sapien
taagaacctcgacaaatggttacag

SEQ ID NO: 195419 - DNA, 25 bp, Homo sapien
ggcttgcaagatccctcttcagctg

SEQ ID NO: 195420 - DNA, 25 bp, Homo sapien
ttgcaagatccctcttcagctgtct

SEQ ID NO: 195421 - DNA, 25 bp, Homo sapien
gaccacttggcttgcaagatccctc

SEQ ID NO: 195422 - DNA, 25 bp, Homo sapien
acttggcttgcaagatccctcttca

SEQ ID NO: 195423 - DNA, 25 bp, Homo sapien
ttttctgacagtttaccctttgtca

SEQ ID NO: 195424 - DNA, 25 bp, Homo sapien
taagcttccttgtgcaaaggcaaaa

SEQ ID NO: 195425 - DNA, 25 bp, Homo sapien
cctgggcctctactaaggagctttt

SEQ ID NO: 195426 - DNA, 25 bp, Homo sapien
ttgtcatatcagagacagagcctaa

SEQ ID NO: 195427 - DNA, 25 bp, Homo sapien
cacagagtctttgtcaggattaatg

SEQ ID NO: 195428 - DNA, 25 bp, Homo sapien
gaaataccctcaataacaactcatc

SEQ ID NO: 195429 - DNA, 25 bp, Homo sapien
catctgcgctgactgggtttgacaa

SEQ ID NO: 195430 - DNA, 25 bp, Homo sapien
tgctgttccaactatagccatggta

SEQ ID NO: 195431 - DNA, 25 bp, Homo sapien
tagagtgtagcttttaactgcttgt

SEQ ID NO: 195432 - DNA, 25 bp, Homo sapien
gtgtcctgtcctagagtgtagcttt

SEQ ID NO: 195433 - DNA, 25 bp, Homo sapien
gtcagtttggtagtaaacaacacca

SEQ ID NO: 195434 - DNA, 25 bp, Homo sapien
tttgtcagtttggtagtaaacaaca

SEQ ID NO: 195435 - DNA, 25 bp, Homo sapien
ccaggtagcaaagtaaactgctccc

SEQ ID NO: 195436 - DNA, 25 bp, Homo sapien
caaagtaaactgctcccctgtaaga

SEQ ID NO: 195437 - DNA, 25 bp, Homo sapien
tctgagacaccaggtagcaaagtaa

SEQ ID NO: 195438 - DNA, 25 bp, Homo sapien
taaactgctcccctgtaagataaag

SEQ ID NO: 195439 - DNA, 25 bp, Homo sapien
tgaagaccaatagcctcctctttct

SEQ ID NO: 195440 - DNA, 25 bp, Homo sapien
tgcctttctttctgagttacttttc

SEQ ID NO: 195441 - DNA, 25 bp, Homo sapien
tgtgcctctgcctctcgttctgtct

SEQ ID NO: 195442 - DNA, 25 bp, Homo sapien
cctctgcctctcgttctgtctccat

SEQ ID NO: 195443 - DNA, 25 bp, Homo sapien
cattaatatggaatcctaatacagc

SEQ ID NO: 195444 - DNA, 25 bp, Homo sapien
ttaatatggaatcctaatacagcca

SEQ ID NO: 195445 - DNA, 25 bp, Homo sapien
attaatatggaatcctaatacagcc

SEQ ID NO: 195446 - DNA, 25 bp, Homo sapien
tcttcagaagccactaagtggctct

SEQ ID NO: 195447 - DNA, 25 bp, Homo sapien
tgccaacagccaggtgacttctctc

SEQ ID NO: 195448 - DNA, 25 bp, Homo sapien
aatggctgatattcctgaggctctc

SEQ ID NO: 195449 - DNA, 25 bp, Homo sapien
tgccaagtggggagtgccaacagcc

SEQ ID NO: 195450 - DNA, 25 bp, Homo sapien
tgctgatacccaacataatacaaga

SEQ ID NO: 195451 - DNA, 25 bp, Homo sapien
gaaaggctcaaattttcagagaaat

SEQ ID NO: 195452 - DNA, 25 bp, Homo sapien
gtgccatgtaaacaactctgtactg

SEQ ID NO: 195453 - DNA, 25 bp, Homo sapien
taaacaactctgtactgctgatacc

SEQ ID NO: 195454 - DNA, 25 bp, Homo sapien
tgttcgtgtcaaaactgttgtagat

SEQ ID NO: 195455 - DNA, 25 bp, Homo sapien
aatgaactttgttcgtgtcaaaact

SEQ ID NO: 195456 - DNA, 25 bp, Homo sapien
tgttgtagattgtacacttttctgt

SEQ ID NO: 195457 - DNA, 25 bp, Homo sapien
tcaaaactgttgtagattgtacact

SEQ ID NO: 195458 - DNA, 25 bp, Homo sapien
caagacaccaatataccattgaagg

SEQ ID NO: 195459 - DNA, 25 bp, Homo sapien
tccaaaaggagctgtgatcacagag

SEQ ID NO: 195460 - DNA, 25 bp, Homo sapien
aggagtagctgttgttagagtccac

SEQ ID NO: 195461 - DNA, 25 bp, Homo sapien
ggaaacaatgaggagtagctgttgt

SEQ ID NO: 195462 - DNA, 25 bp, Homo sapien
ggagctcccacgggctggattgtcc

SEQ ID NO: 195463 - DNA, 25 bp, Homo sapien
taatattgcccttgactttattgca

SEQ ID NO: 195464 - DNA, 25 bp, Homo sapien
gcccttgactttattgcatcctgat

SEQ ID NO: 195465 - DNA, 25 bp, Homo sapien
tattcagtgccagctgttaagatat

SEQ ID NO: 195466 - DNA, 25 bp, Homo sapien
ttattgcatcctgattcacgtaaaa

SEQ ID NO: 195467 - DNA, 25 bp, Homo sapien
tcccaaccccggttatcatcagaat

SEQ ID NO: 195468 - DNA, 25 bp, Homo sapien
ggttatcatcagaatcaatcaggag

SEQ ID NO: 195469 - DNA, 25 bp, Homo sapien
gttcctgtcgtacacttggctccca

SEQ ID NO: 195470 - DNA, 25 bp, Homo sapien
gtcaagcatgttgccatcacttcca

SEQ ID NO: 195471 - DNA, 25 bp, Homo sapien
ccccttatatcctccaatatgcagt

SEQ ID NO: 195472 - DNA, 25 bp, Homo sapien
aataatcagggatgatgagggtagc

SEQ ID NO: 195473 - DNA, 25 bp, Homo sapien
aacattgcttaccacagacatgctc

SEQ ID NO: 195474 - DNA, 25 bp, Homo sapien
tgttttaaagtgtgggaaacattgc

SEQ ID NO: 195475 - DNA, 25 bp, Homo sapien
ttaggggtttgcgagaagagggatc

SEQ ID NO: 195476 - DNA, 25 bp, Homo sapien
acagaacagtactgctttgggagtg

SEQ ID NO: 195477 - DNA, 25 bp, Homo sapien
agaaaatgaacttctggtcaataat

SEQ ID NO: 195478 - DNA, 25 bp, Homo sapien
aagggcacagccactaaagtacacc

SEQ ID NO: 195479 - DNA, 25 bp, Homo sapien
gcacagccactaaagtacaccaaaa

SEQ ID NO: 195480 - DNA, 25 bp, Homo sapien
aatgaacttctggtcaataatcact

SEQ ID NO: 195481 - DNA, 25 bp, Homo sapien
gccatccactatctgcagtggtgct

SEQ ID NO: 195482 - DNA, 25 bp, Homo sapien
gaccagagacattgacagatgagag

SEQ ID NO: 195483 - DNA, 25 bp, Homo sapien
gacattgacagatgagagcctcagc

SEQ ID NO: 195484 - DNA, 25 bp, Homo sapien
gctgaaatgaccagagacattgaca

SEQ ID NO: 195485 - DNA, 25 bp, Homo sapien
ttggggctgccacagttagggtggc

SEQ ID NO: 195486 - DNA, 25 bp, Homo sapien
gggctgagactgctattgtgtttga

SEQ ID NO: 195487 - DNA, 25 bp, Homo sapien
cgacacagcatccaagttcactggg

SEQ ID NO: 195488 - DNA, 25 bp, Homo sapien
gagactgctattgtgtttgagagcc

SEQ ID NO: 195489 - DNA, 25 bp, Homo sapien
tcctgtgccattccgggctttgccc

SEQ ID NO: 195490 - DNA, 25 bp, Homo sapien
gtctgcacctccgacagttctttct

SEQ ID NO: 195491 - DNA, 25 bp, Homo sapien
gcacctccgacagttctttctccca

SEQ ID NO: 195492 - DNA, 25 bp, Homo sapien
tttctcccatgtcttgtctgccctg

SEQ ID NO: 195493 - DNA, 25 bp, Homo sapien
tctggatcatgggtagctctgctgc

SEQ ID NO: 195494 - DNA, 25 bp, Homo sapien
ggaggagtcatgtctacaaggatga

SEQ ID NO: 195495 - DNA, 25 bp, Homo sapien
taatggtagcgattttaaggtagtg

SEQ ID NO: 195496 - DNA, 25 bp, Homo sapien
gggccttggaccctcataataatgg

SEQ ID NO: 195497 - DNA, 25 bp, Homo sapien
tgaatgagatgtttaagagagatga

SEQ ID NO: 195498 - DNA, 25 bp, Homo sapien
gctgacatggtgaatgagatgttta

SEQ ID NO: 195499 - DNA, 25 bp, Homo sapien
gtaggaagccatcattgctgacatg

SEQ ID NO: 195500 - DNA, 25 bp, Homo sapien
ctggttctagcaggccaaaaattct

SEQ ID NO: 195501 - DNA, 25 bp, Homo sapien
gaatggagagtaggggctagagtca

SEQ ID NO: 195502 - DNA, 25 bp, Homo sapien
gagtcagggaaggcaaccagtggga

SEQ ID NO: 195503 - DNA, 25 bp, Homo sapien
gagtaggggctagagtcagggaagg

SEQ ID NO: 195504 - DNA, 25 bp, Homo sapien
gtcagggaaggcaaccagtgggatt

SEQ ID NO: 195505 - DNA, 25 bp, Homo sapien
taaacgttgttcaacatgaatcaac

SEQ ID NO: 195506 - DNA, 25 bp, Homo sapien
tgatttaaatagatggtactttcaa

SEQ ID NO: 195507 - DNA, 25 bp, Homo sapien
taaatagatggtactttcaataaat

SEQ ID NO: 195508 - DNA, 25 bp, Homo sapien
ttcaataaataaacgttgttcaaca

SEQ ID NO: 195509 - DNA, 25 bp, Homo sapien
atgtaagcctatctcctgggctggg

SEQ ID NO: 195510 - DNA, 25 bp, Homo sapien
ggcagttctcgcttagagtccctca

SEQ ID NO: 195511 - DNA, 25 bp, Homo sapien
gcagcttaaggtgtccaatgcccta

SEQ ID NO: 195512 - DNA, 25 bp, Homo sapien
gagtccctcataagtttgcagtcag

SEQ ID NO: 195513 - DNA, 25 bp, Homo sapien
tagactccaattgggttacctctgg

SEQ ID NO: 195514 - DNA, 25 bp, Homo sapien
ggaaaatagtaaaatcaccctgcag

SEQ ID NO: 195515 - DNA, 25 bp, Homo sapien
tggactggcacagtcagatagactc

SEQ ID NO: 195516 - DNA, 25 bp, Homo sapien
tctggtctgcagttgtattggcctc

SEQ ID NO: 195517 - DNA, 25 bp, Homo sapien
gagactagcccgggcaacatggcaa

SEQ ID NO: 195518 - DNA, 25 bp, Homo sapien
gcccgggcaacatggcaagatcctg

SEQ ID NO: 195519 - DNA, 25 bp, Homo sapien
actagcccgggcaacatggcaagat

SEQ ID NO: 195520 - DNA, 25 bp, Homo sapien
ctagcccgggcaacatggcaagatc

SEQ ID NO: 195521 - DNA, 25 bp, Homo sapien
ctccttatatgtcaaacagagttga

SEQ ID NO: 195522 - DNA, 25 bp, Homo sapien
taatagatgaaaaagcgcttgggaa

SEQ ID NO: 195523 - DNA, 25 bp, Homo sapien
agcactgatgtcagaataaataata

SEQ ID NO: 195524 - DNA, 25 bp, Homo sapien
gttgataatgccatacttcacagca

SEQ ID NO: 195525 - DNA, 25 bp, Homo sapien
tgccttcctccatatgggagacatt

SEQ ID NO: 195526 - DNA, 25 bp, Homo sapien
catttctccccagtaactgcttcag

SEQ ID NO: 195527 - DNA, 25 bp, Homo sapien
ccatatgggagacatttctccccag

SEQ ID NO: 195528 - DNA, 25 bp, Homo sapien
tccccagtaactgcttcaggcctgc

SEQ ID NO: 195529 - DNA, 25 bp, Homo sapien
gaaacaatataaggatacgccaatg

SEQ ID NO: 195530 - DNA, 25 bp, Homo sapien
ctttatataggcccagtcacgtgga

SEQ ID NO: 195531 - DNA, 25 bp, Homo sapien
cgccaatgattaacactgaacggat

SEQ ID NO: 195532 - DNA, 25 bp, Homo sapien
cactgaacggatcagtgtcagccac

SEQ ID NO: 195533 - DNA, 25 bp, Homo sapien
atggtccaactgataagaggataca

SEQ ID NO: 195534 - DNA, 25 bp, Homo sapien
gatggtccaactgataagaggatac

SEQ ID NO: 195535 - DNA, 25 bp, Homo sapien
gagatggtccaactgataagaggat

SEQ ID NO: 195536 - DNA, 25 bp, Homo sapien
agagatggtccaactgataagagga

SEQ ID NO: 195537 - DNA, 25 bp, Homo sapien
actgagccacgctctgcccactcct

SEQ ID NO: 195538 - DNA, 25 bp, Homo sapien
gactgagccacgctctgcccactcc

SEQ ID NO: 195539 - DNA, 25 bp, Homo sapien
ggactgagccacgctctgcccactc

SEQ ID NO: 195540 - DNA, 25 bp, Homo sapien
ggaggggcgtagagctttcatgccc

SEQ ID NO: 195541 - DNA, 25 bp, Homo sapien
aagagatgaattggtcaaggtgcag

SEQ ID NO: 195542 - DNA, 25 bp, Homo sapien
ggatacagatggactgctggatgga

SEQ ID NO: 195543 - DNA, 25 bp, Homo sapien
catgcccttttgggcgagccaggct

SEQ ID NO: 195544 - DNA, 25 bp, Homo sapien
ctaggaagtacaagatctgggtgcc

SEQ ID NO: 195545 - DNA, 25 bp, Homo sapien
tactgctgcattggaggtcaacata

SEQ ID NO: 195546 - DNA, 25 bp, Homo sapien
taattcattcgtgagggtggagccc

SEQ ID NO: 195547 - DNA, 25 bp, Homo sapien
cacaccacggttatgacaggaatct

SEQ ID NO: 195548 - DNA, 25 bp, Homo sapien
tgacccaagatggaggccagttacc

SEQ ID NO: 195549 - DNA, 25 bp, Homo sapien
taccgaagcatggtgaagcatcctg

SEQ ID NO: 195550 - DNA, 25 bp, Homo sapien
agttaccagcgagaacaaccatgtg

SEQ ID NO: 195551 - DNA, 25 bp, Homo sapien
catgagcctcttggatcacacctga

SEQ ID NO: 195552 - DNA, 25 bp, Homo sapien
tttataacagtcagaaggtccagtc

SEQ ID NO: 195553 - DNA, 25 bp, Homo sapien
taagaagttacaaagtcagctcccg

SEQ ID NO: 195554 - DNA, 25 bp, Homo sapien
caataaacctttagtggcagcctgc

SEQ ID NO: 195555 - DNA, 25 bp, Homo sapien
cacgaagaaattggaaggcctgagc

SEQ ID NO: 195556 - DNA, 25 bp, Homo sapien
ccccaataaaacaaacacattcact

SEQ ID NO: 195557 - DNA, 25 bp, Homo sapien
cccaataaaacaaacacattcactg

SEQ ID NO: 195558 - DNA, 25 bp, Homo sapien
ccaataaaacaaacacattcactgt

SEQ ID NO: 195559 - DNA, 25 bp, Homo sapien
gaaacatcatgagtgatctcaacac

SEQ ID NO: 195560 - DNA, 25 bp, Homo sapien
gaagaaacatcatgagtgatctcaa

SEQ ID NO: 195561 - DNA, 25 bp, Homo sapien
catcatgagtgatctcaacacagta

SEQ ID NO: 195562 - DNA, 25 bp, Homo sapien
catgagtgatctcaacacagtaaga

SEQ ID NO: 195563 - DNA, 25 bp, Homo sapien
tccataggcagtgccaaggaagaca

SEQ ID NO: 195564 - DNA, 25 bp, Homo sapien
gaacttggtgctctttttgatgatc

SEQ ID NO: 195565 - DNA, 25 bp, Homo sapien
gatcttgggcttcgcgagcggtctc

SEQ ID NO: 195566 - DNA, 25 bp, Homo sapien
ataggcagtgccaaggaagacagct

SEQ ID NO: 195567 - DNA, 25 bp, Homo sapien
cggataatcctctgaaggaagagca

SEQ ID NO: 195568 - DNA, 25 bp, Homo sapien
gtagatgccccggataatcctctga

SEQ ID NO: 195569 - DNA, 25 bp, Homo sapien
gatgccccggataatcctctgaagg

SEQ ID NO: 195570 - DNA, 25 bp, Homo sapien
ttgagtagatgccccggataatcct

SEQ ID NO: 195571 - DNA, 25 bp, Homo sapien
ctttaccaaatgcacaggatagttg

SEQ ID NO: 195572 - DNA, 25 bp, Homo sapien
gaactggacctttgacctatccaaa

SEQ ID NO: 195573 - DNA, 25 bp, Homo sapien
aacgctatcgcacttcttccatcaa

SEQ ID NO: 195574 - DNA, 25 bp, Homo sapien
gcctactccagaatcaaccatgttt

SEQ ID NO: 195575 - DNA, 25 bp, Homo sapien
gctgaatcttaacaatgtctttccg

SEQ ID NO: 195576 - DNA, 25 bp, Homo sapien
acaatttacaacagacagggcgccg

SEQ ID NO: 195577 - DNA, 25 bp, Homo sapien
aacactagcttgactaagatgatca

SEQ ID NO: 195578 - DNA, 25 bp, Homo sapien
caagagatagaagcactaaatggca

SEQ ID NO: 195579 - DNA, 25 bp, Homo sapien
ccgcgcgtggtggcaagagccttta

SEQ ID NO: 195580 - DNA, 25 bp, Homo sapien
gaaaatatctaggtacagccgcgcg

SEQ ID NO: 195581 - DNA, 25 bp, Homo sapien
ggttagaaaatatctaggtacagcc

SEQ ID NO: 195582 - DNA, 25 bp, Homo sapien
atatctaggtacagccgcgcgtggt

SEQ ID NO: 195583 - DNA, 25 bp, Homo sapien
gaatttcaccaaacacaatacacgg

SEQ ID NO: 195584 - DNA, 25 bp, Homo sapien
cggcacctaaaactggctaagctat

SEQ ID NO: 195585 - DNA, 25 bp, Homo sapien
tacacggcacctaaaactggctaag

SEQ ID NO: 195586 - DNA, 25 bp, Homo sapien
caaacacaatacacggcacctaaaa

SEQ ID NO: 195587 - DNA, 25 bp, Homo sapien
gaaagactaagtccttcaccttctc

SEQ ID NO: 195588 - DNA, 25 bp, Homo sapien
atggagtacgcctgcagacgcctac

SEQ ID NO: 195589 - DNA, 25 bp, Homo sapien
ggaaaagctcttggtcgaatgctca

SEQ ID NO: 195590 - DNA, 25 bp, Homo sapien
ctcttggtcgaatgctcagaattac

SEQ ID NO: 195591 - DNA, 25 bp, Homo sapien
ccaaacaacatggagtacgcctgca

SEQ ID NO: 195592 - DNA, 25 bp, Homo sapien
gaaaccgatatccttcgcgtactga

SEQ ID NO: 195593 - DNA, 25 bp, Homo sapien
atgaaaccgatatccttcgcgtact

SEQ ID NO: 195594 - DNA, 25 bp, Homo sapien
gatatccttcgcgtactgacggaaa

SEQ ID NO: 195595 - DNA, 25 bp, Homo sapien
aaccgatatccttcgcgtactgacg

SEQ ID NO: 195596 - DNA, 25 bp, Homo sapien
cagaccgtgccggtttgaacagaca

SEQ ID NO: 195597 - DNA, 25 bp, Homo sapien
atttccggatcagaccgtgccggtt

SEQ ID NO: 195598 - DNA, 25 bp, Homo sapien
accgtgccggtttgaacagacacga

SEQ ID NO: 195599 - DNA, 25 bp, Homo sapien
ccggatcagaccgtgccggtttgaa

SEQ ID NO: 195600 - DNA, 25 bp, Homo sapien
aaagagacagcggttttgcaggtca

SEQ ID NO: 195601 - DNA, 25 bp, Homo sapien
aattacaagactccgcactcagacg

SEQ ID NO: 195602 - DNA, 25 bp, Homo sapien
agtacaggcctgtaatggcggcacc

SEQ ID NO: 195603 - DNA, 25 bp, Homo sapien
attttaagcagcctagcgctccacg

SEQ ID NO: 195604 - DNA, 25 bp, Homo sapien
cctggccgaattttcgcgggtggct

SEQ ID NO: 195605 - DNA, 25 bp, Homo sapien
ggccgaattttcgcgggtggctcca

SEQ ID NO: 195606 - DNA, 25 bp, Homo sapien
attttcgcgggtggctccagtacag

SEQ ID NO: 195607 - DNA, 25 bp, Homo sapien
agcgagaaccctggccgaattttcg

SEQ ID NO: 195608 - DNA, 25 bp, Homo sapien
gctctcagcagtgcaacgaggtaaa

SEQ ID NO: 195609 - DNA, 25 bp, Homo sapien
cttgctctcagcagtgcaacgaggt

SEQ ID NO: 195610 - DNA, 25 bp, Homo sapien
gaagaagctggcccacgcatgcgct

SEQ ID NO: 195611 - DNA, 25 bp, Homo sapien
ctcagcagtgcaacgaggtaaaagg

SEQ ID NO: 195612 - DNA, 25 bp, Homo sapien
gcgctatgccgatcgggtgtccgca

SEQ ID NO: 195613 - DNA, 25 bp, Homo sapien
ctgtagtgcgctatgccgatcgggt

SEQ ID NO: 195614 - DNA, 25 bp, Homo sapien
tagtgcgctatgccgatcgggtgtc

SEQ ID NO: 195615 - DNA, 25 bp, Homo sapien
ggctgtagtgcgctatgccgatcgg

SEQ ID NO: 195616 - DNA, 25 bp, Homo sapien
atcagtagtgggatcgcgcctgtga

SEQ ID NO: 195617 - DNA, 25 bp, Homo sapien
cccgtgctgatcagtagtgggatcg

SEQ ID NO: 195618 - DNA, 25 bp, Homo sapien
cggagcaggtcaaaactcccgtgct

SEQ ID NO: 195619 - DNA, 25 bp, Homo sapien
agtgggatcgcgcctgtgaatagcc

SEQ ID NO: 195620 - DNA, 25 bp, Homo sapien
aattaattagttgtaaactccactg

SEQ ID NO: 195621 - DNA, 25 bp, Homo sapien
aatctgtaactggttgtaattaatt

SEQ ID NO: 195622 - DNA, 25 bp, Homo sapien
tgtaattaattagttgtaaactcca

SEQ ID NO: 195623 - DNA, 25 bp, Homo sapien
ctgtaactggttgtaattaattagt

SEQ ID NO: 195624 - DNA, 25 bp, Homo sapien
gagtcgcgttttaatgctctactag

SEQ ID NO: 195625 - DNA, 25 bp, Homo sapien
gaaaaatcggtatttctgaacgtca

SEQ ID NO: 195626 - DNA, 25 bp, Homo sapien
agtgcgcgattacagctcaccggag

SEQ ID NO: 195627 - DNA, 25 bp, Homo sapien
gttcaacatgtaaatagggacgctc

SEQ ID NO: 195628 - DNA, 25 bp, Homo sapien
gagaggcgcctagagcacaaatttt

SEQ ID NO: 195629 - DNA, 25 bp, Homo sapien
gtctcaggtgcagttaagccagtca

SEQ ID NO: 195630 - DNA, 25 bp, Homo sapien
gggccccgtcctagttcaatcaatc

SEQ ID NO: 195631 - DNA, 25 bp, Homo sapien
tacgaaggccttgtgcggtctggac

SEQ ID NO: 195632 - DNA, 25 bp, Homo sapien
ttgttcagcaggaattgccaagtca

SEQ ID NO: 195633 - DNA, 25 bp, Homo sapien
cgtcaacagctgaaaccctcggaat

SEQ ID NO: 195634 - DNA, 25 bp, Homo sapien
gagaacccggccctgctaagggaga

SEQ ID NO: 195635 - DNA, 25 bp, Homo sapien
ttccctgtaacgcagaggcacacct

SEQ ID NO: 195636 - DNA, 25 bp, Homo sapien
ccagcttgacgtggttgtggccgtt

SEQ ID NO: 195637 - DNA, 25 bp, Homo sapien
gacacggtgctaagacagcccgagt

SEQ ID NO: 195638 - DNA, 25 bp, Homo sapien
tccgagccgtgttgagcctctgtca

SEQ ID NO: 195639 - DNA, 25 bp, Homo sapien
ccgttgggcgagatgaagctacact

SEQ ID NO: 195640 - DNA, 25 bp, Homo sapien
ggtgaaataacaaggccagccacgt

SEQ ID NO: 195641 - DNA, 25 bp, Homo sapien
tctctcaggggtttcatagtttaaa

SEQ ID NO: 195642 - DNA, 25 bp, Homo sapien
gtatgtaagttgctttctattccag

SEQ ID NO: 195643 - DNA, 25 bp, Homo sapien
aaggtacaatctctcaggggtttca

SEQ ID NO: 195644 - DNA, 25 bp, Homo sapien
acgtgccgccatgcccagctaattt

SEQ ID NO: 195645 - DNA, 25 bp, Homo sapien
ttaatgagacagagtctctccctgt

SEQ ID NO: 195646 - DNA, 25 bp, Homo sapien
cacccaggctggattacagtggcgt

SEQ ID NO: 195647 - DNA, 25 bp, Homo sapien
tacagtggcgtgatctcagctcact

SEQ ID NO: 195648 - DNA, 25 bp, Homo sapien
tgaacaaccaaaagtccttccagta

SEQ ID NO: 195649 - DNA, 25 bp, Homo sapien
tacagtgctatgcacagtctgaccc

SEQ ID NO: 195650 - DNA, 25 bp, Homo sapien
tttattggaatcttctgcacgaacc

SEQ ID NO: 195651 - DNA, 25 bp, Homo sapien
ttccagtaataaagctgcaagcacc

SEQ ID NO: 195652 - DNA, 25 bp, Homo sapien
ccttttgaacaattgatccctggaa

SEQ ID NO: 195653 - DNA, 25 bp, Homo sapien
agtgtgagagtgaaatgccttaagc

SEQ ID NO: 195654 - DNA, 25 bp, Homo sapien
gcccagccactaaagtaaaactcat

SEQ ID NO: 195655 - DNA, 25 bp, Homo sapien
aaggttagccttacttgcccagcca

SEQ ID NO: 195656 - DNA, 25 bp, Homo sapien
tggcttcaccattttctcttcaaaa

SEQ ID NO: 195657 - DNA, 25 bp, Homo sapien
ctcgggtaacttttctatggcttca

SEQ ID NO: 195658 - DNA, 25 bp, Homo sapien
cattttctcttcaaaattgaagaaa

SEQ ID NO: 195659 - DNA, 25 bp, Homo sapien
tcgggtaacttttctatggcttcac

SEQ ID NO: 195660 - DNA, 25 bp, Homo sapien
ctcttcttatctcctcccagttcaa

SEQ ID NO: 195661 - DNA, 25 bp, Homo sapien
cacttggccctttctcttcttatct

SEQ ID NO: 195662 - DNA, 25 bp, Homo sapien
tagaactggatcacttggccctttc

SEQ ID NO: 195663 - DNA, 25 bp, Homo sapien
cttcttatctcctcccagttcaaaa

SEQ ID NO: 195664 - DNA, 25 bp, Homo sapien
caacacattccagccttagcacaat

SEQ ID NO: 195665 - DNA, 25 bp, Homo sapien
tcctcttggatctgcagttaggctc

SEQ ID NO: 195666 - DNA, 25 bp, Homo sapien
tgcatctcttaatggccagcatcct

SEQ ID NO: 195667 - DNA, 25 bp, Homo sapien
tcttaatggccagcatcctcttgga

SEQ ID NO: 195668 - DNA, 25 bp, Homo sapien
cttccggaaaattggctttgtctgc

SEQ ID NO: 195669 - DNA, 25 bp, Homo sapien
tccttccctgggcatacaaagaatc

SEQ ID NO: 195670 - DNA, 25 bp, Homo sapien
tgcttccgatcatagcgcctccttc

SEQ ID NO: 195671 - DNA, 25 bp, Homo sapien
tgtggtcttagccttcttccggaaa

SEQ ID NO: 195672 - DNA, 25 bp, Homo sapien
cagggctgttttgtctatatgatga

SEQ ID NO: 195673 - DNA, 25 bp, Homo sapien
ctttgcagcagggctgttttgtcta

SEQ ID NO: 195674 - DNA, 25 bp, Homo sapien
ggctgttttgtctatatgatgaaaa

SEQ ID NO: 195675 - DNA, 25 bp, Homo sapien
tttgcagcagggctgttttgtctat

SEQ ID NO: 195676 - DNA, 25 bp, Homo sapien
aaataagatagcagacgttaaacat

SEQ ID NO: 195677 - DNA, 25 bp, Homo sapien
cgttccttctacgagaaccacatca

SEQ ID NO: 195678 - DNA, 25 bp, Homo sapien
gagaaccacatcagcgtagtatcac

SEQ ID NO: 195679 - DNA, 25 bp, Homo sapien
agtatcacttttcccctccgaagca

SEQ ID NO: 195680 - DNA, 25 bp, Homo sapien
cagcgcgcgacgttgtagctacggt

SEQ ID NO: 195681 - DNA, 25 bp, Homo sapien
tacccaggattctgagcaagggagg

SEQ ID NO: 195682 - DNA, 25 bp, Homo sapien
gctcctattggagccgctacagcct

SEQ ID NO: 195683 - DNA, 25 bp, Homo sapien
taagaaggcctagtcctacccagga

SEQ ID NO: 195684 - DNA, 25 bp, Homo sapien
tgctctcgaactaaggccggcgagg

SEQ ID NO: 195685 - DNA, 25 bp, Homo sapien
cgagaaacagcgcccgacacctggc

SEQ ID NO: 195686 - DNA, 25 bp, Homo sapien
agcgcccgacacctggcccttcgca

SEQ ID NO: 195687 - DNA, 25 bp, Homo sapien
cgcagctctcgcctttcgcagctct

SEQ ID NO: 195688 - DNA, 25 bp, Homo sapien
agctctcgcctttcgcagctctcgc

SEQ ID NO: 195689 - DNA, 25 bp, Homo sapien
tactgcaaaccaataggcagccggc

SEQ ID NO: 195690 - DNA, 25 bp, Homo sapien
tggaaagcaccaaccaacggtctaa

SEQ ID NO: 195691 - DNA, 25 bp, Homo sapien
ctgagcgacagtactgcaaaccaat

SEQ ID NO: 195692 - DNA, 25 bp, Homo sapien
cggtcaggcgccttcggtcgcgtct

SEQ ID NO: 195693 - DNA, 25 bp, Homo sapien
gaccgcggctgagctttttccggga

SEQ ID NO: 195694 - DNA, 25 bp, Homo sapien
tcagttctggccgtctagggcccct

SEQ ID NO: 195695 - DNA, 25 bp, Homo sapien
tttccgggacccgtggtgctgaatg

SEQ ID NO: 195696 - DNA, 25 bp, Homo sapien
gcccctgtaaggatgagagcgcaga

SEQ ID NO: 195697 - DNA, 25 bp, Homo sapien
tggtggtccaggtgcataaccggcc

SEQ ID NO: 195698 - DNA, 25 bp, Homo sapien
tggtcgaccgagatcaatcagctga

SEQ ID NO: 195699 - DNA, 25 bp, Homo sapien
gactcacttcgaaaagcccagggaa

SEQ ID NO: 195700 - DNA, 25 bp, Homo sapien
gaaggtgctaatcctgacgctcgtg

SEQ ID NO: 195701 - DNA, 25 bp, Homo sapien
tctgtgtaaagatattacgggctgg

SEQ ID NO: 195702 - DNA, 25 bp, Homo sapien
ccagaaatgatacaaagttcagtca

SEQ ID NO: 195703 - DNA, 25 bp, Homo sapien
ggatcctttgagtctcgaggcagag

SEQ ID NO: 195704 - DNA, 25 bp, Homo sapien
agcttatgacaatgcattccctgtg

SEQ ID NO: 195705 - DNA, 25 bp, Homo sapien
ggcccagtctggtgcaagattttgc

SEQ ID NO: 195706 - DNA, 25 bp, Homo sapien
gactgagctaagaaggccagagtgt

SEQ ID NO: 195707 - DNA, 25 bp, Homo sapien
caggaggctttgtacctatttctgg

SEQ ID NO: 195708 - DNA, 25 bp, Homo sapien
tctaaggtgaggcaaatagttctct

SEQ ID NO: 195709 - DNA, 25 bp, Homo sapien
tatctccaatttcccccatgagaat

SEQ ID NO: 195710 - DNA, 25 bp, Homo sapien
aaaattatctccaatttcccccatg

SEQ ID NO: 195711 - DNA, 25 bp, Homo sapien
gaaaacatacacatctattacagga

SEQ ID NO: 195712 - DNA, 25 bp, Homo sapien
acatacacatctattacaggaatca

SEQ ID NO: 195713 - DNA, 25 bp, Homo sapien
gcacaattggtcacatgatctttaa

SEQ ID NO: 195714 - DNA, 25 bp, Homo sapien
tgaaagcatgtaactaaaccaaagc

SEQ ID NO: 195715 - DNA, 25 bp, Homo sapien
tgtcgaatccaggtatattgtgaac

SEQ ID NO: 195716 - DNA, 25 bp, Homo sapien
gatctttaatgacctgcacactacc

SEQ ID NO: 195717 - DNA, 25 bp, Homo sapien
actgtttgaatggagagctcaggac

SEQ ID NO: 195718 - DNA, 25 bp, Homo sapien
ttgaagaacttcaattaatggtggg

SEQ ID NO: 195719 - DNA, 25 bp, Homo sapien
ttgaatcttattatcagtaacttga

SEQ ID NO: 195720 - DNA, 25 bp, Homo sapien
caaggacatagactgtttgaatgga

SEQ ID NO: 195721 - DNA, 25 bp, Homo sapien
ctaatgaggtggctaagaaatatac

SEQ ID NO: 195722 - DNA, 25 bp, Homo sapien
tataaatgggatcccagatacaaaa

SEQ ID NO: 195723 - DNA, 25 bp, Homo sapien
aataacatcatctctagggctataa

SEQ ID NO: 195724 - DNA, 25 bp, Homo sapien
tctagggctataaatgggatcccag

SEQ ID NO: 195725 - DNA, 25 bp, Homo sapien
acctgtgcccccaagtgcctgggta

SEQ ID NO: 195726 - DNA, 25 bp, Homo sapien
caagtgcctgggtacctgggactac

SEQ ID NO: 195727 - DNA, 25 bp, Homo sapien
gaatgcagtcgcacactcatagccc

SEQ ID NO: 195728 - DNA, 25 bp, Homo sapien
cctggtgtggcagctaacgcctgta

SEQ ID NO: 195729 - DNA, 25 bp, Homo sapien
gatactccagcgtaacattagcaaa

SEQ ID NO: 195730 - DNA, 25 bp, Homo sapien
tactccagcgtaacattagcaaact

SEQ ID NO: 195731 - DNA, 25 bp, Homo sapien
atactccagcgtaacattagcaaac

SEQ ID NO: 195732 - DNA, 25 bp, Homo sapien
agttgccctaatcccattttcgtcg

SEQ ID NO: 195733 - DNA, 25 bp, Homo sapien
taaagttctgaccttgaaagccaca

SEQ ID NO: 195734 - DNA, 25 bp, Homo sapien
gagcctggtccagtacaaagtaaag

SEQ ID NO: 195735 - DNA, 25 bp, Homo sapien
gagttacatgctgttgttccatcag

SEQ ID NO: 195736 - DNA, 25 bp, Homo sapien
ctctccaatgtccatggctctctgg

SEQ ID NO: 195737 - DNA, 25 bp, Homo sapien
tctccaatgtccatggctctctgga

SEQ ID NO: 195738 - DNA, 25 bp, Homo sapien
tgtttacaccataataccactctct

SEQ ID NO: 195739 - DNA, 25 bp, Homo sapien
ctccaaagaatcgttgtttacacca

SEQ ID NO: 195740 - DNA, 25 bp, Homo sapien
ccttgaagactttgcggctggatcc

SEQ ID NO: 195741 - DNA, 25 bp, Homo sapien
taaactaagtcttgtgcggagaagc

SEQ ID NO: 195742 - DNA, 25 bp, Homo sapien
gagaagcgtaatttgtaccagaggg

SEQ ID NO: 195743 - DNA, 25 bp, Homo sapien
tgtggtactcaatttattctctgga

SEQ ID NO: 195744 - DNA, 25 bp, Homo sapien
gacacaaaggctccccgctcttggt

SEQ ID NO: 195745 - DNA, 25 bp, Homo sapien
tacacagtaacggaggacacaaagg

SEQ ID NO: 195746 - DNA, 25 bp, Homo sapien
ctgattacacagtaacggaggacac

SEQ ID NO: 195747 - DNA, 25 bp, Homo sapien
cacagtaacggaggacacaaaggct

SEQ ID NO: 195748 - DNA, 25 bp, Homo sapien
gtgtttccacactgctatctccgcg

SEQ ID NO: 195749 - DNA, 25 bp, Homo sapien
aggcctggccgtcagttccggaccg

SEQ ID NO: 195750 - DNA, 25 bp, Homo sapien
ccaggctccgggaggacaaacaagg

SEQ ID NO: 195751 - DNA, 25 bp, Homo sapien
acgcaggtatcgtggcctccgtcct

SEQ ID NO: 195752 - DNA, 25 bp, Homo sapien
ggcggcgacggcgacagcgggctcc

SEQ ID NO: 195753 - DNA, 25 bp, Homo sapien
cggcgacggcgacagcgggctcccg

SEQ ID NO: 195754 - DNA, 25 bp, Homo sapien
gcgacggcgacagcgggctcccggc

SEQ ID NO: 195755 - DNA, 25 bp, Homo sapien
ggcgacagcgggctcccggcgcgcg

SEQ ID NO: 195756 - DNA, 25 bp, Homo sapien
gccatcgtccactgggtacgggagc

SEQ ID NO: 195757 - DNA, 25 bp, Homo sapien
acagcagctttctcgttacctccag

SEQ ID NO: 195758 - DNA, 25 bp, Homo sapien
tagtcaggtttcctcgagtcgaggc

SEQ ID NO: 195759 - DNA, 25 bp, Homo sapien
gttgaattgtgccttgccgcggcca

SEQ ID NO: 195760 - DNA, 25 bp, Homo sapien
gccgagcgcaacagcggcagttcga

SEQ ID NO: 195761 - DNA, 25 bp, Homo sapien
cgcaacagcggcagttcgatggtga

SEQ ID NO: 195762 - DNA, 25 bp, Homo sapien
ctgctcggccgagcgcaacagcggc

SEQ ID NO: 195763 - DNA, 25 bp, Homo sapien
acagcggcagttcgatggtgatcac

SEQ ID NO: 195764 - DNA, 25 bp, Homo sapien
gagtccctggagcagcggtaatcct

SEQ ID NO: 195765 - DNA, 25 bp, Homo sapien
cagcggtaatcctggaggtccacgt

SEQ ID NO: 195766 - DNA, 25 bp, Homo sapien
gagcagcggtaatcctggaggtcca

SEQ ID NO: 195767 - DNA, 25 bp, Homo sapien
taatcctggaggtccacgtggtggc

SEQ ID NO: 195768 - DNA, 25 bp, Homo sapien
ccccgtcaggccttgcggggatgac

SEQ ID NO: 195769 - DNA, 25 bp, Homo sapien
cacgtcgtagaccatgtagcggctg

SEQ ID NO: 195770 - DNA, 25 bp, Homo sapien
gtcttggcattcctgcggtccagct

SEQ ID NO: 195771 - DNA, 25 bp, Homo sapien
gcaagcgcgtctggatggaagacca

SEQ ID NO: 195772 - DNA, 25 bp, Homo sapien
ggtccagcttcacgccgaactgctt

SEQ ID NO: 195773 - DNA, 25 bp, Homo sapien
ggctccgggtgcacgaaccgcactt

SEQ ID NO: 195774 - DNA, 25 bp, Homo sapien
gcagcacatggccgggctccgggtg

SEQ ID NO: 195775 - DNA, 25 bp, Homo sapien
tgcagacattcacaaagcagcgccg

SEQ ID NO: 195776 - DNA, 25 bp, Homo sapien
agacattcacaaagcagcgccgcgc

SEQ ID NO: 195777 - DNA, 25 bp, Homo sapien
tgagccttgagcagcgcgtgcttgt

SEQ ID NO: 195778 - DNA, 25 bp, Homo sapien
cgggccaaaggcgatcagtctgaca

SEQ ID NO: 195779 - DNA, 25 bp, Homo sapien
tactgggagaacattcgccggaact

SEQ ID NO: 195780 - DNA, 25 bp, Homo sapien
gagtttctgggcagcgtacagtgac

SEQ ID NO: 195781 - DNA, 25 bp, Homo sapien
accttagtgactccctgcaacatgc

SEQ ID NO: 195782 - DNA, 25 bp, Homo sapien
gaatactcttgactcctgtgcagcc

SEQ ID NO: 195783 - DNA, 25 bp, Homo sapien
aaatggccagcatcgttttttgttg

SEQ ID NO: 195784 - DNA, 25 bp, Homo sapien
ggccatcgaacctcaagaccttaaa

SEQ ID NO: 195785 - DNA, 25 bp, Homo sapien
ctttgtaacatcaaaattctggacg

SEQ ID NO: 195786 - DNA, 25 bp, Homo sapien
tgtaacatcaaaattctggacgttt

SEQ ID NO: 195787 - DNA, 25 bp, Homo sapien
aacatcaaaattctggacgtttgac

SEQ ID NO: 195788 - DNA, 25 bp, Homo sapien
tttgtaacatcaaaattctggacgt

SEQ ID NO: 195789 - DNA, 25 bp, Homo sapien
taagatatagagttaagcagaaaac

SEQ ID NO: 195790 - DNA, 25 bp, Homo sapien
cataagatatagagttaagcagaaa

SEQ ID NO: 195791 - DNA, 25 bp, Homo sapien
cagaatcacataagatatagagtta

SEQ ID NO: 195792 - DNA, 25 bp, Homo sapien
tcacataagatatagagttaagcag

SEQ ID NO: 195793 - DNA, 25 bp, Homo sapien
agtcattctcatgcccccttttctg

SEQ ID NO: 195794 - DNA, 25 bp, Homo sapien
acctaagttgtatacttactaatag

SEQ ID NO: 195795 - DNA, 25 bp, Homo sapien
gctcccaaaaagcaaatgtatgtct

SEQ ID NO: 195796 - DNA, 25 bp, Homo sapien
gttgtatacttactaatagttgtag

SEQ ID NO: 195797 - DNA, 25 bp, Homo sapien
ttttccattagtagtaaatacatta

SEQ ID NO: 195798 - DNA, 25 bp, Homo sapien
ggcttagaaatttaagtaaatcaga

SEQ ID NO: 195799 - DNA, 25 bp, Homo sapien
ggatattatgcatactttctacacc

SEQ ID NO: 195800 - DNA, 25 bp, Homo sapien
acatgtatatgtgggcttatgcttt

SEQ ID NO: 195801 - DNA, 25 bp, Homo sapien
tcaggatatccagcgtagacaagtg

SEQ ID NO: 195802 - DNA, 25 bp, Homo sapien
ggctgacagccctcagagttgactt

SEQ ID NO: 195803 - DNA, 25 bp, Homo sapien
taagactgtatgctccaggctgaca

SEQ ID NO: 195804 - DNA, 25 bp, Homo sapien
ggtcacaaaatcaagtgccctcagg

SEQ ID NO: 195805 - DNA, 25 bp, Homo sapien
gttatctgagaaatcacatgttagg

SEQ ID NO: 195806 - DNA, 25 bp, Homo sapien
aatacagttatctgagaaatcacat

SEQ ID NO: 195807 - DNA, 25 bp, Homo sapien
cagttatctgagaaatcacatgtta

SEQ ID NO: 195808 - DNA, 25 bp, Homo sapien
tacagttatctgagaaatcacatgt

SEQ ID NO: 195809 - DNA, 25 bp, Homo sapien
aagagtgagaccatcgtcaggagtt

SEQ ID NO: 195810 - DNA, 25 bp, Homo sapien
agtgagaccatcgtcaggagttggc

SEQ ID NO: 195811 - DNA, 25 bp, Homo sapien
caggagttggcctgtaagagaacta

SEQ ID NO: 195812 - DNA, 25 bp, Homo sapien
tgagaccatcgtcaggagttggcct

SEQ ID NO: 195813 - DNA, 25 bp, Homo sapien
atcttctactgtcttattagaagga

SEQ ID NO: 195814 - DNA, 25 bp, Homo sapien
tagaaggataaaaaactttgaatga

SEQ ID NO: 195815 - DNA, 25 bp, Homo sapien
gaaaatccacttcttggaaaagagc

SEQ ID NO: 195816 - DNA, 25 bp, Homo sapien
ctactgtcttattagaaggataaaa

SEQ ID NO: 195817 - DNA, 25 bp, Homo sapien
agggtttatgcagaggcattcggta

SEQ ID NO: 195818 - DNA, 25 bp, Homo sapien
tatttgtcgtagtgaaaggatcata

SEQ ID NO: 195819 - DNA, 25 bp, Homo sapien
caatgacaagtagatcgggcacagg

SEQ ID NO: 195820 - DNA, 25 bp, Homo sapien
ggcacaggatacactctcaaagcat

SEQ ID NO: 195821 - DNA, 25 bp, Homo sapien
taggggagtcagatgtccttgggat

SEQ ID NO: 195822 - DNA, 25 bp, Homo sapien
acataaagaggtaggggagtcagat

SEQ ID NO: 195823 - DNA, 25 bp, Homo sapien
ccttgggataagatagtctttacaa

SEQ ID NO: 195824 - DNA, 25 bp, Homo sapien
gatgtccttgggataagatagtctt

SEQ ID NO: 195825 - DNA, 25 bp, Homo sapien
ttatttactaagtcttcacggaaga

SEQ ID NO: 195826 - DNA, 25 bp, Homo sapien
cggacgcagtttctgcacattttat

SEQ ID NO: 195827 - DNA, 25 bp, Homo sapien
gctgctaggaaaacggacgcagttt

SEQ ID NO: 195828 - DNA, 25 bp, Homo sapien
tactaagtcttcacggaagacagta

SEQ ID NO: 195829 - DNA, 25 bp, Homo sapien
aaaatctcttacaatacaaccccat

SEQ ID NO: 195830 - DNA, 25 bp, Homo sapien
tcttcatagaaccacaggcgcgtgc

SEQ ID NO: 195831 - DNA, 25 bp, Homo sapien
tggtctcggaactccaagcaacctg

SEQ ID NO: 195832 - DNA, 25 bp, Homo sapien
ggtctcggaactccaagcaacctgc

SEQ ID NO: 195833 - DNA, 25 bp, Homo sapien
agcctcttcatagaaccacaggcgc

SEQ ID NO: 195834 - DNA, 25 bp, Homo sapien
agtgatgctttcagcaagtggtggc

SEQ ID NO: 195835 - DNA, 25 bp, Homo sapien
tgaaaatggtaccctttgtctgaat

SEQ ID NO: 195836 - DNA, 25 bp, Homo sapien
tcattagtgatgctttcagcaagtg

SEQ ID NO: 195837 - DNA, 25 bp, Homo sapien
ttagtgatgctttcagcaagtggtg

SEQ ID NO: 195838 - DNA, 25 bp, Homo sapien
taagatggaaccaaatccaggatcc

SEQ ID NO: 195839 - DNA, 25 bp, Homo sapien
cttggtaagatggaaccaaatccag

SEQ ID NO: 195840 - DNA, 25 bp, Homo sapien
ggtaagatggaaccaaatccaggat

SEQ ID NO: 195841 - DNA, 25 bp, Homo sapien
aagatggaaccaaatccaggatcct

SEQ ID NO: 195842 - DNA, 25 bp, Homo sapien
ctggaccaggtacaaacacaaaacg

SEQ ID NO: 195843 - DNA, 25 bp, Homo sapien
tggaccaggtacaaacacaaaacga

SEQ ID NO: 195844 - DNA, 25 bp, Homo sapien
tgtagcaaaattcaacacaattcat

SEQ ID NO: 195845 - DNA, 25 bp, Homo sapien
ctgtagcaaaattcaacacaattca

SEQ ID NO: 195846 - DNA, 25 bp, Homo sapien
tagtaatgtcatgatagaaaagttc

SEQ ID NO: 195847 - DNA, 25 bp, Homo sapien
gcactgcccaattgaacacttgaat

SEQ ID NO: 195848 - DNA, 25 bp, Homo sapien
cagaccaacactgtctagtaatgtc

SEQ ID NO: 195849 - DNA, 25 bp, Homo sapien
tattaagtctccagaccaacactgt

SEQ ID NO: 195850 - DNA, 25 bp, Homo sapien
ttcacatattatatctgccaaagtt

SEQ ID NO: 195851 - DNA, 25 bp, Homo sapien
tggtgaatatctgggtattcacata

SEQ ID NO: 195852 - DNA, 25 bp, Homo sapien
ggtattcacatattatatctgccaa

SEQ ID NO: 195853 - DNA, 25 bp, Homo sapien
ctttggtgaatatctgggtattcac

SEQ ID NO: 195854 - DNA, 25 bp, Homo sapien
gattttttccatatggtgcagatga

SEQ ID NO: 195855 - DNA, 25 bp, Homo sapien
gcagatgaaaaattaccacacagaa

SEQ ID NO: 195856 - DNA, 25 bp, Homo sapien
ttttttccatatggtgcagatgaaa

SEQ ID NO: 195857 - DNA, 25 bp, Homo sapien
cagatgaaaaattaccacacagaat

SEQ ID NO: 195858 - DNA, 25 bp, Homo sapien
ttatgcgaagtttttccaatacttc

SEQ ID NO: 195859 - DNA, 25 bp, Homo sapien
agcaaacattatgcgaagtttttcc

SEQ ID NO: 195860 - DNA, 25 bp, Homo sapien
acattatgcgaagtttttccaatac

SEQ ID NO: 195861 - DNA, 25 bp, Homo sapien
cagcaaacattatgcgaagtttttc

SEQ ID NO: 195862 - DNA, 25 bp, Homo sapien
agttttgcagaagtcttcacagatg

SEQ ID NO: 195863 - DNA, 25 bp, Homo sapien
cagatgtattagaaggacctccaaa

SEQ ID NO: 195864 - DNA, 25 bp, Homo sapien
tcttcacagatgtattagaaggacc

SEQ ID NO: 195865 - DNA, 25 bp, Homo sapien
gcagaagtcttcacagatgtattag

SEQ ID NO: 195866 - DNA, 25 bp, Homo sapien
taagtgacttatctgaggttgctcc

SEQ ID NO: 195867 - DNA, 25 bp, Homo sapien
tgctccttgggaaaatttgtactta

SEQ ID NO: 195868 - DNA, 25 bp, Homo sapien
catggattgattatagtcttaagtc

SEQ ID NO: 195869 - DNA, 25 bp, Homo sapien
aaaatctccacaaacaatgaattgg

SEQ ID NO: 195870 - DNA, 25 bp, Homo sapien
caggaggaacacttatgtccaggaa

SEQ ID NO: 195871 - DNA, 25 bp, Homo sapien
gtgaagacccccaccaatccctaca

SEQ ID NO: 195872 - DNA, 25 bp, Homo sapien
ttttttaattagcagtcttagctac

SEQ ID NO: 195873 - DNA, 25 bp, Homo sapien
agacccccaccaatccctacacaat

SEQ ID NO: 195874 - DNA, 25 bp, Homo sapien
cactcaaatagaggtgagcttggct

SEQ ID NO: 195875 - DNA, 25 bp, Homo sapien
caagagtagatgctctgcacaggcc

SEQ ID NO: 195876 - DNA, 25 bp, Homo sapien
aactcccagccaggaaatgttgcct

SEQ ID NO: 195877 - DNA, 25 bp, Homo sapien
tgtgttctccttagcaagatcagca

SEQ ID NO: 195878 - DNA, 25 bp, Homo sapien
tgaaacacttgatcttcaaaccaac

SEQ ID NO: 195879 - DNA, 25 bp, Homo sapien
ggcattgacatgaaacacttgatct

SEQ ID NO: 195880 - DNA, 25 bp, Homo sapien
ctagtagtactagagggctcagtgg

SEQ ID NO: 195881 - DNA, 25 bp, Homo sapien
aaatccaaaggcattgacatgaaac

SEQ ID NO: 195882 - DNA, 25 bp, Homo sapien
cttctgctaagacaaagcatgcctc

SEQ ID NO: 195883 - DNA, 25 bp, Homo sapien
tctgctaagacaaagcatgcctctg

SEQ ID NO: 195884 - DNA, 25 bp, Homo sapien
ttctgctaagacaaagcatgcctct

SEQ ID NO: 195885 - DNA, 25 bp, Homo sapien
tacacaacagttgaggaaaataatt

SEQ ID NO: 195886 - DNA, 25 bp, Homo sapien
gtacacaacagttgaggaaaataat

SEQ ID NO: 195887 - DNA, 25 bp, Homo sapien
ctattcttgaggcagtaataaagtc

SEQ ID NO: 195888 - DNA, 25 bp, Homo sapien
ttcttgaggcagtaataaagtcaac

SEQ ID NO: 195889 - DNA, 25 bp, Homo sapien
cttgaggcagtaataaagtcaacat

SEQ ID NO: 195890 - DNA, 25 bp, Homo sapien
gaggcagtaataaagtcaacataca

SEQ ID NO: 195891 - DNA, 25 bp, Homo sapien
caattcacgtaatgcagattttaaa

SEQ ID NO: 195892 - DNA, 25 bp, Homo sapien
aatttccccaattcacgtaatgcag

SEQ ID NO: 195893 - DNA, 25 bp, Homo sapien
tttccccaattcacgtaatgcagat

SEQ ID NO: 195894 - DNA, 25 bp, Homo sapien
tccccaattcacgtaatgcagattt

SEQ ID NO: 195895 - DNA, 25 bp, Homo sapien
ttggactgttccagtaggatcttcc

SEQ ID NO: 195896 - DNA, 25 bp, Homo sapien
taaggtctagttggactgttccagt

SEQ ID NO: 195897 - DNA, 25 bp, Homo sapien
tagttggactgttccagtaggatct

SEQ ID NO: 195898 - DNA, 25 bp, Homo sapien
ggtctagttggactgttccagtagg

SEQ ID NO: 195899 - DNA, 25 bp, Homo sapien
tcctcgtattaccactattccaata

SEQ ID NO: 195900 - DNA, 25 bp, Homo sapien
tccttgttccaaggcttctgacatg

SEQ ID NO: 195901 - DNA, 25 bp, Homo sapien
ttatccttgttccaaggcttctgac

SEQ ID NO: 195902 - DNA, 25 bp, Homo sapien
tactatttcctcgtattaccactat

SEQ ID NO: 195903 - DNA, 25 bp, Homo sapien
tctccgattttggttgtactaccca

SEQ ID NO: 195904 - DNA, 25 bp, Homo sapien
aagaacaatcgcatctccgattttg

SEQ ID NO: 195905 - DNA, 25 bp, Homo sapien
tcttttaactgcgttatcattccaa

SEQ ID NO: 195906 - DNA, 25 bp, Homo sapien
tatcattccaagaacaatcgcatct

SEQ ID NO: 195907 - DNA, 25 bp, Homo sapien
taaataattcatgcctgtgggtcct

SEQ ID NO: 195908 - DNA, 25 bp, Homo sapien
catcagggtgagaacctatcaccgg

SEQ ID NO: 195909 - DNA, 25 bp, Homo sapien
caccggaggagtaaataattcatgc

SEQ ID NO: 195910 - DNA, 25 bp, Homo sapien
tgagaacctatcaccggaggagtaa

SEQ ID NO: 195911 - DNA, 25 bp, Homo sapien
cctccttgaagccttcttgtgcttc

SEQ ID NO: 195912 - DNA, 25 bp, Homo sapien
cttgtgcttctgccatataacacca

SEQ ID NO: 195913 - DNA, 25 bp, Homo sapien
gctgaccatctgctcctccttgaag

SEQ ID NO: 195914 - DNA, 25 bp, Homo sapien
ttgtgcttctgccatataacaccat

SEQ ID NO: 195915 - DNA, 25 bp, Homo sapien
tgcaaaatggtatatcgctcacgaa

SEQ ID NO: 195916 - DNA, 25 bp, Homo sapien
caaaatggtatatcgctcacgaaac

SEQ ID NO: 195917 - DNA, 25 bp, Homo sapien
aaatggtatatcgctcacgaaacat

SEQ ID NO: 195918 - DNA, 25 bp, Homo sapien
gcaaaatggtatatcgctcacgaaa

SEQ ID NO: 195919 - DNA, 25 bp, Homo sapien
aaataaatttggtgcagggtggttg

SEQ ID NO: 195920 - DNA, 25 bp, Homo sapien
atctcttggtgttccaaataaattt

SEQ ID NO: 195921 - DNA, 25 bp, Homo sapien
tctcttggtgttccaaataaatttg

SEQ ID NO: 195922 - DNA, 25 bp, Homo sapien
aaatttggtgcagggtggttggtca

SEQ ID NO: 195923 - DNA, 25 bp, Homo sapien
caaagcgtggaatatcaaatgctcc

SEQ ID NO: 195924 - DNA, 25 bp, Homo sapien
tctgaattgtacacaaagcgtggaa

SEQ ID NO: 195925 - DNA, 25 bp, Homo sapien
tatcaaatgctcctatgatattgaa

SEQ ID NO: 195926 - DNA, 25 bp, Homo sapien
ttctttctgaattgtacacaaagcg

SEQ ID NO: 195927 - DNA, 25 bp, Homo sapien
gcaatggctcgatcgtggctcacca

SEQ ID NO: 195928 - DNA, 25 bp, Homo sapien
atggctcgatcgtggctcaccacaa

SEQ ID NO: 195929 - DNA, 25 bp, Homo sapien
aatggctcgatcgtggctcaccaca

SEQ ID NO: 195930 - DNA, 25 bp, Homo sapien
caatggctcgatcgtggctcaccac

SEQ ID NO: 195931 - DNA, 25 bp, Homo sapien
aaaaagattcatgctaccctagagg

SEQ ID NO: 195932 - DNA, 25 bp, Homo sapien
caagagcctctactgtggtatgata

SEQ ID NO: 195933 - DNA, 25 bp, Homo sapien
gaaaacctagactccagacactgct

SEQ ID NO: 195934 - DNA, 25 bp, Homo sapien
cttcatctatgagaacaagagcctc

SEQ ID NO: 195935 - DNA, 25 bp, Homo sapien
cactcatcctggacgagccctttgg

SEQ ID NO: 195936 - DNA, 25 bp, Homo sapien
tggacgagccctttggcagcctcag

SEQ ID NO: 195937 - DNA, 25 bp, Homo sapien
tgtcatcattgacaatagctatttc

SEQ ID NO: 195938 - DNA, 25 bp, Homo sapien
catcctggacgagccctttggcagc

SEQ ID NO: 195939 - DNA, 25 bp, Homo sapien
ggagagtgggttcagccatgtggac

SEQ ID NO: 195940 - DNA, 25 bp, Homo sapien
gggggagagtgggttcagccatgtg

SEQ ID NO: 195941 - DNA, 25 bp, Homo sapien
ggggagagtgggttcagccatgtgg

SEQ ID NO: 195942 - DNA, 25 bp, Homo sapien
gggagagtgggttcagccatgtgga

SEQ ID NO: 195943 - DNA, 25 bp, Homo sapien
cctgtgtcacgagcagcaggactgg

SEQ ID NO: 195944 - DNA, 25 bp, Homo sapien
tgaagcgaatcctgtgtcacgagca

SEQ ID NO: 195945 - DNA, 25 bp, Homo sapien
gatggacacttctacgccctgaagc

SEQ ID NO: 195946 - DNA, 25 bp, Homo sapien
gggttacaggatggacacttctacg

SEQ ID NO: 195947 - DNA, 25 bp, Homo sapien
cttcaatcaccccaacatcctttac

SEQ ID NO: 195948 - DNA, 25 bp, Homo sapien
tctgagggagtagggtgctaagcat

SEQ ID NO: 195949 - DNA, 25 bp, Homo sapien
gctgcttccgttctttaagagagat

SEQ ID NO: 195950 - DNA, 25 bp, Homo sapien
ctcacggcttactgtctgagggagt

SEQ ID NO: 195951 - DNA, 25 bp, Homo sapien
cagctgctgcttccgttctttaaga

SEQ ID NO: 195952 - DNA, 25 bp, Homo sapien
ggccgaaggacgatggcaacttcct

SEQ ID NO: 195953 - DNA, 25 bp, Homo sapien
ggcaacttcctgacttaggatcaaa

SEQ ID NO: 195954 - DNA, 25 bp, Homo sapien
agaaaggccgaaggacgatggcaac

SEQ ID NO: 195955 - DNA, 25 bp, Homo sapien
gacgatggcaacttcctgacttagg

SEQ ID NO: 195956 - DNA, 25 bp, Homo sapien
gaaggcccttacgaaatggtgttca

SEQ ID NO: 195957 - DNA, 25 bp, Homo sapien
tcaagcatgcctcacatgaagggct

SEQ ID NO: 195958 - DNA, 25 bp, Homo sapien
ggtccctgggctgtgtgatatatgc

SEQ ID NO: 195959 - DNA, 25 bp, Homo sapien
tactgagccctagagctcttccctg

SEQ ID NO: 195960 - DNA, 25 bp, Homo sapien
cagtaatcactgtagaaacgttgat

SEQ ID NO: 195961 - DNA, 25 bp, Homo sapien
tgtagaaacgttgatcactaataat

SEQ ID NO: 195962 - DNA, 25 bp, Homo sapien
tcactgtagaaacgttgatcactaa

SEQ ID NO: 195963 - DNA, 25 bp, Homo sapien
taacaacagtaatcactgtagaaac

SEQ ID NO: 195964 - DNA, 25 bp, Homo sapien
tcaataacacctccaaggaggaaaa

SEQ ID NO: 195965 - DNA, 25 bp, Homo sapien
ttccaccacagatcgttcaatcatg

SEQ ID NO: 195966 - DNA, 25 bp, Homo sapien
gcttccaccacagatcgttcaatca

SEQ ID NO: 195967 - DNA, 25 bp, Homo sapien
gatcgttcaatcatgtttgatgaca

SEQ ID NO: 195968 - DNA, 25 bp, Homo sapien
ccacagatcgttcaatcatgtttga

SEQ ID NO: 195969 - DNA, 25 bp, Homo sapien
ttttccagtttatcttcaagctcta

SEQ ID NO: 195970 - DNA, 25 bp, Homo sapien
tcttcaagctctaattcactgatag

SEQ ID NO: 195971 - DNA, 25 bp, Homo sapien
cagtttatcttcaagctctaattca

SEQ ID NO: 195972 - DNA, 25 bp, Homo sapien
caagctctaattcactgatagactg

SEQ ID NO: 195973 - DNA, 25 bp, Homo sapien
aagccccgcaacttgaaggcggaga

SEQ ID NO: 195974 - DNA, 25 bp, Homo sapien
ccgcaacttgaaggcggagagcgcc

SEQ ID NO: 195975 - DNA, 25 bp, Homo sapien
ccccgcaacttgaaggcggagagcg

SEQ ID NO: 195976 - DNA, 25 bp, Homo sapien
agcaagccccgcaacttgaaggcgg

SEQ ID NO: 195977 - DNA, 25 bp, Homo sapien
aatatggattcctcagtcagacatg

SEQ ID NO: 195978 - DNA, 25 bp, Homo sapien
tagctccccttcttataattatttg

SEQ ID NO: 195979 - DNA, 25 bp, Homo sapien
taaaccttagactcatacagtagct

SEQ ID NO: 195980 - DNA, 25 bp, Homo sapien
catgaggctactggaacctaatgcc

SEQ ID NO: 195981 - DNA, 25 bp, Homo sapien
tgggccagccttcgagagctatgag

SEQ ID NO: 195982 - DNA, 25 bp, Homo sapien
tcaagatggctgatggcaacgagga

SEQ ID NO: 195983 - DNA, 25 bp, Homo sapien
tagcaaaagtgcagcctcaagatgg

SEQ ID NO: 195984 - DNA, 25 bp, Homo sapien
gatctgcgggctgacgacttgcctg

SEQ ID NO: 195985 - DNA, 25 bp, Homo sapien
caacatggagactggaagatggtaa

SEQ ID NO: 195986 - DNA, 25 bp, Homo sapien
tatctgcctagagaagaactatgga

SEQ ID NO: 195987 - DNA, 25 bp, Homo sapien
tatatgacttttatctgcctagaga

SEQ ID NO: 195988 - DNA, 25 bp, Homo sapien
gatctacaacatggagactggaaga

SEQ ID NO: 195989 - DNA, 25 bp, Homo sapien
caacactgaaggtgatgttcctcct

SEQ ID NO: 195990 - DNA, 25 bp, Homo sapien
tgtgtagacagggtgctgtacttgt

SEQ ID NO: 195991 - DNA, 25 bp, Homo sapien
tcctccttctatgtcaggaagctgt

SEQ ID NO: 195992 - DNA, 25 bp, Homo sapien
gtagacagggtgctgtacttgtttg

SEQ ID NO: 195993 - DNA, 25 bp, Homo sapien
tagagactgatgagacggcttatag

SEQ ID NO: 195994 - DNA, 25 bp, Homo sapien
cttaatctggatacatgggagtgga

SEQ ID NO: 195995 - DNA, 25 bp, Homo sapien
tgaagggctacaacatgcaaagggc

SEQ ID NO: 195996 - DNA, 25 bp, Homo sapien
gaacctggagcacttaagagccctg

SEQ ID NO: 195997 - DNA, 25 bp, Homo sapien
cagttggccctacctatggaagaag

SEQ ID NO: 195998 - DNA, 25 bp, Homo sapien
cgttctgtgtaaggccagttggccc

SEQ ID NO: 195999 - DNA, 25 bp, Homo sapien
aagaagaaggcatatactactcagc

SEQ ID NO: 196000 - DNA, 25 bp, Homo sapien
ttcaccatccctcagacgttctgtg

SEQ ID NO: 196001 - DNA, 25 bp, Homo sapien
catgtgaatggcctagagaacctat

SEQ ID NO: 196002 - DNA, 25 bp, Homo sapien
tatgatcaccttgcatggacagcaa

SEQ ID NO: 196003 - DNA, 25 bp, Homo sapien
tgttagccaactcatggaactgcct

SEQ ID NO: 196004 - DNA, 25 bp, Homo sapien
taaatgcaggttatggcacacagct

SEQ ID NO: 196005 - DNA, 25 bp, Homo sapien
ggtgctgtccagtcaattaaaaagt

SEQ ID NO: 196006 - DNA, 25 bp, Homo sapien
cattatgacgaagctggaaaaacaa

SEQ ID NO: 196007 - DNA, 25 bp, Homo sapien
tcatgctgaatacaggcaggtgctg

SEQ ID NO: 196008 - DNA, 25 bp, Homo sapien
tgtggagggaccaacaactgttcag

SEQ ID NO: 196009 - DNA, 25 bp, Homo sapien
tataatgcggaaatcctgatacatg

SEQ ID NO: 196010 - DNA, 25 bp, Homo sapien
tagtggtaagcctaaaatgcgcttc

SEQ ID NO: 196011 - DNA, 25 bp, Homo sapien
tataggttaagatactctaacgtgc

SEQ ID NO: 196012 - DNA, 25 bp, Homo sapien
ttaaaccccttgtagctggcctata

SEQ ID NO: 196013 - DNA, 25 bp, Homo sapien
tcagaagattgggtgcagacacttt

SEQ ID NO: 196014 - DNA, 25 bp, Homo sapien
tttacattcagaagattgggtgcag

SEQ ID NO: 196015 - DNA, 25 bp, Homo sapien
ttcactttgccaggaatgtttcttg

SEQ ID NO: 196016 - DNA, 25 bp, Homo sapien
gaatgtttcttgataaatctgtgtc

SEQ ID NO: 196017 - DNA, 25 bp, Homo sapien
tacgctgcggaataagtctttttct

SEQ ID NO: 196018 - DNA, 25 bp, Homo sapien
ttacgctgcggaataagtctttttc

SEQ ID NO: 196019 - DNA, 25 bp, Homo sapien
cgctgcggaataagtctttttctct

SEQ ID NO: 196020 - DNA, 25 bp, Homo sapien
ctttacgctgcggaataagtctttt

SEQ ID NO: 196021 - DNA, 25 bp, Homo sapien
taagaataatctactgttaagtcac

SEQ ID NO: 196022 - DNA, 25 bp, Homo sapien
gtaagaataatctactgttaagtca

SEQ ID NO: 196023 - DNA, 25 bp, Homo sapien
gagtaagaataatctactgttaagt

SEQ ID NO: 196024 - DNA, 25 bp, Homo sapien
aagagtaagaataatctactgttaa

SEQ ID NO: 196025 - DNA, 25 bp, Homo sapien
ctccaggagtaagtttcactttata

SEQ ID NO: 196026 - DNA, 25 bp, Homo sapien
tccaggagtaagtttcactttatat

SEQ ID NO: 196027 - DNA, 25 bp, Homo sapien
taaatagacgttacaaaacaattca

SEQ ID NO: 196028 - DNA, 25 bp, Homo sapien
aaaggaattacatgtgttactaaat

SEQ ID NO: 196029 - DNA, 25 bp, Homo sapien
agccattctgtcaactaatggtaac

SEQ ID NO: 196030 - DNA, 25 bp, Homo sapien
caaaagccattctgtcaactaatgg

SEQ ID NO: 196031 - DNA, 25 bp, Homo sapien
caggatgtggctggcctgtcaaaga

SEQ ID NO: 196032 - DNA, 25 bp, Homo sapien
tgtggctggcctgtcaaagaatcaa

SEQ ID NO: 196033 - DNA, 25 bp, Homo sapien
gggcacatattggaatggcaaacag

SEQ ID NO: 196034 - DNA, 25 bp, Homo sapien
tcatggtggtgtaaggggcacatat

SEQ ID NO: 196035 - DNA, 25 bp, Homo sapien
aactctgcttcatagttccaaagag

SEQ ID NO: 196036 - DNA, 25 bp, Homo sapien
tttgcctagcataataagtaatgag

SEQ ID NO: 196037 - DNA, 25 bp, Homo sapien
tcctacctacagttacatttaagag

SEQ ID NO: 196038 - DNA, 25 bp, Homo sapien
ggaacagtggtacttaaactctgct

SEQ ID NO: 196039 - DNA, 25 bp, Homo sapien
taaaggccgaggatgtcgctaaaca

SEQ ID NO: 196040 - DNA, 25 bp, Homo sapien
tggaaatgggactaataccttggct

SEQ ID NO: 196041 - DNA, 25 bp, Homo sapien
gaaaccctgggctagaacagccttc

SEQ ID NO: 196042 - DNA, 25 bp, Homo sapien
gattctgccctcagaagacaatggg

SEQ ID NO: 196043 - DNA, 25 bp, Homo sapien
cctgttgatccagatcttgctcttc

SEQ ID NO: 196044 - DNA, 25 bp, Homo sapien
ctcatttccctgttgatccagatct

SEQ ID NO: 196045 - DNA, 25 bp, Homo sapien
catttccctgttgatccagatcttg

SEQ ID NO: 196046 - DNA, 25 bp, Homo sapien
tccctgttgatccagatcttgctct

SEQ ID NO: 196047 - DNA, 25 bp, Homo sapien
gggcctcaaggttatattcttccta

SEQ ID NO: 196048 - DNA, 25 bp, Homo sapien
tcattcaagagaagaagggtagttc

SEQ ID NO: 196049 - DNA, 25 bp, Homo sapien
ctgtcatttctgacccacaggatag

SEQ ID NO: 196050 - DNA, 25 bp, Homo sapien
gaaagaaacagtgatacaaccagac

SEQ ID NO: 196051 - DNA, 25 bp, Homo sapien
taactcatgagttataacctcaagg

SEQ ID NO: 196052 - DNA, 25 bp, Homo sapien
gagaccctctgtccacctctaggtt

SEQ ID NO: 196053 - DNA, 25 bp, Homo sapien
tctttcttaatgttgtcagagaccc

SEQ ID NO: 196054 - DNA, 25 bp, Homo sapien
ggctgtttcttcacaggttcgtcct

SEQ ID NO: 196055 - DNA, 25 bp, Homo sapien
caacttcatgataagttcacggtct

SEQ ID NO: 196056 - DNA, 25 bp, Homo sapien
ccccagcaacttcatgataagttca

SEQ ID NO: 196057 - DNA, 25 bp, Homo sapien
cagcaacttcatgataagttcacgg

SEQ ID NO: 196058 - DNA, 25 bp, Homo sapien
gcaacttcatgataagttcacggtc

SEQ ID NO: 196059 - DNA, 25 bp, Homo sapien
gtggtaccgttttcacatggttagc

SEQ ID NO: 196060 - DNA, 25 bp, Homo sapien
tactacctcatagggaaatccctcc

SEQ ID NO: 196061 - DNA, 25 bp, Homo sapien
taaatatcaggtagtggtcctctgt

SEQ ID NO: 196062 - DNA, 25 bp, Homo sapien
cacctgcaattcactgtggtaccgt

SEQ ID NO: 196063 - DNA, 25 bp, Homo sapien
cacagccgcaacatttttgcttgtg

SEQ ID NO: 196064 - DNA, 25 bp, Homo sapien
gcttgtgttctgatgagtttcaatg

SEQ ID NO: 196065 - DNA, 25 bp, Homo sapien
taaatctcctgagtcacttggaagt

SEQ ID NO: 196066 - DNA, 25 bp, Homo sapien
gctgcacagccgcaacatttttgct

SEQ ID NO: 196067 - DNA, 25 bp, Homo sapien
cttagtgccctaaaaaagttccatg

SEQ ID NO: 196068 - DNA, 25 bp, Homo sapien
aagctcaacatattgtcacccctga

SEQ ID NO: 196069 - DNA, 25 bp, Homo sapien
gactcatccttactcactaggcaca

SEQ ID NO: 196070 - DNA, 25 bp, Homo sapien
gatgcaagtttttcatctctcatgg

SEQ ID NO: 196071 - DNA, 25 bp, Homo sapien
cactgggatttgtagtctttgtacc

SEQ ID NO: 196072 - DNA, 25 bp, Homo sapien
tagtctttgtaccaacatagcattg

SEQ ID NO: 196073 - DNA, 25 bp, Homo sapien
acatagcattggcaggtcttaggca

SEQ ID NO: 196074 - DNA, 25 bp, Homo sapien
aggcactgggatttgtagtctttgt

SEQ ID NO: 196075 - DNA, 25 bp, Homo sapien
aaaacatctgttgaccggttggttg

SEQ ID NO: 196076 - DNA, 25 bp, Homo sapien
ataaaacatctgttgaccggttggt

SEQ ID NO: 196077 - DNA, 25 bp, Homo sapien
aaacatctgttgaccggttggttga

SEQ ID NO: 196078 - DNA, 25 bp, Homo sapien
tcagaagatcgagacaatcctgcct

SEQ ID NO: 196079 - DNA, 25 bp, Homo sapien
tgcctaacacggtgaaaccccatct

SEQ ID NO: 196080 - DNA, 25 bp, Homo sapien
cagaagatcgagacaatcctgccta

SEQ ID NO: 196081 - DNA, 25 bp, Homo sapien
tcctgcctaacacggtgaaacccca

SEQ ID NO: 196082 - DNA, 25 bp, Homo sapien
gcccatggcaaaactggtttcatta

SEQ ID NO: 196083 - DNA, 25 bp, Homo sapien
tgtttttgaacctcatggtagtagg

SEQ ID NO: 196084 - DNA, 25 bp, Homo sapien
ttacacactgtttcccttaagtcca

SEQ ID NO: 196085 - DNA, 25 bp, Homo sapien
taggaggtactctatagttttcact

SEQ ID NO: 196086 - DNA, 25 bp, Homo sapien
tccggctctgtgatttactgtcact

SEQ ID NO: 196087 - DNA, 25 bp, Homo sapien
tgacaaatgtctccggctctgtgat

SEQ ID NO: 196088 - DNA, 25 bp, Homo sapien
aaatgtctccggctctgtgatttac

SEQ ID NO: 196089 - DNA, 25 bp, Homo sapien
ttggctgacaaatgtctccggctct

SEQ ID NO: 196090 - DNA, 25 bp, Homo sapien
gaagattcctcttttgaagccaatt

SEQ ID NO: 196091 - DNA, 25 bp, Homo sapien
agattcctcttttgaagccaatttc

SEQ ID NO: 196092 - DNA, 25 bp, Homo sapien
aagattcctcttttgaagccaattt

SEQ ID NO: 196093 - DNA, 25 bp, Homo sapien
caagtcaatggtagtatcaggataa

SEQ ID NO: 196094 - DNA, 25 bp, Homo sapien
aaggtgagacaagtcaatggtagta

SEQ ID NO: 196095 - DNA, 25 bp, Homo sapien
gagacaagtcaatggtagtatcagg

SEQ ID NO: 196096 - DNA, 25 bp, Homo sapien
tagtatcaggataatttaatgtctc

SEQ ID NO: 196097 - DNA, 25 bp, Homo sapien
gagtgatatcctcttggtcaacctg

SEQ ID NO: 196098 - DNA, 25 bp, Homo sapien
tagttcatctctgccactctgaaga

SEQ ID NO: 196099 - DNA, 25 bp, Homo sapien
agttcatctctgccactctgaagag

SEQ ID NO: 196100 - DNA, 25 bp, Homo sapien
tctttatcctcatcactgctcgtgt

SEQ ID NO: 196101 - DNA, 25 bp, Homo sapien
tcatcactgctcgtgtcacctccat

SEQ ID NO: 196102 - DNA, 25 bp, Homo sapien
gagttctacttccacaggagtttca

SEQ ID NO: 196103 - DNA, 25 bp, Homo sapien
gttctacttccacaggagtttcatg

SEQ ID NO: 196104 - DNA, 25 bp, Homo sapien
tgggactaccaaccaagccaggtga

SEQ ID NO: 196105 - DNA, 25 bp, Homo sapien
tagtaacagggtctactgcctcacc

SEQ ID NO: 196106 - DNA, 25 bp, Homo sapien
tatataacgcccacatagcaggtgc

SEQ ID NO: 196107 - DNA, 25 bp, Homo sapien
taaggaaagtcagtgtgggactacc

SEQ ID NO: 196108 - DNA, 25 bp, Homo sapien
aaagaatgtaaataaggcactttat

SEQ ID NO: 196109 - DNA, 25 bp, Homo sapien
taaataaggcactttatacagtccc

SEQ ID NO: 196110 - DNA, 25 bp, Homo sapien
gaatgtaaataaggcactttataca

SEQ ID NO: 196111 - DNA, 25 bp, Homo sapien
tgtaaataaggcactttatacagtc

SEQ ID NO: 196112 - DNA, 25 bp, Homo sapien
caaagagacatgatcttctaaggat

SEQ ID NO: 196113 - DNA, 25 bp, Homo sapien
gattatcccaaagagacatgatctt

SEQ ID NO: 196114 - DNA, 25 bp, Homo sapien
ttagattatcccaaagagacatgat

SEQ ID NO: 196115 - DNA, 25 bp, Homo sapien
gatcttctaaggatttagaagcaaa

SEQ ID NO: 196116 - DNA, 25 bp, Homo sapien
tatgagttcacttgtacaacttgcc

SEQ ID NO: 196117 - DNA, 25 bp, Homo sapien
cttgtacaacttgccagtgtctcca

SEQ ID NO: 196118 - DNA, 25 bp, Homo sapien
tcttctgatatgagttcacttgtac

SEQ ID NO: 196119 - DNA, 25 bp, Homo sapien
gagttcacttgtacaacttgccagt

SEQ ID NO: 196120 - DNA, 25 bp, Homo sapien
gtcttcatcctgtactctgactttt

SEQ ID NO: 196121 - DNA, 25 bp, Homo sapien
caccctgatgtctccaaacacaaga

SEQ ID NO: 196122 - DNA, 25 bp, Homo sapien
tttcgttcaccctgatgtctccaaa

SEQ ID NO: 196123 - DNA, 25 bp, Homo sapien
ttcatcctgtactctgacttttcgt

SEQ ID NO: 196124 - DNA, 25 bp, Homo sapien
taaataaccaagaagttgaagagta

SEQ ID NO: 196125 - DNA, 25 bp, Homo sapien
cagacaagactaatgaaaatcagga

SEQ ID NO: 196126 - DNA, 25 bp, Homo sapien
ttttcagtgacggagcttcagacaa

SEQ ID NO: 196127 - DNA, 25 bp, Homo sapien
gagcttcagacaagactaatgaaaa

SEQ ID NO: 196128 - DNA, 25 bp, Homo sapien
ccccatcattagatatgagggagga

SEQ ID NO: 196129 - DNA, 25 bp, Homo sapien
taaaccccatcattagatatgaggg

SEQ ID NO: 196130 - DNA, 25 bp, Homo sapien
gaagctaaaccccatcattagatat

SEQ ID NO: 196131 - DNA, 25 bp, Homo sapien
aaaggaagctaaaccccatcattag

SEQ ID NO: 196132 - DNA, 25 bp, Homo sapien
taagttcaggctatcctttcttacc

SEQ ID NO: 196133 - DNA, 25 bp, Homo sapien
taaactatgtgaaagtgcactgccc

SEQ ID NO: 196134 - DNA, 25 bp, Homo sapien
tacacacttgctctgatattctggg

SEQ ID NO: 196135 - DNA, 25 bp, Homo sapien
gtgtcagatgacactaatggtcata

SEQ ID NO: 196136 - DNA, 25 bp, Homo sapien
tccattgacaagtctagtgatattt

SEQ ID NO: 196137 - DNA, 25 bp, Homo sapien
tgttctaagagtatttgtaaactgt

SEQ ID NO: 196138 - DNA, 25 bp, Homo sapien
tacttcatagcagacttcacatagg

SEQ ID NO: 196139 - DNA, 25 bp, Homo sapien
aacactaaacttgtcacaccaaggc

SEQ ID NO: 196140 - DNA, 25 bp, Homo sapien
atgaagcttcctgttgtcaaatatt

SEQ ID NO: 196141 - DNA, 25 bp, Homo sapien
ctttgtctatatgaaatagcagatt

SEQ ID NO: 196142 - DNA, 25 bp, Homo sapien
caggcatgaggcaaaagtaaccttt

SEQ ID NO: 196143 - DNA, 25 bp, Homo sapien
tttggcaaaacagaaagtgagtaaa

SEQ ID NO: 196144 - DNA, 25 bp, Homo sapien
gaaagtgagtaaacttatcccataa

SEQ ID NO: 196145 - DNA, 25 bp, Homo sapien
tgccagcttcagtcaaggtccgtgg

SEQ ID NO: 196146 - DNA, 25 bp, Homo sapien
gataactcgtgcatcccaagcagca

SEQ ID NO: 196147 - DNA, 25 bp, Homo sapien
caaagtgccattgtgccagcttcag

SEQ ID NO: 196148 - DNA, 25 bp, Homo sapien
gatgatggtacacccaccaagcact

SEQ ID NO: 196149 - DNA, 25 bp, Homo sapien
taacaatgcataatgtttcaatacc

SEQ ID NO: 196150 - DNA, 25 bp, Homo sapien
taccaaagtatggactttctccaga

SEQ ID NO: 196151 - DNA, 25 bp, Homo sapien
caagatatgaaaatcacatgccgca

SEQ ID NO: 196152 - DNA, 25 bp, Homo sapien
gcaagatatgaaaatcacatgccgc

SEQ ID NO: 196153 - DNA, 25 bp, Homo sapien
gcatcatcaccagcacatgttagtg

SEQ ID NO: 196154 - DNA, 25 bp, Homo sapien
tgtatcattgtccattcctaccagc

SEQ ID NO: 196155 - DNA, 25 bp, Homo sapien
tgtgtagacacatacctttgctcat

SEQ ID NO: 196156 - DNA, 25 bp, Homo sapien
cagcagtattctatgttctccacca

SEQ ID NO: 196157 - DNA, 25 bp, Homo sapien
aggtctaacctcaatcttttgcatg

SEQ ID NO: 196158 - DNA, 25 bp, Homo sapien
cttttaagtttaggtcttggatgca

SEQ ID NO: 196159 - DNA, 25 bp, Homo sapien
taaaaagttaagccactgactggca

SEQ ID NO: 196160 - DNA, 25 bp, Homo sapien
tataaatggtgtgattaagaggtct

SEQ ID NO: 196161 - DNA, 25 bp, Homo sapien
tgagggaaatcactatacattctgc

SEQ ID NO: 196162 - DNA, 25 bp, Homo sapien
gggaggctacgcatgcatgcagcag

SEQ ID NO: 196163 - DNA, 25 bp, Homo sapien
atatcgataataggggaggctacgc

SEQ ID NO: 196164 - DNA, 25 bp, Homo sapien
actctgggccataatgatgtgtcaa

SEQ ID NO: 196165 - DNA, 25 bp, Homo sapien
tgtttactgatctcatatcctggac

SEQ ID NO: 196166 - DNA, 25 bp, Homo sapien
gaggaggaaggtacccaatctttca

SEQ ID NO: 196167 - DNA, 25 bp, Homo sapien
taatgacctatatagaaccaccagt

SEQ ID NO: 196168 - DNA, 25 bp, Homo sapien
tatcctggacattgctgaacttgtt

SEQ ID NO: 196169 - DNA, 25 bp, Homo sapien
tcaccccattatagtcagaaaactt

SEQ ID NO: 196170 - DNA, 25 bp, Homo sapien
tggtttctaatttcaccccattata

SEQ ID NO: 196171 - DNA, 25 bp, Homo sapien
aacttactttgtctaatttcaacag

SEQ ID NO: 196172 - DNA, 25 bp, Homo sapien
tccacatacttacgaatttaaaaca

SEQ ID NO: 196173 - DNA, 25 bp, Homo sapien
gactatcctatggtctaccccagag

SEQ ID NO: 196174 - DNA, 25 bp, Homo sapien
acttaagaatacagggtgagcaccc

SEQ ID NO: 196175 - DNA, 25 bp, Homo sapien
ccagccgaggcttgttttatagact

SEQ ID NO: 196176 - DNA, 25 bp, Homo sapien
gatgactcaaagaaaatgcccactg

SEQ ID NO: 196177 - DNA, 25 bp, Homo sapien
catctggccctctattaaatttttg

SEQ ID NO: 196178 - DNA, 25 bp, Homo sapien
acatctggccctctattaaattttt

SEQ ID NO: 196179 - DNA, 25 bp, Homo sapien
gttggattcttaattacacagctag

SEQ ID NO: 196180 - DNA, 25 bp, Homo sapien
ttggattcttaattacacagctagt

SEQ ID NO: 196181 - DNA, 25 bp, Homo sapien
tgttggattcttaattacacagcta

SEQ ID NO: 196182 - DNA, 25 bp, Homo sapien
tggattcttaattacacagctagta

SEQ ID NO: 196183 - DNA, 25 bp, Homo sapien
aaatgacactttaagtcctaattat

SEQ ID NO: 196184 - DNA, 25 bp, Homo sapien
atgacactttaagtcctaattattc

SEQ ID NO: 196185 - DNA, 25 bp, Homo sapien
aatgacactttaagtcctaattatt

SEQ ID NO: 196186 - DNA, 25 bp, Homo sapien
tcattctgttgctgatctcgtccac

SEQ ID NO: 196187 - DNA, 25 bp, Homo sapien
ttctctgagctaatgaaccacagaa

SEQ ID NO: 196188 - DNA, 25 bp, Homo sapien
gctgtgatcagacttaagaagctga

SEQ ID NO: 196189 - DNA, 25 bp, Homo sapien
cagacttaagaagctgaatcctaag

SEQ ID NO: 196190 - DNA, 25 bp, Homo sapien
tgtgatcagacttaagaagctgaat

SEQ ID NO: 196191 - DNA, 25 bp, Homo sapien
gatcagacttaagaagctgaatcct

SEQ ID NO: 196192 - DNA, 25 bp, Homo sapien
gtgtgtttgttgaaatgacacattt

SEQ ID NO: 196193 - DNA, 25 bp, Homo sapien
ttttgacagcaggcaagtgtctgtg

SEQ ID NO: 196194 - DNA, 25 bp, Homo sapien
tccttttgacagcaggcaagtgtct

SEQ ID NO: 196195 - DNA, 25 bp, Homo sapien
tgtgtttgttgaaatgacacatttg

SEQ ID NO: 196196 - DNA, 25 bp, Homo sapien
ctttttgaatagaggtaacagtctg

SEQ ID NO: 196197 - DNA, 25 bp, Homo sapien
tgctttttgaatagaggtaacagtc

SEQ ID NO: 196198 - DNA, 25 bp, Homo sapien
tttttgaatagaggtaacagtctga

SEQ ID NO: 196199 - DNA, 25 bp, Homo sapien
tttgaatagaggtaacagtctgaac

SEQ ID NO: 196200 - DNA, 25 bp, Homo sapien
ggctctgaattgtattaagatggga

SEQ ID NO: 196201 - DNA, 25 bp, Homo sapien
gggaggagatctcccgtccttcttg

SEQ ID NO: 196202 - DNA, 25 bp, Homo sapien
cccagtgtagccagaaagagtgtat

SEQ ID NO: 196203 - DNA, 25 bp, Homo sapien
ttcttgcaggataggagaagggctc

SEQ ID NO: 196204 - DNA, 25 bp, Homo sapien
ttgtgttttcttagcagcatatctc

SEQ ID NO: 196205 - DNA, 25 bp, Homo sapien
tgtgttttcttagcagcatatctct

SEQ ID NO: 196206 - DNA, 25 bp, Homo sapien
gtgttttcttagcagcatatctctt

SEQ ID NO: 196207 - DNA, 25 bp, Homo sapien
tttgtgttttcttagcagcatatct

SEQ ID NO: 196208 - DNA, 25 bp, Homo sapien
tcaacattgacgtcaccatcaacat

SEQ ID NO: 196209 - DNA, 25 bp, Homo sapien
ttttggcattggcatatgctgacaa

SEQ ID NO: 196210 - DNA, 25 bp, Homo sapien
gatcaacatctacaagtaagggctt

SEQ ID NO: 196211 - DNA, 25 bp, Homo sapien
tgctgacaagctgagatcaacatct

SEQ ID NO: 196212 - DNA, 25 bp, Homo sapien
caatagcatttcactaacgtcaatg

SEQ ID NO: 196213 - DNA, 25 bp, Homo sapien
taaagacaagcattaactgcttgac

SEQ ID NO: 196214 - DNA, 25 bp, Homo sapien
ctgcttgactaagagtcaaacttac

SEQ ID NO: 196215 - DNA, 25 bp, Homo sapien
atggtttacagtactggaagtttca

SEQ ID NO: 196216 - DNA, 25 bp, Homo sapien
aactacctgaatggctctgtcaact

SEQ ID NO: 196217 - DNA, 25 bp, Homo sapien
ttgcaacagggtctccttgagcctg

SEQ ID NO: 196218 - DNA, 25 bp, Homo sapien
taattctttgattgcacttgcaaca

SEQ ID NO: 196219 - DNA, 25 bp, Homo sapien
tagctaaagcacttcgaactacctg

SEQ ID NO: 196220 - DNA, 25 bp, Homo sapien
cacacatttactacattgccagtta

SEQ ID NO: 196221 - DNA, 25 bp, Homo sapien
atttactacattgccagttaaagtt

SEQ ID NO: 196222 - DNA, 25 bp, Homo sapien
cacatttactacattgccagttaaa

SEQ ID NO: 196223 - DNA, 25 bp, Homo sapien
catttactacattgccagttaaagt

SEQ ID NO: 196224 - DNA, 25 bp, Homo sapien
cgtgatcctttcgaacattatctaa

SEQ ID NO: 196225 - DNA, 25 bp, Homo sapien
ccaatctgttttcgtgatcctttcg

SEQ ID NO: 196226 - DNA, 25 bp, Homo sapien
agcttccaatctgttttcgtgatcc

SEQ ID NO: 196227 - DNA, 25 bp, Homo sapien
tctgttttcgtgatcctttcgaaca

SEQ ID NO: 196228 - DNA, 25 bp, Homo sapien
agcttttaagtcaattttctggcct

SEQ ID NO: 196229 - DNA, 25 bp, Homo sapien
ctgttgtaaagcttttaagtcaatt

SEQ ID NO: 196230 - DNA, 25 bp, Homo sapien
tttctggccttctatcttggaataa

SEQ ID NO: 196231 - DNA, 25 bp, Homo sapien
tcttggaataaaattcatccaccgc

SEQ ID NO: 196232 - DNA, 25 bp, Homo sapien
caaattctatatatggacattgtga

SEQ ID NO: 196233 - DNA, 25 bp, Homo sapien
tcaaattctatatatggacattgtg

SEQ ID NO: 196234 - DNA, 25 bp, Homo sapien
caactggtttatctgcttccaagct

SEQ ID NO: 196235 - DNA, 25 bp, Homo sapien
actggtttatctgcttccaagcttg

SEQ ID NO: 196236 - DNA, 25 bp, Homo sapien
aactggtttatctgcttccaagctt

SEQ ID NO: 196237 - DNA, 25 bp, Homo sapien
tactttctataaaagatagggaaca

SEQ ID NO: 196238 - DNA, 25 bp, Homo sapien
actttctataaaagatagggaacag

SEQ ID NO: 196239 - DNA, 25 bp, Homo sapien
ctttctataaaagatagggaacaga

SEQ ID NO: 196240 - DNA, 25 bp, Homo sapien
atgatcctttaatgaacgtttaatt

SEQ ID NO: 196241 - DNA, 25 bp, Homo sapien
ctggaataagcatattacagataac

SEQ ID NO: 196242 - DNA, 25 bp, Homo sapien
tatcctggaataagcatattacaga

SEQ ID NO: 196243 - DNA, 25 bp, Homo sapien
atatagtaagtatacatggtgctac

SEQ ID NO: 196244 - DNA, 25 bp, Homo sapien
ttttcatatagtcttctgctttctg

SEQ ID NO: 196245 - DNA, 25 bp, Homo sapien
tgttttcatatagtcttctgctttc

SEQ ID NO: 196246 - DNA, 25 bp, Homo sapien
ggatgttgttttcatatagtcttct

SEQ ID NO: 196247 - DNA, 25 bp, Homo sapien
ttggatgttgttttcatatagtctt

SEQ ID NO: 196248 - DNA, 25 bp, Homo sapien
ggagtgccaatcaagtgtcaattaa

SEQ ID NO: 196249 - DNA, 25 bp, Homo sapien
taaccgtggctaaacaactatgtag

SEQ ID NO: 196250 - DNA, 25 bp, Homo sapien
aatgttgcgttcaagaaaattagag

SEQ ID NO: 196251 - DNA, 25 bp, Homo sapien
tgcttacaaaataatgttgcgttca

SEQ ID NO: 196252 - DNA, 25 bp, Homo sapien
ttttaattactatagcttcatattt

SEQ ID NO: 196253 - DNA, 25 bp, Homo sapien
ttaattactatagcttcatatttta

SEQ ID NO: 196254 - DNA, 25 bp, Homo sapien
agttttaattactatagcttcatat

SEQ ID NO: 196255 - DNA, 25 bp, Homo sapien
taattactatagcttcatattttaa

SEQ ID NO: 196256 - DNA, 25 bp, Homo sapien
acctgctcccttattactttcccag

SEQ ID NO: 196257 - DNA, 25 bp, Homo sapien
cctgctcccttattactttcccaga

SEQ ID NO: 196258 - DNA, 25 bp, Homo sapien
cacctgctcccttattactttccca

SEQ ID NO: 196259 - DNA, 25 bp, Homo sapien
agtttttcatccactttgacattac

SEQ ID NO: 196260 - DNA, 25 bp, Homo sapien
catccactttgacattacccgagaa

SEQ ID NO: 196261 - DNA, 25 bp, Homo sapien
actttgacattacccgagaatccat

SEQ ID NO: 196262 - DNA, 25 bp, Homo sapien
ttgacattacccgagaatccatttt

SEQ ID NO: 196263 - DNA, 25 bp, Homo sapien
gtgttcaatgagagctggtccatag

SEQ ID NO: 196264 - DNA, 25 bp, Homo sapien
agtgttcaatgagagctggtccata

SEQ ID NO: 196265 - DNA, 25 bp, Homo sapien
aatgcagaggatattacttttagta

SEQ ID NO: 196266 - DNA, 25 bp, Homo sapien
taaatgcagaggatattacttttag

SEQ ID NO: 196267 - DNA, 25 bp, Homo sapien
tataaatgcagaggatattactttt

SEQ ID NO: 196268 - DNA, 25 bp, Homo sapien
ctataaatgcagaggatattacttt

SEQ ID NO: 196269 - DNA, 25 bp, Homo sapien
cctatgaggcttttttcatagaaag

SEQ ID NO: 196270 - DNA, 25 bp, Homo sapien
catagaaagtaacaagtcaactcta

SEQ ID NO: 196271 - DNA, 25 bp, Homo sapien
ttttataaggaaatgctggccgagc

SEQ ID NO: 196272 - DNA, 25 bp, Homo sapien
taatccttatcaaaatcctatgagg

SEQ ID NO: 196273 - DNA, 25 bp, Homo sapien
tcacccttaggtgcgctggctacta

SEQ ID NO: 196274 - DNA, 25 bp, Homo sapien
tcttcagtagttcacccttaggtgc

SEQ ID NO: 196275 - DNA, 25 bp, Homo sapien
tgcgctggctactatttcagtcaac

SEQ ID NO: 196276 - DNA, 25 bp, Homo sapien
tagttcacccttaggtgcgctggct

SEQ ID NO: 196277 - DNA, 25 bp, Homo sapien
attcctgggtcctagactagatcta

SEQ ID NO: 196278 - DNA, 25 bp, Homo sapien
gatctactgaattagcagagggtgg

SEQ ID NO: 196279 - DNA, 25 bp, Homo sapien
atgcaaattcctgggtcctagacta

SEQ ID NO: 196280 - DNA, 25 bp, Homo sapien
atctactgaattagcagagggtggg

SEQ ID NO: 196281 - DNA, 25 bp, Homo sapien
tttccaaagtaagcaaaggttcagc

SEQ ID NO: 196282 - DNA, 25 bp, Homo sapien
gcagctctagcatgatcaagtggat

SEQ ID NO: 196283 - DNA, 25 bp, Homo sapien
caagtggatagcgttcacgaacagc

SEQ ID NO: 196284 - DNA, 25 bp, Homo sapien
gcctcatcagttcgaaaccttagaa

SEQ ID NO: 196285 - DNA, 25 bp, Homo sapien
gatgttcactgaatggctgggcgca

SEQ ID NO: 196286 - DNA, 25 bp, Homo sapien
atgtagcccaatgaagtaactccaa

SEQ ID NO: 196287 - DNA, 25 bp, Homo sapien
gaagtaactccaacactccagtaaa

SEQ ID NO: 196288 - DNA, 25 bp, Homo sapien
taaagatgttcactgaatggctggg

SEQ ID NO: 196289 - DNA, 25 bp, Homo sapien
tcaccatatcccacaaatttaactt

SEQ ID NO: 196290 - DNA, 25 bp, Homo sapien
ccccactcatgttatatagcactat

SEQ ID NO: 196291 - DNA, 25 bp, Homo sapien
tatatagcactattacaaaatgatt

SEQ ID NO: 196292 - DNA, 25 bp, Homo sapien
aaaatgttcccccactcatgttata

SEQ ID NO: 196293 - DNA, 25 bp, Homo sapien
gactaatctccgactcttcaaatgt

SEQ ID NO: 196294 - DNA, 25 bp, Homo sapien
cacaccaagctgttttgcactgact

SEQ ID NO: 196295 - DNA, 25 bp, Homo sapien
gattaaatggtaagcagcttcatca

SEQ ID NO: 196296 - DNA, 25 bp, Homo sapien
aatctacaattctatccacaccaag

SEQ ID NO: 196297 - DNA, 25 bp, Homo sapien
ttctttaagagagtctttgccagga

SEQ ID NO: 196298 - DNA, 25 bp, Homo sapien
tgagcttatggcttatggtatcctg

SEQ ID NO: 196299 - DNA, 25 bp, Homo sapien
tatggtatcctgtaaatagtccacc

SEQ ID NO: 196300 - DNA, 25 bp, Homo sapien
tatatccagttacccctaccaattc

SEQ ID NO: 196301 - DNA, 25 bp, Homo sapien
tatgaattcgtatgccagattcaag

SEQ ID NO: 196302 - DNA, 25 bp, Homo sapien
ttctgttgtatgaattcgtatgcca

SEQ ID NO: 196303 - DNA, 25 bp, Homo sapien
aactagacggcatcatattcttagg

SEQ ID NO: 196304 - DNA, 25 bp, Homo sapien
tattcttaggccactcaaattctgt

SEQ ID NO: 196305 - DNA, 25 bp, Homo sapien
gacgaataaggtatgtcttattatc

SEQ ID NO: 196306 - DNA, 25 bp, Homo sapien
ttttgaagacgaataaggtatgtct

SEQ ID NO: 196307 - DNA, 25 bp, Homo sapien
gaagacgaataaggtatgtcttatt

SEQ ID NO: 196308 - DNA, 25 bp, Homo sapien
aataaggtatgtcttattatccaca

SEQ ID NO: 196309 - DNA, 25 bp, Homo sapien
ctagcattcagctccgcgagtacgg

SEQ ID NO: 196310 - DNA, 25 bp, Homo sapien
tacggcgcggaggtcaatggtgcta

SEQ ID NO: 196311 - DNA, 25 bp, Homo sapien
caatggtgctaaagcggctcttcat

SEQ ID NO: 196312 - DNA, 25 bp, Homo sapien
ttcagctccgcgagtacggcgcgga

SEQ ID NO: 196313 - DNA, 25 bp, Homo sapien
gcagaagacccaatattcctcgagg

SEQ ID NO: 196314 - DNA, 25 bp, Homo sapien
ccgagggtcactaccgcaagttcct

SEQ ID NO: 196315 - DNA, 25 bp, Homo sapien
tcctcgaggcgaacgtatttgtgtc

SEQ ID NO: 196316 - DNA, 25 bp, Homo sapien
tctggttaccgtgccccattgtgtc

SEQ ID NO: 196317 - DNA, 25 bp, Homo sapien
gccgaactcagtgcggacacccgat

SEQ ID NO: 196318 - DNA, 25 bp, Homo sapien
cgaactcagtgcggacacccgatcg

SEQ ID NO: 196319 - DNA, 25 bp, Homo sapien
aactcagtgcggacacccgatcggc

SEQ ID NO: 196320 - DNA, 25 bp, Homo sapien
tgccgaactcagtgcggacacccga

SEQ ID NO: 196321 - DNA, 25 bp, Homo sapien
ccagactgccagactggctcggctc

SEQ ID NO: 196322 - DNA, 25 bp, Homo sapien
agactgccagactggctcggctcac

SEQ ID NO: 196323 - DNA, 25 bp, Homo sapien
cagactgccagactggctcggctca

SEQ ID NO: 196324 - DNA, 25 bp, Homo sapien
cattccttggttagttagcacatag

SEQ ID NO: 196325 - DNA, 25 bp, Homo sapien
gtgggacactaacaactcactgcag

SEQ ID NO: 196326 - DNA, 25 bp, Homo sapien
gagccactacatgcggccaaattta

SEQ ID NO: 196327 - DNA, 25 bp, Homo sapien
caaagctgagttatcccagaggtca

SEQ ID NO: 196328 - DNA, 25 bp, Homo sapien
gacagttatccttgttcaaaatgca

SEQ ID NO: 196329 - DNA, 25 bp, Homo sapien
agtgcttagagtctttaaactccca

SEQ ID NO: 196330 - DNA, 25 bp, Homo sapien
ttgtcctgaagaaccggaatcagac

SEQ ID NO: 196331 - DNA, 25 bp, Homo sapien
taaactcccagtagattatcagatt

SEQ ID NO: 196332 - DNA, 25 bp, Homo sapien
tgtctgtgggtaaacgagcagcccc

SEQ ID NO: 196333 - DNA, 25 bp, Homo sapien
taataacagcttttcgcagagacgt

SEQ ID NO: 196334 - DNA, 25 bp, Homo sapien
gacgttttgaatatgcgccggtagg

SEQ ID NO: 196335 - DNA, 25 bp, Homo sapien
agcgatgaggcggttgcaaatcccc

SEQ ID NO: 196336 - DNA, 25 bp, Homo sapien
gtgcggacacccgatcggcatagcg

SEQ ID NO: 196337 - DNA, 25 bp, Homo sapien
actacagcccagaactcctgggctc

SEQ ID NO: 196338 - DNA, 25 bp, Homo sapien
tgcggacacccgatcggcatagcgc

SEQ ID NO: 196339 - DNA, 25 bp, Homo sapien
gctgcgaaaagctactagaagctgc

SEQ ID NO: 196340 - DNA, 25 bp, Homo sapien
gacgctgcgaaaagctactagaagc

SEQ ID NO: 196341 - DNA, 25 bp, Homo sapien
gcgaaaagctactagaagctgcagg

SEQ ID NO: 196342 - DNA, 25 bp, Homo sapien
agacgctgcgaaaagctactagaag

SEQ ID NO: 196343 - DNA, 25 bp, Homo sapien
agccgttctgccttacagggttggg

SEQ ID NO: 196344 - DNA, 25 bp, Homo sapien
gttagtgtggcgtcatccgagctgg

SEQ ID NO: 196345 - DNA, 25 bp, Homo sapien
gcgtcatccgagctgggcagccgtt

SEQ ID NO: 196346 - DNA, 25 bp, Homo sapien
tgggaccccggaagcttatcggcgc

SEQ ID NO: 196347 - DNA, 25 bp, Homo sapien
tgtgttttgatcagaacaccacgtt

SEQ ID NO: 196348 - DNA, 25 bp, Homo sapien
gtgttttgatcagaacaccacgttc

SEQ ID NO: 196349 - DNA, 25 bp, Homo sapien
ctgtgttttgatcagaacaccacgt

SEQ ID NO: 196350 - DNA, 25 bp, Homo sapien
tgctcatagtgtggcgtccggacac

SEQ ID NO: 196351 - DNA, 25 bp, Homo sapien
gaccatagtagatctgcgaaagcag

SEQ ID NO: 196352 - DNA, 25 bp, Homo sapien
cagtagcacaggttgggagtctgca

SEQ ID NO: 196353 - DNA, 25 bp, Homo sapien
taacctggtccgtcagcgttgcttg

SEQ ID NO: 196354 - DNA, 25 bp, Homo sapien
tgctgggccgtgagagaacacccga

SEQ ID NO: 196355 - DNA, 25 bp, Homo sapien
cctgattgctgggccgtgagagaac

SEQ ID NO: 196356 - DNA, 25 bp, Homo sapien
ttgagccgcacaggccctgattgct

SEQ ID NO: 196357 - DNA, 25 bp, Homo sapien
aggctgaacttgagccgcacaggcc

SEQ ID NO: 196358 - DNA, 25 bp, Homo sapien
aatgactgggttaatgtctaatttt

SEQ ID NO: 196359 - DNA, 25 bp, Homo sapien
agaatgactgggttaatgtctaatt

SEQ ID NO: 196360 - DNA, 25 bp, Homo sapien
gaatgactgggttaatgtctaattt

SEQ ID NO: 196361 - DNA, 25 bp, Homo sapien
catttccacactcataaatcttggt

SEQ ID NO: 196362 - DNA, 25 bp, Homo sapien
ctaggattttacaaccatttccaca

SEQ ID NO: 196363 - DNA, 25 bp, Homo sapien
tttacaaccatttccacactcataa

SEQ ID NO: 196364 - DNA, 25 bp, Homo sapien
gattttacaaccatttccacactca

SEQ ID NO: 196365 - DNA, 25 bp, Homo sapien
gacgtttataaggttatcatataac

SEQ ID NO: 196366 - DNA, 25 bp, Homo sapien
aataagtttatttccgactgaaatg

SEQ ID NO: 196367 - DNA, 25 bp, Homo sapien
cttgatatttgaaggtttcacgtta

SEQ ID NO: 196368 - DNA, 25 bp, Homo sapien
catataacctatctaccattatcta

SEQ ID NO: 196369 - DNA, 25 bp, Homo sapien
ggcagacagggctcaaacattcaaa

SEQ ID NO: 196370 - DNA, 25 bp, Homo sapien
tggcagattccacacgagacactgg

SEQ ID NO: 196371 - DNA, 25 bp, Homo sapien
gaattcgcagagcatctggcgggca

SEQ ID NO: 196372 - DNA, 25 bp, Homo sapien
tcttgacgagacctataggcagaca

SEQ ID NO: 196373 - DNA, 25 bp, Homo sapien
aagtgaggcggtttcctcggcgcct

SEQ ID NO: 196374 - DNA, 25 bp, Homo sapien
agaggtcgctcttgtccgaacggtc

SEQ ID NO: 196375 - DNA, 25 bp, Homo sapien
tgctgcgcctgcgtggtcgggaggg

SEQ ID NO: 196376 - DNA, 25 bp, Homo sapien
ttctctgcaggcagcgcaccgagtt

SEQ ID NO: 196377 - DNA, 25 bp, Homo sapien
caagttcaacgtatgggatgtgggc

SEQ ID NO: 196378 - DNA, 25 bp, Homo sapien
ggcattactacactgggacccaagg

SEQ ID NO: 196379 - DNA, 25 bp, Homo sapien
cttcgggaacaaggaaatgcggatc

SEQ ID NO: 196380 - DNA, 25 bp, Homo sapien
gatcctcatgttgggcctggacgcg

SEQ ID NO: 196381 - DNA, 25 bp, Homo sapien
cgtagataacttaatgctgcataaa

SEQ ID NO: 196382 - DNA, 25 bp, Homo sapien
cacatcatgcatgagtaggaataaa

SEQ ID NO: 196383 - DNA, 25 bp, Homo sapien
ttttttatttcgagagaatctttca

SEQ ID NO: 196384 - DNA, 25 bp, Homo sapien
gcgttaggatgctctgatctgacat

SEQ ID NO: 196385 - DNA, 25 bp, Homo sapien
aaggcagtatacaggaaaaggtgga

SEQ ID NO: 196386 - DNA, 25 bp, Homo sapien
aaccaaatgttaatgcttgatgcag

SEQ ID NO: 196387 - DNA, 25 bp, Homo sapien
tcttcatgtgtaagcagtgtgctcg

SEQ ID NO: 196388 - DNA, 25 bp, Homo sapien
cttgatgcagaattgtaaagcagca

SEQ ID NO: 196389 - DNA, 25 bp, Homo sapien
tataagtaaatgagtctgtagactg

SEQ ID NO: 196390 - DNA, 25 bp, Homo sapien
tagtgttggtaaagcactaatatgc

SEQ ID NO: 196391 - DNA, 25 bp, Homo sapien
tacttggaattgtgttctttatggt

SEQ ID NO: 196392 - DNA, 25 bp, Homo sapien
ctgtgatctccccaaactaaaaagt

SEQ ID NO: 196393 - DNA, 25 bp, Homo sapien
ggccatgtaatctctgtattgttcc

SEQ ID NO: 196394 - DNA, 25 bp, Homo sapien
aattttagtatatgtgctgctgaag

SEQ ID NO: 196395 - DNA, 25 bp, Homo sapien
tgcacaggggccatgtaatctctgt

SEQ ID NO: 196396 - DNA, 25 bp, Homo sapien
agtatatgtgctgctgaagtgagca

SEQ ID NO: 196397 - DNA, 25 bp, Homo sapien
gtcagggactcaccagcagctgagg

SEQ ID NO: 196398 - DNA, 25 bp, Homo sapien
gacacgtcagggactcaccagcagc

SEQ ID NO: 196399 - DNA, 25 bp, Homo sapien
tggcagggaactggacacgtcaggg

SEQ ID NO: 196400 - DNA, 25 bp, Homo sapien
tttttgctggggctagtggtctggg

SEQ ID NO: 196401 - DNA, 25 bp, Homo sapien
tgtagccaagaataaggaagaatat

SEQ ID NO: 196402 - DNA, 25 bp, Homo sapien
gccaagaataaggaagaatatttta

SEQ ID NO: 196403 - DNA, 25 bp, Homo sapien
tagccaagaataaggaagaatattt

SEQ ID NO: 196404 - DNA, 25 bp, Homo sapien
ctgtagccaagaataaggaagaata

SEQ ID NO: 196405 - DNA, 25 bp, Homo sapien
gaaggagagtgtgctccatgcctct

SEQ ID NO: 196406 - DNA, 25 bp, Homo sapien
ctcgctgctggtggtagccctggca

SEQ ID NO: 196407 - DNA, 25 bp, Homo sapien
tgagggttggtccttcttgaggctc

SEQ ID NO: 196408 - DNA, 25 bp, Homo sapien
aggctctgaaggagagtgtgctcca

SEQ ID NO: 196409 - DNA, 25 bp, Homo sapien
ctatcagttacacaggtcaggccta

SEQ ID NO: 196410 - DNA, 25 bp, Homo sapien
gatccggttcctaagtggttcactc

SEQ ID NO: 196411 - DNA, 25 bp, Homo sapien
gggtctacacaagagcatgaaggcc

SEQ ID NO: 196412 - DNA, 25 bp, Homo sapien
tattagttaccacctagggaagagc

SEQ ID NO: 196413 - DNA, 25 bp, Homo sapien
atcttctagtagattcacgtttgcc

SEQ ID NO: 196414 - DNA, 25 bp, Homo sapien
tctagtagattcacgtttgccaact

SEQ ID NO: 196415 - DNA, 25 bp, Homo sapien
ccatgtcaatcttctagtagattca

SEQ ID NO: 196416 - DNA, 25 bp, Homo sapien
tgtcaatcttctagtagattcacgt

SEQ ID NO: 196417 - DNA, 25 bp, Homo sapien
ggctgcatgctgctcccagtactct

SEQ ID NO: 196418 - DNA, 25 bp, Homo sapien
ccagtactctgaaggacccgcctgg

SEQ ID NO: 196419 - DNA, 25 bp, Homo sapien
cccgcctggtgatgatgccatccag

SEQ ID NO: 196420 - DNA, 25 bp, Homo sapien
aaggacccgcctggtgatgatgcca

SEQ ID NO: 196421 - DNA, 25 bp, Homo sapien
cagaagcagggctgcttgctctgag

SEQ ID NO: 196422 - DNA, 25 bp, Homo sapien
gaagcagggctgcttgctctgaggg

SEQ ID NO: 196423 - DNA, 25 bp, Homo sapien
agcagggctgcttgctctgagggct

SEQ ID NO: 196424 - DNA, 25 bp, Homo sapien
catccacagaagcagggctgcttgc

SEQ ID NO: 196425 - DNA, 25 bp, Homo sapien
aaggaagggtcatgagatgggtgaa

SEQ ID NO: 196426 - DNA, 25 bp, Homo sapien
ctttgtgaatcaggcagtgaaggaa

SEQ ID NO: 196427 - DNA, 25 bp, Homo sapien
tcatgagatgggtgaacttgggcat

SEQ ID NO: 196428 - DNA, 25 bp, Homo sapien
ttgtgaatcaggcagtgaaggaagg

SEQ ID NO: 196429 - DNA, 25 bp, Homo sapien
cagaggttggaaagattaatgaaaa

SEQ ID NO: 196430 - DNA, 25 bp, Homo sapien
aataatggtacctagcacagaggtt

SEQ ID NO: 196431 - DNA, 25 bp, Homo sapien
aatggtacctagcacagaggttgga

SEQ ID NO: 196432 - DNA, 25 bp, Homo sapien
ttaatgaaaaaatgtggctgggtgc

SEQ ID NO: 196433 - DNA, 25 bp, Homo sapien
cccctgaagtgactgcagagtctca

SEQ ID NO: 196434 - DNA, 25 bp, Homo sapien
catcttatagtaggtagttgtcgag

SEQ ID NO: 196435 - DNA, 25 bp, Homo sapien
gttgtcgagagaactaaacgtagag

SEQ ID NO: 196436 - DNA, 25 bp, Homo sapien
catgatcacatgagttcctggaaac

SEQ ID NO: 196437 - DNA, 25 bp, Homo sapien
attgctcaggctgtattcaatgaat

SEQ ID NO: 196438 - DNA, 25 bp, Homo sapien
tgagagtattgctcaggctgtattc

SEQ ID NO: 196439 - DNA, 25 bp, Homo sapien
gagtattgctcaggctgtattcaat

SEQ ID NO: 196440 - DNA, 25 bp, Homo sapien
gtattgctcaggctgtattcaatga

SEQ ID NO: 196441 - DNA, 25 bp, Homo sapien
actagtaccgagctatgtatggagc

SEQ ID NO: 196442 - DNA, 25 bp, Homo sapien
ttaacatgctgatctactagtaccg

SEQ ID NO: 196443 - DNA, 25 bp, Homo sapien
gcgtccttcccctgtttcatatgtg

SEQ ID NO: 196444 - DNA, 25 bp, Homo sapien
tgttgagagcctcgtgctaggtagt

SEQ ID NO: 196445 - DNA, 25 bp, Homo sapien
ctcctcctgcgagcattgtcattgg

SEQ ID NO: 196446 - DNA, 25 bp, Homo sapien
cctgcgagcattgtcattgggttag

SEQ ID NO: 196447 - DNA, 25 bp, Homo sapien
cattgggttaggtcctgcacccttc

SEQ ID NO: 196448 - DNA, 25 bp, Homo sapien
cattgtcattgggttaggtcctgca

SEQ ID NO: 196449 - DNA, 25 bp, Homo sapien
ggattgagaaatacagaaatcactt

SEQ ID NO: 196450 - DNA, 25 bp, Homo sapien
ctggattgagaaatacagaaatcac

SEQ ID NO: 196451 - DNA, 25 bp, Homo sapien
tggattgagaaatacagaaatcact

SEQ ID NO: 196452 - DNA, 25 bp, Homo sapien
gattgagaaatacagaaatcacttt

SEQ ID NO: 196453 - DNA, 25 bp, Homo sapien
tgctgagctctgttctaccacacac

SEQ ID NO: 196454 - DNA, 25 bp, Homo sapien
gcagtactctgcgatgtgcttcatc

SEQ ID NO: 196455 - DNA, 25 bp, Homo sapien
tagtgcctgcttacaacaaaagctg

SEQ ID NO: 196456 - DNA, 25 bp, Homo sapien
tataagcttctattttagtgcctgc

SEQ ID NO: 196457 - DNA, 25 bp, Homo sapien
gcagtactcggcacacaatcgtttg

SEQ ID NO: 196458 - DNA, 25 bp, Homo sapien
caatcgtttgttgtgctgactctcc

SEQ ID NO: 196459 - DNA, 25 bp, Homo sapien
tgtgcctgttcactagcagtactcg

SEQ ID NO: 196460 - DNA, 25 bp, Homo sapien
cagttgctcgcaatgtgaggtggat

SEQ ID NO: 196461 - DNA, 25 bp, Homo sapien
gcctggacacttcaggcagagaagc

SEQ ID NO: 196462 - DNA, 25 bp, Homo sapien
caaggcctggacacttcaggcagag

SEQ ID NO: 196463 - DNA, 25 bp, Homo sapien
gacacttcaggcagagaagccctca

SEQ ID NO: 196464 - DNA, 25 bp, Homo sapien
tccaaggcctggacacttcaggcag

SEQ ID NO: 196465 - DNA, 25 bp, Homo sapien
gagtcataatgctaatccagtttgg

SEQ ID NO: 196466 - DNA, 25 bp, Homo sapien
tatgcaacattgtagccacaaagca

SEQ ID NO: 196467 - DNA, 25 bp, Homo sapien
gatctgcttaaacaaagctgtggga

SEQ ID NO: 196468 - DNA, 25 bp, Homo sapien
ggtccaaggcctttcacagagctag

SEQ ID NO: 196469 - DNA, 25 bp, Homo sapien
gccttgacggtctcaatcagaatta

SEQ ID NO: 196470 - DNA, 25 bp, Homo sapien
gggagagaaacttcgctggcacacg

SEQ ID NO: 196471 - DNA, 25 bp, Homo sapien
tgcttgcgcagtgcttcagggctgc

SEQ ID NO: 196472 - DNA, 25 bp, Homo sapien
ttttcttgtagcacactcacgtggg

SEQ ID NO: 196473 - DNA, 25 bp, Homo sapien
tcttagcaccgtgacaaccagcagc

SEQ ID NO: 196474 - DNA, 25 bp, Homo sapien
gctcttagcaccgtgacaaccagca

SEQ ID NO: 196475 - DNA, 25 bp, Homo sapien
ttagcaccgtgacaaccagcagcca

SEQ ID NO: 196476 - DNA, 25 bp, Homo sapien
acagctcttagcaccgtgacaacca

SEQ ID NO: 196477 - DNA, 25 bp, Homo sapien
catccagggtttcttcgctgccaga

SEQ ID NO: 196478 - DNA, 25 bp, Homo sapien
caaaggaaagctcttaaggcgacaa

SEQ ID NO: 196479 - DNA, 25 bp, Homo sapien
tcatgctgttcaactgctcgtaggg

SEQ ID NO: 196480 - DNA, 25 bp, Homo sapien
caagctgcggtatactgggagagaa

SEQ ID NO: 196481 - DNA, 25 bp, Homo sapien
gagtccaggcggtagggctgccaga

SEQ ID NO: 196482 - DNA, 25 bp, Homo sapien
tggaaaggagtccaggcggtagggc

SEQ ID NO: 196483 - DNA, 25 bp, Homo sapien
ctggaaaggagtccaggcggtaggg

SEQ ID NO: 196484 - DNA, 25 bp, Homo sapien
ggcggtagggctgccagagacctgg

SEQ ID NO: 196485 - DNA, 25 bp, Homo sapien
gtttctgcctatgaattactaacag

SEQ ID NO: 196486 - DNA, 25 bp, Homo sapien
cacatttgcctgaggatgtttctat

SEQ ID NO: 196487 - DNA, 25 bp, Homo sapien
acatgttttgttagcattcttccac

SEQ ID NO: 196488 - DNA, 25 bp, Homo sapien
agatgttttgcctctagtgagacaa

SEQ ID NO: 196489 - DNA, 25 bp, Homo sapien
tatggaagagtggacccatgttgca

SEQ ID NO: 196490 - DNA, 25 bp, Homo sapien
catgatgattcggagaagaccagcc

SEQ ID NO: 196491 - DNA, 25 bp, Homo sapien
ggccacaagtgccttatccactaga

SEQ ID NO: 196492 - DNA, 25 bp, Homo sapien
catagttcttgttaccctgggccac

SEQ ID NO: 196493 - DNA, 25 bp, Homo sapien
cagctggacgagacaatgaagaccc

SEQ ID NO: 196494 - DNA, 25 bp, Homo sapien
catggtgacggctttattcttgggc

SEQ ID NO: 196495 - DNA, 25 bp, Homo sapien
catgtaagtgagtagtccggaggtc

SEQ ID NO: 196496 - DNA, 25 bp, Homo sapien
tcacgtgggcttcagataaggcctc

SEQ ID NO: 196497 - DNA, 25 bp, Homo sapien
acagcatggctaggaagtatgggac

SEQ ID NO: 196498 - DNA, 25 bp, Homo sapien
cacaacctgagttatggatgtcctc

SEQ ID NO: 196499 - DNA, 25 bp, Homo sapien
gccaatctctggagctaggatgata

SEQ ID NO: 196500 - DNA, 25 bp, Homo sapien
tcccaaggtctacccagagaattgc

SEQ ID NO: 196501 - DNA, 25 bp, Homo sapien
attcattaattcctcggtagacatt

SEQ ID NO: 196502 - DNA, 25 bp, Homo sapien
cctcggtagacatttcttgggtgct

SEQ ID NO: 196503 - DNA, 25 bp, Homo sapien
ctggttatgtgtcatacactctgca

SEQ ID NO: 196504 - DNA, 25 bp, Homo sapien
ggttatgtgtcatacactctgcagg

SEQ ID NO: 196505 - DNA, 25 bp, Homo sapien
ttccatttttcatggcacaattctt

SEQ ID NO: 196506 - DNA, 25 bp, Homo sapien
aagaatcttccccagtccagcttgt

SEQ ID NO: 196507 - DNA, 25 bp, Homo sapien
tgctgctctcctgacgctggaacag

SEQ ID NO: 196508 - DNA, 25 bp, Homo sapien
cagcttctcaggagttttccatttt

SEQ ID NO: 196509 - DNA, 25 bp, Homo sapien
cgtggtattcgcctctatttaaaat

SEQ ID NO: 196510 - DNA, 25 bp, Homo sapien
tctcccattgggttcaattaacaat

SEQ ID NO: 196511 - DNA, 25 bp, Homo sapien
ctgcaaggataagagaataagagct

SEQ ID NO: 196512 - DNA, 25 bp, Homo sapien
taacccaaatagttcacagcgtggt

SEQ ID NO: 196513 - DNA, 25 bp, Homo sapien
tgtcaaattatgtcacacccattac

SEQ ID NO: 196514 - DNA, 25 bp, Homo sapien
atgtcaaattatgtcacacccatta

SEQ ID NO: 196515 - DNA, 25 bp, Homo sapien
cactgtactgggaaagtaccaggca

SEQ ID NO: 196516 - DNA, 25 bp, Homo sapien
aacctcccagcagagagtcacggtg

SEQ ID NO: 196517 - DNA, 25 bp, Homo sapien
caagttcgtgacgacagtgaccagt

SEQ ID NO: 196518 - DNA, 25 bp, Homo sapien
gactatgtgaattgaatcgtggctc

SEQ ID NO: 196519 - DNA, 25 bp, Homo sapien
gacagagagctcagatagggccctc

SEQ ID NO: 196520 - DNA, 25 bp, Homo sapien
ggtgtgtagccaggctataagctct

SEQ ID NO: 196521 - DNA, 25 bp, Homo sapien
agagagctcagatagggccctctcc

SEQ ID NO: 196522 - DNA, 25 bp, Homo sapien
ctccctggctctactcaggtgtgta

SEQ ID NO: 196523 - DNA, 25 bp, Homo sapien
gataaggaggtatgtagagaccact

SEQ ID NO: 196524 - DNA, 25 bp, Homo sapien
tgcctctgtgactggtcaggacaca

SEQ ID NO: 196525 - DNA, 25 bp, Homo sapien
tcaggacacatgcaaggataaggag

SEQ ID NO: 196526 - DNA, 25 bp, Homo sapien
tctgcttgtccgaagaaccctaata

SEQ ID NO: 196527 - DNA, 25 bp, Homo sapien
tcagtggtaatgtcagtagcgtctc

SEQ ID NO: 196528 - DNA, 25 bp, Homo sapien
ccaggcagccagatggctcattacg

SEQ ID NO: 196529 - DNA, 25 bp, Homo sapien
gatggctcattacgacccacatgta

SEQ ID NO: 196530 - DNA, 25 bp, Homo sapien
agacacctgcccatggatgccttct

SEQ ID NO: 196531 - DNA, 25 bp, Homo sapien
tgtgctgagcatctacagtagcccc

SEQ ID NO: 196532 - DNA, 25 bp, Homo sapien
caggcagtcgtgcaggacgtcatgt

SEQ ID NO: 196533 - DNA, 25 bp, Homo sapien
caaatgcccttatcagtctgcagat

SEQ ID NO: 196534 - DNA, 25 bp, Homo sapien
catggacctgctttcggagttatgc

SEQ ID NO: 196535 - DNA, 25 bp, Homo sapien
tttccaggcattctcacaagaccac

SEQ ID NO: 196536 - DNA, 25 bp, Homo sapien
gattcaatgtgagagatcccctgcc

SEQ ID NO: 196537 - DNA, 25 bp, Homo sapien
ctgccctctagagttttacaggtta

SEQ ID NO: 196538 - DNA, 25 bp, Homo sapien
tcattggagaatgcctactattttc

SEQ ID NO: 196539 - DNA, 25 bp, Homo sapien
caagaagcgcaaatccaaattactc

SEQ ID NO: 196540 - DNA, 25 bp, Homo sapien
cacaggctaaacacggtccacagct

SEQ ID NO: 196541 - DNA, 25 bp, Homo sapien
aattactcgtttcttatgttagcaa

SEQ ID NO: 196542 - DNA, 25 bp, Homo sapien
cttatgttagcaacttcaccctcag

SEQ ID NO: 196543 - DNA, 25 bp, Homo sapien
cattcttgtgggtggtcacttgggc

SEQ ID NO: 196544 - DNA, 25 bp, Homo sapien
caccacgggaatgtaaattgcagga

SEQ ID NO: 196545 - DNA, 25 bp, Homo sapien
ccgtcagaggacgagggcacttttt

SEQ ID NO: 196546 - DNA, 25 bp, Homo sapien
cacttgggccctagattaaaggcag

SEQ ID NO: 196547 - DNA, 25 bp, Homo sapien
acaagggacgctggcctatggaaca

SEQ ID NO: 196548 - DNA, 25 bp, Homo sapien
catttctgctatgggaaggacaagg

SEQ ID NO: 196549 - DNA, 25 bp, Homo sapien
tatggaacaggccaccggagattcc

SEQ ID NO: 196550 - DNA, 25 bp, Homo sapien
ggcacgaagccatggacaagtggat

SEQ ID NO: 196551 - DNA, 25 bp, Homo sapien
ccagttagtcataggtttactgtca

SEQ ID NO: 196552 - DNA, 25 bp, Homo sapien
taggtttactgtcatccaagtttaa

SEQ ID NO: 196553 - DNA, 25 bp, Homo sapien
cagttagtcataggtttactgtcat

SEQ ID NO: 196554 - DNA, 25 bp, Homo sapien
gtttactgtcatccaagtttaagaa

SEQ ID NO: 196555 - DNA, 25 bp, Homo sapien
aggtgattgtatcgccagccctgga

SEQ ID NO: 196556 - DNA, 25 bp, Homo sapien
cgagcagagcccagattacaaggct

SEQ ID NO: 196557 - DNA, 25 bp, Homo sapien
tgggtggtaccttcctgcatgggca

SEQ ID NO: 196558 - DNA, 25 bp, Homo sapien
tccttggacttgaacactctgctct

SEQ ID NO: 196559 - DNA, 25 bp, Homo sapien
cacatcaacttgagtgctccaggag

SEQ ID NO: 196560 - DNA, 25 bp, Homo sapien
gagccagcagggttgcgtgctctca

SEQ ID NO: 196561 - DNA, 25 bp, Homo sapien
gagatcatctttgcagcggtttcct

SEQ ID NO: 196562 - DNA, 25 bp, Homo sapien
tgctctcaggagtaggacacgtcac

SEQ ID NO: 196563 - DNA, 25 bp, Homo sapien
cagaggtatctaaggtgggttccac

SEQ ID NO: 196564 - DNA, 25 bp, Homo sapien
cacagaagtccccagagagtgccct

SEQ ID NO: 196565 - DNA, 25 bp, Homo sapien
gagtgccctggacgacaaaatgtag

SEQ ID NO: 196566 - DNA, 25 bp, Homo sapien
gggatctgcatagtccatctctctc

SEQ ID NO: 196567 - DNA, 25 bp, Homo sapien
taacctaaggaaacacctcactaga

SEQ ID NO: 196568 - DNA, 25 bp, Homo sapien
ggaggtgctacttgcatttcataca

SEQ ID NO: 196569 - DNA, 25 bp, Homo sapien
acacctcactagagagtgcttgggc

SEQ ID NO: 196570 - DNA, 25 bp, Homo sapien
ttacagtgatgatgcaatgcggccc

SEQ ID NO: 196571 - DNA, 25 bp, Homo sapien
cacaactctccccacgccgctctcc

SEQ ID NO: 196572 - DNA, 25 bp, Homo sapien
gcccacaactctccccacgccgctc

SEQ ID NO: 196573 - DNA, 25 bp, Homo sapien
ccacaactctccccacgccgctctc

SEQ ID NO: 196574 - DNA, 25 bp, Homo sapien
tgcccacaactctccccacgccgct

SEQ ID NO: 196575 - DNA, 25 bp, Homo sapien
tgagaatggaggctgaagccccttc

SEQ ID NO: 196576 - DNA, 25 bp, Homo sapien
gcaggattccctcgttccacggttc

SEQ ID NO: 196577 - DNA, 25 bp, Homo sapien
gaaaactcctgatgcttagccaact

SEQ ID NO: 196578 - DNA, 25 bp, Homo sapien
tctgcaactcaaagtcaagggattc

SEQ ID NO: 196579 - DNA, 25 bp, Homo sapien
atagaaaacgcccatggcaacgggc

SEQ ID NO: 196580 - DNA, 25 bp, Homo sapien
acgcccatggcaacgggcaagtgcg

SEQ ID NO: 196581 - DNA, 25 bp, Homo sapien
tcaacatagaaaacgcccatggcaa

SEQ ID NO: 196582 - DNA, 25 bp, Homo sapien
gaaaacgcccatggcaacgggcaag

SEQ ID NO: 196583 - DNA, 25 bp, Homo sapien
aaatggcagagtgtgtgtttcacaa

SEQ ID NO: 196584 - DNA, 25 bp, Homo sapien
gtttcacaaaacaggggtggctcac

SEQ ID NO: 196585 - DNA, 25 bp, Homo sapien
tgaaatggcagagtgtgtgtttcac

SEQ ID NO: 196586 - DNA, 25 bp, Homo sapien
gtgtttcacaaaacaggggtggctc

SEQ ID NO: 196587 - DNA, 25 bp, Homo sapien
tccacgtcgcgccgcggcggtttgg

SEQ ID NO: 196588 - DNA, 25 bp, Homo sapien
ggtcctcggggggtggatgcagctt

SEQ ID NO: 196589 - DNA, 25 bp, Homo sapien
cctcggggggtggatgcagctttgc

SEQ ID NO: 196590 - DNA, 25 bp, Homo sapien
ccgcggcggtttgggctggggagca

SEQ ID NO: 196591 - DNA, 25 bp, Homo sapien
gcaaagtcctgccaagtgtgtagtt

SEQ ID NO: 196592 - DNA, 25 bp, Homo sapien
aattgcttccatgtgcgggcttccc

SEQ ID NO: 196593 - DNA, 25 bp, Homo sapien
gcaatttgactttggacggagagct

SEQ ID NO: 196594 - DNA, 25 bp, Homo sapien
tctctctcagggttaatgtgggaaa

SEQ ID NO: 196595 - DNA, 25 bp, Homo sapien
gctgccctgtagcacattagccagt

SEQ ID NO: 196596 - DNA, 25 bp, Homo sapien
taaagcactgtctaacgagcccatc

SEQ ID NO: 196597 - DNA, 25 bp, Homo sapien
gaactctgggcacggctagatgaac

SEQ ID NO: 196598 - DNA, 25 bp, Homo sapien
tcaagatgcctccaatgctctcggc

SEQ ID NO: 196599 - DNA, 25 bp, Homo sapien
gaaagagataaagcaggcacctgag

SEQ ID NO: 196600 - DNA, 25 bp, Homo sapien
gcagagacagaacacctgagttttc

SEQ ID NO: 196601 - DNA, 25 bp, Homo sapien
gagattctccgtcttggcaaattgc

SEQ ID NO: 196602 - DNA, 25 bp, Homo sapien
ggccccgaagcagcagacacttaaa

SEQ ID NO: 196603 - DNA, 25 bp, Homo sapien
ctgagtggcaagaagacgaaatgtc

SEQ ID NO: 196604 - DNA, 25 bp, Homo sapien
tgtgtcgtagaactgtgtgtgatct

SEQ ID NO: 196605 - DNA, 25 bp, Homo sapien
aagacctctcggttcgtgaatggca

SEQ ID NO: 196606 - DNA, 25 bp, Homo sapien
tgtgtgatcttgaaagacctctcgg

SEQ ID NO: 196607 - DNA, 25 bp, Homo sapien
tccagggttgccatccgacctgtca

SEQ ID NO: 196608 - DNA, 25 bp, Homo sapien
ccagggttgccatccgacctgtcat

SEQ ID NO: 196609 - DNA, 25 bp, Homo sapien
gtcaggctccacacaggttctactg

SEQ ID NO: 196610 - DNA, 25 bp, Homo sapien
aggctccacacaggttctactgctc

SEQ ID NO: 196611 - DNA, 25 bp, Homo sapien
ggcccttagtttcttatccacatgt

SEQ ID NO: 196612 - DNA, 25 bp, Homo sapien
cccttagtttcttatccacatgtgg

SEQ ID NO: 196613 - DNA, 25 bp, Homo sapien
tggtctgtggcccttagtttcttat

SEQ ID NO: 196614 - DNA, 25 bp, Homo sapien
tctgtggcccttagtttcttatcca

SEQ ID NO: 196615 - DNA, 25 bp, Homo sapien
gaatccaacggtgttctccaggctg

SEQ ID NO: 196616 - DNA, 25 bp, Homo sapien
tgtgagcttgtgcaggtcccctcaa

SEQ ID NO: 196617 - DNA, 25 bp, Homo sapien
tccacaatcctggagggaactcagt

SEQ ID NO: 196618 - DNA, 25 bp, Homo sapien
tccgggctcatcaacgattttctag

SEQ ID NO: 196619 - DNA, 25 bp, Homo sapien
tggctgcttcctaaggtgatggcga

SEQ ID NO: 196620 - DNA, 25 bp, Homo sapien
tgaggagtgtaaacggcccaccctg

SEQ ID NO: 196621 - DNA, 25 bp, Homo sapien
ctgcttcctaaggtgatggcgaggt

SEQ ID NO: 196622 - DNA, 25 bp, Homo sapien
atggcgaggtaggatgaggagtgta

SEQ ID NO: 196623 - DNA, 25 bp, Homo sapien
tcaggctgaagttgacttcagtggg

SEQ ID NO: 196624 - DNA, 25 bp, Homo sapien
cactttcggaagtctcccaatcttc

SEQ ID NO: 196625 - DNA, 25 bp, Homo sapien
ttccactttcggaagtctcccaatc

SEQ ID NO: 196626 - DNA, 25 bp, Homo sapien
cttcagtggggcaggcaactgcatg

SEQ ID NO: 196627 - DNA, 25 bp, Homo sapien
ggaacacggagactccaccagcgag

SEQ ID NO: 196628 - DNA, 25 bp, Homo sapien
ccagtttcatgtcgggggcccatca

SEQ ID NO: 196629 - DNA, 25 bp, Homo sapien
ctgagtgccagtttcatgtcggggg

SEQ ID NO: 196630 - DNA, 25 bp, Homo sapien
tggaacacggagactccaccagcga

SEQ ID NO: 196631 - DNA, 25 bp, Homo sapien
gatgtgccgcagcaaaaatcctcac

SEQ ID NO: 196632 - DNA, 25 bp, Homo sapien
aagaagaacagaatggatatttggg

SEQ ID NO: 196633 - DNA, 25 bp, Homo sapien
tctcatgccactccgtgatgtgccg

SEQ ID NO: 196634 - DNA, 25 bp, Homo sapien
cactggaatagctccagtgctggtg

SEQ ID NO: 196635 - DNA, 25 bp, Homo sapien
aggatttaggcccacagaaacattt

SEQ ID NO: 196636 - DNA, 25 bp, Homo sapien
aaggatttaggcccacagaaacatt

SEQ ID NO: 196637 - DNA, 25 bp, Homo sapien
cagaaacattttaggaaacttccag

SEQ ID NO: 196638 - DNA, 25 bp, Homo sapien
gcagagtgcctataattgtgtcttt

SEQ ID NO: 196639 - DNA, 25 bp, Homo sapien
gcctataattgtgtctttgaagagg

SEQ ID NO: 196640 - DNA, 25 bp, Homo sapien
cctataattgtgtctttgaagaggc

SEQ ID NO: 196641 - DNA, 25 bp, Homo sapien
cataggcagagtgcctataattgtg

SEQ ID NO: 196642 - DNA, 25 bp, Homo sapien
gaccacagatttccagagcctgatc

SEQ ID NO: 196643 - DNA, 25 bp, Homo sapien
cctccacagtgtacagcaagtttac

SEQ ID NO: 196644 - DNA, 25 bp, Homo sapien
aacaagatgccaaaagaccaggagg

SEQ ID NO: 196645 - DNA, 25 bp, Homo sapien
ggtcactcgtgtcctccattccatg

SEQ ID NO: 196646 - DNA, 25 bp, Homo sapien
ttctcagggtggcaatgtgcccagt

SEQ ID NO: 196647 - DNA, 25 bp, Homo sapien
aacagactcagtagcacttgccttt

SEQ ID NO: 196648 - DNA, 25 bp, Homo sapien
tgtgcccagttacaaatattcatat

SEQ ID NO: 196649 - DNA, 25 bp, Homo sapien
cattcttgtctggatcacatatgcc

SEQ ID NO: 196650 - DNA, 25 bp, Homo sapien
ggtgctcgtgctccatttctcacaa

SEQ ID NO: 196651 - DNA, 25 bp, Homo sapien
aacacagtttccatagtctgactca

SEQ ID NO: 196652 - DNA, 25 bp, Homo sapien
ccaatcccaagtgccggcgggaaat

SEQ ID NO: 196653 - DNA, 25 bp, Homo sapien
tctctcctcaagtgtggtgctcgtg

SEQ ID NO: 196654 - DNA, 25 bp, Homo sapien
cacatggtggcagaaaaggaaagag

SEQ ID NO: 196655 - DNA, 25 bp, Homo sapien
atggcaggtgaaaagcacatctcac

SEQ ID NO: 196656 - DNA, 25 bp, Homo sapien
cagaaaaggaaagagggcttgttca

SEQ ID NO: 196657 - DNA, 25 bp, Homo sapien
acctgcccccacaattcagtcaccc

SEQ ID NO: 196658 - DNA, 25 bp, Homo sapien
tcaagcagaataacacacaacctgt

SEQ ID NO: 196659 - DNA, 25 bp, Homo sapien
agcagaataacacacaacctgttac

SEQ ID NO: 196660 - DNA, 25 bp, Homo sapien
cacagctcaagcagaataacacaca

SEQ ID NO: 196661 - DNA, 25 bp, Homo sapien
gctcaagcagaataacacacaacct

SEQ ID NO: 196662 - DNA, 25 bp, Homo sapien
ttctcttgttgcctgcttcgtgtct

SEQ ID NO: 196663 - DNA, 25 bp, Homo sapien
gttgcctgcttcgtgtcttccttcc

SEQ ID NO: 196664 - DNA, 25 bp, Homo sapien
ggtcccacttctcattaccgcttca

SEQ ID NO: 196665 - DNA, 25 bp, Homo sapien
tctcattaccgcttcactgccatcc

SEQ ID NO: 196666 - DNA, 25 bp, Homo sapien
ttgaagggatgcagcgtttcaaggc

SEQ ID NO: 196667 - DNA, 25 bp, Homo sapien
tttcaaggccacgaggatgttggtg

SEQ ID NO: 196668 - DNA, 25 bp, Homo sapien
ggaaccatccgatgcttgaagggat

SEQ ID NO: 196669 - DNA, 25 bp, Homo sapien
gcgtttcaaggccacgaggatgttg

SEQ ID NO: 196670 - DNA, 25 bp, Homo sapien
gattagggctgaccttaatgaccac

SEQ ID NO: 196671 - DNA, 25 bp, Homo sapien
caaataaggccatagtctgaggtac

SEQ ID NO: 196672 - DNA, 25 bp, Homo sapien
gacaggagttatattagattagggc

SEQ ID NO: 196673 - DNA, 25 bp, Homo sapien
ggacagaattctatgcatccccagc

SEQ ID NO: 196674 - DNA, 25 bp, Homo sapien
cagacagccccaaaggtttgtaact

SEQ ID NO: 196675 - DNA, 25 bp, Homo sapien
ctttgtgtgattccctgcggcagga

SEQ ID NO: 196676 - DNA, 25 bp, Homo sapien
gaaaaacccatctgcgtagcttgaa

SEQ ID NO: 196677 - DNA, 25 bp, Homo sapien
tagcttgaaaaacccaaggcagggc

SEQ ID NO: 196678 - DNA, 25 bp, Homo sapien
cagaacatagtaaggtggccacata

SEQ ID NO: 196679 - DNA, 25 bp, Homo sapien
gaaggaggctccatgtaatacgctg

SEQ ID NO: 196680 - DNA, 25 bp, Homo sapien
ggtatggcagcccaaggccatcagg

SEQ ID NO: 196681 - DNA, 25 bp, Homo sapien
tgtctcgtccctaatggcttttcag

SEQ ID NO: 196682 - DNA, 25 bp, Homo sapien
aaaaccagattcccctgagctgtgc

SEQ ID NO: 196683 - DNA, 25 bp, Homo sapien
caaaaccagattcccctgagctgtg

SEQ ID NO: 196684 - DNA, 25 bp, Homo sapien
agccaactccactttacaaaaccag

SEQ ID NO: 196685 - DNA, 25 bp, Homo sapien
aaaaccagctccagccagaagtatg

SEQ ID NO: 196686 - DNA, 25 bp, Homo sapien
gggctgtcagaccaggctctccgag

SEQ ID NO: 196687 - DNA, 25 bp, Homo sapien
ctgccgggactggagcagcccaaat

SEQ ID NO: 196688 - DNA, 25 bp, Homo sapien
aaactgcagtagtgtgggtggattt

SEQ ID NO: 196689 - DNA, 25 bp, Homo sapien
gaaactgcagtagtgtgggtggatt

SEQ ID NO: 196690 - DNA, 25 bp, Homo sapien
aactgcagtagtgtgggtggatttt

SEQ ID NO: 196691 - DNA, 25 bp, Homo sapien
ttccccagatgagacaccaagattg

SEQ ID NO: 196692 - DNA, 25 bp, Homo sapien
tgttctctggcaatgaatgacaggc

SEQ ID NO: 196693 - DNA, 25 bp, Homo sapien
gagtccattttgacaccagccaaga

SEQ ID NO: 196694 - DNA, 25 bp, Homo sapien
gacttgtgaaccagttgtgaaaccc

SEQ ID NO: 196695 - DNA, 25 bp, Homo sapien
gaaaaccatgggtgagcagagttga

SEQ ID NO: 196696 - DNA, 25 bp, Homo sapien
ctgggagggcgggagaaaaccatgg

SEQ ID NO: 196697 - DNA, 25 bp, Homo sapien
accaagagattctacctctgctccg

SEQ ID NO: 196698 - DNA, 25 bp, Homo sapien
aacaccaagagattctacctctgct

SEQ ID NO: 196699 - DNA, 25 bp, Homo sapien
agcccaacttcttcaagcagcaggc

SEQ ID NO: 196700 - DNA, 25 bp, Homo sapien
tggcccctgtgctagagaactccaa

SEQ ID NO: 196701 - DNA, 25 bp, Homo sapien
catggcccctgtgctagagaactcc

SEQ ID NO: 196702 - DNA, 25 bp, Homo sapien
gcccctgtgctagagaactccaaga

SEQ ID NO: 196703 - DNA, 25 bp, Homo sapien
cgatgaaggccacaggtgatgtttc

SEQ ID NO: 196704 - DNA, 25 bp, Homo sapien
gatgaaggccacaggtgatgtttct

SEQ ID NO: 196705 - DNA, 25 bp, Homo sapien
ttatgtgagtgcatccatctgcttc

SEQ ID NO: 196706 - DNA, 25 bp, Homo sapien
cacaaccagccacctctaagagaag

SEQ ID NO: 196707 - DNA, 25 bp, Homo sapien
agggctaagccttcacaagccctgc

SEQ ID NO: 196708 - DNA, 25 bp, Homo sapien
gagcctggaactgtggtcacagggc

SEQ ID NO: 196709 - DNA, 25 bp, Homo sapien
gtggagcctggaactgtggtcacag

SEQ ID NO: 196710 - DNA, 25 bp, Homo sapien
caggaagacatccgaatccccatca

SEQ ID NO: 196711 - DNA, 25 bp, Homo sapien
cccaggaagacatccgaatccccat

SEQ ID NO: 196712 - DNA, 25 bp, Homo sapien
caccccaggaagacatccgaatccc

SEQ ID NO: 196713 - DNA, 25 bp, Homo sapien
gaagacatccgaatccccatcaaat

SEQ ID NO: 196714 - DNA, 25 bp, Homo sapien
tgtcctagacttttagcagtgctgt

SEQ ID NO: 196715 - DNA, 25 bp, Homo sapien
cagtgctgtgtaccatggcccccaa

SEQ ID NO: 196716 - DNA, 25 bp, Homo sapien
ggatacagcttagaagtgcaaggca

SEQ ID NO: 196717 - DNA, 25 bp, Homo sapien
tggtttgctcctaaaacacatagat

SEQ ID NO: 196718 - DNA, 25 bp, Homo sapien
ggagatccgtgatttgcccaatttg

SEQ ID NO: 196719 - DNA, 25 bp, Homo sapien
gcccaatttgcgttcctctgctgat

SEQ ID NO: 196720 - DNA, 25 bp, Homo sapien
aggaggcaccggacaagcgtagttt

SEQ ID NO: 196721 - DNA, 25 bp, Homo sapien
ccaggctttcagttcccaggaggca

SEQ ID NO: 196722 - DNA, 25 bp, Homo sapien
gacttccactactcactgcatgagg

SEQ ID NO: 196723 - DNA, 25 bp, Homo sapien
gacatcggccagtgttcagcaatct

SEQ ID NO: 196724 - DNA, 25 bp, Homo sapien
aatcatcaggcaacagccagcaggc

SEQ ID NO: 196725 - DNA, 25 bp, Homo sapien
tctggattcacagggaaacggacag

SEQ ID NO: 196726 - DNA, 25 bp, Homo sapien
ggaaaagcagagttcgaatctcttc

SEQ ID NO: 196727 - DNA, 25 bp, Homo sapien
ttttgcattcagggatgatactggg

SEQ ID NO: 196728 - DNA, 25 bp, Homo sapien
caaggggcttgaaaggtcctgatgt

SEQ ID NO: 196729 - DNA, 25 bp, Homo sapien
cagagttcgaatctcttccccaggc

SEQ ID NO: 196730 - DNA, 25 bp, Homo sapien
catgcagagaagcagcattgttcca

SEQ ID NO: 196731 - DNA, 25 bp, Homo sapien
gagaagcagcattgttccatgcaga

SEQ ID NO: 196732 - DNA, 25 bp, Homo sapien
gcagagaagcagcattgttccatgc

SEQ ID NO: 196733 - DNA, 25 bp, Homo sapien
agaagcagcattgttccatgcagat

SEQ ID NO: 196734 - DNA, 25 bp, Homo sapien
tggagacccatcatgtaggcaaacc

SEQ ID NO: 196735 - DNA, 25 bp, Homo sapien
tatcaggtgaaatcagagcatccag

SEQ ID NO: 196736 - DNA, 25 bp, Homo sapien
caaggccggtggcaaatggagaccc

SEQ ID NO: 196737 - DNA, 25 bp, Homo sapien
gttccagacgaccatgcagagtgcc

SEQ ID NO: 196738 - DNA, 25 bp, Homo sapien
tctcagagttgctgggcctcagaac

SEQ ID NO: 196739 - DNA, 25 bp, Homo sapien
tattccacagagtaggagcttcttg

SEQ ID NO: 196740 - DNA, 25 bp, Homo sapien
ttctcttattccacagagtaggagc

SEQ ID NO: 196741 - DNA, 25 bp, Homo sapien
tgtacatttctcttattccacagag

SEQ ID NO: 196742 - DNA, 25 bp, Homo sapien
cagagtaggagcttcttgaggacca

SEQ ID NO: 196743 - DNA, 25 bp, Homo sapien
caggaggctactgtgaaagcccagg

SEQ ID NO: 196744 - DNA, 25 bp, Homo sapien
tgtggaagcaacaagaccagtcagg

SEQ ID NO: 196745 - DNA, 25 bp, Homo sapien
ccagtcaggaggctactgtgaaagc

SEQ ID NO: 196746 - DNA, 25 bp, Homo sapien
aacaggaagtgtaagtgtggaagca

SEQ ID NO: 196747 - DNA, 25 bp, Homo sapien
ccattttcagtgctgccgcaatggt

SEQ ID NO: 196748 - DNA, 25 bp, Homo sapien
tgccgcaatggtctgcatgagtggc

SEQ ID NO: 196749 - DNA, 25 bp, Homo sapien
agccactccatctcggtgctgttca

SEQ ID NO: 196750 - DNA, 25 bp, Homo sapien
actccatctcggtgctgttcatcag

SEQ ID NO: 196751 - DNA, 25 bp, Homo sapien
gccatccagggagttggtcgcagct

SEQ ID NO: 196752 - DNA, 25 bp, Homo sapien
cactgaggagtgtttcagagccatt

SEQ ID NO: 196753 - DNA, 25 bp, Homo sapien
gacacagaagtattctggccatcca

SEQ ID NO: 196754 - DNA, 25 bp, Homo sapien
ctagtacatgtggacgttctcactg

SEQ ID NO: 196755 - DNA, 25 bp, Homo sapien
tggcacagccgtgcagccagatagt

SEQ ID NO: 196756 - DNA, 25 bp, Homo sapien
cacggtgagcaaaactgggtccgcc

SEQ ID NO: 196757 - DNA, 25 bp, Homo sapien
gactgtcctgagagctctttggcac

SEQ ID NO: 196758 - DNA, 25 bp, Homo sapien
ttaactccctgcagacacggtgagc

SEQ ID NO: 196759 - DNA, 25 bp, Homo sapien
ccatggttaggtcaaaccaggcctg

SEQ ID NO: 196760 - DNA, 25 bp, Homo sapien
atggttaggtcaaaccaggcctgca

SEQ ID NO: 196761 - DNA, 25 bp, Homo sapien
catggttaggtcaaaccaggcctgc

SEQ ID NO: 196762 - DNA, 25 bp, Homo sapien
tggttaggtcaaaccaggcctgcac

SEQ ID NO: 196763 - DNA, 25 bp, Homo sapien
ctcttgagtgatgacttccccatgg

SEQ ID NO: 196764 - DNA, 25 bp, Homo sapien
cgtgcatcggcatcagcaaagcctg

SEQ ID NO: 196765 - DNA, 25 bp, Homo sapien
tcccatgctgcacgtgcatcggcat

SEQ ID NO: 196766 - DNA, 25 bp, Homo sapien
cctgcaagaatgctcttgagtgatg

SEQ ID NO: 196767 - DNA, 25 bp, Homo sapien
ctgtcccctcaggaagtctctctcc

SEQ ID NO: 196768 - DNA, 25 bp, Homo sapien
gcagcatgtcccctcgctgctgcag

SEQ ID NO: 196769 - DNA, 25 bp, Homo sapien
ggacagctgtactgggagctctgtc

SEQ ID NO: 196770 - DNA, 25 bp, Homo sapien
tccaccactcatcatggcttctccc

SEQ ID NO: 196771 - DNA, 25 bp, Homo sapien
cccctctggattcccagccttccag

SEQ ID NO: 196772 - DNA, 25 bp, Homo sapien
tctggattcccagccttccagcaag

SEQ ID NO: 196773 - DNA, 25 bp, Homo sapien
tggattcccagccttccagcaagca

SEQ ID NO: 196774 - DNA, 25 bp, Homo sapien
caggcccctctggattcccagcctt

SEQ ID NO: 196775 - DNA, 25 bp, Homo sapien
taatctctcgagatccggagggagt

SEQ ID NO: 196776 - DNA, 25 bp, Homo sapien
atctctcgagatccggagggagttg

SEQ ID NO: 196777 - DNA, 25 bp, Homo sapien
cccatcacttccttgggagtcagtg

SEQ ID NO: 196778 - DNA, 25 bp, Homo sapien
gtggttaatctctcgagatccggag

SEQ ID NO: 196779 - DNA, 25 bp, Homo sapien
cgtggcccgacagcaaatgtctgaa

SEQ ID NO: 196780 - DNA, 25 bp, Homo sapien
tgtgtcagtgtcaaggcagtgcagt

SEQ ID NO: 196781 - DNA, 25 bp, Homo sapien
ggtgcccaaggctatctccagtgcc

SEQ ID NO: 196782 - DNA, 25 bp, Homo sapien
ggcaaagtcccctgaagtcgctatt

SEQ ID NO: 196783 - DNA, 25 bp, Homo sapien
tcagcaggcctaactctctggagct

SEQ ID NO: 196784 - DNA, 25 bp, Homo sapien
cctgaagtccgcagcagctacacgt

SEQ ID NO: 196785 - DNA, 25 bp, Homo sapien
ggccagatgtgcaaagccgggccca

SEQ ID NO: 196786 - DNA, 25 bp, Homo sapien
cacgtccttcatgaggccagatgtg

SEQ ID NO: 196787 - DNA, 25 bp, Homo sapien
ttgcattagcaatctctgaaaggct

SEQ ID NO: 196788 - DNA, 25 bp, Homo sapien
aaggcttgtgactttgaaacctggg

SEQ ID NO: 196789 - DNA, 25 bp, Homo sapien
tgctttaagtctaccgcctcctaag

SEQ ID NO: 196790 - DNA, 25 bp, Homo sapien
cttgtgactttgaaacctgggtatc

SEQ ID NO: 196791 - DNA, 25 bp, Homo sapien
tgtctggagctcagcttcatcagct

SEQ ID NO: 196792 - DNA, 25 bp, Homo sapien
ttgtctggagctcagcttcatcagc

SEQ ID NO: 196793 - DNA, 25 bp, Homo sapien
caggcatgaggtccaccaactggac

SEQ ID NO: 196794 - DNA, 25 bp, Homo sapien
gcatccattcgctgctctggaaagg

SEQ ID NO: 196795 - DNA, 25 bp, Homo sapien
cagaacatccaggagtgactcagtc

SEQ ID NO: 196796 - DNA, 25 bp, Homo sapien
tactcagaataagaagtgcacacat

SEQ ID NO: 196797 - DNA, 25 bp, Homo sapien
ctggagtgggaggggcaggacccat

SEQ ID NO: 196798 - DNA, 25 bp, Homo sapien
ccacattgtaaacaatgggatccag

SEQ ID NO: 196799 - DNA, 25 bp, Homo sapien
tgggaattcctgctatagatcggtc

SEQ ID NO: 196800 - DNA, 25 bp, Homo sapien
ggtgatctgagacaataacaatgaa

SEQ ID NO: 196801 - DNA, 25 bp, Homo sapien
cactggagccaagaccacattgtaa

SEQ ID NO: 196802 - DNA, 25 bp, Homo sapien
ctcctccactgccattcctcaaggt

SEQ ID NO: 196803 - DNA, 25 bp, Homo sapien
cctcctccactgccattcctcaagg

SEQ ID NO: 196804 - DNA, 25 bp, Homo sapien
ggtccacactagacgccagatgcag

SEQ ID NO: 196805 - DNA, 25 bp, Homo sapien
tagacgccagatgcaggcaccttga

SEQ ID NO: 196806 - DNA, 25 bp, Homo sapien
ctgcaaaccaggaatagggtccaca

SEQ ID NO: 196807 - DNA, 25 bp, Homo sapien
caggaatagggtccacactagacgc

SEQ ID NO: 196808 - DNA, 25 bp, Homo sapien
gagtatctgggatcctcccttgttg

SEQ ID NO: 196809 - DNA, 25 bp, Homo sapien
catggtgagtatctgggatcctccc

SEQ ID NO: 196810 - DNA, 25 bp, Homo sapien
ttataaaatgaatgcccatggtgag

SEQ ID NO: 196811 - DNA, 25 bp, Homo sapien
ctgggatcctcccttgttgaagatg

SEQ ID NO: 196812 - DNA, 25 bp, Homo sapien
ccctctctgagcagcgttggcagct

SEQ ID NO: 196813 - DNA, 25 bp, Homo sapien
tcttccgtaatcttcagggctgtgc

SEQ ID NO: 196814 - DNA, 25 bp, Homo sapien
tatctgagtgatggaagccggaacc

SEQ ID NO: 196815 - DNA, 25 bp, Homo sapien
gatgctctgaagacatgaagtgtga

SEQ ID NO: 196816 - DNA, 25 bp, Homo sapien
gagcggatccatagtccatctccac

SEQ ID NO: 196817 - DNA, 25 bp, Homo sapien
ctagggtccgaaaggaagccagcct

SEQ ID NO: 196818 - DNA, 25 bp, Homo sapien
tggaagtccaggtgccccatttgtt

SEQ ID NO: 196819 - DNA, 25 bp, Homo sapien
tgcagagatgcagtagatctgcaga

SEQ ID NO: 196820 - DNA, 25 bp, Homo sapien
tcaagttgacgtttggctctgacat

SEQ ID NO: 196821 - DNA, 25 bp, Homo sapien
aagttgacgtttggctctgacatcc

SEQ ID NO: 196822 - DNA, 25 bp, Homo sapien
gttgacgtttggctctgacatccat

SEQ ID NO: 196823 - DNA, 25 bp, Homo sapien
tttcaagttgacgtttggctctgac

SEQ ID NO: 196824 - DNA, 25 bp, Homo sapien
ctattcgagaaccctaagacctcca

SEQ ID NO: 196825 - DNA, 25 bp, Homo sapien
tattcgagaaccctaagacctccat

SEQ ID NO: 196826 - DNA, 25 bp, Homo sapien
tactattcgagaaccctaagacctc

SEQ ID NO: 196827 - DNA, 25 bp, Homo sapien
caagtgatgctgagataaatcttca

SEQ ID NO: 196828 - DNA, 25 bp, Homo sapien
gataaatcttcaaccaggagaggga

SEQ ID NO: 196829 - DNA, 25 bp, Homo sapien
cagggtgacctgagggggtctgcat

SEQ ID NO: 196830 - DNA, 25 bp, Homo sapien
tgagataaatcttcaaccaggagag

SEQ ID NO: 196831 - DNA, 25 bp, Homo sapien
agaaagcaagtttgtccagcccact

SEQ ID NO: 196832 - DNA, 25 bp, Homo sapien
ggaagattgcacaccccttctgaag

SEQ ID NO: 196833 - DNA, 25 bp, Homo sapien
taatggcctgctacccatctggtct

SEQ ID NO: 196834 - DNA, 25 bp, Homo sapien
tgtattttacgcatggcccaaaggc

SEQ ID NO: 196835 - DNA, 25 bp, Homo sapien
tttccaagtgcccacctgtaattcc

SEQ ID NO: 196836 - DNA, 25 bp, Homo sapien
tgtgcctagtacctaagtacattac

SEQ ID NO: 196837 - DNA, 25 bp, Homo sapien
gcaatgtttacatgcatcctatact

SEQ ID NO: 196838 - DNA, 25 bp, Homo sapien
gtgtaacaatgttctcaacttcctc

SEQ ID NO: 196839 - DNA, 25 bp, Homo sapien
tacatcggatctctaaggacgtgcc

SEQ ID NO: 196840 - DNA, 25 bp, Homo sapien
catgagccacgtaagtgcataagcc

SEQ ID NO: 196841 - DNA, 25 bp, Homo sapien
gaatttttcgtattgcagacagccc

SEQ ID NO: 196842 - DNA, 25 bp, Homo sapien
gcccctggtggtcatcatctataca

SEQ ID NO: 196843 - DNA, 25 bp, Homo sapien
gattaaaggcttcacgatggaaatt

SEQ ID NO: 196844 - DNA, 25 bp, Homo sapien
ttagagccttgggtaagatgattaa

SEQ ID NO: 196845 - DNA, 25 bp, Homo sapien
gatgattaaaggcttcacgatggaa

SEQ ID NO: 196846 - DNA, 25 bp, Homo sapien
gccttgggtaagatgattaaaggct

SEQ ID NO: 196847 - DNA, 25 bp, Homo sapien
caattcaagtgaacaaccatgcatg

SEQ ID NO: 196848 - DNA, 25 bp, Homo sapien
taacagtggctacatgcaattcaag

SEQ ID NO: 196849 - DNA, 25 bp, Homo sapien
tcaaaagacacaacataggccgggt

SEQ ID NO: 196850 - DNA, 25 bp, Homo sapien
ctagtatgcctagtataacagtggc

SEQ ID NO: 196851 - DNA, 25 bp, Homo sapien
tggtatggtagattaggaacacagt

SEQ ID NO: 196852 - DNA, 25 bp, Homo sapien
cactgctagtgagaacgtataatgg

SEQ ID NO: 196853 - DNA, 25 bp, Homo sapien
ctatctcatacccagtgagatgggt

SEQ ID NO: 196854 - DNA, 25 bp, Homo sapien
tgcagttctcctctaggtatatact

SEQ ID NO: 196855 - DNA, 25 bp, Homo sapien
gaaatagtgtccagctgatgaaacc

SEQ ID NO: 196856 - DNA, 25 bp, Homo sapien
atagtgtccagctgatgaaacctcc

SEQ ID NO: 196857 - DNA, 25 bp, Homo sapien
tatgccctgaaatagtgtccagctg

SEQ ID NO: 196858 - DNA, 25 bp, Homo sapien
gccctgaaatagtgtccagctgatg

SEQ ID NO: 196859 - DNA, 25 bp, Homo sapien
ttctttctgatgtatataatatgaa

SEQ ID NO: 196860 - DNA, 25 bp, Homo sapien
tttctttctgatgtatataatatga

SEQ ID NO: 196861 - DNA, 25 bp, Homo sapien
tctttctgatgtatataatatgaat

SEQ ID NO: 196862 - DNA, 25 bp, Homo sapien
aactgcaggcctatatagatgtacc

SEQ ID NO: 196863 - DNA, 25 bp, Homo sapien
gtagtccttccagcagacaaaactg

SEQ ID NO: 196864 - DNA, 25 bp, Homo sapien
tagatgtaccctcaaaaggagtcac

SEQ ID NO: 196865 - DNA, 25 bp, Homo sapien
cacaatgtgatagatttgtgcccat

SEQ ID NO: 196866 - DNA, 25 bp, Homo sapien
cccctgaagggaaatcactacaaag

SEQ ID NO: 196867 - DNA, 25 bp, Homo sapien
catcattgagatgttccccaaaggc

SEQ ID NO: 196868 - DNA, 25 bp, Homo sapien
ggagtggcacccgtattaacattct

SEQ ID NO: 196869 - DNA, 25 bp, Homo sapien
tatacttgaagagtcacatacagcc

SEQ ID NO: 196870 - DNA, 25 bp, Homo sapien
cataacaacatataatacaagtttc

SEQ ID NO: 196871 - DNA, 25 bp, Homo sapien
aatacaagtttcaaatccgctgata

SEQ ID NO: 196872 - DNA, 25 bp, Homo sapien
tccccattgttcgttgttcataaca

SEQ ID NO: 196873 - DNA, 25 bp, Homo sapien
caaatccgctgatatcttttagagt

SEQ ID NO: 196874 - DNA, 25 bp, Homo sapien
cactacaacatgtgtgacagagcaa

SEQ ID NO: 196875 - DNA, 25 bp, Homo sapien
tgtaactaatgattgggtaagctcc

SEQ ID NO: 196876 - DNA, 25 bp, Homo sapien
gagaatacagcgagagacaaaccac

SEQ ID NO: 196877 - DNA, 25 bp, Homo sapien
taattaaagctctaggctaggtgca

SEQ ID NO: 196878 - DNA, 25 bp, Homo sapien
gcatcaactataaggcaaatcccgg

SEQ ID NO: 196879 - DNA, 25 bp, Homo sapien
gaagagacttcgctcactggatact

SEQ ID NO: 196880 - DNA, 25 bp, Homo sapien
tttctcaacatgcttcaccaggtcg

SEQ ID NO: 196881 - DNA, 25 bp, Homo sapien
catggttaacatgttccgtgggaac

SEQ ID NO: 196882 - DNA, 25 bp, Homo sapien
gtatgaagtcgggtggagaaggaaa

SEQ ID NO: 196883 - DNA, 25 bp, Homo sapien
tcagtatgaagtcgggtggagaagg

SEQ ID NO: 196884 - DNA, 25 bp, Homo sapien
catcagtatgaagtcgggtggagaa

SEQ ID NO: 196885 - DNA, 25 bp, Homo sapien
gccatcagtatgaagtcgggtggag

SEQ ID NO: 196886 - DNA, 25 bp, Homo sapien
ccttccatccttttaatgaaacgca

SEQ ID NO: 196887 - DNA, 25 bp, Homo sapien
aaacaagctgaaaggccatacaaac

SEQ ID NO: 196888 - DNA, 25 bp, Homo sapien
aaaacaagctgaaaggccatacaaa

SEQ ID NO: 196889 - DNA, 25 bp, Homo sapien
taaaacaagctgaaaggccatacaa

SEQ ID NO: 196890 - DNA, 25 bp, Homo sapien
gacaagatgcttgttcatattaata

SEQ ID NO: 196891 - DNA, 25 bp, Homo sapien
catcttcagcaagtcttgcaattcc

SEQ ID NO: 196892 - DNA, 25 bp, Homo sapien
gttcatattaatattcatcttcagc

SEQ ID NO: 196893 - DNA, 25 bp, Homo sapien
cagtgacaagatgcttgttcatatt

SEQ ID NO: 196894 - DNA, 25 bp, Homo sapien
tgtaatccggatttccccagcaaga

SEQ ID NO: 196895 - DNA, 25 bp, Homo sapien
cacaggggggaaagcctgtaatccg

SEQ ID NO: 196896 - DNA, 25 bp, Homo sapien
taacgtcgactgaggtgtaggcaca

SEQ ID NO: 196897 - DNA, 25 bp, Homo sapien
ctataaaataacgtcgactgaggtg

SEQ ID NO: 196898 - DNA, 25 bp, Homo sapien
tatactgctgtagtcgtagcactgt

SEQ ID NO: 196899 - DNA, 25 bp, Homo sapien
aggacaatggcagcgtcccacacaa

SEQ ID NO: 196900 - DNA, 25 bp, Homo sapien
cacgccaccggagctatactgctgt

SEQ ID NO: 196901 - DNA, 25 bp, Homo sapien
ccgagggtagcagccatgagcccca

SEQ ID NO: 196902 - DNA, 25 bp, Homo sapien
ccagcgaggactccagcgtatccgc

SEQ ID NO: 196903 - DNA, 25 bp, Homo sapien
cagcgaggactccagcgtatccgcc

SEQ ID NO: 196904 - DNA, 25 bp, Homo sapien
gcgagttaacaaagcccggaaggca

SEQ ID NO: 196905 - DNA, 25 bp, Homo sapien
tgtctataggactcaacaatctccc

SEQ ID NO: 196906 - DNA, 25 bp, Homo sapien
taaaagtggttgctagaagcctgca

SEQ ID NO: 196907 - DNA, 25 bp, Homo sapien
cacgtttggcttaacgaagaggccg

SEQ ID NO: 196908 - DNA, 25 bp, Homo sapien
taagaactctgatacaaagcacagt

SEQ ID NO: 196909 - DNA, 25 bp, Homo sapien
gcttttggctactttacaactgctg

SEQ ID NO: 196910 - DNA, 25 bp, Homo sapien
tctatcactttgaacgaaggcatcc

SEQ ID NO: 196911 - DNA, 25 bp, Homo sapien
agcacagtaaaaggccacaaaccag

SEQ ID NO: 196912 - DNA, 25 bp, Homo sapien
ggcaattcattagctaaagacgtca

SEQ ID NO: 196913 - DNA, 25 bp, Homo sapien
tgtcttcagcagcaaataccggcat

SEQ ID NO: 196914 - DNA, 25 bp, Homo sapien
tcttgaaggcaaggcagttggttcc

SEQ ID NO: 196915 - DNA, 25 bp, Homo sapien
aaggcaatgctactgatcacctgag

SEQ ID NO: 196916 - DNA, 25 bp, Homo sapien
tgcttggcgaatttggacacgtact

SEQ ID NO: 196917 - DNA, 25 bp, Homo sapien
cccgtttgtaagtctttggtggcag

SEQ ID NO: 196918 - DNA, 25 bp, Homo sapien
gagccagtctgaatctctgtgaaga

SEQ ID NO: 196919 - DNA, 25 bp, Homo sapien
tgagcacatagcatcgacgcggtac

SEQ ID NO: 196920 - DNA, 25 bp, Homo sapien
gaggtggactatgcagaggcccatc

SEQ ID NO: 196921 - DNA, 25 bp, Homo sapien
aatgcaccagtaggaacaggaactc

SEQ ID NO: 196922 - DNA, 25 bp, Homo sapien
gaggcccatcaaatgcaccagtagg

SEQ ID NO: 196923 - DNA, 25 bp, Homo sapien
tataaagtgttctggaggccgaagg

SEQ ID NO: 196924 - DNA, 25 bp, Homo sapien
gaggaggctgtctcggtggaatagc

SEQ ID NO: 196925 - DNA, 25 bp, Homo sapien
gtggaatagcaggaggatcatcatc

SEQ ID NO: 196926 - DNA, 25 bp, Homo sapien
atagcaggaggatcatcatcagatt

SEQ ID NO: 196927 - DNA, 25 bp, Homo sapien
aggctgtctcggtggaatagcagga

SEQ ID NO: 196928 - DNA, 25 bp, Homo sapien
gtactcctagattaattcagggctg

SEQ ID NO: 196929 - DNA, 25 bp, Homo sapien
aaactaatctgggttaattatcaga

SEQ ID NO: 196930 - DNA, 25 bp, Homo sapien
cagattatgagtactcctagattaa

SEQ ID NO: 196931 - DNA, 25 bp, Homo sapien
tcaagttaaattcagaggctcaaaa

SEQ ID NO: 196932 - DNA, 25 bp, Homo sapien
tgatctacccgcctggcatgagcca

SEQ ID NO: 196933 - DNA, 25 bp, Homo sapien
gtgatctacccgcctggcatgagcc

SEQ ID NO: 196934 - DNA, 25 bp, Homo sapien
tgtaaactaccacatgaactaaaga

SEQ ID NO: 196935 - DNA, 25 bp, Homo sapien
gggctcttcacttagtttatgtaaa

SEQ ID NO: 196936 - DNA, 25 bp, Homo sapien
tgatcaaacttttttcgaggaggaa

SEQ ID NO: 196937 - DNA, 25 bp, Homo sapien
tggaatttgaagcatcatgatcaaa

SEQ ID NO: 196938 - DNA, 25 bp, Homo sapien
ggtttagttggccaatcctgcccag

SEQ ID NO: 196939 - DNA, 25 bp, Homo sapien
gaggttaggcagaggatgttcctca

SEQ ID NO: 196940 - DNA, 25 bp, Homo sapien
aaattgctatctcagtcatgtggct

SEQ ID NO: 196941 - DNA, 25 bp, Homo sapien
caaaaggtatgcctatgaggttggc

SEQ ID NO: 196942 - DNA, 25 bp, Homo sapien
gaacctgaccccttagctccaggga

SEQ ID NO: 196943 - DNA, 25 bp, Homo sapien
gcatgtaacctaattcagaccagtg

SEQ ID NO: 196944 - DNA, 25 bp, Homo sapien
tgagtttaactgtaggcatgtaacc

SEQ ID NO: 196945 - DNA, 25 bp, Homo sapien
gagtaatcccattcctttagccaga

SEQ ID NO: 196946 - DNA, 25 bp, Homo sapien
cagtatatttctccacggtaggcaa

SEQ ID NO: 196947 - DNA, 25 bp, Homo sapien
gacacgcacactcatggaagcagat

SEQ ID NO: 196948 - DNA, 25 bp, Homo sapien
tcttaggtggtaacagacacgcaca

SEQ ID NO: 196949 - DNA, 25 bp, Homo sapien
tgaatcaaccagtcttaaagcagcc

SEQ ID NO: 196950 - DNA, 25 bp, Homo sapien
tactgtcaggcactgtctgaagcac

SEQ ID NO: 196951 - DNA, 25 bp, Homo sapien
ggtctgacagatcaaacaagcccaa

SEQ ID NO: 196952 - DNA, 25 bp, Homo sapien
taaaggaaccggctttcactgtgag

SEQ ID NO: 196953 - DNA, 25 bp, Homo sapien
tattgggcacctgctaatactgtca

SEQ ID NO: 196954 - DNA, 25 bp, Homo sapien
tggccctgccaacatctcgattttg

SEQ ID NO: 196955 - DNA, 25 bp, Homo sapien
ggcaaagactgaagtgaggcatcta

SEQ ID NO: 196956 - DNA, 25 bp, Homo sapien
taaggattcaggagctaaaggcatt

SEQ ID NO: 196957 - DNA, 25 bp, Homo sapien
aaacataccgcgagaagacagccat

SEQ ID NO: 196958 - DNA, 25 bp, Homo sapien
gagagataagacagtgcatccatga

SEQ ID NO: 196959 - DNA, 25 bp, Homo sapien
aaaaaggcacaatcagaggtaactg

SEQ ID NO: 196960 - DNA, 25 bp, Homo sapien
tacaactaatacaagaaaggaggtc

SEQ ID NO: 196961 - DNA, 25 bp, Homo sapien
ccactggatatgcaacttagctgat

SEQ ID NO: 196962 - DNA, 25 bp, Homo sapien
ttggtaaggcaaatggctacctagt

SEQ ID NO: 196963 - DNA, 25 bp, Homo sapien
taataggatcccatgaattttggta

SEQ ID NO: 196964 - DNA, 25 bp, Homo sapien
tagttagagacgtttcttagcttcc

SEQ ID NO: 196965 - DNA, 25 bp, Homo sapien
ccttttagtaataggatcccatgaa

SEQ ID NO: 196966 - DNA, 25 bp, Homo sapien
aagcactggagcaaagatgctattg

SEQ ID NO: 196967 - DNA, 25 bp, Homo sapien
gcaaaagcactggagcaaagatgct

SEQ ID NO: 196968 - DNA, 25 bp, Homo sapien
aaaagcactggagcaaagatgctat

SEQ ID NO: 196969 - DNA, 25 bp, Homo sapien
ttgaatgtggcaaaagcactggagc

SEQ ID NO: 196970 - DNA, 25 bp, Homo sapien
tgtgttaggccttattccaggagat

SEQ ID NO: 196971 - DNA, 25 bp, Homo sapien
tgggtgacctcgtaaagtacctgag

SEQ ID NO: 196972 - DNA, 25 bp, Homo sapien
aatacactaaggtctgaagaagcag

SEQ ID NO: 196973 - DNA, 25 bp, Homo sapien
ctgaggtagagccatgtcggcctgt

SEQ ID NO: 196974 - DNA, 25 bp, Homo sapien
tttatcaaaaggctgacatttcccc

SEQ ID NO: 196975 - DNA, 25 bp, Homo sapien
gtaccaagataaggcataaaccaga

SEQ ID NO: 196976 - DNA, 25 bp, Homo sapien
tctaggagggatcaaaagtagacac

SEQ ID NO: 196977 - DNA, 25 bp, Homo sapien
tgttccattcagctacctattaagt

SEQ ID NO: 196978 - DNA, 25 bp, Homo sapien
ttctagtgacttgttgaacaaataa

SEQ ID NO: 196979 - DNA, 25 bp, Homo sapien
ctctttttcagatgcacttcccatg

SEQ ID NO: 196980 - DNA, 25 bp, Homo sapien
cagtttcgaggttcaatttctagtg

SEQ ID NO: 196981 - DNA, 25 bp, Homo sapien
ctgtttgcagtttcgaggttcaatt

SEQ ID NO: 196982 - DNA, 25 bp, Homo sapien
taacacattaagagcccacaatatg

SEQ ID NO: 196983 - DNA, 25 bp, Homo sapien
cagtagcactacttattccttagga

SEQ ID NO: 196984 - DNA, 25 bp, Homo sapien
tcatcactagtaagctaccaaaagt

SEQ ID NO: 196985 - DNA, 25 bp, Homo sapien
cattttaatggctcagcagtagcac

SEQ ID NO: 196986 - DNA, 25 bp, Homo sapien
ctcatatctggttctatccgtaaac

SEQ ID NO: 196987 - DNA, 25 bp, Homo sapien
tggttctatccgtaaacagtaaggc

SEQ ID NO: 196988 - DNA, 25 bp, Homo sapien
catatctggttctatccgtaaacag

SEQ ID NO: 196989 - DNA, 25 bp, Homo sapien
tatctggttctatccgtaaacagta

SEQ ID NO: 196990 - DNA, 25 bp, Homo sapien
ggattgattgacttaagttttacta

SEQ ID NO: 196991 - DNA, 25 bp, Homo sapien
taattccacagcttcgtccaaaatt

SEQ ID NO: 196992 - DNA, 25 bp, Homo sapien
cacagcttcgtccaaaattttcctt

SEQ ID NO: 196993 - DNA, 25 bp, Homo sapien
ggcacacaaggtggattgattgact

SEQ ID NO: 196994 - DNA, 25 bp, Homo sapien
gaacactatgcttgatggagaacca

SEQ ID NO: 196995 - DNA, 25 bp, Homo sapien
aaaaatgtcactattcacacagagg

SEQ ID NO: 196996 - DNA, 25 bp, Homo sapien
tactatacagaagtcctagctagca

SEQ ID NO: 196997 - DNA, 25 bp, Homo sapien
gaggatatgactgcccatgaggaaa

SEQ ID NO: 196998 - DNA, 25 bp, Homo sapien
ccgccagcatgcctgggtaattttt

SEQ ID NO: 196999 - DNA, 25 bp, Homo sapien
cgccagcatgcctgggtaattttta

SEQ ID NO: 197000 - DNA, 25 bp, Homo sapien
taattctacttagtactgccacccg

SEQ ID NO: 197001 - DNA, 25 bp, Homo sapien
ggtctagtctgtatactgacactga

SEQ ID NO: 197002 - DNA, 25 bp, Homo sapien
ctgacactgaatttactgcactgac

SEQ ID NO: 197003 - DNA, 25 bp, Homo sapien
gactatctccaatacgccattgaaa

SEQ ID NO: 197004 - DNA, 25 bp, Homo sapien
tgagatttgtggtatggcgaatcat

SEQ ID NO: 197005 - DNA, 25 bp, Homo sapien
tacaagttcagacggttgaactttc

SEQ ID NO: 197006 - DNA, 25 bp, Homo sapien
gtggtatggcgaatcatttttaata

SEQ ID NO: 197007 - DNA, 25 bp, Homo sapien
tccctacaagttcagacggttgaac

SEQ ID NO: 197008 - DNA, 25 bp, Homo sapien
tcagctgacgtgcaatttctattgg

SEQ ID NO: 197009 - DNA, 25 bp, Homo sapien
tcctgatgatcttagcaattgactc

SEQ ID NO: 197010 - DNA, 25 bp, Homo sapien
cctggtttgctgatatgccattcaa

SEQ ID NO: 197011 - DNA, 25 bp, Homo sapien
ggcttactccgtttgcctgagcttg

SEQ ID NO: 197012 - DNA, 25 bp, Homo sapien
caacttccatgttgcgggctcaagt

SEQ ID NO: 197013 - DNA, 25 bp, Homo sapien
taaactcatgttcaatataagattc

SEQ ID NO: 197014 - DNA, 25 bp, Homo sapien
ctcatgttcaatataagattcaatc

SEQ ID NO: 197015 - DNA, 25 bp, Homo sapien
gtcacacaaatttgaacataaactc

SEQ ID NO: 197016 - DNA, 25 bp, Homo sapien
tgttttagtttcttaaagtcacaca

SEQ ID NO: 197017 - DNA, 25 bp, Homo sapien
tcataaaaatgatgttcaacccaat

SEQ ID NO: 197018 - DNA, 25 bp, Homo sapien
tacacttgaaatgaaggattctagt

SEQ ID NO: 197019 - DNA, 25 bp, Homo sapien
aaatgaaggattctagtctttcaag

SEQ ID NO: 197020 - DNA, 25 bp, Homo sapien
aagtcataaaaatgatgttcaaccc

SEQ ID NO: 197021 - DNA, 25 bp, Homo sapien
aagatgccttccctaattactctgg

SEQ ID NO: 197022 - DNA, 25 bp, Homo sapien
ggcctaatctttgctattcctgaaa

SEQ ID NO: 197023 - DNA, 25 bp, Homo sapien
taataacttggcttggatttcacag

SEQ ID NO: 197024 - DNA, 25 bp, Homo sapien
agaaattggaacactgcctttgggc

SEQ ID NO: 197025 - DNA, 25 bp, Homo sapien
cacacacacgcaaagaaagtcagac

SEQ ID NO: 197026 - DNA, 25 bp, Homo sapien
agcatttagggtaatccccggcaca

SEQ ID NO: 197027 - DNA, 25 bp, Homo sapien
aagagggctaagagaaggcgcttcc

SEQ ID NO: 197028 - DNA, 25 bp, Homo sapien
tcaatgcttagtggtacgtacacac

SEQ ID NO: 197029 - DNA, 25 bp, Homo sapien
tgtctgcgtcagtaggttctggctc

SEQ ID NO: 197030 - DNA, 25 bp, Homo sapien
tttaaggtctgcactgattggctgc

SEQ ID NO: 197031 - DNA, 25 bp, Homo sapien
tactggttggacatattccttgcga

SEQ ID NO: 197032 - DNA, 25 bp, Homo sapien
gctgctcgcctttctctattgccaa

SEQ ID NO: 197033 - DNA, 25 bp, Homo sapien
ggtttacaaaatgaacgatatgtgg

SEQ ID NO: 197034 - DNA, 25 bp, Homo sapien
tacaaaatgaacgatatgtggtaag

SEQ ID NO: 197035 - DNA, 25 bp, Homo sapien
aatgaacgatatgtggtaagaaaag

SEQ ID NO: 197036 - DNA, 25 bp, Homo sapien
acgatatgtggtaagaaaagtacga

SEQ ID NO: 197037 - DNA, 25 bp, Homo sapien
caaaacgatatacttcaggacttgg

SEQ ID NO: 197038 - DNA, 25 bp, Homo sapien
tcaaatgcatgcttgtgctcacaag

SEQ ID NO: 197039 - DNA, 25 bp, Homo sapien
tgtattctgcactactgtaacctgg

SEQ ID NO: 197040 - DNA, 25 bp, Homo sapien
aatatgccgttcatgtttggcaccg

SEQ ID NO: 197041 - DNA, 25 bp, Homo sapien
ttaattggtgactataaaaagggca

SEQ ID NO: 197042 - DNA, 25 bp, Homo sapien
taattggtgactataaaaagggcaa

SEQ ID NO: 197043 - DNA, 25 bp, Homo sapien
tgcttgtaaattcggtccatgctac

SEQ ID NO: 197044 - DNA, 25 bp, Homo sapien
gtctaggtgaatactgcttgtaaat

SEQ ID NO: 197045 - DNA, 25 bp, Homo sapien
aattcggtccatgctaccttggaga

SEQ ID NO: 197046 - DNA, 25 bp, Homo sapien
tgaatactgcttgtaaattcggtcc

SEQ ID NO: 197047 - DNA, 25 bp, Homo sapien
aaacacctaaagcatgaagcttaca

SEQ ID NO: 197048 - DNA, 25 bp, Homo sapien
caaactggaatacggtgaggtgatc

SEQ ID NO: 197049 - DNA, 25 bp, Homo sapien
acccaaactggaatacggtgaggtg

SEQ ID NO: 197050 - DNA, 25 bp, Homo sapien
actggaatacggtgaggtgatcatg

SEQ ID NO: 197051 - DNA, 25 bp, Homo sapien
ggctgccctcaaactgttttaatct

SEQ ID NO: 197052 - DNA, 25 bp, Homo sapien
taatatcttatgaacctagctgaag

SEQ ID NO: 197053 - DNA, 25 bp, Homo sapien
ccgcgcctagctttaatgggtaata

SEQ ID NO: 197054 - DNA, 25 bp, Homo sapien
taaaacctatgactaggctgggcac

SEQ ID NO: 197055 - DNA, 25 bp, Homo sapien
tactatggacatatgtgcccacagc

SEQ ID NO: 197056 - DNA, 25 bp, Homo sapien
tctaagaacttctgtctactttcag

SEQ ID NO: 197057 - DNA, 25 bp, Homo sapien
aaagtgagcacgtgaaagatggaga

SEQ ID NO: 197058 - DNA, 25 bp, Homo sapien
tgactctagctaacatctaagaact

SEQ ID NO: 197059 - DNA, 25 bp, Homo sapien
tttctggtgacaatccattcatttc

SEQ ID NO: 197060 - DNA, 25 bp, Homo sapien
ggacataacgaactgcctctttaaa

SEQ ID NO: 197061 - DNA, 25 bp, Homo sapien
cgtggaaggacataacgaactgcct

SEQ ID NO: 197062 - DNA, 25 bp, Homo sapien
gtaactcaaagtagtgccaacagtg

SEQ ID NO: 197063 - DNA, 25 bp, Homo sapien
ggcaccagcataagacgtggaagga

SEQ ID NO: 197064 - DNA, 25 bp, Homo sapien
tatagcttgggataggtatacccca

SEQ ID NO: 197065 - DNA, 25 bp, Homo sapien
ggtttttacatcttggatcaatgca

SEQ ID NO: 197066 - DNA, 25 bp, Homo sapien
caagatctccgaagactagaaacag

SEQ ID NO: 197067 - DNA, 25 bp, Homo sapien
gattcccttaaagctctctgtgcct

SEQ ID NO: 197068 - DNA, 25 bp, Homo sapien
gaggactccttaaacccaagaggca

SEQ ID NO: 197069 - DNA, 25 bp, Homo sapien
cacagtccaggtatggtgcctcatg

SEQ ID NO: 197070 - DNA, 25 bp, Homo sapien
tcatggtcaacagaacagcctagcc

SEQ ID NO: 197071 - DNA, 25 bp, Homo sapien
ggtgaaagagcgagattccgccgca

SEQ ID NO: 197072 - DNA, 25 bp, Homo sapien
gaaactctggtgaaagaatgtcctg

SEQ ID NO: 197073 - DNA, 25 bp, Homo sapien
ctgaaagtgtagagcaactgcaggt

SEQ ID NO: 197074 - DNA, 25 bp, Homo sapien
agtgtagagcaactgcaggtctggc

SEQ ID NO: 197075 - DNA, 25 bp, Homo sapien
tttcataaggatcaaatgcttgctc

SEQ ID NO: 197076 - DNA, 25 bp, Homo sapien
cacagtcaattcatgtatatctgaa

SEQ ID NO: 197077 - DNA, 25 bp, Homo sapien
aagggatgaggactgctttcatcag

SEQ ID NO: 197078 - DNA, 25 bp, Homo sapien
catttcaactgtgtcttcaatcaaa

SEQ ID NO: 197079 - DNA, 25 bp, Homo sapien
caactgtgtcttcaatcaaacctaa

SEQ ID NO: 197080 - DNA, 25 bp, Homo sapien
cagaaagaaaggcttctcgaaacac

SEQ ID NO: 197081 - DNA, 25 bp, Homo sapien
ttcagttctgacaagatcatagtag

SEQ ID NO: 197082 - DNA, 25 bp, Homo sapien
gagaaaccaaacctatgtcatcctg

SEQ ID NO: 197083 - DNA, 25 bp, Homo sapien
catagtagtttaattcaccagaaga

SEQ ID NO: 197084 - DNA, 25 bp, Homo sapien
tggcctttacctttcctaaacatca

SEQ ID NO: 197085 - DNA, 25 bp, Homo sapien
ggttctttcctatgatcatctaatt

SEQ ID NO: 197086 - DNA, 25 bp, Homo sapien
tagaatacctcatatagccacatgt

SEQ ID NO: 197087 - DNA, 25 bp, Homo sapien
actgtaaagaaatagggttgattct

SEQ ID NO: 197088 - DNA, 25 bp, Homo sapien
ttttagctaagcatatgacagtctc

SEQ ID NO: 197089 - DNA, 25 bp, Homo sapien
caaataggggatcatgacaggaatg

SEQ ID NO: 197090 - DNA, 25 bp, Homo sapien
tgacagtctcttgtgacaaataggg

SEQ ID NO: 197091 - DNA, 25 bp, Homo sapien
acgcccggccaagtcatctggattt

SEQ ID NO: 197092 - DNA, 25 bp, Homo sapien
ggtttggagatccaatccaggccaa

SEQ ID NO: 197093 - DNA, 25 bp, Homo sapien
tatggcatcgtacaatcggtctcag

SEQ ID NO: 197094 - DNA, 25 bp, Homo sapien
caaggaattgctaccatgatgtaag

SEQ ID NO: 197095 - DNA, 25 bp, Homo sapien
ttactctcatatggttcaagtggca

SEQ ID NO: 197096 - DNA, 25 bp, Homo sapien
gatatttcataatgccggatattaa

SEQ ID NO: 197097 - DNA, 25 bp, Homo sapien
gagatatactctagtacagccacaa

SEQ ID NO: 197098 - DNA, 25 bp, Homo sapien
tagggatacatggtagtccactttg

SEQ ID NO: 197099 - DNA, 25 bp, Homo sapien
cattgacactttaatgtcctgctga

SEQ ID NO: 197100 - DNA, 25 bp, Homo sapien
tgaaaagaataaataatttaattgc

SEQ ID NO: 197101 - DNA, 25 bp, Homo sapien
gaaaagaataaataatttaattgca

SEQ ID NO: 197102 - DNA, 25 bp, Homo sapien
ctgtgaaaagaataaataatttaat

SEQ ID NO: 197103 - DNA, 25 bp, Homo sapien
taggtcctagtccacttttccagta

SEQ ID NO: 197104 - DNA, 25 bp, Homo sapien
gacagttctgaactcacagtagctt

SEQ ID NO: 197105 - DNA, 25 bp, Homo sapien
gttggactccactaaaagcctctta

SEQ ID NO: 197106 - DNA, 25 bp, Homo sapien
tatgcaatagccaaactaggtccta

SEQ ID NO: 197107 - DNA, 25 bp, Homo sapien
acactaacacagaccatgctacatt

SEQ ID NO: 197108 - DNA, 25 bp, Homo sapien
acatatggaagtgcacatatacaca

SEQ ID NO: 197109 - DNA, 25 bp, Homo sapien
tgcgatgtgtatgtacaagcataca

SEQ ID NO: 197110 - DNA, 25 bp, Homo sapien
cactaacacagaccatgctacatta

SEQ ID NO: 197111 - DNA, 25 bp, Homo sapien
tatagcagattgtgcatcagcaatg

SEQ ID NO: 197112 - DNA, 25 bp, Homo sapien
cttcgttttcgtttttctatagcag

SEQ ID NO: 197113 - DNA, 25 bp, Homo sapien
tttatcaattgggtgaggaaaggtc

SEQ ID NO: 197114 - DNA, 25 bp, Homo sapien
cttcaacgaaggatggattttgtcc

SEQ ID NO: 197115 - DNA, 25 bp, Homo sapien
gctcaatcacagcagaaccattgta

SEQ ID NO: 197116 - DNA, 25 bp, Homo sapien
tgctcaatcacagcagaaccattgt

SEQ ID NO: 197117 - DNA, 25 bp, Homo sapien
ctgctcaatcacagcagaaccattg

SEQ ID NO: 197118 - DNA, 25 bp, Homo sapien
cttgacaaaaacaatcttagccttt

SEQ ID NO: 197119 - DNA, 25 bp, Homo sapien
aaaacaatcttagcctttgtgttca

SEQ ID NO: 197120 - DNA, 25 bp, Homo sapien
gacaaaaacaatcttagcctttgtg

SEQ ID NO: 197121 - DNA, 25 bp, Homo sapien
caaaaacaatcttagcctttgtgtt

SEQ ID NO: 197122 - DNA, 25 bp, Homo sapien
tgcacctaggcagttcatctaattt

SEQ ID NO: 197123 - DNA, 25 bp, Homo sapien
tatgaaaccagcatgcgcaatgtag

SEQ ID NO: 197124 - DNA, 25 bp, Homo sapien
gcacatacccctactcttggctaat

SEQ ID NO: 197125 - DNA, 25 bp, Homo sapien
gaaaaacaagaactactgagatctg

SEQ ID NO: 197126 - DNA, 25 bp, Homo sapien
aatttttgtctacggcatgagatag

SEQ ID NO: 197127 - DNA, 25 bp, Homo sapien
tcccctcataaatgtacccagttgt

SEQ ID NO: 197128 - DNA, 25 bp, Homo sapien
gtctgtgtaaccatcatctcaactg

SEQ ID NO: 197129 - DNA, 25 bp, Homo sapien
ctaaaaaatatgtgcctaaacccag

SEQ ID NO: 197130 - DNA, 25 bp, Homo sapien
tcttgaacagtccttggctgggcca

SEQ ID NO: 197131 - DNA, 25 bp, Homo sapien
ttcattagctgagagagtgggatgc

SEQ ID NO: 197132 - DNA, 25 bp, Homo sapien
gagtgggatgcacttgttcctgaac

SEQ ID NO: 197133 - DNA, 25 bp, Homo sapien
aaaaatcagctcttcaatataatag

SEQ ID NO: 197134 - DNA, 25 bp, Homo sapien
tggctcacattgtatctcttctaga

SEQ ID NO: 197135 - DNA, 25 bp, Homo sapien
gaaatgtttaccagaagacatacgc

SEQ ID NO: 197136 - DNA, 25 bp, Homo sapien
tagacagcaatgctctagagaaatg

SEQ ID NO: 197137 - DNA, 25 bp, Homo sapien
cgctagaaggctcataaataacatt

SEQ ID NO: 197138 - DNA, 25 bp, Homo sapien
ctacataaaatgtggatgcaccctg

SEQ ID NO: 197139 - DNA, 25 bp, Homo sapien
taatgacagctacataaaatgtgga

SEQ ID NO: 197140 - DNA, 25 bp, Homo sapien
cacgctgagatggaaaaactattaa

SEQ ID NO: 197141 - DNA, 25 bp, Homo sapien
aacaatggtgttaagggatacacgc

SEQ ID NO: 197142 - DNA, 25 bp, Homo sapien
gtgaaaatgattgaacatgagaatt

SEQ ID NO: 197143 - DNA, 25 bp, Homo sapien
ttaagataatgtctaactgggatgg

SEQ ID NO: 197144 - DNA, 25 bp, Homo sapien
taagataatgtctaactgggatgga

SEQ ID NO: 197145 - DNA, 25 bp, Homo sapien
ttgaacatcaagcatcaaagtttct

SEQ ID NO: 197146 - DNA, 25 bp, Homo sapien
ccataaatgctgtaacaggacatca

SEQ ID NO: 197147 - DNA, 25 bp, Homo sapien
taaatgctgtaacaggacatcaaga

SEQ ID NO: 197148 - DNA, 25 bp, Homo sapien
cataaatgctgtaacaggacatcaa

SEQ ID NO: 197149 - DNA, 25 bp, Homo sapien
aatgctgtaacaggacatcaagagg

SEQ ID NO: 197150 - DNA, 25 bp, Homo sapien
taccctgataaaccactacatttga

SEQ ID NO: 197151 - DNA, 25 bp, Homo sapien
aaatagaattgttagtgggtgcagc

SEQ ID NO: 197152 - DNA, 25 bp, Homo sapien
gaaggcatttccttactgtaacact

SEQ ID NO: 197153 - DNA, 25 bp, Homo sapien
ttaccacgacagaaccaatttgcct

SEQ ID NO: 197154 - DNA, 25 bp, Homo sapien
tttgttgttgtaaggagtataaata

SEQ ID NO: 197155 - DNA, 25 bp, Homo sapien
tgttgttgtaaggagtataaataaa

SEQ ID NO: 197156 - DNA, 25 bp, Homo sapien
atcatattagaattatgcaggggaa

SEQ ID NO: 197157 - DNA, 25 bp, Homo sapien
tatcatattagaattatgcagggga

SEQ ID NO: 197158 - DNA, 25 bp, Homo sapien
actacaccccagcctggcaaaaaag

SEQ ID NO: 197159 - DNA, 25 bp, Homo sapien
tacaccccagcctggcaaaaaagcg

SEQ ID NO: 197160 - DNA, 25 bp, Homo sapien
acaccccagcctggcaaaaaagcga

SEQ ID NO: 197161 - DNA, 25 bp, Homo sapien
accactacaccccagcctggcaaaa

SEQ ID NO: 197162 - DNA, 25 bp, Homo sapien
gtaaacaggtaagacaccgtttgca

SEQ ID NO: 197163 - DNA, 25 bp, Homo sapien
ctaagggtaatctcttgtaaacagg

SEQ ID NO: 197164 - DNA, 25 bp, Homo sapien
caggaagtgggaaggcgctttaaat

SEQ ID NO: 197165 - DNA, 25 bp, Homo sapien
gtaagacaccgtttgcaggaagtgg

SEQ ID NO: 197166 - DNA, 25 bp, Homo sapien
gaaacgtccttcagaatgcaacagg

SEQ ID NO: 197167 - DNA, 25 bp, Homo sapien
gaaactgtctaaataccagcgggac

SEQ ID NO: 197168 - DNA, 25 bp, Homo sapien
gaagttgcctgacgaaatgactgca

SEQ ID NO: 197169 - DNA, 25 bp, Homo sapien
gacaacaaattggtcaacggcggaa

SEQ ID NO: 197170 - DNA, 25 bp, Homo sapien
tctcctcgctgaagaactcgtaagg

SEQ ID NO: 197171 - DNA, 25 bp, Homo sapien
catttcggactgttctcctcgctga

SEQ ID NO: 197172 - DNA, 25 bp, Homo sapien
aacagtccccgccatttcggactgt

SEQ ID NO: 197173 - DNA, 25 bp, Homo sapien
aagaactcgtaaggctgcggcgcct

SEQ ID NO: 197174 - DNA, 25 bp, Homo sapien
gccgggccggtggcctgacaggcag

SEQ ID NO: 197175 - DNA, 25 bp, Homo sapien
agcgagcctcgctatggcgcgcaca

SEQ ID NO: 197176 - DNA, 25 bp, Homo sapien
gcggcggctgctcgtctcctcatcg

SEQ ID NO: 197177 - DNA, 25 bp, Homo sapien
aggctacggccgaggcggctcggag

SEQ ID NO: 197178 - DNA, 25 bp, Homo sapien
ccgacccggagtgcgcgtcgggcga

SEQ ID NO: 197179 - DNA, 25 bp, Homo sapien
tccggactcggtgccactcttgtag

SEQ ID NO: 197180 - DNA, 25 bp, Homo sapien
ctcttgtagcgctggagccccagga

SEQ ID NO: 197181 - DNA, 25 bp, Homo sapien
tcctctcgacctgcttaagacaatc

SEQ ID NO: 197182 - DNA, 25 bp, Homo sapien
agccccaggactaccgtcgtgggag

SEQ ID NO: 197183 - DNA, 25 bp, Homo sapien
ttccagtctaactataaacttttgc

SEQ ID NO: 197184 - DNA, 25 bp, Homo sapien
ccatatcagcaaggctacaaagatt

SEQ ID NO: 197185 - DNA, 25 bp, Homo sapien
tagaccccttattgtgacttttgaa

SEQ ID NO: 197186 - DNA, 25 bp, Homo sapien
ttgccacagggatgaaaactgggtg

SEQ ID NO: 197187 - DNA, 25 bp, Homo sapien
tgcggtagcgtgatcatactagctc

SEQ ID NO: 197188 - DNA, 25 bp, Homo sapien
gtgcggtagcgtgatcatactagct

SEQ ID NO: 197189 - DNA, 25 bp, Homo sapien
cactgcacccgttacaggcatgaac

SEQ ID NO: 197190 - DNA, 25 bp, Homo sapien
atgatccaagcccaattaaaatgtt

SEQ ID NO: 197191 - DNA, 25 bp, Homo sapien
accactgcacccgttacaggcatga

SEQ ID NO: 197192 - DNA, 25 bp, Homo sapien
ggggaaaatgtgaatgatccaagcc

SEQ ID NO: 197193 - DNA, 25 bp, Homo sapien
ccatttactctctcatacttcctca

SEQ ID NO: 197194 - DNA, 25 bp, Homo sapien
atttactctctcatacttcctcaat

SEQ ID NO: 197195 - DNA, 25 bp, Homo sapien
catttactctctcatacttcctcaa

SEQ ID NO: 197196 - DNA, 25 bp, Homo sapien
cgccacaggaaacaataaatgttgt

SEQ ID NO: 197197 - DNA, 25 bp, Homo sapien
gctaccagtcaatagcaaagcaaag

SEQ ID NO: 197198 - DNA, 25 bp, Homo sapien
caaagcaaagcaacgccacaggaaa

SEQ ID NO: 197199 - DNA, 25 bp, Homo sapien
tatttaaagctacaagcgctaccag

SEQ ID NO: 197200 - DNA, 25 bp, Homo sapien
tttcatgggttgctgccatagccag

SEQ ID NO: 197201 - DNA, 25 bp, Homo sapien
tgggttgctgccatagccagctcgg

SEQ ID NO: 197202 - DNA, 25 bp, Homo sapien
atagccagctcggtcctctcacagc

SEQ ID NO: 197203 - DNA, 25 bp, Homo sapien
agccagctcggtcctctcacagcca

SEQ ID NO: 197204 - DNA, 25 bp, Homo sapien
gattgcctccaaaagtaggccctac

SEQ ID NO: 197205 - DNA, 25 bp, Homo sapien
gaagtctagacacagattaagggcc

SEQ ID NO: 197206 - DNA, 25 bp, Homo sapien
cagccatcagggttggattgcctcc

SEQ ID NO: 197207 - DNA, 25 bp, Homo sapien
tgtgtttacagggatagctcatagg

SEQ ID NO: 197208 - DNA, 25 bp, Homo sapien
agaataacctacatattcaaaacac

SEQ ID NO: 197209 - DNA, 25 bp, Homo sapien
tgacatacatataaaacgttttaca

SEQ ID NO: 197210 - DNA, 25 bp, Homo sapien
gaataacctacatattcaaaacact

SEQ ID NO: 197211 - DNA, 25 bp, Homo sapien
acatataaaacgttttacaagcaga

SEQ ID NO: 197212 - DNA, 25 bp, Homo sapien
taatggcctactctgtttacctggg

SEQ ID NO: 197213 - DNA, 25 bp, Homo sapien
tatgtatgcaatcgtactactgaca

SEQ ID NO: 197214 - DNA, 25 bp, Homo sapien
gaggactgcttcaattaggacaatc

SEQ ID NO: 197215 - DNA, 25 bp, Homo sapien
aaacatgagctgatgaagtgtagcc

SEQ ID NO: 197216 - DNA, 25 bp, Homo sapien
agctttggagagctaagaggaaaga

SEQ ID NO: 197217 - DNA, 25 bp, Homo sapien
tacaggatataccacagcactgggc

SEQ ID NO: 197218 - DNA, 25 bp, Homo sapien
gaatgtaaggcactttcgcggttta

SEQ ID NO: 197219 - DNA, 25 bp, Homo sapien
aaagttctgcagtcaggtcgccaca

SEQ ID NO: 197220 - DNA, 25 bp, Homo sapien
gaagaacaggacaaccactcagtgt

SEQ ID NO: 197221 - DNA, 25 bp, Homo sapien
caaagtcagggattcagggctgagc

SEQ ID NO: 197222 - DNA, 25 bp, Homo sapien
gtcatggttggtaaggacaggtcat

SEQ ID NO: 197223 - DNA, 25 bp, Homo sapien
aacgagcttaggtagcgtaatgcta

SEQ ID NO: 197224 - DNA, 25 bp, Homo sapien
tgtattttcttgtctatgagagacc

SEQ ID NO: 197225 - DNA, 25 bp, Homo sapien
ccttgcctctttattcgcaaagtaa

SEQ ID NO: 197226 - DNA, 25 bp, Homo sapien
tctttattcgcaaagtaaataagca

SEQ ID NO: 197227 - DNA, 25 bp, Homo sapien
acagataaaactgtaccttgcctct

SEQ ID NO: 197228 - DNA, 25 bp, Homo sapien
tgtaccttgcctctttattcgcaaa

SEQ ID NO: 197229 - DNA, 25 bp, Homo sapien
attaaagaatgcaattagtacattc

SEQ ID NO: 197230 - DNA, 25 bp, Homo sapien
tcattttaacaatgcagtggttatc

SEQ ID NO: 197231 - DNA, 25 bp, Homo sapien
ccgtctgctcggttcaattgattct

SEQ ID NO: 197232 - DNA, 25 bp, Homo sapien
agctcacctccgtctgctcggttca

SEQ ID NO: 197233 - DNA, 25 bp, Homo sapien
ttgcaatggaagaagtagcagcagg

SEQ ID NO: 197234 - DNA, 25 bp, Homo sapien
catttctcacatgaagaatgcgatt

SEQ ID NO: 197235 - DNA, 25 bp, Homo sapien
tacaaaatcttctaccagatttcca

SEQ ID NO: 197236 - DNA, 25 bp, Homo sapien
cacatgaagaatgcgatttccaata

SEQ ID NO: 197237 - DNA, 25 bp, Homo sapien
tttatgtttaaccaaaggctgtcag

SEQ ID NO: 197238 - DNA, 25 bp, Homo sapien
gttgtagcctgtcaaacctatattg

SEQ ID NO: 197239 - DNA, 25 bp, Homo sapien
tccaaaggtagtaggtaaatccaca

SEQ ID NO: 197240 - DNA, 25 bp, Homo sapien
tacaagtcagcgtttccaaaaagtc

SEQ ID NO: 197241 - DNA, 25 bp, Homo sapien
actgatagtaatttcagggatgaat

SEQ ID NO: 197242 - DNA, 25 bp, Homo sapien
ctgggatgccagtttaatcaagcca

SEQ ID NO: 197243 - DNA, 25 bp, Homo sapien
aatactgccatccatccttggtgtg

SEQ ID NO: 197244 - DNA, 25 bp, Homo sapien
ccataacatctgtggcactgaagtc

SEQ ID NO: 197245 - DNA, 25 bp, Homo sapien
gcaagaactgcattaggccctagcc

SEQ ID NO: 197246 - DNA, 25 bp, Homo sapien
tgaagtcaaagggtctgtaaccctc

SEQ ID NO: 197247 - DNA, 25 bp, Homo sapien
ctaggaaaggaaaccggctatctgg

SEQ ID NO: 197248 - DNA, 25 bp, Homo sapien
ttcgaggatcaggagtgcagccact

SEQ ID NO: 197249 - DNA, 25 bp, Homo sapien
tccccggaatggtacaattcgagga

SEQ ID NO: 197250 - DNA, 25 bp, Homo sapien
tacggtctgagtaaagtcctgcaca

SEQ ID NO: 197251 - DNA, 25 bp, Homo sapien
caaaagcaggtaatctccccggaat

SEQ ID NO: 197252 - DNA, 25 bp, Homo sapien
gtcccaacccttaatgtgaactgta

SEQ ID NO: 197253 - DNA, 25 bp, Homo sapien
gaagagacacccaagatcatgcgct

SEQ ID NO: 197254 - DNA, 25 bp, Homo sapien
tgaactgtatatggaaacagggcct

SEQ ID NO: 197255 - DNA, 25 bp, Homo sapien
cattgctatagattgaattgtgccc

SEQ ID NO: 197256 - DNA, 25 bp, Homo sapien
tttataacaattggatattgcattc

SEQ ID NO: 197257 - DNA, 25 bp, Homo sapien
ctttgtattctttataacaattgga

SEQ ID NO: 197258 - DNA, 25 bp, Homo sapien
tgtattctttataacaattggatat

SEQ ID NO: 197259 - DNA, 25 bp, Homo sapien
ttctttataacaattggatattgca

SEQ ID NO: 197260 - DNA, 25 bp, Homo sapien
tgccgatagtccacaatgccagtat

SEQ ID NO: 197261 - DNA, 25 bp, Homo sapien
ttacttcaaaattggtcaagacaga

SEQ ID NO: 197262 - DNA, 25 bp, Homo sapien
gccatttcaataccttttacttcaa

SEQ ID NO: 197263 - DNA, 25 bp, Homo sapien
aatgacaaagccacctgccgatagt

SEQ ID NO: 197264 - DNA, 25 bp, Homo sapien
acctgattctgatttgattcatatc

SEQ ID NO: 197265 - DNA, 25 bp, Homo sapien
gagttgaattacgtatcatcaaaca

SEQ ID NO: 197266 - DNA, 25 bp, Homo sapien
cctttagaggagttgattttgccaa

SEQ ID NO: 197267 - DNA, 25 bp, Homo sapien
ttcttgctgctacaatgagtttttc

SEQ ID NO: 197268 - DNA, 25 bp, Homo sapien
taagtgatgctgacacaactggata

SEQ ID NO: 197269 - DNA, 25 bp, Homo sapien
tttttgataagtgatgctgacacaa

SEQ ID NO: 197270 - DNA, 25 bp, Homo sapien
gataagtgatgctgacacaactgga

SEQ ID NO: 197271 - DNA, 25 bp, Homo sapien
ttgataagtgatgctgacacaactg

SEQ ID NO: 197272 - DNA, 25 bp, Homo sapien
gcctttctcatatagggcctgaagt

SEQ ID NO: 197273 - DNA, 25 bp, Homo sapien
ggcctttctcatatagggcctgaag

SEQ ID NO: 197274 - DNA, 25 bp, Homo sapien
ctttctcatatagggcctgaagtct

SEQ ID NO: 197275 - DNA, 25 bp, Homo sapien
ggaggcctttctcatatagggcctg

SEQ ID NO: 197276 - DNA, 25 bp, Homo sapien
ttgctgacagtactcatagaggagg

SEQ ID NO: 197277 - DNA, 25 bp, Homo sapien
gactcaggtttataataaattccac

SEQ ID NO: 197278 - DNA, 25 bp, Homo sapien
aattccactatgtatgacaccactg

SEQ ID NO: 197279 - DNA, 25 bp, Homo sapien
cccttttgctgacagtactcataga

SEQ ID NO: 197280 - DNA, 25 bp, Homo sapien
ccacaattccgccaccaacgatgac

SEQ ID NO: 197281 - DNA, 25 bp, Homo sapien
atgtcgcaggatgagtgctctggca

SEQ ID NO: 197282 - DNA, 25 bp, Homo sapien
caccaacgatgactatatcaaatga

SEQ ID NO: 197283 - DNA, 25 bp, Homo sapien
ctggcagaggcaagccccacaattc

SEQ ID NO: 197284 - DNA, 25 bp, Homo sapien
tatcaagttgatatctatatcaatt

SEQ ID NO: 197285 - DNA, 25 bp, Homo sapien
tttttgcaatttccaatggatctat

SEQ ID NO: 197286 - DNA, 25 bp, Homo sapien
tttccaatggatctataattacttc

SEQ ID NO: 197287 - DNA, 25 bp, Homo sapien
gtagagaagggatcttatattttgc

SEQ ID NO: 197288 - DNA, 25 bp, Homo sapien
agagaagggatcttatattttgccc

SEQ ID NO: 197289 - DNA, 25 bp, Homo sapien
gcctcctaaagcgtagcctcttctt

SEQ ID NO: 197290 - DNA, 25 bp, Homo sapien
tctcctaaggctccggagtagttgg

SEQ ID NO: 197291 - DNA, 25 bp, Homo sapien
gcttcccgtggctcttagaataaaa

SEQ ID NO: 197292 - DNA, 25 bp, Homo sapien
tagaataaaagtcaacgtgtggtta

SEQ ID NO: 197293 - DNA, 25 bp, Homo sapien
tctgggtcattccacaccatatgtc

SEQ ID NO: 197294 - DNA, 25 bp, Homo sapien
tctagtcgtcaaaatagccaaaacc

SEQ ID NO: 197295 - DNA, 25 bp, Homo sapien
gccttacagccttcacacaaactgt

SEQ ID NO: 197296 - DNA, 25 bp, Homo sapien
taaacttcagtcacactcatatggc

SEQ ID NO: 197297 - DNA, 25 bp, Homo sapien
tcttggcctcccagacgcgaacccg

SEQ ID NO: 197298 - DNA, 25 bp, Homo sapien
ggctacctccacacagcggtcttgg

SEQ ID NO: 197299 - DNA, 25 bp, Homo sapien
ccaaataacgcagcgctggcaccat

SEQ ID NO: 197300 - DNA, 25 bp, Homo sapien
gtccgcaggcaccaaccaaataacg

SEQ ID NO: 197301 - DNA, 25 bp, Homo sapien
ccctccacggccgaggacccgcgct

SEQ ID NO: 197302 - DNA, 25 bp, Homo sapien
ctccctcagcgctcagaagaagcca

SEQ ID NO: 197303 - DNA, 25 bp, Homo sapien
acggccgaggacccgcgctctttag

SEQ ID NO: 197304 - DNA, 25 bp, Homo sapien
gaagaagccacttgaccctccacgg

SEQ ID NO: 197305 - DNA, 25 bp, Homo sapien
tacttgataacgtgtcttagcccac

SEQ ID NO: 197306 - DNA, 25 bp, Homo sapien
cagtgctttgttcagaaacctcggt

SEQ ID NO: 197307 - DNA, 25 bp, Homo sapien
gacctgactgtgcaagttgcctgcc

SEQ ID NO: 197308 - DNA, 25 bp, Homo sapien
gactcacatgtgctagtgaaactga

SEQ ID NO: 197309 - DNA, 25 bp, Homo sapien
gatggttacagctaaataagttccc

SEQ ID NO: 197310 - DNA, 25 bp, Homo sapien
tgtttgggttgcaggatttcgatga

SEQ ID NO: 197311 - DNA, 25 bp, Homo sapien
ataagttcccaatagcttgtttggc

SEQ ID NO: 197312 - DNA, 25 bp, Homo sapien
gtgcagtgtgatcctaattttgttt

SEQ ID NO: 197313 - DNA, 25 bp, Homo sapien
caacagggtggattatgatcgcatc

SEQ ID NO: 197314 - DNA, 25 bp, Homo sapien
gacgccaccgactcttgtatcatga

SEQ ID NO: 197315 - DNA, 25 bp, Homo sapien
ccttgacagcgttcacgtggaaaca

SEQ ID NO: 197316 - DNA, 25 bp, Homo sapien
aatacaagattcaggcgatcgacgc

SEQ ID NO: 197317 - DNA, 25 bp, Homo sapien
tctgagtctcatcggcgtgatgaaa

SEQ ID NO: 197318 - DNA, 25 bp, Homo sapien
cagataatactagcaaggaatgttt

SEQ ID NO: 197319 - DNA, 25 bp, Homo sapien
tgcatccactggttaggaaagctgt

SEQ ID NO: 197320 - DNA, 25 bp, Homo sapien
gagcaagtcacctaatcccaaatgc

SEQ ID NO: 197321 - DNA, 25 bp, Homo sapien
cttgatgtagatatttagaatcctt

SEQ ID NO: 197322 - DNA, 25 bp, Homo sapien
ctatagatatctcttgatgtagata

SEQ ID NO: 197323 - DNA, 25 bp, Homo sapien
gatagcatacagacttactcagaat

SEQ ID NO: 197324 - DNA, 25 bp, Homo sapien
cattgcttcaacaggatttgcgtgc

SEQ ID NO: 197325 - DNA, 25 bp, Homo sapien
tggacatagatacttggctgaatac

SEQ ID NO: 197326 - DNA, 25 bp, Homo sapien
cagtaaaaactagtgggctatgctt

SEQ ID NO: 197327 - DNA, 25 bp, Homo sapien
tatgatcacggccactgcacaccag

SEQ ID NO: 197328 - DNA, 25 bp, Homo sapien
caccagcctggtagcctgggtgaaa

SEQ ID NO: 197329 - DNA, 25 bp, Homo sapien
ctatgatcacggccactgcacacca

SEQ ID NO: 197330 - DNA, 25 bp, Homo sapien
tgcacaccagcctggtagcctgggt

SEQ ID NO: 197331 - DNA, 25 bp, Homo sapien
gttctctgtcgcagcgtcccaggta

SEQ ID NO: 197332 - DNA, 25 bp, Homo sapien
cagttctctgtcgcagcgtcccagg

SEQ ID NO: 197333 - DNA, 25 bp, Homo sapien
agttctctgtcgcagcgtcccaggt

SEQ ID NO: 197334 - DNA, 25 bp, Homo sapien
gcagttctctgtcgcagcgtcccag

SEQ ID NO: 197335 - DNA, 25 bp, Homo sapien
gatacagtggagatttcataccgaa

SEQ ID NO: 197336 - DNA, 25 bp, Homo sapien
gattcaccacgatttagtctagagc

SEQ ID NO: 197337 - DNA, 25 bp, Homo sapien
cattactgtatggtgagacaactga

SEQ ID NO: 197338 - DNA, 25 bp, Homo sapien
tagtaatctgcctccgtcaagtgta

SEQ ID NO: 197339 - DNA, 25 bp, Homo sapien
taggactcaggcaacagagatccga

SEQ ID NO: 197340 - DNA, 25 bp, Homo sapien
tctagttttgccagaggtatgggac

SEQ ID NO: 197341 - DNA, 25 bp, Homo sapien
tgtggtacaactgaagcataaatct

SEQ ID NO: 197342 - DNA, 25 bp, Homo sapien
gagatccgaggaaatatatatgggc

SEQ ID NO: 197343 - DNA, 25 bp, Homo sapien
gcatggaagactggatctggaattt

SEQ ID NO: 197344 - DNA, 25 bp, Homo sapien
caagcatggaagactggatctggaa

SEQ ID NO: 197345 - DNA, 25 bp, Homo sapien
tacaagtgcaactccaaacaggttt

SEQ ID NO: 197346 - DNA, 25 bp, Homo sapien
taaactgaaatacaagtgcaactcc

SEQ ID NO: 197347 - DNA, 25 bp, Homo sapien
tcaaagcatctattgattccttttt

SEQ ID NO: 197348 - DNA, 25 bp, Homo sapien
cttcaaagcatctattgattccttt

SEQ ID NO: 197349 - DNA, 25 bp, Homo sapien
ttcaaagcatctattgattcctttt

SEQ ID NO: 197350 - DNA, 25 bp, Homo sapien
ttcttcaaagcatctattgattcct

SEQ ID NO: 197351 - DNA, 25 bp, Homo sapien
tcttggtatcacagtagtacttctt

SEQ ID NO: 197352 - DNA, 25 bp, Homo sapien
ctgccagttagctggggtaggtact

SEQ ID NO: 197353 - DNA, 25 bp, Homo sapien
ggtatcacagtagtacttcttatta

SEQ ID NO: 197354 - DNA, 25 bp, Homo sapien
cagttagctggggtaggtactgcaa

SEQ ID NO: 197355 - DNA, 25 bp, Homo sapien
caggagttgagagcttgctgagatc

SEQ ID NO: 197356 - DNA, 25 bp, Homo sapien
agagcacctaggcaatttgcctact

SEQ ID NO: 197357 - DNA, 25 bp, Homo sapien
tcaagcatggcacagtgtacacttg

SEQ ID NO: 197358 - DNA, 25 bp, Homo sapien
gccaatgccttgtcttatagcggag

SEQ ID NO: 197359 - DNA, 25 bp, Homo sapien
tatgacctgtctcctagtgctggaa

SEQ ID NO: 197360 - DNA, 25 bp, Homo sapien
tcatgtaccttgttgagacctgtgc

SEQ ID NO: 197361 - DNA, 25 bp, Homo sapien
acaagggcacctttaggattcaggg

SEQ ID NO: 197362 - DNA, 25 bp, Homo sapien
caggtggcaggtaggagatcatttc

SEQ ID NO: 197363 - DNA, 25 bp, Homo sapien
cctttgagtagggtccatgtggaga

SEQ ID NO: 197364 - DNA, 25 bp, Homo sapien
tcaaaatatgggtgatgcaacagct

SEQ ID NO: 197365 - DNA, 25 bp, Homo sapien
tgctttcggctctttcttagggtct

SEQ ID NO: 197366 - DNA, 25 bp, Homo sapien
gcaacagctgttcacatgtcagcct

SEQ ID NO: 197367 - DNA, 25 bp, Homo sapien
ggttgtcctcactcctcgttgtaca

SEQ ID NO: 197368 - DNA, 25 bp, Homo sapien
tacaaatacccatagcaatgcccag

SEQ ID NO: 197369 - DNA, 25 bp, Homo sapien
tatataaggagaggcataacgtaca

SEQ ID NO: 197370 - DNA, 25 bp, Homo sapien
tatgtcagaggtgttgaaaccacag

SEQ ID NO: 197371 - DNA, 25 bp, Homo sapien
agggcaggataagagatgtttggga

SEQ ID NO: 197372 - DNA, 25 bp, Homo sapien
gccccagggcaggataagagatgtt

SEQ ID NO: 197373 - DNA, 25 bp, Homo sapien
agccccagggcaggataagagatgt

SEQ ID NO: 197374 - DNA, 25 bp, Homo sapien
cccagggcaggataagagatgtttg

SEQ ID NO: 197375 - DNA, 25 bp, Homo sapien
tgtgagcgtttcacagccccagaag

SEQ ID NO: 197376 - DNA, 25 bp, Homo sapien
tgctgtctcagcaacaatgtctgga

SEQ ID NO: 197377 - DNA, 25 bp, Homo sapien
gacgtgccattgctatatcatcgag

SEQ ID NO: 197378 - DNA, 25 bp, Homo sapien
gttgcctgtgatacgctggagccca

SEQ ID NO: 197379 - DNA, 25 bp, Homo sapien
acacttgctggtgcctaggaatgag

SEQ ID NO: 197380 - DNA, 25 bp, Homo sapien
gattcgtgctaaacacttgctggtg

SEQ ID NO: 197381 - DNA, 25 bp, Homo sapien
ctgaagtactgattcgtgctaaaca

SEQ ID NO: 197382 - DNA, 25 bp, Homo sapien
tgctggtgcctaggaatgagatccc

SEQ ID NO: 197383 - DNA, 25 bp, Homo sapien
caaggtcttcctaatcagatacagc

SEQ ID NO: 197384 - DNA, 25 bp, Homo sapien
gccacgtagtctgtatagtagtcac

SEQ ID NO: 197385 - DNA, 25 bp, Homo sapien
caattgcccaaacatccaccggggg

SEQ ID NO: 197386 - DNA, 25 bp, Homo sapien
gggagcggtaccacctggtagccac

SEQ ID NO: 197387 - DNA, 25 bp, Homo sapien
aaaacaaacagcagcggaaggctgg

SEQ ID NO: 197388 - DNA, 25 bp, Homo sapien
aaagtcacaaagcttaatcacggaa

SEQ ID NO: 197389 - DNA, 25 bp, Homo sapien
tcaaaagccgagcaaatccaaagtc

SEQ ID NO: 197390 - DNA, 25 bp, Homo sapien
cacggaatgtttcgtgatgaggata

SEQ ID NO: 197391 - DNA, 25 bp, Homo sapien
gatattttctggcttcacgtctcta

SEQ ID NO: 197392 - DNA, 25 bp, Homo sapien
gaaagtagggtagccggtcttagca

SEQ ID NO: 197393 - DNA, 25 bp, Homo sapien
tgtcagagcctgaatcatcccaaat

SEQ ID NO: 197394 - DNA, 25 bp, Homo sapien
ggacaacagcaaaagagcagcctaa

SEQ ID NO: 197395 - DNA, 25 bp, Homo sapien
gataatacatcccatgaagcacttg

SEQ ID NO: 197396 - DNA, 25 bp, Homo sapien
gggagagtcgctagatgtcagctct

SEQ ID NO: 197397 - DNA, 25 bp, Homo sapien
tctgtcccacacacaagtgctctga

SEQ ID NO: 197398 - DNA, 25 bp, Homo sapien
tagactcaaatcacctgtggtttcc

SEQ ID NO: 197399 - DNA, 25 bp, Homo sapien
gaatttagactcaaatcacctgtgg

SEQ ID NO: 197400 - DNA, 25 bp, Homo sapien
gatcagtgtcaatgtttccccatgg

SEQ ID NO: 197401 - DNA, 25 bp, Homo sapien
gttctcactccaaaggaccttcagg

SEQ ID NO: 197402 - DNA, 25 bp, Homo sapien
tgggtcaaaatactgctcagggtcc

SEQ ID NO: 197403 - DNA, 25 bp, Homo sapien
gctagatcgtttgcaacctgagaga

SEQ ID NO: 197404 - DNA, 25 bp, Homo sapien
taggttgcttggttcgagactcgac

SEQ ID NO: 197405 - DNA, 25 bp, Homo sapien
tgaagtcacgtcacctgggcaatag

SEQ ID NO: 197406 - DNA, 25 bp, Homo sapien
cctttagctagttggaggctcctca

SEQ ID NO: 197407 - DNA, 25 bp, Homo sapien
cactcatggccaaaacgaagctcta

SEQ ID NO: 197408 - DNA, 25 bp, Homo sapien
gggttccacctactgcaactgacat

SEQ ID NO: 197409 - DNA, 25 bp, Homo sapien
gcactttgcactgggtttggggttc

SEQ ID NO: 197410 - DNA, 25 bp, Homo sapien
tttggggttccacctactgcaactg

SEQ ID NO: 197411 - DNA, 25 bp, Homo sapien
tggggttccacctactgcaactgac

SEQ ID NO: 197412 - DNA, 25 bp, Homo sapien
ccttttgggagtacaagaccacata

SEQ ID NO: 197413 - DNA, 25 bp, Homo sapien
tctgagtagtttctaagcagtataa

SEQ ID NO: 197414 - DNA, 25 bp, Homo sapien
catagactccaagtgaatggggttc

SEQ ID NO: 197415 - DNA, 25 bp, Homo sapien
gaatggggttctaccttaaatctga

SEQ ID NO: 197416 - DNA, 25 bp, Homo sapien
ctgccaagttatgctcttcacgaga

SEQ ID NO: 197417 - DNA, 25 bp, Homo sapien
gctcttcacgagatgttctggtacc

SEQ ID NO: 197418 - DNA, 25 bp, Homo sapien
tgccaagttatgctcttcacgagat

SEQ ID NO: 197419 - DNA, 25 bp, Homo sapien
gagtcagtcaaatctaacaagccta

SEQ ID NO: 197420 - DNA, 25 bp, Homo sapien
tacctccgccctgatgcattatgtg

SEQ ID NO: 197421 - DNA, 25 bp, Homo sapien
tattcacccatacccaaattctgag

SEQ ID NO: 197422 - DNA, 25 bp, Homo sapien
taaggttgctttacatacctccgcc

SEQ ID NO: 197423 - DNA, 25 bp, Homo sapien
catttcaatgtctgtgttgctttaa

SEQ ID NO: 197424 - DNA, 25 bp, Homo sapien
caatgtctgtgttgctttaaaaatt

SEQ ID NO: 197425 - DNA, 25 bp, Homo sapien
cccagcccttcatttcaatgtctgt

SEQ ID NO: 197426 - DNA, 25 bp, Homo sapien
ccagcccttcatttcaatgtctgtg

SEQ ID NO: 197427 - DNA, 25 bp, Homo sapien
cagattacttgtcttttttcccatc

SEQ ID NO: 197428 - DNA, 25 bp, Homo sapien
taactcatcactagtaatattcaga

SEQ ID NO: 197429 - DNA, 25 bp, Homo sapien
gctttattcttaatgggtccactgt

SEQ ID NO: 197430 - DNA, 25 bp, Homo sapien
aactttttcctatgtcaatatatgt

SEQ ID NO: 197431 - DNA, 25 bp, Homo sapien
tggcaacaccagcatcagtagctta

SEQ ID NO: 197432 - DNA, 25 bp, Homo sapien
tggcaccaagcaggctggtaaccca

SEQ ID NO: 197433 - DNA, 25 bp, Homo sapien
gtcttctgacccctaaggtacttga

SEQ ID NO: 197434 - DNA, 25 bp, Homo sapien
cattatacagctagaagtcccctga

SEQ ID NO: 197435 - DNA, 25 bp, Homo sapien
aggctgccctcaacttcaggaaggg

SEQ ID NO: 197436 - DNA, 25 bp, Homo sapien
tctgtgtgctcaccaagtcttcttc

SEQ ID NO: 197437 - DNA, 25 bp, Homo sapien
gaggctgccctcaacttcaggaagg

SEQ ID NO: 197438 - DNA, 25 bp, Homo sapien
ctctgtgtgctcaccaagtcttctt

SEQ ID NO: 197439 - DNA, 25 bp, Homo sapien
tccctggtcaggcatagactaacta

SEQ ID NO: 197440 - DNA, 25 bp, Homo sapien
gagactgagatcacttctatgcaga

SEQ ID NO: 197441 - DNA, 25 bp, Homo sapien
cctagtagccattgcctttggaatc

SEQ ID NO: 197442 - DNA, 25 bp, Homo sapien
tacagcagagtagacacccggattg

SEQ ID NO: 197443 - DNA, 25 bp, Homo sapien
ctcctgaagacttccaggaggttaa

SEQ ID NO: 197444 - DNA, 25 bp, Homo sapien
acaccaggtgaagcctccgtttcct

SEQ ID NO: 197445 - DNA, 25 bp, Homo sapien
tatctgtccaactcatggagaactg

SEQ ID NO: 197446 - DNA, 25 bp, Homo sapien
ctctttggtatctgtccaactcatg

SEQ ID NO: 197447 - DNA, 25 bp, Homo sapien
cctgctccgcagcacccggtcccat

SEQ ID NO: 197448 - DNA, 25 bp, Homo sapien
tgctccgcagcacccggtcccatcg

SEQ ID NO: 197449 - DNA, 25 bp, Homo sapien
gcgcggccgagcctccacgatcaga

SEQ ID NO: 197450 - DNA, 25 bp, Homo sapien
gagcctccacgatcagaaccgcccc

SEQ ID NO: 197451 - DNA, 25 bp, Homo sapien
gctgtaacacttatggcaaagggct

SEQ ID NO: 197452 - DNA, 25 bp, Homo sapien
ctgtaacacttatggcaaagggctg

SEQ ID NO: 197453 - DNA, 25 bp, Homo sapien
actgctgtaacacttatggcaaagg

SEQ ID NO: 197454 - DNA, 25 bp, Homo sapien
tgctgtaacacttatggcaaagggc

SEQ ID NO: 197455 - DNA, 25 bp, Homo sapien
agaactcaaagggacacctctgatc

SEQ ID NO: 197456 - DNA, 25 bp, Homo sapien
agggacacctctgatcctcaaacca

SEQ ID NO: 197457 - DNA, 25 bp, Homo sapien
cagtctgcagcgaatagctggaggt

SEQ ID NO: 197458 - DNA, 25 bp, Homo sapien
aaccagtctgcagcgaatagctgga

SEQ ID NO: 197459 - DNA, 25 bp, Homo sapien
ttaggatttatgactataatatgga

SEQ ID NO: 197460 - DNA, 25 bp, Homo sapien
taggatttatgactataatatggaa

SEQ ID NO: 197461 - DNA, 25 bp, Homo sapien
gatttatgactataatatggaataa

SEQ ID NO: 197462 - DNA, 25 bp, Homo sapien
ttatgactataatatggaataatta

SEQ ID NO: 197463 - DNA, 25 bp, Homo sapien
aagcatcattgcataaaaatatcca

SEQ ID NO: 197464 - DNA, 25 bp, Homo sapien
gcatcattgcataaaaatatccata

SEQ ID NO: 197465 - DNA, 25 bp, Homo sapien
cacttctgagaatatactttccata

SEQ ID NO: 197466 - DNA, 25 bp, Homo sapien
tcattgcataaaaatatccatacca

SEQ ID NO: 197467 - DNA, 25 bp, Homo sapien
tctggaactggatcaatcatggagc

SEQ ID NO: 197468 - DNA, 25 bp, Homo sapien
ccagggaggtgtagcaacacagtca

SEQ ID NO: 197469 - DNA, 25 bp, Homo sapien
ggccttcagaatggaattctggaac

SEQ ID NO: 197470 - DNA, 25 bp, Homo sapien
cagtcactaagccttttgtcagggc

SEQ ID NO: 197471 - DNA, 25 bp, Homo sapien
aatccctcacatgatgcaggtgcct

SEQ ID NO: 197472 - DNA, 25 bp, Homo sapien
taaaaatccctcacatgatgcaggt

SEQ ID NO: 197473 - DNA, 25 bp, Homo sapien
gatgcctgtcctccttagattctac

SEQ ID NO: 197474 - DNA, 25 bp, Homo sapien
cttaggagggggatgcctgtcctcc

SEQ ID NO: 197475 - DNA, 25 bp, Homo sapien
tgttgcagtgcctgagtagggcaat

SEQ ID NO: 197476 - DNA, 25 bp, Homo sapien
ctgagtagggcaataaggttcttgc

SEQ ID NO: 197477 - DNA, 25 bp, Homo sapien
ggttgttgcagtgcctgagtagggc

SEQ ID NO: 197478 - DNA, 25 bp, Homo sapien
tgagtagggcaataaggttcttgct

SEQ ID NO: 197479 - DNA, 25 bp, Homo sapien
tcataggtaccagcagccgtcttga

SEQ ID NO: 197480 - DNA, 25 bp, Homo sapien
taggtaccagcagccgtcttgaagg

SEQ ID NO: 197481 - DNA, 25 bp, Homo sapien
aagaatgacaagacctgcctcatag

SEQ ID NO: 197482 - DNA, 25 bp, Homo sapien
aataactgcactcaagaatgacaag

SEQ ID NO: 197483 - DNA, 25 bp, Homo sapien
ttctatgacctgtgaagtaagagcc

SEQ ID NO: 197484 - DNA, 25 bp, Homo sapien
cctggtcaaaatagtaaatccgaag

SEQ ID NO: 197485 - DNA, 25 bp, Homo sapien
gaagtaagagccaatatggcagaaa

SEQ ID NO: 197486 - DNA, 25 bp, Homo sapien
cctggcaacacaaccctggtcaaaa

SEQ ID NO: 197487 - DNA, 25 bp, Homo sapien
ttctgcattcctctcaagacccagc

SEQ ID NO: 197488 - DNA, 25 bp, Homo sapien
ctgactaacacagtacgtggaaagt

SEQ ID NO: 197489 - DNA, 25 bp, Homo sapien
gccagtgatgtgcaccgtggatgct

SEQ ID NO: 197490 - DNA, 25 bp, Homo sapien
caccgtggatgcttgacctgtttta

SEQ ID NO: 197491 - DNA, 25 bp, Homo sapien
ccaagagtgttttcactagagggac

SEQ ID NO: 197492 - DNA, 25 bp, Homo sapien
aaccaggcaattttacccaagagtg

SEQ ID NO: 197493 - DNA, 25 bp, Homo sapien
tcattattccagcaacgacaaaaaa

SEQ ID NO: 197494 - DNA, 25 bp, Homo sapien
tgtggcctaaaacaccaattctgcc

SEQ ID NO: 197495 - DNA, 25 bp, Homo sapien
ccacatagcagtagatgattccttc

SEQ ID NO: 197496 - DNA, 25 bp, Homo sapien
catagcagtagatgattccttctct

SEQ ID NO: 197497 - DNA, 25 bp, Homo sapien
ctctttgtctcacttgtttttcttg

SEQ ID NO: 197498 - DNA, 25 bp, Homo sapien
ctgccacatagcagtagatgattcc

SEQ ID NO: 197499 - DNA, 25 bp, Homo sapien
caactccgctaggagcatctacttt

SEQ ID NO: 197500 - DNA, 25 bp, Homo sapien
ctgccataggtagaacgtctgccca

SEQ ID NO: 197501 - DNA, 25 bp, Homo sapien
taggtagaacgtctgcccagggatc

SEQ ID NO: 197502 - DNA, 25 bp, Homo sapien
ttgacctccaactccgctaggagca

SEQ ID NO: 197503 - DNA, 25 bp, Homo sapien
tcagaagacggtgaataccctggta

SEQ ID NO: 197504 - DNA, 25 bp, Homo sapien
ccccatagcttagagccagctgtgg

SEQ ID NO: 197505 - DNA, 25 bp, Homo sapien
tagaagaagttccaccccatagctt

SEQ ID NO: 197506 - DNA, 25 bp, Homo sapien
cctgagttacggaaaggagttgaat

SEQ ID NO: 197507 - DNA, 25 bp, Homo sapien
caattttctttatgacagggtcatc

SEQ ID NO: 197508 - DNA, 25 bp, Homo sapien
tcttgatggccacaatctgacccgt

SEQ ID NO: 197509 - DNA, 25 bp, Homo sapien
gagcattcggatttcccgaagggca

SEQ ID NO: 197510 - DNA, 25 bp, Homo sapien
ttatgacagggtcatcttctgattc

SEQ ID NO: 197511 - DNA, 25 bp, Homo sapien
ctacatttgaaaacaactccatagg

SEQ ID NO: 197512 - DNA, 25 bp, Homo sapien
gaaaacaactccataggatccttct

SEQ ID NO: 197513 - DNA, 25 bp, Homo sapien
ccataggatccttctccaattttcc

SEQ ID NO: 197514 - DNA, 25 bp, Homo sapien
tttgaaaacaactccataggatcct

SEQ ID NO: 197515 - DNA, 25 bp, Homo sapien
ttcagccgagaatggtggctcacgc

SEQ ID NO: 197516 - DNA, 25 bp, Homo sapien
cttcagccgagaatggtggctcacg

SEQ ID NO: 197517 - DNA, 25 bp, Homo sapien
cttcacatagtttgaaaacgtcgct

SEQ ID NO: 197518 - DNA, 25 bp, Homo sapien
tggcaccaacggactgcactagagc

SEQ ID NO: 197519 - DNA, 25 bp, Homo sapien
aaacgtcgcttataaaatattggca

SEQ ID NO: 197520 - DNA, 25 bp, Homo sapien
tagagccccacccaacgatgagtgt

SEQ ID NO: 197521 - DNA, 25 bp, Homo sapien
taaaatgtaacttgccatcctaaaa

SEQ ID NO: 197522 - DNA, 25 bp, Homo sapien
tgccatcctaaaacgagccgagctg

SEQ ID NO: 197523 - DNA, 25 bp, Homo sapien
aaacgagccgagctgtaagataagc

SEQ ID NO: 197524 - DNA, 25 bp, Homo sapien
gccgagctgtaagataagctatctt

SEQ ID NO: 197525 - DNA, 25 bp, Homo sapien
gttatcgttcatccgatctaagaca

SEQ ID NO: 197526 - DNA, 25 bp, Homo sapien
gttcatccgatctaagacacctgag

SEQ ID NO: 197527 - DNA, 25 bp, Homo sapien
tcatccgatctaagacacctgagct

SEQ ID NO: 197528 - DNA, 25 bp, Homo sapien
tcgttcatccgatctaagacacctg

SEQ ID NO: 197529 - DNA, 25 bp, Homo sapien
ggcggtcagggacgggcctggctcc

SEQ ID NO: 197530 - DNA, 25 bp, Homo sapien
cctcgccttcttccgcccagctcgg

SEQ ID NO: 197531 - DNA, 25 bp, Homo sapien
cccgcccgggactcacggcgccgcg

SEQ ID NO: 197532 - DNA, 25 bp, Homo sapien
actcacggcgccgcggcggtcaggg

SEQ ID NO: 197533 - DNA, 25 bp, Homo sapien
gcgggccgagtcctgctgccgggag

SEQ ID NO: 197534 - DNA, 25 bp, Homo sapien
cgcgggccgagtcctgctgccggga

SEQ ID NO: 197535 - DNA, 25 bp, Homo sapien
cgggccgagtcctgctgccgggaga

SEQ ID NO: 197536 - DNA, 25 bp, Homo sapien
gagcaagacgcctgcgctaggagcc

SEQ ID NO: 197537 - DNA, 25 bp, Homo sapien
gatttgcaaacttccgcaggccgtg

SEQ ID NO: 197538 - DNA, 25 bp, Homo sapien
tccctttggtcccttggaggcatct

SEQ ID NO: 197539 - DNA, 25 bp, Homo sapien
gcaaagcgcagctgtaaccgcgtct

SEQ ID NO: 197540 - DNA, 25 bp, Homo sapien
gtgccagcatcaatgcgggtacttg

SEQ ID NO: 197541 - DNA, 25 bp, Homo sapien
tttatcatccgtcccgttcccagtg

SEQ ID NO: 197542 - DNA, 25 bp, Homo sapien
ccagtgccagcatcaatgcgggtac

SEQ ID NO: 197543 - DNA, 25 bp, Homo sapien
gccagcatcaatgcgggtacttgtc

SEQ ID NO: 197544 - DNA, 25 bp, Homo sapien
gaagcagtacccgaggagagaaaat

SEQ ID NO: 197545 - DNA, 25 bp, Homo sapien
aagcagtacccgaggagagaaaatt

SEQ ID NO: 197546 - DNA, 25 bp, Homo sapien
agcagtacccgaggagagaaaatta

SEQ ID NO: 197547 - DNA, 25 bp, Homo sapien
gacttgttggatgatatggtgaaca

SEQ ID NO: 197548 - DNA, 25 bp, Homo sapien
acaagggttctaactttgcatcctt

SEQ ID NO: 197549 - DNA, 25 bp, Homo sapien
cacctctgcaaggtttggctttgaa

SEQ ID NO: 197550 - DNA, 25 bp, Homo sapien
atagtctattgaggttgtgatttgc

SEQ ID NO: 197551 - DNA, 25 bp, Homo sapien
cacgagagtcacaaggcgggaaatt

SEQ ID NO: 197552 - DNA, 25 bp, Homo sapien
caatggttcaggacagcacgtactt

SEQ ID NO: 197553 - DNA, 25 bp, Homo sapien
tctttcagactgagacttgtgtgcg

SEQ ID NO: 197554 - DNA, 25 bp, Homo sapien
taagtctggttggaggagtctgcac

SEQ ID NO: 197555 - DNA, 25 bp, Homo sapien
gctgtgatgaacttgggtgcgcagg

SEQ ID NO: 197556 - DNA, 25 bp, Homo sapien
acttgggtgcgcaggtaactcttca

SEQ ID NO: 197557 - DNA, 25 bp, Homo sapien
atgaacttgggtgcgcaggtaactc

SEQ ID NO: 197558 - DNA, 25 bp, Homo sapien
gggtgcgcaggtaactcttcaacat

SEQ ID NO: 197559 - DNA, 25 bp, Homo sapien
ggagccttgaaaagcatctcctcca

SEQ ID NO: 197560 - DNA, 25 bp, Homo sapien
cctctgattgaaccctggagccttg

SEQ ID NO: 197561 - DNA, 25 bp, Homo sapien
cactgtcacctctgattgaaccctg

SEQ ID NO: 197562 - DNA, 25 bp, Homo sapien
tggagccttgaaaagcatctcctcc

SEQ ID NO: 197563 - DNA, 25 bp, Homo sapien
cagccagtatcagtggacagctcca

SEQ ID NO: 197564 - DNA, 25 bp, Homo sapien
tgattccagccagtatcagtggaca

SEQ ID NO: 197565 - DNA, 25 bp, Homo sapien
cttctgattccagccagtatcagtg

SEQ ID NO: 197566 - DNA, 25 bp, Homo sapien
tccagccagtatcagtggacagctc

SEQ ID NO: 197567 - DNA, 25 bp, Homo sapien
ggagcctactgtgcccatgtgcaaa

SEQ ID NO: 197568 - DNA, 25 bp, Homo sapien
tctatgcctggtgtagtggtcatcc

SEQ ID NO: 197569 - DNA, 25 bp, Homo sapien
gacagcgtacggttaaatgctccag

SEQ ID NO: 197570 - DNA, 25 bp, Homo sapien
gatgcccttggcagcaacttgatga

SEQ ID NO: 197571 - DNA, 25 bp, Homo sapien
taaatgtcccctgttttgaggatgg

SEQ ID NO: 197572 - DNA, 25 bp, Homo sapien
cactgtagtgtcatctagctgggca

SEQ ID NO: 197573 - DNA, 25 bp, Homo sapien
gaagactcttcggtattccaccatg

SEQ ID NO: 197574 - DNA, 25 bp, Homo sapien
caaggtctagacataatgcgtggga

SEQ ID NO: 197575 - DNA, 25 bp, Homo sapien
tgtgcatttttaaagaataaataac

SEQ ID NO: 197576 - DNA, 25 bp, Homo sapien
tactgaaatcatatcatatgtgcat

SEQ ID NO: 197577 - DNA, 25 bp, Homo sapien
tatgtgcatttttaaagaataaata

SEQ ID NO: 197578 - DNA, 25 bp, Homo sapien
ttactgaaatcatatcatatgtgca

SEQ ID NO: 197579 - DNA, 25 bp, Homo sapien
cagaagactcatggtcaggctcaac

SEQ ID NO: 197580 - DNA, 25 bp, Homo sapien
ggatagatctcttaaccttgctaaa

SEQ ID NO: 197581 - DNA, 25 bp, Homo sapien
gcgtattgcatagtgaaaagaacag

SEQ ID NO: 197582 - DNA, 25 bp, Homo sapien
tatagagtttgctattgctaacccc

SEQ ID NO: 197583 - DNA, 25 bp, Homo sapien
gttagatacattacaccactccagc

SEQ ID NO: 197584 - DNA, 25 bp, Homo sapien
tacacatggtagacacagctagaca

SEQ ID NO: 197585 - DNA, 25 bp, Homo sapien
tctaaaaataccatggcacccttgt

SEQ ID NO: 197586 - DNA, 25 bp, Homo sapien
tatcatgggcaattaaatacttccc

SEQ ID NO: 197587 - DNA, 25 bp, Homo sapien
aagagatagactagctgtttccagc

SEQ ID NO: 197588 - DNA, 25 bp, Homo sapien
ccataatagttaaagcaaatcatag

SEQ ID NO: 197589 - DNA, 25 bp, Homo sapien
tcatttgcaatataacccataatag

SEQ ID NO: 197590 - DNA, 25 bp, Homo sapien
gtgcagtttgtattgaatttcctta

SEQ ID NO: 197591 - DNA, 25 bp, Homo sapien
atgtagagattgctgtgtgcagtag

SEQ ID NO: 197592 - DNA, 25 bp, Homo sapien
tgtccagccaagatgtagagattgc

SEQ ID NO: 197593 - DNA, 25 bp, Homo sapien
atgtccagccaagatgtagagattg

SEQ ID NO: 197594 - DNA, 25 bp, Homo sapien
tttagttctagagtcatttaccaga

SEQ ID NO: 197595 - DNA, 25 bp, Homo sapien
tcctggagaagcaaagagcctctca

SEQ ID NO: 197596 - DNA, 25 bp, Homo sapien
agtagagacagctgattcacctgcc

SEQ ID NO: 197597 - DNA, 25 bp, Homo sapien
gcaaagagcctctcattttagttct

SEQ ID NO: 197598 - DNA, 25 bp, Homo sapien
taataagcggaaaactcttgtttca

SEQ ID NO: 197599 - DNA, 25 bp, Homo sapien
ctgtctgatcctaataagcggaaaa

SEQ ID NO: 197600 - DNA, 25 bp, Homo sapien
tgatcctaataagcggaaaactctt

SEQ ID NO: 197601 - DNA, 25 bp, Homo sapien
tctgatcctaataagcggaaaactc

SEQ ID NO: 197602 - DNA, 25 bp, Homo sapien
gaactctttgtgatatgcattataa

SEQ ID NO: 197603 - DNA, 25 bp, Homo sapien
tgggtcaggtactctacttagaaga

SEQ ID NO: 197604 - DNA, 25 bp, Homo sapien
gaacccacatttatggaacatctag

SEQ ID NO: 197605 - DNA, 25 bp, Homo sapien
gtaacatcttactccccatattgcc

SEQ ID NO: 197606 - DNA, 25 bp, Homo sapien
ggtcaagactttagctaggcccaag

SEQ ID NO: 197607 - DNA, 25 bp, Homo sapien
gggcaggccttaaccaacatgggat

SEQ ID NO: 197608 - DNA, 25 bp, Homo sapien
ttttctacaaagctgcagagggtgc

SEQ ID NO: 197609 - DNA, 25 bp, Homo sapien
tgcaggtactatgccaaagtgcccg

SEQ ID NO: 197610 - DNA, 25 bp, Homo sapien
tgtaggtttcatcaagtgcagggac

SEQ ID NO: 197611 - DNA, 25 bp, Homo sapien
gacagctgatttatgtcatttcctc

SEQ ID NO: 197612 - DNA, 25 bp, Homo sapien
gacatttagtgacacgtatcagtaa

SEQ ID NO: 197613 - DNA, 25 bp, Homo sapien
aaccatatgataataagtaggactg

SEQ ID NO: 197614 - DNA, 25 bp, Homo sapien
tatcttagctagtaggactcattcc

SEQ ID NO: 197615 - DNA, 25 bp, Homo sapien
ggccatagttagaagaatcacacaa

SEQ ID NO: 197616 - DNA, 25 bp, Homo sapien
cctcaaattggaggcccaaatccca

SEQ ID NO: 197617 - DNA, 25 bp, Homo sapien
ctcctgcatgagacgtaattatctc

SEQ ID NO: 197618 - DNA, 25 bp, Homo sapien
ttttgagcctgaaataagcaaatat

SEQ ID NO: 197619 - DNA, 25 bp, Homo sapien
aaatgcataaaacgagtgcttcgac

SEQ ID NO: 197620 - DNA, 25 bp, Homo sapien
atattttgcaattcctggtggccac

SEQ ID NO: 197621 - DNA, 25 bp, Homo sapien
tcagtggaggtaatctgagaaggct

SEQ ID NO: 197622 - DNA, 25 bp, Homo sapien
cacagtaatgtaggttcagagagga

SEQ ID NO: 197623 - DNA, 25 bp, Homo sapien
gaaagccaacacactgtcttgaagg

SEQ ID NO: 197624 - DNA, 25 bp, Homo sapien
ctgacttgaagcttttaccctgcat

SEQ ID NO: 197625 - DNA, 25 bp, Homo sapien
aagccaacacactgtcttgaaggca

SEQ ID NO: 197626 - DNA, 25 bp, Homo sapien
gcatcccatgtttccagaaagccaa

SEQ ID NO: 197627 - DNA, 25 bp, Homo sapien
ccttgtagatttacaattttcacaa

SEQ ID NO: 197628 - DNA, 25 bp, Homo sapien
ttccttgtagatttacaattttcac

SEQ ID NO: 197629 - DNA, 25 bp, Homo sapien
gattcaatgcgaaaatcaaaactta

SEQ ID NO: 197630 - DNA, 25 bp, Homo sapien
ctacagattcaatgcgaaaatcaaa

SEQ ID NO: 197631 - DNA, 25 bp, Homo sapien
taaacacactaaaacggtatctctc

SEQ ID NO: 197632 - DNA, 25 bp, Homo sapien
cggtatctctctccaactgtgttac

SEQ ID NO: 197633 - DNA, 25 bp, Homo sapien
aacacactaaaacggtatctctctc

SEQ ID NO: 197634 - DNA, 25 bp, Homo sapien
tctaaacacactaaaacggtatctc

SEQ ID NO: 197635 - DNA, 25 bp, Homo sapien
tataatccagaagaaagtggtcgca

SEQ ID NO: 197636 - DNA, 25 bp, Homo sapien
tgggctgtcagccaaaacttgtctt

SEQ ID NO: 197637 - DNA, 25 bp, Homo sapien
ggaactcaaaaacaggactcactga

SEQ ID NO: 197638 - DNA, 25 bp, Homo sapien
ttcctttgagcaataagaacaggga

SEQ ID NO: 197639 - DNA, 25 bp, Homo sapien
gaaaggctcggaagcaacacctaag

SEQ ID NO: 197640 - DNA, 25 bp, Homo sapien
taacaaatggttgcacctcaagagc

SEQ ID NO: 197641 - DNA, 25 bp, Homo sapien
tatacgtacacggttctatgggctt

SEQ ID NO: 197642 - DNA, 25 bp, Homo sapien
tatgggcttacttgggaaactatgt

SEQ ID NO: 197643 - DNA, 25 bp, Homo sapien
tgattgtctcaaactgaactacctg

SEQ ID NO: 197644 - DNA, 25 bp, Homo sapien
gaccatagggtattcctgttcaggt

SEQ ID NO: 197645 - DNA, 25 bp, Homo sapien
cattcaaaggacttggcaaaggaaa

SEQ ID NO: 197646 - DNA, 25 bp, Homo sapien
gctaatagctacacagaccataggg

SEQ ID NO: 197647 - DNA, 25 bp, Homo sapien
ttatgtcccgtgtaagggtttctga

SEQ ID NO: 197648 - DNA, 25 bp, Homo sapien
tggctcataccactgaagtaaaaca

SEQ ID NO: 197649 - DNA, 25 bp, Homo sapien
aacaattccagactgtaaagctcca

SEQ ID NO: 197650 - DNA, 25 bp, Homo sapien
agctccacagaggtatttatgtccc

SEQ ID NO: 197651 - DNA, 25 bp, Homo sapien
ggactcaaccgatcttcccatcttg

SEQ ID NO: 197652 - DNA, 25 bp, Homo sapien
actcaaagaatgagttctgacaagg

SEQ ID NO: 197653 - DNA, 25 bp, Homo sapien
tgtttcttagtaaactcaaagaatg

SEQ ID NO: 197654 - DNA, 25 bp, Homo sapien
atgcagtggcacagtaatagctaac

SEQ ID NO: 197655 - DNA, 25 bp, Homo sapien
ccttttgtatcaggaatctttgttg

SEQ ID NO: 197656 - DNA, 25 bp, Homo sapien
gccttttgtatcaggaatctttgtt

SEQ ID NO: 197657 - DNA, 25 bp, Homo sapien
agccttttgtatcaggaatctttgt

SEQ ID NO: 197658 - DNA, 25 bp, Homo sapien
gggcagctaatcctggttttttggc

SEQ ID NO: 197659 - DNA, 25 bp, Homo sapien
ttgaatatgggcagctaatcctggt

SEQ ID NO: 197660 - DNA, 25 bp, Homo sapien
tagtattcggtctggaaacctgtga

SEQ ID NO: 197661 - DNA, 25 bp, Homo sapien
caaacaaagctataagattgtgaga

SEQ ID NO: 197662 - DNA, 25 bp, Homo sapien
taggtactaataggtgatctgggca

SEQ ID NO: 197663 - DNA, 25 bp, Homo sapien
gactaaaccttaatgatgccagcac

SEQ ID NO: 197664 - DNA, 25 bp, Homo sapien
caaaatcttatgttatggactgagt

SEQ ID NO: 197665 - DNA, 25 bp, Homo sapien
gagagtccagtaatgttcaaaaagc

SEQ ID NO: 197666 - DNA, 25 bp, Homo sapien
catctgatttctcactatatatggt

SEQ ID NO: 197667 - DNA, 25 bp, Homo sapien
gggatggatatggtaaacatcatct

SEQ ID NO: 197668 - DNA, 25 bp, Homo sapien
tggatatggtaaacatcatctgatt

SEQ ID NO: 197669 - DNA, 25 bp, Homo sapien
tctcactatatatggtatgataata

SEQ ID NO: 197670 - DNA, 25 bp, Homo sapien
tcctattgggcgttgctatctaaga

SEQ ID NO: 197671 - DNA, 25 bp, Homo sapien
tacatagtttgctacccagctagcc

SEQ ID NO: 197672 - DNA, 25 bp, Homo sapien
acacatgtacatgcctcctattggg

SEQ ID NO: 197673 - DNA, 25 bp, Homo sapien
tgtcaactcaaacagaattggcttt

SEQ ID NO: 197674 - DNA, 25 bp, Homo sapien
tataagactctacagtttactaagc

SEQ ID NO: 197675 - DNA, 25 bp, Homo sapien
tcagaagaccttaaagaatcagtcc

SEQ ID NO: 197676 - DNA, 25 bp, Homo sapien
gaatcagtccaagatagttaatgtg

SEQ ID NO: 197677 - DNA, 25 bp, Homo sapien
tactaagcactctggatattatctc

SEQ ID NO: 197678 - DNA, 25 bp, Homo sapien
taacatacagccaagtacacttccg

SEQ ID NO: 197679 - DNA, 25 bp, Homo sapien
ttattgataacatacagccaagtac

SEQ ID NO: 197680 - DNA, 25 bp, Homo sapien
gccaagtacacttccgtggaaataa

SEQ ID NO: 197681 - DNA, 25 bp, Homo sapien
tacagccaagtacacttccgtggaa

SEQ ID NO: 197682 - DNA, 25 bp, Homo sapien
tcattgagattcagtgtgtaaatac

SEQ ID NO: 197683 - DNA, 25 bp, Homo sapien
ctgttccatcgttgcctcatgtagc

SEQ ID NO: 197684 - DNA, 25 bp, Homo sapien
gagattcagtgtgtaaataccatct

SEQ ID NO: 197685 - DNA, 25 bp, Homo sapien
tgttccatcgttgcctcatgtagct

SEQ ID NO: 197686 - DNA, 25 bp, Homo sapien
aaggacagccatcaaaaacttttga

SEQ ID NO: 197687 - DNA, 25 bp, Homo sapien
caggatgtatccaggatgttgcaca

SEQ ID NO: 197688 - DNA, 25 bp, Homo sapien
tatccaggatgttgcacaattaatt

SEQ ID NO: 197689 - DNA, 25 bp, Homo sapien
ttttgtatcaggatgtatccaggat

SEQ ID NO: 197690 - DNA, 25 bp, Homo sapien
ttatgatatcttaactttcaaaggc

SEQ ID NO: 197691 - DNA, 25 bp, Homo sapien
catgatgagatatccaaatgcattc

SEQ ID NO: 197692 - DNA, 25 bp, Homo sapien
tattgatagccaatatattgctgct

SEQ ID NO: 197693 - DNA, 25 bp, Homo sapien
tgtaggctaatctgatgactcaact

SEQ ID NO: 197694 - DNA, 25 bp, Homo sapien
gtggaaggccattgatggctggttt

SEQ ID NO: 197695 - DNA, 25 bp, Homo sapien
ggtggaaggccattgatggctggtt

SEQ ID NO: 197696 - DNA, 25 bp, Homo sapien
gggtgggtggaaggccattgatggc

SEQ ID NO: 197697 - DNA, 25 bp, Homo sapien
tgggtggaaggccattgatggctgg

SEQ ID NO: 197698 - DNA, 25 bp, Homo sapien
actgaattaaacagactatgcccct

SEQ ID NO: 197699 - DNA, 25 bp, Homo sapien
ttactagtgtaagacctcctaagtc

SEQ ID NO: 197700 - DNA, 25 bp, Homo sapien
actaattgctaaatgcctgttatac

SEQ ID NO: 197701 - DNA, 25 bp, Homo sapien
gaacttctgttacttgaattactga

SEQ ID NO: 197702 - DNA, 25 bp, Homo sapien
tcatcagttttgaaataccatcacc

SEQ ID NO: 197703 - DNA, 25 bp, Homo sapien
cactcatcagttttgaaataccatc

SEQ ID NO: 197704 - DNA, 25 bp, Homo sapien
ggtgcttgtgctgatccttctgtat

SEQ ID NO: 197705 - DNA, 25 bp, Homo sapien
tggtaactgtggtgcttgtgctgat

SEQ ID NO: 197706 - DNA, 25 bp, Homo sapien
caacttgggctactctgtcttctga

SEQ ID NO: 197707 - DNA, 25 bp, Homo sapien
caggacaatgttttatggttgatgc

SEQ ID NO: 197708 - DNA, 25 bp, Homo sapien
catccggaaagttgtcttcagggta

SEQ ID NO: 197709 - DNA, 25 bp, Homo sapien
ctgctttctgaatcaggacaatgtt

SEQ ID NO: 197710 - DNA, 25 bp, Homo sapien
gaggtaggggaggtggtattgcacg

SEQ ID NO: 197711 - DNA, 25 bp, Homo sapien
aggggaggtggtattgcacgttttg

SEQ ID NO: 197712 - DNA, 25 bp, Homo sapien
gggaggtggtattgcacgttttgag

SEQ ID NO: 197713 - DNA, 25 bp, Homo sapien
aggtaggggaggtggtattgcacgt

SEQ ID NO: 197714 - DNA, 25 bp, Homo sapien
tgtaacatgaaatttgggtctgatg

SEQ ID NO: 197715 - DNA, 25 bp, Homo sapien
aacatgaaatttgggtctgatgaca

SEQ ID NO: 197716 - DNA, 25 bp, Homo sapien
caccatcaacaaaaggattccactg

SEQ ID NO: 197717 - DNA, 25 bp, Homo sapien
tgaaatttgggtctgatgacaatcc

SEQ ID NO: 197718 - DNA, 25 bp, Homo sapien
aaaggtcctaagagcttaaagctga

SEQ ID NO: 197719 - DNA, 25 bp, Homo sapien
ttcaaaatagcagcaatggttaaaa

SEQ ID NO: 197720 - DNA, 25 bp, Homo sapien
tagtaaattcaaaatagcagcaatg

SEQ ID NO: 197721 - DNA, 25 bp, Homo sapien
agctgagaatcaaattctgcgtatt

SEQ ID NO: 197722 - DNA, 25 bp, Homo sapien
gaggaggttcaaattgtaatttgtc

SEQ ID NO: 197723 - DNA, 25 bp, Homo sapien
ttctcagaggaggttcaaattgtaa

SEQ ID NO: 197724 - DNA, 25 bp, Homo sapien
ctcagaggaggttcaaattgtaatt

SEQ ID NO: 197725 - DNA, 25 bp, Homo sapien
catttcatctcgtgcttctgtttct

SEQ ID NO: 197726 - DNA, 25 bp, Homo sapien
aactaggacacaagaaaatggagcc

SEQ ID NO: 197727 - DNA, 25 bp, Homo sapien
taaaaagcgctttcaaataggatcc

SEQ ID NO: 197728 - DNA, 25 bp, Homo sapien
tgtttggaggcaatgcaccacagac

SEQ ID NO: 197729 - DNA, 25 bp, Homo sapien
tgcttaggtagagggcacagtccca

SEQ ID NO: 197730 - DNA, 25 bp, Homo sapien
aatgacaagtgacggcagttcccct

SEQ ID NO: 197731 - DNA, 25 bp, Homo sapien
aaatctgggcatcctatacatctgg

SEQ ID NO: 197732 - DNA, 25 bp, Homo sapien
gagcatctgtacctctcactcaaaa

SEQ ID NO: 197733 - DNA, 25 bp, Homo sapien
taactctatgaaccaaaatctgggc

SEQ ID NO: 197734 - DNA, 25 bp, Homo sapien
gaatgagtctaacacctggctgaaa

SEQ ID NO: 197735 - DNA, 25 bp, Homo sapien
tgcagccttagtcagtctggagaat

SEQ ID NO: 197736 - DNA, 25 bp, Homo sapien
agctggaggttttggactgttgaca

SEQ ID NO: 197737 - DNA, 25 bp, Homo sapien
taatcagctggtttcctaggtaacg

SEQ ID NO: 197738 - DNA, 25 bp, Homo sapien
tctttagtattggaggcccacagac

SEQ ID NO: 197739 - DNA, 25 bp, Homo sapien
tgataactctggaatcgagaaagcc

SEQ ID NO: 197740 - DNA, 25 bp, Homo sapien
gaagggaaagatactctaactctct

SEQ ID NO: 197741 - DNA, 25 bp, Homo sapien
tgaaaaggcctgattgaaacaactg

SEQ ID NO: 197742 - DNA, 25 bp, Homo sapien
tgtagatctaatggtatgacgaatg

SEQ ID NO: 197743 - DNA, 25 bp, Homo sapien
ctggcattcctgtttgtagatctaa

SEQ ID NO: 197744 - DNA, 25 bp, Homo sapien
aatggtatgacgaatgattgcatgg

SEQ ID NO: 197745 - DNA, 25 bp, Homo sapien
gctgtccgttcagctctggcattcc

SEQ ID NO: 197746 - DNA, 25 bp, Homo sapien
tactatgagcgttataaaagcaggg

SEQ ID NO: 197747 - DNA, 25 bp, Homo sapien
ggcacgtggttttgcatttcgagaa

SEQ ID NO: 197748 - DNA, 25 bp, Homo sapien
ttgggaagcccagcaaaacgagata

SEQ ID NO: 197749 - DNA, 25 bp, Homo sapien
tactaatcccaagttgcaaacagtg

SEQ ID NO: 197750 - DNA, 25 bp, Homo sapien
tggattgttcactttgtctaacagt

SEQ ID NO: 197751 - DNA, 25 bp, Homo sapien
tcaaagtcatcgtcatctgcttcag

SEQ ID NO: 197752 - DNA, 25 bp, Homo sapien
tctgcttcagtgtaatgtgcgtggt

SEQ ID NO: 197753 - DNA, 25 bp, Homo sapien
acagttcaactgctagggctctaga

SEQ ID NO: 197754 - DNA, 25 bp, Homo sapien
ttggttagtgctattttgacaaaat

SEQ ID NO: 197755 - DNA, 25 bp, Homo sapien
tggttagtgctattttgacaaaatt

SEQ ID NO: 197756 - DNA, 25 bp, Homo sapien
ttttgacaaaattatggaatgttga

SEQ ID NO: 197757 - DNA, 25 bp, Homo sapien
gtgctattttgacaaaattatggaa

SEQ ID NO: 197758 - DNA, 25 bp, Homo sapien
aattactttttgacattaagaagag

SEQ ID NO: 197759 - DNA, 25 bp, Homo sapien
tggaggctgaaaattactttttgac

SEQ ID NO: 197760 - DNA, 25 bp, Homo sapien
actttttgacattaagaagagagcc

SEQ ID NO: 197761 - DNA, 25 bp, Homo sapien
tttgtcctttagttttggaggctga

SEQ ID NO: 197762 - DNA, 25 bp, Homo sapien
tatgagctcaaatagattcccgtat

SEQ ID NO: 197763 - DNA, 25 bp, Homo sapien
gccaatcacgttagcaaaacacttt

SEQ ID NO: 197764 - DNA, 25 bp, Homo sapien
tataatcccctaaacggtggaagca

SEQ ID NO: 197765 - DNA, 25 bp, Homo sapien
tatcagcattctagctaaaagtagg

SEQ ID NO: 197766 - DNA, 25 bp, Homo sapien
aatgaattgaggtaactaccttcgg

SEQ ID NO: 197767 - DNA, 25 bp, Homo sapien
aaatgaattgaggtaactaccttcg

SEQ ID NO: 197768 - DNA, 25 bp, Homo sapien
gatatcacagagttggttgtagcca

SEQ ID NO: 197769 - DNA, 25 bp, Homo sapien
tcaaacataggtggctgaagttctc

SEQ ID NO: 197770 - DNA, 25 bp, Homo sapien
tcattgggtggagatcaaacatagg

SEQ ID NO: 197771 - DNA, 25 bp, Homo sapien
cattcttctctactgctgcaacttc

SEQ ID NO: 197772 - DNA, 25 bp, Homo sapien
ctagaaggaatcaatgaatacaaca

SEQ ID NO: 197773 - DNA, 25 bp, Homo sapien
tagaaggaatcaatgaatacaacat

SEQ ID NO: 197774 - DNA, 25 bp, Homo sapien
ctgccaaatatttagtgatagtaag

SEQ ID NO: 197775 - DNA, 25 bp, Homo sapien
gatagtaaggatgcccataattcca

SEQ ID NO: 197776 - DNA, 25 bp, Homo sapien
aatttgttcatcaagggacacatta

SEQ ID NO: 197777 - DNA, 25 bp, Homo sapien
ttaatttgttcatcaagggacacat

SEQ ID NO: 197778 - DNA, 25 bp, Homo sapien
gtgccaatgaaagattttcgttttg

SEQ ID NO: 197779 - DNA, 25 bp, Homo sapien
tttcgttttgcaatggtagctgtta

SEQ ID NO: 197780 - DNA, 25 bp, Homo sapien
taaggggtgccaatgaaagattttc

SEQ ID NO: 197781 - DNA, 25 bp, Homo sapien
gaaagattttcgttttgcaatggta

SEQ ID NO: 197782 - DNA, 25 bp, Homo sapien
attttacatcgccatggtctgtcaa

SEQ ID NO: 197783 - DNA, 25 bp, Homo sapien
taattttacatcgccatggtctgtc

SEQ ID NO: 197784 - DNA, 25 bp, Homo sapien
ctaattttacatcgccatggtctgt

SEQ ID NO: 197785 - DNA, 25 bp, Homo sapien
ttttacatcgccatggtctgtcaat

SEQ ID NO: 197786 - DNA, 25 bp, Homo sapien
tgcattttgcctttagtatgcaaat

SEQ ID NO: 197787 - DNA, 25 bp, Homo sapien
tttgcctttagtatgcaaataggca

SEQ ID NO: 197788 - DNA, 25 bp, Homo sapien
ttgcctttagtatgcaaataggcaa

SEQ ID NO: 197789 - DNA, 25 bp, Homo sapien
attttgcctttagtatgcaaatagg

SEQ ID NO: 197790 - DNA, 25 bp, Homo sapien
aaatttccctataagtacaggctga

SEQ ID NO: 197791 - DNA, 25 bp, Homo sapien
cttgcagaatatatactggttaaac

SEQ ID NO: 197792 - DNA, 25 bp, Homo sapien
tttgagcataatgttggactttctt

SEQ ID NO: 197793 - DNA, 25 bp, Homo sapien
tgagagcttctgtttagtgctataa

SEQ ID NO: 197794 - DNA, 25 bp, Homo sapien
taattctggcatctgtcagtgtggg

SEQ ID NO: 197795 - DNA, 25 bp, Homo sapien
taaatactctaactggcttgggacc

SEQ ID NO: 197796 - DNA, 25 bp, Homo sapien
taattccatccaaagctcactcagt

SEQ ID NO: 197797 - DNA, 25 bp, Homo sapien
ggtaatctttgagtagatgcccaac

SEQ ID NO: 197798 - DNA, 25 bp, Homo sapien
ttgtgcaagtatcacagagggtact

SEQ ID NO: 197799 - DNA, 25 bp, Homo sapien
aagattacggtcacataccagcgcc

SEQ ID NO: 197800 - DNA, 25 bp, Homo sapien
catgctcacataacaatagggatgc

SEQ ID NO: 197801 - DNA, 25 bp, Homo sapien
taccagcgccagagtgcaaattcga

SEQ ID NO: 197802 - DNA, 25 bp, Homo sapien
tgaagggaacgcttagacaacatgt

SEQ ID NO: 197803 - DNA, 25 bp, Homo sapien
cacatgaccatggtgtgcatcagca

SEQ ID NO: 197804 - DNA, 25 bp, Homo sapien
gatcactgtatatgtcggcatcagc

SEQ ID NO: 197805 - DNA, 25 bp, Homo sapien
ccaatttacacaactgagggccaag

SEQ ID NO: 197806 - DNA, 25 bp, Homo sapien
ataggctatttgcaattctgataat

SEQ ID NO: 197807 - DNA, 25 bp, Homo sapien
acataggctatttgcaattctgata

SEQ ID NO: 197808 - DNA, 25 bp, Homo sapien
ttctctgcatacataggctatttgc

SEQ ID NO: 197809 - DNA, 25 bp, Homo sapien
tttctctgcatacataggctatttg

SEQ ID NO: 197810 - DNA, 25 bp, Homo sapien
atatcgaacaacaatcattaaaacc

SEQ ID NO: 197811 - DNA, 25 bp, Homo sapien
ttaactggaaatatcgaacaacaat

SEQ ID NO: 197812 - DNA, 25 bp, Homo sapien
taactggaaatatcgaacaacaatc

SEQ ID NO: 197813 - DNA, 25 bp, Homo sapien
gaaatatcgaacaacaatcattaaa

SEQ ID NO: 197814 - DNA, 25 bp, Homo sapien
ccacagtattccatacaaatccata

SEQ ID NO: 197815 - DNA, 25 bp, Homo sapien
cgccaccacagtattccatacaaat

SEQ ID NO: 197816 - DNA, 25 bp, Homo sapien
tgatccgccaccacagtattccata

SEQ ID NO: 197817 - DNA, 25 bp, Homo sapien
ttgaagtgatccgccaccacagtat

SEQ ID NO: 197818 - DNA, 25 bp, Homo sapien
aatacagagagagatgatgcttttt

SEQ ID NO: 197819 - DNA, 25 bp, Homo sapien
acaagggagagagtgtagtagcaaa

SEQ ID NO: 197820 - DNA, 25 bp, Homo sapien
tagtagcacttacatacaagggaga

SEQ ID NO: 197821 - DNA, 25 bp, Homo sapien
cacttacatacaagggagagagtgt

SEQ ID NO: 197822 - DNA, 25 bp, Homo sapien
taactcccaaagtaggcaacgatgt

SEQ ID NO: 197823 - DNA, 25 bp, Homo sapien
ggcaacgatgttacaatgtttacat

SEQ ID NO: 197824 - DNA, 25 bp, Homo sapien
taagataactcccaaagtaggcaac

SEQ ID NO: 197825 - DNA, 25 bp, Homo sapien
caaagtaggcaacgatgttacaatg

SEQ ID NO: 197826 - DNA, 25 bp, Homo sapien
aataagttgtttatcatgttactca

SEQ ID NO: 197827 - DNA, 25 bp, Homo sapien
taagttgtttatcatgttactcaaa

SEQ ID NO: 197828 - DNA, 25 bp, Homo sapien
caaaataagttgtttatcatgttac

SEQ ID NO: 197829 - DNA, 25 bp, Homo sapien
aaaacaaaataagttgtttatcatg

SEQ ID NO: 197830 - DNA, 25 bp, Homo sapien
tggtctgtattttacaatcaaaccc

SEQ ID NO: 197831 - DNA, 25 bp, Homo sapien
tcaaacccttatgagttaattagaa

SEQ ID NO: 197832 - DNA, 25 bp, Homo sapien
tgtgctgtgacatgaaaataggttt

SEQ ID NO: 197833 - DNA, 25 bp, Homo sapien
ccacagtatggtttaataatgcaag

SEQ ID NO: 197834 - DNA, 25 bp, Homo sapien
tgagtcctaacaaatagtacctggg

SEQ ID NO: 197835 - DNA, 25 bp, Homo sapien
cctcgtgtataagggtcctctgcat

SEQ ID NO: 197836 - DNA, 25 bp, Homo sapien
taaaaggcagtaagattcatcacac

SEQ ID NO: 197837 - DNA, 25 bp, Homo sapien
gaactggagtaagtcggttgcaccc

SEQ ID NO: 197838 - DNA, 25 bp, Homo sapien
tgaactaataccaaaaactatcctc

SEQ ID NO: 197839 - DNA, 25 bp, Homo sapien
cagcacgcagcttattatctcttaa

SEQ ID NO: 197840 - DNA, 25 bp, Homo sapien
gccacagcacgcagcttattatctc

SEQ ID NO: 197841 - DNA, 25 bp, Homo sapien
aaaactgtgttccaagctataagca

SEQ ID NO: 197842 - DNA, 25 bp, Homo sapien
agagatgagactgcctcaaatttca

SEQ ID NO: 197843 - DNA, 25 bp, Homo sapien
tcatcaaatatcaactggtttatgc

SEQ ID NO: 197844 - DNA, 25 bp, Homo sapien
ggtagtgatttccaagatacaacac

SEQ ID NO: 197845 - DNA, 25 bp, Homo sapien
gtgatgcttcgagttgtatttccta

SEQ ID NO: 197846 - DNA, 25 bp, Homo sapien
taaccgctcaaactaggaaactggc

SEQ ID NO: 197847 - DNA, 25 bp, Homo sapien
tacctggtcaaaaactactactgca

SEQ ID NO: 197848 - DNA, 25 bp, Homo sapien
tacgtgcctaagcttatgaaccagc

SEQ ID NO: 197849 - DNA, 25 bp, Homo sapien
gaaacaagcagtcttctgacacaca

SEQ ID NO: 197850 - DNA, 25 bp, Homo sapien
taatgatttttactgcagccagctc

SEQ ID NO: 197851 - DNA, 25 bp, Homo sapien
cactcaaaaacagctcctgtttaaa

SEQ ID NO: 197852 - DNA, 25 bp, Homo sapien
tgttaattgcttatcaaccatactt

SEQ ID NO: 197853 - DNA, 25 bp, Homo sapien
aaattaccaatagtcccaccactca

SEQ ID NO: 197854 - DNA, 25 bp, Homo sapien
aattacttggtactatgttaattgc

SEQ ID NO: 197855 - DNA, 25 bp, Homo sapien
ggctcagaaacagatcattggagga

SEQ ID NO: 197856 - DNA, 25 bp, Homo sapien
cagctcccgctgataggaataaata

SEQ ID NO: 197857 - DNA, 25 bp, Homo sapien
tccaaatgaagaaccgatgggcaaa

SEQ ID NO: 197858 - DNA, 25 bp, Homo sapien
gcagtaccaggctcttttataatga

SEQ ID NO: 197859 - DNA, 25 bp, Homo sapien
gaacatgcggtgcaaaactccttaa

SEQ ID NO: 197860 - DNA, 25 bp, Homo sapien
cagacagattcagagcctaaagcct

SEQ ID NO: 197861 - DNA, 25 bp, Homo sapien
tatacaggtctggacaggtgcttcc

SEQ ID NO: 197862 - DNA, 25 bp, Homo sapien
cccatggaaggaggctatactgcac

SEQ ID NO: 197863 - DNA, 25 bp, Homo sapien
gaaggctatctatgccaaggcaaga

SEQ ID NO: 197864 - DNA, 25 bp, Homo sapien
gagtcctacctgtagatctttacta

SEQ ID NO: 197865 - DNA, 25 bp, Homo sapien
gacaaacatataggaaggtgagtcc

SEQ ID NO: 197866 - DNA, 25 bp, Homo sapien
tggtaaaggacccaaacatctctag

SEQ ID NO: 197867 - DNA, 25 bp, Homo sapien
caagtagttgggaatacaggcttcc

SEQ ID NO: 197868 - DNA, 25 bp, Homo sapien
acctccacctcccagttcaagtgat

SEQ ID NO: 197869 - DNA, 25 bp, Homo sapien
tctcccacttccagcctcccaagta

SEQ ID NO: 197870 - DNA, 25 bp, Homo sapien
agtggcgcgatctttgcccaccgca

SEQ ID NO: 197871 - DNA, 25 bp, Homo sapien
ataagattgaactctccctcttggg

SEQ ID NO: 197872 - DNA, 25 bp, Homo sapien
tataagattgaactctccctcttgg

SEQ ID NO: 197873 - DNA, 25 bp, Homo sapien
agccaatataagattgaactctccc

SEQ ID NO: 197874 - DNA, 25 bp, Homo sapien
caatataagattgaactctccctct

SEQ ID NO: 197875 - DNA, 25 bp, Homo sapien
aagtaaattacgaagaatctcaaag

SEQ ID NO: 197876 - DNA, 25 bp, Homo sapien
cataaaagtaaattacgaagaatct

SEQ ID NO: 197877 - DNA, 25 bp, Homo sapien
aattacgaagaatctcaaagccaga

SEQ ID NO: 197878 - DNA, 25 bp, Homo sapien
gtaaattacgaagaatctcaaagcc

SEQ ID NO: 197879 - DNA, 25 bp, Homo sapien
tacttcgcaggaaagtggccccatt

SEQ ID NO: 197880 - DNA, 25 bp, Homo sapien
aaaaagcacggccagcctcacttac

SEQ ID NO: 197881 - DNA, 25 bp, Homo sapien
cccagtcgaccgcaggaaaaaagca

SEQ ID NO: 197882 - DNA, 25 bp, Homo sapien
tctcgccccaatacttcgcaggaaa

SEQ ID NO: 197883 - DNA, 25 bp, Homo sapien
gctgccgaccctctggacgagttcg

SEQ ID NO: 197884 - DNA, 25 bp, Homo sapien
tgcgggttccgcctcaggatgtccg

SEQ ID NO: 197885 - DNA, 25 bp, Homo sapien
ttccgcctcaggatgtccgcggcag

SEQ ID NO: 197886 - DNA, 25 bp, Homo sapien
tggacgagttcgtagtcctgctgcg

SEQ ID NO: 197887 - DNA, 25 bp, Homo sapien
ggcgccgcttcccaacatggagcct

SEQ ID NO: 197888 - DNA, 25 bp, Homo sapien
ccggattcccgctaacaagcacgaa

SEQ ID NO: 197889 - DNA, 25 bp, Homo sapien
gcggctcccggattcccgctaacaa

SEQ ID NO: 197890 - DNA, 25 bp, Homo sapien
ctaacaagcacgaacggcgccgctt

SEQ ID NO: 197891 - DNA, 25 bp, Homo sapien
gacgagcaaaggctggttggcgtcg

SEQ ID NO: 197892 - DNA, 25 bp, Homo sapien
gtcgcaggctacgacccccagcggc

SEQ ID NO: 197893 - DNA, 25 bp, Homo sapien
ctgcacgagggacgagcaaaggctg

SEQ ID NO: 197894 - DNA, 25 bp, Homo sapien
agcaaaggctggttggcgtcgcagg

SEQ ID NO: 197895 - DNA, 25 bp, Homo sapien
gccccgtctttgttgagcgcggagc

SEQ ID NO: 197896 - DNA, 25 bp, Homo sapien
ccgtctttgttgagcgcggagcccg

SEQ ID NO: 197897 - DNA, 25 bp, Homo sapien
cggccccgtctttgttgagcgcgga

SEQ ID NO: 197898 - DNA, 25 bp, Homo sapien
gggcggccccgtctttgttgagcgc

SEQ ID NO: 197899 - DNA, 25 bp, Homo sapien
ggcggaggcgcgtacagtcgccgcc

SEQ ID NO: 197900 - DNA, 25 bp, Homo sapien
tgcgtcaccgggagacacgttccca

SEQ ID NO: 197901 - DNA, 25 bp, Homo sapien
ggcagctccgggtttgccgtcgccg

SEQ ID NO: 197902 - DNA, 25 bp, Homo sapien
gcactccggccgcagaaccagagtg

SEQ ID NO: 197903 - DNA, 25 bp, Homo sapien
cagcagaattccgttgtcaaatgga

SEQ ID NO: 197904 - DNA, 25 bp, Homo sapien
aagagtatacactgaggtggcctga

SEQ ID NO: 197905 - DNA, 25 bp, Homo sapien
taatttactggatcgtaagttgaac

SEQ ID NO: 197906 - DNA, 25 bp, Homo sapien
gatcgtaagttgaacatgggcagca

SEQ ID NO: 197907 - DNA, 25 bp, Homo sapien
cgtgaggagttgcttaccatgagga

SEQ ID NO: 197908 - DNA, 25 bp, Homo sapien
gaatcatcagcatggaggtcctgtc

SEQ ID NO: 197909 - DNA, 25 bp, Homo sapien
ggttacagtgttcacgactctgcag

SEQ ID NO: 197910 - DNA, 25 bp, Homo sapien
taggcagttataaacacacctctgg

SEQ ID NO: 197911 - DNA, 25 bp, Homo sapien
aagaaccgcagggacagaaacagtt

SEQ ID NO: 197912 - DNA, 25 bp, Homo sapien
ctcagagtctgagcgaactgcgccc

SEQ ID NO: 197913 - DNA, 25 bp, Homo sapien
agaaggcagcgagcgcagtgacagc

SEQ ID NO: 197914 - DNA, 25 bp, Homo sapien
tgagtagcaaatgagaacttctgca

SEQ ID NO: 197915 - DNA, 25 bp, Homo sapien
attcagcaccaggccgaggggaggg

SEQ ID NO: 197916 - DNA, 25 bp, Homo sapien
ttcagcaccaggccgaggggagggg

SEQ ID NO: 197917 - DNA, 25 bp, Homo sapien
gattcagcaccaggccgaggggagg

SEQ ID NO: 197918 - DNA, 25 bp, Homo sapien
cagcaccaggccgaggggaggggaa

SEQ ID NO: 197919 - DNA, 25 bp, Homo sapien
gagaggcgacatggatttctctgct

SEQ ID NO: 197920 - DNA, 25 bp, Homo sapien
tggagaggcgacatggatttctctg

SEQ ID NO: 197921 - DNA, 25 bp, Homo sapien
gaggcgacatggatttctctgctga

SEQ ID NO: 197922 - DNA, 25 bp, Homo sapien
ggagaggcgacatggatttctctgc

SEQ ID NO: 197923 - DNA, 25 bp, Homo sapien
gatggtactatttccttgcattacc

SEQ ID NO: 197924 - DNA, 25 bp, Homo sapien
atgatggtactatttccttgcatta

SEQ ID NO: 197925 - DNA, 25 bp, Homo sapien
gtactatttccttgcattaccacca

SEQ ID NO: 197926 - DNA, 25 bp, Homo sapien
ccaatattgttttgttgcccgctag

SEQ ID NO: 197927 - DNA, 25 bp, Homo sapien
gccaccatttaatttcagttataac

SEQ ID NO: 197928 - DNA, 25 bp, Homo sapien
ctgccaccatttaatttcagttata

SEQ ID NO: 197929 - DNA, 25 bp, Homo sapien
tgccaccatttaatttcagttataa

SEQ ID NO: 197930 - DNA, 25 bp, Homo sapien
taaatccagagggtgagctttgctc

SEQ ID NO: 197931 - DNA, 25 bp, Homo sapien
ttttaaatccagagggtgagctttg

SEQ ID NO: 197932 - DNA, 25 bp, Homo sapien
aatccagagggtgagctttgctcat

SEQ ID NO: 197933 - DNA, 25 bp, Homo sapien
tttaaatccagagggtgagctttgc

SEQ ID NO: 197934 - DNA, 25 bp, Homo sapien
gtgtcttttccgtgggcttacagat

SEQ ID NO: 197935 - DNA, 25 bp, Homo sapien
ggtgtcttttccgtgggcttacaga

SEQ ID NO: 197936 - DNA, 25 bp, Homo sapien
gctaccacacctgacgaattttaaa

SEQ ID NO: 197937 - DNA, 25 bp, Homo sapien
gaggtacatatacatttcttggcac

SEQ ID NO: 197938 - DNA, 25 bp, Homo sapien
taattccagtatgctcctgtgtcgg

SEQ ID NO: 197939 - DNA, 25 bp, Homo sapien
cctgtgtcggatgtttgagagttaa

SEQ ID NO: 197940 - DNA, 25 bp, Homo sapien
caggtttattatgctctgggcacag

SEQ ID NO: 197941 - DNA, 25 bp, Homo sapien
aaagttcccaggactaaggagcaca

SEQ ID NO: 197942 - DNA, 25 bp, Homo sapien
tagaaaaagagccacattgcaagtc

SEQ ID NO: 197943 - DNA, 25 bp, Homo sapien
gagtttcggtttacaactggcgaca

SEQ ID NO: 197944 - DNA, 25 bp, Homo sapien
gaaagtgtggtatttatcaccttaa

SEQ ID NO: 197945 - DNA, 25 bp, Homo sapien
tacagatcaacaggaattgggcccc

SEQ ID NO: 197946 - DNA, 25 bp, Homo sapien
tgcaatatgataatgggactgaccc

SEQ ID NO: 197947 - DNA, 25 bp, Homo sapien
caagaatgttatgacctgcccagat

SEQ ID NO: 197948 - DNA, 25 bp, Homo sapien
ttgggccccagtcatcaagaatgtt

SEQ ID NO: 197949 - DNA, 25 bp, Homo sapien
tcagaaaagactctaggcatccacg

SEQ ID NO: 197950 - DNA, 25 bp, Homo sapien
caggcctgacctgtaaattagtgtt

SEQ ID NO: 197951 - DNA, 25 bp, Homo sapien
tagtgttcatttctcctaccgcaca

SEQ ID NO: 197952 - DNA, 25 bp, Homo sapien
gatggtaccatacagacgtaatgcc

SEQ ID NO: 197953 - DNA, 25 bp, Homo sapien
caagctttccctacaccaaagtcgg

SEQ ID NO: 197954 - DNA, 25 bp, Homo sapien
caaagtgcttccatcagaacggagt

SEQ ID NO: 197955 - DNA, 25 bp, Homo sapien
gtacaagctttacagtgcagcagca

SEQ ID NO: 197956 - DNA, 25 bp, Homo sapien
tctgaagactgcaaactggattagt

SEQ ID NO: 197957 - DNA, 25 bp, Homo sapien
aaacatggactcaaaaaccacgcgc

SEQ ID NO: 197958 - DNA, 25 bp, Homo sapien
taatacttatctaggaggtccaaaa

SEQ ID NO: 197959 - DNA, 25 bp, Homo sapien
tctagtggagtttcactgaacagac

SEQ ID NO: 197960 - DNA, 25 bp, Homo sapien
tgtcacagaaatggctacaccataa

SEQ ID NO: 197961 - DNA, 25 bp, Homo sapien
tccacaaaaatatatttaataagct

SEQ ID NO: 197962 - DNA, 25 bp, Homo sapien
caaaaatatatttaataagcttgtt

SEQ ID NO: 197963 - DNA, 25 bp, Homo sapien
cacaaaaatatatttaataagcttg

SEQ ID NO: 197964 - DNA, 25 bp, Homo sapien
ttccacaaaaatatatttaataagc

SEQ ID NO: 197965 - DNA, 25 bp, Homo sapien
cagtctgtcagaaggcagtatgcta

SEQ ID NO: 197966 - DNA, 25 bp, Homo sapien
cagtatgctatgctgtcaggaactc

SEQ ID NO: 197967 - DNA, 25 bp, Homo sapien
tgcctcgtcagagccatgctaaatg

SEQ ID NO: 197968 - DNA, 25 bp, Homo sapien
tcaaactcactgatatctaactggg

SEQ ID NO: 197969 - DNA, 25 bp, Homo sapien
aggctaagtattcctgcttatatgt

SEQ ID NO: 197970 - DNA, 25 bp, Homo sapien
gcaactttgagtttcacgcaccttc

SEQ ID NO: 197971 - DNA, 25 bp, Homo sapien
gcaccttcccaatacaggctaagta

SEQ ID NO: 197972 - DNA, 25 bp, Homo sapien
tcacccattcataccaaaaaatact

SEQ ID NO: 197973 - DNA, 25 bp, Homo sapien
ttttaaagaaggtactactgctgta

SEQ ID NO: 197974 - DNA, 25 bp, Homo sapien
tatcacaataaggttccaaatccta

SEQ ID NO: 197975 - DNA, 25 bp, Homo sapien
gacaatatttcacactacagcggta

SEQ ID NO: 197976 - DNA, 25 bp, Homo sapien
tgttcataatgacatttccgctgcg

SEQ ID NO: 197977 - DNA, 25 bp, Homo sapien
agcatttattaaccagagtacttgt

SEQ ID NO: 197978 - DNA, 25 bp, Homo sapien
tttattaaccagagtacttgtttgc

SEQ ID NO: 197979 - DNA, 25 bp, Homo sapien
taaccagagtacttgtttgcaattt

SEQ ID NO: 197980 - DNA, 25 bp, Homo sapien
tattaaccagagtacttgtttgcaa

SEQ ID NO: 197981 - DNA, 25 bp, Homo sapien
aaattttttccatgttgttgggcat

SEQ ID NO: 197982 - DNA, 25 bp, Homo sapien
aattttttccatgttgttgggcata

SEQ ID NO: 197983 - DNA, 25 bp, Homo sapien
attttttccatgttgttgggcatac

SEQ ID NO: 197984 - DNA, 25 bp, Homo sapien
tttccaactctgtaagaagggcttg

SEQ ID NO: 197985 - DNA, 25 bp, Homo sapien
gaagagcaactttagcattccctgg

SEQ ID NO: 197986 - DNA, 25 bp, Homo sapien
aacaatctgctccaattctttcatg

SEQ ID NO: 197987 - DNA, 25 bp, Homo sapien
gtctgtatgcttcatacattttaac

SEQ ID NO: 197988 - DNA, 25 bp, Homo sapien
tgatgccaaagagtacagacatccg

SEQ ID NO: 197989 - DNA, 25 bp, Homo sapien
tacagacatccgactggcatagtgc

SEQ ID NO: 197990 - DNA, 25 bp, Homo sapien
gaactcctaagctctaacaatcctg

SEQ ID NO: 197991 - DNA, 25 bp, Homo sapien
tcggcacagtagtattaacctgctc

SEQ ID NO: 197992 - DNA, 25 bp, Homo sapien
gtacgattatgggtagaagcaacaa

SEQ ID NO: 197993 - DNA, 25 bp, Homo sapien
agcattcagcatcaagagtacgatt

SEQ ID NO: 197994 - DNA, 25 bp, Homo sapien
agtttctgacttgccaatcagcatt

SEQ ID NO: 197995 - DNA, 25 bp, Homo sapien
tctgacttgccaatcagcattcagc

SEQ ID NO: 197996 - DNA, 25 bp, Homo sapien
tggtaaattactgtgagagatagga

SEQ ID NO: 197997 - DNA, 25 bp, Homo sapien
tgagtacagttataccaagcattat

SEQ ID NO: 197998 - DNA, 25 bp, Homo sapien
agacttttgtgagcagacacaggaa

SEQ ID NO: 197999 - DNA, 25 bp, Homo sapien
tcctatagttcagcttgagtacagt

SEQ ID NO: 198000 - DNA, 25 bp, Homo sapien
tctgcagtatgatatggatttgcag

SEQ ID NO: 198001 - DNA, 25 bp, Homo sapien
ggatttgcaggtaccagaagggact

SEQ ID NO: 198002 - DNA, 25 bp, Homo sapien
gggctcgtgcgtaaacctgaagcca

SEQ ID NO: 198003 - DNA, 25 bp, Homo sapien
tgacaggaggtggttgatcataccg

SEQ ID NO: 198004 - DNA, 25 bp, Homo sapien
tccaaattcggatgactcaactcgt

SEQ ID NO: 198005 - DNA, 25 bp, Homo sapien
taaagatgtagcagcaactctccca

SEQ ID NO: 198006 - DNA, 25 bp, Homo sapien
gaggaagtccttctcgctcaagagg

SEQ ID NO: 198007 - DNA, 25 bp, Homo sapien
ggtaaatcttcagaaccatggttag

SEQ ID NO: 198008 - DNA, 25 bp, Homo sapien
ggatctagagctctaacacagttcc

SEQ ID NO: 198009 - DNA, 25 bp, Homo sapien
taagactcaaataggccggtttcca

SEQ ID NO: 198010 - DNA, 25 bp, Homo sapien
cagggtccctagtaatggatgctac

SEQ ID NO: 198011 - DNA, 25 bp, Homo sapien
aacttaatctcatacaaccaggcag

SEQ ID NO: 198012 - DNA, 25 bp, Homo sapien
tatctggcctatgggtgtagcttgc

SEQ ID NO: 198013 - DNA, 25 bp, Homo sapien
taagtgcgtgactggtatgcggcca

SEQ ID NO: 198014 - DNA, 25 bp, Homo sapien
aataatccagactgggtgctgcggc

SEQ ID NO: 198015 - DNA, 25 bp, Homo sapien
gggagagataccttattacctgaga

SEQ ID NO: 198016 - DNA, 25 bp, Homo sapien
gaactgacttggtcttgtgactccc

SEQ ID NO: 198017 - DNA, 25 bp, Homo sapien
cttggcggtgatgactctgagaaac

SEQ ID NO: 198018 - DNA, 25 bp, Homo sapien
tgaagacagcattgataaccctatg

SEQ ID NO: 198019 - DNA, 25 bp, Homo sapien
tattcggatagcagacaagagccca

SEQ ID NO: 198020 - DNA, 25 bp, Homo sapien
ttcacactctcaccagtagtatatt

SEQ ID NO: 198021 - DNA, 25 bp, Homo sapien
tagtgcctgtcctaattattgtaac

SEQ ID NO: 198022 - DNA, 25 bp, Homo sapien
ctgactggggtaagacacctcactg

SEQ ID NO: 198023 - DNA, 25 bp, Homo sapien
cttacatttccttgacgattagtga

SEQ ID NO: 198024 - DNA, 25 bp, Homo sapien
cagtgacgtctacaatataggtggg

SEQ ID NO: 198025 - DNA, 25 bp, Homo sapien
catgtgctgtgctaatcctatctga

SEQ ID NO: 198026 - DNA, 25 bp, Homo sapien
gtcccattaatgtgggcgtgtccca

SEQ ID NO: 198027 - DNA, 25 bp, Homo sapien
caccaaatggaagattacgcagtca

SEQ ID NO: 198028 - DNA, 25 bp, Homo sapien
tccgaaatgtgcaagagcttccact

SEQ ID NO: 198029 - DNA, 25 bp, Homo sapien
caaataaggtaccagaaagcagaga

SEQ ID NO: 198030 - DNA, 25 bp, Homo sapien
gacccaaggaaaacgctagacacat

SEQ ID NO: 198031 - DNA, 25 bp, Homo sapien
aatctaagcctattgttgaaccaca

SEQ ID NO: 198032 - DNA, 25 bp, Homo sapien
tgtagtcttcatgtgcacgatctcc

SEQ ID NO: 198033 - DNA, 25 bp, Homo sapien
gatcatggttgtattcataatatct

SEQ ID NO: 198034 - DNA, 25 bp, Homo sapien
agtggccgctttctctgaccatcaa

SEQ ID NO: 198035 - DNA, 25 bp, Homo sapien
tgcacgatctccaagtggccgcttt

SEQ ID NO: 198036 - DNA, 25 bp, Homo sapien
tgagaagaaccatactctctaggga

SEQ ID NO: 198037 - DNA, 25 bp, Homo sapien
ctggcaagataagaaggtgcagata

SEQ ID NO: 198038 - DNA, 25 bp, Homo sapien
ggtgcagataatctgttgctttctc

SEQ ID NO: 198039 - DNA, 25 bp, Homo sapien
ctaacttccgttacaaatgactgag

SEQ ID NO: 198040 - DNA, 25 bp, Homo sapien
aactctggtttcttgaaactacatc

SEQ ID NO: 198041 - DNA, 25 bp, Homo sapien
tgttctttgaattggagttctaagg

SEQ ID NO: 198042 - DNA, 25 bp, Homo sapien
attggagttctaaggaaactctggt

SEQ ID NO: 198043 - DNA, 25 bp, Homo sapien
tcatgaggtgttctttgaattggag

SEQ ID NO: 198044 - DNA, 25 bp, Homo sapien
cgtcttggaattgttggaccatgcc

SEQ ID NO: 198045 - DNA, 25 bp, Homo sapien
cttggaattgttggaccatgccgga

SEQ ID NO: 198046 - DNA, 25 bp, Homo sapien
ttggaattgttggaccatgccggat

SEQ ID NO: 198047 - DNA, 25 bp, Homo sapien
tcttggaattgttggaccatgccgg

SEQ ID NO: 198048 - DNA, 25 bp, Homo sapien
aaggataaaattaccctttcatcat

SEQ ID NO: 198049 - DNA, 25 bp, Homo sapien
tgtctaccaccccaaaatcaaaatg

SEQ ID NO: 198050 - DNA, 25 bp, Homo sapien
tttggtttaggatggtacttgggca

SEQ ID NO: 198051 - DNA, 25 bp, Homo sapien
aatggactatgcgtaaaagctcagc

SEQ ID NO: 198052 - DNA, 25 bp, Homo sapien
gcacaacttgcagcacagtcgagag

SEQ ID NO: 198053 - DNA, 25 bp, Homo sapien
cagtcgagagacacccgcaatgttt

SEQ ID NO: 198054 - DNA, 25 bp, Homo sapien
tctgccccagagttcgcacaacttg

SEQ ID NO: 198055 - DNA, 25 bp, Homo sapien
tctgcatccggcagcaggactaagg

SEQ ID NO: 198056 - DNA, 25 bp, Homo sapien
gaagcagaggcgacgtctccttctt

SEQ ID NO: 198057 - DNA, 25 bp, Homo sapien
tccgaagcagaggcgacgtctcctt

SEQ ID NO: 198058 - DNA, 25 bp, Homo sapien
gaggcgacgtctccttcttcacgta

SEQ ID NO: 198059 - DNA, 25 bp, Homo sapien
gcagaggcgacgtctccttcttcac

SEQ ID NO: 198060 - DNA, 25 bp, Homo sapien
ctcggccggcttggacacttcgttt

SEQ ID NO: 198061 - DNA, 25 bp, Homo sapien
tgaactgcctccctagggctccgcg

SEQ ID NO: 198062 - DNA, 25 bp, Homo sapien
ccttctcgacgaggcccgaggccgc

SEQ ID NO: 198063 - DNA, 25 bp, Homo sapien
gcgctgaactgcctccctagggctc

SEQ ID NO: 198064 - DNA, 25 bp, Homo sapien
gccgcgctgaactgcctccctaggg

SEQ ID NO: 198065 - DNA, 25 bp, Homo sapien
tgccgcatgttcagggcgctaagcg

SEQ ID NO: 198066 - DNA, 25 bp, Homo sapien
cccgcagggactgccgcatgttcag

SEQ ID NO: 198067 - DNA, 25 bp, Homo sapien
ccgctcagtcgctggtcagttcctt

SEQ ID NO: 198068 - DNA, 25 bp, Homo sapien
ggccgccgaataaccgctaccacta

SEQ ID NO: 198069 - DNA, 25 bp, Homo sapien
gaagatgaaggacgaaacctgcccc

SEQ ID NO: 198070 - DNA, 25 bp, Homo sapien
tcgcatgcgcatgtcgtggaaccta

SEQ ID NO: 198071 - DNA, 25 bp, Homo sapien
gatccctagcggaggcagtgactct

SEQ ID NO: 198072 - DNA, 25 bp, Homo sapien
ggtcctgccgactgagaagatgaag

SEQ ID NO: 198073 - DNA, 25 bp, Homo sapien
tgttacatagaagctatccgcattg

SEQ ID NO: 198074 - DNA, 25 bp, Homo sapien
gggctcagcagaccctacgtttgaa

SEQ ID NO: 198075 - DNA, 25 bp, Homo sapien
gacttgctcagattgtcctgggagg

SEQ ID NO: 198076 - DNA, 25 bp, Homo sapien
gggtgggcaacagcatttgtcagaa

SEQ ID NO: 198077 - DNA, 25 bp, Homo sapien
tgtgcaccctgtcgatgcgcttggc

SEQ ID NO: 198078 - DNA, 25 bp, Homo sapien
acttcgcgtcggagctgcagaagtc

SEQ ID NO: 198079 - DNA, 25 bp, Homo sapien
ttccttgcccggagaggcccagttc

SEQ ID NO: 198080 - DNA, 25 bp, Homo sapien
aagtcacacttgaagtttcagtcct

SEQ ID NO: 198081 - DNA, 25 bp, Homo sapien
agtggactccgctgtgtatgcacag

SEQ ID NO: 198082 - DNA, 25 bp, Homo sapien
gctatgctccaggaagtcagcccat

SEQ ID NO: 198083 - DNA, 25 bp, Homo sapien
ggtgcagccagctatgctccaggaa

SEQ ID NO: 198084 - DNA, 25 bp, Homo sapien
tccgctgtgtatgcacagggcggct

SEQ ID NO: 198085 - DNA, 25 bp, Homo sapien
gcggatgtgcgatttgagattcgcc

SEQ ID NO: 198086 - DNA, 25 bp, Homo sapien
cgatttgagattcgccttcatggtg

SEQ ID NO: 198087 - DNA, 25 bp, Homo sapien
tgcttgatgcggatgtgcgatttga

SEQ ID NO: 198088 - DNA, 25 bp, Homo sapien
cgccttcatggtgcagcggacgtcg

SEQ ID NO: 198089 - DNA, 25 bp, Homo sapien
gaaggagatatccccagtgtgggat

SEQ ID NO: 198090 - DNA, 25 bp, Homo sapien
ttgtatggctgctcgtccgagtgga

SEQ ID NO: 198091 - DNA, 25 bp, Homo sapien
gagctggcatttgtatggctgctcg

SEQ ID NO: 198092 - DNA, 25 bp, Homo sapien
tggcatttgtatggctgctcgtccg

SEQ ID NO: 198093 - DNA, 25 bp, Homo sapien
gaactcacacttgagcggttcgtca

SEQ ID NO: 198094 - DNA, 25 bp, Homo sapien
gcatagtcacacaggtaacactcgt

SEQ ID NO: 198095 - DNA, 25 bp, Homo sapien
tcgtgcggcatcacatgtgcatggt

SEQ ID NO: 198096 - DNA, 25 bp, Homo sapien
tcgtcacccgttgtggattctgaga

SEQ ID NO: 198097 - DNA, 25 bp, Homo sapien
gagaggcaggttgcttttggaatat

SEQ ID NO: 198098 - DNA, 25 bp, Homo sapien
gctttcagtcactgctttcagtgga

SEQ ID NO: 198099 - DNA, 25 bp, Homo sapien
gaatatcattatccagttctgaagc

SEQ ID NO: 198100 - DNA, 25 bp, Homo sapien
gacaggggccttctgctttcagtca

SEQ ID NO: 198101 - DNA, 25 bp, Homo sapien
tattaaaaggtcagggtatatagaa

SEQ ID NO: 198102 - DNA, 25 bp, Homo sapien
ttattaaaaggtcagggtatataga

SEQ ID NO: 198103 - DNA, 25 bp, Homo sapien
cactgaaactttattaaaaggtcag

SEQ ID NO: 198104 - DNA, 25 bp, Homo sapien
gtttctcataatatctgccctgggt

SEQ ID NO: 198105 - DNA, 25 bp, Homo sapien
tattttacagtgctgagaggtccag

SEQ ID NO: 198106 - DNA, 25 bp, Homo sapien
tctgaacagaaacatagagatggct

SEQ ID NO: 198107 - DNA, 25 bp, Homo sapien
caaagtctgccataaacccttagag

SEQ ID NO: 198108 - DNA, 25 bp, Homo sapien
tctcaaaaattgttgcacaaatgca

SEQ ID NO: 198109 - DNA, 25 bp, Homo sapien
caataactttgagtaacttgacaca

SEQ ID NO: 198110 - DNA, 25 bp, Homo sapien
aaccgtgatcacatgctaaggccag

SEQ ID NO: 198111 - DNA, 25 bp, Homo sapien
gagaaattaagcacctagatgttgg

SEQ ID NO: 198112 - DNA, 25 bp, Homo sapien
ctcctgggttgaccggtgagactca

SEQ ID NO: 198113 - DNA, 25 bp, Homo sapien
gtgttcctgcccataaagcagtgct

SEQ ID NO: 198114 - DNA, 25 bp, Homo sapien
tctgtgaaagctaatgccatacaag

SEQ ID NO: 198115 - DNA, 25 bp, Homo sapien
tagcctaggccaatccacagtttta

SEQ ID NO: 198116 - DNA, 25 bp, Homo sapien
ggcttggccctccaggaatatatca

SEQ ID NO: 198117 - DNA, 25 bp, Homo sapien
ttttgtaaatagatgggcttggccc

SEQ ID NO: 198118 - DNA, 25 bp, Homo sapien
ttccaccaactgctggcggaagtgg

SEQ ID NO: 198119 - DNA, 25 bp, Homo sapien
gaatatatcaaagcgaacttttcgg

SEQ ID NO: 198120 - DNA, 25 bp, Homo sapien
tttgagagacagaaaacctacatgg

SEQ ID NO: 198121 - DNA, 25 bp, Homo sapien
cttagagaggccctacagtagttca

SEQ ID NO: 198122 - DNA, 25 bp, Homo sapien
tgttccctgagttcttgaggcaacc

SEQ ID NO: 198123 - DNA, 25 bp, Homo sapien
ggaaagtcctatttggcactccttg

SEQ ID NO: 198124 - DNA, 25 bp, Homo sapien
gaaactccagttgtgttgctggcag

SEQ ID NO: 198125 - DNA, 25 bp, Homo sapien
tgagaacctactgaaatgttcatct

SEQ ID NO: 198126 - DNA, 25 bp, Homo sapien
caaactcccataagggtctatttag

SEQ ID NO: 198127 - DNA, 25 bp, Homo sapien
taaagtgcacaaatatgagtgtacc

SEQ ID NO: 198128 - DNA, 25 bp, Homo sapien
caaaggaggtgtagaagtcaatggc

SEQ ID NO: 198129 - DNA, 25 bp, Homo sapien
aactatattactgaggctggcaatc

SEQ ID NO: 198130 - DNA, 25 bp, Homo sapien
tctgtcgctgttcagtcacttccag

SEQ ID NO: 198131 - DNA, 25 bp, Homo sapien
ggtgtcagattcctaactatattac

SEQ ID NO: 198132 - DNA, 25 bp, Homo sapien
agtccttcaccattgcgtctgcctt

SEQ ID NO: 198133 - DNA, 25 bp, Homo sapien
tgcgtctgccttagtgttcttgcag

SEQ ID NO: 198134 - DNA, 25 bp, Homo sapien
caccattgcgtctgccttagtgttc

SEQ ID NO: 198135 - DNA, 25 bp, Homo sapien
attttcaacatacaagtccttcacc

SEQ ID NO: 198136 - DNA, 25 bp, Homo sapien
gacaccattggaacaaatctacttt

SEQ ID NO: 198137 - DNA, 25 bp, Homo sapien
ggactgtttaactctgcttgtaaca

SEQ ID NO: 198138 - DNA, 25 bp, Homo sapien
taccattcgtaactacaacccactg

SEQ ID NO: 198139 - DNA, 25 bp, Homo sapien
tataacagagataagatttgggcag

SEQ ID NO: 198140 - DNA, 25 bp, Homo sapien
caagctcagaacctagatgactggc

SEQ ID NO: 198141 - DNA, 25 bp, Homo sapien
gaagtgtttatacgtgtccacaccc

SEQ ID NO: 198142 - DNA, 25 bp, Homo sapien
tgatggttcttcattgccgacagaa

SEQ ID NO: 198143 - DNA, 25 bp, Homo sapien
cagggataaggatgacagcactctc

SEQ ID NO: 198144 - DNA, 25 bp, Homo sapien
gttgtatccctgtgcccacggcagg

SEQ ID NO: 198145 - DNA, 25 bp, Homo sapien
aaacgcttggcaccttgtaagtgca

SEQ ID NO: 198146 - DNA, 25 bp, Homo sapien
tactgaaaacaggacggatcccact

SEQ ID NO: 198147 - DNA, 25 bp, Homo sapien
gtaagtgcattctatatgggcaggg

SEQ ID NO: 198148 - DNA, 25 bp, Homo sapien
tcatctcagtttccagagaggctat

SEQ ID NO: 198149 - DNA, 25 bp, Homo sapien
agtatctaaagaactaggttgggca

SEQ ID NO: 198150 - DNA, 25 bp, Homo sapien
gtctcttcagtggatgcgcaactaa

SEQ ID NO: 198151 - DNA, 25 bp, Homo sapien
gaggctataacactctcccagaggg

SEQ ID NO: 198152 - DNA, 25 bp, Homo sapien
ttattagacaacataagttaacgag

SEQ ID NO: 198153 - DNA, 25 bp, Homo sapien
aatagaatttgcctttattagacaa

SEQ ID NO: 198154 - DNA, 25 bp, Homo sapien
gcctttattagacaacataagttaa

SEQ ID NO: 198155 - DNA, 25 bp, Homo sapien
gaatttgcctttattagacaacata

SEQ ID NO: 198156 - DNA, 25 bp, Homo sapien
tgggtgaacagagatgaccgggtag

SEQ ID NO: 198157 - DNA, 25 bp, Homo sapien
gaacagagatgaccgggtaggctca

SEQ ID NO: 198158 - DNA, 25 bp, Homo sapien
gagttaaagctggaatgtgaggtgg

SEQ ID NO: 198159 - DNA, 25 bp, Homo sapien
caataaagggatgtaaaactggagt

SEQ ID NO: 198160 - DNA, 25 bp, Homo sapien
tgaagaagccttttcactagtttca

SEQ ID NO: 198161 - DNA, 25 bp, Homo sapien
aacttctatcattcgttcctccatg

SEQ ID NO: 198162 - DNA, 25 bp, Homo sapien
ctccatgacagttaccagttgttcc

SEQ ID NO: 198163 - DNA, 25 bp, Homo sapien
gaagaagccttttcactagtttcag

SEQ ID NO: 198164 - DNA, 25 bp, Homo sapien
gaggatgggtttactatcagagcag

SEQ ID NO: 198165 - DNA, 25 bp, Homo sapien
cacacaacggtgatgggttaaggag

SEQ ID NO: 198166 - DNA, 25 bp, Homo sapien
gagtcaaaggctaccatctgtttag

SEQ ID NO: 198167 - DNA, 25 bp, Homo sapien
tgcagtccaccaaaatgtccccata

SEQ ID NO: 198168 - DNA, 25 bp, Homo sapien
gaatttgattcacaagatctgtcat

SEQ ID NO: 198169 - DNA, 25 bp, Homo sapien
tatagactacatcctttcaagaatc

SEQ ID NO: 198170 - DNA, 25 bp, Homo sapien
taagagacataatactgcaaaggtt

SEQ ID NO: 198171 - DNA, 25 bp, Homo sapien
gcacttaattccaacatatcttagc

SEQ ID NO: 198172 - DNA, 25 bp, Homo sapien
tccttctgtaggaatctgcgtgcac

SEQ ID NO: 198173 - DNA, 25 bp, Homo sapien
taggaatctgcgtgcactgctcgct

SEQ ID NO: 198174 - DNA, 25 bp, Homo sapien
tcacaggtgcccaatccttctgtag

SEQ ID NO: 198175 - DNA, 25 bp, Homo sapien
actgctcgctgctccggtagcaagg

SEQ ID NO: 198176 - DNA, 25 bp, Homo sapien
tgggcaccatcggacaggcttgctg

SEQ ID NO: 198177 - DNA, 25 bp, Homo sapien
cagcagctggcgttgaagctgcaga

SEQ ID NO: 198178 - DNA, 25 bp, Homo sapien
tggcgttgaagctgcagaaactgct

SEQ ID NO: 198179 - DNA, 25 bp, Homo sapien
tgtggtgtgttggtttcggaggtcc

SEQ ID NO: 198180 - DNA, 25 bp, Homo sapien
gcaaatcccaagcatgaggggacgg

SEQ ID NO: 198181 - DNA, 25 bp, Homo sapien
ctgcaaatcccaagcatgaggggac

SEQ ID NO: 198182 - DNA, 25 bp, Homo sapien
caaatcccaagcatgaggggacggg

SEQ ID NO: 198183 - DNA, 25 bp, Homo sapien
tgcaaatcccaagcatgaggggacg

SEQ ID NO: 198184 - DNA, 25 bp, Homo sapien
tcgcagtggacctcaggtgctgcat

SEQ ID NO: 198185 - DNA, 25 bp, Homo sapien
cgtcgcagtggacctcaggtgctgc

SEQ ID NO: 198186 - DNA, 25 bp, Homo sapien
ctaggcgtcgcagtggacctcaggt

SEQ ID NO: 198187 - DNA, 25 bp, Homo sapien
ggcgtcgcagtggacctcaggtgct

SEQ ID NO: 198188 - DNA, 25 bp, Homo sapien
ctctgctacttccaaccactgagtt

SEQ ID NO: 198189 - DNA, 25 bp, Homo sapien
actgcacccttctctgctacttcca

SEQ ID NO: 198190 - DNA, 25 bp, Homo sapien
tatagagatgagagactacttcccc

SEQ ID NO: 198191 - DNA, 25 bp, Homo sapien
ggagtgcacatatcaggttagaacc

SEQ ID NO: 198192 - DNA, 25 bp, Homo sapien
tagctacagccgagtgatgaacagg

SEQ ID NO: 198193 - DNA, 25 bp, Homo sapien
ggaatgtacctatccctcaggtgag

SEQ ID NO: 198194 - DNA, 25 bp, Homo sapien
gttcaagggaattcatctgactgac

SEQ ID NO: 198195 - DNA, 25 bp, Homo sapien
tgttcaagggaattcatctgactga

SEQ ID NO: 198196 - DNA, 25 bp, Homo sapien
gacaccgagtcagaatattgctcag

SEQ ID NO: 198197 - DNA, 25 bp, Homo sapien
gctttagagcacaaccaggtcttct

SEQ ID NO: 198198 - DNA, 25 bp, Homo sapien
tatactagggttagtctgcgtgaca

SEQ ID NO: 198199 - DNA, 25 bp, Homo sapien
cctagtgagctagaggacaccgagt

SEQ ID NO: 198200 - DNA, 25 bp, Homo sapien
gatcacactctctctttaagctcaa

SEQ ID NO: 198201 - DNA, 25 bp, Homo sapien
tgggattcatggtacctgatgggtt

SEQ ID NO: 198202 - DNA, 25 bp, Homo sapien
cctgttagcaggagattgttctttc

SEQ ID NO: 198203 - DNA, 25 bp, Homo sapien
tgggtttagatgtttttggtgcttg

SEQ ID NO: 198204 - DNA, 25 bp, Homo sapien
cattcatcagatgatccaacttgtc

SEQ ID NO: 198205 - DNA, 25 bp, Homo sapien
ttctgtaccatggtctggagcctct

SEQ ID NO: 198206 - DNA, 25 bp, Homo sapien
cgtgagttcggctttggtgttctgt

SEQ ID NO: 198207 - DNA, 25 bp, Homo sapien
tcccgggagtgcgtgagttcggctt

SEQ ID NO: 198208 - DNA, 25 bp, Homo sapien
ggatgagtagctatctctggggccc

SEQ ID NO: 198209 - DNA, 25 bp, Homo sapien
ctgatggatgagtagctatctctgg

SEQ ID NO: 198210 - DNA, 25 bp, Homo sapien
atggatgagtagctatctctggggc

SEQ ID NO: 198211 - DNA, 25 bp, Homo sapien
tgatggatgagtagctatctctggg

SEQ ID NO: 198212 - DNA, 25 bp, Homo sapien
tgtaagccttaaaaacaagctattg

SEQ ID NO: 198213 - DNA, 25 bp, Homo sapien
tatttgcacacagattaggcagcac

SEQ ID NO: 198214 - DNA, 25 bp, Homo sapien
gtcagccagctaacactttaatcag

SEQ ID NO: 198215 - DNA, 25 bp, Homo sapien
tggtgccatagcaacctatttgtag

SEQ ID NO: 198216 - DNA, 25 bp, Homo sapien
ggcagcactgtgacttattaaaatg

SEQ ID NO: 198217 - DNA, 25 bp, Homo sapien
tcctgctgagtcactcgtaggtcag

SEQ ID NO: 198218 - DNA, 25 bp, Homo sapien
ctgaagttgcttatgtaaagacatc

SEQ ID NO: 198219 - DNA, 25 bp, Homo sapien
catccgggacatttgcaggtttaca

SEQ ID NO: 198220 - DNA, 25 bp, Homo sapien
caggtttacattctgcacggtgtct

SEQ ID NO: 198221 - DNA, 25 bp, Homo sapien
tcttgtcagtagctcagtggaaacc

SEQ ID NO: 198222 - DNA, 25 bp, Homo sapien
tggtctcacctctagcatgttcagg

SEQ ID NO: 198223 - DNA, 25 bp, Homo sapien
caatgatgaactatgtctggagcaa

SEQ ID NO: 198224 - DNA, 25 bp, Homo sapien
tacaataccaatgggtgccaactgg

SEQ ID NO: 198225 - DNA, 25 bp, Homo sapien
ctgtgactttaagctcgcactctga

SEQ ID NO: 198226 - DNA, 25 bp, Homo sapien
ctgttcctgcttcatcgtcgcaatt

SEQ ID NO: 198227 - DNA, 25 bp, Homo sapien
cctgcttcatcgtcgcaattctatg

SEQ ID NO: 198228 - DNA, 25 bp, Homo sapien
agctcgcactctgatgttcccagga

SEQ ID NO: 198229 - DNA, 25 bp, Homo sapien
tttgcaaacatagctagccttaatt

SEQ ID NO: 198230 - DNA, 25 bp, Homo sapien
tgttttacacgtctaattttgagga

SEQ ID NO: 198231 - DNA, 25 bp, Homo sapien
ttatatgcctgcacttacattgtca

SEQ ID NO: 198232 - DNA, 25 bp, Homo sapien
tcctggctccaaatcgagacaaacc

SEQ ID NO: 198233 - DNA, 25 bp, Homo sapien
gctatttaattcctcactcagagct

SEQ ID NO: 198234 - DNA, 25 bp, Homo sapien
gcagtttttcgttgtagcttagaac

SEQ ID NO: 198235 - DNA, 25 bp, Homo sapien
cagctatttaattcctcactcagag

SEQ ID NO: 198236 - DNA, 25 bp, Homo sapien
tgtagcttagaacactagagatttt

SEQ ID NO: 198237 - DNA, 25 bp, Homo sapien
gaagtcagagagatcgggacatctg

SEQ ID NO: 198238 - DNA, 25 bp, Homo sapien
ctggaagtcagagagatcgggacat

SEQ ID NO: 198239 - DNA, 25 bp, Homo sapien
agtcagagagatcgggacatctgtg

SEQ ID NO: 198240 - DNA, 25 bp, Homo sapien
cagagagatcgggacatctgtgcag

SEQ ID NO: 198241 - DNA, 25 bp, Homo sapien
ggaggcttgacttcccgagctcagg

SEQ ID NO: 198242 - DNA, 25 bp, Homo sapien
ctggaggcttgacttcccgagctca

SEQ ID NO: 198243 - DNA, 25 bp, Homo sapien
gagtgcaggggcacagtagcgcaat

SEQ ID NO: 198244 - DNA, 25 bp, Homo sapien
tcactggaggcttgacttcccgagc

SEQ ID NO: 198245 - DNA, 25 bp, Homo sapien
ttaggtcctcaactttgccaagcag

SEQ ID NO: 198246 - DNA, 25 bp, Homo sapien
tggtacaaaggacaactggtggtta

SEQ ID NO: 198247 - DNA, 25 bp, Homo sapien
tgtcctcagctaccaagctagttga

SEQ ID NO: 198248 - DNA, 25 bp, Homo sapien
tagcaatagcctttacagataggat

SEQ ID NO: 198249 - DNA, 25 bp, Homo sapien
cgcctccagagaagacactaaagtg

SEQ ID NO: 198250 - DNA, 25 bp, Homo sapien
cctgttgcacaatatgggtctgtat

SEQ ID NO: 198251 - DNA, 25 bp, Homo sapien
acttcagagagctccgcctccagag

SEQ ID NO: 198252 - DNA, 25 bp, Homo sapien
tcatctttgagaaggtggttttcct

SEQ ID NO: 198253 - DNA, 25 bp, Homo sapien
acttaccaggttcataaaaggccat

SEQ ID NO: 198254 - DNA, 25 bp, Homo sapien
catacatatttaggctggggaaact

SEQ ID NO: 198255 - DNA, 25 bp, Homo sapien
aatgacactgttttatgaccatttt

SEQ ID NO: 198256 - DNA, 25 bp, Homo sapien
tggcatggaaaattcaacatcatgc

SEQ ID NO: 198257 - DNA, 25 bp, Homo sapien
ttcctatataccaatgatagccaaa

SEQ ID NO: 198258 - DNA, 25 bp, Homo sapien
cctatataccaatgatagccaaatc

SEQ ID NO: 198259 - DNA, 25 bp, Homo sapien
tatataccaatgatagccaaatcat

SEQ ID NO: 198260 - DNA, 25 bp, Homo sapien
ataccaatgatagccaaatcatgag

SEQ ID NO: 198261 - DNA, 25 bp, Homo sapien
agagttctttactagcagggatatt

SEQ ID NO: 198262 - DNA, 25 bp, Homo sapien
cccatgtccctccatttttaagagt

SEQ ID NO: 198263 - DNA, 25 bp, Homo sapien
gatattaggccttctcactgtggta

SEQ ID NO: 198264 - DNA, 25 bp, Homo sapien
tcaaatttttggtcccatgtccctc

SEQ ID NO: 198265 - DNA, 25 bp, Homo sapien
gaatgtctactcagttgttcaggca

SEQ ID NO: 198266 - DNA, 25 bp, Homo sapien
cttacctacttatctattcatgtgc

SEQ ID NO: 198267 - DNA, 25 bp, Homo sapien
tggccctggttatacactacgtttc

SEQ ID NO: 198268 - DNA, 25 bp, Homo sapien
tgttcaggcaccattaatttaaaag

SEQ ID NO: 198269 - DNA, 25 bp, Homo sapien
gttcctccaatgcactgtttcctgg

SEQ ID NO: 198270 - DNA, 25 bp, Homo sapien
gcactttacaacgttccagttcttc

SEQ ID NO: 198271 - DNA, 25 bp, Homo sapien
ttctcttgttcccgttcctccaatg

SEQ ID NO: 198272 - DNA, 25 bp, Homo sapien
gcatttctgttagacgttgattaag

SEQ ID NO: 198273 - DNA, 25 bp, Homo sapien
actgaaactgcacaagggctacagc

SEQ ID NO: 198274 - DNA, 25 bp, Homo sapien
ctgaatggcaccagctatctgaata

SEQ ID NO: 198275 - DNA, 25 bp, Homo sapien
cagacagattcttaaatggccttcc

SEQ ID NO: 198276 - DNA, 25 bp, Homo sapien
cctcaattctgctgatgataaagct

SEQ ID NO: 198277 - DNA, 25 bp, Homo sapien
ctttaaattttcaaccatcttctga

SEQ ID NO: 198278 - DNA, 25 bp, Homo sapien
taaattttcaaccatcttctgaact

SEQ ID NO: 198279 - DNA, 25 bp, Homo sapien
ttttcaaccatcttctgaactgcag

SEQ ID NO: 198280 - DNA, 25 bp, Homo sapien
tgcagcattttcttgttttacagtt

SEQ ID NO: 198281 - DNA, 25 bp, Homo sapien
atccatttaatgtccctaatttcag

SEQ ID NO: 198282 - DNA, 25 bp, Homo sapien
tccatttaatgtccctaatttcagg

SEQ ID NO: 198283 - DNA, 25 bp, Homo sapien
gatccatttaatgtccctaatttca

SEQ ID NO: 198284 - DNA, 25 bp, Homo sapien
ccatttaatgtccctaatttcaggt

SEQ ID NO: 198285 - DNA, 25 bp, Homo sapien
aaggcagtcatctggcatctttgga

SEQ ID NO: 198286 - DNA, 25 bp, Homo sapien
gtcatctggcatctttggaaaatat

SEQ ID NO: 198287 - DNA, 25 bp, Homo sapien
ggcagtcatctggcatctttggaaa

SEQ ID NO: 198288 - DNA, 25 bp, Homo sapien
cagtcatctggcatctttggaaaat

SEQ ID NO: 198289 - DNA, 25 bp, Homo sapien
tgttctaagataaatttccactgtt

SEQ ID NO: 198290 - DNA, 25 bp, Homo sapien
catggtgcctgaccatttgcactgt

SEQ ID NO: 198291 - DNA, 25 bp, Homo sapien
tttattagaatctggaggctcctca

SEQ ID NO: 198292 - DNA, 25 bp, Homo sapien
gtgggcagtggttcaaattaattct

SEQ ID NO: 198293 - DNA, 25 bp, Homo sapien
taggttagtttctctaggcacggca

SEQ ID NO: 198294 - DNA, 25 bp, Homo sapien
cacggcaagcagtggaagttagatc

SEQ ID NO: 198295 - DNA, 25 bp, Homo sapien
gcggaagggaatgcctcctaaacaa

SEQ ID NO: 198296 - DNA, 25 bp, Homo sapien
tcgtgacgtctagaaggtacataca

SEQ ID NO: 198297 - DNA, 25 bp, Homo sapien
tttgctgcatctcactgcacgtgat

SEQ ID NO: 198298 - DNA, 25 bp, Homo sapien
tttttgctgcatctcactgcacgtg

SEQ ID NO: 198299 - DNA, 25 bp, Homo sapien
ctcagaagttcaactttttgctgca

SEQ ID NO: 198300 - DNA, 25 bp, Homo sapien
cagaagttcaactttttgctgcatc

SEQ ID NO: 198301 - DNA, 25 bp, Homo sapien
tttttccaagagctgtgtgttcccc

SEQ ID NO: 198302 - DNA, 25 bp, Homo sapien
tgaattgttccatgtaaccaggcaa

SEQ ID NO: 198303 - DNA, 25 bp, Homo sapien
tgatgtacactcctaaccctgggca

SEQ ID NO: 198304 - DNA, 25 bp, Homo sapien
tccatcaggttcgatttccaggttc

SEQ ID NO: 198305 - DNA, 25 bp, Homo sapien
cattcagcccctcattttctatttt

SEQ ID NO: 198306 - DNA, 25 bp, Homo sapien
aaaccagaacattcagcccctcatt

SEQ ID NO: 198307 - DNA, 25 bp, Homo sapien
tcctgaagcttctcaatcttgcctt

SEQ ID NO: 198308 - DNA, 25 bp, Homo sapien
atcttgccttgaagtctcaaaacca

SEQ ID NO: 198309 - DNA, 25 bp, Homo sapien
gtctctgaacagagctcgtccctgt

SEQ ID NO: 198310 - DNA, 25 bp, Homo sapien
ggcagtcattttctcggctcacatc

SEQ ID NO: 198311 - DNA, 25 bp, Homo sapien
tagtgcctcatcgtagcgtgtctcc

SEQ ID NO: 198312 - DNA, 25 bp, Homo sapien
ttttcagaagctcgatcacagtccg

SEQ ID NO: 198313 - DNA, 25 bp, Homo sapien
aggtcacttaggacatgccgcctgg

SEQ ID NO: 198314 - DNA, 25 bp, Homo sapien
cttaggacatgccgcctggtcacac

SEQ ID NO: 198315 - DNA, 25 bp, Homo sapien
tcacttaggacatgccgcctggtca

SEQ ID NO: 198316 - DNA, 25 bp, Homo sapien
ggtcacttaggacatgccgcctggt

SEQ ID NO: 198317 - DNA, 25 bp, Homo sapien
tgcttcgttcggttttgctgtaaaa

SEQ ID NO: 198318 - DNA, 25 bp, Homo sapien
aaaactgctctgtttgttccgcagt

SEQ ID NO: 198319 - DNA, 25 bp, Homo sapien
ccaaaaaactcagtagctggctcat

SEQ ID NO: 198320 - DNA, 25 bp, Homo sapien
tagctggctcatccaaacaagaaga

SEQ ID NO: 198321 - DNA, 25 bp, Homo sapien
gcaggcttaagaggacgtccccatt

SEQ ID NO: 198322 - DNA, 25 bp, Homo sapien
tgggatttctcctcacgctgctgtt

SEQ ID NO: 198323 - DNA, 25 bp, Homo sapien
tcagctcaagtatctggtcagacag

SEQ ID NO: 198324 - DNA, 25 bp, Homo sapien
tttctagtctttccagccgctggct

SEQ ID NO: 198325 - DNA, 25 bp, Homo sapien
ggttcttctattacactctgtttcc

SEQ ID NO: 198326 - DNA, 25 bp, Homo sapien
tatttgagaggttcttctattacac

SEQ ID NO: 198327 - DNA, 25 bp, Homo sapien
ggcttctatttgagaggttcttcta

SEQ ID NO: 198328 - DNA, 25 bp, Homo sapien
aaactgggcttctatttgagaggtt

SEQ ID NO: 198329 - DNA, 25 bp, Homo sapien
cttcttgcagctgaccacggtttcg

SEQ ID NO: 198330 - DNA, 25 bp, Homo sapien
taaggtgtgcgtttcgttctcatgc

SEQ ID NO: 198331 - DNA, 25 bp, Homo sapien
tctgtccaggcgctactctgaaggc

SEQ ID NO: 198332 - DNA, 25 bp, Homo sapien
gagcctgtgtcagtctagccttgag

SEQ ID NO: 198333 - DNA, 25 bp, Homo sapien
gatacttaagtcaggcatggtttac

SEQ ID NO: 198334 - DNA, 25 bp, Homo sapien
tagtgtctgaacaaccttattaaga

SEQ ID NO: 198335 - DNA, 25 bp, Homo sapien
gaactgagcagccattacacatagc

SEQ ID NO: 198336 - DNA, 25 bp, Homo sapien
gccattacacatagctaccctctgt

SEQ ID NO: 198337 - DNA, 25 bp, Homo sapien
gcctcaatgctcatattcaatggat

SEQ ID NO: 198338 - DNA, 25 bp, Homo sapien
tctgaggcaacatatgtccctgtga

SEQ ID NO: 198339 - DNA, 25 bp, Homo sapien
tggattgcattcttcagaaccgagc

SEQ ID NO: 198340 - DNA, 25 bp, Homo sapien
ttcatctgttcaatgaccagctctg

SEQ ID NO: 198341 - DNA, 25 bp, Homo sapien
ctgaaaacacatgggactcattgat

SEQ ID NO: 198342 - DNA, 25 bp, Homo sapien
aaacacatgggactcattgatcctg

SEQ ID NO: 198343 - DNA, 25 bp, Homo sapien
gaaaacacatgggactcattgatcc

SEQ ID NO: 198344 - DNA, 25 bp, Homo sapien
aacacatgggactcattgatcctgc

SEQ ID NO: 198345 - DNA, 25 bp, Homo sapien
gattttcagcctgaattaccagaga

SEQ ID NO: 198346 - DNA, 25 bp, Homo sapien
cagcctgaattaccagagatgtgaa

SEQ ID NO: 198347 - DNA, 25 bp, Homo sapien
taaggaatgattttcagcctgaatt

SEQ ID NO: 198348 - DNA, 25 bp, Homo sapien
ctaaggaatgattttcagcctgaat

SEQ ID NO: 198349 - DNA, 25 bp, Homo sapien
tctacagcctgtccgaatgtgttta

SEQ ID NO: 198350 - DNA, 25 bp, Homo sapien
tttatctacagcctgtccgaatgtg

SEQ ID NO: 198351 - DNA, 25 bp, Homo sapien
aagagtaaaggctttatctacagcc

SEQ ID NO: 198352 - DNA, 25 bp, Homo sapien
gctttatctacagcctgtccgaatg

SEQ ID NO: 198353 - DNA, 25 bp, Homo sapien
cagactggagttcatctacttggtc

SEQ ID NO: 198354 - DNA, 25 bp, Homo sapien
tcttctgacggtgagttcttcaacg

SEQ ID NO: 198355 - DNA, 25 bp, Homo sapien
tcttcaacggaagcctgagcactct

SEQ ID NO: 198356 - DNA, 25 bp, Homo sapien
gtgttcgggctcaatgccaccgctg

SEQ ID NO: 198357 - DNA, 25 bp, Homo sapien
ccaacactggtcttagatgtgacac

SEQ ID NO: 198358 - DNA, 25 bp, Homo sapien
aaaaccaacactggtcttagatgtg

SEQ ID NO: 198359 - DNA, 25 bp, Homo sapien
taaaaaccaacactggtcttagatg

SEQ ID NO: 198360 - DNA, 25 bp, Homo sapien
aaccaacactggtcttagatgtgac

SEQ ID NO: 198361 - DNA, 25 bp, Homo sapien
tatatgcccatacaaaaacgtgcgc

SEQ ID NO: 198362 - DNA, 25 bp, Homo sapien
catagctgcgttactcataatagcc

SEQ ID NO: 198363 - DNA, 25 bp, Homo sapien
catagggttaccatacaacctagca

SEQ ID NO: 198364 - DNA, 25 bp, Homo sapien
aaacgtgcgcacaaattttcatagc

SEQ ID NO: 198365 - DNA, 25 bp, Homo sapien
ggcactcctgcacttactcagttct

SEQ ID NO: 198366 - DNA, 25 bp, Homo sapien
gggtcacagagctagggaacgggga

SEQ ID NO: 198367 - DNA, 25 bp, Homo sapien
catgaggaatggaagtacccacaga

SEQ ID NO: 198368 - DNA, 25 bp, Homo sapien
cacagagctagggaacggggaagct

SEQ ID NO: 198369 - DNA, 25 bp, Homo sapien
cctgcactgccgctcatattcattt

SEQ ID NO: 198370 - DNA, 25 bp, Homo sapien
tcagcactgctaggatcgaggtcac

SEQ ID NO: 198371 - DNA, 25 bp, Homo sapien
tgccgctcatattcatttctcatct

SEQ ID NO: 198372 - DNA, 25 bp, Homo sapien
aagaactcagcactgctaggatcga

SEQ ID NO: 198373 - DNA, 25 bp, Homo sapien
cagtttctggtattcacccagtctc

SEQ ID NO: 198374 - DNA, 25 bp, Homo sapien
taagcacgaacaacaccaactgggt

SEQ ID NO: 198375 - DNA, 25 bp, Homo sapien
cactagagtgacgtgttcaatgaac

SEQ ID NO: 198376 - DNA, 25 bp, Homo sapien
cagggatcatttctcagtgccaggc

SEQ ID NO: 198377 - DNA, 25 bp, Homo sapien
aagtttgtttgtcagattctcatat

SEQ ID NO: 198378 - DNA, 25 bp, Homo sapien
gaagtttgtttgtcagattctcata

SEQ ID NO: 198379 - DNA, 25 bp, Homo sapien
ctctgcattttctagaagctcattt

SEQ ID NO: 198380 - DNA, 25 bp, Homo sapien
tctctgcattttctagaagctcatt

SEQ ID NO: 198381 - DNA, 25 bp, Homo sapien
agctcattttccagacgactgtttt

SEQ ID NO: 198382 - DNA, 25 bp, Homo sapien
gcggtcccggatatagttctcttct

SEQ ID NO: 198383 - DNA, 25 bp, Homo sapien
attttttaaggctgctattcgctcc

SEQ ID NO: 198384 - DNA, 25 bp, Homo sapien
aagttctaaacgctgcttgcctgcc

SEQ ID NO: 198385 - DNA, 25 bp, Homo sapien
ggctgctattcgctccttgtactct

SEQ ID NO: 198386 - DNA, 25 bp, Homo sapien
aggttgtactcattccgccgctcta

SEQ ID NO: 198387 - DNA, 25 bp, Homo sapien
cacctccgaggccattaaagacttg

SEQ ID NO: 198388 - DNA, 25 bp, Homo sapien
agacttgagcttctcggccttgtcc

SEQ ID NO: 198389 - DNA, 25 bp, Homo sapien
gctctatggccgcatggtgatcatc

SEQ ID NO: 198390 - DNA, 25 bp, Homo sapien
ctaggatcagaagtacactgagtta

SEQ ID NO: 198391 - DNA, 25 bp, Homo sapien
taggatcagaagtacactgagttaa

SEQ ID NO: 198392 - DNA, 25 bp, Homo sapien
aagggccagtgttaattctgtcaaa

SEQ ID NO: 198393 - DNA, 25 bp, Homo sapien
caaattgatgtttccatcgaggctg

SEQ ID NO: 198394 - DNA, 25 bp, Homo sapien
ttccatcgaggctgaaatccaaggc

SEQ ID NO: 198395 - DNA, 25 bp, Homo sapien
caaatgccggatttcagccttaaag

SEQ ID NO: 198396 - DNA, 25 bp, Homo sapien
tgaacagaagtaccattaagaagaa

SEQ ID NO: 198397 - DNA, 25 bp, Homo sapien
atttctcatgtcaataatctggggg

SEQ ID NO: 198398 - DNA, 25 bp, Homo sapien
ctatctggccctgtaaataaacaca

SEQ ID NO: 198399 - DNA, 25 bp, Homo sapien
ctcatgtcaataatctgggggttaa

SEQ ID NO: 198400 - DNA, 25 bp, Homo sapien
tggctgttctcaatgccctcttcct

SEQ ID NO: 198401 - DNA, 25 bp, Homo sapien
ggcaggagaagacccgaaagccaat

SEQ ID NO: 198402 - DNA, 25 bp, Homo sapien
aatggtacttgtcattgctgatgag

SEQ ID NO: 198403 - DNA, 25 bp, Homo sapien
ggtacgtcgtccactctcatcgaaa

SEQ ID NO: 198404 - DNA, 25 bp, Homo sapien
gaaaaaatcttctacactcattgta

SEQ ID NO: 198405 - DNA, 25 bp, Homo sapien
actcattgtaccgtcaggatcaaga

SEQ ID NO: 198406 - DNA, 25 bp, Homo sapien
cctttttagttgtctatatggagta

SEQ ID NO: 198407 - DNA, 25 bp, Homo sapien
ctgcatggaaaggtgcctttttagt

SEQ ID NO: 198408 - DNA, 25 bp, Homo sapien
tctgtgaagcattcaagtcatctgg

SEQ ID NO: 198409 - DNA, 25 bp, Homo sapien
gaccagcttcttccggttcaggtga

SEQ ID NO: 198410 - DNA, 25 bp, Homo sapien
tccacattctgtaaaccatactgct

SEQ ID NO: 198411 - DNA, 25 bp, Homo sapien
ttcaggtgaccatcacgggtgatcc

SEQ ID NO: 198412 - DNA, 25 bp, Homo sapien
atactcctcactgcgttgcgtcttc

SEQ ID NO: 198413 - DNA, 25 bp, Homo sapien
tcatactcctcactgcgttgcgtct

SEQ ID NO: 198414 - DNA, 25 bp, Homo sapien
cctcactgcgttgcgtcttccagtg

SEQ ID NO: 198415 - DNA, 25 bp, Homo sapien
ctcctcactgcgttgcgtcttccag

SEQ ID NO: 198416 - DNA, 25 bp, Homo sapien
ttcttgagacagtccaacccaaaag

SEQ ID NO: 198417 - DNA, 25 bp, Homo sapien
tcatcttcgatgatttcacacaaaa

SEQ ID NO: 198418 - DNA, 25 bp, Homo sapien
caaaagcgtcgtcagatacggcaca

SEQ ID NO: 198419 - DNA, 25 bp, Homo sapien
cagccttcgaaagcccaggcagcat

SEQ ID NO: 198420 - DNA, 25 bp, Homo sapien
ccgtgcatctcaatgtcatgctggc

SEQ ID NO: 198421 - DNA, 25 bp, Homo sapien
ctgctttgctggactgcagagcaga

SEQ ID NO: 198422 - DNA, 25 bp, Homo sapien
ctgtgggccgtgcatctcaatgtca

SEQ ID NO: 198423 - DNA, 25 bp, Homo sapien
tcttgagttgtcctacagctggaca

SEQ ID NO: 198424 - DNA, 25 bp, Homo sapien
catttagaagagcagcacatgtagc

SEQ ID NO: 198425 - DNA, 25 bp, Homo sapien
tgtactagagtaacatagctcccca

SEQ ID NO: 198426 - DNA, 25 bp, Homo sapien
ggctattgtttctgcagggacacac

SEQ ID NO: 198427 - DNA, 25 bp, Homo sapien
catctatggcgtatttcactaacag

SEQ ID NO: 198428 - DNA, 25 bp, Homo sapien
ttatggcaatatgcaaaatgaaaag

SEQ ID NO: 198429 - DNA, 25 bp, Homo sapien
atgagggaggctggcgactctccac

SEQ ID NO: 198430 - DNA, 25 bp, Homo sapien
ggtagattatggcaatatgcaaaat

SEQ ID NO: 198431 - DNA, 25 bp, Homo sapien
cacatgctggagaacgagacaggcc

SEQ ID NO: 198432 - DNA, 25 bp, Homo sapien
caaaaaccaagtgttcgagctgctt

SEQ ID NO: 198433 - DNA, 25 bp, Homo sapien
cttgaggcaaaaaccaagtgttcga

SEQ ID NO: 198434 - DNA, 25 bp, Homo sapien
ccaagtgttcgagctgctttatcac

SEQ ID NO: 198435 - DNA, 25 bp, Homo sapien
tgaggcaaaaaccaagtgttcgagc

SEQ ID NO: 198436 - DNA, 25 bp, Homo sapien
gaggagctggttcgccttttaaata

SEQ ID NO: 198437 - DNA, 25 bp, Homo sapien
tcaaaatgcctgaacgcgttgcttt

SEQ ID NO: 198438 - DNA, 25 bp, Homo sapien
aaaagataagatgcaggctttcaaa

SEQ ID NO: 198439 - DNA, 25 bp, Homo sapien
ttcaaaatgcctgaacgcgttgctt

SEQ ID NO: 198440 - DNA, 25 bp, Homo sapien
taaatgtgtacatgacgcatgcaca

SEQ ID NO: 198441 - DNA, 25 bp, Homo sapien
tgtacatgacgcatgcacagaaatg

SEQ ID NO: 198442 - DNA, 25 bp, Homo sapien
tacatgacgcatgcacagaaatgtc

SEQ ID NO: 198443 - DNA, 25 bp, Homo sapien
actctaaatgtgtacatgacgcatg

SEQ ID NO: 198444 - DNA, 25 bp, Homo sapien
tcaatcaccgtcacttcaggaaact

SEQ ID NO: 198445 - DNA, 25 bp, Homo sapien
tctaacatatttgggctgagcttct

SEQ ID NO: 198446 - DNA, 25 bp, Homo sapien
ccacggactcttggaactcgggcaa

SEQ ID NO: 198447 - DNA, 25 bp, Homo sapien
gtgaaggccgcgcttcttcatccag

SEQ ID NO: 198448 - DNA, 25 bp, Homo sapien
gaggagacaagagttgaggccacat

SEQ ID NO: 198449 - DNA, 25 bp, Homo sapien
gagacaagagttgaggccacatgac

SEQ ID NO: 198450 - DNA, 25 bp, Homo sapien
agagaggagacaagagttgaggcca

SEQ ID NO: 198451 - DNA, 25 bp, Homo sapien
ggagacaagagttgaggccacatga

SEQ ID NO: 198452 - DNA, 25 bp, Homo sapien
cagacacccgagctacttgttggca

SEQ ID NO: 198453 - DNA, 25 bp, Homo sapien
gcccagacacccgagctacttgttg

SEQ ID NO: 198454 - DNA, 25 bp, Homo sapien
gtgtgtcagcttgtgaccattcagg

SEQ ID NO: 198455 - DNA, 25 bp, Homo sapien
cttgtgaccattcaggagcggccca

SEQ ID NO: 198456 - DNA, 25 bp, Homo sapien
ggaagaatgtttgagtggaaagaac

SEQ ID NO: 198457 - DNA, 25 bp, Homo sapien
acgatccccacgaacaactggaggg

SEQ ID NO: 198458 - DNA, 25 bp, Homo sapien
tgcacgatccccacgaacaactgga

SEQ ID NO: 198459 - DNA, 25 bp, Homo sapien
gagtggaaagaactgcacgatcccc

SEQ ID NO: 198460 - DNA, 25 bp, Homo sapien
caagatgagtattaatgcttcttta

SEQ ID NO: 198461 - DNA, 25 bp, Homo sapien
tggacaagatgagtattaatgcttc

SEQ ID NO: 198462 - DNA, 25 bp, Homo sapien
gacaagatgagtattaatgcttctt

SEQ ID NO: 198463 - DNA, 25 bp, Homo sapien
aagatgagtattaatgcttctttaa

SEQ ID NO: 198464 - DNA, 25 bp, Homo sapien
catcctgacagccttgaagtgagtc

SEQ ID NO: 198465 - DNA, 25 bp, Homo sapien
atcctgacagccttgaagtgagtca

SEQ ID NO: 198466 - DNA, 25 bp, Homo sapien
tcctgacagccttgaagtgagtcat

SEQ ID NO: 198467 - DNA, 25 bp, Homo sapien
catgtgtcaccacctcttaggagaa

SEQ ID NO: 198468 - DNA, 25 bp, Homo sapien
gtgggagaactcaaactagcactga

SEQ ID NO: 198469 - DNA, 25 bp, Homo sapien
cttatcagaagtcaatgcacaggaa

SEQ ID NO: 198470 - DNA, 25 bp, Homo sapien
tactggaaatagacccaaggtggga

SEQ ID NO: 198471 - DNA, 25 bp, Homo sapien
tctgaggctcagagtatttaagata

SEQ ID NO: 198472 - DNA, 25 bp, Homo sapien
acagtcttgtaagggaaatagtctt

SEQ ID NO: 198473 - DNA, 25 bp, Homo sapien
tgtaagggaaatagtcttcccatta

SEQ ID NO: 198474 - DNA, 25 bp, Homo sapien
acgtgttcatatggttaaaaagtgg

SEQ ID NO: 198475 - DNA, 25 bp, Homo sapien
ccacttcccatagccacgttcttcc

SEQ ID NO: 198476 - DNA, 25 bp, Homo sapien
cacttcccatagccacgttcttccc

SEQ ID NO: 198477 - DNA, 25 bp, Homo sapien
ctcctccaagctcaacatgtggcaa

SEQ ID NO: 198478 - DNA, 25 bp, Homo sapien
gggaccctgtgcccgtcgtgtcaaa

SEQ ID NO: 198479 - DNA, 25 bp, Homo sapien
ggaccctgtgcccgtcgtgtcaaaa

SEQ ID NO: 198480 - DNA, 25 bp, Homo sapien
agggaccctgtgcccgtcgtgtcaa

SEQ ID NO: 198481 - DNA, 25 bp, Homo sapien
aacagctccttgagtcgggcctcat

SEQ ID NO: 198482 - DNA, 25 bp, Homo sapien
cagctccttgagtcgggcctcatgc

SEQ ID NO: 198483 - DNA, 25 bp, Homo sapien
aaacagctccttgagtcgggcctca

SEQ ID NO: 198484 - DNA, 25 bp, Homo sapien
acagctccttgagtcgggcctcatg

SEQ ID NO: 198485 - DNA, 25 bp, Homo sapien
tgctcgggaacacccagtttctgat

SEQ ID NO: 198486 - DNA, 25 bp, Homo sapien
attcccgttctctgtaccccaccag

SEQ ID NO: 198487 - DNA, 25 bp, Homo sapien
gtcaccacctggcacattcccgttc

SEQ ID NO: 198488 - DNA, 25 bp, Homo sapien
accccaccagtctctagggaatgct

SEQ ID NO: 198489 - DNA, 25 bp, Homo sapien
ggtcacgtacagtagaagacaccct

SEQ ID NO: 198490 - DNA, 25 bp, Homo sapien
tgagagggtcacgtacagtagaaga

SEQ ID NO: 198491 - DNA, 25 bp, Homo sapien
cagaatgagagggtcacgtacagta

SEQ ID NO: 198492 - DNA, 25 bp, Homo sapien
cgtacagtagaagacaccctcctct

SEQ ID NO: 198493 - DNA, 25 bp, Homo sapien
cttggagacgtcaataactgagtca

SEQ ID NO: 198494 - DNA, 25 bp, Homo sapien
cagtaaaaacttggagacgtcaata

SEQ ID NO: 198495 - DNA, 25 bp, Homo sapien
cataaaattccaggtagctcgtatt

SEQ ID NO: 198496 - DNA, 25 bp, Homo sapien
caggtagctcgtattttactaatga

SEQ ID NO: 198497 - DNA, 25 bp, Homo sapien
gatgcaatggatgccaaacacgaca

SEQ ID NO: 198498 - DNA, 25 bp, Homo sapien
gcctgaaacctgcacatctgaagat

SEQ ID NO: 198499 - DNA, 25 bp, Homo sapien
tgaagatgccttcgccatgatgcaa

SEQ ID NO: 198500 - DNA, 25 bp, Homo sapien
ggattttccgatgaaagcctgaaac

SEQ ID NO: 198501 - DNA, 25 bp, Homo sapien
aaggctctcagaaccagtcctttga

SEQ ID NO: 198502 - DNA, 25 bp, Homo sapien
ctgcaacaaggctctcagaaccagt

SEQ ID NO: 198503 - DNA, 25 bp, Homo sapien
acaaggctctcagaaccagtccttt

SEQ ID NO: 198504 - DNA, 25 bp, Homo sapien
gcaacaaggctctcagaaccagtcc

SEQ ID NO: 198505 - DNA, 25 bp, Homo sapien
gctaagatgttgaacacagccagaa

SEQ ID NO: 198506 - DNA, 25 bp, Homo sapien
cgtccatacggcagatcattacaac

SEQ ID NO: 198507 - DNA, 25 bp, Homo sapien
taacttagaggtgatcgtccatacg

SEQ ID NO: 198508 - DNA, 25 bp, Homo sapien
caaatcaatgttgctctaggttgtg

SEQ ID NO: 198509 - DNA, 25 bp, Homo sapien
gaatttagacaaggccaacacttcg

SEQ ID NO: 198510 - DNA, 25 bp, Homo sapien
caagattcacttagagtccaccagt

SEQ ID NO: 198511 - DNA, 25 bp, Homo sapien
tcaactaagatctgctgagaatccc

SEQ ID NO: 198512 - DNA, 25 bp, Homo sapien
caccaagttgttatgcaaagccaca

SEQ ID NO: 198513 - DNA, 25 bp, Homo sapien
gaaacatccaggagatgttacgcat

SEQ ID NO: 198514 - DNA, 25 bp, Homo sapien
agcagctctccgctactcagacagc

SEQ ID NO: 198515 - DNA, 25 bp, Homo sapien
gtacgggcggcacatgccaacggaa

SEQ ID NO: 198516 - DNA, 25 bp, Homo sapien
aggctaacacctcggatttccccat

SEQ ID NO: 198517 - DNA, 25 bp, Homo sapien
tctgcagcgtctcaatcacaaggct

SEQ ID NO: 198518 - DNA, 25 bp, Homo sapien
tcggtctctccggagcgcccgcaca

SEQ ID NO: 198519 - DNA, 25 bp, Homo sapien
cttctgtcggtctctccggagcgcc

SEQ ID NO: 198520 - DNA, 25 bp, Homo sapien
ctgtcggtctctccggagcgcccgc

SEQ ID NO: 198521 - DNA, 25 bp, Homo sapien
ggtctctccggagcgcccgcacagc

SEQ ID NO: 198522 - DNA, 25 bp, Homo sapien
aaggaggacgctttgttagggctgg

SEQ ID NO: 198523 - DNA, 25 bp, Homo sapien
ggcgcagcggttccgggcgggcgtc

SEQ ID NO: 198524 - DNA, 25 bp, Homo sapien
tgcaaagcgaaggaggacgctttgt

SEQ ID NO: 198525 - DNA, 25 bp, Homo sapien
tggagaaacgggacaatacttcgca

SEQ ID NO: 198526 - DNA, 25 bp, Homo sapien
tgcgtcccggggctcaggcgcccgg

SEQ ID NO: 198527 - DNA, 25 bp, Homo sapien
tcccggggctcaggcgcccggcgcc

SEQ ID NO: 198528 - DNA, 25 bp, Homo sapien
cgtcccggggctcaggcgcccggcg

SEQ ID NO: 198529 - DNA, 25 bp, Homo sapien
ccggggctcaggcgcccggcgccgc

SEQ ID NO: 198530 - DNA, 25 bp, Homo sapien
ctggcgcactccgggcttggcggcg

SEQ ID NO: 198531 - DNA, 25 bp, Homo sapien
ggccgctggcgcactccgggcttgg

SEQ ID NO: 198532 - DNA, 25 bp, Homo sapien
catggccgctggcgcactccgggct

SEQ ID NO: 198533 - DNA, 25 bp, Homo sapien
gcggcagcgggacggccgcgcccag

SEQ ID NO: 198534 - DNA, 25 bp, Homo sapien
cgattggccatcaacattggaaagg

SEQ ID NO: 198535 - DNA, 25 bp, Homo sapien
cgccttcagcaagcgggactttaag

SEQ ID NO: 198536 - DNA, 25 bp, Homo sapien
ccgcagcgtcttcgcgcagaggaag

SEQ ID NO: 198537 - DNA, 25 bp, Homo sapien
cagccctcgggtgtcgattggccat

SEQ ID NO: 198538 - DNA, 25 bp, Homo sapien
gtttttgactcagctgtattggcat

SEQ ID NO: 198539 - DNA, 25 bp, Homo sapien
cacccgtttttgactcagctgtatt

SEQ ID NO: 198540 - DNA, 25 bp, Homo sapien
cccacccgtttttgactcagctgta

SEQ ID NO: 198541 - DNA, 25 bp, Homo sapien
cccgtttttgactcagctgtattgg

SEQ ID NO: 198542 - DNA, 25 bp, Homo sapien
caaccctctgaagatagttgcagaa

SEQ ID NO: 198543 - DNA, 25 bp, Homo sapien
tctgtgcaaacaggtgaaattcagt

SEQ ID NO: 198544 - DNA, 25 bp, Homo sapien
gaaattcagtagttcaagggcaacc

SEQ ID NO: 198545 - DNA, 25 bp, Homo sapien
gggtgtgggcacacagaaccagcaa

SEQ ID NO: 198546 - DNA, 25 bp, Homo sapien
gagcctgtaggagggtatgaatcat

SEQ ID NO: 198547 - DNA, 25 bp, Homo sapien
tttgcagacacagcagtgactgaga

SEQ ID NO: 198548 - DNA, 25 bp, Homo sapien
tatgaatcataaggcctgggaacag

SEQ ID NO: 198549 - DNA, 25 bp, Homo sapien
ctggagagttacttctgggctttgc

SEQ ID NO: 198550 - DNA, 25 bp, Homo sapien
tgcctgccttcttcgttaggtgact

SEQ ID NO: 198551 - DNA, 25 bp, Homo sapien
ttcgttaggtgactacaacagcctc

SEQ ID NO: 198552 - DNA, 25 bp, Homo sapien
tcaccaatccttcttgcaaaggcac

SEQ ID NO: 198553 - DNA, 25 bp, Homo sapien
gcctcaccaatccttcttgcaaagg

SEQ ID NO: 198554 - DNA, 25 bp, Homo sapien
cctgtctgtactgagtcctttcctg

SEQ ID NO: 198555 - DNA, 25 bp, Homo sapien
tccaacatagcaatagtcctgactt

SEQ ID NO: 198556 - DNA, 25 bp, Homo sapien
tgactttagttagagctgtcctctt

SEQ ID NO: 198557 - DNA, 25 bp, Homo sapien
catgtccaacatagcaatagtcctg

SEQ ID NO: 198558 - DNA, 25 bp, Homo sapien
atagtcctgactttagttagagctg

SEQ ID NO: 198559 - DNA, 25 bp, Homo sapien
aagggaagcacagcaccggtaggct

SEQ ID NO: 198560 - DNA, 25 bp, Homo sapien
tccaacttgtcaagccacaccaagg

SEQ ID NO: 198561 - DNA, 25 bp, Homo sapien
cacagcaccggtaggctagggcttt

SEQ ID NO: 198562 - DNA, 25 bp, Homo sapien
taggctagggctttggaaagcagag

SEQ ID NO: 198563 - DNA, 25 bp, Homo sapien
ctgtgcgaggggaaagctccgggca

SEQ ID NO: 198564 - DNA, 25 bp, Homo sapien
gtgcgaggggaaagctccgggcagg

SEQ ID NO: 198565 - DNA, 25 bp, Homo sapien
gaggggaaagctccgggcaggaggc

SEQ ID NO: 198566 - DNA, 25 bp, Homo sapien
gcgaggggaaagctccgggcaggag

SEQ ID NO: 198567 - DNA, 25 bp, Homo sapien
agactctcctgtctgcagtgaaagt

SEQ ID NO: 198568 - DNA, 25 bp, Homo sapien
ctttgtgtacagactctcctgtctg

SEQ ID NO: 198569 - DNA, 25 bp, Homo sapien
tctgcagtgaaagtgaaaccgggta

SEQ ID NO: 198570 - DNA, 25 bp, Homo sapien
actctcctgtctgcagtgaaagtga

SEQ ID NO: 198571 - DNA, 25 bp, Homo sapien
ccagtgtactcccaaaggaaagctg

SEQ ID NO: 198572 - DNA, 25 bp, Homo sapien
cagattcttttagatccaaccccag

SEQ ID NO: 198573 - DNA, 25 bp, Homo sapien
acaagtctggttaaagtcagtgccc

SEQ ID NO: 198574 - DNA, 25 bp, Homo sapien
gtcagtgcccacatagggcctatgg

SEQ ID NO: 198575 - DNA, 25 bp, Homo sapien
cttgcctgctcttttgtataagtgt

SEQ ID NO: 198576 - DNA, 25 bp, Homo sapien
gctcttttgtataagtgtagcccat

SEQ ID NO: 198577 - DNA, 25 bp, Homo sapien
tgcctgctcttttgtataagtgtag

SEQ ID NO: 198578 - DNA, 25 bp, Homo sapien
cctgctcttttgtataagtgtagcc

SEQ ID NO: 198579 - DNA, 25 bp, Homo sapien
tgctccatgagaaaaatccacctat

SEQ ID NO: 198580 - DNA, 25 bp, Homo sapien
tgaccttaggtcctcagaccgacca

SEQ ID NO: 198581 - DNA, 25 bp, Homo sapien
tccatgagaaaaatccacctatgac

SEQ ID NO: 198582 - DNA, 25 bp, Homo sapien
ttgggagatcaatcccccatcctcc

SEQ ID NO: 198583 - DNA, 25 bp, Homo sapien
aaagaagtgaaaaggccctgccctg

SEQ ID NO: 198584 - DNA, 25 bp, Homo sapien
cttgcacatatacgcccagatggcc

SEQ ID NO: 198585 - DNA, 25 bp, Homo sapien
tgacttgcacatatacgcccagatg

SEQ ID NO: 198586 - DNA, 25 bp, Homo sapien
ccctgtgacttgcacatatacgccc

SEQ ID NO: 198587 - DNA, 25 bp, Homo sapien
gagtgattaaccctgcgaatttcct

SEQ ID NO: 198588 - DNA, 25 bp, Homo sapien
cttaactgagtgattaaccctgcga

SEQ ID NO: 198589 - DNA, 25 bp, Homo sapien
gattaaccctgcgaatttccttctc

SEQ ID NO: 198590 - DNA, 25 bp, Homo sapien
aactgagtgattaaccctgcgaatt

SEQ ID NO: 198591 - DNA, 25 bp, Homo sapien
tcatgtgacttactggatggtgaca

SEQ ID NO: 198592 - DNA, 25 bp, Homo sapien
tacgtacacttatggatgccctgag

SEQ ID NO: 198593 - DNA, 25 bp, Homo sapien
gatgggcactaagatttgggtaaag

SEQ ID NO: 198594 - DNA, 25 bp, Homo sapien
tgttctgcgcttcttagatgggcac

SEQ ID NO: 198595 - DNA, 25 bp, Homo sapien
gaaaactcgtctaccatccacctta

SEQ ID NO: 198596 - DNA, 25 bp, Homo sapien
gactagaatttatcaagttagcctg

SEQ ID NO: 198597 - DNA, 25 bp, Homo sapien
tactaatgtgacagcaaatccaatg

SEQ ID NO: 198598 - DNA, 25 bp, Homo sapien
caaaaaaccagcctaacatttcttg

SEQ ID NO: 198599 - DNA, 25 bp, Homo sapien
taaactaagggctcaatgctgactg

SEQ ID NO: 198600 - DNA, 25 bp, Homo sapien
tgattagagccgaaaggagggtctc

SEQ ID NO: 198601 - DNA, 25 bp, Homo sapien
tcaaggcaattagggctgctctggc

SEQ ID NO: 198602 - DNA, 25 bp, Homo sapien
tcatctggattgtgtggagctgcaa

SEQ ID NO: 198603 - DNA, 25 bp, Homo sapien
gagatactcaactattatagattat

SEQ ID NO: 198604 - DNA, 25 bp, Homo sapien
agagatactcaactattatagatta

SEQ ID NO: 198605 - DNA, 25 bp, Homo sapien
cagagatactcaactattatagatt

SEQ ID NO: 198606 - DNA, 25 bp, Homo sapien
agatactcaactattatagattatt

SEQ ID NO: 198607 - DNA, 25 bp, Homo sapien
tctttaattgttcggtcactggaga

SEQ ID NO: 198608 - DNA, 25 bp, Homo sapien
tgtttttgagtaccattgtgttcca

SEQ ID NO: 198609 - DNA, 25 bp, Homo sapien
aaggttccacgttccagatgttttg

SEQ ID NO: 198610 - DNA, 25 bp, Homo sapien
gagaatttccccgaggcagctatgt

SEQ ID NO: 198611 - DNA, 25 bp, Homo sapien
ctgggaaagaatctctcagtgcggg

SEQ ID NO: 198612 - DNA, 25 bp, Homo sapien
tactatgatgaagctaccttggtga

SEQ ID NO: 198613 - DNA, 25 bp, Homo sapien
taagaatctcgatgttcaaacaggc

SEQ ID NO: 198614 - DNA, 25 bp, Homo sapien
acagtgcccggcataaaaaagacgc

SEQ ID NO: 198615 - DNA, 25 bp, Homo sapien
taatggggatctgatattacatggg

SEQ ID NO: 198616 - DNA, 25 bp, Homo sapien
attttaatgaatcatagtaaactgg

SEQ ID NO: 198617 - DNA, 25 bp, Homo sapien
tattacatggggatctgatatttgc

SEQ ID NO: 198618 - DNA, 25 bp, Homo sapien
tgaatcatagtaaactggttttctt

SEQ ID NO: 198619 - DNA, 25 bp, Homo sapien
acataggcttcgtagtctgcaaaga

SEQ ID NO: 198620 - DNA, 25 bp, Homo sapien
tttatcttgacacttgacataggct

SEQ ID NO: 198621 - DNA, 25 bp, Homo sapien
cttgacataggcttcgtagtctgca

SEQ ID NO: 198622 - DNA, 25 bp, Homo sapien
tcttgacacttgacataggcttcgt

SEQ ID NO: 198623 - DNA, 25 bp, Homo sapien
aatatcaggcatggctggtttacca

SEQ ID NO: 198624 - DNA, 25 bp, Homo sapien
tgtaagacttttaaccagccctcaa

SEQ ID NO: 198625 - DNA, 25 bp, Homo sapien
gcatcgctggtggagaatatctaac

SEQ ID NO: 198626 - DNA, 25 bp, Homo sapien
tcttaaaccttactggcatcgctgg

SEQ ID NO: 198627 - DNA, 25 bp, Homo sapien
gaagtgcctcatagtattcttttgc

SEQ ID NO: 198628 - DNA, 25 bp, Homo sapien
aaaagccattgtcaatttgatcaat

SEQ ID NO: 198629 - DNA, 25 bp, Homo sapien
atctttgaagaggtcaggctgcttg

SEQ ID NO: 198630 - DNA, 25 bp, Homo sapien
cttcagctctggaagtgcctcatag

SEQ ID NO: 198631 - DNA, 25 bp, Homo sapien
catggtcccgatagttagggcccca

SEQ ID NO: 198632 - DNA, 25 bp, Homo sapien
acttcatattgcctgtccccgaggc

SEQ ID NO: 198633 - DNA, 25 bp, Homo sapien
agatgaacaggttctcttccccagc

SEQ ID NO: 198634 - DNA, 25 bp, Homo sapien
acatcatctatcctcatgccaaaga

SEQ ID NO: 198635 - DNA, 25 bp, Homo sapien
gcatattttgcaatgagggtagtac

SEQ ID NO: 198636 - DNA, 25 bp, Homo sapien
ctgcatattttgcaatgagggtagt

SEQ ID NO: 198637 - DNA, 25 bp, Homo sapien
tgcatattttgcaatgagggtagta

SEQ ID NO: 198638 - DNA, 25 bp, Homo sapien
caccacatctgccactgaagtgatc

SEQ ID NO: 198639 - DNA, 25 bp, Homo sapien
ccaaccatagggtcattgttcacca

SEQ ID NO: 198640 - DNA, 25 bp, Homo sapien
agaagatgactttcaacttgcttcc

SEQ ID NO: 198641 - DNA, 25 bp, Homo sapien
ttcagcaagagatactctgtagttc

SEQ ID NO: 198642 - DNA, 25 bp, Homo sapien
tttaccaccaatgataactgtcctt

SEQ ID NO: 198643 - DNA, 25 bp, Homo sapien
accaatgataactgtccttggcacg

SEQ ID NO: 198644 - DNA, 25 bp, Homo sapien
gataactgtccttggcacgaataac

SEQ ID NO: 198645 - DNA, 25 bp, Homo sapien
caatgataactgtccttggcacgaa

SEQ ID NO: 198646 - DNA, 25 bp, Homo sapien
cagtgagacctatgctgagtctgct

SEQ ID NO: 198647 - DNA, 25 bp, Homo sapien
aatggaagacagctgacggtcaggg

SEQ ID NO: 198648 - DNA, 25 bp, Homo sapien
gtcagggcagtgagacctatgctga

SEQ ID NO: 198649 - DNA, 25 bp, Homo sapien
cctgcaagggggcttgttggctaca

SEQ ID NO: 198650 - DNA, 25 bp, Homo sapien
cacatgcagacagttcaagagctgt

SEQ ID NO: 198651 - DNA, 25 bp, Homo sapien
ggttgtacatcgtgatcacatgcag

SEQ ID NO: 198652 - DNA, 25 bp, Homo sapien
tgtactcatgtatcctcttcacctg

SEQ ID NO: 198653 - DNA, 25 bp, Homo sapien
gagctgtcgcttgtactcatgtatc

SEQ ID NO: 198654 - DNA, 25 bp, Homo sapien
ctgttaagacagtgcatggtgccag

SEQ ID NO: 198655 - DNA, 25 bp, Homo sapien
agtgcatggtgccagagctcttttg

SEQ ID NO: 198656 - DNA, 25 bp, Homo sapien
taagacagtgcatggtgccagagct

SEQ ID NO: 198657 - DNA, 25 bp, Homo sapien
gtgcatggtgccagagctcttttgg

SEQ ID NO: 198658 - DNA, 25 bp, Homo sapien
ctgcttcaccttggcgagttcccgg

SEQ ID NO: 198659 - DNA, 25 bp, Homo sapien
tggagcttcgtcagctggctcaggt

SEQ ID NO: 198660 - DNA, 25 bp, Homo sapien
caggaagctgtggagcttcgtcagc

SEQ ID NO: 198661 - DNA, 25 bp, Homo sapien
gttcccggaggaagacatcatcacc

SEQ ID NO: 198662 - DNA, 25 bp, Homo sapien
cgccttggagtgatcccattggttt

SEQ ID NO: 198663 - DNA, 25 bp, Homo sapien
ctgaaacttgtcaggttctagctca

SEQ ID NO: 198664 - DNA, 25 bp, Homo sapien
tcctgggttgcagagtaggagccag

SEQ ID NO: 198665 - DNA, 25 bp, Homo sapien
ggagccagcgccttggagtgatccc

SEQ ID NO: 198666 - DNA, 25 bp, Homo sapien
ccattaatggatcagtgtcagaccc

SEQ ID NO: 198667 - DNA, 25 bp, Homo sapien
gcatttagtagcatcattccattaa

SEQ ID NO: 198668 - DNA, 25 bp, Homo sapien
caaggcctttcctcatccctaagtg

SEQ ID NO: 198669 - DNA, 25 bp, Homo sapien
tccctaagtgcaaccctgcatttag

SEQ ID NO: 198670 - DNA, 25 bp, Homo sapien
cagacggtccacatctttaggaaac

SEQ ID NO: 198671 - DNA, 25 bp, Homo sapien
gaaccgacaatgcagagatgggcca

SEQ ID NO: 198672 - DNA, 25 bp, Homo sapien
tggattttagccacgccattcacag

SEQ ID NO: 198673 - DNA, 25 bp, Homo sapien
tcagagacatccttctcagacggtc

SEQ ID NO: 198674 - DNA, 25 bp, Homo sapien
cagggcttccgggagcactgtgtgg

SEQ ID NO: 198675 - DNA, 25 bp, Homo sapien
tccaaatgtcgagggagcagcttct

SEQ ID NO: 198676 - DNA, 25 bp, Homo sapien
gatttccaaatgtcgagggagcagc

SEQ ID NO: 198677 - DNA, 25 bp, Homo sapien
gttggtgtaggcgaaggtcttctgg

SEQ ID NO: 198678 - DNA, 25 bp, Homo sapien
agggtgagtgtcattcagctggatg

SEQ ID NO: 198679 - DNA, 25 bp, Homo sapien
atcctcatcagctcagggatcgcga

SEQ ID NO: 198680 - DNA, 25 bp, Homo sapien
gatcgcgagtgcagggtgagtgtca

SEQ ID NO: 198681 - DNA, 25 bp, Homo sapien
catcagctcagggatcgcgagtgca

SEQ ID NO: 198682 - DNA, 25 bp, Homo sapien
caatcttagctccttcccttcaaaa

SEQ ID NO: 198683 - DNA, 25 bp, Homo sapien
gaaacggcggatgatatcttgcaag

SEQ ID NO: 198684 - DNA, 25 bp, Homo sapien
tcttgcaaggttgcagccaccacaa

SEQ ID NO: 198685 - DNA, 25 bp, Homo sapien
aaacacagttcctgcaccacgggtg

SEQ ID NO: 198686 - DNA, 25 bp, Homo sapien
taactccatctagcatcagggcaga

SEQ ID NO: 198687 - DNA, 25 bp, Homo sapien
gggtcactaatcaagggcaaaatac

SEQ ID NO: 198688 - DNA, 25 bp, Homo sapien
aacagatgtttgttcatgggtctgc

SEQ ID NO: 198689 - DNA, 25 bp, Homo sapien
cagaaagagcctagtcagtgagaga

SEQ ID NO: 198690 - DNA, 25 bp, Homo sapien
ccgggagatgttctcggccaggttt

SEQ ID NO: 198691 - DNA, 25 bp, Homo sapien
cagcctgaatgtagtctccaacatt

SEQ ID NO: 198692 - DNA, 25 bp, Homo sapien
acccgggagatgttctcggccaggt

SEQ ID NO: 198693 - DNA, 25 bp, Homo sapien
tcattgggatagaggacccgggaga

SEQ ID NO: 198694 - DNA, 25 bp, Homo sapien
gcctgcttagtcagtgaagttcaga

SEQ ID NO: 198695 - DNA, 25 bp, Homo sapien
gaaaccagccattgttgttggaaac

SEQ ID NO: 198696 - DNA, 25 bp, Homo sapien
ggatttcaacacaccgtcatgctgg

SEQ ID NO: 198697 - DNA, 25 bp, Homo sapien
tgtgctgtgtgtcatgtgggattcc

SEQ ID NO: 198698 - DNA, 25 bp, Homo sapien
cacgggggtgtcatatggcagagcc

SEQ ID NO: 198699 - DNA, 25 bp, Homo sapien
agtcatttggtgcccgagcagacca

SEQ ID NO: 198700 - DNA, 25 bp, Homo sapien
ggtgttgacagtgttattcatgtag

SEQ ID NO: 198701 - DNA, 25 bp, Homo sapien
tttggtgcccgagcagaccagaggc

SEQ ID NO: 198702 - DNA, 25 bp, Homo sapien
gctgagttgagtctaagaggtaagc

SEQ ID NO: 198703 - DNA, 25 bp, Homo sapien
catgtttcagataaagccattgctc

SEQ ID NO: 198704 - DNA, 25 bp, Homo sapien
gacattgtgaatctgtacccaccaa

SEQ ID NO: 198705 - DNA, 25 bp, Homo sapien
ttgcataggtttttcagtgatctga

SEQ ID NO: 198706 - DNA, 25 bp, Homo sapien
taatgggcaatctttagtgtcaggc

SEQ ID NO: 198707 - DNA, 25 bp, Homo sapien
tagaggacctaaactgacacgtgac

SEQ ID NO: 198708 - DNA, 25 bp, Homo sapien
gaagcataattaaggcagcccaaga

SEQ ID NO: 198709 - DNA, 25 bp, Homo sapien
ggactcatgctctgacatcactggg

SEQ ID NO: 198710 - DNA, 25 bp, Homo sapien
aatactatacaaaacgctggctata

SEQ ID NO: 198711 - DNA, 25 bp, Homo sapien
tattattcaaaacacgacatgccct

SEQ ID NO: 198712 - DNA, 25 bp, Homo sapien
gacatgccctatactcaatatcacc

SEQ ID NO: 198713 - DNA, 25 bp, Homo sapien
aatatcaccactatatgctacatag

SEQ ID NO: 198714 - DNA, 25 bp, Homo sapien
tgagtgtcaatccacttggtcccgg

SEQ ID NO: 198715 - DNA, 25 bp, Homo sapien
gcatgaattctgggcgggacttctc

SEQ ID NO: 198716 - DNA, 25 bp, Homo sapien
tatctgagccaatcatctgcttctt

SEQ ID NO: 198717 - DNA, 25 bp, Homo sapien
tacttttccatagaagtgcacaggc

SEQ ID NO: 198718 - DNA, 25 bp, Homo sapien
ggctgttgtaaaacccatctgaagg

SEQ ID NO: 198719 - DNA, 25 bp, Homo sapien
tatgaaataggaagacgatgaggca

SEQ ID NO: 198720 - DNA, 25 bp, Homo sapien
gctgcacttaggcaagggccaattt

SEQ ID NO: 198721 - DNA, 25 bp, Homo sapien
gctcagataagagaggatgggcact

SEQ ID NO: 198722 - DNA, 25 bp, Homo sapien
gccgtatccataggctgcaagtccc

SEQ ID NO: 198723 - DNA, 25 bp, Homo sapien
ctgccatccatctcggatcttctga

SEQ ID NO: 198724 - DNA, 25 bp, Homo sapien
aatcccatattcataccgaatgccg

SEQ ID NO: 198725 - DNA, 25 bp, Homo sapien
gatcttctgattgaaaatcccatat

SEQ ID NO: 198726 - DNA, 25 bp, Homo sapien
gagcacaggcaaaagatagagtcat

SEQ ID NO: 198727 - DNA, 25 bp, Homo sapien
gtcattaagctgagccaaaatttcc

SEQ ID NO: 198728 - DNA, 25 bp, Homo sapien
gatagagtcattaagctgagccaaa

SEQ ID NO: 198729 - DNA, 25 bp, Homo sapien
ggcaaaagatagagtcattaagctg

SEQ ID NO: 198730 - DNA, 25 bp, Homo sapien
cttctaactcttctatatccaatcc

SEQ ID NO: 198731 - DNA, 25 bp, Homo sapien
ttcttctaactcttctatatccaat

SEQ ID NO: 198732 - DNA, 25 bp, Homo sapien
gaccaccattgccaagtccagcatc

SEQ ID NO: 198733 - DNA, 25 bp, Homo sapien
cagcaagtctcccaagaccaccatt

SEQ ID NO: 198734 - DNA, 25 bp, Homo sapien
gcagaccgaggttgatcatggtgtt

SEQ ID NO: 198735 - DNA, 25 bp, Homo sapien
catggtgttctgtaatgttcggccc

SEQ ID NO: 198736 - DNA, 25 bp, Homo sapien
tcatcacaggcattttgcagaccga

SEQ ID NO: 198737 - DNA, 25 bp, Homo sapien
tgttcggcccatgtaaaattccaga

SEQ ID NO: 198738 - DNA, 25 bp, Homo sapien
gaaatggagtgtgcaagtcctgacc

SEQ ID NO: 198739 - DNA, 25 bp, Homo sapien
ttttatccccagcattagtcagagg

SEQ ID NO: 198740 - DNA, 25 bp, Homo sapien
taaccacgtgaagtcagctgcaaca

SEQ ID NO: 198741 - DNA, 25 bp, Homo sapien
ggaacacctgtcaataaacctgaga

SEQ ID NO: 198742 - DNA, 25 bp, Homo sapien
cctggtccgtcaggggcttcgccat

SEQ ID NO: 198743 - DNA, 25 bp, Homo sapien
acgatgccgcggatgctgatctgcc

SEQ ID NO: 198744 - DNA, 25 bp, Homo sapien
cgaagtagtagtcgcgggtggtggc

SEQ ID NO: 198745 - DNA, 25 bp, Homo sapien
caggtgccggttgaaactcttcttc

SEQ ID NO: 198746 - DNA, 25 bp, Homo sapien
agctggaagtgcggccggaggcgct

SEQ ID NO: 198747 - DNA, 25 bp, Homo sapien
agagctggaagtgcggccggaggcg

SEQ ID NO: 198748 - DNA, 25 bp, Homo sapien
gagagctggaagtgcggccggaggc

SEQ ID NO: 198749 - DNA, 25 bp, Homo sapien
ctggaagtgcggccggaggcgctgg

SEQ ID NO: 198750 - DNA, 25 bp, Homo sapien
atgcaactcttgcaataccgatgac

SEQ ID NO: 198751 - DNA, 25 bp, Homo sapien
tatgcaactcttgcaataccgatga

SEQ ID NO: 198752 - DNA, 25 bp, Homo sapien
ttatgcaactcttgcaataccgatg

SEQ ID NO: 198753 - DNA, 25 bp, Homo sapien
gcagggcagccattgaccaaatccc

SEQ ID NO: 198754 - DNA, 25 bp, Homo sapien
ccagcgctgaagactgattcagaga

SEQ ID NO: 198755 - DNA, 25 bp, Homo sapien
ggccttagcacagggaacccctgct

SEQ ID NO: 198756 - DNA, 25 bp, Homo sapien
cagagaatacccaagggagaggtat

SEQ ID NO: 198757 - DNA, 25 bp, Homo sapien
tgaaaaggagcaacactaagtctgg

SEQ ID NO: 198758 - DNA, 25 bp, Homo sapien
gatgatgactcatgctccgtagcca

SEQ ID NO: 198759 - DNA, 25 bp, Homo sapien
tacttgcaaggttgacccacggcta

SEQ ID NO: 198760 - DNA, 25 bp, Homo sapien
tattaaccccaggacaataggcttg

SEQ ID NO: 198761 - DNA, 25 bp, Homo sapien
gctggctgctgatactggagtgacc

SEQ ID NO: 198762 - DNA, 25 bp, Homo sapien
gatattctcatagctgcctgggtat

SEQ ID NO: 198763 - DNA, 25 bp, Homo sapien
gcaggtctacatttctgagctggct

SEQ ID NO: 198764 - DNA, 25 bp, Homo sapien
gatgcagcaggcacggtgtatccac

SEQ ID NO: 198765 - DNA, 25 bp, Homo sapien
gactgggagatttaattgaggaaac

SEQ ID NO: 198766 - DNA, 25 bp, Homo sapien
gctgcagtatcggaagctttccaca

SEQ ID NO: 198767 - DNA, 25 bp, Homo sapien
gctttccacacttcggatactgtat

SEQ ID NO: 198768 - DNA, 25 bp, Homo sapien
aatggcctgaacattgaagactggg

SEQ ID NO: 198769 - DNA, 25 bp, Homo sapien
cccagagctgccctcgttcccatct

SEQ ID NO: 198770 - DNA, 25 bp, Homo sapien
gagctgccctcgttcccatctttct

SEQ ID NO: 198771 - DNA, 25 bp, Homo sapien
gatccccagagctgccctcgttccc

SEQ ID NO: 198772 - DNA, 25 bp, Homo sapien
cgttcccatctttctgagctgcccc

SEQ ID NO: 198773 - DNA, 25 bp, Homo sapien
gatcctaccctgatgtgaacctgtg

SEQ ID NO: 198774 - DNA, 25 bp, Homo sapien
tggactactccagaaaattaggctg

SEQ ID NO: 198775 - DNA, 25 bp, Homo sapien
gaggaactatgagtctaccacggcc

SEQ ID NO: 198776 - DNA, 25 bp, Homo sapien
taaggcgtggtatcatagcagcatc

SEQ ID NO: 198777 - DNA, 25 bp, Homo sapien
actgggagcccggtgtgcagcgtga

SEQ ID NO: 198778 - DNA, 25 bp, Homo sapien
ctctgctggagtagaagtcggggac

SEQ ID NO: 198779 - DNA, 25 bp, Homo sapien
ctggagtagaagtcggggactggga

SEQ ID NO: 198780 - DNA, 25 bp, Homo sapien
ctgggagcccggtgtgcagcgtgac

SEQ ID NO: 198781 - DNA, 25 bp, Homo sapien
ccactagttattgtaattagggcaa

SEQ ID NO: 198782 - DNA, 25 bp, Homo sapien
tccatggatagaggacagattcgca

SEQ ID NO: 198783 - DNA, 25 bp, Homo sapien
acagtgaccactgccaaatccatgg

SEQ ID NO: 198784 - DNA, 25 bp, Homo sapien
gagacagcacttcccttattacttg

SEQ ID NO: 198785 - DNA, 25 bp, Homo sapien
tgctattaactagtctgcgtccaag

SEQ ID NO: 198786 - DNA, 25 bp, Homo sapien
tgcgtccaagtataaagaaggtgct

SEQ ID NO: 198787 - DNA, 25 bp, Homo sapien
ggcactcctgagctttgttaagtca

SEQ ID NO: 198788 - DNA, 25 bp, Homo sapien
aacaagagtgcagagaagatgctca

SEQ ID NO: 198789 - DNA, 25 bp, Homo sapien
tacgctgtcagcttccctctcttcg

SEQ ID NO: 198790 - DNA, 25 bp, Homo sapien
gtcagcttccctctcttcggttgga

SEQ ID NO: 198791 - DNA, 25 bp, Homo sapien
cctctcttcggttggattgaacggc

SEQ ID NO: 198792 - DNA, 25 bp, Homo sapien
tcttcggttggattgaacggccctg

SEQ ID NO: 198793 - DNA, 25 bp, Homo sapien
tgaaccggtagccagcaacagctgt

SEQ ID NO: 198794 - DNA, 25 bp, Homo sapien
tttgaaccggtagccagcaacagct

SEQ ID NO: 198795 - DNA, 25 bp, Homo sapien
ctttgaaccggtagccagcaacagc

SEQ ID NO: 198796 - DNA, 25 bp, Homo sapien
aaccggtagccagcaacagctgttt

SEQ ID NO: 198797 - DNA, 25 bp, Homo sapien
tctatttaagtcgaggaggacccca

SEQ ID NO: 198798 - DNA, 25 bp, Homo sapien
agaggccctccacgttatcaaatgc

SEQ ID NO: 198799 - DNA, 25 bp, Homo sapien
tatcaaatgctatgggaccttgttg

SEQ ID NO: 198800 - DNA, 25 bp, Homo sapien
cgttcctgttcaggctgaccgcagg

SEQ ID NO: 198801 - DNA, 25 bp, Homo sapien
tcactgtcaggttgtcattggagag

SEQ ID NO: 198802 - DNA, 25 bp, Homo sapien
caccaaaggcaggatcagggtggtt

SEQ ID NO: 198803 - DNA, 25 bp, Homo sapien
tgtcatagcgatctaccgtgagctc

SEQ ID NO: 198804 - DNA, 25 bp, Homo sapien
gttgtgcatgaaccagctccggtta

SEQ ID NO: 198805 - DNA, 25 bp, Homo sapien
tgaggagcgttgtgtagcgttttca

SEQ ID NO: 198806 - DNA, 25 bp, Homo sapien
tcctgggcgggtgaggagcgttgtg

SEQ ID NO: 198807 - DNA, 25 bp, Homo sapien
ggcacgtcctgggagttggtactct

SEQ ID NO: 198808 - DNA, 25 bp, Homo sapien
cgttgtgtagcgttttcatgctgcc

SEQ ID NO: 198809 - DNA, 25 bp, Homo sapien
cagaagcagacggaggacacacgac

SEQ ID NO: 198810 - DNA, 25 bp, Homo sapien
ctgcaccagaagcagacggaggaca

SEQ ID NO: 198811 - DNA, 25 bp, Homo sapien
agcagacggaggacacacgaccgat

SEQ ID NO: 198812 - DNA, 25 bp, Homo sapien
cggaggacacacgaccgattcagca

SEQ ID NO: 198813 - DNA, 25 bp, Homo sapien
ccaaccaggtgatccgggagtgaag

SEQ ID NO: 198814 - DNA, 25 bp, Homo sapien
cccaaccaggtgatccgggagtgaa

SEQ ID NO: 198815 - DNA, 25 bp, Homo sapien
gaggggatgcgctaagatgcctgtg

SEQ ID NO: 198816 - DNA, 25 bp, Homo sapien
ggggatgcgctaagatgcctgtgta

SEQ ID NO: 198817 - DNA, 25 bp, Homo sapien
gatgcgctaagatgcctgtgtaacc

SEQ ID NO: 198818 - DNA, 25 bp, Homo sapien
gggagaggggatgcgctaagatgcc

SEQ ID NO: 198819 - DNA, 25 bp, Homo sapien
catgcactttggtctttgctatttg

SEQ ID NO: 198820 - DNA, 25 bp, Homo sapien
cactttggtctttgctatttggtaa

SEQ ID NO: 198821 - DNA, 25 bp, Homo sapien
ttggtctttgctatttggtaacaga

SEQ ID NO: 198822 - DNA, 25 bp, Homo sapien
cacatgcactttggtctttgctatt

SEQ ID NO: 198823 - DNA, 25 bp, Homo sapien
catatactaaacaggtgctctctga

SEQ ID NO: 198824 - DNA, 25 bp, Homo sapien
tgctctctgacttgtacctttaccc

SEQ ID NO: 198825 - DNA, 25 bp, Homo sapien
ttagtgctcataaagagtgctttgc

SEQ ID NO: 198826 - DNA, 25 bp, Homo sapien
ttgatagactagtaccccaaaagga

SEQ ID NO: 198827 - DNA, 25 bp, Homo sapien
gacataagacaagttgccgccattt

SEQ ID NO: 198828 - DNA, 25 bp, Homo sapien
ttttattgacataagacaagttgcc

SEQ ID NO: 198829 - DNA, 25 bp, Homo sapien
caccaatcacgtaagtaaaagataa

SEQ ID NO: 198830 - DNA, 25 bp, Homo sapien
ggaaattgagcacaccaatcacgta

SEQ ID NO: 198831 - DNA, 25 bp, Homo sapien
gagtaaggtgcagattgtgtctcaa

SEQ ID NO: 198832 - DNA, 25 bp, Homo sapien
agagtaaggtgcagattgtgtctca

SEQ ID NO: 198833 - DNA, 25 bp, Homo sapien
agtaaggtgcagattgtgtctcaaa

SEQ ID NO: 198834 - DNA, 25 bp, Homo sapien
gagagtaaggtgcagattgtgtctc

SEQ ID NO: 198835 - DNA, 25 bp, Homo sapien
cagagcgggttatccatggtggtac

SEQ ID NO: 198836 - DNA, 25 bp, Homo sapien
caagacacgcgtttcagagatgcct

SEQ ID NO: 198837 - DNA, 25 bp, Homo sapien
gatttggatacctgtaccccatgag

SEQ ID NO: 198838 - DNA, 25 bp, Homo sapien
taattcggctagcagtgatcccacc

SEQ ID NO: 198839 - DNA, 25 bp, Homo sapien
gaaaggactcattctacggagcggc

SEQ ID NO: 198840 - DNA, 25 bp, Homo sapien
tcggaaatcaaagtaggatctcccg

SEQ ID NO: 198841 - DNA, 25 bp, Homo sapien
ccggtgcattgagagactgtaaaga

SEQ ID NO: 198842 - DNA, 25 bp, Homo sapien
ggagcggcaatctttccgaaggcac

SEQ ID NO: 198843 - DNA, 25 bp, Homo sapien
cagactctagggatgtcacttgacc

SEQ ID NO: 198844 - DNA, 25 bp, Homo sapien
gattttttatactagcacactccag

SEQ ID NO: 198845 - DNA, 25 bp, Homo sapien
cagttgtcctgggagttactaccta

SEQ ID NO: 198846 - DNA, 25 bp, Homo sapien
cagaggacacctcgaacaacaaagg

SEQ ID NO: 198847 - DNA, 25 bp, Homo sapien
tattatatcagactaaagacttaac

SEQ ID NO: 198848 - DNA, 25 bp, Homo sapien
aatagctggttctatgcacggtgtg

SEQ ID NO: 198849 - DNA, 25 bp, Homo sapien
caaaatgttactcgcatgttgaagc

SEQ ID NO: 198850 - DNA, 25 bp, Homo sapien
tgaccagagggtatttccgtgaatt

SEQ ID NO: 198851 - DNA, 25 bp, Homo sapien
cgtgtgtgtgcagaatatcatccta

SEQ ID NO: 198852 - DNA, 25 bp, Homo sapien
gagtcaagactttgtgttcccacta

SEQ ID NO: 198853 - DNA, 25 bp, Homo sapien
gggtcagctgcctgtaagtcatcta

SEQ ID NO: 198854 - DNA, 25 bp, Homo sapien
gctccctctagttggcagttattgc

SEQ ID NO: 198855 - DNA, 25 bp, Homo sapien
tccaattgtagcgttactatctggg

SEQ ID NO: 198856 - DNA, 25 bp, Homo sapien
tagacatacctctttgggagctcca

SEQ ID NO: 198857 - DNA, 25 bp, Homo sapien
gtcctcctgtctggcagtgaacaac

SEQ ID NO: 198858 - DNA, 25 bp, Homo sapien
cacggtaaggcaagacatgtcacga

SEQ ID NO: 198859 - DNA, 25 bp, Homo sapien
gtgtatactaatccagtgccctctg

SEQ ID NO: 198860 - DNA, 25 bp, Homo sapien
cttgaacccaggtccaataagatgg

SEQ ID NO: 198861 - DNA, 25 bp, Homo sapien
tatgagtaacattgtctaggcccac

SEQ ID NO: 198862 - DNA, 25 bp, Homo sapien
gatgtagtttcaagaatcccaacct

SEQ ID NO: 198863 - DNA, 25 bp, Homo sapien
gcatgcctatagagccagttactag

SEQ ID NO: 198864 - DNA, 25 bp, Homo sapien
tttccctcccagttaggacaggcag

SEQ ID NO: 198865 - DNA, 25 bp, Homo sapien
tgggatgggagggagctggaggaaa

SEQ ID NO: 198866 - DNA, 25 bp, Homo sapien
gatgggagggagctggaggaaattt

SEQ ID NO: 198867 - DNA, 25 bp, Homo sapien
gggatgggagggagctggaggaaat

SEQ ID NO: 198868 - DNA, 25 bp, Homo sapien
ctgggatgggagggagctggaggaa

SEQ ID NO: 198869 - DNA, 25 bp, Homo sapien
cacacttggactcatataataatgc

SEQ ID NO: 198870 - DNA, 25 bp, Homo sapien
tttcagagaactatccacacttgga

SEQ ID NO: 198871 - DNA, 25 bp, Homo sapien
tccatgggtgtctttgatacatctc

SEQ ID NO: 198872 - DNA, 25 bp, Homo sapien
tgtgcaactggcgttttttccatgg

SEQ ID NO: 198873 - DNA, 25 bp, Homo sapien
cttcctgctaatcccttttccctgt

SEQ ID NO: 198874 - DNA, 25 bp, Homo sapien
ttattgctttcctaattctcctata

SEQ ID NO: 198875 - DNA, 25 bp, Homo sapien
tgctttcctaattctcctataaaaa

SEQ ID NO: 198876 - DNA, 25 bp, Homo sapien
aaattttatcttcctgctaatccct

SEQ ID NO: 198877 - DNA, 25 bp, Homo sapien
cagtagggataacgtctgttcaaca

SEQ ID NO: 198878 - DNA, 25 bp, Homo sapien
ggtcacttatcaagcactgcccaat

SEQ ID NO: 198879 - DNA, 25 bp, Homo sapien
gacatttgatctcccctgcataacg

SEQ ID NO: 198880 - DNA, 25 bp, Homo sapien
ttacactagaaagccagaacgcacc

SEQ ID NO: 198881 - DNA, 25 bp, Homo sapien
taattatttgatcctataggctttg

SEQ ID NO: 198882 - DNA, 25 bp, Homo sapien
ctgaatgtattagaatgagggagaa

SEQ ID NO: 198883 - DNA, 25 bp, Homo sapien
ggctttgtctattgttacagatcga

SEQ ID NO: 198884 - DNA, 25 bp, Homo sapien
tctattgttacagatcgatcatatc

SEQ ID NO: 198885 - DNA, 25 bp, Homo sapien
caaactgataggtcatccctgagag

SEQ ID NO: 198886 - DNA, 25 bp, Homo sapien
tacacacatgggaaatgaggccatc

SEQ ID NO: 198887 - DNA, 25 bp, Homo sapien
tgtggtaccaaggatcgcagttcca

SEQ ID NO: 198888 - DNA, 25 bp, Homo sapien
tctgcgttgcatctaggaaagactc

SEQ ID NO: 198889 - DNA, 25 bp, Homo sapien
ccgctttgggtatgaaacggaggca

SEQ ID NO: 198890 - DNA, 25 bp, Homo sapien
caaagatgaaaatggcgggtaatgc

SEQ ID NO: 198891 - DNA, 25 bp, Homo sapien
tatggtggctctcggtagcctagcc

SEQ ID NO: 198892 - DNA, 25 bp, Homo sapien
tagcctagccaagactgaagggact

SEQ ID NO: 198893 - DNA, 25 bp, Homo sapien
tccacgactggaaagaacctaggtc

SEQ ID NO: 198894 - DNA, 25 bp, Homo sapien
cacatgatgtgtatcggtggagaat

SEQ ID NO: 198895 - DNA, 25 bp, Homo sapien
gaatgggagcctgctctagagccta

SEQ ID NO: 198896 - DNA, 25 bp, Homo sapien
tagagcctagatacatttgtcttac

SEQ ID NO: 198897 - DNA, 25 bp, Homo sapien
atcacatccacataccataggctct

SEQ ID NO: 198898 - DNA, 25 bp, Homo sapien
ttatcaaaggaagccgccggcccaa

SEQ ID NO: 198899 - DNA, 25 bp, Homo sapien
cagcttatttagattgttatcaaag

SEQ ID NO: 198900 - DNA, 25 bp, Homo sapien
ggcccaagccattggaactgccgat

SEQ ID NO: 198901 - DNA, 25 bp, Homo sapien
cagaatgcagagcaagtcatggaaa

SEQ ID NO: 198902 - DNA, 25 bp, Homo sapien
aggaacagcggctctgtgcagaatg

SEQ ID NO: 198903 - DNA, 25 bp, Homo sapien
tggaaacacttcaggaatgtgggca

SEQ ID NO: 198904 - DNA, 25 bp, Homo sapien
tcatggaaacacttcaggaatgtgg

SEQ ID NO: 198905 - DNA, 25 bp, Homo sapien
ttagatgccacgcagttctcgctct

SEQ ID NO: 198906 - DNA, 25 bp, Homo sapien
agttctcgctctgagggatactgct

SEQ ID NO: 198907 - DNA, 25 bp, Homo sapien
acgcagttctcgctctgagggatac

SEQ ID NO: 198908 - DNA, 25 bp, Homo sapien
gatgccacgcagttctcgctctgag

SEQ ID NO: 198909 - DNA, 25 bp, Homo sapien
gttgaagtgaagaccatccacagtg

SEQ ID NO: 198910 - DNA, 25 bp, Homo sapien
ttgaaggccttgacccgagcgttgt

SEQ ID NO: 198911 - DNA, 25 bp, Homo sapien
ctcagacgtttggaggaccagggtc

SEQ ID NO: 198912 - DNA, 25 bp, Homo sapien
ggtcttgctgtacgggctgactcct

SEQ ID NO: 198913 - DNA, 25 bp, Homo sapien
cggaattgaccaccgttgccatcat

SEQ ID NO: 198914 - DNA, 25 bp, Homo sapien
tgttgtgggtacaacattcctccag

SEQ ID NO: 198915 - DNA, 25 bp, Homo sapien
gctccagaatgtatccatcggcggg

SEQ ID NO: 198916 - DNA, 25 bp, Homo sapien
tggctgtttccaggacaacgtagcg

SEQ ID NO: 198917 - DNA, 25 bp, Homo sapien
tatgccttgtcagtcatcccaacca

SEQ ID NO: 198918 - DNA, 25 bp, Homo sapien
tcatcatggaacacctggtatgctg

SEQ ID NO: 198919 - DNA, 25 bp, Homo sapien
tatccagggacatttagatgaacaa

SEQ ID NO: 198920 - DNA, 25 bp, Homo sapien
gggaaccatgtttttgccagctgct

SEQ ID NO: 198921 - DNA, 25 bp, Homo sapien
ttacagcctcattagcagaaactca

SEQ ID NO: 198922 - DNA, 25 bp, Homo sapien
taagcccttggtggatacagtttaa

SEQ ID NO: 198923 - DNA, 25 bp, Homo sapien
tcttcagatcttgatattgtcccag

SEQ ID NO: 198924 - DNA, 25 bp, Homo sapien
gacaaaaagtcaaagggagtggaga

SEQ ID NO: 198925 - DNA, 25 bp, Homo sapien
tgcgcagtcctaagtggccaagtga

SEQ ID NO: 198926 - DNA, 25 bp, Homo sapien
tgtgtgcagacttgaacagactgga

SEQ ID NO: 198927 - DNA, 25 bp, Homo sapien
ggccaagtgacagtgctttagaaat

SEQ ID NO: 198928 - DNA, 25 bp, Homo sapien
gttctgcgttttggccctgagaata

SEQ ID NO: 198929 - DNA, 25 bp, Homo sapien
tctggactcccctgatttatatcaa

SEQ ID NO: 198930 - DNA, 25 bp, Homo sapien
gcttactatctctatccatgtggaa

SEQ ID NO: 198931 - DNA, 25 bp, Homo sapien
tattggcaggccaactgtgatcctc

SEQ ID NO: 198932 - DNA, 25 bp, Homo sapien
atctcaaagagaccttgccatatcc

SEQ ID NO: 198933 - DNA, 25 bp, Homo sapien
ttcacttgcacgaaatccagctggt

SEQ ID NO: 198934 - DNA, 25 bp, Homo sapien
ctcaagtcaaagtccgtggtcatcc

SEQ ID NO: 198935 - DNA, 25 bp, Homo sapien
catccttggagtgagtgtgccttta

SEQ ID NO: 198936 - DNA, 25 bp, Homo sapien
cactcttcttatgagggcgtcagaa

SEQ ID NO: 198937 - DNA, 25 bp, Homo sapien
tctggcgcaatttcactgtgcagtg

SEQ ID NO: 198938 - DNA, 25 bp, Homo sapien
cagtgagagatctgatctcgaacca

SEQ ID NO: 198939 - DNA, 25 bp, Homo sapien
ctgcaaaaaaccactaggatcattt

SEQ ID NO: 198940 - DNA, 25 bp, Homo sapien
gcagtactccatgagacctgtggtc

SEQ ID NO: 198941 - DNA, 25 bp, Homo sapien
ttcctgcccctccccacagccccac

SEQ ID NO: 198942 - DNA, 25 bp, Homo sapien
cttcctgcccctccccacagcccca

SEQ ID NO: 198943 - DNA, 25 bp, Homo sapien
ttcccttcctgcccctccccacagc

SEQ ID NO: 198944 - DNA, 25 bp, Homo sapien
catctgaacccagttcctttccctt

SEQ ID NO: 198945 - DNA, 25 bp, Homo sapien
cttgggagaggtaatgagctaatga

SEQ ID NO: 198946 - DNA, 25 bp, Homo sapien
gtggagcttgggagaggtaatgagc

SEQ ID NO: 198947 - DNA, 25 bp, Homo sapien
tgcatctttttccttgcgtggatgg

SEQ ID NO: 198948 - DNA, 25 bp, Homo sapien
atctttttccttgcgtggatggtgg

SEQ ID NO: 198949 - DNA, 25 bp, Homo sapien
cagctcttgaggtactctgtgaccg

SEQ ID NO: 198950 - DNA, 25 bp, Homo sapien
gacagctttgccgattcctgcaggt

SEQ ID NO: 198951 - DNA, 25 bp, Homo sapien
tacaatttggactgctcaggtgcca

SEQ ID NO: 198952 - DNA, 25 bp, Homo sapien
tttttagcaatgttaggccaggtgc

SEQ ID NO: 198953 - DNA, 25 bp, Homo sapien
tttcttctgttgagggcatcgatga

SEQ ID NO: 198954 - DNA, 25 bp, Homo sapien
tgtgctcatgctccttgttgacgcg

SEQ ID NO: 198955 - DNA, 25 bp, Homo sapien
gggcatcgatgagggcatcacattg

SEQ ID NO: 198956 - DNA, 25 bp, Homo sapien
catgctccttgttgacgcgggccag

SEQ ID NO: 198957 - DNA, 25 bp, Homo sapien
ctggatctgctggaccatgttgcgc

SEQ ID NO: 198958 - DNA, 25 bp, Homo sapien
tgttgcgcagctgtaccagaaactc

SEQ ID NO: 198959 - DNA, 25 bp, Homo sapien
cttctttggccctgtctgacagtcc

SEQ ID NO: 198960 - DNA, 25 bp, Homo sapien
acagtccgttcagcgcctgggagag

SEQ ID NO: 198961 - DNA, 25 bp, Homo sapien
ggtagattctggtgtcgaaactccc

SEQ ID NO: 198962 - DNA, 25 bp, Homo sapien
gaaactccctgtgctcctgagtagt

SEQ ID NO: 198963 - DNA, 25 bp, Homo sapien
gaggttggacctttttgctggcatt

SEQ ID NO: 198964 - DNA, 25 bp, Homo sapien
gattcctcttgtctgaggttggacc

SEQ ID NO: 198965 - DNA, 25 bp, Homo sapien
tttgaaagggtgcagattctcgctc

SEQ ID NO: 198966 - DNA, 25 bp, Homo sapien
gatactatatctaaagcccagaacc

SEQ ID NO: 198967 - DNA, 25 bp, Homo sapien
caaagttgggcactgactctctaaa

SEQ ID NO: 198968 - DNA, 25 bp, Homo sapien
tattaccctactggtgcacagtgca

SEQ ID NO: 198969 - DNA, 25 bp, Homo sapien
ttagtgcctgcaagaatggatccct

SEQ ID NO: 198970 - DNA, 25 bp, Homo sapien
gatggacaggaatcctccaagacca

SEQ ID NO: 198971 - DNA, 25 bp, Homo sapien
gatgccaatttatctctaagcccag

SEQ ID NO: 198972 - DNA, 25 bp, Homo sapien
ggaagatcctggatataccccaacc

SEQ ID NO: 198973 - DNA, 25 bp, Homo sapien
tatgatttgcaaaagagtagctggg

SEQ ID NO: 198974 - DNA, 25 bp, Homo sapien
ctatgatttgcaaaagagtagctgg

SEQ ID NO: 198975 - DNA, 25 bp, Homo sapien
ctgaattttccgaattgttttccag

SEQ ID NO: 198976 - DNA, 25 bp, Homo sapien
aactgttccctggtagtttcagaca

SEQ ID NO: 198977 - DNA, 25 bp, Homo sapien
ggcagccagagagatatgtagagaa

SEQ ID NO: 198978 - DNA, 25 bp, Homo sapien
gagaacgctataccacccggaagaa

SEQ ID NO: 198979 - DNA, 25 bp, Homo sapien
cccagtgtggacgtgaaggcagcca

SEQ ID NO: 198980 - DNA, 25 bp, Homo sapien
tctccttttaagttggagagaggaa

SEQ ID NO: 198981 - DNA, 25 bp, Homo sapien
ggtggtcggattgcttcacctgata

SEQ ID NO: 198982 - DNA, 25 bp, Homo sapien
cacctttggcggtggtcggattgct

SEQ ID NO: 198983 - DNA, 25 bp, Homo sapien
tggtctccttttaagttggagagag

SEQ ID NO: 198984 - DNA, 25 bp, Homo sapien
ggcaaaacgaccacaaagaatataa

SEQ ID NO: 198985 - DNA, 25 bp, Homo sapien
aaggcaaaacgaccacaaagaatat

SEQ ID NO: 198986 - DNA, 25 bp, Homo sapien
aggcaaaacgaccacaaagaatata

SEQ ID NO: 198987 - DNA, 25 bp, Homo sapien
caaatgccgtaaagcttgtggtaca

SEQ ID NO: 198988 - DNA, 25 bp, Homo sapien
agaagtgtcctgctttttagaaagg

SEQ ID NO: 198989 - DNA, 25 bp, Homo sapien
tctagtcaactcatgatgccctaag

SEQ ID NO: 198990 - DNA, 25 bp, Homo sapien
taaagcttgtggtacacatctccca

SEQ ID NO: 198991 - DNA, 25 bp, Homo sapien
ggggaagagcatccctctaaggtca

SEQ ID NO: 198992 - DNA, 25 bp, Homo sapien
tgggggaagagcatccctctaaggt

SEQ ID NO: 198993 - DNA, 25 bp, Homo sapien
gggaagagcatccctctaaggtcat

SEQ ID NO: 198994 - DNA, 25 bp, Homo sapien
cttgggggaagagcatccctctaag

SEQ ID NO: 198995 - DNA, 25 bp, Homo sapien
taggtcctcccacagtatttatcaa

SEQ ID NO: 198996 - DNA, 25 bp, Homo sapien
tagtaattgaagtccagaggctgtc

SEQ ID NO: 198997 - DNA, 25 bp, Homo sapien
taagagtcctaagatgagtcagtgc

SEQ ID NO: 198998 - DNA, 25 bp, Homo sapien
tctaaagatagatgagtggccaaca

SEQ ID NO: 198999 - DNA, 25 bp, Homo sapien
aatgctctgaagattatggatggga

SEQ ID NO: 199000 - DNA, 25 bp, Homo sapien
aaatgctctgaagattatggatggg

SEQ ID NO: 199001 - DNA, 25 bp, Homo sapien
caaatgctctgaagattatggatgg

SEQ ID NO: 199002 - DNA, 25 bp, Homo sapien
tagcagcatttatcctactcagggt

SEQ ID NO: 199003 - DNA, 25 bp, Homo sapien
actccagtgatatgtatgttaggcc

SEQ ID NO: 199004 - DNA, 25 bp, Homo sapien
tgcctgtctgtctgataataccaac

SEQ ID NO: 199005 - DNA, 25 bp, Homo sapien
tcccctactattgcaggactccagt

SEQ ID NO: 199006 - DNA, 25 bp, Homo sapien
caagcggattgaaacaagattgcaa

SEQ ID NO: 199007 - DNA, 25 bp, Homo sapien
tccaggagatttatactacaggaaa

SEQ ID NO: 199008 - DNA, 25 bp, Homo sapien
aagattgcaacttgaaaccacagaa

SEQ ID NO: 199009 - DNA, 25 bp, Homo sapien
ggagtgacactataagtaacagctg

SEQ ID NO: 199010 - DNA, 25 bp, Homo sapien
agcagcgtgagggagcagcatgaag

SEQ ID NO: 199011 - DNA, 25 bp, Homo sapien
gcagcgtgagggagcagcatgaagg

SEQ ID NO: 199012 - DNA, 25 bp, Homo sapien
taaattgtttgcagactcccagagg

SEQ ID NO: 199013 - DNA, 25 bp, Homo sapien
tcccagaggtgagtgagagtccgaa

SEQ ID NO: 199014 - DNA, 25 bp, Homo sapien
tgcatttcggaagcactcctgtgca

SEQ ID NO: 199015 - DNA, 25 bp, Homo sapien
tcctgctctccttgaagttatgggc

SEQ ID NO: 199016 - DNA, 25 bp, Homo sapien
tactggagcaccaatacaaatggct

SEQ ID NO: 199017 - DNA, 25 bp, Homo sapien
gaaaccgaggtacagatgggataaa

SEQ ID NO: 199018 - DNA, 25 bp, Homo sapien
tgactctaagggactgtcaacccct

SEQ ID NO: 199019 - DNA, 25 bp, Homo sapien
tccaaagaataataggtcctcaagc

SEQ ID NO: 199020 - DNA, 25 bp, Homo sapien
tctgggcatataaaagcgttttggt

SEQ ID NO: 199021 - DNA, 25 bp, Homo sapien
catataaaagcgttttggttatgca

SEQ ID NO: 199022 - DNA, 25 bp, Homo sapien
cgttttggttatgcaatcaaactag

SEQ ID NO: 199023 - DNA, 25 bp, Homo sapien
taaaagcgttttggttatgcaatca

SEQ ID NO: 199024 - DNA, 25 bp, Homo sapien
tcttatcagtggtcttatcagatga

SEQ ID NO: 199025 - DNA, 25 bp, Homo sapien
tcttatcagatgagccagtggtctc

SEQ ID NO: 199026 - DNA, 25 bp, Homo sapien
tgctgaacagctcatggtcttatca

SEQ ID NO: 199027 - DNA, 25 bp, Homo sapien
gtgtgaacgacccaattgagcaacc

SEQ ID NO: 199028 - DNA, 25 bp, Homo sapien
acaggaaggaatgtagtgggtatat

SEQ ID NO: 199029 - DNA, 25 bp, Homo sapien
gaatcaacaacagtaagggcctcac

SEQ ID NO: 199030 - DNA, 25 bp, Homo sapien
caggccttgaggtagttacagtgag

SEQ ID NO: 199031 - DNA, 25 bp, Homo sapien
tgaggacggagctctaaacacagat

SEQ ID NO: 199032 - DNA, 25 bp, Homo sapien
aggaaggcagaaactctagatacac

SEQ ID NO: 199033 - DNA, 25 bp, Homo sapien
gcagaaactctagatacacaggaga

SEQ ID NO: 199034 - DNA, 25 bp, Homo sapien
gccatgcttgcagacaggaaggcag

SEQ ID NO: 199035 - DNA, 25 bp, Homo sapien
tggaaccaaagccatgcttgcagac

SEQ ID NO: 199036 - DNA, 25 bp, Homo sapien
tctggtgatctgaaggtttggtcta

SEQ ID NO: 199037 - DNA, 25 bp, Homo sapien
tgatctgaaggtttggtctaagaaa

SEQ ID NO: 199038 - DNA, 25 bp, Homo sapien
tgggtgtggccaggttagttggtct

SEQ ID NO: 199039 - DNA, 25 bp, Homo sapien
tggtctggtgatctgaaggtttggt

SEQ ID NO: 199040 - DNA, 25 bp, Homo sapien
taacaggtgtcccaaagtttgcaca

SEQ ID NO: 199041 - DNA, 25 bp, Homo sapien
aaagggcttgaattccggagaagtg

SEQ ID NO: 199042 - DNA, 25 bp, Homo sapien
ttgcacatataactactgaaagagg

SEQ ID NO: 199043 - DNA, 25 bp, Homo sapien
gactggaaagataaatctggtaaca

SEQ ID NO: 199044 - DNA, 25 bp, Homo sapien
tccggtcctgacactctagtctcag

SEQ ID NO: 199045 - DNA, 25 bp, Homo sapien
aagcctgcacgtcgcgttgccatgg

SEQ ID NO: 199046 - DNA, 25 bp, Homo sapien
gctcatcagtattccgcctgcggcg

SEQ ID NO: 199047 - DNA, 25 bp, Homo sapien
tctgtcttttgagcacgtggcacca

SEQ ID NO: 199048 - DNA, 25 bp, Homo sapien
tagaagacatcgcactgttcgcaca

SEQ ID NO: 199049 - DNA, 25 bp, Homo sapien
cggcacggatcgcagtagaagacat

SEQ ID NO: 199050 - DNA, 25 bp, Homo sapien
taggctcatcttgtccaggtccaga

SEQ ID NO: 199051 - DNA, 25 bp, Homo sapien
gatagtcatagtcggagaccccgga

SEQ ID NO: 199052 - DNA, 25 bp, Homo sapien
ctgcaccaggatgttgcgggcgcac

SEQ ID NO: 199053 - DNA, 25 bp, Homo sapien
gcaccaggatgttgcgggcgcacgc

SEQ ID NO: 199054 - DNA, 25 bp, Homo sapien
tgcaccaggatgttgcgggcgcacg

SEQ ID NO: 199055 - DNA, 25 bp, Homo sapien
caggatgatgggctcccgatagaag

SEQ ID NO: 199056 - DNA, 25 bp, Homo sapien
ctgacacaaattgtgagagcagggc

SEQ ID NO: 199057 - DNA, 25 bp, Homo sapien
acacaaattgtgagagcagggcagg

SEQ ID NO: 199058 - DNA, 25 bp, Homo sapien
tgggctcccgatagaaggagccgca

SEQ ID NO: 199059 - DNA, 25 bp, Homo sapien
tcaactcctcttccatctcctccat

SEQ ID NO: 199060 - DNA, 25 bp, Homo sapien
acggggcatttcaactcctcttcca

SEQ ID NO: 199061 - DNA, 25 bp, Homo sapien
catttcaactcctcttccatctcct

SEQ ID NO: 199062 - DNA, 25 bp, Homo sapien
tttcaactcctcttccatctcctcc

SEQ ID NO: 199063 - DNA, 25 bp, Homo sapien
gctggcgaggtggccgacgggcccg

SEQ ID NO: 199064 - DNA, 25 bp, Homo sapien
gggaggagacagcgacggctgcagc

SEQ ID NO: 199065 - DNA, 25 bp, Homo sapien
cgacgggcccgtcttgtccagcacc

SEQ ID NO: 199066 - DNA, 25 bp, Homo sapien
cgaggtggccgacgggcccgtcttg

SEQ ID NO: 199067 - DNA, 25 bp, Homo sapien
actggcacggacacccagagaggcg

SEQ ID NO: 199068 - DNA, 25 bp, Homo sapien
ttcccgcgcagcactggcacggaca

SEQ ID NO: 199069 - DNA, 25 bp, Homo sapien
acggacacccagagaggcgctagct

SEQ ID NO: 199070 - DNA, 25 bp, Homo sapien
gtggtggtgccttcccgcgcagcac

SEQ ID NO: 199071 - DNA, 25 bp, Homo sapien
cgcgccgcgcgccagcccggaccgc

SEQ ID NO: 199072 - DNA, 25 bp, Homo sapien
ctgtgagccgcagccgcgtagccgc

SEQ ID NO: 199073 - DNA, 25 bp, Homo sapien
gccgcgccgcgcgccagcccggacc

SEQ ID NO: 199074 - DNA, 25 bp, Homo sapien
gcgcgccagcccggaccgcccctac

SEQ ID NO: 199075 - DNA, 25 bp, Homo sapien
gatcgaagctctcattggccaccag

SEQ ID NO: 199076 - DNA, 25 bp, Homo sapien
atagggcagtcttcgctcgcggctg

SEQ ID NO: 199077 - DNA, 25 bp, Homo sapien
ctcgtctccgcaggccacagggggt

SEQ ID NO: 199078 - DNA, 25 bp, Homo sapien
ttcggtagagtctgaggatagggca

SEQ ID NO: 199079 - DNA, 25 bp, Homo sapien
ggatgattcatcctcgcccggctta

SEQ ID NO: 199080 - DNA, 25 bp, Homo sapien
ggagttaggcgggatgattcatcct

SEQ ID NO: 199081 - DNA, 25 bp, Homo sapien
gggaaggaggagttaggcgggatga

SEQ ID NO: 199082 - DNA, 25 bp, Homo sapien
taggcgggatgattcatcctcgccc

SEQ ID NO: 199083 - DNA, 25 bp, Homo sapien
gacctccggtgcagtctcccaggag

SEQ ID NO: 199084 - DNA, 25 bp, Homo sapien
cgacctccggtgcagtctcccagga

SEQ ID NO: 199085 - DNA, 25 bp, Homo sapien
cagcgtttgcgtttggctcccagct

SEQ ID NO: 199086 - DNA, 25 bp, Homo sapien
tctcgccagcgtttgcgtttggctc

SEQ ID NO: 199087 - DNA, 25 bp, Homo sapien
gggcttctcgccagcgtttgcgttt

SEQ ID NO: 199088 - DNA, 25 bp, Homo sapien
cagctctgagctccgcgcccaccta

SEQ ID NO: 199089 - DNA, 25 bp, Homo sapien
cctgcgtccctcgtttcctaaagag

SEQ ID NO: 199090 - DNA, 25 bp, Homo sapien
ttctccgtgaatccgctgacgccgt

SEQ ID NO: 199091 - DNA, 25 bp, Homo sapien
cgatttcctagtgtcgacatgagat

SEQ ID NO: 199092 - DNA, 25 bp, Homo sapien
gcaagccctggcgacactcttggct

SEQ ID NO: 199093 - DNA, 25 bp, Homo sapien
tgggtaaccgatggaaatggtcagc

SEQ ID NO: 199094 - DNA, 25 bp, Homo sapien
ctgggtaaccgatggaaatggtcag

SEQ ID NO: 199095 - DNA, 25 bp, Homo sapien
gggtaaccgatggaaatggtcagca

SEQ ID NO: 199096 - DNA, 25 bp, Homo sapien
tgaccccttcgtttcatgctttaaa

SEQ ID NO: 199097 - DNA, 25 bp, Homo sapien
agaggcctcagtgccgtggtgtgaa

SEQ ID NO: 199098 - DNA, 25 bp, Homo sapien
taaattatagctcggcccagaggcc

SEQ ID NO: 199099 - DNA, 25 bp, Homo sapien
tagtcagaatctatgaccccttcgt

SEQ ID NO: 199100 - DNA, 25 bp, Homo sapien
taaatgaatcactgtgtgactgcgg

SEQ ID NO: 199101 - DNA, 25 bp, Homo sapien
tcggttgaggcaagaacagtttgtc

SEQ ID NO: 199102 - DNA, 25 bp, Homo sapien
tctgagtgcccgtagtttagtaaag

SEQ ID NO: 199103 - DNA, 25 bp, Homo sapien
gctgagctttttcgaggcccgctgg

SEQ ID NO: 199104 - DNA, 25 bp, Homo sapien
gtgccccggagacagctgtagcaaa

SEQ ID NO: 199105 - DNA, 25 bp, Homo sapien
ggccacctgccagtccaaggcagct

SEQ ID NO: 199106 - DNA, 25 bp, Homo sapien
cattcctgacagcttgggcctcaag

SEQ ID NO: 199107 - DNA, 25 bp, Homo sapien
gacagctgtagcaaacaagctgccc

SEQ ID NO: 199108 - DNA, 25 bp, Homo sapien
tagttattgtactcttctgctgcaa

SEQ ID NO: 199109 - DNA, 25 bp, Homo sapien
cttgaacaagcctgctgttggacca

SEQ ID NO: 199110 - DNA, 25 bp, Homo sapien
aaataacctgtctttacactgataa

SEQ ID NO: 199111 - DNA, 25 bp, Homo sapien
cctgctgttggaccagtgtagtgat

SEQ ID NO: 199112 - DNA, 25 bp, Homo sapien
tctgtagctcccaggcatccaaagt

SEQ ID NO: 199113 - DNA, 25 bp, Homo sapien
tatttctttcaccactctgagccag

SEQ ID NO: 199114 - DNA, 25 bp, Homo sapien
tctggtgcctgtctgttgtactgaa

SEQ ID NO: 199115 - DNA, 25 bp, Homo sapien
tactgaaggttattggtgctgcaac

SEQ ID NO: 199116 - DNA, 25 bp, Homo sapien
cagagatgattggtaggagtgtgtc

SEQ ID NO: 199117 - DNA, 25 bp, Homo sapien
cagagattgaccggggaaacatcca

SEQ ID NO: 199118 - DNA, 25 bp, Homo sapien
cccagagattgaccggggaaacatc

SEQ ID NO: 199119 - DNA, 25 bp, Homo sapien
agagattgaccggggaaacatccat

SEQ ID NO: 199120 - DNA, 25 bp, Homo sapien
cagtcagagcttttagacagtccag

SEQ ID NO: 199121 - DNA, 25 bp, Homo sapien
aagtctggcttattcagttttacaa

SEQ ID NO: 199122 - DNA, 25 bp, Homo sapien
gatagttgatagtacctttcctaaa

SEQ ID NO: 199123 - DNA, 25 bp, Homo sapien
taggagtgagtccacatcagtcaga

SEQ ID NO: 199124 - DNA, 25 bp, Homo sapien
gcaatcctgcatagaggatatgaac

SEQ ID NO: 199125 - DNA, 25 bp, Homo sapien
tgcaatcctgcatagaggatatgaa

SEQ ID NO: 199126 - DNA, 25 bp, Homo sapien
gagaagaaagctttacaagccctgg

SEQ ID NO: 199127 - DNA, 25 bp, Homo sapien
gcattgttgtcatcacagaaccgct

SEQ ID NO: 199128 - DNA, 25 bp, Homo sapien
caagccctggatataatgcaaagcc

SEQ ID NO: 199129 - DNA, 25 bp, Homo sapien
tatctgccaagcttgattgtttccc

SEQ ID NO: 199130 - DNA, 25 bp, Homo sapien
tggccacaatgaaccatgctcagtt

SEQ ID NO: 199131 - DNA, 25 bp, Homo sapien
taggctccggcatttgaccacaact

SEQ ID NO: 199132 - DNA, 25 bp, Homo sapien
gaaaccaggcagtaaactatggcca

SEQ ID NO: 199133 - DNA, 25 bp, Homo sapien
caatgcctcaaggaatcaggtgtca

SEQ ID NO: 199134 - DNA, 25 bp, Homo sapien
ttcatcttgactttcgatcacgttc

SEQ ID NO: 199135 - DNA, 25 bp, Homo sapien
tatattccaatatgctagagctttg

SEQ ID NO: 199136 - DNA, 25 bp, Homo sapien
tcttgactttcgatcacgttcttcc

SEQ ID NO: 199137 - DNA, 25 bp, Homo sapien
tgacggcaagcctcttggcttcatc

SEQ ID NO: 199138 - DNA, 25 bp, Homo sapien
aaattcttgtaagctgccaaacggt

SEQ ID NO: 199139 - DNA, 25 bp, Homo sapien
ttcttgtaagctgccaaacggttct

SEQ ID NO: 199140 - DNA, 25 bp, Homo sapien
cttgtaagctgccaaacggttctat

SEQ ID NO: 199141 - DNA, 25 bp, Homo sapien
ttgtaagctgccaaacggttctatt

SEQ ID NO: 199142 - DNA, 25 bp, Homo sapien
gcaagagtcctcacatcaacatgac

SEQ ID NO: 199143 - DNA, 25 bp, Homo sapien
atcaaactgccagtttgtttgtaca

SEQ ID NO: 199144 - DNA, 25 bp, Homo sapien
catcaacatgactagcacattctct

SEQ ID NO: 199145 - DNA, 25 bp, Homo sapien
aaactgttacatcggcaagagtcct

SEQ ID NO: 199146 - DNA, 25 bp, Homo sapien
aacaaagagccacttgtactctctg

SEQ ID NO: 199147 - DNA, 25 bp, Homo sapien
taaagtacggtgaagtccacacaac

SEQ ID NO: 199148 - DNA, 25 bp, Homo sapien
tactctctgcttcctcggatcacag

SEQ ID NO: 199149 - DNA, 25 bp, Homo sapien
tccacggaccagtgttctataaagt

SEQ ID NO: 199150 - DNA, 25 bp, Homo sapien
ttgggaatctgagaacagttgttcc

SEQ ID NO: 199151 - DNA, 25 bp, Homo sapien
gaacagttgttccatctgtgcccac

SEQ ID NO: 199152 - DNA, 25 bp, Homo sapien
tggtcaatgtctttatttgggaatc

SEQ ID NO: 199153 - DNA, 25 bp, Homo sapien
ccacaaagacttttaggctgtgcaa

SEQ ID NO: 199154 - DNA, 25 bp, Homo sapien
aggagggattcactgttcgatccca

SEQ ID NO: 199155 - DNA, 25 bp, Homo sapien
caattggaaggatgccgtgaatata

SEQ ID NO: 199156 - DNA, 25 bp, Homo sapien
taataatatatggatgactgtgtgc

SEQ ID NO: 199157 - DNA, 25 bp, Homo sapien
tctttcatagggtagaatacgggca

SEQ ID NO: 199158 - DNA, 25 bp, Homo sapien
agcagccctctctcgcaaaaatggg

SEQ ID NO: 199159 - DNA, 25 bp, Homo sapien
ttcggtttcaatagtgcttgactca

SEQ ID NO: 199160 - DNA, 25 bp, Homo sapien
cgcgttcttcggtttcaatagtgct

SEQ ID NO: 199161 - DNA, 25 bp, Homo sapien
gttactgtgcgcgttcttcggtttc

SEQ ID NO: 199162 - DNA, 25 bp, Homo sapien
tggtaggaacagtgtgcccctctgc

SEQ ID NO: 199163 - DNA, 25 bp, Homo sapien
gagtatgttccagcaaccagaatgc

SEQ ID NO: 199164 - DNA, 25 bp, Homo sapien
cttttaaagccatggtaggaacagt

SEQ ID NO: 199165 - DNA, 25 bp, Homo sapien
tgcccctctgcctcgaatgagtatg

SEQ ID NO: 199166 - DNA, 25 bp, Homo sapien
ggggagtcactaatgtgccaacatc

SEQ ID NO: 199167 - DNA, 25 bp, Homo sapien
ctggggagtcactaatgtgccaaca

SEQ ID NO: 199168 - DNA, 25 bp, Homo sapien
tggggagtcactaatgtgccaacat

SEQ ID NO: 199169 - DNA, 25 bp, Homo sapien
aactttcaggaagcgccatgtttgg

SEQ ID NO: 199170 - DNA, 25 bp, Homo sapien
tgaacaaatatatctgggcaaccca

SEQ ID NO: 199171 - DNA, 25 bp, Homo sapien
taccaggtatctcctacaacatgtg

SEQ ID NO: 199172 - DNA, 25 bp, Homo sapien
tgtagctctagtcaaaaggcccgca

SEQ ID NO: 199173 - DNA, 25 bp, Homo sapien
gcagtgggggttgtgtatcaccatt

SEQ ID NO: 199174 - DNA, 25 bp, Homo sapien
gggggttgtgtatcaccattagtga

SEQ ID NO: 199175 - DNA, 25 bp, Homo sapien
tgtgtatcaccattagtgacagtaa

SEQ ID NO: 199176 - DNA, 25 bp, Homo sapien
gtgacagtaatagtaagttctgata

SEQ ID NO: 199177 - DNA, 25 bp, Homo sapien
catggtattctcttgattccaacaa

SEQ ID NO: 199178 - DNA, 25 bp, Homo sapien
aaactgaagtttactgagagatcca

SEQ ID NO: 199179 - DNA, 25 bp, Homo sapien
aaaagtttgcattctactcaggaaa

SEQ ID NO: 199180 - DNA, 25 bp, Homo sapien
cacatggtaatacaggatatgctac

SEQ ID NO: 199181 - DNA, 25 bp, Homo sapien
gaatcaactgaccattacgtagtag

SEQ ID NO: 199182 - DNA, 25 bp, Homo sapien
tgtaatgtccccttctttctaggct

SEQ ID NO: 199183 - DNA, 25 bp, Homo sapien
ctggtaatattgtgtgggatttcac

SEQ ID NO: 199184 - DNA, 25 bp, Homo sapien
gatgtgtaacttgtgatgccttaga

SEQ ID NO: 199185 - DNA, 25 bp, Homo sapien
gcaagacaggtaagcattgcacatc

SEQ ID NO: 199186 - DNA, 25 bp, Homo sapien
taaagttggctgaacagatagggtc

SEQ ID NO: 199187 - DNA, 25 bp, Homo sapien
gaattctggctacatctaacagctg

SEQ ID NO: 199188 - DNA, 25 bp, Homo sapien
cccagaggtgtggtacaaataggta

SEQ ID NO: 199189 - DNA, 25 bp, Homo sapien
agccaataaacaggatggcagagcc

SEQ ID NO: 199190 - DNA, 25 bp, Homo sapien
tatgagcatggctgttacctctcga

SEQ ID NO: 199191 - DNA, 25 bp, Homo sapien
gtgtaataccccttacctctggaca

SEQ ID NO: 199192 - DNA, 25 bp, Homo sapien
tacctctcgactttgtgaacaatgg

SEQ ID NO: 199193 - DNA, 25 bp, Homo sapien
accagcagaaactccgtggtagctg

SEQ ID NO: 199194 - DNA, 25 bp, Homo sapien
ttagctcttagacttggctgcttca

SEQ ID NO: 199195 - DNA, 25 bp, Homo sapien
tttgaggagattctcaaatgcccag

SEQ ID NO: 199196 - DNA, 25 bp, Homo sapien
catttttagctttgaggagattctc

SEQ ID NO: 199197 - DNA, 25 bp, Homo sapien
tggctgcttcactggattcacgttt

SEQ ID NO: 199198 - DNA, 25 bp, Homo sapien
tgatttggttcctgagctctcttca

SEQ ID NO: 199199 - DNA, 25 bp, Homo sapien
tctcttcatgggcaaagaatgccat

SEQ ID NO: 199200 - DNA, 25 bp, Homo sapien
agctctcttcatgggcaaagaatgc

SEQ ID NO: 199201 - DNA, 25 bp, Homo sapien
cctgagctctcttcatgggcaaaga

SEQ ID NO: 199202 - DNA, 25 bp, Homo sapien
cagctgtcacattgctcgttctgta

SEQ ID NO: 199203 - DNA, 25 bp, Homo sapien
gctgtcacattgctcgttctgtagg

SEQ ID NO: 199204 - DNA, 25 bp, Homo sapien
agctgtcacattgctcgttctgtag

SEQ ID NO: 199205 - DNA, 25 bp, Homo sapien
tcagctgtcacattgctcgttctgt

SEQ ID NO: 199206 - DNA, 25 bp, Homo sapien
tgttgctttcggtactcccatacca

SEQ ID NO: 199207 - DNA, 25 bp, Homo sapien
cctcttgttgctttcggtactccca

SEQ ID NO: 199208 - DNA, 25 bp, Homo sapien
tcttgttgctttcggtactcccata

SEQ ID NO: 199209 - DNA, 25 bp, Homo sapien
gctttcggtactcccataccatatt

SEQ ID NO: 199210 - DNA, 25 bp, Homo sapien
agtttggcattgctgggtaggcatt

SEQ ID NO: 199211 - DNA, 25 bp, Homo sapien
gcattgctgtcttcaggagccttct

SEQ ID NO: 199212 - DNA, 25 bp, Homo sapien
cattgctgggtaggcattgctgtct

SEQ ID NO: 199213 - DNA, 25 bp, Homo sapien
gcatctgtgcaccaagctgatgtat

SEQ ID NO: 199214 - DNA, 25 bp, Homo sapien
caggttgcttttcgagagttgtaaa

SEQ ID NO: 199215 - DNA, 25 bp, Homo sapien
cttttcgagagttgtaaaagactgg

SEQ ID NO: 199216 - DNA, 25 bp, Homo sapien
tgcttttcgagagttgtaaaagact

SEQ ID NO: 199217 - DNA, 25 bp, Homo sapien
tttcgagagttgtaaaagactggaa

SEQ ID NO: 199218 - DNA, 25 bp, Homo sapien
gggctcagaaggcaatctgaggctc

SEQ ID NO: 199219 - DNA, 25 bp, Homo sapien
actgctttctgagggctcagaaggc

SEQ ID NO: 199220 - DNA, 25 bp, Homo sapien
gaaactctgcagccatagccctggc

SEQ ID NO: 199221 - DNA, 25 bp, Homo sapien
cagccatagccctggccagagattt

SEQ ID NO: 199222 - DNA, 25 bp, Homo sapien
catggtgaggcatccgcagtcacgt

SEQ ID NO: 199223 - DNA, 25 bp, Homo sapien
attctcctctcgtctgctgccatgg

SEQ ID NO: 199224 - DNA, 25 bp, Homo sapien
tctagaagataatgttttcttggct

SEQ ID NO: 199225 - DNA, 25 bp, Homo sapien
tacttcagtgtgcatatctagaaga

SEQ ID NO: 199226 - DNA, 25 bp, Homo sapien
tggtgctttaccaaatcacagcggc

SEQ ID NO: 199227 - DNA, 25 bp, Homo sapien
tttccataggacgtgctggcaggct

SEQ ID NO: 199228 - DNA, 25 bp, Homo sapien
ctccctgccaactgtggttgtgtct

SEQ ID NO: 199229 - DNA, 25 bp, Homo sapien
cattagctgtgctgcggcttggctg

SEQ ID NO: 199230 - DNA, 25 bp, Homo sapien
tcgttgaaatatgagcagccaggac

SEQ ID NO: 199231 - DNA, 25 bp, Homo sapien
catgagttgaacagcaggcagggat

SEQ ID NO: 199232 - DNA, 25 bp, Homo sapien
ggcagggatattgggcagggtggcc

SEQ ID NO: 199233 - DNA, 25 bp, Homo sapien
tggagtaggacttgcaggtgctgga

SEQ ID NO: 199234 - DNA, 25 bp, Homo sapien
gccaggtctatctgcaggtgatcac

SEQ ID NO: 199235 - DNA, 25 bp, Homo sapien
cgttgggcagtaaaagatggtcatc

SEQ ID NO: 199236 - DNA, 25 bp, Homo sapien
gatcactgtgctgctagtctctgtt

SEQ ID NO: 199237 - DNA, 25 bp, Homo sapien
gctagtctctgttcacattggtaga

SEQ ID NO: 199238 - DNA, 25 bp, Homo sapien
ggcaacgtccccaaactagtggaga

SEQ ID NO: 199239 - DNA, 25 bp, Homo sapien
gacaattccgcacaggaagcctgta

SEQ ID NO: 199240 - DNA, 25 bp, Homo sapien
gcaatgcggctgaaactctcgacca

SEQ ID NO: 199241 - DNA, 25 bp, Homo sapien
tggtgccaggcctacgtaagttttc

SEQ ID NO: 199242 - DNA, 25 bp, Homo sapien
gttgcagagtcgatatcgcgccgtt

SEQ ID NO: 199243 - DNA, 25 bp, Homo sapien
agaggttgcagagtcgatatcgcgc

SEQ ID NO: 199244 - DNA, 25 bp, Homo sapien
tgcagagtcgatatcgcgccgttgc

SEQ ID NO: 199245 - DNA, 25 bp, Homo sapien
cagagtcgatatcgcgccgttgcac

SEQ ID NO: 199246 - DNA, 25 bp, Homo sapien
catttaagtatgacttcaatgaact

SEQ ID NO: 199247 - DNA, 25 bp, Homo sapien
tcttaactttgagatgactgtcttc

SEQ ID NO: 199248 - DNA, 25 bp, Homo sapien
agttgtaagttctcagtgattctgg

SEQ ID NO: 199249 - DNA, 25 bp, Homo sapien
tccttaaccaaagtccaatactgct

SEQ ID NO: 199250 - DNA, 25 bp, Homo sapien
tattgggtgtgagcataagtggaca

SEQ ID NO: 199251 - DNA, 25 bp, Homo sapien
aaggtcggattggtgtatataaggc

SEQ ID NO: 199252 - DNA, 25 bp, Homo sapien
gtttttaacttctcagcgacttgga

SEQ ID NO: 199253 - DNA, 25 bp, Homo sapien
tgccccatccagtattgctcaaatc

SEQ ID NO: 199254 - DNA, 25 bp, Homo sapien
catcggaatcaggaatgtgcgagga

SEQ ID NO: 199255 - DNA, 25 bp, Homo sapien
aacattctgcggtttggcattcctg

SEQ ID NO: 199256 - DNA, 25 bp, Homo sapien
tgtgcgaggataacattctgcggtt

SEQ ID NO: 199257 - DNA, 25 bp, Homo sapien
ttttggtgtctgcacagctgaatca

SEQ ID NO: 199258 - DNA, 25 bp, Homo sapien
ttccactgctacatggaatggaagg

SEQ ID NO: 199259 - DNA, 25 bp, Homo sapien
ttcacaatttcaatagcccagcagt

SEQ ID NO: 199260 - DNA, 25 bp, Homo sapien
gaaggagctgctcgctgtgttaaaa

SEQ ID NO: 199261 - DNA, 25 bp, Homo sapien
gaagcatagtgacatctggtcccgg

SEQ ID NO: 199262 - DNA, 25 bp, Homo sapien
ctcttgccctggtgtattaatctgt

SEQ ID NO: 199263 - DNA, 25 bp, Homo sapien
ttatcatgccctttctgtgagcctg

SEQ ID NO: 199264 - DNA, 25 bp, Homo sapien
ggctctgttttagatgctcaggctg

SEQ ID NO: 199265 - DNA, 25 bp, Homo sapien
gcgtgcgtgcatatgtgagtgtata

SEQ ID NO: 199266 - DNA, 25 bp, Homo sapien
tgccccatgggtcttccatttgagt

SEQ ID NO: 199267 - DNA, 25 bp, Homo sapien
ctggaaaaagtcttcattatttctt

SEQ ID NO: 199268 - DNA, 25 bp, Homo sapien
tggaaaaagtcttcattatttcttc

SEQ ID NO: 199269 - DNA, 25 bp, Homo sapien
ttgatccataattgacatctgcgaa

SEQ ID NO: 199270 - DNA, 25 bp, Homo sapien
cataattgacatctgcgaaaaagag

SEQ ID NO: 199271 - DNA, 25 bp, Homo sapien
tccataattgacatctgcgaaaaag

SEQ ID NO: 199272 - DNA, 25 bp, Homo sapien
aagcaaagcacctcctcctttcagg

SEQ ID NO: 199273 - DNA, 25 bp, Homo sapien
tgggcagggaagatctgttccttga

SEQ ID NO: 199274 - DNA, 25 bp, Homo sapien
gggcagggaagatctgttccttgag

SEQ ID NO: 199275 - DNA, 25 bp, Homo sapien
ttcatcccaagagtgtctgtcaggg

SEQ ID NO: 199276 - DNA, 25 bp, Homo sapien
aagaacagggggtgcccaagacagc

SEQ ID NO: 199277 - DNA, 25 bp, Homo sapien
gacagccagacttgttcatcccaag

SEQ ID NO: 199278 - DNA, 25 bp, Homo sapien
gcccaagacagccagacttgttcat

SEQ ID NO: 199279 - DNA, 25 bp, Homo sapien
ccctgagtttggtaaagctgctgca

SEQ ID NO: 199280 - DNA, 25 bp, Homo sapien
ggtcatgctgcggatctgccatagg

SEQ ID NO: 199281 - DNA, 25 bp, Homo sapien
aagactagggccatggtgaacccca

SEQ ID NO: 199282 - DNA, 25 bp, Homo sapien
catctgtgtaaagcttctgggtcat

SEQ ID NO: 199283 - DNA, 25 bp, Homo sapien
acagctgagacagggaattccgggt

SEQ ID NO: 199284 - DNA, 25 bp, Homo sapien
catccacttcagctcgggcagcatt

SEQ ID NO: 199285 - DNA, 25 bp, Homo sapien
cagggccattgcatccacttcagct

SEQ ID NO: 199286 - DNA, 25 bp, Homo sapien
ctggcaccaagcaatgctgcccatg

SEQ ID NO: 199287 - DNA, 25 bp, Homo sapien
ttagaaaatgcgatcctggacctcc

SEQ ID NO: 199288 - DNA, 25 bp, Homo sapien
tgggctacagcagattaaagatggc

SEQ ID NO: 199289 - DNA, 25 bp, Homo sapien
tgcctgactgcttttgccaatagag

SEQ ID NO: 199290 - DNA, 25 bp, Homo sapien
tccaatccttgtgggtctgggctgc

SEQ ID NO: 199291 - DNA, 25 bp, Homo sapien
gatttctacaccaaacacagggctt

SEQ ID NO: 199292 - DNA, 25 bp, Homo sapien
tcaaatgtgaagatacccagggccc

SEQ ID NO: 199293 - DNA, 25 bp, Homo sapien
tgaaacatgaggaccaatgcctgac

SEQ ID NO: 199294 - DNA, 25 bp, Homo sapien
gaatcatcagtcataaggtcagtcc

SEQ ID NO: 199295 - DNA, 25 bp, Homo sapien
ggacgaagaggcagtgcattacttg

SEQ ID NO: 199296 - DNA, 25 bp, Homo sapien
ttgatgacattaaatcaaattgctg

SEQ ID NO: 199297 - DNA, 25 bp, Homo sapien
tgaccagagtcgaagtgatggaatt

SEQ ID NO: 199298 - DNA, 25 bp, Homo sapien
ttgttaaccatccaaaagtgtctgc

SEQ ID NO: 199299 - DNA, 25 bp, Homo sapien
tggtccagttttagttcctgtgtct

SEQ ID NO: 199300 - DNA, 25 bp, Homo sapien
gtccagttttagttcctgtgtctca

SEQ ID NO: 199301 - DNA, 25 bp, Homo sapien
ccagttttagttcctgtgtctcaaa

SEQ ID NO: 199302 - DNA, 25 bp, Homo sapien
ctaggagccttggtccagttttagt

SEQ ID NO: 199303 - DNA, 25 bp, Homo sapien
cctggacagtctgtaacgaatccat

SEQ ID NO: 199304 - DNA, 25 bp, Homo sapien
agtaaaattccagcctattcttgtg

SEQ ID NO: 199305 - DNA, 25 bp, Homo sapien
gagagttgtttgtacagggttgcca

SEQ ID NO: 199306 - DNA, 25 bp, Homo sapien
agggttgccatgatatgaaactggg

SEQ ID NO: 199307 - DNA, 25 bp, Homo sapien
gatgtcatcaaagccagtggttggg

SEQ ID NO: 199308 - DNA, 25 bp, Homo sapien
ctccaggagagtcgcctgccagctt

SEQ ID NO: 199309 - DNA, 25 bp, Homo sapien
ctgatgtcatcaaagccagtggttg

SEQ ID NO: 199310 - DNA, 25 bp, Homo sapien
ttgggtctgggttgaggagtctcgg

SEQ ID NO: 199311 - DNA, 25 bp, Homo sapien
ttccatggcatggagtagaaaagcg

SEQ ID NO: 199312 - DNA, 25 bp, Homo sapien
tacagctcctaactccttgcatttc

SEQ ID NO: 199313 - DNA, 25 bp, Homo sapien
aaaagcgtaaatgagcagagggcct

SEQ ID NO: 199314 - DNA, 25 bp, Homo sapien
tgcggggagcaacagcaaggccact

SEQ ID NO: 199315 - DNA, 25 bp, Homo sapien
tcttctatacagtccagtgcacaag

SEQ ID NO: 199316 - DNA, 25 bp, Homo sapien
gttcttctatacagtccagtgcaca

SEQ ID NO: 199317 - DNA, 25 bp, Homo sapien
cttctatacagtccagtgcacaagc

SEQ ID NO: 199318 - DNA, 25 bp, Homo sapien
gtgttcttctatacagtccagtgca

SEQ ID NO: 199319 - DNA, 25 bp, Homo sapien
tagcagtatctgatagagccaaaca

SEQ ID NO: 199320 - DNA, 25 bp, Homo sapien
aaacccacagctgatggttcctggg

SEQ ID NO: 199321 - DNA, 25 bp, Homo sapien
gagccaaacattcaagagtgactgt

SEQ ID NO: 199322 - DNA, 25 bp, Homo sapien
tgatggcagcgatttccatctgggc

SEQ ID NO: 199323 - DNA, 25 bp, Homo sapien
tttggtcaacaactaggagcggagc

SEQ ID NO: 199324 - DNA, 25 bp, Homo sapien
gagcggagccacgtacacaatgctt

SEQ ID NO: 199325 - DNA, 25 bp, Homo sapien
ggagccattcaaagcccactggaga

SEQ ID NO: 199326 - DNA, 25 bp, Homo sapien
taccaaaggcgatgaagcagggctc

SEQ ID NO: 199327 - DNA, 25 bp, Homo sapien
gaagcaaggctgtgacttagtggct

SEQ ID NO: 199328 - DNA, 25 bp, Homo sapien
tatctgtcagaagcgtacggagcat

SEQ ID NO: 199329 - DNA, 25 bp, Homo sapien
agttcactggtactggaagcaaggc

SEQ ID NO: 199330 - DNA, 25 bp, Homo sapien
gagagcttcctcgaattagcagaga

SEQ ID NO: 199331 - DNA, 25 bp, Homo sapien
taattccattgagtatcatccatgg

SEQ ID NO: 199332 - DNA, 25 bp, Homo sapien
tctatcagtctcaaaagagcccttc

SEQ ID NO: 199333 - DNA, 25 bp, Homo sapien
catgcaagcaaccaccataacaatc

SEQ ID NO: 199334 - DNA, 25 bp, Homo sapien
aaataagcatagtcatcatgctcag

SEQ ID NO: 199335 - DNA, 25 bp, Homo sapien
gagaacacttggcttagagaatcta

SEQ ID NO: 199336 - DNA, 25 bp, Homo sapien
tagagacaggagttggaaatttccc
